(19) United States
(12) Patent Application Publication
(10) Pub. No.: US 2021/0277418 A1
(43) Pub. Date: Sep. 9, 2021

(54) AAV VARIANTS WITH ENHANCED TROPISM

(71) Applicants: VOYAGER THERAPEUTICS, INC., Cambridge, MA (US); CALIFORNIA INSTITUTE OF TECHNOLOGY, Pasadena, CA (US)

(72) Inventors: Dinah Wen-Yee Sah, Cambridge, MA (US); Jinzhao Hou, Lexington, MA (US); Kei Adachi, Portland, OR (US); Wei Wang, Arlington, MA (US); Qingmin Chen, Lexington, MA (US); Jenna Carroll Soper, Winchester, MA (US); Amy Ren, Cambridge, MA (US); Xiao-Qin Ren, Cambridge, MA (US); Benjamin E. Deverman, Somerville, MA (US); Viviana Gradinaru, Pasadena, CA (US); Qin Huang, Arlington, MA (US)

(21) Appl. No.: 17/265,749

(22) PCT Filed: Aug. 2, 2019
(86) PCT No.: PCT/US2019/044796

§ 371 Date: Feb. 3, 2021

Related U.S. Application Data
(60) Provisional application No. 62/714,118, filed on Aug. 3, 2018.

(51) Int. Cl. C12N 15/86; C12N 15/113; A61K 45/06

(52) U.S. Cl. CPC C12N 15/86; C12N 15/113; C12N 2750/14143; C12N 2310/14; C12N 2750/14142; A61K 45/06

(57) ABSTRACT

The disclosure relates to compositions, methods, and processes for the preparation, use, and/or formulation of adeno-associated virus capsid proteins, wherein the capsid proteins comprise targeting peptide inserts for enhanced tropism to a target tissue.

### CROSS REFERENCE TO RELATED APPLICATIONS

[0001] This application claims the benefit of U.S. Provisional Patent Application No. 62/714,118, filed Aug. 3, 2018, entitled, “AAV VARIANTS WITH ENHANCED TROPISM”, the contents of which are herein incorporated by reference in their entirety.

### SEQUENCE LISTING

[0002] The instant application contains a Sequence Listing which has been filed electronically in ASCII format and is hereby incorporated by reference in its entirety. Said ASCII copy, created on Aug. 1, 2019, is named 2057_1031PCTSL.txt and is 10,962,788 bytes in size.

### FIELD OF THE DISCLOSURE

[0003] The disclosure relates to compositions, methods, and processes for the preparation, use, and/or formulation of adeno-associated virus capsid proteins, wherein the capsid proteins comprise targeting peptide inserts for enhanced tropism to a target tissue.

### BACKGROUND OF THE DISCLOSURE

[0004] Recombinant adeno-associated viral vectors (AAV) have proven to be a useful biological tool and are increasingly showing promise in the field of gene therapy for the treatment of human disease.

[0005] AAV-based therapies are currently being tested for the treatment of a wide-range of human disease. In some cases, the AAV-based therapy may be brought easily into contact with the system in need, such as for treating diseases of the blood (e.g, lipoprotein lipase deficiency or hemophilias), the eye (e.g., Leber's congenital amaurosis or inherited retinal diseases), or muscle (e.g., Duchenne muscular dystrophy). In other cases, such as, for example, in treating disorders of the central nervous systems (CNS; i.e., brain and spinal cord), delivery of the AAV-based therapy becomes more complicated. Direct administration generally involves invasive surgeries, while the blood brain barrier impedes access of the AAV-based therapy to the CNS if administered systemically. Further, high doses of AAV-based therapies are necessary to yield sufficient transduction of target CNS tissue, giving rise to enhanced risk of side effects and/or production difficulties given the high volumes needed.

[0006] Though the peripheral nervous system (PNS; i.e., nervous tissue outside the brain and spinal cord) may be thought of as more accessible for therapeutic intervention, some PNS tissues, such as dorsal root ganglia remain difficult to target.

[0007] To identify AAV capsid proteins with desired tropism profiles, libraries of novel capsids have been created and screened. A variety of capsid engineering methods have been used, including DNA barcoding, directed evolution, random peptide insertions, and capsid shuffling and/or chimeras. In one such method known as CREATE, a series of targeting peptides was identified that enhanced the AAV capsid protein tropism for CNS tissues. The majority of this work has been carried out in mouse models, meaning that there still remains an issue of translatability to human subjects and conditions.

[0008] Even though such ongoing efforts to generate AAV capsids with enhanced tropism to CNS tissues and/or blood brain barrier permeability have yielded improvements, a need still exists for AAV particles with enhanced tropism for CNS or PNS tissue for the use of treating human disease. Even more so, a need exists for AAV particles with enhanced tropism for CNS or PNS tissues, which may be delivered intravenously to a subject in need, at a low dose, and yet still provide sufficient transduction of the target cell-type, tissue and/or organ.

[0009] The present disclosure addresses this need by providing novel targeting peptides and associated AAV capsid proteins and AAV particles for enhanced tropism to the human CNS or PNS following intravenous delivery. In addition, the viral genomes of these AAV particles may be manipulated to suit the needs of a wide variety of CNS or PNS-associated disorders, or neurological disease.

### SUMMARY OF THE DISCLOSURE

[0010] In one aspect, the disclosure provides peptides (targeting peptides) with amino acid sequences set forth as any of SEQ ID NO: 4-14326 or SEQ ID NO: 42973-42999. Nucleic acid sequences encoding these peptides are also provided and are set forth as any of SEQ ID NO: 14327-42972 or SEQ ID NO: 430043053.

[0011] In one aspect, targeting sequences may be inserted into a parent sequence, for example, a targeting peptide may be inserted into a parent AAV capsid protein comprising a VP1 amino acid sequence set forth as SEQ ID NO: 2 or SEQ ID NO: 3. The parent VP1 amino acid sequence may comprise a VP2 region and/or a VP3 region. Targeting peptides may be inserted into the parent sequence in any of the VP1, VP2, or VP3 regions.

[0012] In one aspect, a targeting peptide may be inserted at any amino acid position between amino acids 586-592, inclusive, of the parent VP1 amino acid sequence.

[0013] In one aspect, a targeting peptide may be inserted between amino acids 588-589 of the parent amino acid sequence.

[0014] In one aspect, the disclosure provides AAV particles comprising an AAV capsid protein with a targeting sequence insert and a viral genome. The viral genome comprises a nucleic acid sequence encoding a payload, wherein the payload may be an RNAi agent or a polypeptide.

[0015] In one aspect, the AAV particles of the disclosure comprise a viral genome encoding an RNAi agent payload. The RNAi agent may be, but is not limited to, a dsRNA, siRNA, shRNA, pre-miRNA, pri-miRNA, miRNA, stRNA, lncRNA, piRNA, or snoRNA. When the RNAi agent is expressed, it inhibits or suppresses the expression of a gene of interest in a cell, wherein the gene of interest may be, but is not limited to, SOD1, MAPT, APOE, HTT, C90RF72, TDP-43, APP, BACE, SNCA, ATXN1, ATXN2, ATXN3, ATXN7, SCN1A-SCN5A, or SCN8A-SCN11A.

[0016] In one aspect, the AAV particles of the disclosure comprise a viral genome encoding a polypeptide payload. The polypeptide may be, but is not limited to, an antibody, aromatic L-amino acid decarboxylase (AADC), survival motor neuron 1 (SMN1), frataxin (FXN), ApoE2, GBA1, GRN, ASPA, CLN2, GLB1, SGSH, NAGLU, IDS, NPC1, or GAN.

[0017] In one aspect, the AAV particles of the disclosure may be formulated with a pharmaceutically acceptable excipient to prepare a pharmaceutical composition. The pharmaceutical composition may be administered to a subject in need in order to treat a disease in said subject. The disease may be, but is not limited to, Huntington's Disease, Amyotrophic Lateral Sclerosis, Friedreich's Ataxia. Parkinson's Disease, Alzheimer's Disease, a tauopathy or neuropathic pain.

### BRIEF DESCRIPTION OF THE FIGURES

[0018] The foregoing and other objects, features and advantages will be apparent from the following description of particular embodiments of the present disclosure, as illustrated in the accompanying FIGURES. The figures are not necessarily to scale or comprehensive, with emphasis instead being placed upon illustrating the principles of various embodiments of the present disclosure.

[0019] FIG. 1 shows a schematic for a non-limiting example of the CREATE method in non-human primate.

### DETAILED DESCRIPTION

[0020] The details of one or more embodiments of the disclosure are set forth in the accompanying description below. Although any materials and methods similar or equivalent to those described herein can be used in the practice or testing of the content described herein, the preferred materials and methods are now described. Other features, objects and advantages of the disclosure will be apparent from the description. In the description, the singular forms also include the plural unless the context clearly dictates otherwise. Unless defined otherwise, all technical and scientific terms used herein have the same meaning as commonly understood by one of ordinary skill in the art to which this disclosure belongs. In the case of conflict, the present description will control.

### 1. Introduction

[0021] According to the present disclosure, AAV particles with enhanced tropism for a target tissue (e.g., CNS) are provided, as well as associated processes for their targeting, preparation, formulation and use. Targeting peptides and nucleic acid sequences encoding the targeting peptides are provided. These targeting peptides may be inserted into an AAV capsid protein sequence to alter tropism to a particular cell-type, tissue, organ or organism, in vivo, ex vivo or in vitro.

[0022] As used herein, an “AAV particle” or “AAV vector” comprises a capsid protein and a viral genome, wherein the viral genome comprises at least one payload region and at least one inverted terminal repeat (ITR). The AAV particle and/or its component capsid and viral genome may be engineered to alter tropism to a particular cell-type, tissue, organ or organism.

[0023] As used herein, “viral genome” or “vector genome” refers to the nucleic acid sequence(s) encapsulated in an AAV particle. A viral genome comprises a nucleic acid sequence with at least one payload region encoding a payload and at least one ITR

[0024] As used herein, a “payload region” is any nucleic acid molecule which encodes one or more “payloads” of the disclosure. As non-limiting examples, a payload region may be a nucleic acid sequence encoding a payload comprising an RNAi agent or a polypeptide.

[0025] As used herein, a “targeting peptide” refers to a peptide of 3-20 amino acids in length. These targeting peptides may be inserted into, or attached to, a parent amino acid sequence to alter the characteristics (e.g., tropism) of the parent protein. As a non-limiting example, the targeting peptide can be inserted into an AAV capsid sequence for enhanced targeting to a desired cell-type, tissue, organ or organism.

[0026] The AAV particles and payloads of the disclosure may be delivered to one or more target cells, tissues, organs, or organisms. In a preferred embodiment, the AAV particles of the disclosure demonstrate enhanced tropism for a target cell type, tissue or organ. As a non-limiting example, the AAV particle may have enhanced tropism for cells and tissues of the central or peripheral nervous systems (CNS and PNS, respectively). The AAV particles of the disclosure may, in addition, or alternatively, have decreased tropism for an undesired target cell-type, tissue or organ.

### II. Compositions of the Disclosure

[0027] Adeno-associated viruses (AAV) are small non-enveloped icosahedral capsid viruses of the Parvoviridae family characterized by a single stranded DNA viral genome. Parvoviridae family viruses consist of two subfamilies: Parvovirinae, which infect vertebrates, and Densovirinae, which infect invertebrates. The Parvoviridae family comprises the Dependovirus genus which includes AAV, capable of replication in vertebrate hosts including, but not limited to, human, primate, bovine, canine, equine, and ovine species.

[0028] The parvoviruses and other members of the Parvoviridae family are generally described in Kenneth I. Berns, “Parvoviridae: The Viruses and Their Replication,” Chapter 69 in FIELDS VIROLOGY (3d Ed. 1996), the contents of which are incorporated by reference in their entirety.

[0029] AAV have proven to be useful as a biological tool due to their relatively simple structure, their ability to infect a wide range of cells (including quiescent and dividing cells) without integration into the host genome and without replicating, and their relatively benign immunogenic profile. The genome of the virus may be manipulated to contain a minimum of components for the assembly of a functional recombinant virus, or viral particle, which is loaded with or engineered to target a particular tissue and express or deliver a desired payload.

[0030] The wild-type AAV vector genome is a linear, single-stranded DNA (ssDNA) molecule approximately 5,000 nucleotides (nt) in length. Inverted terminal repeats (ITRs) traditionally cap the viral genome at both the 5′ and the 3′ end, providing origins of replication for the viral genome. While not wishing to be bound by theory, an AAV viral genome typically comprises two ITR sequences. These ITRs have a characteristic T-shaped hairpin structure defined by a self-complementary region (145 nt in wild-type AAV) at the 5′ and 3′ ends of the ssDNA which form an energetically stable double stranded region. The double stranded hairpin structures comprise multiple functions including, but not limited to, acting as an origin for DNA replication by functioning as primers for the endogenous DNA polymerase complex of the host viral replication cell.

[0031] The wild-type AAV viral genome further comprises nucleotide sequences for two open reading frames, one for the four non-structural Rep proteins (Rep78, Rep68, Rep52, Rep40, encoded by Rep genes) and one for the three capsid, or structural, proteins (VP1, VP2, VP3, encoded by capsid genes or Cap genes). The Rep proteins are important for replication and packaging, while the capsid proteins are assembled to create the protein shell of the AAV, or AAV capsid. Alternative splicing and alternate initiation codons and promoters result in the generation of four different Rep proteins from a single open reading frame and the generation of three capsid proteins from a single open reading frame. Though it varies by AAV serotype, as a non-limiting example, for AAV9/hu.14 (SEQ ID NO: 123 of U.S. Pat. No. 7,906,111, the contents of which are herein incorporated by reference in their entirety) VP1 refers to amino acids 1-736, VP2 refers to amino acids 138-736, and VP3 refers to amino acids 203-736. In other words, VP1 is the full-length capsid sequence, while VP2 and VP3 are shorter components of the whole. As a result, changes in the sequence in the VP3 region, are also changes to VP1 and VP2, however, the percent difference as compared to the parent sequence will be greatest for VP3 since it is the shortest sequence of the three. Though described here in relation to the amino acid sequence, the nucleic acid sequence encoding these proteins can be similarly described. Together, the three capsid proteins assemble to create the AAV capsid protein. While not wishing to be bound by theory, the AAV capsid protein typically comprises a molar ratio of 1:1:10 of VP1:VP2:VP3. As used herein, an “AAV serotype” is defined primarily by the AAV capsid. In some instances, the ITRs are also specifically described by the AAV serotype (e.g., AAV2/9).

[0032] For use as a biological tool, the wild-type AAV viral genome can be modified to replace the rep/cap sequences with a nucleic acid sequence comprising a payload region with at least one ITR region. Typically, in recombinant AAV viral genomes there are two ITR regions. The rep/cap sequences can be provided in trans during production to generate AAV particles.

[0033] In addition to the encoded heterologous payload, AAV vectors may comprise the viral genome, in whole or in part, of any naturally occurring and/or recombinant AAV serotype nucleotide sequence or variant. AAV variants may have sequences of significant homology at the nucleic acid (genome or capsid) and amino acid levels (capsids), to produce constructs which are generally physical and functional equivalents, replicate by similar mechanisms, and assemble by similar mechanisms. Chiorini et al., J. Vir. 71: 6823-33(1997): Srivastava et al., J. Vir. 45:555-64 (1983); Chiorini et al., J. Vir. 73:1309-1319 (1999); Rutledge et al., J. Vir. 72:309-319 (1998); and Wu et al., J. Vir. 74: 8635-47 (2000), the contents of each of which are incorporated herein by reference in their entirety.

[0034] In certain embodiments, AAV particles of the present disclosure are recombinant AAV viral vectors which are replication defective and lacking sequences encoding functional Rep and Cap proteins within their viral genome. These defective AAV vectors may lack most or all parental coding sequences and essentially carry only one or two AAV ITR sequences and the nucleic acid of interest for delivery to a cell, a tissue, an organ, or an organism.

[0035] In certain embodiments, the viral genome of the AAV particles of the present disclosure comprises at least one control element which provides for the replication, transcription, and translation of a coding sequence encoded therein. Not all of the control elements need always be present as long as the coding sequence is capable of being replicated, transcribed, and/or translated in an appropriate host cell. Non-limiting examples of expression control elements include sequences for transcription initiation and/or termination, promoter and/or enhancer sequences, efficient RNA processing signals such as splicing and polyadenylation signals, sequences that stabilize cytoplasmic mRNA, sequences that enhance translation efficacy (e.g., Kozak consensus sequence), sequences that enhance protein stability, and/or sequences that enhance protein processing and/or secretion.

[0036] According to the present disclosure, AAV particles for use in therapeutics and/or diagnostics comprise a virus that has been distilled or reduced to the minimum components necessary for transduction of a nucleic acid payload or cargo of interest. In this manner, AAV particles are engineered as vehicles for specific delivery while lacking the deleterious replication and/or integration features found in wild-type viruses.

[0037] AAV vectors of the present disclosure may be produced recombinantly and may be based on adeno-associated virus (AAV) parent or reference sequences. As used herein, a “vector” is any molecule or moiety which transports, transduces, or otherwise acts as a carrier of a heterologous molecule such as the nucleic acids described herein.

[0038] In addition to single stranded AAV viral genomes (e.g., ssAAVs), the present invention also provides for self-complementary AAV (scAAVs) viral genomes, scAAV vector genomes contain DNA strands which anneal together to form double stranded DNA. By skipping second strand synthesis, scAAVs allow for rapid expression in the transduced cell.

[0039] In certain embodiments, the AAV particle of the present disclosure is an scAAV.

[0040] In certain embodiments, the AAV particle of the present disclosure is an ssAAV.

[0041] Methods for producing and/or modifying AAV particles are disclosed in the art such as pseudotyped AAV vectors (PCT Patent Publication Nos. WO200028004; WO200123001; WO2004112727; WO2005005610; and WO2005072364, the content of each of which is incorporated herein by reference in its entirety).

[0042] AAV particles may be modified to enhance the efficiency of delivery. Such modified AAV particles can be packaged efficiently and be used to successfully infect the target cells at high frequency and with minimal toxicity. In some embodiments, the capsids of the AAV particles are engineered according to the methods described in US Publication Number US20130195801, the contents of which are incorporated herein by reference in their entirety.

[0043] In certain embodiments, the AAV particles of the disclosure comprising a capsid with an inserted targeting peptide and a viral genome, may have enhanced tropism for a cell-type or tissue of the human CNS.

### AAV Capsids

[0044] AAV particles of the present disclosure may comprise or be derived from any natural or recombinant AAV serotype. AAV serotypes may differ in characteristics such as, but not limited to, packaging, tropism, transduction and immunogenic profiles. While not wishing to be bound by theory, the AAV capsid protein is often considered to be the driver of AAV particle tropism to a particular tissue.

[0045] In certain embodiments, an AAV particle may have a capsid protein and ITR sequences derived from the same parent serotype (e.g., AAV2 capsid and AAV2 ITRs). In another embodiment, the AAV particle may be a pseudo-typed AAV particle, wherein the capsid protein and ITR sequences are derived from different parent serotypes (e.g., AAV9 capsid and AAV2 ITRs; AAV2/9).

[0046] The AAV particles of the present disclosure may comprise an AAV capsid protein with a targeting peptide inserted into the parent sequence. The parent capsid or serotype may comprise or be derived from any natural or recombinant AAV serotype. As used herein, a “parent” sequence is a nucleotide or amino acid sequence into which a targeting sequence is inserted (i.e., nucleotide insertion into nucleic acid sequence or amino acid sequence insertion into amino acid sequence).

[0047] In a preferred embodiment, the parent AAV capsid nucleotide sequence is as set forth in SEQ ID NO: 1.

[0048] In another embodiment, the parent AAV capsid nucleotide sequence is a K449R variant of SEQ ID NO: 1, wherein the codon encoding a lysine (e.g., AAA or AAG) at position 449 in the amino acid sequence (nucleotides 1345-1347) is exchanged for one encoding an arginine (CGT, CGC, CGA, CGG, AGA, AGG). The K449R variant has the same function as wild-type AAV9.

[0049] In a preferred embodiment, the parent AAV capsid amino acid sequence is as set forth in SEQ ID NO: 2.

[0050] In another embodiment, the parent AAV capsid amino acid sequence is as set forth in SEQ ID NO: 3.

[0051] In certain embodiments the parent AAV capsid sequence is any of those shown in Table 1.

TABLE 1
AAV Capsid Sequences

| | SEQ | |
|---|---|---|
| Serotype | ID NO | Reference Information |
| AAV9/hu.14 (nt) | 1 | US7906111 SEQ ID NO: 3; WO2015038958 SEQ ID NO: 11 |
| AAV9/hu.14 (aa) | 2 | US7906111 SEQ ID NO: 123; WO2015038958 SEQ ID NO: 2 |
| AAV9/hu.14 K449R (aa) | 3 | WO2017100671 SEQ ID NO: 45 |

[0052] Each of the patents, applications and or publications listed in Table 1 are hereby incorporated by reference in their entirety.

[0053] The parent AAV serotype and associated capsid sequence may be any of those known in the art. Non-limiting examples of such AAV serotypes include. AAV9, AAV9 K449R (or K449R AAV9), AAV1, AAVrh10, AAV-DJ, AAV-DJ8, AAV5, AAVPHP.B (PHP.B), AAVPHP.A (PHP.A), AAVG2B-26, AAVG2B-13, AAVTH1.1-32, AAVTH1.1-35, AAVPHP.B2 (PHP.B2), AAVPHP.B3 (PHP.B3), AAVPHP.N/PHP.B-DGT, AAVPHP.B-EST, AAVPHP.B-GGT, AAVPHP.B-ATP, AAVPHP.B-ATT-T, AAVPHP.B-DGT-T, AAVPHP.B-GGT-T, AAVPHP.B-SGS, AAVPHP.B-AQP, AAVPHP.B-QQP, AAVPHP.B-SNP(3), AAVPHP.B-SNP, AAVPHP.B-QGT, AAVPHP.B-NQT, AAVPHP.B-EGS, AAVPHP.B-SGN, AAVPHP.B-EGT, AAVPHP.B-DST, AAVPHP.B-DST, AAVPHP.B-STP, AAVPHP.B-PQP, AAVPHP.B-SQP, AAVPHP.B-QLP, AAVPHP.B-TMP, AAVPHP.B-TTP, AAVPHP.S/G2A12, AAVG2A15/G2A3 (G2A3), AAVG2B4 (G2B4), AAVG2B5 (G2B5), PHP.S, AAV2, AAV2G9, AAV3, AAV3a, AAV3b, AAV3-3, AAV4, AAV4-4, AAV6, AAV6.1, AAV6.2, AAV6.1.2, AAV7, AAV7.2. AAV8, AAV9.11, AAV9.13, AAV9.16, AAV9.24, AAV9.45, AAV9.47, AAV9.61, AAV9.68, AAV9.84, AAV9.9, AAV10, AAV11, AAV12, AAV16.3. AAV24.1, AAV27.3, AAV42.12, AAV42-1b, AAV42-2, AAV42-3a, AAV42-3b, AAV42-4, AAV42-5a, AAV42-5b, AAV42-6b, AAV42-8, AAV42-10, AAV42-11, AAV42-12, AAV42-13, AAV42-15, AAV42-aa, AAV43-1, AAV43-12, AAV43-20, AAV43-21, AAV43-23, AAV43-25, AAV43-5, AAV44.1, AAV44.2, AAV44.5, AAV223.1. AAV223.2, AAV223.4, AAV223.5, AAV223.6, AAV223.7, AAV1-7/rh.48, AAV1-8/rh.49. AAV2-15/rh.62, AAV2-3/rh.61, AAV2-4/rh.50, AAV2-5/rh.51, AAV3.1/hu.6. AAV3.1/hu.9, AAV3-9/rh.52, AAV3-11/rh.53, AAV4-8/r11.64, AAV4-9/rh.54. AAV4-19/rh.55, AAV5-3/rh.57, AAV5-22/rh.58, AAV7.3/hu.7, AAV16.8/hu.10, AAV16.12/hu.11, AAV29.3/bb.1, AAV29.5/bb.2, AAV106.1/hu.37, AAV114.3/hu.40, AAV127.2/hu.41, AAV127.5/hu.42, AAV128.3/hu.44, AAV130.4/hu.48, AAV145.1/hu.53, AAV145.5/hu.54, AAV145.6/hu.55, AAV161.10/hu.60, AAV161.6/hu.61, AAV33.12/hu.17, AAV33.4/hu.15, AAV33.8/hu.16, AAV52/hu.19, AAV52.1/hu.20, AAV58.2/hu.25, AAVA3.3, AAVA3.4, AAVA3.5, AAVA3.7, AAVC1, AAVC2, AAVC5, AAVF3, AAVF5, AAVH2, AAVrh.72, AAVhu.8, AAVrb.68, AAVrh.70, AAVpi.1. AAVpi.3, AAVpi.2, AAVrh.60, AAVrh.44, AAVrh.65, AAVrh.55. AAVrh.47, AAVrh.69, AAVrh.45, AAVrh.59, AAVhu.12, AAVH6, AAVH-1/hu.1, AAVH-5/hu.3, AAVLG-10/rh.40, AAVLG-4/rh.38, AAVLG-9/hu.39, AAVN721-8/rh.43, AAVCh.5, AAVCh.5R1, AAVcy.2. AAVcy.3. AAVcy.4. AAVcy.5, AAVCy.5R1, AAVCy.5R2, AAVCy.5R3, AAVCy.5R4, AAVcy.6, AAVhu.1, AAVhu.2, AAVhu.3, AAVhu.4, AAVhu.5, AAVhu.6, AAVhu.7, AAVhu.9, AAVhu.10, AAVhu.11, AAVhu.13, AAVhu.15, AAVhu.16, AAVhu.17, AAVhu.18, AAVhu.20, AAVhu.21. AAVhu.22, AAVhu.23.2, AAVhu.24, AAVhu.25, AAVhu.27, AAVhu.28, AAVhu.29. AAVhu.29R. AAVhu.31. AAVhu.32, AAVhu.34, AAVhu.35, AAVhu.37, AAVhu.39, AAVhu.40, AAVhu.41, AAVhu.42, AAVhu.43, AAVhu.44, AAVhu.44R1, AAVhu.44R2, AAVhu.44R3, AAVhu.45, AAVhu.46, AAVhu.47, AAVhu.48, AAVhu.48R1, AAVhu.48R2. AAVhu.48R3, AAVhu.49, AAVhu.51, AAVhu.52, AAVhu.54, AAVhu.55, AAVhu.56, AAVhu.57, AAVhu.58, AAVhu.60, AAVhu.61, AAVhu.63, AAVhu.64, AAVhu.66, AAVhu.67, AAVhu.14/9, AAVhu.t 19, AAVrh.2, AAVrh.2R. AAVrb.8, AAVrh.8R, AAVrh.10, AAVrh.12, AAVrh.13. AAVrh.13R. AAVrh.14. AAVrh.17, AAVrh.18, AAVrh.19, AAVrh.20, AAVrh.21. AAVrh.22, AAVrh.23, AAVrh.24, AAVrh.25, AAVrh.31, AAVrh.32, AAVrh.33, AAVrh.34, AAVrh.35, AAVrb.36, AAVrb.37, AAVrh.37R2, AAVrh.38, AAVrh.39, AAVrh.40, AAVrh.46, AAVrb.48, AAVrh.48.1, AAVrh.48.1.2, AAVrh.48.2, AAVrh.49, AAVrh.51. AAVrh.52, AAVrh.53, AAVrh.54, AAVrh.56, AAVrh.57, AAVrb.58, AAVrb.61, AAVrh.64, AAVrh.64R1, AAVrh.64R2, AAVrb.67, AAVrh.73, AAVrb.74, AAVrh8R, AAVrh8R A586R mutant, AAVrh8R R533A mutant, AAAV.BAAV, caprine AAV, bovine AAV, AAVhE1.1, AAVhEr1.5, AAVhER1.14, AAVhEr1.8, AAVhEr1.16, AAVhEr1.18, AAVhEr1.35, AAVhEr1.7, AAVhEr1.36, AAVhEr2.29, AAVhEr2.4, AAVhEr2.16, AAVhEr2.30, AAVhEr2.31, AAVhEr2.36, AAVhER1.23, AAVhEr3.1, AAV2.5T, AAV-PAEC, AAV-LK01, AAV-LK02, AAV-LK03, AAV-LK04, AAV-LK05, AAV-LK06, AAV-LK07, AAV-LK08, AAV-LK09, AAV-LK10, AAV-LK11, AAV-LK12, AAV-LK13, AAV-LK14, AAV-LK15, AAV-LK16, AAV-LK17, AAV-LK18, AAV-LK19, AAV-PAEC2, AAV-PAEC4, AAV-PAEC6, AAV-PAEC7, AAV-PAEC8, AAV-PAEC11, AAV-PAEC12, AAV-2-pre-miRNA-101, AAV-8h, AAV-8b, AAV-h, AAV-b, AAV SM 10-2. AAV Shuffle 100-1, AAV Shuffle 100-3, AAV Shuffle 100-7, AAV Shuffle 10-2, AAV Shuffle 10-6, AAV Shuffle 10-8, AAV Shuffle 100-2, AAV SM 10-1, AAV SM 10-8, AAV SM 100-3, AAV SM 100-10, BNP61 AAV, BNP62 AAV, BNP63 AAV, AAVrh.50, AAVrh.43, AAVrh.62, AAVrh.48, AAVhu.19, AAVhu.11, AAVhu.53, AAV4-8/rh.64, AAVLG-9/hu.39, AAV54.5/hu.23, AAV54.2/hu.22, AAV54.7/hu.24, AAV54.1/hu.21. AAV54.4R/hu.27, AAV46.2/hu.28, AAV46.6/hu.29, AAV128.1/hu.43, true type AAV (ttAAV), UPENN AAV10, Japanese AAV10 serotypes, AAV CBr-7.1, AAV CBr-7.10, AAV CBr-7.2, AAV CBr-7.3, AAV CBr-7.4, AAV CBr-7.5, AAV CBr-7.7, AAV CBr-7.8, AAV CBr-B7.3, AAV CBr-B7.4, AAV CBr-E1, AAV CBr-E2, AAV CBr-E3, AAV CBr-E4, AAV CBr-E5, AAV CBr-e5, AAV CBr-E6, AAV CBr-E7, AAV CBr-E8, AAV CHt-1, AAV CHt-2, AAV CHt-3, AAV CHt-6.1, AAV CHt-6.10, AAV CHt-6.5, AAV CHt-6.6, AAV CHt-6.7, AAV CHt-6.8, AAV CHt-P1, AAV CHt-P2, AAV CHt-P5, AAV CHt-P6, AAV CHt-P8, AAV CHt-P9, AAV CKd-1, AAV CKd-10, AAV CKd-2, AAV CKd-3, AAV CKd-4, AAV CKd-6, AAV CKd-7, AAV CKd-8, AAV CKd-B1, AAV CKd-B2, AAV CKd-B3, AAV CKd-B4, AAV CKd-B5, AAV CKd-B6, AAV CKd-B7, AAV CKd-B8, AAV CKd-H1, AAV CKd-H2, AAV CKd-H3, AAV CKd-H4, AAV CKd-H5, AAV CKd-H6, AAV CKd-N3, AAV CKd-N4, AAV CKd-N9, AAV CLg-F1, AAV CLg-F2, AAV CLg-F3, AAV CLg-F4, AAV CLg-F5, AAV CLg-F6, AAV CLg-F7, AAV CLg-F8, AAV CLv-1, AAV CLv1-1, AAV CLv1-10, AAV CLv1-2, AAV CLv-12, AAV CLv1-3, AAV CLv-13, AAV CLv1-4, AAV Clv1-7, AAV CLv1-8, AAV Clv1-9, AAV CLv-2, AAV CLv-3, AAV CLv-4, AAV CLv-6, AAV CLv-8, AAV CLv-D1, AAV CLv-D2, AAV CLv-D3, AAV CLv-D4, AAV CLv-D5, AAV CLv-D6, AAV CLv-D7, AAV CLv-D8, AAV CLv-E1, AAV CLv-KL, AAV CLv-K3, AAV CLv-K6, AAV CLv-L4, AAV CLv-L5, AAV CLv-L6, AAV CLv-M1, AAV CLv-M11, AAV CLv-M2, AAV CLv-M5, AAV CLv-M6, AAV CLv-M7, AAV CLv-M8, AAV CLv-M9, AAV CLv-R1, AAV CLv-R2, AAV CLv-R3, AAV CLv-R4, AAV CLv-R5, AAV CLv-R6, AAV CLv-R7, AAV CLv-R8, AAV CLv-R9, AAV CSp-1, AAV CSp-10, AAV CSp-11, AAV CSp-2, AAV CSp-3, AAV CSp-4, AAV CSp-6, AAV CSp-7, AAV CSp-8, AAV CSp-8.10, AAV CSp-8.2, AAV CSp-8.4, AAV CSp-8.5, AAV CSp-8.6, AAV CSp-8.7, AAV CSp-8.8, AAV CSp-8.9, AAV CSp-9, AAV.hu.48R3, AAV.VR-355, AAV3B, AAV4, AAV5, AAVF1/HSC1, AAVF11/HSC11, AAVF12/HSC12, AAVF13/HSC13, AAVF14/HSC14, AAVF15/HSC15, AAVF16/HSC16, AAVF17/HSC17, AAVF2/HSC2, AAVF3/HSC3, AAVF4/HSC4, AAVF5/HSC5, AAVF6/HSC6, AAVF7/HSC7, AAVF8/HSC8, and/or AAVF9/HSC9 and variants thereof.

[0054] In some embodiments, the serotype may be AAVDJ or a variant thereof, such as AAVDJ8 (or AAV-DJ8), as described by Grimm et al. (Journal of Virology 82(12): 5887-5911 (2008), US Publication US20140359799 and U.S. Pat. No. 7,588,772, each of which is herein incorporated by reference in its entirety). The amino acid sequence of AAVDJ8 may comprise two or more mutations in order to remove the heparin binding domain (HBD). As a non-limiting example, the AAV-DJ sequence is as described by SEQ ID NO: 1 in U.S. Pat. No. 7,588,772, the contents of which are herein incorporated by reference in their entirety, and the AAVDJ8 sequence may comprise two mutations: (1) R587Q where arginine (R; Arg) at amino acid 587 is changed to glutamine (Q; Gln) and (2) R590T where arginine (R; Arg) at amino acid 590 is changed to threonine (T: Thr). As another non-limiting example, the AAVDJ8 sequence may comprise three mutations: (1) K406R where lysine (K; Lys) at amino acid 406 is changed to arginine (R: Arg), (2) R587Q where arginine (R: Arg) at amino acid 587 is changed to glutamine (Q; Gln) and (3) R590T where arginine (R: Arg) at amino acid 590 is changed to threonine (T; Thr).

[0055] In certain embodiments, the parent AAV capsid sequence comprises an AAV9 sequence.

[0056] In certain embodiments, the parent AAV capsid sequence comprises an K449R AAV9 sequence.

[0057] In certain embodiments, the parent AAV capsid sequence comprises an AAVDJ sequence.

[0058] In certain embodiments, the parent AAV capsid sequence comprises an AAVDJ8 sequence.

[0059] In certain embodiments, the parent AAV capsid sequence comprises an AAVrh10 sequence.

[0060] In certain embodiments, the parent AAV capsid sequence comprises an AAV1 sequence.

[0061] In certain embodiments, the parent AAV capsid sequence comprises an AAV5 sequence.

[0062] While not wishing to be bound by theory, it is understood that a parent AAV capsid sequence comprises a VP1 region. In certain embodiments, a parent AAV capsid sequence comprises a VP1, VP2 and/or VP3 region, or any combination thereof. A parent VP1 sequence may be considered synonymous with a parent AAV capsid sequence.

[0063] In certain embodiments, the initiation codon for translation of the AAV VP1 capsid protein may be CTG, TTG, or GTG as described in U.S. Pat. No. 8,163,543, the contents of which are herein incorporated by reference in their entirety.

[0064] The present disclosure refers to structural capsid proteins (including VP1. VP2 and VP3) which are encoded by capsid (Cap) genes. These capsid proteins form an outer protein structural shell (i.e. capsid) of a viral vector such as AAV. VP capsid proteins synthesized from Cap polynucleotides generally include a methionine as the first amino acid in the peptide sequence (Met1), which is associated with the start codon (AUG or ATG) in the corresponding Cap nucleotide sequence. However, it is common for a first-methionine (Met1) residue or generally any first amino acid (AA1) to be cleaved off after or during polypeptide synthesis by protein processing enzymes such as Met-aminopeptidases. This “Met/AA-clipping” process often correlates with a corresponding acetylation of the second amino acid in the polypeptide sequence (e.g., alanine, valine, serine, threonine, etc.). Met-clipping commonly occurs with VP1 and VP3 capsid proteins but can also occur with VP2 capsid proteins.

[0065] Where the Met/AA-clipping is incomplete, a mixture of one or more (one, two or three) VP capsid proteins comprising the viral capsid may be produced, some of which may include a Met1/AA1 amino acid (Met+/AA+) and some of which may lack a Met1/AA1 amino acid as a result of Met/AA-clipping (Met−/AA−). For further discussion regarding Met/AA-clipping in capsid proteins, see Jin, et al. Direct Liquid Chromatography/Mass Spectrometry Analysis for Complete Characterization of Recombinant Adeno-Associated Virus Capsid Proteins. Hum Gene Ther Methods. 2017 Oct. 28(5):255-267; Hwang, et al. N-Terminal Acetylation of Cellular Proteins Creates Specific Degradation Signals. Science. 2010 Feb. 19, 327(5968): 973-977; the contents of which are each incorporated herein by reference in its entirety.

[0066] According to the present disclosure, references to capsid proteins is not limited to either clipped (Met−/AA−) or unclipped (Met+/AA+) and may, in context, refer to independent capsid proteins, viral capsids comprised of a mixture of capsid proteins, and/or polynucleotide sequences (or fragments thereof) which encode, describe, produce or result in capsid proteins of the present disclosure. A direct reference to a “capsid protein” or “capsid polypeptide” (such as VP1, VP2 or VP2) may also comprise VP capsid proteins which include a Met1/AA1 amino acid (Met+/AA+) as well as corresponding VP capsid proteins which lack the Met1/AA1 amino acid as a result of Met/AA-clipping (Met−/AA−).

[0067] Further according to the present disclosure, a reference to a specific SEQ ID NO: (whether a protein or nucleic acid) which comprises or encodes, respectively, one or more capsid proteins which include a Met1/AA1 amino acid (Met+/AA+) should be understood to teach the VP capsid proteins which lack the Met1/AA1 amino acid as upon review of the sequence, it is readily apparent any sequence which merely lacks the first listed amino acid (whether or not Met1/AA1).

[0068] As a non-limiting example, reference to a VP1 polypeptide sequence which is 736 amino acids in length and which includes a “Met1” amino acid (Met+) encoded by the AUG/ATG start codon may also be understood to teach a VP1 polypeptide sequence which is 735 amino acids in length and which does not include the “Met1” amino acid (Met−) of the 736 amino acid Met+ sequence.

[0069] As a second non-limiting example, reference to a VP1 polypeptide sequence which is 736 amino acids in length and which includes an “AA1” amino acid (AA1+) encoded by any NNN initiator codon may also be understood to teach a VP1 polypeptide sequence which is 735 amino acids in length and which does not include the “AA1” amino acid (AA1−) of the 736 amino acid AA1+ sequence.

[0070] References to viral capsids formed from VP capsid proteins (such as reference to specific AAV capsid serotypes), can incorporate VP capsid proteins which include a Met1/AA1 amino acid (Met+/AA1+), corresponding VP capsid proteins which lack the Met1/AA1 amino acid as a result of Met/AA1-clipping (Mct−/AA1−), and combinations thereof (Met+/AA1+ and Met−/AA1−).

[0071] As a non-limiting example, an AAV capsid serotype can include VP1 (Met+/AA1+), VP1 (Met−/AA1−), or a combination of VP1 (Met+/AA1+) and VP1 (Met−/AA1−). An AAV capsid serotype can also include VP3 (Met+/AA1+), VP3 (Met−/AA1−), or a combination of VP3 (Met+/AA1+) and VP3 (Met−/AA1−); and can also include similar optional combinations of VP2 (Met+/AA1) and VP2 (Met−/AA1−).

[0072] In certain embodiments, the parent AAV capsid sequence may comprise an amino acid sequence with 50%, 51%, 52%, 53%, 54%, 55%, 56%, 57%, 58%, 59%, 60%, 61%, 62%, 63%, 64%, 65%, 66%, 67%, 68%, 69%, 70%, 71%, 72%, 73%, 74%, 75%, 76%, 77%, 78%, 79%, 80%, 81%, 82%, 83%, 84%, 85%, 86%, 87%, 88%, 89%, 90%, 91%, 92%, 93%, 94%, 95%, 96%, 97%, 98%, 99%, or 100% identity to any of the those described above.

[0073] In certain embodiments, the parent AAV capsid sequence may be encoded by a nucleotide sequence with 50%, 51%, 52%, 53%, 54%, 55%, 56%, 57%, 58%, 59%, 60%, 61%, 62%, 63%, 64%, 65%, 66%, 67%, 68%, 69%, 70%, 71%, 72%, 73%, 74%, 75%, 76%, 77%, 78%, 79%, 80%, 81%, 82%, 83%, 84%, 85%, 86%, 87%, 88%, 89%, 90%, 91%, 92%, 93%, 94%, 95%, 96%, 97%, 98%, 99%, or 100% identity to any of those described above.

[0074] In certain embodiments, the parent sequence is not an AAV capsid sequence and is instead a different vector (e.g., lentivirus, plasmid, etc). In another embodiment, the parent sequence is a delivery vehicle (e.g., a nanoparticle) and the targeting peptide is attached thereto.

### Capsid Engineering

[0075] Recombinant or engineered AAV vectors have shown promise for use in therapy for the treatment of human disease. However, a need still exists for AAV particles with more specific and/or enhanced tropism for target tissues. Capsid engineering methods have been used to try to identify capsids with enhanced transduction of target tissues (e.g., brain, spinal cord, DRG). A variety of methods have been used, including mutational methods, DNA barcoding, directed evolution, random peptide insertions, and capsid shuffling and/or chimeras.

[0076] Rational engineering and mutational methods have been used to direct AAV to a target tissue. In rational design, structure-function relationships are used to determine regions in which changes to the capsid sequence may be made. As non-limiting examples, surface loop structures, receptor binding sites, and/or heparin binding sites may be mutated, or otherwise altered, for rational design of recombinant AAV capsids for enhanced targeting to a target tissue. In one example of rational design, AAV capsids were modified by mutation of surface exposed tyrosines to phenylalanine, in order to evade ubiquitination, reduce proteasomal degradation and allow for increased AAV particle and viral genome expression (Lochrie M A, et al, J Virol. 2006 January; 80(2):821-34; Santiago-Ortiz J L and Schaffer D V, J Control Release, 2016 Oct. 28; 240:287-301, the contents of each of which are incorporated by reference in their entirety). Rational design also encompasses the addition of targeting peptides to a parent AAV capsid sequence, wherein the targeting peptide may have an affinity for a receptor of interest within a target tissue.

[0077] In certain embodiments, rational engineering and/or mutational methods are used to identify AAV capsids and/or targeting peptides having enhanced transduction of a target tissue (e.g., CNS or PNS).

[0078] Capsid shuffling, and/or chimeras describe a method in which fragments of at least two parent AAV capsids are combined to generate a new recombinant capsid protein, the number of parent AAV capsids used may be 2-20, or more than 20.

[0079] In certain embodiments, capsid shuffling is used to identify AAV capsids and/or targeting peptides having enhanced transduction of a target tissue (e.g., CNS or PNS).

[0080] Directed evolution involves the generation of AAV capsid libraries (˜10⁴-10⁸) by any of a variety of mutagenesis techniques and selection of lead candidates based on response to selective pressure by properties of interest (e.g., tropism). Directed evolution of AAV capsids allows for positive selection from a pool of diverse mutants without necessitating extensive prior characterization of the mutant library. Directed evolution libraries may be generated by any molecular biology technique known in the art, and may include, DNA shuffling, random point mutagenesis, insertional mutagenesis (e.g., targeting peptides), random peptide insertions, or ancestral reconstructions. AAV capsid libraries may be subjected to more than one round of selection using directed evolution for further optimization. Directed evolution methods are most commonly used to identify AAV capsid proteins with enhanced transduction of a target tissue. Capsids with enhanced transduction of a target tissue have been identified for the targeting human airway epithelium, neural stem cells, human pluripotent stem cells, retinal cells, and other in vitro and in vivo cells.

[0081] In certain embodiments directed evolution methods are used to identify AAV capsids and/or targeting peptides having enhanced transduction of a target tissue (e.g., CNS or PNS).

[0082] One method described for high-throughput characterization of the phenotypes of a large number of AAV serotypes is known as AAV Barcode-Seq (Adachi K et al, Nature Communications 5:3075 (2014), the contents of which are herein incorporated by reference in their entirety). In this next-generation sequence (NGS) based method, AAV libraries are created comprising DNA barcode tags, which can be assessed by multi-plexed Illumina barcode sequencing. This method can be used to identify AAV variants with altered receptor binding, tropism, neutralization and or blood clearance as compared to wild-type or non-variant sequences. Amino acids of the AAV capsid that are important to these functions can also be identified in this manner.

[0083] As described in Adachi et al 2014, AAV capsid libraries were generated, wherein each mutant carried a wild-type AAV2 rep gene and an AAV cap gene derived from a series of variants or mutants, and a pair of left and right 12-nucleotide long DNA bar-codes downstream of an AAV2 polyadenylation signal (pA). In this manner, 7 different DNA barcode AAV capsid libraries were generated. Capsid libraries were then provided to mice. At a pre-set timepoint, samples were collected, DNA extracted and PCR-amplified using AAV-clone specific virus bar codes and sample-specific bar code attached PCR primers. All the virus barcode PCR amplicons were Illumina sequenced and converted to raw sequence read number data by a computational algorithm. The core of the Barcode-Seq approach is a 96-nucleotide cassette comprising the DNA bar-codes (left and right) described above, three PCR primer binding sites and two restriction enzyme sites. As an exemplar, an AAV rep-cap genome was used, but the system can be applied to any AAV viral genome, including one devoid of rep and cap genes. The advantage of the Barcode Seq method is the collection of a large data set and correlation to desirable phenotype with few replicates and in a short period of time.

[0084] The DNA Barcode Seq method can be similarly applied to RNA.

[0085] In certain embodiments, the Barcode Seq method is used to identify AAV capsids and/or targeting peptides having enhanced transduction of a target tissue (e.g., CNS or PNS).

[0086] One method used to generate AAV particles with desirable transduction profiles, with enhanced targeting to CNS or PNS tissues after intravenous administration, is through the use of insertion of targeting peptides into a parent AAV capsid sequence.

### Targeting Peptides

[0087] Disclosed herein are targeting peptides and associated AAV particles comprising a capsid protein with one or more targeting peptide inserts, for enhanced or improved transduction of a target tissue (e.g., cells of the CNS or PNS).

[0088] In certain embodiments, the targeting peptide may direct an AAV particle to a cell or tissue of the CNS. The cell of the CNS may be, but is not limited to, neurons (e.g., excitatory, inhibitory, motor, sensory, autonomic, sympathetic, parasympathetic, Purkinje, Betz, etc), glial cells (e.g., microglia, astrocytes, oligodendrocytes) and/or supporting cells of the brain such as immune cells (e.g., T cells). The tissue of the CNS may be, but is not limited to, the cortex (e.g, frontal, parietal, occipital, temporal), thalamus, hypothalamus, striatum, putamen, caudate nucleus, hippocampus, entorhinal cortex, basal ganglia, or deep cerebellar nuclei.

[0089] In certain embodiments, the targeting peptide may direct an AAV particle to a cell or tissue of the PNS. The cell or tissue of the PNS may be, but is not limited to, a dorsal root ganglion (DRG).

[0090] The targeting peptide may direct an AAV particle to the CNS (e.g., the cortex) after intravenous administration.

[0091] The targeting peptide may direct and AAV particle to the PNS (e.g., DRG) after intravenous administration.

[0092] A targeting peptide may vary in length. In certain embodiments, the targeting peptide is 3-20 amino acids in length. As non-limiting examples, the targeting peptide may be 3,4,5,6, 7,8,9, 10, 11, 12, 13, 14, 15, 16, 17, 18, 19,20 or 3-5, 3-8, 3-10, 3-12, 3-15, 3-18, 3-20, 5-10, 5-15, 5-20, 10-12, 10-15, 10-20, 12-20, or 15-20 amino acids in length.

[0093] Targeting peptides of the present disclosure may be identified and/or designed by any method known in the art. As a non-limiting example, the CREATE system as described in Deverman et al., (Nature Biotechnology 34(2):204-209 (2016)) and in International Patent Application Publication Nos. WO2015038958 and WO2017100671, the contents of each of which are herein incorporated by reference in their entirety, may be used as a means of identifying targeting peptides, in either mice or other research animals, such as, but not limited to, non-human primates.

[0094] Targeting peptides and associated AAV particles may be identified from libraries of AAV capsids comprised of targeting peptide variants. In certain embodiments, the targeting peptides may be 7 amino acid sequences (7-mers). In another embodiment, the targeting peptides may be 9 amino acid sequences (9-mers). The targeting peptides may also differ in their method of creation or design, with non-limiting examples including, random peptide selection, site saturation mutagenesis, and/or optimization of a particular region of the peptide (e.g., flanking regions or central core).

[0095] In certain embodiments, a targeting peptide library comprises targeting peptides of 7 amino acids (7-mer) in length randomly generated by PCR.

[0096] In certain embodiments, a targeting peptide library comprises targeting peptides with 3 mutated amino acids. In certain embodiments, these 3 mutated amino acids are consecutive amino acids. In another embodiment, these 3 mutated amino acids are not consecutive amino acids. In certain embodiments, the parent targeting peptide is a 7-mer. In another embodiment, the parent peptide is a 9-mer.

[0097] In certain embodiments, a targeting peptide library comprises 7-mer targeting peptides, wherein the amino acids of the targeting peptide and/or the flanking sequences are evolved through site saturation mutagenesis of 3 consecutive amino acids. In certain embodiments, NNK (N=any base; K=G or T) codons are used to generate the site saturated mutation sequences.

### CREATE System in Mice

[0098] In some embodiments, the AAV particles of the present disclosure are prepared via the CREATE system, as described in Deverman et al., (Nature Biotechnology 34(2):204-209 (2016)) and in International Patent Application Publication Nos. WO2015038958 and WO2017100671, the contents of each of which are herein incorporated by reference in their entirety. “CREATE” or “Cre-recombinant-based AAV targeted evolution” refers to an AAV capsid selection strategy that selects for capsids that transduce target tissues (e.g, CNS or PNS) following intravenous injection. The method has been demonstrated in a mouse model.

[0099] Libraries of AAV capsids with one or more targeting peptide inserts are developed and administered intravenously to transgenic mice. These transgenic cre-expressing mice may be developed for specific targeting, for example, GFAP-Cre mice may be used for targeting to astrocytes.

[0100] Variation of the targeting sequence as well as the transgenic animal model enables the selection of AAV variants with desired transduction profiles, for example, tropism to neurons or astrocytes, as compared to other AAV serotypes, including the parent AAV particle and capsid.

[0101] The CREATE method involves the generation of a library of targeting peptides which are then assembled into a viral genome backbone comprising a parent AAV capsid sequence. An AAV capsid library (AAV particles) is then generated, purified and administered to a transgenic animal (e.g., mouse). Target tissue is collected and AAV sequences selectively recovered from Crc expressing cells. These sequences are assessed and characterized for the identification of targeting peptides that lead to enrichment in a target tissue (i.e., enhanced transduction or tropism). Targeting peptides and associated AAV particles can then be generated for further testing and characterization. This process is considered one round of evolution or selection. In some embodiments, more than one round of evolution is conducted. As many as 15 rounds of selection may be conducted.

[0102] In more detail, the CREATE system uses a rAAV-Cap-in-cis-lox viral genome comprising AAV cap and regulator elements of the AAV rep genes and a Cre-invertible switch. Since this viral genome lacks a fully functioning rep gene necessary for AAV particle production, the rep is provided in trans. A modified AAV2/9 Rep-Cap plasmid may be provided, wherein stop-codons are provided in-frame to prevent the expression of VP1-VP3 proteins.

[0103] Capsid libraries are generated using the rAAV-Cap-in-cis-lox viral genome as a backbone. Targeting peptides are inserted into the parent AAV capsid protein (e.g., AAV9) at any position that results in the generation of a fully functional AAV capsid protein and AAV particle. As an exemplar, targeting peptides comprising 7 random amino acids were inserted between amino acids 588 and 589 of the VP1 sequence of K449R AAV9. Targeting peptides may be designed by any method known in the art. In certain embodiments, targeting peptides are generated using polymerase chain reaction (PCR).

[0104] AAV particles comprising capsid proteins with targeting peptide inserts are generated and viral genomes encoding a reporter (e.g., GFP) encapsulated within. These AAV particles (or AAV capsid library) are then administered to a transgenic mouse by intravenous delivery to the tail vein. Administration of these capsid libraries to cre-expressing mice results in expression of the reporter payload in the target tissue, due to the expression of Cre.

[0105] AAV particles and/or viral genomes may be recovered from the target tissue for identification of targeting peptides and associated AAV particles that are enriched, indicating enhanced transduction of target tissue. Standard methods in the art, such as, but not limited to next generation sequencing (NGS), viral genome quantification, biochemical assays, immunohistochemistry and/or imaging of target tissue samples may be used to determine enrichment.

[0106] A target tissue may be any cell, tissue or organ of a subject. As non-limiting examples, samples may be collected from brain, spinal cord, dorsal root ganglia and associated roots, liver, heart, gastrocnemius muscle, soleus muscle, pancreas, kidney, spleen, lung, adrenal glands, stomach, sciatic nerve, saphenous nerve, thyroid gland, eyes (with or without optic nerve), pituitary gland, skeletal muscle (rectus femoris), colon, duodenum, ileum, jejunum, skin of the leg, superior cervical ganglia, urinary bladder, ovaries, uterus, prostate gland, testes, and/or any sites identified as having a lesion, or being of interest.

[0107] Targeting peptides and associated AAV capsid proteins and AAV particles identified using a CREATE system include AAVPHP.B (PHP.B), AAVPHP.A (PHP.A), AAVG2B-26, AAVG2B-13, AAVTH1.1-32, AAVTH1.1-35, AAVPHP.B2 (PHP.B2), AAVPHP.B3 (PHP.B3), AAVPHP.N/PHP.B-DGT, AAVPHP.B-EST, AAVPHP.B-GGT, AAVPHP.B-ATP, AAVPHP.B-ATT-T, AAVPHP.B-DGT-T, AAVPHP.B-GGT-T, AAVPHP.B-SGS, AAVPHP.B-AQP, AAVPHP.B-QQP, AAVPHP.B-SNP(3), AAVPHP.B-SNP, AAVPHP.B-QGT, AAVPHP.B-NQT, AAVPHP.B-EGS, AAVPHP.B-SGN, AAVPHP.B-EGT, AAVPHP.B-DST, AAVPHP.B-DST, AAVPHP.B-STP, AAVPHP.B-PQP, AAVPHP.B-SQP, AAVPHP.B-QLP, AAVPHP.B-TMP, AAVPHP.B-TTP, AAVPHP.S/G2A12, AAVG2A15/G2A3 (G2A3), AAVG2B4 (G2B4), AAVG2B5 (G2B5), and AAVPHP.S.

[0108] In certain embodiments, CREATE in mice is used to identify AAV capsids and/or targeting peptides having enhanced transduction of a target tissue (e.g., CNS or PNS).

### Create System in NHP

[0109] The CREATE system has proven efficacious in identifying targeting peptides for enhanced transduction to the CNS of mice after intravenous administration. However, translation of findings from mouse to human is not always straightforward. Modifying the CREATE system for non-transgenic animals or model systems that more closely resemble humans may help identify targeting peptides and associated AAV capsids and particles useful for the treatment of human disease.

[0110] For adaptation of the CREATE method to non-transgenic animals, another mechanism needs to be used to alter target tissues and/or cells to express Cre. In certain embodiments, AAV Cre-vectors may be used to transduce cells and induce subsequent Cre expression. In certain embodiments, these AAV Cre-vectors may be AAV1-Cre vectors.

[0111] These AAV Cre-vectors may comprise viral genomes with a cell-type specific promoter. These cell-type specific promotors may be, but are not limited to, CAG, UBC, EF1α, synapsin, GFAP, MBP, VGLUT, VGAT, Nav1.8, parvalbumin, TH, ChaT, and/or any promoter known in the art.

[0112] In certain embodiments, these AAV-Cre vectors are delivered to a target tissue by intraparenchymal administration. In certain embodiments, the intraparenchymal administration is directly to the putamen of the subject. In certain embodiments, the intraparenchymal administration is directly to the thalamus of a subject. In certain embodiments, the intraparenchymal administration is directly to the cortex of a subject. In certain embodiments, the intraparenchymal administration is indirectly to the cortex of a subject. In certain embodiments, the intraparenchymal administration is simultaneously to one or more of the putamen, the thalamus and or the cortex of a subject, and may be bi-lateral administrations.

[0113] In certain embodiments, the subject is a non-human primate.

[0114] As for the CREATE method developed in mice, the AAV capsid libraries may be administered intravenously. In another embodiment, the AAV capsid libraries may be administered by intraparenchymal delivery. In certain embodiments, the AAV capsid library is administered prior to the delivery of the AAV-Cre vectors. In another embodiment, the AAV capsid library is administered after the delivery of the AAV-Cre vectors. The length of time between the administration of the AAV-Cre vectors and the AAV capsid libraries may be seconds, minutes, hours, days, weeks, or years.

[0115] The AAV capsid library may comprise AAV particles comprising a viral genome encoding a reporter (e.g., GFP). Only those cells of the target tissue (e.g., CNS or DRG) also expressing Cre (co-transduced by a Cre-vector administered intraparenchymally) will express the reporter.

[0116] Target tissues may be collected and analyzed for the identification of AAV particles and targeting peptides that lead to enrichment in the target tissue, i.e., enhanced transduction. Standard methods in the art may be used to assess, analyze, or characterize sample tissues and AAV sequences, including but not limited to, next generation sequencing, viral genome quantification, biochemical assays, immunohistochemistry and/or imaging.

[0117] In certain embodiments, CREATE in NHP is used to identify AAV capsids and/or targeting peptides having enhanced transduction of a target tissue (e.g., CNS or PNS).

[0118] A non-limiting example of CREATE in NHP may be summarized as follows and is shown in FIG. 1. First, an AAV plasmid library is prepared and an AAV particle library is produced using triple transfection methods (other AAV library production methods may be used). The AAV particle library is administered to one or more NHP by intravenous administration at Day 0. At Day 7, the NHP is administered AAV-Cre vectors by intracranial infusion. At Day 20, necropsy is performed and tissues collected from brain, spinal cord, dorsal root ganglia, liver, heart, muscle, kidney, pancreas, spleen, lung, etc. Capsid DNA is captured by Cre-dependent DNA recovery from transduced tissues, using an rAAV-Cap-in-cis-lox rAAV genome wherein Cre inverts the polyadenylation sequence flanked by the lox71 and lox66 sites. PCR primers selectively amplify the Cre-recombined sequences. Recovered DNA can then be processed for and analyzed by next-generation sequencing (NGS) to identify AAV variants. Two to three rounds of this process may be conducted to identify enriched variants.

### Targeting Peptide Sequences

[0119] In certain embodiments the targeting peptide may comprise a sequence as set forth in SEQ ID NO: 4-14326 and SEQ ID NO: 42973-42999. These targeting peptides may be encoded by a sequence as set forth in SEQ ID NO: 14327-42972 and SEQ ID NO: 43027-43053. These sequences are shown in Tables 2 and 3.

[0120] In certain embodiments, the targeting peptide may comprise an amino acid sequence with 50%, 51%, 52%, 53%, 54%, 55%, 56%, 57%, 58%, 59%, 60%, 61%, 62%, 63%, 64%, 65%, 66%, 67%, 68%, 69%, 70%, 71%, 72%, 73%, 74%, 75%, 76%, 77%, 78%, 79%, 80%, 81%, 82%, 83%, 84%, 85%, 86%, 87%, 88%, 89%, 90%, 91%, 92%, 93%, 94%, 95%, 96%, 97%, 98%, 99%, or 100% identity to any of the sequences shown in Table 2 or 3.

[0121] In certain embodiments, the targeting peptide may be encoded by a nucleic acid sequence with 50%, 51%, 52%, 53%, 54%, 55%, 56%, 57%, 58%, 59%, 60%, 61%, 62%, 63%, 64%, 65%, 66%, 67%, 68%, 69%, 70%, 71%, 72%, 73%, 74%, 75%, 76%, 77%, 78%, 79%, 80%, 81%, 82%, 83%, 84%, 85%, 86%, 87%, 88%, 89%, 90%, 91%, 92%, 93%, 94%, 95%, 96%, 97%, 98%, 99%, or 100% identity to any of the sequences shown in Table 2 or 3.

[0122] In certain embodiments, a targeting peptide may comprise 4 or more contiguous amino acids of any of the targeting peptides disclosed herein. In certain embodiments the targeting peptide may comprise 4 contiguous amino acids of any of the sequences as set forth in SEQ ID NO: 4-14326 and SEQ ID NO: 4297342999. In certain embodiments the targeting peptide may comprise 5 contiguous amino acids of any of the sequences as set forth in SEQ ID NO: 4-14326 and SEQ ID NO: 4297342999. In certain embodiments the targeting peptide may comprise 6 contiguous amino acids of any of the sequences as set forth in SEQ ID NO: 4-14326 and SEQ ID NO: 42973-42999.

[0123] In certain embodiments, the AAV particle of the disclosure comprises an AAV capsid with a targeting peptide insert, wherein the targeting peptide has an amino acid sequence as set forth in any of SEQ ID NO: 4-14326 and SEQ ID NO: 42973-42999.

[0124] In certain embodiments, the AAV particle of the disclosure comprises an AAV capsid polynucleotide with a targeting nucleic acid insert, wherein the targeting nucleic acid insert has a nucleotide sequence as set forth in any of SEQ ID NO: 14327-42972 and SEQ ID NO: 43027-43053.

[0125] In certain embodiments, the AAV particle of the disclosure comprises an AAV capsid with a targeting peptide insert, wherein the targeting peptide has an amino acid sequence comprising at least 4 contiguous amino acids of any of the sequences as set forth in any of SEQ ID NO: 4-14326 and SEQ ID NO: 42973-42999.

[0126] In certain embodiments, the AAV particle of the disclosure comprises an AAV capsid with a targeting peptide insert, wherein the targeting peptide has an amino acid sequence substantially comprising any of the sequences as set forth in any of SEQ ID NO: 4-14326 and SEQ ID NO: 42973-42999.

[0127] In certain embodiments, the AAV particle of the disclosure comprises an AAV capsid polynucleotide with a targeting nucleic acid insert, wherein the targeting nucleic acid insert has a nucleotide sequence substantially comprising any of those set forth as SEQ ID NO: 14327-42972 and SEQ ID NO: 43027-43053.

[0128] The AAV particle of the disclosure comprising a targeting nucleic acid insert, may have a polynucleotide sequence with 50%, 51%, 52%, 53%, 54%, 55%, 56%, 57%, 58%, 59%, 60%, 61%, 62%, 63%, 64%, 65%, 66%, 67%, 68%, 69%, 70%, 71%, 72%, 73%, 74%, 75%, 76%, 77%, 78%, 79%, 80%, 81%, 82%, 83%, 84%, 85%, 86%, 87%, 88%, 89%, 90%, 91% 92%, 93%, 94%, 95%, 96%, 97%, 98%, 99% or more, identity to the parent capsid sequence.

[0129] The AAV particle of the disclosure comprising a targeting peptide insert, may have an amino acid sequence with 50%, 51%, 52%, 53%, 54%, 55%, 56%, 57%, 58%, 59%, 60%, 61%, 62%, 63%, 64%, 65%, 66%, 67%, 68%, 69%, 70%, 71%, 72%, 73%, 74%, 75%, 76%, 77%, 78%, 79%, 80%, 81%, 82%, 83%, 84%, 85%, 86%, 87%, 88%, 89%, 90%, 91%, 92%, 93%, 94%, 95%, 96%, 97%, 98%, 99% or more, identity to the parent capsid sequence.

Lengthy table referenced here
US20210277418A1-20210909-T00001
Please refer to the end of the specification for access instructions.

[0130] In any of the DNA and RNA sequences referenced and/or described herein, the single letter symbol has the following description: A for adenine; C for cytosine; G for guanine; T for thymine; U for Uracil; W for weak bases such as adenine or thymine: S for strong nucleotides such as cytosine and guanine; M for amino nucleotides such as adenine and cytosine: K for keto nucleotides such as guanine and thymine; R for purines adenine and guanine; Y for pyrimidine cytosine and thymine; B for any base that is not A (e.g., cytosine, guanine, and thymine); D for any base that is not C (e.g., adenine, guanine, and thymine); H for any base that is not G (e.g., adenine, cytosine, and thymine); V for any base that is not T (e.g., adenine, cytosine, and guanine): N for any nucleotide (which is not a gap): and Z is for zero.

[0131] In any of the amino acid sequences referenced and/or described herein, the single letter symbol has the following description: G (Gly) for Glycine; A (Ala) for Alanine: L (Leu) for Leucine; M (Met) for Methionine; F (Phe) for Phenylalanine; W (Trp) for Tryptophan; K (Lys) for Lysine; Q (Gln) for Glutamine; E (Glu) for Glutamic Acid; S (Ser) for Serine; P (Pro) for Proline; V (Val) for Valine; I (Ile) for Isoleucine; C (Cys) for Cysteine: Y (Tyr) for Tyrosine; H (His) for Histidine: R (Arg) for Arginine: N (Asn) for Asparagine: D (Asp) for Aspartic Acid; T (Thr) for Threonine; B (Asx) for Aspartic acid or Asparagine: J (Xle) for Leucine or Isoleucine; O (Pyl) for Pyrrolysine; U (See) for Selenocysteine; X (Xaa) for any amino acid; and Z (Glx) for Glutamine or Glutamic acid.

### Use of Targeting Peptides in AAV Particles

[0132] Targeting peptides may be stand-alone peptides or may be inserted into or conjugated to a parent sequence. In certain embodiments, the targeting peptides are inserted into the capsid protein of an AAV particle.

[0133] One or more targeting peptides may be inserted into a parent AAV capsid sequence to generate the AAV particles of the disclosure.

[0134] Targeting peptides may be inserted into a parent AAV capsid sequence in any location that results in fully functional AAV particles. The targeting peptide may be inserted in VP1, VP2 and/or VP3. Numbering of the amino acid residues differs across AAV serotypes, and so the exact amino acid position of the targeting peptide insertion may not be critical. As used herein, amino acid positions of the parent AAV capsid sequence are described using AAV9 (SEQ ID NO: 2) as reference.

[0135] In certain embodiments, the targeting peptides are inserted in a hypervariable region of the AAV capsid sequence. Non-limiting examples of such hypervariable regions include Loop IV and Loop VIII of the parent AAV capsid. While not wishing to be bound by theory, these surface exposed loops are unstructured and poorly conserved, making them ideal regions for insertion of targeting peptides.

[0136] In certain embodiments, the targeting peptide is inserted into Loop IV. In another embodiment, the targeting peptide is used to replace a portion, or all of Loop IV. As a non-limiting example, addition of the targeting peptide to the parent AAV capsid sequence may result in the replacement or mutation of at least one amino acid of the parent AAV capsid.

[0137] In certain embodiments, the targeting peptide is inserted into Loop VIII. In another embodiment, the targeting peptide is used to replace a portion, or all of Loop VIII. As a non-limiting example, addition of the targeting peptide to the parent AAV capsid sequence may result in the replacement or mutation of at least one amino acid of the parent AAV capsid.

[0138] In certain embodiments, more than one targeting peptide is inserted into a parent AAV capsid sequence. As a non-limiting example, targeting peptides may be inserted at both Loop IV and Loop VIII in the same parent AAV capsid sequence.

[0139] Targeting peptides may be inserted at any amino acid position of the parent AAV capsid sequence, such as, but not limited to, between amino acids at positions 586-592, 588-589, 586-589, 452-458, 262-269, 464-473, 491-495, 546-557 and/or 659-668.

[0140] In a preferred embodiment, the targeting peptides are inserted into a parent AAV capsid sequence between amino acids at positions 588 and 589 (Loop VIII). In certain embodiments, the parent AAV capsid is AAV9 (SEQ ID NO: 2). In a second embodiment, the parent AAV capsid is K449R AAV9 (SEQ ID NO: 3).

[0141] The targeting peptides described herein may increase the transduction of the AAV particles of the disclosure to a target tissue as compared to the parent AAV particle lacking a targeting peptide insert. In certain embodiments, the targeting peptide increases the transduction of an AAV particle to a target tissue by at least about 5%, 10%, 15%, 20%, 25%, 30%, 35%, 40%, 45%, 50%, 55%, 60%, 65%, 70%, 75%, 80%, 85%, 90%, 95%, 100%, 125%, 150%, 200%, 300%, 400%, 500%, or more as compared to a parent AAV particle lacking a targeting peptide insert.

[0142] In certain embodiments, the targeting peptide increases the transduction of an AAV particle to a cell or tissue of the CNS by at least about 5%, 10%, 15%, 20%, 25%, 30%, 35%, 40%, 45%, 50%, 55%, 60%, 65%, 70%, 75%, 80%, 85%, 90%, 95%, 100%, 125%, 150%, 200%, 300%, 400%, 500%, or more as compared to a parent AAV particle lacking a targeting peptide insert.

[0143] In certain embodiments, the targeting peptide increases the transduction of an AAV particle to a cell or tissue of the PNS by at least about 5%, 10%, 15%, 20%, 25%, 30%, 35%, 40%, 45%, 50%, 55%, 60%, 65%, 70%, 75%, 80%, 85%, 90%, 95%, 100%, 125%, 150%, 200%, 300%, 400%, 500%, or more as compared to a parent AAV particle lacking a targeting peptide insert.

[0144] In certain embodiments, the targeting peptide increases the transduction of an AAV particle to a cell or tissue of the DRG by at least about 5%, 10%, 15%, 20%, 25%, 30%, 35%, 40%, 45%, 50%, 55%, 60%, 65%, 70%, 75%, 80%, 85%, 90%, 95%, 100%, 125%, 150%, 200%, 300%, 400%, 500%, or more as compared to a parent AAV particle lacking a targeting peptide insert.

### Viral Genome of the AAV Particle

[0145] AAV particles of the disclosure, comprising targeting peptides, may be used for the delivery of any viral genome to a target tissue (e.g., CNS and/or DRG). The viral genome may encode any payload, such as but not limited to a polypeptide, an antibody, an enzyme, an RNAi agent and/or components of a gene editing system. In certain embodiments, the AAV particles of the disclosure are used to deliver a payload to cells of the CNS, after intravenous delivery. In another embodiment, the AAV particles of the disclosure are used to deliver a payload to cells of the DRG, after intravenous delivery.

[0146] A viral genome of an AAV particle of the disclosure, comprises a nucleic acid sequence with at least one payload region encoding a payload, and at least one ITR. A viral genome typically comprises two ITR sequences, one at each of the 5′ and 3′ ends. Further, a viral genome of the AAV particles of the disclosure may comprise nucleic acid sequences for additional components, such as, but not limited to, a regulatory element (e.g., promoter), untranslated regions (UTR), a polyadenylation sequence (polyA), a filler or stuffer sequence, an intron, and/or a linker sequence for enhanced expression.

[0147] These viral genome components can be selected and/or engineered to further tailor the specificity and efficiency of expression of a given payload in a target tissue (e.g., CNS or DRG).

### Viral Genome Component: Inverted Terminal Repeats (ITRs)

[0148] The AAV particles of the present disclosure comprise a viral genome with at least one ITR and a payload region. In certain embodiments, the viral genome has two ITRs. These two ITRs flank the payload region at the 5′ and 3′ ends. The ITRs function as origins of replication comprising recognition sites for replication. ITRs comprise sequence regions which can be complementary and symmetrically arranged. ITRs incorporated into viral genomes of the disclosure may be comprised of naturally occurring polynucleotide sequences or recombinantly derived polynucleotide sequences.

[0149] The ITRs may be derived from the same serotype as the capsid, selected from any of the known serotypes, or a derivative thereof. The ITR may be of a different serotype than the capsid. In certain embodiments, the AAV particle has more than one ITR. In a non-limiting example, the AAV particle has a viral genome comprising two ITRs. In certain embodiments, the ITRs are of the same serotype as one another. In another embodiment, the ITRs are of different serotypes. Non-limiting examples include zero, one or both of the ITRs having the same serotype as the capsid. In certain embodiments both ITRs of the viral genome of the AAV particle are AAV2 ITRs.

[0150] Independently, each ITR may be about 100 to about 150 nucleotides in length. An ITR may be about 100-105 nucleotides in length, 106-110 nucleotides in length, 111-115 nucleotides in length, 116-120 nucleotides in length, 121-125 nucleotides in length, 126-130 nucleotides in length, 131-135 nucleotides in length, 136-140 nucleotides in length, 141-145 nucleotides in length or 146-150 nucleotides in length. In certain embodiments, the ITRs are 140-142 nucleotides in length. Non-limiting examples of ITR length are 102, 105, 130, 140, 141, 142, 145 nucleotides in length. ITRs encompassed by the present disclosure include those with at least 90% identity, at least 95% identity, at least 98% identity, or at least 99% identity to a known AAV serotype ITR sequence.

### Viral Genome Component: Promoters

[0151] In certain embodiments, the payload region of the viral genome comprises at least one element to enhance the payload target specificity and expression (See e.g., Powell et al. Viral Expression Cassette Elements to Enhance Transgene Target Specificity and Expression in Gene Therapy, 2015: the contents of which are herein incorporated by reference in their entirety). Non-limiting examples of elements to enhance payload target specificity and expression include promoters, endogenous miRNAs, post-transcriptional regulatory elements (PREs), polyadenylation (PolyA) signal sequences and upstream enhancers (USEs), CMV enhancers and introns.

[0152] A person skilled in the art may recognize that expression of a payload in a target cell may require a specific promoter, including but not limited to, a promoter that is species specific, inducible, tissue-specific, or cell cycle-specific (Parr et al., Nat. Med 3:1145-9 (1997): the contents of which are herein incorporated by reference in their entirety).

[0153] In certain embodiments, the promoter is deemed to be efficient when it drives expression of the payload encoded by the viral genome of the AAV particle.

[0154] In certain embodiments, the promoter is a promoter deemed to be efficient when it drives expression in a cell being targeted.

[0155] In certain embodiments, the promoter is a promoter having a tropism for a cell being targeted.

[0156] In certain embodiments, the promoter drives expression of the payload for a period of time in targeted tissues. Expression driven by a promoter may be for a period of 1 hour, 2, hours, 3 hours, 4 hours, 5 hours, 6 hours, 7 hours, 8 hours, 9 hours, 10 hours, 11 hours, 12 hours, 13 hours, 14 hours, 15 hours, 16 hours, 17 hours, 18 hours, 19 hours, 20 hours, 21 hours, 22 hours, 23 hours, I day, 2 days, 3 days, 4 days, 5 days, 6 days, I week, 8 days, 9 days, 10 days, 11 days, 12 days, 13 days, 2 weeks, 15 days, 16 days, 17 days, 18 days, 19 days, 20 days, 3 weeks, 22 days, 23 days, 24 days, 25 days, 26 days, 27 days, 28 days, 29 days, 30 days, 31 days, I month, 2 months, 3 months, 4 months, 5 months, 6 months, 7 months, 8 months, 9 months, 10 months, 11 months, 1 year, 13 months, 14 months, 15 months, 16 months, 17 months, 18 months, 19 months, 20 months, 21 months, 22 months, 23 months, 2 years, 3 years, 4 years, 5 years, 6 years, 7 years, 8 years, 9 years, 10 years or more than 10 years. Expression may be for 1-5 hours, 1-12 hours, 1-2 days, 1-5 days, 1-2 weeks, 1-3 weeks, 1-4 weeks, 1-2 months, 1-4 months, 1-6 months, 2-6 months, 3-6 months, 3-9 months, 4-8 months, 6-12 months, 1-2 years, 1-5 years, 2-5 years, 3-6 years, 3-8 years, 4-8 years or 5-10 years. As a non-limiting example, the promoter is a selected for sustained expression of a payload in tissues and/or cells of the central or peripheral nervous system.

[0157] Promoters may be naturally occurring or non-naturally occurring. Non-limiting examples of promoters include those derived from viruses, plants, mammals, or humans. In some embodiments, the promoters may be those derived from human cells or systems. In some embodiments, the promoter may be truncated or mutated.

[0158] Promoters which drive or promote expression in most tissues include, but are not limited to, the human elongation factor 1α-subunit (EF1α) promoter, the cytomegalovirus (CMV) immediate-early enhancer and/or promoter, the chicken β-actin (CBA) promoter and its derivative CAG, β glucuronidase (GUSB) promoter, or ubiquitin C (UBC) promoter. Tissue-specific promoters can be used to restrict expression to certain cell types such as, but not limited to, cells of the central or peripheral nervous systems, targeted regions within (e.g., frontal cortex), and/or sub-sets of cells therein (e.g., excitatory neurons). As non-limiting examples, cell-type specific promoters may be used to restrict expression of a payload to excitatory neurons (e.g., glutamatergic), inhibitory neurons (e.g., GABA-ergic), neurons of the sympathetic or parasympathetic nervous system, sensory neurons, neurons of the dorsal root ganglia, motor neurons, or supportive cells of the nervous systems such as microglia, astrocytes, oligodendrocytes, and/or Schwann cells.

[0159] Cell-type specific promoters also exist for other tissues of the body, with non-limiting examples including, liver promoters (e.g., hAAT, TBG), skeletal muscle specific promoters (e.g., desmin, MCK, C512), B cell promoters, monocyte promoters, leukocyte promoters, macrophage promoters, pancreatic acinar cell promoters, endothelial cell promoters, lung tissue promoters, and/or cardiac or cardiovascular promoters (e.g., αMHC, cTnT, and CMV-MLC2k).

[0160] Non-limiting examples of tissue-specific promoters for targeting payload expression to central nervous system tissues and cells include synapsin (Syn), glutamate vesicular transporter (VGLUT), vesicular GABA transporter (VGAT), parvalbumin (PV), sodium channel Nav 1.8, tyrosine hydroxylase (TH), choline acetyltransferase (ChaT), methyl-CpG binding protein 2 (MeCP2), Ca²⁺/calmodulin-dependent protein kinase II (CaMKII), metabotropic glutamate receptor 2 (mGluR2), neurofilament light (NFL) or heavy (NFH), neuron-specific enolase (NSE), p-globin minigene np2, preproenkephalin (PPE), enkephalin (Enk) and excitatory amino acid transporter 2 (EAAT2) promoters. Non-limiting examples oftissue-specific expression elements for astrocytes include glial fibrillary acidic protein (GFAP) and EAAT2 promoters. A non-limiting example of a tissue-specific expression element for oligodendrocytes includes the myelin basic protein (MBP) promoter.

[0161] In certain embodiments, the promoter may be less than 1 kb. The promoter may have a length of 200, 210, 220, 230, 240, 250, 260, 270, 280, 290, 300, 310, 320, 330, 340, 350, 360, 370, 380, 390, 400, 410, 420, 430, 440, 450, 460, 470, 480, 490, 500, 510, 520, 530, 540, 550, 560, 570, 580, 590, 600, 610, 620, 630, 640, 650, 660, 670, 680, 690, 700, 710, 720, 730, 740, 750, 760, 770, 780, 790, 800 or more than 800 nucleotides. The promoter may have a length between 200-300, 200-400, 200-500, 200-600, 200-700, 200-800, 300-400, 300-500, 300-600, 300-700, 300-800, 400-500, 400-600, 400-700, 400-800, 500-600, 500-700, 500-800, 600-700, 600-800 or 700-800 nucleotides.

[0162] In certain embodiments, the promoter may be a combination of two or more components of the same or different starting or parental promoters such as, but not limited to, CMV and CBA. Each component may have a length of 200, 210, 220, 230, 240, 250, 260, 270, 280, 290, 300, 310, 320, 330, 340, 350, 360, 370, 380, 381, 382, 383, 384, 385, 386, 387, 388, 389, 390, 400, 410, 420, 430, 440, 450, 460, 470, 480, 490, 500, 510, 520, 530, 540, 550, 560, 570, 580, 590, 600, 610, 620, 630, 640, 650, 660, 670, 680, 690, 700, 710, 720, 730, 740, 750, 760, 770, 780, 790, 800 or more than 800 nucleotides. Each component may have a length between 200-300, 200-400, 200-500, 200-600, 200-700, 200-800, 300-400, 300-500, 300-600, 300-700, 300-800, 400-500, 400-600, 400-700, 400-800, 500-600, 500-700, 500-800, 600-700, 600-800 or 700-800 nucleotides. In certain embodiments, the promoter is a combination of a 382 nucleotide CMV-enhancer sequence and a 260 nucleotide CBA-promoter sequence.

[0163] In certain embodiments, the viral genome comprises a ubiquitous promoter. Non-limiting examples of ubiquitous promoters include CMV, CBA (including derivatives CAG, CBh, etc.), EF-1α, PGK, UBC, GUSB (hGBp), and UCOE (promoter of HNRPA2B1-CBX3).

[0164] Yu et al. (Molecular Pam 2011, 7:63; the contents of which are herein incorporated by reference in their entirety) evaluated the expression of eGFP under the CAG, EF1α, PGK and UBC promoters in rat DRG cells and primary DRG cells using lentiviral vectors and found that UBC showed weaker expression than the other 3 promoters and only 10-12% glial expression was seen for all promoters. Soderblom et al. (E. Neuro 2015, 2(2): ENEURO.0001-15; the contents of which are herein incorporated by reference in their entirety) evaluated the expression of eGFP in AAV8 with CMV and UBC promoters and AAV2 with the CMV promoter after injection in the motor cortex. Intranasal administration of a plasmid containing a UBC or EF1α promoter showed a sustained airway expression greater than the expression with the CMV promoter (See e.g., Gill et al., Gene Therapy 2001, Vol. 8, 1539-1546; the contents of which are herein incorporated by reference in their entirety). Husain et al. (Gene Therapy 2009, 16(7): 927-932; the contents of which are herein incorporated by reference in their entirety) evaluated an HOH construct with a hGUSB promoter, a HSV-ILAT promoter and an NSE promoter and found that the HpH construct showed weaker expression than NSE in mouse brain. Passini and Wolfe (J. Virol. 2001, 12382-12392, the contents of which are herein incorporated by reference in their entirety) evaluated the long-term effects of the HpH vector following an intraventricular injection in neonatal mice and found that there was sustained expression for at least 1 year. Low expression in all brain regions was found by Xu et al. (Gene Therapy 2001, 8, 1323-1332; the contents of which are herein incorporated by reference in their entirety) when NFL and NFH promoters were used as compared to the CMV-lacZ, CMV-luc, EF, GFAP, hENK, nAChR. PPE, PPE+wpre, NSE (0.3 kb), NSE (1.8 kb) and NSE (1.8 kb+wpre). Xu et al. found that the promoter activity in descending order was NSE (1.8 kb), EF, NSE (0.3 kb), GFAP, CMV, hENK, PPE, NFL and NFH. NFL is a 650-nucleotide promoter and NFH is a 920-nucleotide promoter which are both absent in the liver but NFH is abundant in the sensory proprioceptive neurons, brain and spinal cord and NFH is present in the heart. SCN8A (Nav 1.6) is a 470 nucleotide promoter which expresses throughout the DRG, spinal cord and brain with particularly high expression seen in the hippocampal neurons and cerebellar Purkinje cells, cortex, thalamus and hypothalamus (See e.g., Drews et al. Identification of evolutionary conserved, functional noncoding elements in the promoter region of the sodium channel gene SCN8A. Mamm Genome (2007) 18:723-731; and Raymond et al. Expression of Alternatively Spliced Sodium Channel α-subunit genes. Journal of Biological Chemistry (2004) 279(44) 46234-46241; the contents of each of which are herein incorporated by reference in their entireties).

[0165] Any of the promoters taught by the aforementioned Yu, Soderblom, Gill, Husain, Passini, Xu, Drews or Raymond may be used herein.

[0166] In certain embodiments, the promoter is not cell specific.

[0167] In certain embodiments, the promoter is a RNA pol III promoter. As a non-limiting example, the RNA pol III promoter is U6. As a non-limiting example, the RNA pol III promoter is H1.

[0168] In certain embodiments, the viral genome comprises an enhancer element.

[0169] In certain embodiments, the viral genome comprises an engineered promoter.

[0170] In another embodiment, the viral genome comprises a promoter from a naturally expressed protein.

### Viral Genome Component: Untranslated Regions (UTRs)

[0171] By definition, wild type untranslated regions (UTRs) of a gene are transcribed but not translated. Generally, the 5′ UTR starts at the transcription start site and ends at the start codon and the 3′ UTR starts immediately following the stop codon and continues until the termination signal for transcription.

[0172] Features typically found in abundantly expressed genes of specific target organs (e.g., CNS tissue or DRG) may be engineered into UTRs to enhance stability and protein production. As a non-limiting example, a 5′ UTR from mRNA normally expressed in the brain (e.g., huntingtin) may be used in the viral genomes of the AAV particles of the disclosure to enhance expression in neuronal cells or other cells of the central nervous system.

[0173] While not wishing to be bound by theory, wild-type 5′ untranslated regions (UTRs) include features which play roles in translation initiation. Kozak sequences, which are commonly known to be involved in the process by which the ribosome initiates translation of many genes, are usually included in 5′ UTRs. Kozak sequences have the consensus CCR(A/G)CCAUGG, where R is a purine (adenine or guanine) three bases upstream of the start codon (ATG), which is followed by another ‘G’.

[0174] In certain embodiments, the 5′UTR in the viral genome includes a Kozak sequence.

[0175] In certain embodiments, the 5′UTR in the viral genome does not include a Kozak sequence.

[0176] While not wishing to be bound by theory, wild-type 3′ UTRs are known to have stretches of Adenosines and Uridines embedded therein. These AU rich signatures are particularly prevalent in genes with high rates of turnover. Based on their sequence features and functional properties, the AU rich elements (AREs) can be separated into three classes (Chen et al, 1995, the contents of which are herein incorporated by reference in its entirety): Class I AREs, such as, but not limited to, c-Myc and MyoD, contain several dispersed copies of an AUUUA motif within U-rich regions. Class II AREs, such as, but not limited to, GM-CSF and TNF-α, possess two or more overlapping UUAUUUA(U/A)(U/A) nonamers. Class III ARES, such as, but not limited to, c-Jun and Myogenin, are less well defined. These U rich regions do not contain an AUUUA motif. Most proteins binding to the AREs are known to destabilize the messenger, whereas members of the ELAV family, most notably HuR, have been documented to increase the stability of mRNA. HuR binds to AREs of all the three classes. Engineering the HuR specific binding sites into the 3′ UTR of nucleic acid molecules will lead to HuR binding and thus, stabilization of the message in vivo.

[0177] Introduction, removal or modification of 3′ UTR AU rich elements (AREs) can be used to modulate the stability of a polynucleotide. When engineering specific polynucleotides, e.g., payload regions of viral genomes, one or more copies of an ARE can be introduced to make polynucleotides less stable and thereby curtail translation and decrease production of the resultant protein. Likewise. AREs can be identified and removed or mutated to increase the intracellular stability and thus increase translation and production of the resultant protein.

[0178] In certain embodiments, the 3′ UTR of the viral genome may include an oligo(dT) sequence for templated addition of a poly-A tail.

[0179] In certain embodiments, the viral genome may include at least one miRNA seed, binding site or full sequence, microRNAs (or miRNA or miR) are 19-25 nucleotide noncoding RNAs that bind to the sites of nucleic acid targets and down-regulate gene expression either by reducing nucleic acid molecule stability or by inhibiting translation. A microRNA sequence comprises a “seed” region, i.e., a sequence in the region of positions 2-8 of the mature microRNA, which has perfect Watson-Crick sequence complementarity to the miRNA target sequence of the nucleic acid.

[0180] In certain embodiments, the viral genome may be engineered to include, alter or remove at least one miRNA binding site, full sequence or seed region.

[0181] Any UTR from any gene known in the art may be incorporated into the viral genome of the AAV particle. These UTRs, or portions thereof, may be placed in the same orientation as in the gene from which they were selected or they may be altered in orientation or location. In certain embodiments, the UTR used in the viral genome of the AAV particle may be inverted, shortened, lengthened, made with one or more other 5′ UTRs or 3′ UTRs known in the art. As used herein, the term “altered” as it relates to a UTR, means that the UTR has been changed in some way in relation to a reference sequence. For example, a 3′ or 5′ UTR may be altered relative to a wild type or native UTR by the change in orientation or location as taught above or may be altered by the inclusion of additional nucleotides, deletion of nucleotides, swapping or transposition of nucleotides.

[0182] In certain embodiments, the viral genome of the AAV particle comprises at least one artificial UTR which is not a variant of a wild type UTR.

[0183] In certain embodiments, the viral genome of the AAV particle comprises UTRs which have been selected from a family of transcripts whose proteins share a common function, structure, feature or property.

### Viral Genome Component: Polyadenylation Sequence

[0184] The viral genome of the AAV particles of the present disclosure may comprise at least one polyadenylation sequence. In certain embodiments, the viral genome of the AAV particle comprises a polyadenylation sequence between the 3′ end of the payload encoding region and the 5′ end of the 3′ITR.

[0185] In certain embodiments, the polyadenylation sequence or “polyA sequence” may range from absent to about 500 nucleotides in length. The polyadenylation sequence may be, but is not limited to, 1,2,3,4,5,6,7,8,9, 10, 11, 12, 13, 14, 15, 16, 17, 18, 19,20,21,22, 23, 24, 25, 26, 27, 28, 29, 30, 31, 32, 33, 34, 35, 36, 37, 38, 39, 40,41,42,43, 44,45, 46,47, 48, 49, 50, 51, 52, 53, 54, 55, 56, 57, 58, 59, 60, 61, 62, 63, 64, 65, 66, 67, 68, 69, 70, 71, 72, 73, 74, 75, 76, 77, 78, 79, 80, 81, 82, 83, 84, 85, 86, 87, 88, 89, 90, 91, 92, 93, 94, 95, 96, 97, 98,99, 100,101, 102, 103, 104,105, 106,107, 108, 109, 110, 111, 112,113,114, 115, 116, 117, 118, 119, 120, 121, 122, 123, 124, 125, 126, 127, 128, 129, 130, 131, 132, 133, 134, 135, 136, 137, 138, 139, 140, 141, 142, 143, 144, 145, 146, 147, 148, 149, 150, 151, 152, 153, 154, 155, 156, 157, 158, 159, 160, 161, 162, 163, 164, 165, 166, 167, 168, 169, 170, 171, 172, 173, 174, 175, 176, 177, 178, 179, 180, 181, 182, 183, 184, 185, 186, 187, 188, 189, 190, 191, 192, 193, 194, 195, 196, 197, 198, 199, 200, 201, 202, 203, 204, 205, 206, 207,208,209,210,211, 212, 213, 214, 215, 216, 217, 218, 219, 220, 221, 222, 223, 224, 225, 226, 227, 228, 229, 230, 231, 232, 233, 234, 235, 236, 237, 238, 239, 240, 241, 242, 243, 244, 245, 246, 247, 248, 249, 250, 251, 252, 253, 254, 255, 256, 257, 258, 259, 260, 261, 262, 263, 264, 265, 266, 267, 268, 269, 270, 271, 272, 273, 274, 275, 276, 277, 278, 279, 280, 281, 282, 283, 284, 285, 286, 287, 288, 289, 290, 291, 292, 293, 294, 295, 296, 297, 298, 299, 300, 301, 302, 303, 304, 305, 306, 307, 308, 309, 310, 311, 312, 313, 314, 315, 316, 317, 318, 319, 320, 321, 322, 323, 324, 325, 326, 327, 328, 329, 330, 331, 332, 333, 334, 335, 336, 337, 338, 339, 340, 341, 342, 343, 344, 345, 346, 347, 348, 349, 350, 351, 352, 353, 354, 355, 356, 357, 358, 359, 360, 361, 362, 363, 364, 365, 366, 367, 368, 369, 370, 371, 372, 373, 374, 375, 376, 377, 378, 379, 380, 381, 382, 383, 384, 385, 386, 387, 388, 389, 390, 391, 392, 393, 394, 395, 396, 397, 398, 399, 400, 401, 402,403, 404, 405, 406,407,408,409, 410, 411,412,413,414,415,416, 417, 418, 419,420,421,422, 423, 424,425,426,427, 428, 429, 430, 431, 432, 433, 434, 435, 436, 437, 438,439,440, 441,442,443,444,445, 446,447,448,449,450,451,452,453,454, 455, 456,457,458, 459, 460, 461, 462, 463, 464, 465, 466, 467, 468, 469, 470, 471, 472, 473, 474,475, 476, 477, 478, 479, 480, 481, 482, 483, 484, 485, 486, 487, 488, 489, 490, 491, 492, 493, 494, 495, 496, 497, 498, 499, and 500 nucleotides in length.

[0186] In certain embodiments, the polyadenylation sequence is 50-100 nucleotides in length.

[0187] In certain embodiments, the polyadenylation sequence is 50-150 nucleotides in length.

[0188] In certain embodiments, the polyadenylation sequence is 50-160 nucleotides in length.

[0189] In certain embodiments, the polyadenylation sequence is 50-200 nucleotides in length.

[0190] In certain embodiments, the polyadenylation sequence is 60-100 nucleotides in length.

[0191] In certain embodiments, the polyadenylation sequence is 60-150 nucleotides in length.

[0192] In certain embodiments, the polyadenylation sequence is 60-160 nucleotides in length.

[0193] In certain embodiments, the polyadenylation sequence is 60-200 nucleotides in length.

[0194] In certain embodiments, the polyadenylation sequence is 70-100 nucleotides in length.

[0195] In certain embodiments, the polyadenylation sequence is 70-150 nucleotides in length.

[0196] In certain embodiments, the polyadenylation sequence is 70-160 nucleotides in length.

[0197] In certain embodiments, the polyadenylation sequence is 70-200 nucleotides in length.

[0198] In certain embodiments, the polyadenylation sequence is 80-100 nucleotides in length.

[0199] In certain embodiments, the polyadenylation sequence is 80-150 nucleotides in length.

[0200] In certain embodiments, the polyadenylation sequence is 80-160 nucleotides in length.

[0201] In certain embodiments, the polyadenylation sequence is 80-200 nucleotides in length.

[0202] In certain embodiments, the polyadenylation sequence is 90-100 nucleotides in length.

[0203] In certain embodiments, the polyadenylation sequence is 90-150 nucleotides in length.

[0204] In certain embodiments, the polyadenylation sequence is 90-160 nucleotides in length.

[0205] In certain embodiments, the polyadenylation sequence is 90-200 nucleotides in length.

### Viral Genome Component: Introns

[0206] In certain embodiments, the viral genome of the AAV particles of the present disclosure comprises at least one element to enhance the payload target specificity and expression (See e.g., Powell et al. Viral Expression Cassette Elements to Enhance Transgene Target Specificity and Expression in Gene Therapy, Discov. Med, 2015, 19(102): 49-57; the contents of which are herein incorporated by reference in their entirety) such as an intron. Non-limiting examples of introns include. MVM (67-97 bps), FIX truncated intron 1 (300 bps), pi-globin SD/immunoglobulin heavy chain splice acceptor (250 bps), adenovirus splice donor/immunoglobin splice acceptor (500 bps), SV40 late splice donor/splice acceptor (19S/16S) (180 bps) and hybrid adenovirus splice donor/IgG splice acceptor (230 bps).

[0207] In certain embodiments, the intron or intron portion may be 100-500 nucleotides in length. The intron may have a length of 80, 90, 100, 110, 120, 130, 140, 150, 160, 170, 171, 172, 173, 174, 175, 176, 177, 178, 179, 180, 190, 200, 210, 220, 230, 240, 250, 260, 270, 280, 290, 300, 310, 320, 330, 340, 350, 360, 370, 380, 390, 400, 410, 420, 430, 440, 450, 460, 470, 480, 490 or 500 nucleotides. The intron may have a length between 80-100, 80-120, 80-140, 80-160, 80-180, 80-200, 80-250, 80-300, 80-350, 80-400, 80-450, 80-500, 200-300, 200-400, 200-500, 300-400, 300-500, or 400-500 nucleotides.

### Viral Genome Component: Suffer Sequences

[0208] In certain embodiments, the viral genome of the AAV particles of the present disclosure comprises at least one element to improve packaging efficiency and expression, such as a stuffer or filler sequence. Non-limiting examples of stuffer sequences include albumin and/or alpha-1 antitrypsin. Any known viral, mammalian, or plant sequence may be manipulated for use as a stuffer sequence.

[0209] In certain embodiments, the stuffer or filler sequence may be from about 100-3500 nucleotides in length. The stuffer sequence may have a length of about 100, 200, 300, 400, 500, 600, 700, 800, 900, 1000, 1100, 1200, 1300, 1400, 1500, 1600, 1700, 1800, 1900, 2000, 2100, 2200, 2300, 2400, 2500, 2600, 2700, 2800, 2900 or 3000 nucleotides.

Viral Genome Component: miRNA

[0210] In certain embodiments, the viral genome comprises at least one sequence encoding a miRNA to reduce the expression of the payload in an “off-target” tissue. As used herein, “off-target” indicates a tissue or cell-type unintentionally targeted by the AAV particles of the disclosure. As an example, an “off-target” tissue or cell when targeting the DRG, may be neurons of other ganglia, such as those of the sympathetic or parasympathetic nervous system, miRNAs and their targeted tissues are well known in the art. As a non-limiting example, a miR-122 miRNA may be encoded in the viral genome to reduce the expression of the viral genome in the liver.

### Viral Genome Component: Selectable Marker

[0211] In some embodiments, the viral genome of the AAV particles of the disclosure optionally encodes a selectable marker. The selectable marker may comprise a cell-surface marker, such as any protein expressed on the surface of the cell including, but not limited to receptors, CD markers, lectins, integrins, or truncated versions thereof.

[0212] In some embodiments, selectable marker reporter genes are described in International Publication Nos. WO 1996023810 and WO 1996030540; Heim et al., Current Biology 2:178-182 (1996); Heim et al., Proc. Natl. Acad. Sci. USA (1995); or Heim et al., Science 373:663-664 (1995), the contents of each of which are incorporated herein by reference in their entirety.

### Genome Size

[0213] In certain embodiments, the AAV particles of the disclosure may comprise a single-stranded or double-stranded viral genome. The size of the viral genome may be small, medium, large or the maximum size. As described above, the viral genome may comprise a promoter and a polyA tail.

[0214] In certain embodiments, the viral genome may be a small single stranded viral genome. A small single stranded viral genome may be 2.1 to 3.5 kb in size such as, but not limited to, about 2.1, 2.2, 2.3, 2.4, 2.5, 2.6, 2.7, 2.8, 2.9, 3.0, 3.1, 3.2, 3.3, 3.4, and 3.5 kb in size.

[0215] In certain embodiments, the viral genome may be a small double stranded viral genome. A small double stranded viral genome may be 1.3 to 1.7 kb in size such as, but not limited to, about 1.3, 1.4, 1.5, 1.6, and 1.7 kb in size.

[0216] In certain embodiments, the viral genome may be a medium single stranded viral genome. A medium single stranded viral genome may be 3.6 to 4.3 kb in size such as, but not limited to, about 3.6, 3.7, 3.8, 3.9, 4.0, 4.1, 4.2 and 4.3 kb in size.

[0217] In certain embodiments, the viral genome may be a medium double stranded viral genome. A medium double stranded viral genome may be 1.8 to 2.1 kb in size such as, but not limited to, about 1.8, 1.9, 2.0, and 2.1 kb in size.

[0218] In certain embodiments, the viral genome may be a large single stranded viral genome. A large single stranded viral genome may be 4.4 to 6.0 kb in size such as, but not limited to, about 4.4, 4.5, 4.6, 4.7, 4.8, 4.9, 5.0, 5.1, 5.2, 5.3, 5.4, 5.5, 5.6, 5.7, 5.8, 5.9 and 6.0 kb in size.

[0219] In certain embodiments, the viral genome may be a large double stranded viral genome. A large double stranded viral genome may be 2.2 to 3.0 kb in size such as, but not limited to, about 2.2, 2.3, 2.4, 2.5, 2.6, 2.7, 2.8, 2.9 and 3.0 kb in size.

### Payloads

[0220] The AAV particles of the present disclosure comprise a viral genome with at least one payload region. As used herein, a “payload region” is any nucleic acid sequence (e.g., within the viral genome) which encodes one or more “payloads” of the disclosure. As non-limiting examples, a payload region may be a nucleic acid sequence within the viral genome of an AAV particle, which encodes a payload, wherein the payload is an RNAi agent or a polypeptide. Payloads of the present disclosure may be, but are not limited to, peptides, polypeptides, proteins, antibodies, RNAi agents, etc.

[0221] The payload region may comprise a combination of coding and non-coding nucleic acid sequences.

[0222] In some embodiments, the payload region may encode a coding or non-coding RNA.

[0223] In certain embodiments, the AAV particle comprises a viral genome with a payload region encoding more than one payload of interest. In such an embodiment, a viral genome encoding more than one payload may be replicated and packaged into a viral particle. A target cell transduced with a viral particle comprising more than one payload may express each of the payloads in a single cell.

### Polypeptides

[0224] Where the payload region encodes a polypeptide, the polypeptide may be a peptide or protein. As a non-limiting example, the payload region may encode at least one allele of apolipoprotein E (APOE) such as, but not limited to ApoE2, ApoE3 and/or ApoE4. In certain embodiments, the payload region encodes ApoE2 (cys112, cys158). In certain embodiments, the payload region encodes ApoE3 (cys112, arg 158). In certain embodiments, the payload region of the encodes ApoE4 (arg112, arg158). As a second non-limiting example, the payload region may encode a human or a primate frataxin protein, or fragment or variant thereof. As another non-limiting example, the payload region may encode an antibody, or a fragment thereof. As another non-limiting example, the payload region may encode human aromatic L-amino acid decarboxylase (AADC), or a fragment or variant thereof. As another non-limiting example, the payload region may encode human survival of motor neuron (SMN) 1 or SMN2, or fragments or variants thereof. As another non-limiting example, the payload region may encode frataxin (FXN). As another non-limiting example, the payload region may encode APOE (APOE2, APOE3, APOE4), or fragments or variants thereof. As another non-limiting example, the payload region may encode glucocerebrosidase (GBA1), or a fragment or variant thereof. As another non-limiting example, the payload region may encode granulin precursor or progranulin (GRN), or a fragment or variant thereof. As another non-limiting example, the payload region may encode aspartoacylase (ASPA), or a fragment or variant thereof. As another non-limiting example, the payload region may encode tripeptidyl peptidase I (CLN2), or a fragment or variant thereof. As another non-limiting example, the payload region may encode beta-galactosidase (GLB1), or a fragment or variant thereof. As another non-limiting example, the payload region may encode N-sulphoglucosamine sulphohydrolase (SGSH), or a fragment or variant thereof. As another non-limiting example, the payload region may encode N-acetyl-alpha-glucosaminidase (NAGLU), or a fragment or variant thereof. As another non-limiting example, the payload region may encode iduronate 2-sulfatase (IDS), or a fragment or variant thereof. As another non-limiting example, the payload region may encode Intracellular cholesterol transporter (NPC1), or a fragment or variant thereof. As another non-limiting example, the payload region may encode gigaxonin (GAN), or a fragment or variant thereof. The AAV viral genomes encoding polypeptides described herein may be useful in the fields of human disease, viruses, infections veterinary applications and a variety of in vivo and n vitro settings.

[0225] Amino acid sequences encoded by payload regions of the viral genomes of the disclosure may be translated as a whole polypeptide, a plurality of polypeptides or fragments of polypeptides, which independently may be encoded by one or more nucleic acids, fragments of nucleic acids or variants of any of the aforementioned. As used herein, “polypeptide” means a polymer of amino acid residues (natural or unnatural) linked together most often by peptide bonds. The term, as used herein, refers to proteins, polypeptides, and peptides of any size, structure, or function. In some instances, the polypeptide encoded is smaller than about 50 amino acids and the polypeptide is then termed a peptide. If the polypeptide is a peptide, it will be at least about 2, 3, 4, or at least 5 amino acid residues long. Thus, polypeptides include gene products, naturally occurring polypeptides, synthetic polypeptides, homologs, orthologs, paralogs, fragments and other equivalents, variants, and analogs of the foregoing. A polypeptide may be a single molecule or may be a multi-molecular complex such as a dimer, trimer or tetramer. They may also comprise single chain or multichain polypeptides and may be associated or linked. The term polypeptide may also apply to amino acid polymers in which one or more amino acid residues are an artificial chemical analogue of a corresponding naturally occurring amino acid.

[0226] The term “polypeptide variant” refers to molecules which differ in their amino acid sequence from a native or reference sequence. The amino acid sequence variants may possess substitutions, deletions, and/or insertions at certain positions within the amino acid sequence, as compared to a native or reference sequence. Ordinarily, variants will possess at least about 50% identity (homology) to a native or reference sequence, and preferably, they will be at least about 80%, more preferably at least about 90% identical (homologous) to a native or reference sequence.

### Antibodies

[0227] Where the payload region encodes an antibody, the “antibody” may be an antibody, a fragment, or any derivative thereof, which may contribute to the formation of a “functional antibody”, exhibiting the desired biological activity. As non-limiting examples, an antibody may be a native antibody (e.g., with two heavy and two light chains), a heavy chain variable region, a light chain variable region, a heavy chain constant region, a light chain constant region, Fab, Fab′, F(ab′)₂, Fv, or scFv fragments, a diabody, a linear antibody, a single-chain antibody, a multi-specific antibody, an intrabody, one or more heavy chain complementarity determining regions (CDR), one or more light chain CDRs, a bi-specific antibody, a monoclonal antibody, a polyclonal antibody, a humanized antibody, an antibody mimetic, an antibody variant, a miniaturized antibody, a unibody, a maxibody, and/or a chimeric antigen receptor.

[0228] As used herein, “antibody-based” or “antibody-derived” compositions are monomeric or multi-meric polypeptides which comprise at least one amino-acid region derived from a known or parental antibody sequence and at least one amino acid region derived from a non-antibody sequence, e.g., mammalian protein.

[0229] Payload regions may encode polypeptides that form or function as any antibody, including antibodies that are known in the art and/or antibodies that are commercially available. The encoded antibodies may be therapeutic, diagnostic, or for research purposes. The encoded antibodies may be useful in the treatment of neurological disease or any disorders associated with the central and/or peripheral nervous systems.

[0230] In certain embodiments, the viral genome of the AAV particle may comprise nucleic acids which have been engineered to enable or enhance the expression of antibodies, antibody fragments, or components thereof.

[0231] Antibodies encoded in payload regions of the AAV particles of the present disclosure may be, but are not limited to, antibodies targeting β-amyloid, APOE, tau, SOD1, TDP43, huntingtin, and/or synuclein.

### RNAi Agents

[0232] RNAi (also known as post-transcriptional gene silencing (PTGS), quelling, or co-suppression) is a post-transcriptional gene silencing process in which RNA molecules, in a sequence specific manner, inhibit gene expression, typically by causing the destruction of specific mRNA molecules. RNAi mediated gene silencing can specifically inhibit targeted gene expression. Where the payload region of the viral genome of the AAV particles of the present disclosure encodes an RNAi agent, the RNAi agent may be, but is not limited to, dsRNA, siRNA, shRNA, pre-miRNA, pri-miRNA, miRNA, stRNA, lncRNA, piRNA, or snoRNA. Non-limiting examples of a target gene of an RNAi agent include. SOD1, MAPT. APOE, HT, C90RF72, TDP-43, APP, BACE, SNCA, ATXN1, ATXN2, ATXN3, ATXN7, SCN1A-SCN5A, or SCN8A-SCN11A.

[0233] The AAV particles of the present disclosure may comprise viral genomes encoding RNAi agents, wherein the RNAi agent targets the mRNA of a gene of interest to interfere with gene expression and/or protein production. Such AAV particles may be used as a therapeutic, a diagnostic, or for research purposes.

[0234] In certain embodiments, the RNAi agent may target the gene of interest along any segment of their respective nucleotide sequence.

[0235] In certain embodiments, the RNAi agent may target the gene of interest at the location of a single-nucleotide polymorphism (SNP) or variant within the nucleotide sequence.

[0236] In some embodiments, a nucleic acid sequence encoding an RNAi agent, or a single strand of an RNAi agent, is inserted into the viral genome of the AAV particle and introduced into cells, specifically cells in the central nervous system or cells of the DRG.

[0237] The RNAi agent may be an siRNA duplex, wherein the siRNA duplex contains an antisense strand (guide strand) and a sense strand (passenger strand) hybridized together forming a duplex structure, wherein the antisense strand is complementary to the nucleic acid sequence of the targeted gene, and wherein the sense strand is homologous to the nucleic acid sequence of the targeted gene. In some aspects, the 5′end of the antisense strand has a 5′ phosphate group and the 3′end of the sense strand contains a 3′hydroxyl group. In other aspects, there are none, one or 2 nucleotide overhangs at the 3′end of each strand.

[0238] Each strand of an siRNA duplex targeting a gene of interest may be about 19 to 25, 19 to 24 or 19 to 21 nucleotides in length, preferably about 19 nucleotides, 20 nucleotides, 21 nucleotides, 22 nucleotides, 23 nucleotides, 24 nucleotides, or 25 nucleotides in length.

[0239] In certain embodiments, an siRNA or dsRNA includes at least two sequences that are complementary to each other. The dsRNA includes a sense strand having a first sequence and an antisense strand having a second sequence. The antisense strand includes a nucleotide sequence that is substantially complementary to at least part of an mRNA encoding the target gene, and the region of complementarity is 30 nucleotides or less, and at least 15 nucleotides in length. Generally, the dsRNA is 19 to 25, 19 to 24 or 19 to 21 nucleotides in length. In some embodiments, the dsRNA is from about 15 to about 25 nucleotides in length, and in other embodiments the dsRNA is from about 25 to about 30 nucleotides in length. In some embodiments, the dsRNA is about 15 nucleotides in length, 16 nucleotides in length, 17 nucleotides in length, 18 nucleotides in length, 19 nucleotides, 20 nucleotides, 21 nucleotides, 22 nucleotides, 23 nucleotides, 24 nucleotides, 25 nucleotides in length, 26 nucleotides in length, 27 nucleotides in length, 28 nucleotides in length, 29 nucleotides in length, or 30 nucleotides in length.

[0240] The dsRNA, whether directly administered or encoded in a viral genome in an AAV particle, upon contacting with a cell expressing the target protein, inhibits the expression of the protein by at least 10%, at least 20%, at least 25%, at least 30%, at least 35% or at least 40% or more, such as when assayed by a method known in the art.

[0241] In certain embodiments, the RNAi agent may be used to reduce the expression of target protein by at least about 30%, 40%, 50%, 60%, 70%, 80%, 85%, 90%, 95% and 100%, or at least 20-30%, 20-40%, 20-50%, 20-60%, 20-70%, 20-80%, 20-90%, 20-95%, 20-100%, 30-40%, 30-50%, 30-60%, 30-70%, 30-80%, 30-90%, 30-95%, 30-100%, 40-50%, 40-60%, 40-70%, 40-80%, 40-90%, 40-95%, 40-100%, 50-60%, 50-70%, 50-80%, 50-90%, 50-95%, 50-100%, 60-70%, 60-80%, 60-90%, 60-95%, 60-100%, 70-80%, 70-90%, 70-95%, 70-100%, 80-90%, 80-95%, 80-100%, 90-95%, 90-100% or 95-100%. As a non-limiting example, the expression of target protein expression may be reduced 50-90%.

[0242] In certain embodiments, the RNAi agent may be used to reduce the expression of target mRNA by at least about 30%, 40%, 50%, 60%, 70%, 80%, 85%, 90%, 95% and 100%, or at least 20-30%, 20-40%, 20-50%, 20-60%, 20-70%, 20-80%, 20-90%, 20-95%, 20-100%, 30-40%, 30-50%, 30-60%, 30-70%, 30-80%, 30-90%, 30-95%, 30-100%, 40-50%, 40-60%, 40-70%, 40-80%, 40-90%, 40-95%, 40-100%, 50-60%, 50-70%, 50-80%, 50-90%, 50-95%, 50-100%, 60-70%, 60-80%, 60-90%, 60-95%, 60-100%, 70-80%, 70-90%, 70-95%, 70-100%, 80-90%, 80-95%, 80-100%, 90-95%, 90-100% or 95-100%. As a non-limiting example, the expression of target mRNA expression may be reduced 50-90%.

[0243] In certain embodiments, RNAi agent may be used to reduce the expression of target protein and/or mRNA in at least one region of the CNS. The expression of target protein and/or mRNA is reduced by at least about 30%, 40%, 50%, 60%, 70%, 80%, 85%, 90%, 95% and 100%, or at least 20-30%, 20-40%, 20-50%, 20-60%, 20-70%, 20-80%, 20-90%, 20-95%, 20-100%, 30-40%, 30-50%, 30-60%, 30-70%, 30-80%, 30-90%, 30-95%, 30-100%, 40-50%, 40-60%, 40-70%, 40-80%, 40-90%, 40-95%, 40-100%, 50-60%, 50-70%, 50-80%, 50-90%, 50-95%, 50-100%, 60-70%, 60-80%, 60-90%, 60-95%, 60-100%, 70-80%, 70-90%, 70-95%, 70-100%, 80-90%, 80-95%, 80-100%, 90-95%, 90-100% or 95-100% in at least one region of the CNS. As a non-limiting example, the expression of target protein and mRNA in neurons (e.g., cortical neurons) is reduced by 50-90%. As a non-limiting example, the expression of target protein and mRNA in neurons (e.g., cortical neurons) is reduced by 40-50%.

[0244] In some embodiments, the AAV particle of the present disclosure comprising a viral genome encoding at least one RNAi agent targeting a gene of interest is administered to a subject in need for treating and/or ameliorating a disease, e.g., a neurological disorder of any disease associated with the central or peripheral nervous systems.

[0245] In certain embodiments, the RNAi agent is an siRNA.

Design of siRNA

[0246] AAV particles of the present disclosure may comprise a viral genome encoding one or more siRNA molecules (e.g., siRNA duplexes or encoded dsRNA) that are specifically designed to target a gene of interest and suppress target gene expression and protein production. In some aspects, the siRNA molecules are designed and used to selectively “knock out” target gene variants in cells, i.e., transcripts that are identified in neurological disease. In some aspects, the siRNA molecules are designed and used to selectively “knock down” target gene variants in cells.

[0247] In some embodiments, siRNA molecules targeting a gene of interest may be designed using any available design tools.

[0248] Some guidelines for designing siRNAs (for insertion into a viral genome of the AAV particles of the disclosure) have been proposed in the art. These guidelines generally recommend generating a 19-nucleotide duplexed region, symmetric 2-3 nucleotide 3′overhangs, 5-phosphate and 3-hydroxyl groups targeting a region in the gene to be silenced. Other rules that may govern siRNA sequence preference include, but are not limited to, (i) A/U at the 5′ end of the antisense strand: (ii) G/C at the 5′ end of the sense strand: (iii) at least five A/U residues in the 5′ terminal one-third of the antisense strand; and (iv) the absence of any GC stretch of more than 9 nucleotides in length. In accordance with such considerations, together with the specific sequence of a target gene, highly effective siRNA molecules essential for suppressing mammalian target gene expression may be readily designed.

[0249] In certain embodiments, the sense and/or antisense strand is designed based on the method and rules outlined in European Patent Publication No. EP1752536, the contents of which are herein incorporated by reference in their entirety. As a non-limiting example, the 3′-terminal base of the sequence is adenine, thymine or uracil. As a non-limiting example, the 5′-terminal base of the sequence is guanine or cytosine. As a non-limiting example, the 3′-terminal sequence comprises seven bases rich in one or more bases of adenine, thymine and uracil.

[0250] In certain embodiments, an siRNA molecule comprises a sense strand and a complementary antisense strand in which both strands are hybridized together to form a duplex structure. The antisense strand has sufficient complementarity to the target mRNA sequence to direct target-specific RNAi, i.e., the siRNA molecule has a sequence sufficient to trigger the destruction of the target mRNA by the RNAi machinery or process.

[0251] In some embodiments, the antisense strand and target mRNA sequences have 100% complementarity. The antisense strand may be complementary to any part of the target mRNA sequence. Neither the identity of the sense sequence nor the homology of the antisense sequence need be 100% complementary to the target.

[0252] In other embodiments, the antisense strand and target mRNA sequences comprise at least one mismatch. As a non-limiting example, the antisense strand and the target mRNA sequence have at least 30%, 40%, 50%, 60%, 70%, 80%, 81%, 82%, 83%, 84%, 85%, 86%, 87%, 88%, 89%, 90%, 91%, 92%, 93%, 94%, 95%, 96%, 97%, 98% or 99% or at least 20-30%, 20-40%, 20-50%, 20-60%, 20-70%, 20-80%, 20-90%, 20-95%, 20-99%, 30-40%, 30-50%, 30-60%, 30-70%, 30-80%, 30-90%, 30-95%, 30-99%, 40-50%, 40-60%, 40-70%, 40-80%, 40-90%, 40-95%, 40-99%, 50-60%, 50-70%, 50-80%, 50-90%, 50-95%, 50-99%, 60-70%, 60-80%, 60-90%, 60-95%, 60-99%, 70-80%, 70-90%, 70-95%, 70-99%, 80-90%, 80-95%, 80-99%, 90-95%, 90-99% or 95-99% complementary.

[0253] The siRNA molecule may have a length from about 10-50 or more nucleotides, i.e., each strand comprising 10-50 nucleotides (or nucleotide analogs). Preferably, the siRNA molecule has a length from about 15-30, e.g., 15, 16, 17, 18, 19, 20, 21, 22, 23, 24, 25, 26, 27, 28, 29, or 30 nucleotides in each strand, wherein one of the strands is sufficiently complementary to a target region. In certain embodiments, the siRNA molecule has a length from about 19 to 25, 19 to 24 or 19 to 21 nucleotides.

[0254] In some embodiments, the siRNA molecule can be a synthetic RNA duplex comprising about 19 nucleotides to about 25 nucleotides, and two overhanging nucleotides at the 3′-end.

[0255] The siRNA molecule may comprise an antisense sequence and a sense sequence, or a fragment or variant thereof. As a non-limiting example, the antisense sequence and the sense sequence have at least 30%, 40%, 50%, 60%, 70%, 80%, 81%, 82%, 83%, 84%, 85%, 86%, 87%, 88%, 89%, 90%, 91%, 92%, 93%, 94%, 95%, 96%, 97%, 98% or 99% or at least 20-30%, 20-40%, 20-50%, 20-60%, 20-70%, 20-80%, 20-90%, 20-95%, 20-99%, 30-40%, 30-50%, 30-60%, 30-70%, 30-80%, 30-90%, 30-95%, 30-99%, 40-50%, 40-60%, 40-70%, 40-80%, 40-90%, 40-95%, 40-99%, 50-60%, 50-70%, 50-80%, 50-90%, 50-95%, 50-99%, 60-70%, 60-80%, 60-90%, 60-95%, 60-99%, 70-80%, 70-90%, 70-95%, 70-99%, 80-90%, 80-95%, 80-99%, 90-95%, 90-99% or 95-99% complementary.

[0256] The sense and antisense sequences may be completely complementary across a substantial portion of their length. In other embodiments, the sense sequence and antisense sequence may be at least 70, 80, 90, 95 or 99% complementary across independently at least 50, 60, 70, 80, 85, 90, 95, or 99% of the length of the strands.

[0257] In some embodiments, the sense and antisense strands of a siRNA duplex are linked by a short spacer sequence leading to the expression of a stem-loop structure termed short hairpin RNA (shRNA). The hairpin is recognized and cleaved by Dicer, thus generating mature siRNA molecules.

[0258] In some embodiments, the siRNA molecules, as well as associated spacer and/or flanking regions once designed, can be encoded by the viral genome of the AAV particles of the present disclosure, for delivery to a cell.

### Molecular Scaffold

[0259] In certain embodiments, the siRNA molecules may be encoded in a modulatory polynucleotide which also comprises a molecular scaffold. As used herein a “molecular scaffold” is a framework or starting molecule that forms the sequence or structural basis against which to design or make a subsequent molecule.

[0260] In certain embodiments, the modulatory polynucleotide which comprises the payload (e.g., siRNA, miRNA or other RNAi agent described herein) includes a molecular scaffold which comprises at least one 5′ flanking sequence which may be of any length and may be derived in whole or in part from wild type microRNA sequence or be completely artificial. A 3′ flanking sequence may mirror the 5′ flanking sequence in size and origin. Either flanking sequence may be absent. In certain embodiments, both the 5′ and 3′ flanking sequences are absent. The 3′ flanking sequence may optionally contain one or more CNNC motifs, where “N” represents any nucleotide.

[0261] In some embodiments the 5′ and 3′ flanking sequences are the same length.

[0262] In some embodiments the 5′ flanking sequence is from 1-10 nucleotides in length, from 5-15 nucleotides in length, from 10-30 nucleotides in length, from 20-50 nucleotides in length, greater than 40 nucleotides in length, greater than 50 nucleotides in length, greater than 100 nucleotides in length or greater than 200 nucleotides in length.

[0263] In some embodiments, the 5′ flanking sequence may be 1, 2, 3, 4, 5, 6, 7, 8, 9, 10, 11, 12, 13, 14, 15, 16, 17, 18, 19, 20, 21, 22, 23, 24, 25, 26, 27, 28, 29, 30, 31, 32, 33, 34, 35, 36, 37, 38, 39, 40, 41, 42, 43, 44, 45, 46, 47, 48, 49, 50, 51, 52, 53, 54, 55, 56, 57, 58, 59, 60, 61, 62, 63, 64, 65, 66, 67, 68, 69, 70, 71, 72, 73, 74, 75, 76, 77, 78, 79, 80, 81, 82, 83, 84, 85, 86, 87, 88, 89, 90, 91, 92, 93, 94, 95, 96, 97, 98, 99, 100, 101, 102, 103, 104, 105, 106, 107, 108, 109, 110, 111, 112, 113, 114, 115, 116, 117, 118, 119, 120, 121, 122, 123, 124, 125, 126, 127, 128, 129, 130, 131, 132, 133, 134, 135, 136, 137, 138, 139, 140, 141, 142, 143, 144, 145, 146, 147, 148, 149, 150, 151, 152, 153, 154, 155, 156, 157, 158, 159, 160, 161, 162, 163, 164, 165, 166, 167, 168, 169, 170, 171, 172, 173, 174, 175, 176, 177, 178, 179, 180, 181, 182, 183, 184, 185, 186, 187, 188, 189, 190, 191, 192, 193, 194, 195, 196, 197, 198, 199, 200, 201, 202, 203, 204, 205, 206, 207, 208, 209, 210, 211, 212, 213, 214, 215, 216, 217, 218, 219, 220, 221, 222, 223, 224, 225, 226, 227, 228, 229, 230, 231, 232, 233, 234, 235, 236, 237, 238, 239, 240, 241, 242, 243, 244, 245, 246, 247, 248, 249,250, 251, 252, 253, 254, 255, 256, 257, 258, 259, 260, 261, 262, 263, 264, 265, 266, 267, 268, 269, 270, 271, 272, 273, 274, 275, 276, 277, 278, 279, 280, 281, 282, 283, 284, 285, 286, 287, 288, 289, 290, 291, 292, 293, 294, 295, 296, 297, 298, 299, 300, 301, 302, 303, 304, 305, 306, 307, 308, 309,310,311,312,313,314,315,316,317,318,319,320,321,322,323, 324, 325, 326, 327, 328, 329, 330, 331, 332, 333, 334, 335, 336, 337, 338, 339, 340, 341, 342, 343, 344, 345, 346, 347, 348, 349, 350, 351, 352, 353, 354, 355, 356, 357, 358, 359, 360, 361, 362, 363, 364, 365, 366, 367, 368, 369, 370, 371, 372, 373, 374, 375, 376, 377, 378, 379, 380, 381, 382, 383, 384, 385, 386, 387, 388, 389, 390, 391, 392, 393, 394, 395, 396, 397, 398, 399, 400, 401, 402, 403, 404, 405, 406, 407, 408, 409, 410, 411, 412, 413, 414, 415, 416, 417,418, 419,420,421, 422, 423, 424,425, 426, 427, 428,429,430,431, 432, 433, 434, 435, 436, 437, 438, 439, 440, 441, 442, 443, 444, 445, 446, 447, 448, 449. 450, 451, 452, 453, 454, 455, 456, 457, 458, 459, 460, 461, 462, 463, 464, 465, 466, 467, 468, 469, 470, 471, 472, 473, 474, 475, 476, 477, 478, 479, 480, 481, 482, 483,484, 485, 486, 487, 488, 489, 490, 491, 492, 493, 494, 495, 496, 497, 498, 499, or 500 nucleotides in length.

[0264] In certain embodiments, the molecular scaffold comprises at least one 3′ flanking region. As a non-limiting example, the 3′ flanking region may comprise a 3′ flanking sequence which may be of any length and may be derived in whole or in part from wild type microRNA sequence or be a completely artificial sequence.

[0265] In some embodiments the 3′ flanking sequence is from 1-10 nucleotides in length, from 5-15 nucleotides in length, from 10-30 nucleotides in length, from 20-50 nucleotides in length, greater than 40 nucleotides in length, greater than 50 nucleotides in length, greater than 100 nucleotides in length or greater than 200 nucleotides in length.

[0266] In some embodiments, the 3′ flanking sequence may be 1, 2, 3, 4, 5, 6, 7, 8, 9, 10, 11, 12, 13, 14, 15, 16, 17, 18, 19, 20, 21, 22, 23, 24, 25, 26, 27, 28, 29, 30, 31, 32, 33, 34, 35, 36, 37, 38, 39, 40, 41, 42, 43, 44, 45, 46, 47, 48, 49, 50, 51, 52, 53, 54, 55, 56, 57, 58, 59, 60, 61, 62, 63, 64, 65, 66, 67, 68, 69, 70, 71, 72, 73, 74, 75, 76, 77, 78, 79, 80, 81, 82, 83, 84, 85, 86, 87, 88, 89, 90, 91, 92, 93, 94, 95, 96, 97, 98, 99, 100, 101, 102, 103, 104, 105, 106, 107, 108, 109, 110,111,112, 113, 114, 115, 116,117, 118, 119,120, 121, 122, 123,124, 125, 126, 127, 128, 129, 130, 131, 132, 133, 134, 135, 136, 137, 138, 139, 140, 141, 142, 143, 144, 145, 146, 147, 148, 149, 150, 151, 152, 153, 154, 155, 156, 157, 158, 159, 160, 161, 162, 163, 164, 165, 166, 167, 168, 169, 170, 171, 172, 173, 174, 175, 176, 177, 178, 179, 180, 181, 182, 183, 184, 185, 186, 187, 188, 189, 190, 191, 192, 193, 194, 195, 196, 197, 198, 199, 200, 201, 202, 203, 204, 205, 206, 207, 208, 209, 210, 211, 212, 213, 214, 215, 216, 217, 218, 219, 220, 221, 222, 223, 224, 225, 226, 227, 228, 229, 230, 231, 232, 233, 234, 235, 236, 237, 238, 239, 240, 241, 242, 243, 244, 245, 246, 247, 248, 249, 250, 251, 252, 253, 254, 255, 256, 257, 258, 259, 260, 261, 262, 263, 264, 265, 266, 267, 268, 269, 270, 271, 272, 273, 274, 275, 276, 277, 278, 279, 280, 281, 282, 283, 284, 285, 286, 287, 288, 289, 290, 291, 292, 293, 294, 295, 296, 297, 298, 299, 300, 301, 302, 303, 304, 305, 306, 307, 308, 309,310,311,312,313,314,315,316,317,318,319,320,321,322,323, 324, 325, 326, 327, 328, 329, 330, 331, 332, 333, 334, 335, 336, 337, 338, 339, 340, 341, 342, 343, 344, 345, 346, 347, 348, 349, 350, 351, 352, 353, 354, 355, 356, 357, 358, 359, 360, 361, 362, 363, 364, 365, 366, 367, 368, 369, 370, 371, 372, 373, 374, 375, 376, 377, 378, 379, 380, 381, 382, 383, 384, 385, 386, 387, 388, 389, 390, 391, 392, 393, 394, 395, 396, 397, 398, 399, 400, 401, 402, 403, 404, 405, 406, 407, 408, 409, 410, 411, 412, 413. 414, 415, 416, 417, 418, 419, 420, 421, 422, 423, 424, 425, 426, 427, 428, 429,430,431, 432, 433, 434, 435, 436, 437, 438, 439, 440, 441, 442, 443, 444, 445, 446, 447, 448, 449, 450, 451, 452, 453, 454, 455, 456, 457, 458, 459, 460, 461, 462, 463, 464, 465, 466, 467, 468, 469,470, 471, 472, 473, 474,475,476,477,478,479, 480, 481, 482, 483,484,485, 486, 487, 488, 489, 490, 491, 492, 493, 494, 495, 496, 497, 498, 499, or 500 nucleotides in length.

[0267] In some embodiments the 5′ and 3′ flanking sequences are the same sequence. In some embodiments they differ by 2%, 3%, 4%, 5%, 10%, 20% or more than 30% when aligned to each other.

[0268] Forming the stem of a stem loop structure is a minimum of at least one payload sequence. In some embodiments, the payload sequence comprises at least one nucleic acid sequence which is in part complementary or will hybridize to the target sequence. In some embodiments, the payload is an siRNA molecule or fragment of an siRNA molecule.

[0269] In some embodiments, the 5′ arm of the stem loop comprises a sense sequence.

[0270] In some embodiments, the 3′ arm of the stem loop comprises an antisense sequence. The antisense sequence, in some instances, comprises a “G” nucleotide at the 5′ most end.

[0271] In other embodiments, the sense sequence may reside on the 3′ arm while the antisense sequence resides on the 5′ arm of the stem of the stem loop structure.

[0272] Separating the sense and antisense sequence of the stem loop structure is a loop (also known as a loop motif). The loop may be of any length, between 4-30 nucleotides, between 4-20 nucleotides, between 4-15 nucleotides, between 5-15 nucleotides, between 6-12 nucleotides, 6 nucleotides, 7, nucleotides, 8 nucleotides, 9 nucleotides, 10 nucleotides, 11 nucleotides, and/or 12 nucleotides.

[0273] In some embodiments, the loop comprises at least one UGUG motif. In some embodiments, the UGUG motif is located at the 5′ terminus of the loop.

[0274] Spacer regions may be present in the modulatory polynucleotide to separate one or more modules from one another. There may be one or more such spacer regions present.

[0275] In certain embodiments, a spacer region of between 8-20, i.e., 8, 9, 10, 11, 12, 13, 14, 15, 16, 17, 18, 19, or 20 nucleotides may be present between the sense sequence and a flanking sequence.

[0276] In certain embodiments, the spacer is 13 nucleotides and is located between the 5′ terminus of the sense sequence and a flanking sequence. In certain embodiments, a spacer is of sufficient length to form approximately one helical turn of the sequence.

[0277] In certain embodiments, a spacer region of between 8-20, i.e., 8, 9, 10, 11, 12, 13, 14, 15, 16, 17, 18, 19, or 20 nucleotides may be present between the antisense sequence and a flanking sequence.

[0278] In certain embodiments, the spacer sequence is between 10-13, i.e., 10, 11, 12 or 13 nucleotides and is located between the 3′ terminus of the antisense sequence and a flanking sequence. In certain embodiments, a spacer is of sufficient length to form approximately one helical turn of the sequence.

[0279] In certain embodiments, the modulatory polynucleotide comprises in the 5′ to 3′ direction, a 5′ flanking sequence, a 5′ arm, a loop motif, a 3′ arm and a 3′ flanking sequence. As a non-limiting example, the 5′ arm may comprise a sense sequence and the 3′ arm comprises the antisense sequence. In another non-limiting example, the 5′ arm comprises the antisense sequence and the 3′ arm comprises the sense sequence.

[0280] In certain embodiments, the 5′ arm, payload (e.g., sense and/or antisense sequence), loop motif and/or 3′ arm sequence may be altered (e.g., substituting I or more nucleotides, adding nucleotides and/or deleting nucleotides). The alteration may cause a beneficial change in the function of the construct (e.g., increase knock-down of the target sequence, reduce degradation of the construct, reduce off target effect, increase efficiency of the payload, and reduce degradation of the payload).

[0281] In certain embodiments, the molecular scaffold of the modulatory polynucleotides is aligned in order to have the rate of excision of the guide or antisense strand be greater than the rate of excision of the passenger or sense strand. The rate of excision of the guide or passenger strand may be, independently, 1%, 2%, 3%, 4%, 5%, 10%, 15%, 20%, 25%, 30%, 35%, 40%, 45%, 50%, 55%, 60%, 65%, 70%, 75%, 80%, 85%, 90%, 95%, 99% or more than 99%. As a non-limiting example, the rate of excision of the guide strand is at least 80%. As another non-limiting example, the rate of excision of the guide strand is at least 90%.

[0282] In certain embodiments, the rate of excision of the guide strand is greater than the rate of excision of the passenger strand. In one aspect, the rate of excision of the guide strand may be at least 1%, 2%, 3%, 4%, 5%, 10%, 15%, 20%, 25%, 30%, 35%, 40%, 45%, 50%, 55%, 60%, 65%, 70%, 75%, 80%, 85%, 90%, 95%, 99% or more than 99% greater than the passenger strand.

[0283] In certain embodiments, the efficiency of excision of the guide strand is at least 60%, 65%, 70%, 75%, 80%, 85%, 90%, 95%, 99% or more than 99%. As a non-limiting example, the efficiency of the excision of the guide strand is greater than 80%.

[0284] In certain embodiments, the efficiency of the excision of the guide strand is greater than the excision of the passenger strand from the molecular scaffold. The excision of the guide strand may be 2, 3, 4, 5, 6, 7, 8, 9, 10 or more than 10 times more efficient than the excision of the passenger strand from the molecular scaffold.

[0285] In certain embodiments, the molecular scaffold comprises a dual-function targeting modulatory polynucleotide. As used herein, a “dual-function targeting” modulatory polynucleotide is a polynucleotide where both the guide and passenger strands knock down the same target or the guide and passenger strands knock down different targets.

[0286] In certain embodiments, the molecular scaffold may comprise one or more linkers known in the art. The linkers may separate regions or one molecular scaffold from another. As a non-limiting example, the molecular scaffold may be polycistronic.

[0287] In certain embodiments, the modulatory polynucleotide is designed using at least one of the following properties: loop variant, seed mismatch/bulge/wobble variant, stem mismatch, loop variant and basal stem mismatch variant, seed mismatch and basal stem mismatch variant, stem mismatch and basal stem mismatch variant, seed wobble and basal stem wobble variant, or a stem sequence variant.

### AAV Production

[0288] Viral production disclosed herein describes processes and methods for producing AAV particles (with enhanced, improved and/or increased tropism for a target tissue) that may be used to contact a target cell to deliver a payload.

[0289] The present disclosure provides methods for the generation of AAV particles comprising targeting peptides. In certain embodiments, the AAV particles are prepared by viral genome replication in a viral replication cell. Any method known in the art may be used for the preparation of AAV particles. In certain embodiments, AAV particles are produced in mammalian cells (e.g., HEK293). In another embodiment, AAV particles are produced in insect cells (e.g., Sf9)

[0290] Methods of making AAV particles are well known in the art and are described in e.g., U.S. Pat. Nos. 6,204,059, 5,756,283, 6,258,595, 6,261,551, 6,270,996, 6,281,010, 6,365,394, 6,475,769, 6,482,634, 6,485,966, 6,943,019, 6,953,690, 7,022,519, 7,238,526, 7,291,498 and 7,491,508, 5,064,764, 6,194,191. U.S. Pat. Nos. 6,566,118, 8,137,948; or International Publication Nos. WO1996039530, WO1998010088, WO1999014354, WO1999015685, WO1999047691, WO2000055342, WO2000075353 and WO2001023597; Methods In Molecular Biology, ed. Richard, Humana Press, NJ (1995); O'Reilly et al., Baculovirus Expression Vectors, A Laboratory Manual. Oxford Univ. Press (1994); Samulski et al., J. Vir. 63:3822-8 (1989); Kajigaya et al., Proc. Nat'l. Acad. Sci. USA 88: 4646-50 (1991); Ruffing et al., J. Vir. 66:6922-30 (1992); Kimbauer et al., Vir., 219:37-44 (1996); Zhao et al., Vir. 272:382-93 (2000); the contents of each of which are herein incorporated by reference in their entirety. In certain embodiments, the AAV particles are made using the methods described in International Patent Publication WO2015191508, the contents of which are herein incorporated by reference in their entirety.

[0291] The viral replication cell may be selected from any biological organism, including prokaryotic (e.g., bacterial) cells, and eukaryotic cells, including, insect cells, yeast cells and mammalian cells. Viral replication cells commonly used for production of recombinant AAV viral particles include, but are not limited to, HEK293 cells, COS cells, HeLa cells, KB cells, and other mammalian cell lines as described in U.S. Pat. Nos. 6,156,303, 5,387,484, 5,741,683, 5,691,176, and 5,688,676; U.S. Patent Application Publication No. 2002/0081721, and International Patent Publication Nos. WO 2000047757, WO 2000024916, and WO 1996017947, the contents of each of which are herein incorporated by reference in their entirety. Viral replication cells may comprise other mammalian cells such as A549. WEH1, 3T3, 10T1/2, BHK, MDCK, COS 1, COS 7, BSC 1, BSC 40, BMT 10, VERO, W138, Saos, C2C12, L cells, HT1080, HepG2 and primary fibroblast, hepatocyte and myoblast cells derived from mammals. Viral replication cells may comprise cells derived from mammalian species including, but not limited to, human, monkey, mouse, rat, rabbit, and hamster. Viral replication cells may comprise cells derived from a cell type, including but not limited to fibroblast, hepatocyte, tumor cell, cell line transformed cell, etc.

[0292] In some embodiments, the present disclosure provides a method for producing an AAV particle in mammalian cells, comprising the steps of 1) simultaneously co-transfecting mammalian cells, such as, but not limited to HEK293 cells, with a viral genome comprising a payload region (payload construct), a viral genome comprising polynucleotide sequences for rep and cap genes (rep/cap construct) and a viral genome comprising polynucleotide sequences encoding helper components (helper construct), 2) harvesting and purifying the AAV particles comprising a viral genome. This triple transfection method of AAV particle production may be utilized to produce small lots of virus.

[0293] In certain embodiments, the AAV particles may be produced in a viral replication cell that comprises an insect cell.

[0294] Growing conditions for insect cells in culture, and production of heterologous products in insect cells in culture are well-known in the art, see U.S. Pat. No. 6,204,059, the contents of which are herein incorporated by reference in their entirety.

[0295] Any insect cell which allows for replication of parvovirus and which can be maintained in culture can be used in accordance with the present disclosure. Cell lines may be used from Spodoptera frugiperda, including, but not limited to the Sf9 or Sf21 cell lines, Drosophila cell lines, or mosquito cell lines, such as Aedes albopictus derived cell lines. Use of insect cells for expression of heterologous proteins is well documented, as are methods of introducing nucleic acids, such as vectors, e.g., insect-cell compatible vectors, into such cells and methods of maintaining such cells in culture. See, for example, Methods in Molecular Biology, ed. Richard, Humana Press, NJ (1995): O'Reilly et al., Baculovirus Expression Vectors, A Laboratory Manual, Oxford Univ. Press (1994): Samulski et al., J. Vir. 63:3822-8 (1989): Kajigaya et al., Proc. Nat'l. Acad. Sci. USA 88: 4646-50 (1991); Ruffing et al., J. Vir. 66:6922-30 (1992); Kimbauer et al., Vir. 219:37-44 (1996); Zhao et al., Vir. 272:382-93 (2000); and Samulski et al., U.S. Pat. No. 6,204,059, the contents of each of which is herein incorporated by reference in its entirety.

[0296] In some embodiments, the present disclosure provides a method for producing an AAV particle in a baculovirus/Sf9 system, comprising the steps of: 1) co-transfecting competent bacterial cells with a bacmid vector and either a viral construct vector and/or AAV payload construct vector, 2) isolating the resultant viral construct expression vector and AAV payload construct expression vector and separately transfecting viral replication cells, 3) isolating and purifying resultant payload and viral construct particles comprising viral construct expression vector or AAV payload construct expression vector, 4) co-infecting a viral replication cell with both the AAV payload and viral construct particles comprising viral construct expression vector or AAV payload construct expression vector, and 5) harvesting and purifying AAV particles comprising a viral genome.

[0297] Briefly, the viral construct vector and the AAV payload construct vector are each incorporated by a transposon donor/acceptor system into a bacmid, also known as a baculovirus plasmid, by standard molecular biology techniques known and performed by a person skilled in the art. Transfection of separate viral replication cell populations produces two baculoviruses, one that comprises the viral construct expression vector, and another that comprises the AAV payload construct expression vector. The two baculoviruses may be used to infect a single viral replication cell population for production of AAV particles.

[0298] Baculovirus expression vectors for producing viral particles in insect cells, including but not limited to Spodoptera frugiperda (Sf9) cells, provide high titers of viral particle product. Recombinant baculovirus encoding the viral construct expression vector and AAV payload construct expression vector initiates a productive infection of viral replicating cells. Infectious baculovirus particles released from the primary infection secondarily infect additional cells in the culture, exponentially infecting the entire cell culture population in a number of infection cycles that is a function of the initial multiplicity of infection, see Urabe, M, el al., J Virol. 2006 February; 80 (4):1874-85, the contents of which are herein incorporated by reference in their entirety.

[0299] Production of AAV particles with baculovirus in an insect cell system may address known baculovirus genetic and physical instability. In certain embodiments, the production system addresses baculovirus instability over multiple passages by utilizing a titerless infected-cells preservation and scale-up system. Small scale seed cultures of viral producing cells are transfected with viral expression constructs encoding the structural, non-structural, components of the viral particle. Baculovirus-infected viral producing cells are harvested into aliquots that may be cryopreserved in liquid nitrogen; the aliquots retain viability and infectivity for infection of large scale viral producing cell culture Wasilko D J et al., Protein Expr Purif, 2009 June; 65(2):122-32, the contents of which are herein incorporated by reference in their entirety.

[0300] A genetically stable baculovirus may be used as the source of one or more of the components for producing AAV particles in invertebrate cells. In certain embodiments, defective baculovirus expression vectors may be maintained episomally in insect cells. In such an embodiment the bacmid vector is engineered with replication control elements, including but not limited to promoters, enhancers, and/or cell-cycle regulated replication elements.

[0301] In certain embodiments, stable viral replication cells permissive for baculovirus infection are engineered with at least one stable integrated copy of any of the elements necessary for AAV replication and viral particle production including, but not limited to, the entire AAV genome, Rep and Cap genes, Rep genes, Cap genes, each Rep protein as a separate transcription cassette, each VP protein as a separate transcription cassette, the AAP (assembly activation protein), or at least one of the baculovirus helper genes with native or non-native promoters.

[0302] AAV particles described herein may be produced by triple transfection or baculovirus mediated virus production, or any other method known in the art. Any suitable permissive or packaging cell known in the art may be employed to produce the particles. Mammalian cells are often preferred. Also preferred are trans-complementing packaging cell lines that provide functions deleted from a replication-defective helper virus, e.g., 293 cells or other E1a trans-complementing cells. A packaging cell line may be used that is stably transformed to express cap and/or rep genes. Alternatively, a packaging cell line may be used that is stably transformed to express helper constructs necessary for AAV particle assembly.

[0303] Recombinant AAV virus particles are, in some cases, produced and purified from culture supernatants according to the procedure as described in US20160032254, the contents of which are incorporated by reference.

[0304] In certain embodiments, AAV particles are produced wherein all three VP proteins are expressed at a stoichiometry around 1:1:10 (VP1:VP2:VP3). While not wishing to be bound by theory, the regulatory mechanisms that allow this controlled level of expression include the production of two mRNAs, one for VP1, and the other for VP2 and VP3, produced by differential splicing.

[0305] In certain embodiments, the viral construct vector(s) used for AAV production may contain a nucleotide sequence encoding the AAV capsid proteins where the initiation codon of the AAV VP1 capsid protein is a non-ATG, i.e., a suboptimal initiation codon, allowing the expression of a modified ratio of the viral capsid proteins in the production system, to provide improved infectivity of the host cell. In a non-limiting example, a viral construct vector may contain a nucleic acid construct comprising a nucleotide sequence encoding AAV VP1, VP2, and VP3 capsid proteins, wherein the initiation codon for translation of the AAV VP1 capsid protein is CTG. TTG, or GTG, as described in U.S. Pat. No. 8,163,543, the contents of which are herein incorporated by reference in its entirety.

[0306] In certain embodiments, the viral construct vector(s) used for AAV production may contain a nucleotide sequence encoding the AAV rep proteins where the initiation codon of the AAV rep protein or proteins is a non-ATG. In certain embodiments, a single coding sequence is used for the Rep78 and Rep52 proteins, wherein initiation codon for translation of the Rep78 protein is a suboptimal initiation codon, selected from the group consisting of ACG, TTG, CTG and GTG, that effects partial exon skipping upon expression in insect cells, as described in U.S. Pat. No. 8,512,981, the contents of which is herein incorporated by reference in its entirety, for example to promote less abundant expression of Rcp78 as compared to Rep52, which may be advantageous in that it promotes high vector yields. Small-scale production

[0307] In some cases, 293T cells (adhesion/suspension) are transfected with polyethyleneimine (PEI) with plasmids required for production of AAV, i.e., AAV2 rep, an adenoviral helper construct and a ITR flanked payload cassette. The AAV2 rep plasmid also contains the cap sequence of the particular virus being studied. Twenty-four hours after transfection (no medium changes for suspension), which occurs in DMEM/F17 with/without serum, the medium is replaced with fresh medium with or without serum. Three (3) days after transfection, a sample is taken from the culture medium of the 293 adherent cells. Subsequently cells are scraped, or suspension cells are pelleted, and transferred into a receptacle. For adhesion cells, after centrifugation to remove cellular pellet, a second sample is taken from the supernatant after scraping. Next, cell lysis is achieved by three consecutive freeze-thaw cycles (−80 C to 37 C) or adding detergent triton. Cellular debris is removed by centrifugation or depth filtration and sample 3 is taken from the medium. The samples are quantified for AAV particles by DNase resistant genome titration by DNA qPCR. The total production yield from such a transfection is equal to the particle concentration from sample 3.

[0308] AAV particle titers are measured according to genome copy number (genome particles per milliliter). Genome particle concentrations are based on DNA qPCR of the vector DNA as previously reported (Clark et al. (1999) Hum. Gene Ther., 10:1031-1039; Veldwijk et al. (2002) Mol. Ther., 6:272-278).

### Large-Scale Production

[0309] In some embodiments. AAV particle production may be modified to increase the scale of production. Large scale viral production methods according to the present disclosure may include any of those taught in U.S. Pat. Nos. 5,756,283, 6,258,595, 6,261,551, 6,270,996, 6,281,010, 6,365,394, 6,475,769, 6,482,634, 6,485,966, 6,943,019, 6,953,690, 7,022,519, 7,238,526, 7,291,498 and 7,491,508 or International Publication Nos. WO1996039530, WO1998010088, WO1999014354, WO1999015685, WO1999047691, WO2000055342, WO2000075353 and WO2001023597, the contents of each of which are herein incorporated by reference in their entirety. Methods of increasing viral particle production scale typically comprise increasing the number of viral replication cells. In some embodiments, viral replication cells comprise adherent cells. To increase the scale of viral particle production by adherent viral replication cells, larger cell culture surfaces are required. In some cases, large-scale production methods comprise the use of roller bottles to increase cell culture surfaces. Other cell culture substrates with increased surface areas are known in the art. Examples of additional adherent cell culture products with increased surface areas include, but are not limited to CELLSTACK®, CELLCUBE® (Corning Corp., Corning, N.Y.) and NUNC™ CELL FACTORY™ (Thermo Scientific, Waltham, Mass.). In some cases, large-scale adherent cell surfaces may comprise from about 1,000 cm² to about 100,000 cm². In some cases, large-scale adherent cell cultures may comprise from about 10⁷ to about 10⁹ cells, from about 1 to about 10¹⁰ cells, from about 10⁹ to about 10¹² cells or at least 10¹² cells. In some cases, large-scale adherent cultures may produce from about 10⁹ to about 10¹², from about 10¹⁰ to about 10¹³, from about 10¹¹ to about 10¹⁴, from about 10¹² to about 10¹⁵ or at least 10¹⁵ viral particles.

[0310] In some embodiments, large-scale viral production methods of the present disclosure may comprise the use of suspension cell cultures. Suspension cell culture allows for significantly increased numbers of cells. Typically, the number of adherent cells that can be grown on about 10-50 cm² of surface area can be grown in about 1 cm³ volume in suspension.

[0311] Transfection of replication cells in large-scale culture formats may be carried out according to any methods known in the art. For large-scale adherent cell cultures, transfection methods may include, but are not limited to the use of inorganic compounds (e.g. calcium phosphate), organic compounds [e.g. polyethyleneimine (PEI)] or the use of non-chemical methods (e.g. electroporation.) With cells grown in suspension, transfection methods may include, but are not limited to the use of calcium phosphate and the use of PEI. In some cases, transfection of large scale suspension cultures may be carried out according to the section entitled “Transfection Procedure” described in Feng, L, el al., 2008. Biotechnol Appl. Biochem. 50:121-32, the contents of which are herein incorporated by reference in their entirety. According to such embodiments, PEI-DNA complexes may be formed for introduction of plasmids to be transfected. In some cases, cells being transfected with PEI-DNA complexes may be ‘shocked’ prior to transfection. This comprises lowering cell culture temperatures to 4° C. for a period of about 1 hour. In some cases, cell cultures may be shocked for a period of from about 10 minutes to about 5 hours. In some cases, cell cultures may be shocked at a temperature of from about 0° C. to about 20° C.

[0312] In some cases, transfections may include one or more vectors for expression of an RNA effector molecule to reduce expression of nucleic acids from one or more AAV payload constructs. Such methods may enhance the production of viral particles by reducing cellular resources wasted on expressing payload constructs. In some cases, such methods may be carried out according to those methods taught in US Publication No. US2014/0099666, the contents of which are herein incorporated by reference in their entirety.

### III. Methods and Uses of the Compositions of the Disclosure

[0313] The AAV particles of the present disclosure, having enhanced tropism for a desired target tissue, may be used for the delivery of a payload to the target tissue. In certain embodiments the payload is a polypeptide. In a second embodiment, the payload is an antibody. In a third embodiment, the payload is an RNAi agent and/or modulatory polynucleotide. The AAV particles of the present disclosure may be delivered by intravenous injection or infusion for the targeting of CNS and/or PNS tissues (e.g., neurons. DRG).

[0314] The AAV particles of the present disclosure may be used for regulating expression of a gene of interest (or its protein product) in a cell, tissue, organ or subject.

[0315] In accordance with the present disclosure, methods for increasing expression of a target protein in a cell, tissue, organ or subject are provided; the method comprising administering to the cell, tissue, organ or subject an effective amount of the AAV particles of the disclosure comprising a viral genome with a payload region encoding the target protein.

[0316] Accordingly, the target protein may be increased by at least about 10%, preferably by at least about 10%, 30%, 40%, 50%, 60%, 70%, 80%, 85%, 90%, 95% and 100%, or at least 20-30%, 20-40%, 20-50%, 20-60%, 20-70%, 20-80%, 20-90%, 20-95%, 20-100%, 30-40%, 30-50%, 30-60%, 30-70%, 30-80%, 30-90%, 30-95%, 30-100%, 40-50%, 40-60%, 40-70%, 40-80%, 40-90%, 40-95%, 40-100%, 50-60%, 50-70%, 50-80%, 50-90%, 50-95%, 50-100%, 60-70%, 60-80%, 60-90%, 60-95%, 60-100%, 70-80%, 70-90%, 70-95%, 70-100%, 80-90%, 80-95%, 80-100%, 90-95%, 90-100% or 95-100%.

[0317] In certain embodiments, the AAV particles of the present disclosure may be used to increase the expression of a target protein in a cell of the CNS, such as a neuron, astrocyte, microglial cell, and/or oligodendrocyte. In some embodiments, the gene may encode a protein including, but not limited to, an antibody, aromatic L-amino acid decarboxylase (AADC), survival motor neuron 1 (SMN1), frataxin (FXN), APOE (APOE2, APOE3, or APOE4), GBA1, GRN, ASPA, CLN2, GLB1, SGSH, NAGLU, IDS, NPC1, or GAN.

[0318] In accordance with the present disclosure, methods for decreasing, inhibiting or suppressing the expression of a target gene or protein in a cell, tissue, organ or subject are also provided; the method comprising administering to the cell, tissue, organ or subject an effective amount of the AAV particles of the disclosure comprising a viral genome with a payload region encoding an RNAi agent and/or modulatory polynucleotide.

[0319] Accordingly, the RNAi agent may be, but is not limited to, dsRNA, siRNA, shRNA, pre-miRNA, pri-miRNA, miRNA, stRNA, lncRNA, piRNA, or snoRNA specific for a target gene of interest. Non-limiting examples of a target gene of interest include, SOD1, MAPT, APOE, HTT. C90RF72, TDP-43, APP. BACE. SNCA, ATXN1, ATXN2, ATXN3. ATXN7, SCN1A-SCN5A, or SCN8A-SCN11A.

[0320] In some embodiments, the present disclosure provides methods for inhibiting/silencing target gene expression in a cell. Accordingly, the RNAi agent can be used to substantially inhibit target gene expression in a cell, such as but not limited to, in astrocytes, microglia, or cortical, hippocampal, entorhinal, thalamic, motor or sensory neurons. In some aspects, the inhibition of target gene expression refers to an inhibition by at least about 20%, such as by at least about 30%, 40%, 50%, 60%, 70%, 80%, 85%, 90%, 95% and 100%, or at least 20-30%, 20-40%, 20-50%, 20-60%, 20-70%, 20-80/o, 20-90/o, 20-95%, 20-100%, 30-40%, 30-50%, 30-60%, 30-70%, 30-80%, 30-90%, 30-95%, 30-100%, 40-50%, 40-60%, 40-70%, 40-80%, 40-90%, 40-95%, 40-100%, 50-60%, 50-70%, 50-80%, 50-90%, 50-95%, 50-100%, 60-70%, 60-80%, 60-90%, 60-95%, 60-100%, 70-80%, 70-90%, 70-95%, 70-100%, 80-90%, 80-95%, 80-100%, 90-95%, 90-100% or 95-100%. Accordingly, the protein product of the targeted gene may be inhibited by at least about 20%, preferably by at least about 30%, 40%, 50%, 60%, 70/, 80%, 85%, 90%, 95% and 100%, or at least 20-30%, 20-40%, 20-50%, 20-60%, 20-70%, 20-80%, 20-90%, 20-95%, 20-100%, 30-40%, 30-50%, 30-60%, 30-70%, 30-80%, 30-90%, 30-95%, 30-100%, 40-50%, 40-60%, 40-70%, 40-80%, 40-90%, 40-95%, 40-100%, 50-60%, 50-70%, 50-80%, 50-90%, 50-95%, 50-100%, 60-70%, 60-80%, 60-90%, 60-95%, 60-100%, 70-80%, 70-90%, 70-95%, 70-100%, 80-90%, 80-95%, 80-100%, 90-95%, 90-100% or 95-100%.

[0321] In some embodiments, the gene to be inhibited may include but is not limited to SOD1, MAPT, APOE, HTT, C90RF72, TDP-43, APP, BACE, SNCA, ATXN1, ATXN2, ATXN3, ATXN7, SCN1A-SCN5A, or SCN8A-SCN11A.

### Therapeutic Applications

[0322] The present disclosure provides a method for treating a disease, disorder and/or condition in a mammalian subject, including a human subject, comprising administering to the subject any of the AAV particles described herein or administering to the subject any of the described compositions, including pharmaceutical compositions, described herein.

[0323] In certain embodiments, the AAV particles of the present disclosure are administered to a subject prophylactically, to prevent on-set of disease. In another embodiment, the AAV particles of the present disclosure are administered to treat (lessen the effects of) a disease or symptoms thereof. In yet another embodiment, the AAV particles of the present disclosure are administered to cure (eliminate) a disease. In another embodiment, the AAV particles of the present disclosure are administered to prevent or slow progression of disease. In yet another embodiment, the AAV particles of the present disclosure are used to reverse the deleterious effects of a disease. Disease status and/or progression may be determined or monitored by standard methods known in the art.

[0324] In some embodiments, the AAV particles of the disclosure are useful in the field of medicine for the treatment, prophylaxis, palliation or amelioration of neurological diseases and/or disorders.

[0325] In some embodiments, the AAV particles of the disclosure are useful in the field of medicine for the treatment, prophylaxis, palliation or amelioration of tauopathy.

[0326] In some embodiments, the AAV particles of the disclosure are useful in the field of medicine for the treatment, prophylaxis, palliation or amelioration of Alzheimer's Disease.

[0327] In some embodiments, the AAV particles of the disclosure are useful in the field of medicine for the treatment, prophylaxis, palliation or amelioration of Friedreich's ataxia, or any disease stemming from a loss or partial loss of frataxin protein.

[0328] In some embodiments, the AAV particles of the disclosure are useful in the field of medicine for the treatment, prophylaxis, palliation or amelioration of Parkinson's Disease.

[0329] In some embodiments, the AAV particles of the disclosure are useful in the field of medicine for the treatment, prophylaxis, palliation or amelioration of Amyotrophic lateral sclerosis.

[0330] In some embodiments, the AAV particles of the disclosure are useful in the field of medicine for the treatment, prophylaxis, palliation or amelioration of Huntington's Disease.

[0331] In some embodiments, the AAV particles of the disclosure are useful in the field of medicine for the treatment, prophylaxis, palliation or amelioration of chronic or neuropathic pain.

[0332] In some embodiments, the AAV particles of the disclosure are useful in the field of medicine for treatment, prophylaxis, palliation or amelioration of a disease associated with the central nervous system.

[0333] In some embodiments, the AAV particles of the disclosure are useful in the field of medicine for treatment, prophylaxis, palliation or amelioration of a disease associated with the peripheral nervous system.

[0334] In certain embodiments, the AAV particles of the present disclosure are administered to a subject having at least one of the diseases or symptoms described herein.

[0335] As used herein, any disease associated with the central or peripheral nervous system and components thereof (e.g., neurons) may be considered a “neurological disease”.

[0336] Any neurological disease may be treated with the AAV particles of the disclosure, or pharmaceutical compositions thereof, including but not limited to, Absence of the Septum Pellucidum, Acid Lipase Disease, Acid Maltase Deficiency, Acquired Epileptiform Aphasia, Acute Disseminated Encephalomyelitis, Attention Deficit-Hyperactivity Disorder (ADHD), Adie's Pupil, Adie's Syndrome, Adrenoleukodystrophy, Agenesis of the Corpus Callosum, Agnosia, Aicardi Syndrome, Aicardi-Goutieres Syndrome Disorder. AIDS—Neurological Complications, Alexander Disease, Alpers' Disease, Alternating Hemiplegia, Alzheimer's Disease, Amyotrophic Lateral Sclerosis (ALS). Anencephaly. Aneurysm, Angelman Syndrome, Angiomatosis, Anoxia, Antiphospholipid Syndrome, Aphasia, Apraxia, Arachnoid Cysts, Arachnoiditis, Amold-Chiari Malformation, Arteriovenous Malformation, Asperger Syndrome, Ataxia, Ataxia Telangiectasia, Ataxias and Cerebellar or Spinocerebellar Degeneration, Atrial Fibrillation and Stroke, Attention Deficit-Hyperactivity Disorder, Autism Spectrum Disorder. Autonomic Dysfunction, Back Pain, Barth Syndrome, Batten Disease, Becker's Myotonia, Bechet's Disease, Bell's Palsy, Benign Essential Blepharospasm, Benign Focal Amyotrophy, Benign Intracranial Hypertension, Bernhardt-Roth Syndrome. Binswanger's Disease, Blepharospasm, Bloch-Sulzberger Syndrome. Brachial Plexus Birth Injuries, Brachial Plexus Injuries, Bradbury-Eggleston Syndrome, Brain and Spinal Tumors, Brain Aneurysm, Brain Injury. Brown-Sequard Syndrome. Bulbar palsy, Bulbospinal Muscular Atrophy, Cerebral Autosomal Dominant Arteriopathy with Sub-cortical Infarcts and Leukoencephalopathy (CADASIL), Canavan Disease, Carpal Tunnel Syndrome, Causalgia, Cavemomas, Cavernous Angioma, Cavernous Malformation, Central Cervical Cord Syndrome, Central Cord Syndrome, Central Pain Syndrome, Central Pontine Myelinolysis, Cephalic Disorders, Ceramidase Deficiency, Cerebellar Degeneration. Cerebellar Hypoplasia, Cerebral Aneurysms, Cerebral Arteriosclerosis, Cerebral Atrophy, Cerebral Beriberi, Cerebral Cavemous Malformation, Cerebral Gigantism, Cerebral Hypoxia, Cerebral Palsy. Cerebro-Oculo-Facio-Skeletal Syndrome (COFS), Charcot-Marie-Tooth Disease, Chiari Malformation, Cholesterol Ester Storage Disease, Chorea, Choreoacanthocytosis, Chronic Inflammatory Demyelinating Polyneuropathy (CIDP), Chronic Orthostatic Intolerance, Chronic Pain, Cockayne Syndrome Type II, Coffin Lowry Syndrome, Colpocephaly, Coma, Complex Regional Pain Syndrome, Concentric sclerosis (Balós sclerosis), Congenital Facial Diplegia, Congenital Myasthenia, Congenital Myopathy, Congenital Vascular Cavernous Malformations, Corticobasal Degeneration, Cranial Arteritis, Craniosynostosis, Cree encephalitis. Creutzfeldt-Jakob Disease, Chronic progressive external ophthalmoplegia. Cumulative Trauma Disorders, Cushing's Syndrome, Cytomegalic Inclusion Body Disease, Cytomegalovirus Infection, Dancing Eyes-Dancing Feet Syndrome, Dandy-Walker Syndrome, Dawson Disease, De Morsier's Syndrome, Dejerine-Klumpke Palsy, Dementia, Dementia-Multi-Infarct, Dementia—Semantic, Dementia-Subcortical, Dementia With Lewy Bodies, Demyelination diseases, Dentate Cerebellar Ataxia, Dentatorubral Atrophy, Dermatomyositis, Developmental Dyspraxia, Devic's Syndrome, Diabetic Neuropathy, Diffuse Sclerosis, Distal hereditary motor neuronopathies, Dravet Syndrome, Dysautonomia, Dysgraphia. Dyslexia, Dysphagia, Dyspraxia, Dyssynergia Cerebellaris Myoclonica, Dyssynergia Cerebellaris Progressiva, Dystonias, Early Infantile Epileptic Encephalopathy, Empty Sella Syndrome, Encephalitis, Encephalitis Lethargica, Encephaloceles, Encephalomyelitis, Encephalopathy, Encephalopathy (familial infantile), Encephalotrigeminal Angiomatosis, Epilepsy, Epileptic Hemiplegia, Episodic ataxia, Erb's Palsy, Erb-Duchenne and Dejerine-Klumpke Palsies, Essential Tremor, Extrapontine Myelinolysis, Faber's disease, Fabry Disease, Fahr's Syndrome, Fainting, Familial Dysautonomia, Familial Hemangioma, Familial Idiopathic Basal Ganglia Calcification, Familial Periodic Paralyses, Familial Spastic Paralysis, Farber's Disease, Febrile Seizures, Fibromuscular Dysplasia, Fisher Syndrome, Floppy Infant Syndrome, Foot Drop, Friedreich's Ataxia, Frontotemporal Dementia. Gaucher Disease, Generalized Gangliosidoses (GM1, GM2), Gerstmann's Syndrome, Gerstmann-Straussler-Scheinker Disease, Giant Axonal Neuropathv, Giant Cell Arteritis, Giant Cell Inclusion Disease, Globoid Cell Leukodystrophy, Glossopharyngeal Neuralgia. Glycogen Storage Disease, Guillain-Barr6 Syndrome, Hallervorden-Spatz Disease, Head Injury, Headache, Hemicrania Continua, Hemifacial Spasm, Hemiplegia Alterans, Hereditary Neuropathies, Hereditary Spastic Paraplegia, Heredopathia Atactica Polyneuritiformis, Herpes Zoster, Herpes Zoster Oticus, Hirayama Syndrome, Holmes-Adie syndrome, Holoprosencephaly, HTLV-1 Associated Myelopathy, Hughes Syndrome, Huntington's Disease, Hurler syndrome, Hydranencephaly, Hydrocephalus, Hydrocephalus—Normal Pressure, Hvdromyelia, Hypercortisolism, Hypersomnia, Hypertonia, Hypotonia, Hypoxia, Immune-Mediated Encephalomyelitis, Inclusion Body Myositis, Incontinentia Pigmenti, Infantile Hypotonia, Infantile Neuroaxonal Dystrophy, Infantile Phytanic Acid Storage Disease, Infantile Refsum Disease, Infantile Spasms, Inflammatory Myopathies, Iniencephaly, Intestinal Lipodystrophy, Intracranial Cysts, Intracranial Hypertension. Isaacs' Syndrome, Joubert Syndrome, Kearns-Sayre Syndrome, Kennedv's Disease. Kinsboume syndrome, Kleine-Levin Syndrome, Klippel-Feil Syndrome, Klippel-Trenaunay Syndrome (KTS), Kluver-Bucy Syndrome, Korsakoffs Amnesic Syndrome, Krabbe Disease, Kugelberg-Welander Disease. Kuru, Lambert-Eaton Myasthenic Syndrome, Landau-Kleffner Syndrome, Lateral Femoral Cutaneous Nerve Entrapment, Lateral Medullary Syndrome. Learning Disabilities. Leigh's Disease, Lennox-Gastaut Syndrome, Lesch-Nyhan Syndrome, Leukodystrophy, Levine-Critchley Syndrome, Lewy Body Dementia, Lichtheim's disease. Lipid Storage Diseases, Lipoid Proteinosis, Lissencephaly, Locked-In Syndrome, Lou Gehrig's Disease, Lupus—Neurological Sequelae, Lyme Disease—Neurological Complications, Lysosomal storage disorders, Machado-Joseph Disease, Macrencephaly. Megalencephaly, Melkersson-Rosenthal Syndrome, Meningitis, Meningitis and Encephalitis, Menkes Disease, Meralgia Paresthetica. Metachromatic Leukodystrophy, Microcephaly. Migraine, Miller Fisher Syndrome, Mini Stroke. Mitochondrial Myopathy, Mitochondrial DNA depletion syndromes, Moebius Syndrome, Monomelic Amyotrophy, Morvan Syndrome, Motor Neuron Diseases, Moyamoya Disease, Mucolipidoses, Mucopolysaccharidoses. Multi-Infarct Dementia, Multifocal Motor Neuropathy, Multiple Sclerosis, Multiple System Atrophy, Multiple System Atrophy with Orthostatic Hypotension, Muscular Dystrophy, Myasthenia—Congenital, Myasthenia Gravis, Myelinoclastic Diffuse Sclerosis, Myelitis, Myoclonic Encephalopathy of Infants, Myoclonus, Myoclonus epilepsy, Myopathy, Myopathy-Congenital, Myopathy-Thyrotoxic. Myotonia, Myotonia Congenita, Narcolepsy, NARP (neuropathy, ataxia and retinitis pigmentosa), Neuroacanthocytosis, Neurodegeneration with Brain Iron Accumulation, Neurodegenerative disease, Neurofibromatosis, Neuroleptic Malignant Syndrome, Neurological Complications of AIDS, Neurological Complications of Lyme Disease, Neurological Consequences of Cytomegalovirus Infection, Neurological Manifestations of Pompe Disease, Neurological Sequelac Of Lupus, Neuromyelitis Optica, Neuromyotonia, Neuronal Ceroid Lipofuscinosis, Neuronal Migration Disorders, Neuropathic pain, Neuropathy-Hereditary, Neuropathy, Neurosarcoidosis, Neurosyphilis, Neurotoxicity, Nevus Cavemosus, Niemann-Pick Disease, O'Sullivan-McLeod Syndrome, Occipital Neuralgia, Ohtahara Syndrome, Olivopontocerebellar Atrophy, Opsoclonus Myoclonus, Orthostatic Hypotension, Overuse Syndrome, Pain-Chronic, Pantothenate Kinase-Associated Neurodegeneration, Paraneoplastic Syndromes, Paresthesia, Parkinson's Disease, Paroxysmal Choreoathetosis, Paroxysmal Hemicrania, Parry-Romberg, Pelizaeus-Merzbacher Disease, Pena Shokeir II Syndrome, Perineural Cysts, Peroneal muscular atrophy, Periodic Paralyses, Peripheral Neuropathy, Periventricular Leukomalacia, Persistent Vegetative State, Pervasive Developmental Disorders, Phytanic Acid Storage Disease, Pick's Disease, Pinched Nerve, Piriformis Syndrome, Pituitary Tumors, Polymyositis, Pompe Disease, Porencephaly, Post-Polio Syndrome, Postherpetic Neuralgia, Postinfectious Encephalomyelitis, Postural Hypotension, Postural Orthostatic Tachycardia Syndrome, Postural Tachycardia Syndrome, Primary Dentatum Atrophy, Primary Lateral Sclerosis, Primary Progressive Aphasia, Prion Diseases, Progressive bulbar palsy, Progressive Hemifacial Atrophy, Progressive Locomotor Ataxia, Progressive Multifocal Leukoencephalopathy, Progressive Muscular Atrophy, Progressive Sclerosing Poliodystrophy, Progressive Supranuclear Palsy, Prosopagnosia, Pseudobulbar palsy, Pseudo-Torch syndrome. Pseudotoxoplasmosis syndrome, Pseudotumor Cerebri, Psychogenic Movement, Ramsay Hunt Syndrome I, Ramsay Hunt Syndrome II, Rasmussen's Encephalitis, Reflex Sympathetic Dystrophy Syndrome, Refsum Disease, Refsum Disease—Infantile, Repetitive Motion Disorders, Repetitive Stress Injuries, Restless Legs Syndrome, Retrovirus-Associated Myelopathy, Rett Syndrome, Reye's Syndrome, Rheumatic Encephalitis. Riley-Day Syndrome, Sacral Nerve Root Cysts, Saint Vitus Dance, Salivary Gland Disease, Sandhoff Disease, Schilder's Disease, Schizencephaly, Seitelberger Disease, Seizure Disorder, Semantic Dementia, Septo-Optic Dysplasia. Severe Myoclonic Epilepsy of Infancy (SMEI), Shaken Baby Syndrome, Shingles, Shy-Drager Syndrome, Sjögren's Syndrome. Sleep Apnea. Sleeping Sickness, Sotos Syndrome, Spasticity, Spina Bifida, Spinal Cord Infarction, Spinal Cord Injury, Spinal Cord Tumors. Spinal Muscular Atrophy, Spinocerebellar Ataxia, Spinocerebellar Atrophy, Spinocerebellar Degeneration, Sporadic ataxia. Steele-Richardson-Olszewski Syndrome, Stiff-Person Syndrome, Striatonigral Degeneration, Stroke, Sturge-Weber Syndrome, Subacute Sclerosing Panencephalitis, Subcortical Arteriosclerotic Encephalopathy, Short-lasting, Unilateral, Neuralgiform (SUNCT) Headache, Swallowing Disorders, Sydenham Chorea, Syncope, Syphilitic Spinal Sclerosis, Syringohydromyelia, Syringomyelia, Systemic Lupus Erythematosus, Tabes Dorsalis. Tardive Dyskinesia, Tarlov Cysts, Tay-Sachs Disease, Temporal Arteritis, Tethered Spinal Cord Syndrome, Thomsen's Myotonia, Thoracic Outlet Syndrome, Thyrotoxic Myopathy, Tic Douloureux, Todd's Paralysis, Tourette Syndrome, Transient Ischemic Attack, Transmissible Spongiform Encephalopathies, Transverse Myelitis, Traumatic Brain Injury, Tremor, Trigeminal Neuralgia, Tropical Spastic Paraparesis, Troyer Syndrome, Tuberous Sclerosis, Vascular Erectile Tumor, Vasculitis Syndromes of the Central and Peripheral Nervous Systems, Vitamin B12 deficiency, Von Economo's Disease, Von Hippel-Lindau Disease (VHL), Von Recklinghausen's Disease, Wallenberg's Syndrome, Werdnig-Hoffman Disease, Wemicke-KorsakoffSyndrome, West Syndrome, Whiplash, Whipple's Disease, Williams Syndrome, Wilson Disease, Wolman's Disease, X-Linked Spinal and Bulbar Muscular Atrophy.

### Methods of Treatment of Neurological Disease

### AAV Particles Encoding Protein Payloads

[0337] Provided in the present disclosure are methods for introducing the AAV particles of the present disclosure into cells, the method comprising introducing into said cells any of the vectors in an amount sufficient for an increase in the production of target mRNA and protein to occur. In some aspects, the cells may be neurons such as but not limited to, motor, hippocampal, entorhinal, thalamic, cortical, sensory, sympathetic, or parasympathetic neurons, and glial cells such as astrocytes, microglia, and/or oligodendrocytes.

[0338] Disclosed herein are methods for treating neurological disease associated with insufficient function/presence of a target protein (e.g., ApoE, FXN) in a subject in need of treatment. The method optionally comprises administering to the subject a therapeutically effective amount of a composition comprising AAV particles of the present disclosure. As a non-limiting example, the AAV particles can increase target gene expression, increase target protein production, and thus reduce one or more symptoms of neurological disease in the subject such that the subject is therapeutically treated.

[0339] In certain embodiments, the composition comprising the AAV particles of the present disclosure is administered to the central nervous system of the subject via systemic administration. In certain embodiments, the systemic administration is intravenous injection.

[0340] In some embodiments, the composition comprising the AAV particles of the present disclosure is administered to the central nervous system of the subject. In other embodiments, the composition comprising the AAV particles of the present disclosure is administered to a CNS tissue of a subject (e.g., putamen, thalamus or cortex of the subject).

[0341] In certain embodiments, the composition comprising the AAV particles of the present disclosure is administered to the central nervous system of the subject via intraparenchymal injection. Non-limiting examples of intraparenchymal injections include intraputamenal, intracortical, intrathalamic, intrastriatal, intrahippocampal or into the entorhinal cortex.

[0342] In certain embodiments, the composition comprising the AAV particles of the present disclosure is administered to the central nervous system of the subject via intraparenchymal injection and intravenous injection.

[0343] In certain embodiments, the AAV particles of the present disclosure may be delivered into specific types of targeted cells, including, but not limited to, thalamic, hippocampal, entorhinal, cortical, motor, sensory, excitatory, inhibitory, sympathetic, or parasympathetic neurons; glial cells including oligodendrocytes, astrocytes and microglia; and/or other cells surrounding neurons such as T cells.

[0344] In certain embodiments, the AAV particles of the present disclosure may be delivered to neurons in the putamen, thalamus and/or cortex.

[0345] In some embodiments, the AAV particles of the present disclosure may be used as a therapy for neurological disease.

[0346] In some embodiments, the AAV particles of the present disclosure may be used as a therapy for tauopathies.

[0347] In some embodiments, the AAV particles of the present disclosure may be used as a therapy for Alzheimer's Disease.

[0348] In some embodiments, the AAV particles of the present disclosure may be used as a therapy for Amyotrophic Lateral Sclerosis.

[0349] In some embodiments, the AAV particles of the present disclosure may be used as a therapy for Huntington's Disease.

[0350] In some embodiments, the AAV particles of the present disclosure may be used as a therapy for Parkinson's Disease.

[0351] In some embodiments, the AAV particles of the present disclosure may be used as a therapy for Friedreich's Ataxia.

[0352] In some embodiments, the AAV particles of the present disclosure may be used as a therapy for chronic or neuropathic pain.

[0353] In certain embodiments, administration of the AAV particles described herein to a subject may increase target protein levels in a subject. The target protein levels may be increased by about 30%, 40%, 50%, 60%, 70%, 80%, 85%, 90%, 95% and 100%, or at least 20-30%, 20-40%, 20-50%, 20-60%, 20-70%, 20-80%, 20-90%, 20-95%, 20-100%, 30-40%, 30-50%, 30-60%, 30-70%, 30-80%, 30-90%, 30-95%, 30-100%, 40-50%, 40-60%, 40-70%, 40-80%, 40-90%, 40-95%, 40-100%, 50-60%, 50-70%, 50-80%, 50-90%, 50-95%, 50-100%, 60-70%, 60-80%, 60-90%, 60-95%, 60-100%, 70-80%, 70-90%, 70-95%, 70-100%, 80-90%, 80-95%, 80-100%, 90-95%, 90-100% or 95-100% in a subject such as, but not limited to, the CNS, a region of the CNS, or a specific cell of the CNS of a subject. As a non-limiting example, the AAV particles may increase the protein levels of a target protein by at least 50%. As a non-limiting example, the AAV particles may increase the proteins levels of a target protein by at least 40%. As a non-limiting example, a subject may have an increase of 10% of target protein. As a non-limiting example, the AAV particles may increase the protein levels of a target protein by fold increases over baseline. In certain embodiments, AAV particles lead to 5-6 times higher levels of a target protein.

[0354] In certain embodiments, administration of the AAV particles described herein to a subject may increase the expression of a target protein in a subject. The expression of the target protein may be increased by about 30%, 40%, 50%, 60%, 70%, 80%, 85%, 90%, 95% and 100%, or at least 20-30%, 20-40%, 20-50%, 20-60%, 20-70%, 20-80%, 20-90%, 20-95%, 20-100%, 30-40%, 30-50%, 30-60%, 30-70%, 30-80%, 30-90%, 30-95%, 30-100%, 40-50%, 40-60%, 40-70%, 40-80%, 40-90%, 40-95%, 40-100%, 50-60%, 50-70%, 50-80%, 50-90%, 50-95%, 50-100%, 60-70%, 60-80%, 60-90%, 60-95%, 60-100%, 70-80%, 70-90%, 70-95%, 70-100%, 80-90%, 80-95%, 80-100⁰/o, 90-95%, 90-100% or 95-100% in a subject such as, but not limited to, the CNS, a region of the CNS, or a specific cell of the CNS of a subject. As a non-limiting example, the AAV particles may increase the expression of a target protein by at least 50%. As a non-limiting example, the AAV particles may increase the expression of a target protein by at least 40%.

[0355] In certain embodiments, intravenous administration of the AAV particles described herein to a subject may increase the CNS expression of a target protein in a subject. The expression of the target protein may be increased by about 30%, 40%, 50%, 60%, 70%, 80%, 85%, 90%, 95% and 100%, or at least 20-30%, 20-40%, 20-50%, 20-60%, 20-70%, 20-80%, 20-90%, 20-95%, 20-100%, 30-40%, 30-50%, 30-60%, 30-70%, 30-80%, 30-90%, 30-95%, 30-100%, 40-50%, 40-60%, 40-70%, 40-80%, 40-90%, 40-95%, 40-100%, 50-60%, 50-70%, 50-80%, 50-90%, 50-95%, 50-100%, 60-70%, 60-80%, 60-90%, 60-95%, 60-100%, 70-80%, 70-90%, 70-95%, 70-100%, 80-90%, 80-95%, 80-100%, 90-95%, 90-100% or 95-100% in a subject such as, but not limited to, the CNS, a region of the CNS, or a specific cell of the CNS of a subject. As a non-limiting example, the AAV particles may increase the expression of a target protein in the CNS by at least 50%. As a non-limiting example, the AAV particles may increase the expression of a target protein in the CNS by at least 40%.

[0356] In some embodiments, the AAV particles of the present disclosure may be used to increase target protein expression in astrocytes in order to treat a neurological disease. Target protein in astrocytes may be increased by 5%, 10%, 15%, 20%, 25%, 30%, 35%, 40%, 45%, 50%, 55%, 60%, 65%, 70%, 75%, 80%, 85%, 90%, 95%, or more than 95%, 5-15%, 5-20%, 5-25%, 5-30%, 5-35%, 5-40%, 5-45%, 5-50%, 5-55%, 5-60%, 5-65%, 5-70%, 5-75%, 5-80%, 5-85/o, 5-90%, 5-95%, 10-20%, 10-25%, 10-30%, 10-35/, 10-40%, 10-45%, 10-50%, 10-55%, 10-60%, 10-65%, 10-70%, 10-75%, 10-80%, 10-85%, 10-90%, 10-95%, 15-25%, 15-30%, 15-35%, 15-40%, 15-45%, 15-50%, 15-55%, 15-60%, 15-65%, 15-70%, 15-75%, 15-80%, 15-85%, 15-90%, 15-95%, 20-30%, 20-35%, 20-40%, 20-45%, 20-50%, 20-55%, 20-60%, 20-65%, 20-70%, 20-75%, 20-80%, 20-85%, 20-90%, 20-95%, 25-35%, 25-40%, 25-45%, 25-50%, 25-55%, 25-60%, 25-65%, 25-70%, 25-75%, 25-80%, 25-85%, 25-90%, 25-95%, 30-40%, 30-45%, 30-50%, 30-55%, 30-60%, 30-65%, 30-70%, 30-75%, 30-80%, 30-85%, 30-90%, 30-95%, 35-45%, 35-50%, 35-55%, 35-60%, 35-65%, 35-70%, 35-75%, 35-80%, 35-85%, 35-90%, 35-95%, 40-50%, 40-55%, 40-60%, 40-65%, 40-70%, 40-75%, 40-80%, 40-85%, 40-90%, 40-95%, 45-55%, 45-60%, 45-65%, 45-70%, 45-75%, 45-80%, 45-85%, 45-90%, 45-95%, 50-60%, 50-65%, 50-70%, 50-75%, 50-80%, 50-85%, 50-90%, 50-95%, 55-65%, 55-70%, 55-75%, 55-80%, 55-85%, 55-90%, 55-95%, 60-70%, 60-75%, 60-80%, 60-85%, 60-90%, 60-95%, 65-75%, 65-80%, 65-85%, 65-90%, 65-95%, 70-80%, 70-85%, 70-90%, 70-95%, 75-85%, 75-90%, 75-95%, 80-90%, 80-95%, or 90-95%.

[0357] In some embodiments, the AAV particles may be used to increase target protein in microglia. The increase of target protein in microglia may be, independently, increased by 5%, 10%, 15%, 20%, 25%, 30%, 35%, 40%, 45%, 50%, 55%, 60%, 65%, 70%, 75%, 80%, 85%, 90%, 95%, or more than 95%, 5-15%, 5-20%, 5-25%, 5-30%, 5-35%, 5-40%, 5-45%, 5-50%, 5-55%, 5-60%, 5-65%, 5-70%, 5-75%, 5-80%, 5-85%, 5-90%, 5-95%, 10-20%, 10-25%, 10-30%, 10-35%, 10-40%, 10-45%, 10-50%, 10-55%, 10-60%, 10-65%, 10-70%, 10-75%, 10-80%, 10-85%, 10-90%, 10-95%, 15-25%, 15-30%, 15-35%, 15-40%, 15-45%, 15-50%, 15-55%, 15-60%, 15-65%, 15-70%, 15-75%, 15-80%, 15-85%, 15-90%, 15-95%, 20-30%, 20-35%, 20-40%, 20-45%, 20-50%, 20-55%, 20-60%, 20-65%, 20-70%, 20-75%, 20-80%, 20-85%, 20-90%, 20-95%, 25-35%, 25-40%, 25-45%, 25-50%, 25-55%, 25-60%, 25-65%, 25-70%, 25-75%, 25-80%, 25-85%, 25-90%, 25-95%, 3040%, 30-45%, 30-50%, 30-55%, 30-60%, 30-65%, 30-70%, 30-75%, 30-80%, 30-85%, 30-90%, 30-95%, 35-45%, 35-50%, 35-55%, 35-60%, 35-65%, 35-70%, 35-75%, 35-80%, 35-85%, 35-90%, 35-95%, 40-50%, 40-55%, 40-60%, 40-65%, 40-70%, 40-75%, 40-80%, 40-85%, 40-90%, 40-95%, 45-55%, 45-60%, 45-65%, 45-70%, 45-75%, 45-80%, 45-85%, 45-90%, 45-95%, 50-60%, 50-65%, 50-70%, 50-75%, 50-80%, 50-85%, 50-90%, 50-95%, 55-65%, 55-70%, 55-75%, 55-80%, 55-85%, 55-90%, 55-95%, 60-70%, 60-75%, 60-80%, 60-85%, 60-90%, 60-95%, 65-75%, 65-80%, 65-85%, 65-90%, 65-95%, 70-80%, 70-85%, 70-90%, 70-95%, 75-85%, 75-90%, 75-95%, 80-90%, 80-95%, or 90-95%.

[0358] In some embodiments, the AAV particles may be used to increase target protein in cortical neurons. The increase of target protein in the cortical neurons may be, independently, increased by 5%, 10%, 15%, 20%, 25%, 30%, 35%, 40%, 45%, 50%, 55%, 60%, 65%, 70%, 75%, 80%, 85%, 90%, 95%, or more than 95%, 5-15%, 5-20%, 5-25%, 5-30%, 5-35%, 5-40%, 5-45%, 5-50%, 5-55%, 5-60%, 5-65%, 5-70%, 5-75%, 5-80%, 5-85%, 5-90%, 5-95%, 10-20%, 10-25%, 10-30%, 10-35%, 10-40%, 10-45%, 10-50%, 10-55%, 10-60%, 10-65%, 10-70%, 10-75%, 10-80%, 10-85%, 10-90%, 10-95%, 15-25%, 15-30%, 15-35%, 15-40%, 15-45%, 15-50%, 15-55%, 15-60%, 15-65%, 15-70%, 15-75%, 15-80%, 15-85%, 15-90%, 15-95%, 20-30%, 20-35%, 20-40%, 20-45%, 20-50%, 20-55%, 20-60%, 20-65%, 20-70%, 20-75%, 20-80%, 20-85%, 20-90%, 20-95%, 25-35%, 25-40%, 25-45%, 25-50%, 25-55%, 25-60%, 25-65%, 25-70%, 25-75%, 25-80%, 25-85%, 25-90%, 25-95%, 30-40%, 30-45°/, 30-50%, 30-55%, 30-60%, 30-65%, 30-70%, 30-75%, 30-80%, 30-85%, 30-90%, 30-95%, 35-45%, 35-50%, 35-55%, 35-60%, 35-65%, 35-70%, 35-75%, 35-80%, 35-85%, 35-90%, 35-95%, 40-50%, 40-55%, 40-60%, 40-65%, 40-70%, 40-75%, 40-80%, 40-85%, 40-90%, 40-95%, 45-55%, 45-60%, 45-65%, 45-70%, 45-75%, 45-80%, 45-85%, 45-90%, 45-95%, 50-60%, 50-65%, 50-70%, 50-75%, 50-80%, 50-85%, 50-90%, 50-95%, 55-65%, 55-70%, 55-75%, 55-80%, 55-85%, 55-90%, 55-95%, 60-70%, 60-75%, 60-80%, 60-85%, 60-90%, 60-95%, 65-75%, 65-80%, 65-85%, 65-90%, 65-95%, 70-80%, 70-85%, 70-90%, 70-95%, 75-85%, 75-90%, 75-95%, 80-90%, 80-95%, or 90-95%.

[0359] In some embodiments, the AAV particles may be used to increase target protein in hippocampal neurons. The increase of target protein in the hippocampal neurons may be, independently, increased by 5%, 10%, 15%, 20%, 25%, 30%, 35%, 40%, 45%, 50%, 55%, 60%, 65%, 70%, 75%, 80%, 85%, 90%, 95%, or more than 95%, 5-15%, 5-20%, 5-25%, 5-30%, 5-35%, 5-40%, 5-45%, 5-50%, 5-55%, 5-60%, 5-65%, 5-70%, 5-75%, 5-80%, 5-85%, 5-90%, 5-95%, 10-20%, 10-25%, 10-30%, 10-35%, 10-40%, 10-45%, 10-50%, 10-55%, 10-60%, 10-65%, 10-70%, 10-75%, 10-80%, 10-85%, 10-90%, 10-95%, 15-25%, 15-30%, 15-35%, 15-40%, 15-45%, 15-50%, 15-55%, 15-60%, 15-65%, 15-70%, 15-75%, 15-80%, 15-85%, 15-90%, 15-95%, 20-30%, 20-35%, 20-40%, 20-45%, 20-50%, 20-55%, 20-60%, 20-65%, 20-70%, 20-75%, 20-80%, 20-85%, 20-90%, 20-95%, 25-35%, 25-40%, 25-45%, 25-50%, 25-55%, 25-60%, 25-65%, 25-70%, 25-75%, 25-80%, 25-85%, 25-90%, 25-95%, 30-40%, 30-45%, 30-50%, 30-55%, 30-60%, 30-65%, 30-70%, 30-75%, 30-80%, 30-85%, 30-90%, 30-95%, 35-45%, 35-50%, 35-55%, 35-60%, 35-65%, 35-70%, 35-75%, 35-80%, 35-85%, 35-90%, 35-95%, 40-50%, 40-55%, 40-60%, 40-65%, 40-70%, 40-75%, 40-80%, 40-85%, 40-90%, 40-95%, 45-55%, 45-60%, 45-65%, 45-70%, 45-75%, 45-80%, 45-85%, 45-90%, 45-95%, 50-60%, 50-65%, 50-70%, 50-75%, 50-80%, 50-85%, 50-90%, 50-95%, 55-65%, 55-70%, 55-75%, 55-80%, 55-85%, 55-90%, 55-95%, 60-70%, 60-75%, 60-80%, 60-85%, 60-90%, 60-95%, 65-75%, 65-80%, 65-85%, 65-90%, 65-95%, 70-80%, 70-85%, 70-90%, 70-95%, 75-85%, 75-90%, 75-95%, 80-90%, 80-95%, or 90-95%.

[0360] In some embodiments, the AAV particles may be used to increase target protein in DRG and/or sympathetic neurons. The increase of target protein in the DRG and/or sympathetic neurons may be, independently, increased by 5%, 10%, 15%, 20%, 25%, 30%, 35%, 40%, 45%, 50%, 55%, 60%, 65%, 70%, 75%, 80%, 85%, 90%, 95%, or more than 95%, 5-15%, 5-20%, 5-25%, 5-30%, 5-35%, 5-40%, 545%, 5-50%, 5-55%, 5-60%, 5-65%, 5-70%, 5-75%, 5-80%, 5-85%, 5-90%, 5-95%, 10-20%, 10-25%, 10-30%, 10-35%, 10-40%, 10-45%, 10-50%, 10-55%, 10-60%, 10-65%, 10-70%, 10-75%, 10-80%, 10-85%, 10-90%, 10-95%, 15-25%, 15-30%, 15-35%, 15-40%, 15-45%, 15-50%, 15-55%, 15-60%, 15-65%, 15-70%, 15-75%, 15-80%, 15-85%, 15-90%, 15-95%, 20-30%, 20-35%, 20-40%, 20-45%, 20-50%, 20-55%, 20-60%, 20-65%, 20-70%, 20-75%, 20-80%, 20-85%, 20-90%, 20-95%, 25-35%, 25-40%, 25-45%, 25-50%, 25-55%, 25-60%, 25-65%, 25-70%, 25-75%, 25-80%, 25-85%, 25-90%, 25-95%, 30-40%, 30-45%, 30-50%, 30-55%, 30-60%, 30-65%, 30-70%, 30-75%, 30-80%, 30-85%, 30-90%, 30-95%, 35-45%, 35-50%, 35-55%, 35-60%, 35-65%, 35-70%, 35-75%, 35-80%, 35-85%, 35-90%, 35-95%, 40-50%, 40-55%, 40-60%, 40-65%, 40-70%, 40-75%, 40-80%, 40-85%, 40-90%, 40-95%, 45-55%, 45-60%, 45-65%, 45-70%, 45-75%, 45-80%, 45-85%, 45-90%, 45-95%, 50-60%, 50-65%, 50-70%, 50-75%, 50-80%, 50-85%, 50-90%, 50-95%, 55-65%, 55-70%, 55-75%, 55-80%, 55-85%, 55-90%, 55-95%, 60-70%, 60-75%, 60-80%, 60-85%, 60-90%, 60-95%, 65-75%, 65-80%, 65-85%, 65-90%, 65-95%, 70-80%, 70-85%, 70-90%, 70-95%, 75-85%, 75-90%, 75-95%, 80-90%, 80-95%, or 90-95%.

[0361] In some embodiments, the AAV particles of the present disclosure may be used to increase target protein in sensory neurons in order to treat neurological disease. Target protein in sensory neurons may be increased by 5%, 10%, 15%, 20%, 25%, 30%, 35%, 40%, 45%, 50%, 55%, 60%, 65%, 70%, 75%, 80%, 85%, 90%, 95%, or more than 95%, 5-15%, 5-20%, 5-25%, 5-30%, 5-35%, 5-40%, 5-45%, 5-50%, 5-55%, 5-60%, 5-65%, 5-70%, 5-75%, 5-80%, 5-85%, 5-90%, 5-95%, 10-20%, 10-25%, 10-30%, 10-35%, 10-40%, 10-45%, 10-50%, 10-55%, 10-60%, 10-65%, 10-70%, 10-75%, 10-80%, 10-85%, 10-90%, 10-95%, 15-25%, 15-30%, 15-35%, 15-40%, 15-45%, 15-50%, 15-55%, 15-60%, 15-65%, 15-70%, 15-75%, 15-80%, 15-85%, 15-90%, 15-95%, 20-30%, 20-35%, 20-40%, 20-45%, 20-50%, 20-55%, 20-60%, 20-65%, 20-70%, 20-75%, 20-80%, 20-85%, 20-90%, 20-95%, 25-35%, 25-40%, 25-45%, 25-50%, 25-55%, 25-60%, 25-65%, 25-70%, 25-75%, 25-80%, 25-85%, 25-90%, 25-95%, 30-40%, 30-45%, 30-50%, 30-55%, 30-60%, 30-65%, 30-70%, 30-75%, 30-80%, 30-85%, 30-90%, 30-95%, 35-45%, 35-50%, 35-55%, 35-60%, 35-65%, 35-70%, 35-75%, 35-80%, 35-85%, 35-90%, 35-95%, 40-50%, 40-55%, 40-60%, 40-65%, 40-70%, 40-75%, 40-80%, 40-85%, 40-90%, 40-95%, 45-55%, 45-60%, 45-65%, 45-70%, 45-75%, 45-80%, 45-85%, 45-90%, 45-95%, 50-60%, 50-65%, 50-70%, 50-75%, 50-80%, 50-85%, 50-90%, 50-95%, 55-65%, 55-70%, 55-75%, 55-80%, 55-85%, 55-90%, 55-95%, 60-70%, 60-75%, 60-80%, 60-85%, 60-90%, 60-95%, 65-75%, 65-80%, 65-85%, 65-90%, 65-95%, 70-80%, 70-85%, 70-90%, 70-95%, 75-85%, 75-90%, 75-95%, 80-90%, 80-95%, or 90-95%.

[0362] In some embodiments, the AAV particles of the present disclosure may be used to increase target protein and reduce symptoms of neurological disease in a subject. The increase of target protein and/or the reduction of symptoms of neurological disease may be, independently, altered (increased for the production of target protein and reduced for the symptoms of neurological disease) by 5%, 10%, 15%, 20%, 25%, 30%, 35%, 40%, 45%, 50%, 55%, 60%, 65%, 70%, 75%, 80%, 85%, 90%, 95%, or more than 95%, 5-15%, 5-20%, 5-25%, 5-30%, 5-35%, 5-40%, 5-45%, 5-50%, 5-55%, 5-60%, 5-65%, 5-70%, 5-75%, 5-80%, 5-85%, 5-90%, 5-95%, 10-20%, 10-25%, 10-30%, 10-35%, 10-40%, 10-45%, 10-50%, 10-55%, 10-60%, 10-65%, 10-70%, 10-75%, 10-80%, 10-85%, 10-90%, 10-95%, 15-25%, 15-30%, 15-35%, 15-40%, 15-45%, 15-50%, 15-55%, 15-60%, 15-65%, 15-70%, 15-75%, 15-80%, 15-85%, 15-90%, 15-95%, 20-30%, 20-35%, 20-40%, 20-45%, 20-50%, 20-55%, 20-60%, 20-65%, 20-70%, 20-75%, 20-80%, 20-85%, 20-90%, 20-95%, 25-35%, 25-40%, 25-45%, 25-50%, 25-55%, 25-60%, 25-65%, 25-70%, 25-75%, 25-80%, 25-85%, 25-90%, 25-95%, 30-40%, 30-45%, 30-50%, 30-55%, 30-60%, 30-65%, 30-70%, 30-75%, 30-80%, 30-85%, 30-90%, 30-95%, 35-45%, 35-50%, 35-55%, 35-60%, 35-65%, 35-70%, 35-75%, 35-80%, 35-85%, 35-90%, 35-95%, 40-50%, 40-55%, 40-60%, 40-65%, 40-70%, 40-75%, 40-80%, 40-85%, 40-90%, 40-95%, 45-55%, 45-60%, 45-65%, 45-70%, 45-75%, 45-80%, 45-85%, 45-90%, 45-95%, 50-60%, 50-65%, 50-70%, 50-75%, 50-80%, 50-85%, 50-90%, 50-95%, 55-65%, 55-70%, 55-75%, 55-80%, 55-85%, 55-90%, 55-95%, 60-70%, 60-75%, 60-80%, 60-85%, 60-90%, 60-95%, 65-75%, 65-80%, 65-85%, 65-90%, 65-95%, 70-80%, 70-85%, 70-90%, 70-95%, 75-85%, 75-90%, 75-95%, 80-90%, 80-95%, or 90-95%.

[0363] In certain embodiments, the AAV particles of the present disclosure may be used to reduce the decline of functional capacity and activities of daily living as measured by a standard evaluation system such as, but not limited to, the total functional capacity (TFC) scale.

[0364] In certain embodiments, the AAV particles of the present disclosure may be used to improve performance on any assessment used to measure symptoms of neurological disease. Such assessments include, but are not limited to ADAS-cog (Alzheimer Disease Assessment Scale—cognitive), MMSE (Mini-Mental State Examination), GDS (Geriatric Depression Scale). FAQ (Functional Activities Questionnaire), ADL (Activities of Daily Living), GPCOG (General Practitioner Assessment of Cognition), Mini-Cog, AMTS (Abbreviated Mental Test Score), Clock-drawing test, 6-CIT (6-item Cognitive Impairment Test), TYM (Test Your Memory), MoCa (Montreal Cognitive Assessment), ACE-R (Addenbrookes Cognitive Assessment), MIS (Memory Impairment Screen), BADLS (Bristol Activities of Daily Living Scale), Barthel Index, Functional Independence Measure, Instrumental Activities of Daily Living, IQCODE (Informant Questionnaire on Cognitive Decline in the Elderly), Neuropsychiatric Inventory, The Cohen-Mansfield Agitation Inventory, BEHAVE-AD, EuroQol, Short Form-36 and/or MBR Caregiver Strain Instrument, or any of the other tests as described in Sheehan B (Ther Adv Neurol Disord. 5(6):349-358 (2012)), the contents of which are herein incorporated by reference in their entirety.

[0365] In some embodiments, the present composition is administered as a solo therapeutic or as combination therapeutic for the treatment of neurological disease.

[0366] The AAV particles encoding the target protein may be used in combination with one or more other therapeutic agents. By “in combination with,” it is not intended to imply that the agents must be administered at the same time and/or formulated for delivery together, although these methods of delivery are within the scope of the present disclosure. Compositions can be administered concurrently with, prior to, or subsequent to, one or more other desired therapeutics or medical procedures. In general, each agent will be administered at a dose and/or on a time schedule determined for that agent.

[0367] Therapeutic agents that may be used in combination with the AAV particles of the present disclosure can be small molecule compounds which are antioxidants, anti-inflammatory agents, anti-apoptosis agents, calcium regulators, antiglutamatergic agents, structural protein inhibitors, compounds involved in muscle function, and compounds involved in metal ion regulation. As a non-limiting example, the combination therapy may be in combination with one or more neuroprotective agents such as small molecule compounds, growth factors and hormones which have been tested for their neuroprotective effect on motor neuron degeneration.

[0368] Compounds tested for treating neurological disease which may be used in combination with the AAV particles described herein include, but are not limited to, cholinesterase inhibitors (donepezil, rivastigmine, galantamine), NMDA receptor antagonists such as memantine, anti-psychotics, anti-depressants, anti-convulsants (e.g., sodium valproate and levetiracetam for myoclonus), secretase inhibitors, amyloid aggregation inhibitors, copper or zinc modulators, BACE inhibitors, inhibitors of tau aggregation, such as Methylene blue, phenothiazines, anthraquinones, n-phenylamines or rhodamines, microtubule stabilizers such as NAP, taxol or paclitaxel, kinase or phosphatase inhibitors such as those targeting GSK3β (lithium) or PP2A, immunization with As peptides or tau phospho-epitopes, anti-tau or anti-amyloid antibodies, dopamine-depleting agents (e.g., tetrabenazine for chorea), benzodiazepines (e.g., clonazepam for myoclonus, chorea, dystonia, rigidity, and/or spasticity), amino acid precursors of dopamine (e.g., levodopa for rigidity), skeletal muscle relaxants (e.g., baclofen, tizanidine for rigidity and/or spasticity), inhibitors for acetylcholine release at the neuromuscular junction to cause muscle paralysis (e.g., botulinum toxin for bruxism and/or dystonia), atypical neuroleptics (e.g., olanzapine and quetiapine for psychosis and/or irritability, risperidone, sulpiride and haloperidol for psychosis, chorea and/or irritability, clozapine for treatment-resistant psychosis, aripiprazole for psychosis with prominent negative symptoms), selective serotonin reuptake inhibitors (SSRIs) (e.g., citalopram, fluoxetine, paroxetine, sertraline, mirtazapine, venlafaxine for depression, anxiety, obsessive compulsive behavior and/or irritability), hypnotics (e.g., xopiclone and/or zolpidem for altered sleep-wake cycle), anticonvulsants (e.g., sodium valproate and carbamazepine for mania or hypomania) and mood stabilizers (e.g., lithium for mania or hypomania).

[0369] Neurotrophic factors may be used in combination therapy with the AAV particles of the present disclosure for treating neurological disease. Generally, a neurotrophic factor is defined as a substance that promotes survival, growth, differentiation, proliferation and/or maturation of a neuron, or stimulates increased activity of a neuron. In some embodiments, the present methods further comprise delivery of one or more trophic factors into the subject in need of treatment. Trophic factors may include, but are not limited to, IGF-I, GDNF, BDNF, CTNF, VEGF, Colivelin, Xaliproden, Thyrotrophin-releasing hormone and ADNF, and variants thereof.

[0370] In one aspect, the AAV particle described herein may be co-administered with AAV particles expressing neurotrophic factors such as AAV-IGF-I (See e.g., Vincent et al., Neuromolecudar medicine, 2004, 6, 79-85; the contents of which are incorporated herein by reference in their entirety) and AAV-GDNF (See e.g., Wang et al., J Neurosci., 2002, 22, 6920-6928; the contents of which are incorporated herein by reference in their entirety).

[0371] In certain embodiments, administration of the AAV particles to a subject will increase the expression of a target protein in a subject and the increase of the expression of the target protein will reduce the effects and/or symptoms of neurological disease in a subject.

[0372] As a non-limiting example, the target protein may be an antibody, or fragment thereof.

### AAV Particles Comprising RNAi Agents or Modulatory Polynucleotides

[0373] Provided in the present disclosure are methods for introducing the AAV particles of the disclosure, comprising a viral genome with a nucleic acid sequence encoding one or more siRNA molecules into cells, the method comprising introducing into said cells any of the vectors in an amount sufficient for degradation of a target mRNA to occur, thereby activating target-specific RNAi in the cells. In some aspects, the cells may be neurons such as but not limited to, motor, hippocampal, entorhinal, thalamic, cortical, sensory, sympathetic, or parasympathetic neurons, and glial cells such as astrocytes, microglia, and/or oligodendrocytes.

[0374] Disclosed herein are methods for treating neurological diseases associated with dysfunction of a target protein in a subject in need of treatment. The method optionally comprises administering to the subject a therapeutically effective amount of a composition comprising AAV particles comprising a viral genome with a nucleic acid sequence encoding one or more siRNA molecules. As a non-limiting example, the siRNA molecules can silence target gene expression, inhibit target protein production, and reduce one or more symptoms of neurological disease in the subject such that the subject is therapeutically treated.

[0375] In some embodiments, the composition comprising the AAV particles of the present disclosure comprising a viral genome encoding one or more siRNA molecules comprise an AAV capsid that allows for enhanced transduction of CNS and/or PNS cells after intravenous administration.

[0376] In some embodiments, the composition comprising the AAV particles of the present disclosure with a viral genome encoding at least one siRNA molecule is administered to the central nervous system of the subject. In other embodiments, the composition comprising the AAV particles of the present disclosure is administered to a tissue of a subject (e.g., putamen, thalamus or cortex of the subject).

[0377] In certain embodiments, the composition comprising the AAV particles of the disclosure, comprising a viral genome with a nucleic acid sequence encoding one or more siRNA molecules is administered to the central nervous system of the subject via systemic administration. In certain embodiments, the systemic administration is intravenous injection.

[0378] In certain embodiments, the composition comprising the AAV particles of the disclosure comprising a viral genome with a nucleic acid sequence encoding one or more siRNA molecules is administered to the central nervous system of the subject via intraparenchymal injection. Non-limiting examples of intraparenchymal injections include intraputamenal, intracortical, intrathalamic, intrastriatal, intrahippocampal or into the entorhinal cortex.

[0379] In certain embodiments, the composition comprising the AAV particles comprising a viral genome with a nucleic acid sequence encoding one or more siRNA molecules is administered to the central nervous system of the subject via intraparenchymal injection and intravenous injection.

[0380] In certain embodiments, the AAV particles comprising a viral genome with a nucleic acid sequence encoding one or more siRNA molecules may be delivered into specific types or targeted cells, including, but not limited to, thalamic, hippocampal, entorhinal, cortical, motor, sensory, excitatory, inhibitory, sympathetic, or parasympathetic neurons: glial cells including oligodendrocytes, astrocytes and microglia; and/or other cells surrounding neurons such as T cells.

[0381] In certain embodiments, the AAV particles comprising a viral genome with a nucleic acid sequence encoding one or more siRNA molecules may be delivered to neurons in the putamen, thalamus, and/or cortex.

[0382] In certain embodiments, the AAV particles comprising a viral genome with a nucleic acid sequence encoding one or more siRNA molecules may be used as a therapy for neurological disease.

[0383] In certain embodiments, the AAV particles comprising a viral genome with a nucleic acid sequence encoding one or more siRNA molecules may be used as a therapy for tauopathies.

[0384] In certain embodiments, the AAV particles comprising a viral genome with a nucleic acid sequence encoding one or more siRNA molecules may be used as a therapy for Alzheimer's Disease.

[0385] In certain embodiments, the AAV particles comprising a viral genome with a nucleic acid sequence encoding one or more siRNA molecules may be used as a therapy for Amyotrophic Lateral Sclerosis.

[0386] In certain embodiments, the AAV particles comprising a viral genome with a nucleic acid sequence encoding one or more siRNA molecules may be used as a therapy for Huntington's Disease.

[0387] In certain embodiments, the AAV particles comprising a viral genome with a nucleic acid sequence encoding one or more siRNA molecules may be used as a therapy for Parkinson's Disease.

[0388] In certain embodiments, the AAV particles comprising a viral genome with a nucleic acid sequence encoding one or more siRNA molecules may be used as a therapy for Friedreich's Ataxia.

[0389] In certain embodiments, the administration of AAV particles comprising a viral genome with a nucleic acid sequence encoding one or more siRNA molecules to a subject may lower target protein levels in a subject. The target protein levels may be lowered by about 30%, 40%, 50%, 60%, 70%, 80%, 85%, 90%, 95% and 100%, or at least 20-30%, 20-40%, 20-50%, 20-60%, 20-70%, 20-80%, 20-90%, 20-95%, 20-100%, 30-40%, 30-50%, 30-60%, 30-70%, 30-80%, 30-90%, 30-95%, 30-100%, 40-50%, 40-60%, 40-70%, 40-80%, 40-90%, 40-95%, 40-100%, 50-60%, 50-70%, 50-80%, 50-90%, 50-95%, 50-100%, 60-70%, 60-80%, 60-90%, 60-95%, 60-100%, 70-80%, 70-90%, 70-95%, 70-100%, 80-90%, 80-95%, 80-100%, 90-95%, 90-100% or 95-100% in a subject such as, but not limited to, the CNS, a region of the CNS, or a specific cell of the CNS of a subject. As a non-limiting example, the AAV particles may lower the protein levels of a target protein by at least 50%. As a non-limiting example, the AAV particles may lower the proteins levels of a target protein by at least 40%.

[0390] In certain embodiments, the administration of AAV particles comprising a viral genome with a nucleic acid sequence encoding one or more siRNA molecules to a subject may lower the expression of a target protein in a subject. The expression of a target protein may be lowered by about 30%, 40%, 50%, 60%, 70%, 80%, 85%, 90%, 95% and 100%, or at least 20-30%, 20-40%, 20-50%, 20-60%, 20-70%, 20-80%, 20-90%, 20-95%, 20-100%, 30-40%, 30-50%, 30-60%, 30-70%, 30-80%, 30-90%, 30-95%, 30-100%, 40-50%, 40-60%, 40-70%, 40-80%, 40-90%, 40-95%, 40-100%, 50-60%, 50-70%, 50-80%, 50-90%, 50-95%, 50-100%, 60-70%, 60-80%, 60-90%, 60-95%, 60-100%, 70-80%, 70-90%, 70-95%, 70-100%, 80-90%, 80-95%, 80-100%, 90-95%, 90-100% or 95-100% in a subject such as, but not limited to, the CNS, a region of the CNS, or a specific cell of the CNS of a subject. As a non-limiting example, the AAV particles may lower the expression of a target protein by at least 50%. As a non-limiting example, the AAV particles may lower the expression of a target protein by at least 40%.

[0391] In certain embodiments, the administration of AAV particles comprising a viral genome with a nucleic acid sequence encoding one or more siRNA molecules to a subject may lower the expression of a target protein in the CNS of a subject. The expression of a target protein may be lowered by about 30%, 40%, 50%, 60%, 70%, 80%, 85%, 90%, 95% and 100%, or at least 20-30%, 20-40%, 20-50%, 20-60%, 20-70%, 20-80%, 20-90%, 20-95%, 20-100%, 30-40%, 30-50%, 30-60%, 30-70%, 30-80%, 30-90%, 30-95%, 30-100%, 40-50%, 40-60%, 40-70%, 40-80%, 40-90%, 40-95%, 40-100%, 50-60%, 50-70%, 50-80%, 50-90%, 50-95%, 50-100%, 60-70%, 60-80%, 60-90%, 60-95%, 60-100%, 70-80%, 70-90%, 70-95%, 70-100%, 80-90%, 80-95%, 80-100%, 90-95%, 90-100% or 95-100% in a subject such as, but not limited to, the CNS, a region of the CNS, or a specific cell of the CNS of a subject. As a non-limiting example, the AAV particles may lower the expression of a target protein by at least 50%. As a non-limiting example, the AAV particles may lower the expression of a target protein by at least 40%.

[0392] In certain embodiments, the AAV particles comprising a viral genome with a nucleic acid sequence encoding one or more siRNA molecules may be used to suppress a target protein in astrocytes in order to treat neurological disease. Target protein in astrocytes may be suppressed by 5%, 10%, 15%, 20%, 25%, 30%, 35%, 40%, 45%, 50%, 55%, 60%, 65%, 70%, 75%, 80%, 85%, 90%, 95%, or more than 95%, 5-15%, 5-20%, 5-25%, 5-30%, 5-35%, 5-40%, 5-45%, 5-50%, 5-55%, 5-60%, 5-65%, 5-70%, 5-75%, 5-80%, 5-85%, 5-90%, 5-95%, 10-20%, 10-25%, 10-30%, 10-35%, 10-40%, 10-45%, 10-50%, 10-55%, 10-60%, 10-65%, 10-70%, 10-75%, 10-80%, 10-85%, 10-90%, 10-95%, 15-25%, 15-30%, 15-35%, 15-40%, 15-45%, 15-50%, 15-55%, 15-60%, 15-65%, 15-70%, 15-75%, 15-80%, 15-85%, 15-90%, 15-95%, 20-30%, 20-35%, 20-40%, 20-45%, 20-50%, 20-55%, 20-60%, 20-65%, 20-70%, 20-75%, 20-80%, 20-85%, 20-90%, 20-95%, 25-35%, 25-40%, 25-45%, 25-50%, 25-55%, 25-60%, 25-65%, 25-70%, 25-75%, 25-80%, 25-85%, 25-90%, 25-95%, 30-40%, 30-45%, 30-50%, 30-55%, 30-60%, 30-65%, 30-70%, 30-75%, 30-80%, 30-85%, 30-90%, 30-95%, 35-45%, 35-50%, 35-55%, 35-60%, 35-65%, 35-70%, 35-75%, 35-80%, 35-85%, 35-90%, 35-95%, 40-50%, 40-55%, 40-60%, 40-65%, 40-70%, 40-75%, 40-80%, 40-85%, 40-90%, 40-95%, 45-55%, 45-60%, 45-65%, 45-70%, 45-75%, 45-80%, 45-85%, 45-90%, 45-95%, 50-60%, 50-65%, 50-70%, 50-75%, 50-80%, 50-85%, 50-90%, 50-95%, 55-65%, 55-70%, 55-75%, 55-80%, 55-85%, 55-90%, 55-95%, 60-70%, 60-75%, 60-80%, 60-85%, 60-90%, 60-95%, 65-75%, 65-80%, 65-85%, 65-90%, 65-95%, 70-80%, 70-85%, 70-90%, 70-95%, 75-85%, 75-90%, 75-95%, 80-90%, 80-95%, or 90-95%. Target protein in astrocytes may be reduced may be 5%, 10%, 15%, 20%, 25%, 30%, 35%, 40%, 45%, 50%, 55%, 60%, 65%, 70%, 75%, 80%, 85%, 90%, 95%, or more than 95%, 5-15%, 5-20%, 5-25%, 5-30%, 5-35%, 5-40%, 5-45%, 5-50%, 5-55%, 5-60%, 5-65%, 5-70%, 5-75%, 5-80%, 5-85%, 5-90%, 5-95%, 10-20%, 10-25%, 10-30%, 10-35%, 10-40%, 10-45%, 10-50%, 10-55%, 10-60%, 10-65%, 10-70%, 10-75%, 10-80%, 10-85%, 10-90%, 10-95%, 15-25%, 15-30%, 15-35%, 15-40%, 15-45%, 15-50%, 15-55%, 15-60%, 15-65%, 15-70%, 15-75%, 15-80%, 15-85%, 15-90%, 15-95%, 20-30%, 20-35%, 20-40%, 20-45%, 20-50%, 20-55%, 20-60%, 20-65%, 20-70%, 20-75%, 20-80%, 20-85%, 20-90%, 20-95%, 25-35%, 25-40%, 25-45%, 25-50%, 25-55%, 25-60%, 25-65%, 25-70%, 25-75%, 25-80%, 25-85%, 25-90%, 25-95%, 30-40%, 30-45%, 30-50%, 30-55%, 30-60%, 30-65%, 30-70%, 30-75%, 30-80%, 30-85%, 30-90%, 30-95%, 35-45%, 35-50%, 35-55%, 35-60%, 35-65%, 35-70%, 35-75%, 35-80%, 35-85%, 35-90%, 35-95%, 40-50%, 40-55%, 40-60%, 40-65%, 40-70%, 40-75%, 40-80%, 40-85%, 40-90%, 40-95%, 45-55%, 45-60%, 45-65%, 45-70%, 45-75%, 45-80%, 45-85%, 45-90%, 45-95%, 50-60%, 50-65%, 50-70%, 50-75%, 50-80%, 50-85%, 50-90%, 50-95%, 55-65%, 55-70%, 55-75%, 55-80%, 55-85%, 55-90%, 55-95%, 60-70%, 60-75%, 60-80%, 60-85%, 60-90%, 60-95%, 65-75%, 65-80%, 65-85%, 65-90%, 65-95%, 70-80%, 70-85%, 70-90%, 70-95%, 75-85%, 75-90%, 75-95%, 80-90%, 80-95%, or 90-95%.

[0393] In certain embodiments, the AAV particles comprising a viral genome with a nucleic acid sequence encoding one or more siRNA molecules may be used to suppress a target protein in microglia. The suppression of the target protein in microglia may be, independently, suppressed by 5%, 10%, 15%, 20%, 25%, 30%, 35%, 40%, 45%, 50%, 55%, 60%, 65%, 70%, 75%, 80%, 85%, 90%, 95%, or more than 95%, 5-15%, 5-20%, 5-25%, 5-30%, 5-35%, 5-40%, 5-45%, 5-50%, 5-55%, 5-60%, 5-65%, 5-70%, 5-75%, 5-80%, 5-85%, 5-90%, 5-95%, 10-20%, 10-25%, 10-30%, 10-35%, 10-40%, 10-45%, 10-50%, 10-55%, 10-60%, 10-65%, 10-70%, 10-75%, 10-80%, 10-85%, 10-90%, 10-95%, 15-25%, 15-30%, 15-35%, 15-40%, 15-45%, 15-50%, 15-55%, 15-60%, 15-65%, 15-70%, 15-75%, 15-80%, 15-85%, 15-90%, 15-95%, 20-30%, 20-35%, 20-40%, 20-45%, 20-50%, 20-55%, 20-60%, 20-65%, 20-70%, 20-75%, 20-80%, 20-85%, 20-90°/, 20-95%, 25-35%, 25-40%, 25-45%, 25-50%, 25-55%, 25-60%, 25-65%, 25-70%, 25-75%, 25-80%, 25-85%, 25-90%, 25-95%, 30-40%, 30-45%, 30-50%, 30-55%, 30-60%, 30-65%, 30-70%, 30-75%, 30-80%, 30-85%, 30-90%, 30-95%, 35-45%, 35-50%, 35-55%, 35-60%, 35-65%, 35-70%, 35-75%, 35-80%, 35-85%, 35-90%, 35-95%, 40-50%, 40-55%, 40-60%, 40-65%, 40-70%, 40-75%, 40-80%, 40-85%, 40-90%, 40-95%, 45-55%, 45-60%, 45-65%, 45-70%, 45-75%, 45-80%, 45-85%, 45-90%, 45-95%, 50-60%, 50-65%, 50-70%, 50-75%, 50-80%, 50-85%, 50-90%, 50-95%, 55-65%, 55-70%, 55-75%, 55-80%, 55-85%, 55-90%, 55-95%, 60-70%, 60-75%, 60-80%, 60-85%, 60-90%, 60-95%, 65-75%, 65-80%, 65-85%, 65-90%, 65-95%, 70-80%, 70-85%, 70-90%, 70-95%, 75-85%, 75-90%, 75-95%, 80-90%, 80-95%, or 90-95%. The reduction may be 5%, 10%, 15%, 20%, 25%, 30%, 35%, 40%, 45%, 50%, 55%, 60%, 65%, 70%, 75%, 80%, 85%, 90%, 95%, or more than 95%, 5-15%, 5-20%, 5-25%, 5-30%, 5-35%, 5-40%, 5-45%, 5-50%, 5-55%, 5-60%, 5-65%, 5-70%, 5-75%, 5-80%, 5-85%, 5-90%, 5-95%, 10-20%, 10-25%, 10-30%, 10-35%, 10-40%, 10-45%, 10-50%, 10-55%, 10-60%, 10-65%, 10-70%, 10-75%, 10-80%, 10-85%, 10-90%, 10-95%, 15-25%, 15-30%, 15-35%, 15-40%, 15-45%, 15-50%, 15-55%, 15-60%, 15-65%, 15-70%, 15-75%, 15-80%, 15-85%, 15-90%, 15-95%, 20-30%, 20-35%, 20-40%, 20-45%, 20-50%, 20-55%, 20-60%, 20-65%, 20-70%, 20-75%, 20-80%, 20-85%, 20-90%, 20-95%, 25-35%, 25-40%, 25-45%, 25-50%, 25-55%, 25-60%, 25-65%, 25-70%, 25-75%, 25-80%, 25-85%, 25-90%, 25-95%, 30-40%, 30-45%, 30-50%, 30-55%, 30-60%, 30-65%, 30-70%, 30-75%, 30-80%, 30-85%, 30-90%, 30-95%, 35-45%, 35-50%, 35-55%, 35-60%, 35-65%, 35-70%, 35-75%, 35-80%, 35-85%, 35-90%, 35-95%, 40-50%, 40-55%, 40-60%, 40-65%, 40-70%, 40-75%, 40-80%, 40-85%, 40-90%, 40-95%, 45-55%, 45-60%, 45-65%, 45-70%, 45-75%, 45-80%, 45-85%, 45-90%, 45-95%, 50-60%, 50-65%, 50-70%, 50-75%, 50-80%, 50-85%, 50-90%, 50-95%, 55-65%, 55-70%, 55-75%, 55-80%, 55-85%, 55-90%, 55-95%, 60-70%, 60-75%, 60-80%, 60-85%, 60-90%, 60-95%, 65-75%, 65-80%, 65-85%, 65-90%, 65-95%, 70-80%, 70-85%, 70-90%, 70-95%, 75-85%, 75-90%, 75-95%, 80-90%, 80-95%, or 90-95%.

[0394] In certain embodiments, the AAV particles comprising a viral genome with a nucleic acid sequence encoding one or more siRNA molecules may be used to suppress target protein in cortical neurons. The suppression of a target protein in cortical neurons may be, independently, suppressed by 5%, 10%, 15%, 20%, 25%, 30%, 35%, 40%, 45%, 50%, 55%, 60%, 65%, 70%, 75%, 80%, 85%, 90%, 95%, or more than 95%, 5-15%, 5-20%, 5-25%, 5-30%, 5-35%, 5-40%, 5-45%, 5-50%, 5-55%, 5-60%, 5-65%, 5-70%, 5-75%, 5-80%, 5-85%, 5-90%, 5-95%, 10-20%, 10-25%, 10-30%, 10-35%, 10-40%, 10-45%, 10-50%, 10-55%, 10-60%, 10-65%, 10-70%, 10-75%, 10-80%, 10-85%, 10-90%, 10-95%, 15-25%, 15-30%, 15-35%, 15-40%, 15-45%, 15-50%, 15-55%, 15-60%, 15-65%, 15-70%, 15-75%, 15-80%, 15-85%, 15-90%, 15-95%, 20-30%, 20-35%, 20-40%, 20-45%, 20-50%, 20-55%, 20-60%, 20-65%, 20-70%, 20-75%, 20-80%, 20-85%, 20-90%, 20-95%, 25-35%, 25-40%, 25-45%, 25-50%, 25-55%, 25-60%, 25-65%, 25-70%, 25-75%, 25-80%, 25-85%, 25-90%, 25-95%, 30-40%, 30-45%, 30-50%, 30-55%, 30-60%, 30-65%, 30-70%, 30-75%, 30-80%, 30-85%, 30-90%, 30-95%, 35-45%, 35-50%, 35-55%, 35-60%, 35-65%, 35-70%, 35-75%, 35-80%, 35-85%, 35-90%, 35-95%, 40-50%, 40-55%, 40-60%, 40-65%, 40-70%, 40-75%, 40-80%, 40-85%, 40-90%, 40-95%, 45-55%, 45-60%, 45-65%, 45-70%, 45-75%, 45-80%, 45-85%, 45-90%, 45-95%, 50-60%, 50-65%, 50-70%, 50-75%, 50-80%, 50-85%, 50-90%, 50-95%, 55-65%, 55-70%, 55-75%, 55-80%, 55-85%, 55-90%, 55-95%, 60-70%, 60-75%, 60-80%, 60-85%, 60-90%, 60-95%, 65-75%, 65-80%, 65-85%, 65-90%, 65-95%, 70-80%, 70-85%, 70-90%, 70-95%, 75-85%, 75-90%, 75-95%, 80-90%, 80-95%, or 90-95%. The reduction may be 5%, 10%, 15%, 20%, 25%, 30%, 35%, 40%, 45%, 50%, 55%, 60%, 65%, 70%, 75%, 80%, 85%, 90%, 95%, or more than 95%, 5-15%, 5-20%, 5-25%, 5-30%, 5-35%, 5-40%, 5-45%, 5-50%, 5-55%, 5-60%, 5-65%, 5-70%, 5-75%, 5-80%, 5-85%, 5-90%, 5-95%, 10-20%, 10-25%, 10-30%, 10-35%, 10-40%, 10-45%, 10-50%, 10-55%, 10-60%, 10-65%, 10-70%, 10-75%, 10-80%, 10-85%, 10-90%, 10-95%, 15-25%, 15-30%, 15-35%, 15-40%, 15-45%, 15-50%, 15-55%, 15-60%, 15-65%, 15-70%, 15-75%, 15-80%, 15-85%, 15-90%, 15-95%, 20-30%, 20-35%, 20-40%, 20-45%, 20-50%, 20-55%, 20-60%, 20-65%, 20-70%, 20-75%, 20-80%, 20-85%, 20-90%, 20-95%, 25-35%, 25-40%, 25-45%, 25-50%, 25-55%, 25-60%, 25-65%, 25-70%, 25-75%, 25-80%, 25-85%, 25-90%, 25-95%, 30-40%, 30-45%, 30-50%, 30-55%, 30-60%, 30-65%, 30-70%, 30-75%, 30-80%, 30-85%, 30-90%, 30-95%, 35-45%, 35-50%, 35-55%, 35-60%, 35-65%, 35-70%, 35-75%, 35-80%, 35-85%, 35-90%, 35-95%, 40-50%, 40-55%, 40-60%, 40-65%, 40-70%, 40-75%, 40-80%, 40-85%, 40-90%, 40-95%, 45-55%, 45-60%, 45-65%, 45-70%, 45-75%, 45-80%, 45-85%, 45-90%, 45-95%, 50-60%, 50-65%, 50-70%, 50-75%, 50-80%, 50-85%, 50-90%, 50-95%, 55-65%, 55-70%, 55-75%, 55-80%, 55-85%, 55-90%, 55-95%, 60-70%, 60-75%, 60-80%, 60-85%, 60-90%, 60-95%, 65-75%, 65-80%, 65-85%, 65-90%, 65-95%, 70-80%, 70-85%, 70-90%, 70-95%, 75-85%, 75-90%, 75-95%, 80-90%, 80-95%, or 90-95%.

[0395] In certain embodiments, the AAV particles comprising a viral genome with a nucleic acid sequence encoding one or more siRNA molecules may be used to suppress a target protein in hippocampal neurons. The suppression of a target protein in the hippocampal neurons may be, independently, suppressed by 5%, 10%, 15%, 20%, 25%, 30%, 35%, 40%, 45%, 50%, 55%, 60%, 65%, 70%, 75%, 80%, 85%, 90%, 95%, or more than 95%, 5-15%, 5-20%, 5-25%, 5-30%, 5-35%, 5-40%, 545%, 5-50%, 5-55%, 5-60%, 5-65%, 5-70%, 5-75%, 5-80%, 5-85%, 5-90%, 5-95%, 10-20%, 10-25%, 10-30%, 10-35%, 10-40%, 10-45%, 10-50%, 10-55%, 10-60%, 10-65%, 10-70%, 10-75%, 10-80%, 10-85%, 10-90%, 10-95%, 15-25%, 15-30%, 15-35%, 15-40%, 15-45%, 15-50%, 15-55%, 15-60%, 15-65%, 15-70%, 15-75%, 15-80%, 15-85%, 15-90%, 15-95%, 20-30%, 20-35%, 20-40%, 20-45%, 20-50%, 20-55%, 20-60%, 20-65%, 20-70%, 20-75%, 20-80%, 20-85%, 20-90%, 20-95%, 25-35%, 25-40%, 25-45%, 25-50%, 25-55%, 25-60%, 25-65%, 25-70%, 25-75%, 25-80%, 25-85%, 25-90%, 25-95%, 30-40%, 30-45%, 30-50%, 30-55%, 30-60%, 30-65%, 30-70%, 30-75%, 30-80%, 30-85%, 30-90%, 30-95%, 35-45%, 35-50%, 35-55%, 35-60%, 35-65%, 35-70%, 35-75%, 35-80%, 35-85%, 35-90%, 35-95%, 40-50%, 40-55%, 40-60%, 40-65%, 40-70%, 40-75%, 40-80%, 40-85%, 40-90%, 40-95%, 45-55%, 45-60%, 45-65%, 45-70%, 45-75%, 45-80%, 45-85%, 45-90%, 45-95%, 50-60%, 50-65%, 50-70%, 50-75%, 50-80%, 50-85%, 50-90%, 50-95%, 55-65%, 55-70%, 55-75%, 55-80%, 55-85%, 55-90%, 55-95%, 60-70%, 60-75%, 60-80%, 60-85%, 60-90%, 60-95%, 65-75%, 65-80%, 65-85%, 65-90%, 65-95%, 70-80%, 70-85%, 70-90%, 70-95%, 75-85%, 75-90%, 75-95%, 80-90%, 80-95%, or 90-95%. The reduction may be 5%, 10%, 15%, 20%, 25%, 30%, 35%, 40%, 45%, 50%, 55%, 60%, 65%, 70%, 75%, 80%, 85%, 90%, 95%, or more than 95%, 5-15%, 5-20%, 5-25%, 5-30%, 5-35%, 5-40/o, 5-45%, 5-50%, 5-55%, 5-60%, 5-65%, 5-70%, 5-75%, 5-80%, 5-85%, 5-90%, 5-95%, 10-20%, 10-25%, 10-30%, 10-35%, 10-40%, 10-45%, 10-50%, 10-55%, 10-60%, 10-65%, 10-70%, 10-75%, 10-80%, 10-85%, 10-90%, 10-95%, 15-25%, 15-30%, 15-35%, 15-40%, 15-45%, 15-50%, 15-55%, 15-60%, 15-65%, 15-70%, 15-75%, 15-80%, 15-85%, 15-90%, 15-95%, 20-30%, 20-35%, 20-40%, 20-45%, 20-50%, 20-55%, 20-60%, 20-65%, 20-70%, 20-75%, 20-80%, 20-85%, 20-90%, 20-95%, 25-35%, 25-40%, 25-45%, 25-50%, 25-55%, 25-60%, 25-65%, 25-70%, 25-75%, 25-80%, 25-85%, 25-90%, 25-95%, 30-40%, 30-45%, 30-50%, 30-55%, 30-60%, 30-65%, 30-70%, 30-75%, 30-80%, 30-85%, 30-90%, 30-95%, 35-45%, 35-50%, 35-55%, 35-60%, 35-65%, 35-70%, 35-75%, 35-80%, 35-85%, 35-90%, 35-95%, 40-50%, 40-55%, 40-60%, 40-65%, 40-70%, 40-75%, 40-80%, 40-85%, 40-90%, 40-95%, 45-55%, 45-60%, 45-65%, 45-70%, 45-75%, 45-80%, 45-85%, 45-90%, 45-95%, 50-60%, 50-65%, 50-70%, 50-75%, 50-80%, 50-85%, 50-90%, 50-95%, 55-65%, 55-70%, 55-75%, 55-80%, 55-85%, 55-90%, 55-95%, 60-70%, 60-75%, 60-80%, 60-85%, 60-90%, 60-95%, 65-75%, 65-80%, 65-85%, 65-90%, 65-95%, 70-80%, 70-85%, 70-90%, 70-95%, 75-85%, 75-90%, 75-95%, 80-90%, 80-95%, or 90-95%.

[0396] In certain embodiments, the AAV particles comprising a viral genome with a nucleic acid sequence encoding one or more siRNA molecules may be used to suppress a target protein in DRG and/or sympathetic neurons. The suppression of a target protein in the DRG and/or sympathetic neurons may be, independently, suppressed by 5%, 10%, 15%, 20%, 25%, 30%, 35%, 40%, 45%, 50%, 55%, 60%, 65%, 70%, 75%, 80%, 85%, 90%, 95%, or more than 95%, 5-15%, 5-20%, 5-25%, 5-30%, 5-35%, 5-40%, 5-45%, 5-50%, 5-55%, 5-60%, 5-65%, 5-70%, 5-75%, 5-80%, 5-85%, 5-90%, 5-95%, 10-20%, 10-25%, 10-30%, 10-35%, 10-40%, 10-45%, 10-50%, 10-55%, 10-60%, 10-65%, 10-70%, 10-75%, 10-80%, 10-85%, 10-90%, 10-95%, 15-25%, 15-30%, 15-35%, 15-40%, 15-45%, 15-50%, 15-55%, 15-60%, 15-65%, 15-70%, 15-75%, 15-80%, 15-85%, 15-90%, 15-95%, 20-30%, 20-35%, 20-40%, 20-45%, 20-50%, 20-55%, 20-60%, 20-65%, 20-70%, 20-75%, 20-80%, 20-85%, 20-90%, 20-95%, 25-35%, 25-40%, 25-45%, 25-50%, 25-55%, 25-60%, 25-65%, 25-70%, 25-75%, 25-80%, 25-85%, 25-90%, 25-95%, 30-40%, 30-45%, 30-50%, 30-55%, 30-60%, 30-65%, 30-70%, 30-75%, 30-80%, 30-85%, 30-90%, 30-95%, 35-.45°/, 35-50%, 35-55%, 35-60%, 35-65%, 35-70%, 35-75%, 35-80%, 35-85%, 35-90%, 35-95%, 40-50%, 40-55%, 40-60%, 40-65%, 40-70%, 40-75%, 40-80%, 40-85%, 40-90%, 40-95%, 45-55%, 45-60%, 45-65%, 45-70%, 45-75%, 45-80%, 45-85%, 45-90%, 45-95%, 50-60%, 50-65%, 50-70%, 50-75%, 50-80%, 50-85%, 50-90%, 50-95%, 55-65%, 55-70%, 55-75%, 55-80%, 55-85%, 55-90%, 55-95%, 60-70%, 60-75%, 60-80%, 60-85%, 60-90%, 60-95%, 65-75%, 65-80%, 65-85%, 65-90%, 65-95%, 70-80%, 70-85%, 70-90%, 70-95%, 75-85%, 75-90%, 75-95%, 80-90%, 80-95%, or 90-95%. The reduction may be 5%, 10%, 15%, 20%, 25%, 30%, 35%, 40%, 45%, 50%, 55%, 60%, 65%, 70%, 75%, 80%, 85%, 90%, 95%, or more than 95%, 5-15%, 5-20%, 5-25%, 5-30%, 5-35%, 5-40%, 5-45%, 5-50%, 5-55%, 5-60%, 5-65%, 5-70%, 5-75%, 5-80%, 5-85%, 5-90%, 5-95%, 10-20%, 10-25%, 10-30%, 10-35%, 10-40%, 10-45%, 10-50%, 10-55%, 10-60%, 10-65%, 10-70%, 10-75%, 10-80%, 10-85%, 10-90%, 10-95%, 15-25%, 15-30%, 15-35%, 15-40%, 15-45%, 15-50%, 15-55%, 15-60%, 15-65%, 15-70%, 15-75%, 15-80%, 15-85%, 15-90%, 15-95%, 20-30%, 20-35%, 20-40%, 20-45%, 20-50%, 20-55%, 20-60%, 20-65%, 20-70%, 20-75%, 20-80%, 20-85%, 20-90%, 20-95%, 25-35%, 25-40%, 25-45%, 25-50%, 25-55%, 25-60%, 25-65%, 25-70%, 25-75%, 25-80%, 25-85%, 25-90%, 25-95%, 30-40%, 30-45%, 30-50%, 30-55%, 30-60%, 30-65%, 30-70%, 30-75%, 30-80%, 30-85%, 30-90%, 30-95%, 35-45%, 35-50%, 35-55%, 35-60%, 35-65%, 35-70%, 35-75%, 35-80%, 35-85%, 35-90%, 35-95%, 40-50%, 40-55%, 40-60%, 40-65%, 40-70%, 40-75%, 40-80%, 40-85%, 40-90%, 40-95%, 45-55%, 45-60%, 45-65%, 45-70%, 45-75%, 45-80%, 45-85%, 45-90%, 45-95%, 50-60%, 50-65%, 50-70%, 50-75%, 50-80%, 50-85%, 50-90%, 50-95%, 55-65%, 55-70%, 55-75%, 55-80%, 55-85%, 55-90%, 55-95%, 60-70%, 60-75%, 60-80%, 60-85%, 60-90%, 60-95%, 65-75%, 65-80%, 65-85%, 65-90%, 65-95%, 70-80%, 70-85%, 70-90%, 70-95%, 75-85%, 75-90%, 75-95%, 80-90%, 80-95%, or 90-95%.

[0397] In certain embodiments, the AAV particles comprising a viral genome with a nucleic acid sequence encoding one or more siRNA molecules may be used to suppress a target protein in sensory neurons in order to treat neurological disease. Target protein in sensory neurons may be suppressed by 5%, 10%, 15%, 20%, 25%, 30%, 35%, 40%, 45%, 50%, 55%, 60%, 65%, 70%, 75%, 80%, 85%, 90%, 95%, or more than 95%, 5-15%, 5-20%, 5-25%, 5-30%, 5-35%, 5-40%, 5-45%, 5-50%, 5-55%, 5-60%, 5-65%, 5-70%, 5-75%, 5-80%, 5-85%, 5-90%, 5-95%, 10-20%, 10-25%, 10-30%, 10-35%, 10-40%, 10-45%, 10-50%, 10-55%, 10-60%, 10-65%, 10-70%, 10-75%, 10-80%, 10-85%, 10-90%, 10-95%, 15-25%, 15-30%, 15-35%, 15-40%, 15-45%, 15-50%, 15-55%, 15-60%, 15-65%, 15-70%, 15-75%, 15-80%, 15-85%, 15-90%, 15-95%, 20-30%, 20-35%, 20-40%, 20-45%, 20-50%, 20-55%, 20-60%, 20-65%, 20-70%, 20-75%, 20-80%, 20-85%, 20-90%, 20-95%, 25-35%, 25-40%, 25-45%, 25-50%, 25-55%, 25-60%, 25-65%, 25-70%, 25-75%, 25-80%, 25-85%, 25-90%, 25-95%, 30-40%, 30-45%, 30-50%, 30-55%, 30-60%, 30-65%, 30-70%, 30-75%, 30-80%, 30-85%, 30-90%, 30-95%, 35-45%, 35-50%, 35-55%, 35-60%, 35-65%, 35-70%, 35-75%, 35-80%, 35-85%, 35-90%, 35-95%, 40-50%, 40-55%, 40-60%, 40-65%, 40-7%, 40-75%, 40-80%, 40-85%, 40-90%, 40-95%, 45-55%, 45-60%, 45-65%, 45-70%, 45-75%, 45-80%, 45-85%, 45-90%, 45-95%, 50-60%, 50-65%, 50-70%, 50-75%, 50-80%, 50-85%, 50-90%, 50-95%, 55-65%, 55-70%, 55-75%, 55-80%, 55-85%, 55-90%, 55-95%, 60-70%, 60-75%, 60-80%, 60-85%, 60-90%, 60-95%, 65-75%, 65-80%, 65-85%, 65-90%, 65-95%, 70-80%, 70-85%, 70-90%, 70-95%, 75-85%, 75-90%, 75-95%, 80-90%, 80-95%, or 90-95%. Target protein in the sensory neurons may be reduced may be 5%, 10%, 15%, 20%, 25%, 30%, 35%, 40%, 45%, 50%, 55%, 60%, 65%, 70%, 75%, 80%, 85%, 90%, 95%, or more than 95%, 5-15%, 5-20%, 5-25%, 5-30%, 5-35%, 5-40%, 5-45%, 5-50%, 5-55%, 5-60%, 5-65%, 5-70%, 5-75%, 5-80%, 5-85%, 5-90%, 5-95%, 10-20%, 10-25%, 10-30%, 10-35%, 10-40%, 10-45%, 10-50%, 10-55%, 10-60%, 10-65%, 10-70%, 10-75%, 10-80%, 10-85%, 10-90%, 10-95%, 15-25%, 15-30%, 15-35%, 15-40%, 15-45%, 15-50%, 15-55%, 15-60%, 15-65%, 15-70%, 15-75%, 15-80%, 15-85%, 15-90%, 15-95%, 20-30%, 20-35%, 20-40%, 20-45%, 20-50%, 20-55%, 20-60%, 20-65%, 20-70%, 20-75%, 20-80%, 20-85%, 20-90%, 20-95%, 25-35%, 25-40%, 25-45%, 25-50%, 25-55%, 25-60%, 25-65%, 25-70%, 25-75%, 25-80%, 25-85%, 25-90%, 25-95%, 30-40%, 30-45%, 30-50%, 30-55%, 30-60%, 30-65%, 30-70%, 30-75%, 30-80%, 30-85%, 30-90%, 30-95%, 35-45%, 35-50%, 35-55%, 35-60%, 35-65%, 35-70%, 35-75%, 35-80%, 35-85%, 35-90%, 35-95%, 40-50%, 40-55%, 40-60%, 40-65%, 40-70%, 40-75%, 40-80%, 40-85%, 40-90%, 40-95%, 45-55%, 45-60%, 45-65%, 45-70%, 45-75%, 45-80%, 45-85%, 45-90%, 45-95%, 50-60%, 50-65%, 50-70%, 50-75%, 50-80%, 50-85%, 50-90%, 50-95%, 55-65%, 55-70%, 55-75%, 55-80%, 55-85%, 55-90%, 55-95%, 60-70%, 60-75%, 60-80%, 60-85%, 60-90%, 60-95%, 65-75%, 65-80%, 65-85%, 65-90%, 65-95%, 70-80%, 70-85%, 70-90%, 70-95%, 75-85%, 75-90%, 75-95%, 80-90%, 80-95%, or 90-95%.

[0398] In certain embodiments, the AAV particles comprising a viral genome with a nucleic acid sequence encoding one or more siRNA molecules may be used to suppress a target protein and reduce symptoms of neurological disease in a subject. The suppression of target protein and/or the reduction of symptoms of neurological disease may be, independently, reduced or suppressed by 5%, 10%, 15%, 20%, 25%, 30%, 35%, 40%, 45%, 50%, 55%, 60%, 65%, 70%, 75%, 80%, 85%, 90%, 95%, or more than 95%, 5-15%, 5-20%, 5-25%, 5-30%, 5-35%, 5-40%, 5-45%, 5-50%, 5-55%, 5-60%, 5-65%, 5-70%, 5-75%, 5-80%, 5-85%, 5-90%, 5-95%, 10-20%, 10-25%, 10-30%, 10-35%, 10-40%, 10-45%, 10-50%, 10-55%, 10-60%, 10-65%, 10-70%, 10-75%, 10-80%, 10-85%, 10-90%, 10-95%, 15-25%, 15-30%, 15-35%, 15-40%, 15-45%, 15-50%, 15-55%, 15-60%, 15-65%, 15-70%, 15-75%, 15-80%, 15-85%, 15-90%, 15-95%, 20-30%, 20-35%, 20-40%, 20-45%, 20-50/, 20-55%, 20-60%, 20-65%, 20-70%, 20-75%, 20-80%, 20-85%, 20-90%, 20-95%, 25-35%, 25-40%, 25-45%, 25-50%, 25-55%, 25-60%, 25-65%, 25-70%, 25-75%, 25-80%, 25-85%, 25-90%, 25-95%, 30-40%, 30-45%, 30-50%, 30-55%, 30-60%, 30-65%, 30-70%, 30-75%, 30-80%, 30-85%, 30-90%, 30-95%, 35-45%, 35-50%, 35-55%, 35-60%, 35-65%, 35-70%, 35-75%, 35-80%, 35-85%, 35-90%, 35-95%, 40-50%, 40-55%, 40-60%, 40-65%, 40-70%, 40-75%, 40-80%, 40-85%, 40-90%, 40-95%, 45-55%, 45-60%, 45-65%, 45-70%, 45-75%, 45-80%, 45-85%, 45-90%, 45-95%, 50-60%, 50-65%, 50-70%, 50-75%, 50-80%, 50-85%, 50-90%, 50-95%, 55-65%, 55-70%, 55-75%, 55-80%, 55-85%, 55-90%, 55-95%, 60-70%, 60-75%, 60-80%, 60-85%, 60-90%, 60-95%, 65-75%, 65-80%, 65-85%, 65-90%, 65-95%, 70-80%, 70-85%, 70-90%, 70-95%, 75-85%, 75-90%, 75-95%, 80-90%, 80-95%, or 90-95%.

[0399] In certain embodiments, the AAV particles comprising a viral genome with a nucleic acid sequence encoding one or more siRNA molecules may be used to reduce the decline of functional capacity and activities of daily living as measured by a standard evaluation system such as, but not limited to, the total functional capacity (TFC) scale.

[0400] In some embodiments, the present composition is administered as a solo therapeutic or as combination therapeutic for the treatment of neurological disease.

[0401] The AAV particles comprising a viral genome with a nucleic acid sequence encoding one or more siRNA molecules may be used in combination with one or more other therapeutic agents. By “in combination with,” it is not intended to imply that the agents must be administered at the same time and/or formulated for delivery together, although these methods of delivery are within the scope of the present disclosure. Compositions can be administered concurrently with, prior to, or subsequent to, one or more other desired therapeutics or medical procedures. In general, each agent will be administered at a dose and/or on a time schedule determined for that agent.

[0402] Therapeutic agents that may be used in combination with the AAV particles comprising a viral genome with a nucleic acid sequence encoding one or more siRNA molecules can be small molecule compounds which are antioxidants, anti-inflammatory agents, anti-apoptosis agents, calcium regulators, antiglutamatergic agents, structural protein inhibitors, compounds involved in muscle function, and compounds involved in metal ion regulation.

[0403] Compounds tested for treating neurological disease which may be used in combination with the AAV particles comprising a viral genome with a nucleic acid sequence encoding one or more siRNA molecules include, but are not limited to, cholinesterase inhibitors (donepezil, rivastigmine, galantamine), NMDA receptor antagonists such as memantine, anti-psychotics, anti-depressants, anti-convulsants (e.g., sodium valproate and levetiracetam for myoclonus), secretase inhibitors, amyloid aggregation inhibitors, copper or zinc modulators, BACE inhibitors, inhibitors of tau aggregation, such as Methylene blue, phenothiazines, anthraquinones, n-phenylamines or rhodamines, microtubule stabilizers such as NAP, taxol or paclitaxel, kinase or phosphatase inhibitors such as those targeting GSK3p (lithium) or PP2A, immunization with AP peptides or tau phospho-epitopes, anti-tau or anti-amyloid antibodies, dopamine-depleting agents (e.g., tetrabenazine for chorea), benzodiazepines (e.g., clonazepam for myoclonus, chorea, dystonia, rigidity, and/or spasticity), amino acid precursors of dopamine (e.g., levodopa for rigidity), skeletal muscle relaxants (e.g., baclofen, tizanidine for rigidity and/or spasticity), inhibitors for acetylcholine release at the neuromuscular junction to cause muscle paralysis (e.g., botulinum toxin for bruxism and/or dystonia), atypical neuroleptics (e.g., olanzapine and quetiapine for psychosis and/or irritability, risperidone, sulpiride and haloperidol for psychosis, chorea and/or irritability, clozapine for treatment-resistant psychosis, aripiprazole for psychosis with prominent negative symptoms), selective serotonin reuptake inhibitors (SSRIs) (e.g., citalopram, fluoxetine, paroxetine, sertraline, mirtazapine, venlafaxine for depression, anxiety, obsessive compulsive behavior and/or irritability), hypnotics (e.g., xopiclone and/or zolpidem for altered sleep-wake cycle), anticonvulsants (e.g., sodium valproate and carbamazepine for mania or hypomania) and mood stabilizers (e.g., lithium for mania or hypomania).

[0404] Neurotrophic factors may be used in combination therapy with the AAV particles comprising a viral genome with a nucleic acid sequence encoding one or more siRNA molecules for treating neurological disease. Generally, a neurotrophic factor is defined as a substance that promotes survival, growth, differentiation, proliferation and/or maturation of a neuron, or stimulates increased activity of a neuron. In some embodiments, the present methods further comprise delivery of one or more trophic factors into the subject in need of treatment. Trophic factors may include, but are not limited to, IGF-I, GDNF, BDNF, CTNF, VEGF, Colivelin, Xaliproden, Thyrotrophin-releasing hormone and ADNF, and variants thereof.

[0405] In one aspect, the AAV particle encoding the nucleic acid sequence for the at least one siRNA duplex targeting the gene of interest may be co-administered with AAV particles expressing neurotrophic factors such as AAV-IGF-I (See e.g., Vincent et al., Neuromolecular medicine, 2004, 6, 79-85; the content of which is incorporated herein by reference in its entirety) and AAV-GDNF (See e.g., Wang et al., J Neurosci., 2002, 22, 6920-6928; the contents of which are incorporated herein by reference in their entirety).

[0406] In certain embodiments, administration of the AAV particles to a subject will reduce the expression of a target protein in a subject and the reduction of expression of the target protein will reduce the effects and/or symptoms of neurological disease in a subject.

### IV. Formulation

### Pharmaceutical Compositions

[0407] According to the present disclosure the AAV particles may be prepared as pharmaceutical compositions. As used herein the term “pharmaceutical composition” refers to compositions comprising at least one active ingredient and optionally, one or more pharmaceutically acceptable excipients.

[0408] Relative amounts of the active ingredient (e.g. AAV particle), a pharmaceutically acceptable excipient, and/or any additional ingredients in a pharmaceutical composition in accordance with the present disclosure may vary. Differences in the constitution of a pharmaceutical composition may depend upon the identity, size, and/or condition of the subject being treated, the route by which the composition is to be administered, the nature of the AAV particle composition or the excipient, and/or any other factor. The composition may comprise between 0.0001% and 99% (w/w) of the active ingredient. By way of example, the composition may comprise between 0.0001% and 100%, e.g., between 0.5 and 50%, between 1-30%, between 5-80%, or at least 80% (w/w) active ingredient.

[0409] In certain embodiments, the pharmaceutical composition comprises AAV particles having one type of AAV capsid protein. In another embodiment, the pharmaceutical composition comprises a mixture of AAV particles, having different AAV capsid proteins.

[0410] In some embodiments, the pharmaceutical compositions described herein may comprise at AAV particles comprising a viral genome encoding at least one payload. As a non-limiting example, the pharmaceutical compositions may contain an AAV particle with 1, 2, 3, 4, 5, or more payloads.

[0411] Although the descriptions of pharmaceutical compositions provided herein are principally directed to pharmaceutical compositions which are suitable for administration to humans, it will be understood by the skilled artisan that such compositions are generally suitable for administration to any other animal, e.g., to non-human animals, e.g. non-human mammals. Modification of pharmaceutical compositions suitable for administration to humans in order to render the compositions suitable for administration to various animals is well understood, and the ordinarily skilled veterinary pharmacologist can design and/or perform such modification with merely ordinary, if any, experimentation. Subjects to which administration of the pharmaceutical compositions is contemplated include, but are not limited to, humans and/or other primates: mammals, including commercially relevant mammals such as cattle, pigs, horses, sheep, cats, dogs, mice, rats, birds, including commercially relevant birds such as poultry, chickens, ducks, geese, and/or turkeys.

[0412] In some embodiments, pharmaceutical compositions are administered to humans, human patients or subjects.

[0413] In certain embodiments, the pharmaceutical composition is administered to the human, human patient, and/or subject by intravenous delivery. The pharmaceutical composition may be prepared in a manner optimized for administration by intravenous delivery.

### Formulation

[0414] Formulations of the present disclosure can include, without limitation, one or more AAV particles, saline, liposomes, lipid nanoparticles, polymers, peptides, proteins, cells transfected with viral vectors (e.g., for transfer or transplantation into a subject) and combinations thereof.

[0415] Formulations of the pharmaceutical compositions described herein may be prepared by any method known or hereafter developed in the art of pharmacology.

[0416] In general, such preparatory methods include the step of associating the active ingredient with an excipient and/or one or more other accessory ingredients. As used herein, the phrase “active ingredient” generally refers either to an AAV particle with a viral genome encoding a payload or to the end product, or payload itself.

[0417] A pharmaceutical composition in accordance with the present disclosure may be prepared, packaged, and/or sold in bulk, as a single unit dose, and/or as a plurality of single unit doses. As used herein, a “unit dose” refers to a discrete amount of the pharmaceutical composition comprising a predetermined amount of the active ingredient. The amount of the active ingredient is generally equal to the dosage of the active ingredient which would be administered to a subject and/or a convenient fraction of such a dosage such as, for example, one-half or one-third of such a dosage.

[0418] In some embodiments, the AAV formulations described herein may contain sufficient AAV particles for expression of at least one expressed functional payload. As a non-limiting example, the AAV particles may contain viral genomes encoding 1, 2, 3, 4 or 5 functional payloads.

[0419] In some embodiments, the formulations described herein may contain at least one AAV particle comprising a viral genome with a nucleic acid sequence encoding a protein of interest. The protein of interest may include but is not limited to an antibody, aromatic L-amino acid decarboxylase (AADC), survival motor neuron 1 (SMN1), frataxin (FXN), APOE (APOE2, APOE3, or APOE4), GBA1, GRN, ASPA, CLN2, GLB1, SGSH, NAGLU, IDS, NPC1, or GAN.

[0420] In some embodiments, the formulations described herein may contain at least one AAV particle comprising a viral genome with a nucleic acid sequence encoding the siRNA molecules described herein. In certain embodiments, the siRNA molecules may target a gene of interest at one target site. In another embodiment, the formulation comprises a plurality of AAV particles, each AAV particle comprising a viral genome with a nucleic acid sequence encoding a siRNA molecule targeting the gene of interest at a different target site. The target gene may be targeted at 1, 2, 3, 4, 5 or more than 5 sites. In certain embodiments, the target gene may include, but is not limited to, SOD1. MAPT, APOE, HTT, C90RF72, TDP-43, APP, BACE, SNCA, ATXN1, ATXN2, ATXN3, ATXN7, SCN1A-SCN5A, or SCN8A-SCN11A.

[0421] According to the present disclosure AAV particles may be formulated for systemic delivery. In another embodiment, AAV particles may be formulated for CNS delivery. The formulation of AAV particles may be optimized for delivery to any target tissue by any administration route described herein. As a non-limiting example, the formulation of AAV particles may be optimized for CNS as the target tissue and intravenous administration as the method of delivery. Alternatively, the formulation of AAV particles may be optimized for DRG as the target tissue and intravenous administration as the method of delivery.

[0422] The AAV particles of the disclosure can be formulated using one or more excipients to: (1) increase stability; (2) increase cell transfection or transduction; (3) permit the sustained or delayed expression of the payload; (4) alter the biodistribution (e.g., target the viral particle to specific tissues or cell types); (5) increase the translation of encoded protein; (6) alter the release profile of encoded protein; and/or (7) allow for regulatable expression of the payload.

[0423] In some embodiments, a pharmaceutically acceptable excipient may be at least 95%, at least 96%, at least 97%, at least 98%, at least 99%, or 100% pure. In some embodiments, an excipient is approved for use for humans and for veterinary use. In some embodiments, an excipient may be approved by United States Food and Drug Administration. In some embodiments, an excipient may be of pharmaceutical grade. In some embodiments, an excipient may meet the standards of the United States Pharmacopoeia (USP), the European Pharmacopoeia (EP), the British Pharmacopoeia. and/or the International Pharmacopoeia.

[0424] Excipients, as used herein, include, but are not limited to, any and all solvents, dispersion media, diluents, or other liquid vehicles, dispersion or suspension aids, surface active agents, isotonic agents, thickening or emulsifying agents, preservatives, and the like, as suited to the particular dosage form desired. Various excipients for formulating pharmaceutical compositions and techniques for preparing the composition are known in the art (see Remington: The Science and Practice of Pharmacy, 21st Edition, A. R. Gennaro, Lippincott, Williams & Wilkins, Baltimore, Md., 2006, incorporated herein by reference in its entirety). The use of a conventional excipient medium may be contemplated within the scope of the present disclosure, except insofar as any conventional excipient medium may be incompatible with a substance or its derivatives, such as by producing any undesirable biological effect or otherwise interacting in a deleterious manner with any other component(s) of the pharmaceutical composition.

[0425] Exemplary diluents include, but are not limited to, calcium carbonate, sodium carbonate, calcium phosphate, dicalcium phosphate, calcium sulfate, calcium hydrogen phosphate, sodium phosphate lactose, sucrose, cellulose, microcrystalline cellulose, kaolin, mannitol, sorbitol, inositol, sodium chloride, dry starch, cornstarch, powdered sugar, etc., and/or combinations thereof.

[0426] In some embodiments, AAV particle formulations may comprise at least one inactive ingredient. As used herein, the term “inactive ingredient” refers to one or more agents that do not contribute to the activity of the active ingredient of the pharmaceutical composition included in formulations. In some embodiments, all, none or some of the inactive ingredients which may be used in the formulations of the present disclosure may be approved by the US Food and Drug Administration (FDA). Inactive ingredients and their use are well known in the art.

[0427] Pharmaceutical composition formulations of AAV particles disclosed herein may include cations or anions. In certain embodiments, the formulations include metal cations such as, but not limited to, Zn2+, Ca2+, Cu2+, Mn2+, Mg+ and combinations thereof. As a non-limiting example, formulations may include polymers and complexes with a metal cation (&e e.g., U.S. Pat. Nos. 6,265,389 and 6,555,525, each of which is herein incorporated by reference in its entirety).

[0428] Formulations of the disclosure may also include one or more pharmaceutically acceptable salts. As used herein, “pharmaceutically acceptable salts” refers to derivatives of the disclosed compounds wherein the parent compound is modified by converting an existing acid or base moiety to its salt form (e.g., by reacting the free base group with a suitable organic acid). Examples of pharmaceutically acceptable salts include, but are not limited to, mineral or organic acid salts of basic residues such as amines; alkali or organic salts of acidic residues such as carboxylic acids; and the like. Representative acid addition salts include acetate, acetic acid, adipate, alginate, ascorbate, aspartate, benzenesulfonate, benzene sulfonic acid, benzoate, bisulfate, borate, butyrate, camphorate, camphor sulfonate, citrate, cyclopentane propionate, digluconate, dodecyl sulfate, ethane sulfonate, fumarate, glucoheptonate, glycerophosphate, hemi sulfate, heptonate, hexanoate, hydrobromide, hydrochloride, hydroiodide, 2-hydroxy-ethanesulfonate, lactobionate, lactate, laurate, lauryl sulfate, malate, maleate, malonate, methane sulfonate, 2-naphthalenesulfonate, nicotinate, nitrate, oleate, oxalate, palmitate, pamoate, pectinate, persulfate, 3-phenylpropionate, phosphate, picrate, pivalate, propionate, stearate, succinate, sulfate, tartrate, thiocyanate, toluene sulfonate, undecanoate, valerate salts, and the like. Representative alkali or alkaline earth metal salts include sodium, lithium, potassium, calcium, magnesium, and the like, as well as nontoxic ammonium, quaternary ammonium, and amine cations, including, but not limited to ammonium, tetramethylammonium, tetraethylammonium, methylamine, dimethylamine, trimethylamine, triethylamine, ethylamine, and the like. The pharmaceutically acceptable salts of the present disclosure include the conventional non-toxic salts of the parent compound formed, for example, from non-toxic inorganic or organic acids.

[0429] Solvates may be prepared by crystallization, recrystallization, or precipitation from a solution that includes organic solvents, water, or a mixture thereof. Examples of suitable solvents are ethanol, water (for example, mono-, di-, and tri-hydrates), N-methylpyrrolidinone (NMP), dimethyl sulfoxide (DMSO), N,N′-dimethylformamide (DMF), N,N′-dimethylacetamide (DMAC), 1,3-dimethyl-2-imidazolidinone (DMEU), 1,3-dimethyl-3,4,5,6-tetrahydro-2-(1H)-pyrimidinone (DMPU), acetonitrile (ACN), propylene glycol, ethyl acetate, benzyl alcohol, 2-pyrrolidone, benzyl benzoate, and the like. When water is the solvent, the solvate is referred to as a “hydrate.”

[0430] In certain embodiments, the AAV particles of the disclosure may be formulated in phosphate buffered saline (PBS), in combination with an ethylene oxide/propylene oxide copolymer (also known as pluronic or poloxamer).

[0431] In certain embodiments, the AAV particles of the disclosure may be formulated in PBS with 0.001% pluronic acid (F-68) (poloxamer 188) at a pH of about 7.0.

[0432] In certain embodiments, the AAV particles of the disclosure may be formulated in PBS with 0.001% pluronic acid (F-68) (poloxamer 188) at a pH of about 7.3.

[0433] In certain embodiments, the AAV particles of the disclosure may be formulated in PBS with 0.001% pluronic acid (F-68) (poloxamer 188) at a pH of about 7.4.

[0434] In certain embodiments, the AAV particles of the disclosure may be formulated in a solution comprising sodium chloride, sodium phosphate and an ethylene oxide/propylene oxide copolymer.

[0435] In certain embodiments, the AAV particles of the disclosure may be formulated in a solution comprising sodium chloride, sodium phosphate dibasic, sodium phosphate monobasic and poloxamer 188/pluronic acid (F-68).

[0436] In certain embodiments, the AAV particles of the disclosure may be formulated in a solution comprising sodium chloride, potassium phosphate monobasic, sodium phosphate dibasic, and poloxamer 188/pluronic acid (F-68).

[0437] In certain embodiments. AAV particles are formulated in a solution comprising about 200 mM sodium chloride (NaCl), about 1 mM potassium phosphate monobasic (KH₂PO₄), about 3 mM sodium phosphate dibasic (Na₂HPO₄), and about 0.001% Pluronic F-68/poloxamer 188 at a pH of about 7.4. The concentration of sodium chloride in the final solution may be 150 mM-250 mM. As non-limiting examples, the concentration of sodium chloride in the final solution may be 150 mM, 160 mM, 170 mM, 180 mM, 190 mM, 200 mM, 210 mM, 220 mM, 230 mM, 240 mM, 250 mM, or any concentration in between. The concentration of potassium phosphate monobasic in the final solution may be 0.01 mM-3 mM. As non-limiting examples, the concentration of potassium phosphate monobasic in the final solution may be 0.01 mM, 0.5 mM, 1 mM, 2 mM, 3 mM, or any concentration in between. The concentration of sodium phosphate dibasic in the final solution may be 1 mM-10 mM. As non-limiting examples, the concentration of sodium phosphate dibasic in the final solution may be 1 mM, 2 mM, 3 mM, 4 mM, 5 mM, 6 mM, 7 mM, 8 mM, 9 mM, 10 mM or any concentration in between. The concentration of pluronic F-68 (poloxamer 188) may be 0.0001%-1%. As non-limiting examples, the concentration of pluronic F-68 (poloxamer 188) may be 0.0001%, 0.0005%, 0.001%, 0.005%, 0.01%, 0.05%, 0.1%, 0.5%, or 1%. The final solution may have a pH of 6.8-7.7. Non-limiting examples for the pH of the final solution include a pH of 6.8, 6.9, 7.0, 7.1, 7.2, 7.3, 7.4, 7.5, 7.6, or 7.7.

### V. Dosing and Administration

[0438] In certain embodiments, the AAV particles may be administered to a subject in a therapeutically effective amount to reduce the symptoms of disease, such as a neurological disease (affecting either the CNS or PNS), of a subject (e.g., determined using a known evaluation method). In some embodiments the subject is a mammal. A mammal may include, a mouse, a non-human primate, and/or a human.

### Administration

[0439] The AAV particles of the present disclosure may be administered by any delivery route which results in a therapeutically effective outcome. These include, but are not limited to, intravenous (into a vein), intraparenchymal (CNS), intraparenchymal (brain), intraparenchymal (spinal cord), intraparenchymal (DRG), intracranial, intrastriatal, intrathalamic, enteral (into the intestine), gastroenteral, epidural (into the dura mater), oral (by way of the mouth), transdermal, intracerebral (into the cerebrum), intracerebroventricular (into the cerebral ventricles), sub-pial (between pia and CNS parenchyma), intracarotid arterial (into the intracarotid artery), epicutaneous (application onto the skin), intradermal, (into the skin itself), subcutaneous (under the skin), nasal administration (through the nose), intravenous bolus, intravenous drip, intra-arterial (into an artery), systemic, intramuscular (into a muscle), intracardiac (into the heart), intraosseous infusion (into the bone marrow), intrathecal (into the spinal canal), intraperitoneal, (infusion or injection into the peritoneum), intravesical infusion, intravitreal. (through the eye), intracavernous injection (into a pathologic cavity) intracavitary (into the base of the penis), intravaginal administration, intrauterine, extra-amniotic administration, transdermal (diffusion through the intact skin for systemic distribution), transmucosal (diffusion through a mucous membrane), transvaginal, insufflation (snorting), sublingual, sublabial, enema, eye drops (onto the conjunctiva), or in ear drops, auricular (in or by way of the ear), buccal (directed toward the check), conjunctival, cutaneous, dental (to a tooth or teeth), electro-osmosis, endocervical, endosinusial, endotracheal, extracorporeal, hemodialysis, infiltration, interstitial, intra-abdominal, intra-amniotic, intra-articular, intrabiliary, intrabronchial, intrabursal, intracartilaginous (within a cartilage), intracaudal (within the canda equine), intracisternal (within the cistema magna cerebellomedularis), intracomeal (within the comea), dental intracoronal, intracoronary (within the coronary arteries), intracorporus cavemosum (within the dilatable spaces of the corporus cavemosa of the penis), intradiscal (within a disc), intraductal (within a duct of a gland), intraduodenal (within the duodenum), intradural (within or beneath the dura), intraepidermal (to the epidermis), intraesophageal (to the esophagus), intragastric (within the stomach), intragingival (within the gingivae), intraileal (within the distal portion of the small intestine), intralesional (within or introduced directly to a localized lesion), intraluminal (within a lumen of a tube), intralymphatic (within the lymph), intramedullary (within the marrow cavity of a bone), intrameningeal (within the meninges), intramyocardial (within the myocardium), intraocular (within the eye), intraovarian (within the ovary), intrapericardial (within the pericardium), intrapleural (within the pleura), intraprostatic (within the prostate gland), intrapulmonary (within the lungs or its bronchi), intrasinal (within the nasal or periorbital sinuses), intraspinal (within the vertebral column), intrasynovial (within the synovial cavity of a joint), intratendinous (within a tendon), intratesticular (within the testicle), intrathecal (within the cerebrospinal fluid at any level of the cerebrospinal axis), intrathoracic (within the thorax), intratubular (within the tubules of an organ), intratumor (within a tumor), intratympanic (within the aurus media), intravascular (within a vessel or vessels), intraventricular (within a ventricle), iontophoresis (by means of electric current where ions of soluble salts migrate into the tissues of the body), irrigation (to bathe or flush open wounds or body cavities), laryngeal (directly upon the larynx), nasogastric (through the nose and into the stomach), occlusive dressing technique (topical route administration which is then covered by a dressing which occludes the area), ophthalmic (to the external eye), oropharyngeal (directly to the mouth and pharynx), parenteral, percutaneous, periarticular, peridural, perineural, periodontal, rectal, respiratory (within the respiratory tract by inhaling orally or nasally for local or systemic effect), retrobulbar (behind the pons or behind the eyeball), soft tissue, subarachnoid, subconjunctival, submucosal, topical, transplacental (through or across the placenta), transtracheal (through the wall of the trachea), transtympanic (across or through the tympanic cavity), ureteral (to the ureter), urethral (to the urethra), vaginal, caudal block, diagnostic, nerve block, biliary perfusion, cardiac perfusion, photopheresis and spinal.

[0440] In certain embodiments, the AAV particles of the disclosure are administered by intraparenchymal injection. In other words, the AAV particles are delivered directly to the target tissue. AAV particles of the disclosure may be administered by intraparenchymal delivery to central nervous system tissue, such as but not limited to, the putamen, the thalamus, and/or the cortex. AAV particles of the disclosure may be administered by intraparenchymal delivery to the peripheral nervous system tissue, such as, but not limited to, the dorsal root ganglia.

[0441] In some embodiments, the AAV particles that may be administered to a subject by peripheral injections. AAV particles may be administered systemically. In certain embodiments, AAV particles are administered intravenously.

[0442] Intravenous administration encompasses the use of any vein of the subject for the delivery of the AAV particles of the disclosure. Non-limiting examples of target veins include, median cubital vein, orbital veins (superior or inferior ophthalmic, saphenous veins (greater or lesser), internal jugular, and/or femoral vein. When the subject is a mouse, the target vein may be the tail vein or the orbital veins.

[0443] In certain embodiments, the AAV particles of the present disclosure may be administered via intravenous delivery to cells of the central nervous system (CNS), such as, but not limited to, neurons, astrocytes, microglia and/or oligodendrocytes.

[0444] In certain embodiments, the AAV particles of the present disclosure may be administered via intravenous delivery to cells of the peripheral nervous system (PNS), such as, but not limited to, neurons and/or Schwann cells.

[0445] In certain embodiments, the AAV particles of the present disclosure may be administered via intravenous delivery to DRG neurons.

[0446] In certain embodiments, the AAV particles may be delivered by injection into a CSF pathway (e.g., intrathecal or intraventricular).

[0447] In certain embodiments, the AAV particles of the present disclosure may be administered to a subject by intracranial delivery (See, e.g., U.S. Pat. No. 8,119,611; the contents of which are incorporated herein by reference in their entirety).

[0448] In certain embodiments, the AAV particle may be administered to the CNS or PNS in a therapeutically effective amount to improve function and/or survival for a subject with a neurological disease. As a non-limiting example, the vector may be administered intravenously.

[0449] The AAV particles of the present disclosure may be administered in any suitable form, either as a liquid solution or suspension, as a solid form suitable for liquid solution or suspension in a liquid solution. The AAV particles may be formulated with any appropriate and pharmaceutically acceptable excipient.

[0450] In some embodiments, the AAV particles of the present disclosure may be delivered to a subject via a single route of administration. In other embodiments, the AAV particles may be delivered to a subject via more than one route of administration.

[0451] In some embodiments, the AAV particles of the present disclosure may be delivered to a subject via a multi-site route of administration. AAV particles may be administered at 2, 3, 4, 5 or more than 5 sites.

[0452] In some embodiments, two or more compositions comprising AAV particles may be administered to the same subject. In some embodiments, the two or more AAV particle compositions may be administered via the same route. In some embodiments, the two or more AAV particle compositions may be administered via different routes. Two or more compositions comprising AAV particles may be administered simultaneously, or at different times. In some embodiments, one composition comprising AAV particles may be administered by an intraparenchymal route, while another composition comprising AAV particles may be administered by an intravenous route.

[0453] In some embodiments, AAV particles may be administered by injection. In some embodiments, AAV particles are administered by infusion. In some embodiments, AAVs may be administered as a bolus.

[0454] Injection sites for AAV particle administration may include, but are not limited to, the putamen, thalamus, cortex, hippocampus, dorsal root ganglia, and deep cerebellar nuclei.

[0455] In certain embodiments, administration of the AAV particles of the present disclosure occurs only once, and serves as a one-time treatment. In other embodiments, administration of the AAV particles of the present disclosure occurs more than once.

### Dosing

[0456] The present disclosure provides methods of administering AAV particles in accordance with the disclosure to a subject in need thereof. The pharmaceutical, diagnostic, or prophylactic AAV particles and compositions of the present disclosure may be administered to a subject using any amount and any route of administration effective for preventing, treating, managing, or diagnosing diseases, disorders and/or conditions. The exact amount required will vary from subject to subject, depending on the species, age, and general condition of the subject, the severity of the disease, the particular composition, its mode of administration, its mode of activity, and the like. The subject may be a human, a mammal, or an animal.

[0457] Compositions in accordance with the disclosure are typically formulated in unit dosage form for ease of administration and uniformity of dosage. It will be understood, however, that the total daily usage of the compositions of the present disclosure may be decided by the attending physician within the scope of sound medical judgment. The specific therapeutically effective, prophylactically effective, or appropriate diagnostic dose level for any particular individual will depend upon a variety of factors including the disorder being treated and the severity of the disorder: the activity of the specific payload employed: the specific composition employed; the age, body weight, general health, sex and diet of the patient, the time of administration, route of administration, and rate of excretion of the specific AAV particle employed: the duration of the treatment; drugs used in combination or coincidental with the specific AAV particle employed: and like factors well known in the medical arts.

[0458] In certain embodiments, AAV particle pharmaceutical compositions in accordance with the present disclosure may be administered at dosage levels sufficient to deliver from about 0.0001 mg/kg to about 100 mg/kg, from about 0.001 mg/kg to about 0.05 mg/kg, from about 0.005 mg/kg to about 0.05 mg/kg, from about 0.001 mg/kg to about 0.005 mg/kg, from about 0.05 mg/kg to about 0.5 mg/kg, from about 0.01 mg/kg to about 50 mg/kg, from about 0.1 mg/kg to about 40 mg/kg, from about 0.5 mg/kg to about 30 mg/kg, from about 0.01 mg/kg to about 10 mg/kg, from about 0.1 mg/kg to about 10 mg/kg, or from about 1 mg/kg to about 25 mg/kg, of subject body weight to obtain the desired therapeutic, diagnostic, or prophylactic effect. It will be understood that the above dosing concentrations may be converted to vg or viral genomes per kg or into total viral genomes administered by one of skill in the art.

[0459] In certain embodiments. AAV particle pharmaceutical compositions in accordance with the present disclosure may be administered at about 0.1-600 μl/site, or about 0.1 to about 0.5 μl/site, about 0.5 to about 1 μl/site, about 1 to about 10 μl/site, about 10 to about 600 μl/site, about 50 to about 500 μl/site, about 100 to about 400 μl/site, about 120 to about 300 μl/site, about 140 to about 200 μl/site, about 160 μl/site. As non-limiting examples, AAV particles may be administered at 0.5 μl/site, 50 μl/site, 150 μl/site, 160 μl/site or 250 μl/site.

[0460] In certain embodiments, delivery of the compositions in accordance with the present disclosure to cells comprises a rate of delivery defined by [VG/hour=mL/hour*VG/mL] wherein VG is viral genomes, VG/mL is composition concentration, and mL/hour is rate of delivery.

[0461] In certain embodiments, delivery of AAV particle compositions to cells may comprise a total concentration per subject between about 1×10⁶ VG (viral genome) and about 1×10¹⁶ VG. In some embodiments, delivery may comprise a composition concentration of about 1×10⁶, 2×10⁶, 3×10⁶, 4×10⁶, 5×10⁶, 6×10⁶, 7×10⁶, 8×10⁶, 9×10⁶, 1×10⁷, 2×10⁷, 3×10⁷, 4×10⁷, 5×10⁷, 6×10⁷, 7×10⁷, 8×10⁷, 9×10⁷, 1×10⁸, 2×10⁸, 3×10⁸, 4×10⁸, 5×10⁸, 6×10⁸, 7×10⁸, 8×10⁸, 9×10⁸, 1×10⁹, 2×10⁹, 3×10⁹, 4×10⁹, 5×10⁹, 6×10⁹, 7×10⁹, 8×10⁹, 9×10⁹, 1×10¹⁰, 1.5×10¹⁰, 2×10¹⁰, 2.5×10¹⁰, 3×10¹⁰, 4×10¹⁰, 5×10¹⁰, 6×10¹⁰, 7×10¹⁰, 7.5×10¹⁰, 8×10¹⁰, 9×10¹⁰, 1×10¹¹, 1.25×10¹¹, 2×10¹¹, 2.1×10¹¹, 2.2×10¹¹, 2.3×10¹¹, 2.4×10¹¹, 2.5×10¹¹, 2.6×10¹, 2.7×10¹¹. 2.8×10¹¹, 2.9×10¹¹, 3×10¹¹, 3.75×10¹¹, 4×10¹¹, 5×10¹¹, 6×10¹¹, 6.25×10¹, 6.75×10¹, 7×10¹¹, 7.1×10¹¹, 7.2×10¹¹, 7.3×10, 7.4×10¹¹, 7.5×10, 7.6×10¹¹, 7.7×10¹¹, 7.8×10¹¹, 7.9×10¹¹, 8×10¹¹, 9×10¹¹, 1×10¹², 1.1×10¹², 0.2×10¹², 1.3×10¹², 1.4×10², 1.5×10¹¹, 1.6×10¹², 1.7×10², 1.8×10², 1.9×10², 2×10¹², 3×10¹², 4×10¹², 4.1×10¹², 4.2×10¹², 4.3×10¹², 4.4×10¹², 4.5×10¹²,4.6×10¹², 4.7×10¹², 4.8×10¹², 4.9×10¹², 5×10¹², 6×10¹², 6.1×10¹² 6.2×10¹², 6.3×10¹². 6.4×10¹², 6.5×10¹², 6.6×10¹², 6.7×10¹², 6.8×10¹², 6.9×10¹², 7×10¹², 8×10¹², 8.1×10¹², 8.2×10¹², 8.3×10¹², 8.4×10¹², 8.5×10¹², 8.6×10¹², 8.7×10¹², 8.8×10¹², 8.9×10¹², 9×10¹², 1×10¹³, 2×10¹³, 3×10¹³, 4×10¹³, 5×10¹³, 6×10¹³, 6.7×10¹³, 7×10¹³, 8×10¹³, 9×10¹³, 1×10¹⁴, 2×10¹⁴, 3×10¹⁴, 4×10¹⁴, 5×10¹⁴, 6×10¹⁴, 7×10¹⁴, 8×10¹⁴, 9×10¹⁴, 1×10¹⁵, 2×10¹⁵, 3×10¹⁵, 4×10¹⁵, 5×10¹⁵, 6×10¹⁵, 7×10¹⁵, 8×10¹⁵, 9×10¹⁵, or 1×10¹⁶ VG/subject.

[0462] In certain embodiments, delivery of AAV particle compositions to cells may comprise a total concentration per subject between about 1×10⁶ VG/kg and about 1×10¹⁶ VG/kg. In some embodiments, delivery may comprise a composition concentration of about 1×10⁶, 2×10⁶, 3×10⁶, 4×10⁶, 5×10⁶, 6×10⁶, 7×10⁶, 8×10⁶, 9×10⁶, 1×10⁷, 2×10⁷, 3×10⁷, 4×10⁷, 5×10⁷, 6×10⁷, 7×10⁷, 8×10⁷, 9×10⁷, 1×10⁸, 2×10⁸, 3×10⁸, 4×10⁸, 5×10⁸, 6×10⁸, 7×10⁸, 8×10⁸, 9×10⁸, 1×10⁹, 2×10⁹, 3×10⁹, 4×10⁹, 5×10⁹, 6×10⁹, 7×10⁹, 8×10⁹, 9×10⁹, 1×10¹⁰, 2×10¹⁰, 3×10¹⁰, 4×10¹⁰, 5×10¹⁰, 6×10¹⁰, 7×10¹⁰, 8×10¹⁰, 9×10¹⁰, 1×10¹¹, 2×10¹¹, 2.1×10¹¹, 2.2×10¹¹, 2.3×10¹¹, 2.4×10¹¹, 2.5×10¹¹, 2.6×10¹¹, 2.7×10¹¹, 2.8×10¹¹, 2.9×10¹¹, 3×10¹¹, 4×10¹¹, 5×10¹¹, 6×10¹¹, 7×10¹¹, 7.1×10¹¹, 7.2×10¹¹, 7.3×10¹¹, 7.4×10¹¹, 7.5×10¹¹, 7.6×10¹¹, 7.7×10¹¹, 7.8×10¹¹, 7.9×10¹¹, 8×10¹¹, 9×10¹¹, 1×10¹², 1.1×10¹², 1.2×10¹², 1.3×10¹², 1.4×10¹², 1.5×10¹², 1.6×10¹², 1.7×10¹², 1.8×10¹², 1.9×10¹², 2×10¹², 3×10¹², 4×10¹², 4.1×10¹², 4.2×10¹², 4.3×10¹², 4.4×10¹², 4.5×10¹²,4.6×10¹², 4.7×10¹², 4.8×10¹², 4.9×10¹², 5×10¹², 6×10¹², 6.1×10¹², 6.2×10¹², 6.3×10¹², 6.4×10¹², 6.5×10¹², 6.6×10¹², 6.7×10¹², 6.8×10¹², 6.9×10¹² 7×10¹², 8×10¹², 8.1×10¹², 8.2×10¹², 8.3×10¹², 8.4×10¹², 8.5×10¹², 8.6×10¹², 8.7×10¹², 8.8×10¹², 8.9×10¹², 9×10¹², 1×10¹³, 2×10¹³, 3×10¹³, 4×10¹³, 5×10¹³, 6×10¹³, 6.7×10¹³, 7×10¹³, 8×10¹³, 9×10¹³, 1×10¹⁴, 2×10¹⁴, 3×10¹⁴, 4×10¹⁴, 5×10¹⁴, 6×10¹⁴, 7×10¹⁴, 8×10¹⁴, 9×10¹⁴, 1×10¹⁵, 2×10¹⁵, 3×10¹⁵, 4×10¹⁵, 5×10¹⁵, 6×10¹⁵, 7×10¹⁵, 8×10¹⁵, 9×10¹⁵, or 1×10¹⁶ VG/kg. In certain embodiments, the delivery comprises a composition concentration of 1×10¹³ VG/kg. In certain embodiments, the delivery comprises a composition concentration of 2.1×10¹² VG/kg. In certain embodiments, the delivery comprises a composition concentration of 1×10¹³ VG/kg. In certain embodiments, the delivery comprises a composition concentration of 6.7×10¹² VG/kg. In certain embodiments, the delivery comprises a composition concentration of 7×10¹² VG/kg. In certain embodiments, the delivery comprises a composition concentration of 2×10¹³ VG/kg. In certain embodiments, the delivery comprises a composition concentration of 3×10¹¹ VG/kg. In certain embodiments, the delivery comprises a composition concentration of 3×10¹² VG/kg. In certain embodiments, the delivery comprises a composition concentration of 3×10¹³ VG/kg. In certain embodiments, the delivery comprises a composition concentration of 6.3×10¹² VG/kg.

[0463] In certain embodiments, delivery of AAV particle compositions to cells may comprise a total concentration per site between about 1×10⁶ VG/site and about 1×10¹⁶ VG/site. In some embodiments, delivery may comprise a composition concentration of about 1×10⁶, 2×10⁶, 3×10⁶, 4×10⁶, 5×10⁶, 6×10⁶, 7×10⁶, 8×10⁶, 9×10⁶, 1×10⁷, 2×10⁷, 3×10⁷, 4×10⁷, 5×10⁷, 6×10⁷, 7×10⁷, 8×10⁷, 9×10⁷, 1×10⁸, 2×10⁸, 3×10⁸, 4×10⁸, 5×10⁸, 6×10⁸, 7×10⁸, 8×10⁸, 9×10⁸, 1×10⁹, 2×10⁹, 3×10⁹, 4×10⁹, 5×10⁹, 6×10⁹, 7×10⁹, 8×10⁹, 9×10⁹, 1×10¹⁰, 2×10¹⁰, 3×10¹⁰, 4×10¹⁰, 5×10¹⁰, 6×10¹⁰, 7×10¹⁰, 8×10¹⁰, 9×10¹⁰, 1×10¹¹, 2×10¹¹, 2.1×10¹¹, 2.2×10¹¹, 2.3×10¹¹, 2.4×10¹¹, 2.5×10¹¹, 2.6×10¹¹, 2.7×10¹¹, 2.8×10¹¹, 2.9×10¹¹, 3×10¹¹, 4×10¹¹, 5×10¹¹, 6×10¹¹, 7×10¹¹, 7.1×10¹¹, 7.2×10¹¹, 7.3×10¹¹, 7.4×10¹¹, 7.5×10¹¹, 7.6×10¹¹, 7.7×10¹¹, 7.8×10¹¹, 7.9×10¹¹, 8×10¹¹, 9×10¹¹, 1×10¹², 1.1×10¹², 1.2×10¹², 1.3×10¹², 1.4×10¹², 1.5×10¹², 1.6×10¹², 1.7×10¹², 1.8×10¹², 1.9×10¹², 2×10¹², 3×10¹², 4×10¹², 4.1×10¹², 4.2×10¹², 4.3×10¹², 4.4×10¹², 4.5×10¹²,4.6×10¹², 4.7×10¹², 4.8×10¹², 4.9×10¹², 5×10¹², 6×10¹², 6.1×10¹², 6.2×10¹², 6.3×10¹², 6.4×10¹², 6.5×10¹², 6.6×10¹², 6.7×10¹², 6.8×10¹², 6.9×10¹², 7×10¹², 8×10¹², 8.1×10¹², 8.2×10¹², 8.3×10¹², 8.4×10¹², 8.5×10¹², 8.6×10¹², 8.7×10¹², 8.8×10¹², 8.9×10¹², 9×10¹², 1×10¹³, 2×10¹³, 3×10¹³, 4×10¹³, 5×10¹³, 6×10¹³, 6.7×10¹³, 7×10¹³, 8×10¹³, 9×10¹³, 1×10¹⁴, 2×10¹⁴, 3×10¹⁴, 4×10¹⁴, 5×10¹⁴, 6×10¹⁴, 7×10¹⁴, 8×10¹⁴, 9×10¹⁴, 1×10¹⁵, 2×10¹⁵, 3×10¹⁵, 4×10¹⁵, 5×10¹⁵, 6×10¹⁵, 7×10¹⁵, 8×10¹⁵, 9×10¹⁵, or 1×10¹⁶ VG/site.

[0464] In certain embodiments, delivery of AAV particles to cells of the central nervous system may comprise a total dose between about 1×10⁶ VG and about 1×10¹⁶ VG. In some embodiments, delivery may comprise a total dose of about 1×10⁶, 2×10⁶, 3×10⁶, 4×10⁶, 5×10⁶, 6×10⁶, 7×10⁶, 8×10⁶, 9×10⁶, 1×10⁷, 2×10⁷, 3×10⁷, 4×10⁷, 5×10⁷, 6×10⁷, 7×10⁷, 8×10⁷, 9×10⁷, 1×10⁸, 2×10⁸, 3×10⁸, 4×10⁸, 5×10⁸, 6×10⁸, 7×10⁸, 8×10⁸, 9×10⁸, 1×10⁹, 2×10⁹, 3×10⁹, 4×10⁹, 5×10⁹, 6×10⁹, 7×10⁹, 8×10⁹, 9×10⁹, 1×10¹⁰, 1.9×10¹⁰, 2×10¹⁰, 3×10¹⁰, 3.73×10¹⁰, 4×10¹⁰, 5×10¹⁰, 6×10¹⁰, 7×10¹⁰, 8×10¹⁰, 9×10¹⁰, 1×10¹¹, 2×10¹¹, 2.5×10¹¹, 3×10¹¹, 4×10¹¹, 5×10¹¹, 6×10¹¹, 7×10¹¹, 8×10¹¹, 9×10¹¹, 1×10¹², 2×10¹², 3×10¹², 4×10¹², 5×10¹², 6×10¹², 6.1×10¹², 6.2×10¹², 6.3×10¹², 6.4×10¹², 6.5×10¹², 6.6×10¹², 6.7×10¹², 6.8×10¹², 6.9×10¹², 7×10¹², 8×10¹², 9×10¹², 1×10¹³, 2×10¹³, 3×10¹³, 4×10¹³, 5×10¹³, 6×10¹³, 7×10¹³, 8×10¹³, 9×10¹³, 1×10¹⁴, 2×10¹⁴, 3×10¹⁴, 4×10¹⁴, 5×10¹⁴, 6×10¹⁴, 7×10¹⁴, 8×10¹⁴, 9×10¹⁴, 1×10¹⁵, 2×10¹⁵, 3×10¹⁵, 4×10¹⁵, 5×10¹⁵, 6×10¹⁵, 7×10¹⁵, 8×10¹⁵, 9×10¹⁵, or 1×10¹⁶ VG. As a non-limiting example, the total dose is 1×10¹³ VG. As another non-limiting example, the total dose is 2.1×10¹² VG. As another non-limiting example, the total dose is 6.3×10¹²VG.

[0465] In certain embodiments, about 10⁵ to 10⁶ viral genome (unit) may be administered per dose.

[0466] In certain embodiments, delivery of the compositions comprising the AAV particles in accordance with the present disclosure to cells may comprise a total concentration between about 1×10⁶ VG/mL and about 1×10¹⁶ VG/mL. In some embodiments, delivery may comprise a composition concentration of about 1×10⁶, 2×10⁶, 3×10⁶, 4×10⁶, 5×10⁶. 6×10⁶, 7×10⁶, 8×10⁶, 9×10⁶, 1×10⁷, 2×10⁷, 3×10⁷, 4×10⁷, 5×10⁷, 6×10⁷, 7×10⁷, 8×10⁷, 9×10⁷, 1×10⁸, 2×10⁸, 3×10⁸, 4×10⁸, 5×10⁸, 6×10⁸, 7×10⁸, 8×10⁸, 9×10⁸, 1×10⁹, 2×10⁹, 3×10⁹, 4×10⁹, 5×10⁹, 6×10⁹, 7×10⁹, 8×10⁹, 9×10⁹, 1×10¹⁰, 2×10¹⁰, 3×10¹⁰, 4×10¹⁰, 5×10¹⁰, 6×10¹⁰, 7×10¹⁰, 8×10¹⁰, 9×10¹⁰, 1×10¹¹, 2×10¹¹, 3×10¹¹, 4×10¹¹, 5×10¹¹, 6×10¹¹, 7×10¹¹, 8×10¹¹, 9×10¹¹, 1×10¹², 1.1×10¹², 1.2×10¹², 1.3×10¹², 1.4×10¹², 1.5×10¹², 1.6×10², 1.7×10¹², 1.8×10¹², 1.9×10¹², 2×10¹², 2.1×10¹², 2.2×10¹², 2.3×10¹², 2.4×10¹², 2.5×10¹², 2.6×10¹², 2.7×10¹², 2.8×10¹², 2.9×10¹², 3×10¹², 3.1×10¹², 3.2×10¹², 3.3×10¹², 3.4×10¹², 3.5×10¹², 3.6×10¹², 3.7×10¹², 3.8×10¹², 3.9×10¹², 4×10¹², 4.1×10¹², 4.2×10¹², 4.3×10¹², 4.4×10¹². 4.5×10¹², 4.6×10¹², 4.7×10¹², 4.8×10¹², 4.9×10¹², 5×10¹², 6×10¹², 6.1×10¹², 6.2×10¹², 6.3×10¹², 6.4×10¹², 6.5×10¹², 6.6×10¹², 6.7×10¹², 6.8×10¹², 6.9×10¹², 7×10¹², 8×10¹² 9×10¹², 1×10¹³, 2×10¹³, 3×10¹³, 4×10¹³, 5×10¹³, 6×10¹³, 6.7×10¹³, 7×10¹³, 8×10¹³, 9×10¹³, 1×10¹⁴, 2×10¹⁴, 3×10¹⁴, 4×10¹⁴, 5×10¹⁴, 6×10¹⁴, 7×10¹⁴, 8×10¹⁴, 9×10¹⁴, 1×10¹⁵, 2×10¹⁵, 3×10¹⁵, 4×10¹⁵, 5×10¹⁵, 6×10¹⁵, 7×10¹⁵, 8×10¹⁵, 9×10¹⁵, or 1×10¹⁶ VG/mL.

[0467] In certain embodiments, delivery of AAV particles to cells of the central nervous system may comprise a composition concentration between about 1×10⁶ VG/mL and about 1×10¹⁶ VG/mL. In some embodiments, delivery may comprise a composition concentration of about 1×10⁶, 2×10⁶, 3×10⁶, 4×10⁶, 5×10⁶, 6×10⁶, 7×10⁶, 8×10⁶, 9×10⁶, 1×10⁷, 2×10⁷, 3×10⁷, 4×10⁷, 5×10⁷, 6×10⁷, 7×10⁷, 8×10⁷, 9×10⁷, 1×10⁸, 2×10⁸, 3×10⁸, 4×10⁸, 5×10⁸, 6×10⁸, 7×10⁸, 8×10⁸, 9×10⁸, 1×10⁹, 2×10⁹, 3×10⁹, 4×10⁹, 5×10⁹, 6×10⁹, 7×10⁹, 8×10⁹, 9×10⁹, 1×10¹⁰, 2×10¹⁰, 3×10¹⁰, 4×10¹⁰, 5×10¹⁰, 6×10¹⁰, 7×10¹⁰, 8×10¹⁰, 9×10¹⁰, 1×10¹¹, 2×10¹¹, 3×10¹¹, 4×10¹¹, 5×10¹¹, 6×10¹¹, 7×10¹¹, 8×10¹¹, 9×10¹¹, 1×10¹¹, 2×10¹², 3×10¹², 4×10¹², 5×10¹², 6×10¹², 6.1×10¹², 6.2×10¹², 6.3×10¹², 6.4×10¹², 6.5×10¹², 6.6×10¹², 6.7×10¹², 6.8×10¹², 6.9×10¹², 7×10¹², 8×10¹², 9×10¹², 1×10¹³, 2×10¹³, 3×10¹³, 4×10¹³, 5×10¹³, 6×10¹³, 7×10¹³, 8×10¹³, 9×10¹³, 1×10¹⁴, 2×10¹⁴, 3×10¹⁴, 4×10¹⁴, 5×10¹⁴, 6×10¹⁴, 7×10¹⁴, 8×10¹⁴, 9×10¹⁴, 1×10¹⁵, 2×10¹⁵, 3×10¹⁵, 4×10¹⁵, 5×10¹⁵, 6×10¹⁵, 7×10¹⁵, 8×10¹⁵, 9×10¹⁵, or 1×10¹⁶ VG/mL. In certain embodiments, the delivery comprises a composition concentration of 1×10¹³ VG/mL. In certain embodiments, the delivery comprises a composition concentration of 2.1×10¹² VG/mL. In certain embodiments, the delivery comprises a composition concentration of 1×10¹³ VG/mL. In certain embodiments, the delivery comprises a composition concentration of 2×10¹³ VG/mL. In certain embodiments, the delivery comprises a composition concentration of 3×10¹¹ VG/mL. In certain embodiments, the delivery comprises a composition concentration of 3×10¹² VG/mL. In certain embodiments, the delivery comprises a composition concentration of 6.3×10¹² VG/mL. In certain embodiments, the delivery comprises a composition concentration of 3×10¹² VG/mL.

[0468] In certain embodiments, the desired dosage may be delivered using multiple administrations (e.g., two, three, four, five, six, seven, eight, nine, ten, eleven, twelve, thirteen, fourteen, or more administrations). When multiple administrations are employed, split dosing regimens such as those described herein may be used. As used herein, a “split dose” is the division of “single unit dose” or total daily dose into two or more doses, e.g., two or more administrations of the “single unit dose”. As used herein, a “single unit dose” is a dose of any therapeutic administered in one dose/at one time/single route/single point of contact, i.e., single administration event.

[0469] The desired dosage of the AAV particles of the present disclosure may be administered as a “pulse dose” or as a “continuous flow”. As used herein, a “pulse dose” is a series of single unit doses of any therapeutic administered with a set frequency over a period of time. As used herein, a “continuous flow” is a dose of therapeutic administered continuously for a period of time in a single route/single point of contact, i.e., continuous administration event. A total daily dose, an amount given or prescribed in 24 hour period, may be administered by any of these methods, or as a combination of these methods, or by any other methods suitable for a pharmaceutical administration.

[0470] In certain embodiments, delivery of the AAV particles of the present disclosure to a subject provides regulating activity of a target gene in a subject. The regulating activity may be an increase in the production of the target protein in a subject or the decrease of the production of target protein in a subject. The regulating activity can be for at least 1 month, 2 months, 3 months, 4 months, 5 months, 6 months, 7 months, 8 months, 9 months, 10 months, 11 months, 1 year, 13 months, 14 months, 15 months, 16 months, 17 months, 18 months, 19 months, 20 months, 20 months, 21 months, 22 months, 23 months, 2 years, 3 years, 4 years, 5 years, 6 years, 7 years, 8 years, 9 years, 10 years or more than 10 years.

[0471] In some embodiments, the AAV particle of the present disclosure may be administered to a subject using a single dose, one-time treatment. The dose of the one-time treatment may be administered by any methods known in the art and/or described herein. As used herein, a “one-time treatment” refers to a composition which is only administered one time. If needed, a booster dose may be administered to the subject to ensure the appropriate efficacy is reached. A booster may be administered 1 month, 2 months, 3 months, 4 months, 5 months, 6 months, 7 months, 8 months, 9 months, 10 months, 11 months, 12 months, 1 year, 13 months, 14 months, 15 months, 16 months, 17 months, 18 months, 19 months, 20 months, 21 months, 22 months, 23 months, 24 months, 2 years, 3 years, 4 years, 5 years, 6 years, 7 years, 8 years, 9 years, 10 years, or more than 10 years after the one-time treatment.

### Delivery

[0472] In certain embodiments, the AAV particles or pharmaceutical compositions of the disclosure are delivered by intravenous injection.

[0473] In certain embodiments, the AAV particles or pharmaceutical compositions of the present disclosure may be administered or delivered using the methods for treatment of disease described in U.S. Pat. No. 8,999,948, or International Publication No. WO2014178863, the contents of each of which are herein incorporated by reference in their entirety.

[0474] In certain embodiments, the AAV particles or pharmaceutical compositions of the present disclosure may be administered or delivered using the methods for delivering gene therapy in Alzheimer's Disease or other neurodegenerative conditions as described in US Application No. 20150126590, the contents of which are herein incorporated by reference in their entirety.

[0475] In certain embodiments, the AAV particles or pharmaceutical compositions of the present disclosure may be administered or delivered using the methods for delivery of a CNS gene therapy as described in U.S. Pat. Nos. 6,436,708, and 8,946,152, and International Publication No. WO2015168666, the contents of each of which are herein incorporated by reference in their entirety.

[0476] In certain embodiments, the AAV particle or pharmaceutical compositions of the present disclosure may be administered or delivered using the methods for delivering proteins using AAV vectors described in European Patent Application No. EP2678433, the contents of which are herein incorporated by reference in their entirety.

[0477] In certain embodiments, the AAV particle or pharmaceutical compositions of the present disclosure may be administered or delivered using the methods for delivering DNA to the bloodstream described in U.S. Pat. No. 6,211,163, the contents of which are herein incorporated by reference in their entirety.

[0478] In certain embodiments, the AAV particle or pharmaceutical compositions of the present disclosure may be administered or delivered using the methods for delivering a payload to the central nervous system described in U.S. Pat. No. 7,588,757, the contents of which are herein incorporated by reference in their entirety.

[0479] In certain embodiments, the AAV particle or pharmaceutical compositions of the present disclosure may be administered or delivered using the methods for delivering a payload described in U.S. Pat. No. 8,283,151, the contents of which are herein incorporated by reference in their entirety.

[0480] In certain embodiments, the AAV particle or pharmaceutical compositions of the present disclosure may be administered or delivered using the methods for delivering a payload using a glutamic acid decarboxylase (GAD) delivery vector described in International Patent Publication No. WO2001089583, the contents of which are herein incorporated by reference in their entirety.

[0481] In certain embodiments, the AAV particle or pharmaceutical compositions of the present disclosure may be administered or delivered using the methods for delivering a payload to neural cells described in International Patent Publication No. WO2012057363, the contents of which are herein incorporated by reference in their entirety.

### Delivery to Cells

[0482] The present disclosure provides a method of delivering to a cell or tissue any of the above-described AAV particles, comprising contacting the cell or tissue with said AAV particle or contacting the cell or tissue with a formulation comprising said AAV particle, or contacting the cell or tissue with any of the described compositions, including pharmaceutical compositions. The method of delivering the AAV particle to a cell or tissue can be accomplished in vitro, ex vivo, or in vivo.

### Delivery to Subjects

[0483] The present disclosure additionally provides a method of delivering to a subject, including a mammalian subject, any of the above-described AAV particles comprising administering to the subject said AAV particle, or administering to the subject a formulation comprising said AAV particle, or administering to the subject any of the described compositions, including pharmaceutical compositions.

[0484] In certain embodiments, the subject is a human. In some aspects, the human subject is a patient with a disease, for example, a neurological disease, or a disease associated with the central or peripheral nervous system or components thereof.

### Combinations

[0485] The AAV particles may be used in combination with one or more other therapeutic, prophylactic, research or diagnostic agents. By “in combination with,” it is not intended to imply that the agents must be administered at the same time and/or formulated for delivery together, although these methods of delivery are within the scope of the present disclosure. Compositions can be administered concurrently with, prior to, or subsequent to, one or more other desired therapeutics or medical procedures. In general, each agent will be administered at a dose and/or on a time schedule determined for that agent. In some embodiments, the present disclosure encompasses the delivery of pharmaceutical, prophylactic, research, or diagnostic compositions in combination with agents that may improve their bioavailability, reduce and/or modify their metabolism, inhibit their excretion, and/or modify their distribution within the body.

### VI. Kits and Devices

### Kits

[0486] In certain embodiments, the disclosure provides a variety of kits for conveniently and/or effectively carrying out the methods described herein. Typically, kits will comprise sufficient amounts and/or numbers of components to allow a user to perform multiple treatments of a subject(s) and/or to perform multiple experiments.

[0487] Any of the targeting peptides and/or associated AAV particles of the present disclosure may be comprised in a kit. In some embodiments, kits may further include reagents and/or instructions for creating and/or synthesizing compounds and/or compositions of the present disclosure. In some embodiments, kits may also include one or more buffers. In some embodiments, kits of the disclosure may include components for making protein or nucleic acid arrays or libraries and thus, may include, for example, solid supports.

[0488] In some embodiments, kit components may be packaged either in aqueous media or in lyophilized form. The container means of the kits will generally include at least one vial, test tube, flask, bottle, syringe or other container means, into which a component may be placed, and preferably, suitably aliquoted. Where there is more than one kit component, (labeling reagent and label may be packaged together), kits may also generally contain second, third or other additional containers into which additional components may be separately placed. In some embodiments, kits may also comprise second container means for containing sterile, pharmaceutically acceptable buffers and/or other diluents. In some embodiments, various combinations of components may be comprised in one or more vial. Kits of the present disclosure may also typically include means for containing compounds and/or compositions of the present disclosure, e.g., proteins, nucleic acids, and any other reagent containers in close confinement for commercial sale. Such containers may include injection or blow-molded plastic containers into which desired vials ar retained.

[0489] In some embodiments, kit components are provided in one and/or more liquid solutions. In some embodiments, liquid solutions are aqueous solutions, with sterile aqueous solutions being particularly preferred. In some embodiments, kit components may be provided as dried powder(s). When reagents and/or components are provided as dry powders, such powders may be reconstituted by the addition of suitable volumes of solvent. In some embodiments, it is envisioned that solvents may also be provided in another container means. In some embodiments, labeling dyes are provided as dried powders. In some embodiments, it is contemplated that 10, 20, 30, 40, 50, 60, 70, 80, 90, 100, 120, 120, 130, 140, 150, 160, 170, 180, 190, 200, 300, 400, 500, 600, 700, 800, 900, 1000 micrograms or at least or at most those amounts of dried dye are provided in kits of the disclosure. In such embodiments, dye may then be resuspended in any suitable solvent, such as DMSO.

[0490] In some embodiments, kits may include instructions for employing kit components as well the use of any other reagent not included in the kit. Instructions may include variations that may be implemented.

### Devices

[0491] In certain embodiments, the AAV particles of the disclosure are delivered by catheter.

[0492] In certain embodiments, the AAV particles of the disclosure are delivered by syringe and/or syringe pump.

[0493] In certain embodiments, the AAV particles of the disclosure are delivered by cannula.

[0494] In certain embodiments, the AAV particles of the disclosure are delivered by a device, wherein the device is further placed in a mechanism to direct or target the trajectory.

[0495] In certain embodiments, the AAV particles may be delivered to a subject using a device to deliver the AAV particles and a head fixation assembly. The head fixation assembly may be, but is not limited to, any of the head fixation assemblies sold by MRI interventions. As a non-limiting example, the head fixation assembly may be any of the assemblies described in U.S. Pat. Nos. 8,099,150, 8,548,569, and 9,031,636 and International Patent Publication Nos. WO201108495 and WO2014014585, the contents of each of which are incorporated by reference in their entireties. A head fixation assembly may be used in combination with an MRI compatible drill such as, but not limited to, the MRI compatible drills described in International Patent Publication No. WO2013181008 and US Patent Publication No. US20130325012, the contents of which are herein incorporated by reference in its entirety.

[0496] In certain embodiments, the AAV particles may be delivered using a method, system and/or computer program for positioning of an apparatus to a target point on a subject to deliver the AAV particles. As a non-limiting example, the method, system and/or computer program may be the methods, systems and/or computer programs described in U.S. Pat. No. 8,340,743, the contents of which are herein incorporated by reference in their entirety. The method may include: determining a target point in the body and a reference point, wherein the target point and the reference point define a planned trajectory line (PTL) extending through each; determining a visualization plane, wherein the PTL intersects the visualization plane at a sighting point; mounting the guide device relative to the body to move with respect to the PTL, wherein the guide device does not intersect the visualization plane; determining a point of intersection (GPP) between the guide axis and the visualization plane; and aligning the GPP with the sighting point in the visualization plane.

[0497] In certain embodiments, the AAV particles may be delivered to a subject using a convention-enhanced delivery device. Non-limiting examples of targeted delivery of drugs using convection are described in US Patent Publication Nos. US20100217228, US20130035574, and US 20130035660 and International Patent Publication No. WO2013019830 and WO2008144585, the contents of each of which are herein incorporated by reference in their entireties.

[0498] In certain embodiments, a subject may be imaged prior to, during and/or after delivery of the AAV particles. The imaging method may be a method known in the art and/or described herein, such as but not limited to, magnetic resonance imaging (MRI). As a non-limiting example, imaging may be used to assess therapeutic effect. As another non-limiting example, imaging may be used for assisted delivery of AAV particles.

[0499] In certain embodiments, the AAV particles may be delivered using an MRI-guided device. Non-limiting examples of MRI-guided devices are described in U.S. Pat. Nos. 9,055,884, 9,042,958, 8,886,288, 8,768,433, 8,396,532, 8,369,930, 8,374,677, and 8,175,677 and US Patent Application No. US20140024927 the contents of each of which are herein incorporated by reference in their entireties. As a non-limiting example, the MRI-guided device may be able to provide data in real time such as those described in U.S. Pat. Nos. 8,886,288 and 8,768,433, the contents of each of which is herein incorporated by reference in its entirety. As another non-limiting example, the MRI-guided device or system may be used with a targeting cannula such as the systems described in U.S. Pat. Nos. 8,175,677 and 8,374,677, the contents of each of which are herein incorporated by reference in their entireties. As yet another non-limiting example, the MRI-guided device includes a trajectory guide frame for guiding an interventional device as described, for example, in U.S. Pat. No. 9,055,884 and US Patent Application No. US20140024927, the contents of each of which are herein incorporated by reference in their entireties.

[0500] In certain embodiments, the AAV particles may be delivered using an MRI-compatible tip assembly. Non-limiting examples of MRI-compatible tip assemblies are described in US Patent Publication No. US20140275980, the contents of which is herein incorporated by reference in its entirety.

[0501] In certain embodiments, the AAV particles may be delivered using a cannula which is MRI-compatible. Non-limiting examples of MRI-compatible cannulas include those taught in International Patent Publication No. WO2011130107, the contents of which are herein incorporated by reference in its entirety.

[0502] In certain embodiments, the AAV particles may be delivered using a catheter which is MRI-compatible. Non-limiting examples of MRI-compatible catheters include those taught in International Patent Publication No. WO2012116265, U.S. Pat. No. 8,825,133 and US Patent Publication No. US20140024909, the contents of each of which are herein incorporated by reference in their entireties.

[0503] In certain embodiments, the AAV particles may be delivered using a device with an elongated tubular body and a diaphragm as described in US Patent Publication Nos. US20140276582 and US20140276614, the contents of each of which are herein incorporated by reference in their entireties.

[0504] In certain embodiments, the AAV particles may be delivered using an MRI compatible localization and/or guidance system such as, but not limited to, those described in US Patent Publication Nos. US20150223905 and US20150230871, the contents of each of which are herein incorporated by reference in their entireties. As a non-limiting example, the MRI compatible localization and/or guidance systems may comprise a mount adapted for fixation to a patient, a targeting cannula with a lumen configured to attach to the mount so as to be able to controllably translate in at least three dimensions, and an elongate probe configured to snugly advance via slide and retract in the targeting cannula lumen, the elongate probe comprising at least one of a stimulation or recording electrode.

[0505] In certain embodiments, the AAV particles may be delivered to a subject using a trajectory frame as described in US Patent Publication Nos. US20150031982 and US20140066750 and International Patent Publication Nos. WO2015057807 and WO2014039481, the contents of each of which are herein incorporated by reference in their entireties.

[0506] In certain embodiments, the AAV particles may be delivered to a subject using a gene gun.

### VII. Definitions

[0507] Adeno-associated virus: As used herein, the term “adeno-associated virus” or “AAV” refers to members of the dependovirus genus comprising any particle, sequence, gene, protein, or component derived therefrom.

[0508] AAV Particle: As used herein, an “AAV particle” is a virus which comprises a capsid and a viral genome with at least one payload region and at least one ITR. As used herein “AAV particles of the disclosure” are AAV particles comprising a parent capsid sequence with at least one targeting peptide insert. AAV particles of the present disclosure may be produced recombinantly and may be based on adeno-associated virus (AAV) parent or reference sequences. AAV particle may be derived from any serotype, described herein or known in the art, including combinations of serotypes (i.e., “pseudotyped” AAV) or from various genomes (e.g., single stranded or self-complementary). In addition, the AAV particle may be replication defective and/or targeted. In certain embodiments, the AAV particle may have a targeting peptide inserted into the capsid to enhance tropism for a desired target tissue. It is to be understood that reference to the AAV particles of the disclosure also includes pharmaceutical compositions thereof, even if not explicitly recited.

[0509] Administering: As used herein, the term “administering” refers to providing a pharmaceutical agent or composition to a subject.

[0510] Amelioration: As used herein, the term “amelioration” or “ameliorating” refers to a lessening of severity of at least one indicator of a condition or disease. For example, in the context of neurodegeneration disorder, amelioration includes the reduction of neuron loss.

[0511] Animal: As used herein, the term “animal” refers to any member of the animal kingdom. In some embodiments, “animal” refers to humans at any stage of development. In some embodiments, “animal” refers to non-human animals at any stage of development. In certain embodiments, the non-human animal is a mammal (e.g., a rodent, a mouse, a rat, a rabbit, a monkey, a dog, a cat, a sheep, cattle, a primate, or a pig). In some embodiments, animals include, but are not limited to, mammals, birds, reptiles, amphibians, fish, and worms. In some embodiments, the animal is a transgenic animal, genetically-engineered animal, or a clone.

[0512] Antisense strand: As used herein, the term “the antisense strand” or “the first strand” or “the guide strand” of a siRNA molecule refers to a strand that is substantially complementary to a section of about 10-50 nucleotides, e.g., about 15-30, 16-25, 18-23 or 19-22 nucleotides of the mRNA of a gene targeted for silencing. The antisense strand or first strand has sequence sufficiently complementary to the desired target mRNA sequence to direct target-specific silencing, e.g., complementarity sufficient to trigger the destruction of the desired target mRNA by the RNAi machinery or process.

[0513] Approximately: As used herein, the term “approximately” or “about,” as applied to one or more values of interest, refers to a value that is similar to a stated reference value. In certain embodiments, the term “approximately” or “about” refers to a range of values that fall within 25%, 20%, 19%, 18%, 17%, 16%, 15%, 14%, 13%, 12%, 11%, 10%, 9%, 8%, 7%, 6%, 5%, 4%, 3/6, 2%, 1%, or less in either direction (greater than or less than) of the stated reference value unless otherwise stated or otherwise evident from the context (except where such number would exceed 100% of a possible value).

[0514] Capsid: As used herein, the term “capsid” refers to the protein shell of a virus particle.

[0515] Complementary and substantially complementary: As used herein, the term “complementary” refers to the ability of polynucleotides to form base pairs with one another. Base pairs are typically formed by hydrogen bonds between nucleotide units in antiparallel polynucleotide strands. Complementary polynucleotide strands can form base pairs in the Watson-Crick manner (e.g., A to T, A to U, C to G), or in any other manner that allows for the formation of duplexes. As persons skilled in the art are aware, when using RNA as opposed to DNA, uracil rather than thymine is the base that is considered to be complementary to adenine. However, when a U is denoted in the context of the present disclosure, the ability to substitute a T is implied, unless otherwise stated. Perfect complementarity or 100% complementarity refers to the situation in which each nucleotide unit of one polynucleotide strand can form a hydrogen bond with a nucleotide unit of a second polynucleotide strand. Less than perfect complementarity refers to the situation in which some, but not all, nucleotide units of two strands can form hydrogen bond with each other. For example, for two 20-mers, if only two base pairs on each strand can form a hydrogen bond with each other, the polynucleotide strands exhibit 10% complementarity. In the same example, if 18 base pairs on each strand can form hydrogen bonds with each other, the polynucleotide strands exhibit 90% complementarity. As used herein, the term “substantially complementary” means that the siRNA has a sequence (e.g., in the antisense strand) which is sufficient to bind the desired target mRNA, and to trigger the RNA silencing of the target mRNA.

[0516] Control Elements: As used herein, “control elements”. “regulatory control elements” or “regulatory sequences” refers to promoter regions, polyadenylation signals, transcription termination sequences, upstream regulatory domains, origins of replication, internal ribosome entry sites (“IRES”), enhancers, and the like, which provide for the replication, transcription and translation of a coding sequence in a recipient cell. Not all of these control elements need always be present as long as the selected coding sequence is capable of being replicated, transcribed and/or translated in an appropriate host cell.

[0517] Delivery: As used herein, “delivery” refers to the act or manner of delivering an AAV particle, a compound, substance, entity, moiety, cargo or payload.

[0518] Element: As used herein, the term “element” refers to a distinct portion of an entity. In some embodiments, an element may be a polynucleotide sequence with a specific purpose, incorporated into a longer polynucleotide sequence.

[0519] Encapsulate: As used herein, the term “encapsulate” means to enclose, surround or encase. As an example, a capsid protein often encapsulates a viral genome.

[0520] Engineered: As used herein, embodiments of the disclosure are “engineered” when they are designed to have a feature or property, whether structural or chemical, that varies from a starting point, wild type or native molecule.

[0521] Effective Amount: As used herein, the term “effective amount” of an agent is that amount sufficient to effect beneficial or desired results, for example, clinical results, and, as such, an “effective amount” depends upon the context in which it is being applied. For example, in the context of administering an agent that treats cancer, an effective amount of an agent is, for example, an amount sufficient to achieve treatment, as defined herein, of cancer, as compared to the response obtained without administration of the agent.

[0522] Expression: As used herein, “expression” of a nucleic acid sequence refers to one or more of the following events: (1) production of an RNA template from a DNA sequence (e.g., by transcription): (2) processing of an RNA transcript (e.g., by splicing, editing, 5′ cap formation, and/or 3′ end processing); (3) translation of an RNA into a polypeptide or protein; and (4) post-translational modification of a polypeptide or protein.

[0523] Feature: As used herein, a “feature” refers to a characteristic, a property, or a distinctive element.

[0524] Formulation: As used herein, a “formulation” includes at least one AAV particle (active ingredient) and an excipient, and/or an inactive ingredient.

[0525] Fragment: A “fragment,” as used herein, refers to a portion. For example, an antibody fragment may comprise a CDR, or a heavy chain variable region, or a scFv, etc.

[0526] Functional: As used herein, a “functional” biological molecule is a biological molecule in a form in which it exhibits a property and/or activity by which it is characterized.

[0527] Gene expression: The term “gene expression” refers to the process by which a nucleic acid sequence undergoes successful transcription and in most instances translation to produce a protein or peptide. For clarity, when reference is made to measurement of “gene expression”, this should be understood to mean that measurements may be of the nucleic acid product of transcription, e.g., RNA or mRNA or of the amino acid product of translation, e.g., polypeptides or peptides. Methods of measuring the amount or levels of RNA, mRNA, polypeptides and peptides are well known in the art.

[0528] Homology: As used herein, the term “homology” refers to the overall relatedness between polymeric molecules, e.g. between polynucleotide molecules (e.g. DNA molecules and/or RNA molecules) and/or between polypeptide molecules. In some embodiments, polymeric molecules are considered to be “homologous” to one another if their sequences are at least 25%, 30%, 35%, 40%, 45%, 50%, 55%, 60%, 65%, 70%, 75%, 80%, 85%, 90%, 95%, or 99% identical or similar. The term “homologous” necessarily refers to a comparison between at least two sequences (polynucleotide or polypeptide sequences). In accordance with the disclosure, two polynucleotide sequences are considered to be homologous if the polypeptides they encode are at least about 50%, 60%, 70%, 80%, 90%, 95%, or even 99% for at least one stretch of at least about 20 amino acids. In some embodiments, homologous polynucleotide sequences are characterized by the ability to encode a stretch of at least 4-5 uniquely specified amino acids. For polynucleotide sequences less than 60 nucleotides in length, homology is determined by the ability to encode a stretch of at least 4-5 uniquely specified amino acids. In accordance with the disclosure, two protein sequences are considered to be homologous if the proteins are at least about 50%, 60%, 70%, 80%, or 90% identical for at least one stretch of at least about 20 amino acids.

[0529] Identify: As used herein, the term “identity” refers to the overall relatedness between polymeric molecules, e.g., between polynucleotide molecules (e.g. DNA molecules and/or RNA molecules) and/or between polypeptide molecules. Calculation of the percent identity of two polynucleotide sequences, for example, can be performed by aligning the two sequences for optimal comparison purposes (e.g., gaps can be introduced in one or both of a first and a second nucleic acid sequences for optimal alignment and non-identical sequences can be disregarded for comparison purposes). In certain embodiments, the length of a sequence aligned for comparison purposes is at least 30%, at least 40%, at least 50%, at least 60%, at least 70%, at least 80%, at least 90%, at least 95%, or 100% of the length of the reference sequence. The nucleotides at corresponding nucleotide positions are then compared. When a position in the first sequence is occupied by the same nucleotide as the corresponding position in the second sequence, then the molecules are identical at that position. The percent identity between the two sequences is a function of the number of identical positions shared by the sequences, taking into account the number of gaps, and the length of each gap, which needs to be introduced for optimal alignment of the two sequences. The comparison of sequences and determination of percent identity between two sequences can be accomplished using a mathematical algorithm. For example, the percent identity between two nucleotide sequences can be determined using methods such as those described in Computational Molecular Biology. Lesk, A. M., ed., Oxford University Press, New York, 1988; Biocomputing: Informatics and Genome Projects, Smith, D. W., ed., Academic Press, New York, 1993; Sequence Analysis in Molecular Biology, von Heinje, G., Academic Press, 1987; Computer Analysis of Sequence Data, Part 1, Griffin, A. M., and Griffin, H. G., eds., Humana Press, New Jersey, 1994; and Sequence Analysis Primer, Gribskov, M. and Devereux, J., eds., M Stockton Press, New York, 1991; the contents of each of which are incorporated herein by reference in their entirety. For example, the percent identity between two nucleotide sequences can be determined using the algorithm of Meyers and Miller (CABIOS, 1989, 4:11-17), which has been incorporated into the ALIGN program (version 2.0) using a PAM120 weight residue table, a gap length penalty of 12 and a gap penalty of 4. The percent identity between two nucleotide sequences can, alternatively, be determined using the GAP program in the GCG software package using an NWSgapdna.CMP matrix. Methods commonly employed to determine percent identity between sequences include, but are not limited to those disclosed in Carillo. H., and Lipman, D., SIAM J Applied Math., 48:1073 (1988), incorporated herein by reference. Techniques for determining identity are codified in publicly available computer programs. Exemplary computer software to determine homology between two sequences include, but are not limited to, GCG program package, Devereux, J., et al., Nucleic Acids Research, 12(1), 387 (1984)), BLASTP, BLASTN, and FASTA Altschul, S. F. et al., J Molec. Biol., 215, 403 (1990)).

[0530] Inhibit expression of a gene: As used herein, the phrase “inhibit expression of a gene” means to cause a reduction in the amount of an expression product of the gene. The expression product can be an RNA transcribed from the gene (e.g., an mRNA) or a polypeptide translated from an mRNA transcribed from the gene. Typically, a reduction in the level of an mRNA results in a reduction in the level of a polypeptide translated therefrom. The level of expression may be determined using standard techniques for measuring mRNA or protein.

[0531] Insert: As used herein the term “insert” may refer to the addition of a targeting peptide sequence to a parent AAV capsid sequence. An “insertion” may result in the replacement of one or more amino acids of the parent AAV capsid sequence. Alternatively, an insertion may result in no changes to the parent AAV capsid sequence beyond the addition of the targeting peptide sequence.

[0532] Inverted terminal repeat: As used herein, the term “inverted terminal repeat” or “ITR” refers to a cis-regulatory element for the packaging of polynucleotide sequences into viral capsids.

[0533] Library: As used herein, the term “library” refers to a diverse collection of linear polypeptides, polynucleotides, viral particles, or viral vectors. As examples, a library may be a DNA library or an AAV capsid library.

[0534] Neurological disease: As used herein, a “neurological disease” is any disease associated with the central or peripheral nervous system and components thereof (e.g., neurons).

[0535] Naturally Occurring: As used herein, “naturally occurring” or “wild-type” means existing in nature without artificial aid, or involvement of the hand of man.

[0536] Open reading frame: As used herein, “open reading frame” or “ORF” refers to a sequence which does not contain a stop codon in a given reading frame.

[0537] Parent sequence: As used herein, a “parent sequence” is a nucleic acid or amino acid sequence from which a variant is derived. In certain embodiments, a parent sequence is a sequence into which a heterologous sequence is inserted. In other words, a parent sequence may be considered an acceptor or recipient sequence. In certain embodiments, a parent sequence is an AAV capsid sequence into which a targeting sequence is inserted.

[0538] Particle: As used herein, a “particle” is a virus comprised of at least two components, a protein capsid and a polynucleotide sequence enclosed within the capsid.

[0539] Patient: As used herein, “patient” refers to a subject who may seek or be in need of treatment, requires treatment, is receiving treatment, will receive treatment, or a subject who is under care by a trained professional for a particular disease or condition.

[0540] Payload region: As used herein, a “payload region” is any nucleic acid sequence (e.g., within the viral genome) which encodes one or more “payloads” of the disclosure. As non-limiting examples, a payload region may be a nucleic acid sequence within the viral genome of an AAV particle, which encodes a payload, wherein the payload is an RNAi agent or a polypeptide. Payloads of the present disclosure may be, but are not limited to, peptides, polypeptides, proteins, antibodies, RNAi agents, etc.

[0541] Peptide: As used herein, “peptide” is less than or equal to 50 amino acids long, e.g., about 5, 10, 15, 20, 25, 30, 35, 40, 45, or 50 amino acids long.

[0542] Pharmaceutically acceptable: The phrase “pharmaceutically acceptable” is employed herein to refer to those compounds, materials, compositions, and/or dosage forms which are, within the scope of sound medical judgment, suitable for use in contact with the tissues of human beings and animals without excessive toxicity, irritation, allergic response, or other problem or complication, commensurate with a reasonable benefit/risk ratio.

[0543] Preventing: As used herein, the term “preventing” or “prevention” refers to partially or completely delaying onset of an infection, disease, disorder and/or condition; partially or completely delaying onset of one or more symptoms, features, or clinical manifestations of a particular infection, disease, disorder, and/or condition; partially or completely delaying onset of one or more symptoms, features, or manifestations of a particular infection, disease, disorder, and/or condition; partially or completely delaying progression from an infection, a particular disease, disorder and/or condition; and/or decreasing the risk of developing pathology associated with the infection, the disease, disorder, and/or condition.

[0544] Prophylactic: As used herein, “prophylactic” refers to a therapeutic or course of action used to prevent the spread of disease.

[0545] Prophylaxis: As used herein, a “prophylaxis” refers to a measure taken to maintain health and prevent the spread of disease.

[0546] Region: As used herein, the term “region” refers to a zone or general area. In some embodiments, when referring to a protein or protein module, a region may comprise a linear sequence of amino acids along the protein or protein module or may comprise a three-dimensional area, an epitope and/or a cluster of epitopes. In some embodiments, regions comprise terminal regions. As used herein, the term “terminal region” refers to regions located at the ends or termini of a given agent. When referring to proteins, terminal regions may comprise N- and/or C-termini.

[0547] In some embodiments, when referring to a polynucleotide, a region may comprise a linear sequence of nucleic acids along the polynucleotide or may comprise a three-dimensional area, secondary structure, or tertiary structure. In some embodiments, regions comprise terminal regions. As used herein, the term “terminal region” refers to regions located at the ends or termini of a given agent. When referring to polynucleotides, terminal regions may comprise 5′ and/or 3′ termini.

[0548] RNA or RNA molecule: As used herein, the term “RNA” or “RNA molecule” or “ribonucleic acid molecule” refers to a polymer of ribonucleotides: the term “DNA” or “DNA molecule” or “deoxyribonucleic acid molecule” refers to a polymer of deoxyribonucleotides. DNA and RNA can be synthesized naturally, e.g., by DNA replication and transcription of DNA, respectively; or be chemically synthesized. DNA and RNA can be single-stranded (i.e., ssRNA or ssDNA, respectively) or multi-stranded (e.g., double stranded, i.e., dsRNA and dsDNA, respectively). The term “mRNA” or “messenger RNA”, as used herein, refers to a single stranded RNA that encodes the amino acid sequence of one or more polypeptide chains.

[0549] RNA interfering or RNAi: As used herein, the term “RNA interfering” or “RNAi” refers to a sequence specific regulatory mechanism mediated by RNA molecules which results in the inhibition or interfering or “silencing” of the expression of a corresponding protein-coding gene. RNAi has been observed in many types of organisms, including plants, animals and fungi. RNAi occurs in cells naturally to remove foreign RNAs (e.g., viral RNAs). Natural RNAi proceeds via fragments cleaved from free dsRNA which direct the degradative mechanism to other similar RNA sequences. RNAi is controlled by the RNA-induced silencing complex (RISC) and is initiated by short/small dsRNA molecules in cell cytoplasm, where they interact with the catalytic RISC component argonaute. The dsRNA molecules can be introduced into cells exogenously. Exogenous dsRNA initiates RNAi by activating the ribonuclease protein Dicer, which binds and cleaves dsRNAs to produce double-stranded fragments of 21-25 base pairs with a few unpaired overhang bases on each end. These short double stranded fragments are called small interfering RNAs (siRNAs).

[0550] RNAi agent: As used herein, the term “RNAi agent” refers to an RNA molecule, or its derivative, that can induce inhibition, interfering, or “silencing” of the expression of a target gene and/or its protein product. An RNAi agent may knock-out (virtually eliminate or eliminate) expression, or knock-down (lessen or decrease) expression. The RNAi agent may be, but is not limited to, dsRNA, siRNA, shRNA, pre-miRNA, pri-miRNA, miRNA, stRNA, lncRNA, piRNA, or snoRNA.

[0551] Sample: As used herein, the term “sample” or “biological sample” refers to a subset of its tissues, cells or component parts (e.g. body fluids, including but not limited to blood, serum, mucus, lymphatic fluid, synovial fluid, cerebrospinal fluid, saliva, amniotic fluid, amniotic cord blood, urine, vaginal fluid and semen). A sample further may include a homogenate, lysate or extract prepared from a whole organism or a subset of its tissues, cells or component parts, or a fraction or portion thereof, including but not limited to, for example, plasma, serum, spinal fluid, lymph fluid, the external sections of the skin, respiratory, intestinal, and genitourinary tracts, tears, saliva, milk, blood cells, tumors, organs. A sample further refers to a medium, such as a nutrient broth or gel, which may contain cellular components, such as proteins or nucleic acid molecule.

[0552] Self-complementary viral particle: As used herein, a “self-complementary viral particle” is a particle comprised of at least two components, a protein capsid and a self-complementary viral genome enclosed within the capsid.

[0553] Sense Strand: As used herein, the term “the sense strand” or “the second strand” or “the passenger strand” of a siRNA molecule refers to a strand that is complementary to the antisense strand or first strand. The antisense and sense strands of a siRNA molecule are hybridized to form a duplex structure. As used herein, a “siRNA duplex” includes a siRNA strand having sufficient complementarity to a section of about 10-50 nucleotides of the mRNA of the gene targeted for silencing and a siRNA strand having sufficient complementarity to form a duplex with the other siRNA strand.

[0554] Similarity As used herein, the term “similarity” refers to the overall relatedness between polymeric molecules, e.g. between polynucleotide molecules (e.g. DNA molecules and/or RNA molecules) and/or between polypeptide molecules. Calculation of percent similarity of polymeric molecules to one another can be performed in the same manner as a calculation of percent identity, except that calculation of percent similarity takes into account conservative substitutions as is understood in the art.

[0555] Short interfering RNA or siRNA: As used herein, the terms “short interfering RNA,” “small interfering RNA” or “siRNA” refer to an RNA molecule (or RNA analog) comprising between about 5-60 nucleotides (or nucleotide analogs) which is capable of directing or mediating RNAi. Preferably, a siRNA molecule comprises between about 15-30 nucleotides or nucleotide analogs, such as between about 16-25 nucleotides (or nucleotide analogs), between about 18-23 nucleotides (or nucleotide analogs), between about 19-22 nucleotides (or nucleotide analogs) (e.g., 19, 20, 21 or 22 nucleotides or nucleotide analogs), between about 19-25 nucleotides (or nucleotide analogs), and between about 19-24 nucleotides (or nucleotide analogs). The term “short” siRNA refers to a siRNA comprising 5-23 nucleotides, preferably 21 nucleotides (or nucleotide analogs), for example, 19, 20, 21 or 22 nucleotides. The term “long” siRNA refers to a siRNA comprising 24-60 nucleotides, preferably about 24-25 nucleotides, for example, 23, 24, 25 or 26 nucleotides. Short siRNAs may, in some instances, include fewer than 19 nucleotides, e.g., 16, 17 or 18 nucleotides, or as few as 5 nucleotides, provided that the shorter siRNA retains the ability to mediate RNAi. Likewise, long siRNAs may, in some instances, include more than 26 nucleotides, e.g., 27, 28, 29, 30, 35, 40, 45, 50, 55, or even 60 nucleotides, provided that the longer siRNA retains the ability to mediate RNAi or translational repression absent further processing, e.g., enzymatic processing, to a short siRNA, siRNAs can be single stranded RNA molecules (ss-siRNAs) or double stranded RNA molecules (ds-siRNAs) comprising a sense strand and an antisense strand which hybridized to form a duplex structure called an siRNA duplex.

[0556] Subject: As used herein, the term “subject” or “patient” refers to any organism to which a composition in accordance with the disclosure may be administered, e.g., for experimental, diagnostic, prophylactic, and/or therapeutic purposes. Typical subjects include animals (e.g., mammals such as mice, rats, rabbits, non-human primates, and humans) and/or plants.

[0557] Substantially: As used herein, the term “substantially” refers to the qualitative condition of exhibiting total or near-total extent or degree of a characteristic or property of interest. One of ordinary skill in the biological arts will understand that biological and chemical phenomena rarely, if ever, go to completion and/or proceed to completeness or achieve or avoid an absolute result. The term “substantially” is therefore used herein to capture the potential lack of completeness inherent in many biological and chemical phenomena.

[0558] Targeting peptide: As used herein, a “targeting peptide” refers to a peptide of 3-20 amino acids in length. These targeting peptides may be inserted into, or attached to, a parent amino acid sequence to alter the characteristics (e.g., tropism) of the parent protein. As a non-limiting example, the targeting peptide can be inserted into an AAV capsid sequence for enhanced targeting to a desired cell-type, tissue, organ or organism. It is to be understood that a targeting peptide is encoded by a targeting polynucleotide which may similarly be inserted into a parent polynucleotide sequence. Therefore, a “targeting sequence” refers to a peptide or polynucleotide sequence for insertion into an appropriate parent sequence (amino acid or polynucleotide, respectively).

[0559] Target Cells: As used herein, “target cells” or “target tissue” refers to any one or more cells of interest. The cells may be found in vitro, in vivo, in situ or in the tissue or organ of an organism. The organism may be an animal, preferably a mammal, more preferably a human and most preferably a patient.

[0560] Therapeutic Agent: The term “therapeutic agent” refers to any agent that, when administered to a subject, has a therapeutic, diagnostic, and/or prophylactic effect and/or elicits a desired biological and/or pharmacological effect.

[0561] Therapeutically effective amount: As used herein, the term “therapeutically effective amount” means an amount of an agent to be delivered (e.g., nucleic acid, drug, therapeutic agent, diagnostic agent, prophylactic agent, etc.) that is sufficient, when administered to a subject suffering from or susceptible to an infection, disease, disorder, and/or condition, to treat, improve symptoms of, diagnose, prevent, and/or delay the onset of the infection, disease, disorder, and/or condition. In some embodiments, a therapeutically effective amount is provided in a single dose.

[0562] Therapeutically effective outcome: As used herein, the term “therapeutically effective outcome” means an outcome that is sufficient in a subject suffering from or susceptible to an infection, disease, disorder, and/or condition, to treat, improve symptoms of, diagnose, prevent, and/or delay the onset of the infection, disease, disorder, and/or condition.

[0563] Treating: As used herein, the term “treating” refers to partially or completely alleviating, ameliorating, improving, relieving, delaying onset of, inhibiting progression of, reducing severity of, and/or reducing incidence of one or more symptoms or features of a particular infection, disease, disorder, and/or condition. For example, “treating” cancer may refer to inhibiting survival, growth, and/or spread of a tumor. Treatment may be administered to a subject who does not exhibit signs of a disease, disorder, and/or condition and/or to a subject who exhibits only early signs of a disease, disorder, and/or condition for the purpose of decreasing the risk of developing pathology associated with the disease, disorder, and/or condition.

[0564] Vector: As used herein, the term “vector” refers to any molecule or moiety which transports, transduces or otherwise acts as a carrier of a heterologous molecule. In some embodiments, vectors may be plasmids. In some embodiments, vectors may be viruses. An AAV particle is an example of a vector. Vectors of the present disclosure may be produced recombinantly and may be based on and/or may comprise adeno-associated virus (AAV) parent or reference sequences. The heterologous molecule may be a polynucleotide and/or a polypeptide.

[0565] Viral Genome: As used herein, the terms “viral genome” or “vector genome” refer to the nucleic acid sequence(s) encapsulated in an AAV particle. A viral genome comprises a nucleic acid sequence with at least one payload region encoding a payload and at least one ITR.

[0566] The present disclosure is further illustrated by the following non-limiting examples.

### EXAMPLES

### Example 1. Targeting Peptides Identified Using CREATE in Mice

[0567] The CREATE method for generating libraries of targeting peptides has previously been described in Deverman et al (Nature Biotechnology 34(2):204-209 (2016), the contents of which are herein incorporated in their entirety. This method was used to identify targeting peptides for enhancing AAV tropism to desired tissues (e.g., CNS). In short, random 7-amino acid peptides were inserted between amino acids 588 and 589 of K449R AAV9 (SEQ ID NO: 3), by inserting, at the DNA level, the nucleotides coding for random 7 amino acids into the corresponding region of the K449R AAV9 nucleotide sequence, to generate a DNA library. The K449R variant of AAV9 has the same function as wild-type AAV9. The DNA library was then used to create an AAV particle library which was intravenously administered to adult GFAP-Cre mice. DNAs packaged in AAV particles transducing the Cre-expressing cells were recovered in a Cre-dependent manner a week after administration. The recovered DNAs were cloned into the K449R AAV9 backbone to create a 2^{nd} round DNA library. A second round of in-vivo selection yielded a series of AAV variants comprising targeting peptides that enhanced tropism for CNS tissues. Examples of targeting peptides isolated in such a manner include targeting peptides PHP.B (TLAVPFK; SEQ ID NO: 43054). PHP.A (YTLSQGW: SEQ ID NO: 43055), PHP.B2 (SVSKPFL; SEQ ID NO: 43056), PHP.B3 (FTLTTPK: SEQ ID NO: 43057), PHP.S (QAVRTSL; SEQ ID NO: 43058), G2B-A7 (MNSTKNV: SEQ ID NO: 43060), and G2B5-G9 (VSGGHHS; SEQ ID NO: 43061) shown in Table 4 below.

TABLE 4
Exemplar Targeting Peptides

| Targeting | | Reference | SEQ ID |
|---|---|---|---|
| Peptide | Sequence | Information | NO: |
| PHP.B | TLAVPFK | WO2015038958 | 43054 |
| | | SEQ ID NO: 1 | |
| PHP.A | YTLSQGW | WO2015038958 | 43055 |
| | | SEQ ID NO: 60 | |
| PHP.B2 | SVSKPFL | WO2015038958 | 43056 |
| | | SEQ ID NO: 28 | |
| PHP.B3 | FTLTTPK | WO2015038958 | 43057 |
| | | SEQ ID NO: 29 | |
| PHP.S | QAVRTSL | WO2017100671 | 43058 |
| | | SEQ ID NO: 37 | |
| PHP.N | DGTLAVPFKAQ | WO2017100671 | 43059 |
| | | SEQ ID NO: 4 | |
| G2B4 (G2B-A7) | MNSTKNV | WO2017100671 | 43060 |
| | | SEQ ID NO: 43 | |
| G2B5 (G2B5-G9) | VSGGHHS | WO2017100671 | 43061 |
| | | SEQ ID NO: 44 | |
| PHP.B-EST | ESTLAVPFKAQ | WO2017100671 | 43062 |
| | | SEQ ID NO: 5 | |
| PHP.B-GGT | GGTLAVPFKAQ | WO2017100671 | 43063 |
| | | SEQ ID NO: 6 | |
| PHP.B-ATP | AQTLATPFKAQ | WO2017100671 | 43064 |
| | | SEQ ID NO: 7 | |
| PHP.B-ATT-T | ATTLATPFKAQ | WO2017100671 | 43065 |
| | | SEQ ID NO: 8 | |
| PHP.B-DGT-T | DGTLATPFKAQ | WO2017100671 | 43066 |
| | | SEQ ID NO: 9 | |
| PHP.B-GGT-T | GGTLATPFKAQ | WO2017100671 | 43067 |
| | | SEQ ID NO: 10 | |
| PHP.B-SGS | SGSLAVPFKAQ | WO2017100671 | 43068 |
| | | SEQ ID NO: 11 | |
| PHP.B-AQP | AQTLAQPFKAQ | WO20171.00671 | 43069 |
| | | SEQ ID NO: 12 | |
| PHP.B-QQP | AQTLQQPFKAQ | WO2017100671 | 43070 |
| | | SEQ ID NO: 13 | |
| PHP.B-SNP(3) | AQTLSNPFKAQ | WO2017100671 | 43071 |
| | | SEQ ID NO: 14 | |
| PHP.B-SNP | AQTLAVPFSNP | WO2017100671 | 43072 |
| | | SEQ ID NO: 15 | |

[0568] The PHP.B 7-mer and flanking sequences were further evolved through site saturation mutagenesis of sets of three consecutive amino acids, using NNK codons, wherein N=any base and K is a G or T. DNA libraries of these site saturation mutagenesis sequences were generated to then create AAV particle libraries. CREATE was used for AAV particle selection in three different CNS cell populations, 1) astrocytes (GFAP-Cre), 2) GABA-ergic (inhibitory) neurons (VGAT-IRES-Cre), and 3) a subset of glutamatergic (excitatory) neurons (Vglut2-IRES-CRE). AAV particles transducing Cre-expressing cells were subjected to two rounds of selection and were then recovered and assessed by clonal and/or next generation sequencing (NGS). An example of a targeting peptide isolated in such a manner include PHP.N (DGTLAVPFKAQ; SEQ ID NO: 43059), PHP.B-EST (ESTLAVPFKAQ; SEQ ID NO: 43062), PHP.B-GGT (GGTLAVPFKAQ; SEQ ID NO: 43063), PHP.B-ATP (AQTLATPFKAQ; SEQ ID NO: 43064), PHP.B-ATT-T (ATTLATPFKAQ; SEQ ID NO: 43065). PHP.B-DGT-T (DGTLATPFKAQ; SEQ ID NO: 43066), PHP.B-GGT-T (GGTLATPFKAQ; SEQ ID NO: 43067). PHP.B-SGS (SGSLAVPFKAQ; SEQ ID NO: 43068), PHP.B-AQP (AQTLAQPFKAQ; SEQ ID NO: 43069), PHP.B-QQP (AQTLQQPFKAQ; SEQ ID NO: 43070), PHP.B-SNP(3) (AQTLSNPFKAQ; SEQ ID NO: 43071), and PHP.B-SNP (AQTLAVPFSNP; SEQ ID NO: 43072) as shown in Table 4 above.

### Example 2. Identification of Improved CNS Targeting Peptides and AAV Particles

[0569] Using CREATE in mice to isolate novel targeting peptides for enhancing tropism of AAV particles to the CNS after intravenous delivery has proven useful in identifying targeting peptides and associated AAV variants such as PHP.B and PHPN. These vectors have shown broad CNS distribution following intravenous administration when tested in mice, however, whether these vectors will show similar efficacy in NHP or humans remains to be determined. Even if efficacy is the same, the dose necessary for CNS distribution after IV administration in a large mammal may be prohibitive. Continuing to evolve targeting peptides in systems more closely matched to humans (e.g., NHP) can help generate targeting peptides and AAV particles with more desirable CNS transduction profiles, for use in humans using intravenous delivery.

### Pilot Study to Test Co-Transduction of AAV-Cre Vectors and PHP.N Reporter

[0570] To use CREATE in non-transgenic NHP lacking Cre expression, AAV-Cre vectors need to be delivered intraparenchymally to the target CNS tissues of the NHP. To evaluate co-transduction of intraparenchymally (IPa) administered Cre-expressing AAV particles and an intravenously administered Cre-dependent reporter packaged in an AAV particle, the system will first be tested in mice.

[0571] Four Cre-vectors will be created, 1) for ubiquitous expression using a CAG, UBC or EF1a promoter (CAG-UBC- or EF1α-Cre), 2) for neuronal expression using a human synapsin promoter (hSyn1-Cre), 3) for astrocytic expression using a truncated GFAP promoter (GfAB₁D-Cre, and 4) for oligodendrocyte expression using a myelin basic promoter (MBP-Cre), then packaged into an AAV capsid (AAV1, AAV9, AAVrh10 or AAVPHP.B) to generate AAV particles. A vector expressing a fluorescent protein can be used to mark vector spread at the injection site (e.g., CAG-mRuby2/tdTomato).

[0572] Two reporter AAV particles will be created for testing, 1) AAVPHP.N:CAG-DIO-mTurquoisc2 (forward)/GFP(reverse) and 2) AAV1/9/rh10-CAG-DIO-mTurquoise2(f)/GFP(r). These reporter AAV particles will be delivered either by intravenous administration or by co-intraparenchymal administration with the Cre-vectors. Only those cells of the CNS also expressing Cre (co-transduced by a cre-vector administered intraparenchymally) will express the reporter.

[0573] Each cre-vector will be injected into two mice and each mouse will also be administered one of the two reporter AAV particles (16 mice). The reporter AAV particles may be administered intravenously or intraparenchymally. Four mice will serve as non-Cre mRuby2/tdTomato controls. Using an intracranial surgical approach, Cre-vectors (and/or a reporter AAV) will be intraparenchymally administered to the striatum, thalamus and/or cortex at a volume of 0.5 μL and a concentration of 3×10⁹ to 3×10¹⁰ vg/site. The reporter AAV particles administered intravenously will be given at a concentration of 3×10¹¹ vg.

[0574] Mice will be evaluated three weeks after AAV particle administration. Co-transduction efficiency will be evaluated based on imaging of the coincidence of green and red fluorescent signals.

[0575] It is anticipated that the IV-administered reporter AAV particles will deliver the reporter to CNS tissues expressing Cre and mRuby2/tdTomato (e.g., striatum, thalamus and/or cortex). To be considered successful, the results of this pilot experiment will show a high yield of GFP (reporter) transduced neurons in the mRuby/tdTomato transduced brain region (delivered by IPa). As an example, >50% of neurons and astrocytes and 10-30% of oligodendrocytes in the mRuby/tdTomato transduced brain region may also express GFP.

[0576] It is possible that off-target cell-types will be transduced by the Cre-vectors and reporter AAV particles. In this case, miRNA binding sites complementary to miRNAs expressed in these off-target cell types, but not in the target cell type, may be introduced into the viral genomes of the AAV particles for enhanced targeting and specificity.

### Pilot Mouse AAV-Cre Based AAV-PHP.B/N Library Selection

[0577] In order to test whether expected and/or novel capsid sequences comprising targeting peptides can be recovered from the brain following intraparenchymal delivery to the striatum, thalamus and/or cortex of the Cre-vectors and intravenous delivery of an AAV capsid library, a pilot study will first be performed in mice. This study can also be used to test library diversification/randomization strategies.

[0578] Four DNA libraries based on PHP.B/PHP.N will be generated by PCR, with mixed bases at the desired positions. PCR fragments will be cloned into the library acceptor AAV genome (e.g., AAV9) by Gibson assembly and processed to remove unassembled DNA. The AAV DNA libraries will then be transfected directly into HEK293 cells for AAV particle production. The libraries will be built into an AAV vector with rep/cap in cis and a floxed element. Libraries of AAV particles will be generated based on these DNA libraries.

[0579] Library 1 will extend the targeting peptide sequence to include the 2-3 amino acids immediately upstream and/or downstream of the 7-mer peptide insert. These amino acids will be replaced with random amino acids generated by NNK-containing primers. This library will comprise site saturation mutagenesis at 5-6 amino acids of the targeting peptide sequence and produce a library diversity of 3.2×10⁶ to 6.4×10⁷ sequences.

[0580] Library 2 will be a mixed library of PHP.B/N, PHP.B2 and PHP.B3 targeting peptides mutated 3-amino acids at a time, creating 21 combined libraries with approximately 1.6×10⁵ variants. This library is based on the same strategy as was used for generation of PHP.N from PHP.B, described above.

[0581] Library 3 will be a mixture of two novel 7-mer peptide libraries inserted between amino acids 588 and 589 of AAV9 (SEQ ID NO: 2), K449R AAV9 (SEQ ID NO: 3) and/or AAV-DJ8 and/or AAV5.

[0582] Library 4 will include capsid sequences modified at a distinct surface site (e.g., loop IV and/or VIII).

[0583] Cell-type specific Cre-vectors (as described above) and AAV particle libraries will be injected into mice (2 mice per Cre-vector, per library and 2 Cre-control mice: 18 mice total). Cre-vectors will be delivered to the striatum and cortex via intraparenchymal administration, whereas the AAV particle libraries will be administered intravenously.

[0584] Libraries may optionally be spiked with a small amount of AAV9 or AAVPHP.B to serve as a normalization control.

[0585] Tissue samples (e.g., brain) will be collected 3 weeks after administration of Cre-vectors and AAV libraries. The total DNA will be isolated and capsid sequences recovered. For recovery. Cre-dependent amplification strategies may be used. Capsid sequences will be prepared for NGS using standard methods known in the art.

[0586] DNA libraries will be sequenced by NGS at a depth of 50M, 100 bp reads. Virus libraries will be sequenced at a depth of 20M, 100 bp reads. Samples recovered from one CNS region and one liver sample per mouse will be sequenced at a depth of 5M reads.

[0587] Capsid sequences comprising targeting peptides that show evidence of enrichment across CNS cell-types will be isolated and cloned. If no clearly enriched variants arise from the first round library, a second-round capsid library may be generated. Capsid sequences comprising targeting peptides that show evidence of enrichment across CNS cell-types from a second round library will be isolated and cloned.

[0588] Isolated variants will be screened in adult mice. Each capsid variant will be used to package a ubiquitous reporter vector (e.g., ssAAV-CAG-GFP) and transduction efficiency to CNS tissues (brain and spinal cord) subsequent to intravenous administration will be evaluated by immunofluorescence imaging, as compared to parental capsids PHP.B, PHP.N and/or AAV9. Vector genome quantification in target tissues (e.g., brain, spinal cord, liver, heart, spleen, skeletal muscle) will be determined by qPCR.

[0589] It is anticipated that intraparenchymal delivery of AAV-Cre vectors will allow for the adaptation of the CREATE method to non-transgenic animals. A successful outcome of this pilot study would be the identification of one or more capsid variants (and targeting peptides) with enhanced tropism for CNS tissue after intravenous administration. As a positive control, it is anticipated that PHP.B, PHP.N, PHP.B2, and PHP.B3 or other AAV variants (see Table 4) will be identified again in Library 2.

### Pilot Testing of NHP Injection Strategy

[0590] AAV-Cre vectors will need to be delivered directly to the CNS tissue of the non-transgenic NHP. The injection strategy will be validated with a pilot study in NHP. The pilot study will assess spacing of injection sites for separation between areas of vector spread based on differing promoters (promoters described above). Further, the pilot study will address toxicity or immune responses to the modified CREATE system, by assessing markers of cell death, glial reactivity (Iba1 and GFAP immunostaining), T cell infiltration, and/or H&E staining. Simultaneously, expression of IV administered AAV-PHP.B delivered at a concentration of about 2×10¹³ vg/kg can be assessed for transduction efficiency based on the Cre-dependent reporter. Transduction efficiency of AAV particles comprising reporter constructs delivered by co-intraparenchymal administration may also be determined.

### Selection of a AV Capsid Variants in NHP

[0591] AAVPHP.B/N based capsid libraries are generated as described above, however prior to injection into NHP, the libraries will be titred and assessed by NGS. Cell-type specific Cre-vectors will be stereotactically delivered to the CNS tissue of three NHP, while the AAV capsid libraries will be injected intravenously, one week prior to injection of Cre vector. Stereotactic delivery to CNS tissue, may include intraparenchymal delivery to the putamen, thalamus, cortex, hippocampus and/or deep cerebellar nuclei.

[0592] Two-three weeks post-Cre-vectors stereotactical administration, tissue samples (e.g., brain, spinal cord, peripheral organs) are collected for analysis. Total vector DNA is isolated from the desired tissue sample(s) and a Cre-dependent amplification strategy is used to recover capsid sequences from each animal and each tissue region of interest. Samples are then prepared for NGS and sequenced as described previously.

[0593] AAV capsid variants showing enrichment across CNS cell types will be cloned for further examination and tested in adult mice/NHP for transduction efficiency to tissues of interest.

[0594] It is anticipated that AAV capsid sequences comprising targeting peptides with enhanced tropism to CNS tissues after IV administration, as compared to AAV9. PHP.B or PHP.A will be identified through these NHP experiments.

[0595] The methods for selection of AAV capsid variants in NHP as described above can be repeated, and a second round library generated to further narrow the number of lead AAV capsid sequence candidates with enhanced tropism to the CNS and/or to enhance reliability. AAV capsid variants showing enrichment across CNS cell types in the second round library will also be cloned for further examination and testing in mice/NHP.

[0596] A second evolution step may optionally be included for the AAV capsid candidates generated in the aforementioned NHP selection process. AAV capsid variant sequences with targeting peptides inserted at amino acid position 588-589 of the parent capsid sequence, are further modified at a second surface site. Modifications at more than one surface site may increase CNS tropism of the AAV capsid variants.

[0597] The top ten AAV capsid variants identified in these experiments will be cloned for further testing, and a viral genome encoding a reporter construct will be packaged inside. Variants will be identified based on total read number recovered from each sample, enrichment over the previous round or the starting library, and predicted high level of virus production. AAV particles will be titred and injected IV into adult mice at a dose of 1×10¹¹ vg/mouse. Three weeks after injection, the mouse is perfused and tissues collected and processed for assessment of fluorescence by confocal microscopy. The top three candidates after further examination in mice will be tested individually in NHP to identify an AAV variant capsid with the best NHP CNS transduction profile following IV administration. Alternatively, AAV particles may be tested immediately in NHP and/or in parallel with the mouse studies described above.

### Example 3. Identification of Dorsal Root Ganglion Targeting Peptides and AAV Particles

[0598] The dorsal root ganglia are clusters of neuronal cell bodies that lie just outside the spinal cord along the dorsal roots. Neurons of the dorsal root, with cell bodies in the DRG, convey sensory information from the periphery back to the spinal cord and central nervous system. Neurons of the DRG can be difficult to target with efficiency and selectivity for delivery of, for example, a therapeutic agent. Pathological conditions associated with DRG and their component neurons (e.g., neuropathic pain) could potentially be more easily treated if targeting peptides and associated AAV particles are identified for specific and efficient transduction of DRG following intravenous administration of AAV particles.

### Mouse Sensory Neuron Selection, First Round of Evolution

[0599] One of the targeting peptides (PHP.S; SEQ ID NO: 43058) identified using CREATE in mice (as described above), has previously demonstrated efficient transduction of peripheral neurons of the dorsal root, nodose, sympathetic, parasympathetic and cardiac ganglia. To identify targeting peptides and associated AAV particles with enhanced specificity for neurons of the DRG and subpopulations thereof, libraries based on this PHP.S targeting peptide will be generated and screened in transgenic mice.

[0600] Three AAV capsid libraries will be created and screened. Each library will be generated by site-saturation mutagenesis of different subsets of amino acids of the parent PHP.S amino acid sequence or flanking sequences of the parent AAV capsid.

[0601] Library 1 will involve site-saturation mutagenesis of the amino acids flanking the PHP.S 7-mer on both the 5′ and 3′ end in the parent AAV capsid sequence. This mutagenesis may include 4 or 5 amino acids flanking the 7-mer, yielding approximately 1.6×10⁵ to 3.2×10⁶ unique sequences.

[0602] For Library 2, sets of three amino acids of the PHP.S 7-mer and/or flanking regions will be evolved together, to generate six, 3 amino acid libraries with approximately 4.8×10⁴ unique amino acid sequences.

[0603] Library 3 will be a mixture of two novel 7-mer peptide libraries inserted between amino acids 588 and 589 of AAV9 (SEQ ID NO: 2). K449R AAV9 (SEQ ID NO: 3) and/or AAV-DJ8, giving approximately 1.3×10⁹ unique amino acid sequences each.

[0604] The three DNA libraries will be used to generate AAV particle libraries. Both DNA and AAV particle libraries will be titered by qPCR and assessed by NGS. AAV particle libraries will be given to transgenic mice via intravenous administration at a dose of approximately 1×10¹¹ vg/mouse.

[0605] Five transgenic mouse lines will be used, as follows: 1) Vglut-Cre for selection of targeting peptides for total sensory neuron transduction, 2) Nav 1.8-Cre for selection of targeting peptides for nociceptive neuron transduction, 3) Parvalbumin (PV)-Cre for selection of targeting peptides for parvalbumin neuron transduction, 4) TH-Cre for selection of targeting peptides for sympathetic/adrenergic neuron transduction and 5) Chat-Cre for selection of targeting peptides for parasympathetic/cholinergic neuron transduction.

[0606] One to two weeks after intravenous delivery, AAV particles will be recovered from neurons of the dorsal root, nodose, and cardiac ganglia, sympathetic and parasympathetic neurons including those of the myenteric ganglia and submucosal plexus of the intestines, and olfactory sensory neurons. DNA and AAV particle libraries associated with a desired transduction profile (e.g., transduction of a particular neuronal subset) will be sequenced and further characterized.

[0607] Fluorescence imaging will be used to determine transgene expression in the DRG and other peripheral ganglia. Immunostaining can be used to co-localize transgene expression to particular neuronal subtypes of the DRG. Transgene/reporter expression can be driven by either ubiquitous or neuron-specific promoter(s).

[0608] It is anticipated that several rounds of evolution may be necessary in order to identify a targeting peptide and associated AAV particle with a transduction profile for a specific neuronal subset, such as nociceptive neurons of the DRG. Negative selection may also be applied, wherein targeting peptides and associated AAV particles are eliminated from consideration if the transduction profile is considered undesirable.

Mouse Sensory Neuron Selection. Second Round of Evolution

[0609] One or more of the targeting peptides with enhanced specificity and efficiency of transduction of neurons of the DRG will be further evolved to increase specificity. Evolution strategies may include site-saturation mutagenesis of loop IV (e.g., amino acids 452-458) or mutation of known receptor binding sites.

[0610] Fluorescence imaging will be used to determine transgene expression in the DRG and other peripheral ganglia. Immunostaining can be used to co-localize transgene expression to particular neuronal subtypes of the DRG. Biodistribution of vector genomes can be determined by qPCR.

### Example 4. Targeting of AAVPHP.B and AAVPHP.a to the CNS and DRG

[0611] To determine the tropism of AAV particles comprising the PHP.B or PHP.A targeting peptide to CNS and to the dorsal root ganglia after intravenous administration, the following study design was executed in adult (6-7 weeks) male C57BL/6 mice.

TABLE 5
Study design for PHP.B/PHP.A targeting to DRG

| Test | Dose | Route | Volume | N | End of |
|---|---|---|---|---|---|
| Article | (vg) | (Tail vein) | (μL) | (IHC) | Study |
| Vehicle | 0 | IV | 160 | 2 | D28 |
| AAV9-ssGFP | 5 × 10¹¹ | IV | 160 | 4 | D28 |
| PHP.B-ssGFP | 5 × 10¹¹ | IV | 160 | 4 | D28 |
| PHP.A-ssGFP | 5 × 10¹¹ | IV | 160 | 4 | D28 |

[0612] Targeting peptides PHP.B (TLAVPFK; SEQ ID NO: 43054) or PHP.A (YTLSQGW: SEQ ID NO: 43055) were inserted into an AAV9 (SEQ ID NO: 2) capsid sequence between amino acid positions 588 and 589. AAV9 without a targeting insert was used as a comparison vector, and PBS used as a control. A single stranded viral genome encoding GFP was used, yielding AAV particles AAV9-ssGFP, PHP.B-ssGFP and PHP.A-ssGFP. AAV particles (or PBS) were administered intravenously via the tail vein at a dose of 5×10¹¹ and volume of 160 μL.

[0613] Twenty eight days after intravenous delivery of the AAV particles, the animals were sacrificed and tissues collected for immunohistochemical and immunofluorescent analyses. Tissues from the dorsal root ganglion, brain (striatum, cortex, hippocampus), spinal cord (ventral horn), liver, heart and muscle were collected for processing by standard methods known in the art.

[0614] Analysis of tissue sections of brain, striatum, cortex, hippocampus and ventral horn showed that vectors comprising PHP.B or PHP.A targeting peptides mediate greater gene delivery throughout the CNS than AAV9 following intravenous injection in adult mice.

[0615] Similar analysis of tissue sections of the DRG demonstrated that after intravenous administration of the AAV particles, the greatest transduction of sensory neurons (most GFP signal) was seen with the use of targeting peptide PHP.B. Both AAV9 and PHP.A yielded transduced sensory neurons in the DRG following intravenous delivery, though to a lesser extent to that seen with PHP.B. As expected, intravenous delivery of PBS showed no transduction of sensory neurons of the DRG. These results demonstrate that targeting peptide PHP.B can be used for enhanced targeting to the CNS and of the sensory neurons of the dorsal root ganglia.

### Example 5. Seven-Mer Targeting Peptide Libraries for Selection in NHP

[0616] DNA libraries and associated AAV capsid libraries of 7-mer targeting peptides were generated and tested in mice and NHP. Targeting peptides were inserted into an AAV9 (SEQ ID NO: 2) parent capsid sequence between amino acid positions 588 and 589 (loop VIII).

[0617] AAV1-Cre vectors were administered intraparenchymally to the striatum and thalamus of three adult (2-11 yr, 4-8 kg) non-human primates (macaca mulatta or rhesus macaque), while the AAV capsid library was administered intravenously as shown in the study design of Table 6, below. The AAV particles were delivered in an excipient comprising 200 mM NaCl, 1 mM KH₂PO₄, 3 mM Na₂HPO₄, 0.001% Pluronic F-68 at pH 7.4.

TABLE 6
Study design for AAV9-7mer library in NHP

| | | | | Day 11 ± Dosing (MRI-CED) | | | | |
|---|---|---|---|---|---|---|---|---|
| | | Day 1 Dosing (IV) | | | Dose & Volume | | | |
| | | | Dose & | | Putamen | | Thalamus | |
| Group | N | Material | Volume | Material | Left | Right | Left | Right |
| 1A | 1 | AAV9- | 5.0 × 10¹² vg/kg | AAV1-Cre | 3.75 × 10¹¹ vg | 7.5 × 10¹⁰ vg | 6.25 × 10¹¹ vg | 1.25 × 10¹¹ vg |
| | | 7mer | (1 mL/kg) | | (150 μL) | (150 μL) | (250 μL) | (250 μL) |
| 1B | 1 | AAV9- | 5.0 × 10¹² vg/kg | AAV1-Cre | 7.5 × 10¹⁰ vg | 1.5 × 10¹⁰ vg | 1.25 × 10¹¹ vg | 2.5 × 10¹⁰ vg |
| | | 7mer | (1 mL/kg) | | (150 μL) | (150 μL) | (250 μL) | (250 μL) |
| 1C | 1 | AAV9- | 5.0 × 10¹² vg/kg | AAV1-Cre | 3.75 × 10¹¹ vg | 1.5 × 10¹⁰ vg | 6.75 × 10¹¹ vg | 2.5 × 10¹⁰ vg |
| | | 7mer | (1 mL/kg) | | (150 μL) | (150 μL) | (250 μL) | (250 μL) |

[0618] Five animals were selected based on results of neutralizing antibody assays for anti-AAV antibodies to AAV1 and AAV9. Minimal or no detectable capsid specific antibodies was required for selection. Two of these five animals served as alternate study animals. Study subjects underwent a pre-project physical examination.

[0619] On Day 1 of the study, each animal received intravenous infusion of the AAV9-7mer library. On Day 7±1, animals had bilateral intracranial infusion of AAV1-Cre vectors to the putamen and thalamus, using MRI-guided convection enhanced delivery.

[0620] On the day of dosing, AAV9-7mer libraries or AAV1-Cre containing compositions were thawed at 2-8 C. The excipient detailed above was used as a vehicle control. Dosing solutions were gently centrifuged to collect material from the vial cap then transferred to the syringe/needle for delivery. Dosing solutions were kept at room temperature until administration, but not longer than for 2 hours. On Day 7±1, for the MRI-CED dosing, Gadoteridol (ProHance, Bracco Diagnostics Inc) was added at a 1:250 ratio and mixed carefully by tube inversion prior to loading into dosing syringes.

[0621] For intravenous administration of the AAV9-7mer libraries on Day 1, animals were immobilized with ketamine (10 mg/kg, administered intramuscularly (IM)) and dexmedetomidine (15 μg/kg, IM) and given a single intravenous infusion (dose volume of 1 mL/kg) via the saphenous vein, using a syringe pump. After dosing, a 0.2 mL flush of vehicle/excipient was administered. Animals were allowed to recover and returned to home cages.

[0622] On Day 7±1, for the MRI-CED of AAV1-Cre vectors, animals were anesthetized with ketamine (10 mg/kg) and dexmedetomidine (15 μg/kg) via intramuscular injection, weighed, shaved on the head and neck, intubated and maintained on 1-5% isoflurane. The head was secured in a stereotaxic frame and the overlying skin cleaned and prepared for implantation procedures. Aseptic techniques were used to expose the skull by opening the wound site by anatomical layers. Bilateral craniotomies were performed at entry sites located above the frontal/parietal and occipital lobes. A skull mounted cannula guide ball array was temporarily secured to the skull with titanium screws over each burr hole. After implantation of the cannula guides, animals were transferred to the MRI suite. MRI was used to align the cannula guides with putamen and thalamus targets ipsilateral (same side of the brain/body) to each cannula guide. Repeat MRI was used to visually monitor infusions.

[0623] Dosing solutions were delivered via an adjustable tip 16G cannula (MRI Interventions Inc) primed with the dosing solution then guided into each target site through the skull mounted cannula arrays. Cannula were connected via microbore extension lines (Smiths Medical) to a syringe mounted on a syringe pump (Harvard apparatus). Ascending infusion rates (up to 10 μL/min) were used to deliver dose volumes (150 μL/putamen; 250 μL/thalamus) to the putamen and thalamus. Serial MRI scans were used to monitor infusate distribution.

[0624] Immediately after MRI-CED dosing, animals were transferred back to the operating room where the cannula guide system was removed and the wound site closed, using a vicryl suture. Animals were provided pre- and post-operative medications, allowed to recover from anesthesia and returned to their home cages.

[0625] Fourteen days after MRI-CED dosing to the putamen and thalamus (Day 21±2) animals were euthanized and tissue samples collected. Euthanasia was performed using intravenous delivery of a pentobarbital sodium solution (100 mg/kg), followed by a bilateral thoracotomy. A transcardial perfusion using ice-cold saline was performed via left cardiac ventricle, with approximately 2.5 L of ice-cold saline with heparin (100 U/mL) using a perfusion pump set to 200-400 mL/min over about 10 min. Samples were collected from brain, spinal cord, 12 dorsal root ganglia and associated roots (4 each from cervical, thoracic and lumbar spinal cord), liver, heart (left ventricle and right atrium), gastrocnemius muscle, soleus muscle, pancreas, kidney, spleen, lung, adrenal glands, stomach, sciatic nerve, saphenous nerve, thyroid gland, eyes (with optic nerve), pituitary gland, skeletal muscle (rectus femoris), colon, duodenum, ileum, jejunum, skin of the leg, superior cervical ganglia, urinary bladder, ovaries, uterus, prostate gland, testes, and/or any sites identified as having a lesion, and fresh frozen for biochemical analysis.

[0626] At the time of collection, all samples were photographed alongside a ruler for scale. The brain was cut coronally in a matrix at 3 mm slice thickness, then alphabetically annotated rostral (nose) to caudal (tail). A small punch (1 mm diameter) was created in the white matter of the right cortex for orientation purposes. Brain samples were frozen on dry ice. The spinal cord was cut into segments corresponding to each vertebral level, then transferred to a chilled cryovial tube and snap frozen on dry ice. DRG and associated roots were collected from C1, C3, C5, C7, T3, T5, 17, T9, L1, L3, L5 and L7. These were transferred into a chilled cryovial and frozen on dry ice. For the other organ samples collected, two samples per organ, approximately 1.0×1.0×0.5 cm (or the entire organ if smaller) were collected, transferred to a chilled cryovial tube and snap-frozen on dry ice. All samples were stored frozen at −60C or below.

[0627] Blood and cerebrospinal fluid (CSF) samples were collected on Day 1, prior to IV dosing, on Day 7±1, prior to MRI-CED dosing, and on Day 21±2 prior to termination. Time points and descriptions of sample collection are shown below in Table 7. Whole blood samples were collected in tubes containing EDTA, mixed by inversion and aliquoted into 2 sub-samples, then stored at −60C or below. Sample volumes listed in the Serum column, refer to the volume of whole blood which was then processed to serum and split to 2 aliquots and stored at −60C or below. CSF samples were collected after animals were immobilized with ketamine (10 mg/kg; IM) and dexmedetomidine (15 ug/kg; IM). The neck was shaved and flexed and skin prepared. A 23G needle was manually advanced through the skin and the atlanto-occipital membrane into the cerebellomedullary cistem space. Once CSF flow was confirmed in the needle hub, CSF collection began. Collected CSF was centrifuged (4,500 g for 5 min at 4 C), the supernatant filtered through a 0.8 μm low protein binding syringe filter, and the filtrate split into 4 aliquots for analysis. At necropsy, all available CSF was collected, processed, and aliquoted to approximately 1.0 mL samples. CSF samples were stored at −60C or below.

TABLE 7
Time points for sample collection

| | | | Sample Volume (mL) | | |
|---|---|---|---|---|---|
| Time point | Fasted | N | Serum | Whole blood | CSF |
| Pre-screennig | Yes | 18 | 2.0 | N/A | N/A |
| Day 1: prior to IV dosing | Yes | 3 | 2.0 | 0.5 | 1.5 |
| Day 7 ± 1: prior to intraparenchymal | Yes | 3 | 2.0 | 0.5 | 1.5 |
| MRI-CED dosing | | | | | |
| Day 21 ± 2: prior to necropsy | Yes | 3 | 2.0 | 0.5 | All |
| | | | | | available |

[0628] Animals were monitored throughout the study with twice daily clinical observations assessing mortality, neurological signs or other abnormalities and/or signs of pain or distress. Food consumption was also monitored daily. Body weights were measured once weekly, beginning prior to IV dosing on Day 1.

[0629] After this first round of selection in NHP, targeting peptides with amino acid sequences as represented by SEQ ID NO: 4-14326 (shown in Table 2) were recovered from CNS tissues. DNA libraries comprising SEQ ID NO: 14327-42972 have been prepared for second round selection in NHP.

### Example 6. Three-Mer Targeting Peptide Library for Selection in NHP

[0630] A DNA library and associated AAV capsid library was generated based on a 9-mer of the PHP.N targeting peptide. The 9-mer PHP.N amino acid sequence was further evolved through site saturation mutagenesis of sets of three consecutive amino acids, to generate the targeting peptides represented by SEQ ID NO: 42973-42999, as shown in Table 3. Amino acids at positions 1, 2, and 6-9 of the parent PHP.N 9-mer remained the same, with site saturation mutagenesis of only amino acids at positions 3, 4, and 5, yielding 27 targeting peptide sequences for screening and characterization.

### EQUIVALENTS AND SCOPE

[0631] Those skilled in the art will recognize, or be able to ascertain using no more than routine experimentation, many equivalents to the specific embodiments in accordance with the disclosure. The scope of the present disclosure is not intended to be limited to the above Description, but rather is as set forth in the appended claims.

[0632] In the claims, articles such as “a,” “an,” and “the” may mean one or more than one unless indicated to the contrary or otherwise evident from the context. Claims or descriptions that include “or” between one or more members of a group are considered satisfied if one, more than one, or all of the group members are present in, employed in, or otherwise relevant to a given product or process unless indicated to the contrary or otherwise evident from the context. The disclosure includes embodiments in which exactly one member of the group is present in, employed in, or otherwise relevant to a given product or process. The disclosure includes embodiments in which more than one, or the entire group members are present in, employed in, or otherwise relevant to a given product or process.

[0633] It is also noted that the term “comprising” is intended to be open and permits but does not require the inclusion of additional elements or steps. When the term “comprising” is used herein, the term “consisting of” is thus also encompassed and disclosed.

[0634] Where ranges are given, endpoints are included. Furthermore, it is to be understood that unless otherwise indicated or otherwise evident from the context and understanding of one of ordinary skill in the art, values that are expressed as ranges can assume any specific value or subrange within the stated ranges in different embodiments of the disclosure, to the tenth of the unit of the lower limit of the range, unless the context clearly dictates otherwise.

[0635] In addition, it is to be understood that any particular embodiment of the present disclosure that falls within the prior art may be explicitly excluded from any one or more of the claims. Since such embodiments are deemed to be known to one of ordinary skill in the art, they may be excluded even if the exclusion is not set forth explicitly herein. Any particular embodiment of the compositions of the disclosure (e.g., any antibiotic, therapeutic or active ingredient: any method of production; any method of use; etc.) can be excluded from any one or more claims, for any reason, whether or not related to the existence of prior art.

[0636] It is to be understood that the words which have been used are words of description rather than limitation, and that changes may be made within the purview of the appended claims without departing from the true scope and spirit of the disclosure in its broader aspects.

[0637] While the present disclosure has been described at some length and with some particularity with respect to the several described embodiments, it is not intended that it should be limited to any such particulars or embodiments or any particular embodiment, but it is to be construed with references to the appended claims so as to provide the broadest possible interpretation of such claims in view of the prior art and, therefore, to effectively encompass the intended scope of the disclosure.

LENGTHY TABLES
The patent application contains a lengthy table section. A copy of the table is available in electronic form from the USPTO web site (https://seqdata.uspto.gov/?pageRequest=docDetail&DocID=US20210277418A1). An electronic copy of the table will also be available from the USPTO upon request and payment of the fee set forth in 37 CFR 1.19(b)(3).

The application's sequence listing, which the Patent Office published only in electronic form, follows.

SEQUENCE LISTING (43072 sequences)

SEQ ID NO: 1 - DNA, 2211 bp, Unknown
  Description of Unknown: Adeno-associated virus, human clone 9 sequence
atggctgccgatggttatcttccagattggctcgaggacaaccttagtgaaggaattcgcgagtggtgggctttgaaacctggagcccctcaacccaaggcaaatcaacaacatcaagacaacgctcgaggtcttgtgcttccgggttacaaataccttggacccggcaacggactcgacaagggggagccggtcaacgcagcagacgcggcggccctcgagcacgacaaggcctacgaccagcagctcaaggccggagacaacccgtacctcaagtacaaccacgccgacgccgagttccaggagcggctcaaagaagatacgtcttttgggggcaacctcgggcgagcagtcttccaggccaaaaagaggcttcttgaacctcttggtctggttgaggaagcggctaagacggctcctggaaagaagaggcctgtagagcagtctcctcaggaaccggactcctccgcgggtattggcaaatcgggtgcacagcccgctaaaaagagactcaatttcggtcagactggcgacacagagtcagtcccagaccctcaaccaatcggagaacctcccgcagccccctcaggtgtgggatctcttacaatggcttcaggtggtggcgcaccagtggcagacaataacgaaggtgccgatggagtgggtagttcctcgggaaattggcattgcgattcccaatggctgggggacagagtcatcaccaccagcacccgaacctgggccctgcccacctacaacaatcacctctacaagcaaatctccaacagcacatctggaggatcttcaaatgacaacgcctacttcggctacagcaccccctgggggtattttgacttcaacagattccactgccacttctcaccacgtgactggcagcgactcatcaacaacaactggggattccggcctaagcgactcaacttcaagctcttcaacattcaggtcaaagaggttacggacaacaatggagtcaagaccatcgccaataaccttaccagcacggtccaggtcttcacggactcagactatcagctcccgtacgtgctcgggtcggctcacgagggctgcctcccgccgttcccagcggacgttttcatgattcctcagtacgggtatctgacgcttaatgatggaagccaggccgtgggtcgttcgtccttttactgcctggaatatttcccgtcgcaaatgctaagaacgggtaacaacttccagttcagctacgagtttgagaacgtacctttccatagcagctacgctcacagccaaagcctggaccgactaatgaatccactcatcgaccaatacttgtactatctctcaaagactattaacggttctggacagaatcaacaaacgctaaaattcagtgtggccggacccagcaacatggctgtccagggaagaaactacatacctggacccagctaccgacaacaacgtgtctcaaccactgtgactcaaaacaacaacagcgaatttgcttggcctggagcttcttcttgggctctcaatggacgtaatagcttgatgaatcctggacctgctatggccagccacaaagaaggagaggaccgtttctttcctttgtctggatctttaatttttggcaaacaaggaactggaagagacaacgtggatgcggacaaagtcatgataaccaacgaagaagaaattaaaactactaacccggtagcaacggagtcctatggacaagtggccacaaaccaccagagtgcccaagcacaggcgcagaccggctgggttcaaaaccaaggaatacttccgggtatggtttggcaggacagagatgtgtacctgcaaggacccatttgggccaaaattcctcacacggacggcaactttcacccttctccgctgatgggagggtttggaatgaagcacccgcctcctcagatcctcatcaaaaacacacctgtacctgcggatcctccaacggccttcaacaaggacaagctgaactctttcatcacccagtattctactggccaagtcagcgtggagatcgagtgggagctgcagaaggaaaacagcaagcgctggaacccggagatccagtacacttccaactattacaagtctaataatgttgaatttgctgttaatactgaaggtgtatatagtgaaccccgccccattggcaccagatacctgactcgtaatctgtaa

SEQ ID NO: 2 - protein, 736 aa, Unknown
  Description of Unknown: Capsid of AAV9/hu.14 sequence
MAADGYLPDWLEDNLSEGIREWWALKPGAPQPKANQQHQDNARGLVLPGYKYLGPGNGLDKGEPVNAADAAALEHDKAYDQQLKAGDNPYLKYNHADAEFQERLKEDTSFGGNLGRAVFQAKKRLLEPLGLVEEAAKTAPGKKRPVEQSPQEPDSSAGIGKSGAQPAKKRLNFGQTGDTESVPDPQPIGEPPAAPSGVGSLTMASGGGAPVADNNEGADGVGSSSGNWHCDSQWLGDRVITTSTRTWALPTYNNHLYKQISNSTSGGSSNDNAYFGYSTPWGYFDFNRFHCHFSPRDWQRLINNNWGFRPKRLNFKLFNIQVKEVTDNNGVKTIANNLTSTVQVFTDSDYQLPYVLGSAHEGCLPPFPADVFMIPQYGYLTLNDGSQAVGRSSFYCLEYFPSQMLRTGNNFQFSYEFENVPFHSSYAHSQSLDRLMNPLIDQYLYYLSKTINGSGQNQQTLKFSVAGPSNMAVQGRNYIPGPSYRQQRVSTTVTQNNNSEFAWPGASSWALNGRNSLMNPGPAMASHKEGEDRFFPLSGSLIFGKQGTGRDNVDADKVMITNEEEIKTTNPVATESYGQVATNHQSAQAQAQTGWVQNQGILPGMVWQDRDVYLQGPIWAKIPHTDGNFHPSPLMGGFGMKHPPPQILIKNTPVPADPPTAFNKDKLNSFITQYSTGQVSVEIEWELQKENSKRWNPEIQYTSNYYKSNNVEFAVNTEGVYSEPRPIGTRYLTRNL

SEQ ID NO: 3 - protein, 736 aa, Artificial Sequence
  Description of Artificial Sequence: Synthetic polypeptide
MAADGYLPDWLEDNLSEGIREWWALKPGAPQPKANQQHQDNARGLVLPGYKYLGPGNGLDKGEPVNAADAAALEHDKAYDQQLKAGDNPYLKYNHADAEFQERLKEDTSFGGNLGRAVFQAKKRLLEPLGLVEEAAKTAPGKKRPVEQSPQEPDSSAGIGKSGAQPAKKRLNFGQTGDTESVPDPQPIGEPPAAPSGVGSLTMASGGGAPVADNNEGADGVGSSSGNWHCDSQWLGDRVITTSTRTWALPTYNNHLYKQISNSTSGGSSNDNAYFGYSTPWGYFDFNRFHCHFSPRDWQRLINNNWGFRPKRLNFKLFNIQVKEVTDNNGVKTIANNLTSTVQVFTDSDYQLPYVLGSAHEGCLPPFPADVFMIPQYGYLTLNDGSQAVGRSSFYCLEYFPSQMLRTGNNFQFSYEFENVPFHSSYAHSQSLDRLMNPLIDQYLYYLSRTINGSGQNQQTLKFSVAGPSNMAVQGRNYIPGPSYRQQRVSTTVTQNNNSEFAWPGASSWALNGRNSLMNPGPAMASHKEGEDRFFPLSGSLIFGKQGTGRDNVDADKVMITNEEEIKTTNPVATESYGQVATNHQSAQAQAQTGWVQNQGILPGMVWQDRDVYLQGPIWAKIPHTDGNFHPSPLMGGFGMKHPPPQILIKNTPVPADPPTAFNKDKLNSFITQYSTGQVSVEIEWELQKENSKRWNPEIQYTSNYYKSNNVEFAVNTEGVYSEPRPIGTRYLTRNL

SEQ ID NO: 4 - protein, 7 aa, Artificial Sequence
  Description of Artificial Sequence: Synthetic peptide
AAAASNT

SEQ ID NO: 5 - protein, 7 aa, Artificial Sequence
  Description of Artificial Sequence: Synthetic peptide
AAAIDGD

SEQ ID NO: 6 - protein, 7 aa, Artificial Sequence
  Description of Artificial Sequence: Synthetic peptide
AAALSTK

SEQ ID NO: 7 - protein, 7 aa, Artificial Sequence
  Description of Artificial Sequence: Synthetic peptide
AADANVN

SEQ ID NO: 8 - protein, 7 aa, Artificial Sequence
  Description of Artificial Sequence: Synthetic peptide
AADFKRD

SEQ ID NO: 9 - protein, 7 aa, Artificial Sequence
  Description of Artificial Sequence: Synthetic peptide
AADKTSR

SEQ ID NO: 10 - protein, 7 aa, Artificial Sequence
  Description of Artificial Sequence: Synthetic peptide
AADPGSR

SEQ ID NO: 11 - protein, 7 aa, Artificial Sequence
  Description of Artificial Sequence: Synthetic peptide
AADRVRP

SEQ ID NO: 12 - protein, 7 aa, Artificial Sequence
  Description of Artificial Sequence: Synthetic peptide
AAFMVER

SEQ ID NO: 13 - protein, 7 aa, Artificial Sequence
  Description of Artificial Sequence: Synthetic peptide
AAGFATD

SEQ ID NO: 14 - protein, 7 aa, Artificial Sequence
  Description of Artificial Sequence: Synthetic peptide
AAGFHLS

SEQ ID NO: 15 - protein, 7 aa, Artificial Sequence
  Description of Artificial Sequence: Synthetic peptide
AAGMIAS

SEQ ID NO: 16 - protein, 7 aa, Artificial Sequence
  Description of Artificial Sequence: Synthetic peptide
AAGSTHI

SEQ ID NO: 17 - protein, 7 aa, Artificial Sequence
  Description of Artificial Sequence: Synthetic peptide
AAHANTV

SEQ ID NO: 18 - protein, 7 aa, Artificial Sequence
  Description of Artificial Sequence: Synthetic peptide
AAHPQLF

SEQ ID NO: 19 - protein, 7 aa, Artificial Sequence
  Description of Artificial Sequence: Synthetic peptide
AAHRTAH

SEQ ID NO: 20 - protein, 7 aa, Artificial Sequence
  Description of Artificial Sequence: Synthetic peptide
AAIGKDE

SEQ ID NO: 21 - protein, 7 aa, Artificial Sequence
  Description of Artificial Sequence: Synthetic peptide
AAIRSSY

SEQ ID NO: 22 - protein, 7 aa, Artificial Sequence
  Description of Artificial Sequence: Synthetic peptide
AAKTSQL

SEQ ID NO: 23 - protein, 7 aa, Artificial Sequence
  Description of Artificial Sequence: Synthetic peptide
AALPTLL

SEQ ID NO: 24 - protein, 7 aa, Artificial Sequence
  Description of Artificial Sequence: Synthetic peptide
AALSHLH

SEQ ID NO: 25 - protein, 7 aa, Artificial Sequence
  Description of Artificial Sequence: Synthetic peptide
AALSRVD

SEQ ID NO: 26 - protein, 7 aa, Artificial Sequence
  Description of Artificial Sequence: Synthetic peptide
AALTKVL

SEQ ID NO: 27 - protein, 7 aa, Artificial Sequence
  Description of Artificial Sequence: Synthetic peptide
AALTRLT

SEQ ID NO: 28 - protein, 7 aa, Artificial Sequence
  Description of Artificial Sequence: Synthetic peptide
AAMIKRQ

SEQ ID NO: 29 - protein, 7 aa, Artificial Sequence
  Description of Artificial Sequence: Synthetic peptide
AAMMKTV

SEQ ID NO: 30 - protein, 7 aa, Artificial Sequence
  Description of Artificial Sequence: Synthetic peptide
AAMVSTP

SEQ ID NO: 31 - protein, 7 aa, Artificial Sequence
  Description of Artificial Sequence: Synthetic peptide
AANLRTG

SEQ ID NO: 32 - protein, 7 aa, Artificial Sequence
  Description of Artificial Sequence: Synthetic peptide
AANLVLQ

SEQ ID NO: 33 - protein, 7 aa, Artificial Sequence
  Description of Artificial Sequence: Synthetic peptide
AANSTQS

SEQ ID NO: 34 - protein, 7 aa, Artificial Sequence
  Description of Artificial Sequence: Synthetic peptide
AAPIAAA

SEQ ID NO: 35 - protein, 7 aa, Artificial Sequence
  Description of Artificial Sequence: Synthetic peptide
AAPPFGH

SEQ ID NO: 36 - protein, 7 aa, Artificial Sequence
  Description of Artificial Sequence: Synthetic peptide
AAPSSSI

SEQ ID NO: 37 - protein, 7 aa, Artificial Sequence
  Description of Artificial Sequence: Synthetic peptide
AAPSYRG

SEQ ID NO: 38 - protein, 7 aa, Artificial Sequence
  Description of Artificial Sequence: Synthetic peptide
AAPTITP

SEQ ID NO: 39 - protein, 7 aa, Artificial Sequence
  Description of Artificial Sequence: Synthetic peptide
AAQLGER

SEQ ID NO: 40 - protein, 7 aa, Artificial Sequence
  Description of Artificial Sequence: Synthetic peptide
AAQPYTH

SEQ ID NO: 41 - protein, 7 aa, Artificial Sequence
  Description of Artificial Sequence: Synthetic peptide
AARPPNA

SEQ ID NO: 42 - protein, 7 aa, Artificial Sequence
  Description of Artificial Sequence: Synthetic peptide
AARSTVV

SEQ ID NO: 43 - protein, 7 aa, Artificial Sequence
  Description of Artificial Sequence: Synthetic peptide
AARTSFN

SEQ ID NO: 44 - protein, 7 aa, Artificial Sequence
  Description of Artificial Sequence: Synthetic peptide
AARTTYT

SEQ ID NO: 45 - protein, 7 aa, Artificial Sequence
  Description of Artificial Sequence: Synthetic peptide
AASASRY

SEQ ID NO: 46 - protein, 7 aa, Artificial Sequence
  Description of Artificial Sequence: Synthetic peptide
AASSDSY

SEQ ID NO: 47 - protein, 7 aa, Artificial Sequence
  Description of Artificial Sequence: Synthetic peptide
AASYVGI

SEQ ID NO: 48 - protein, 7 aa, Artificial Sequence
  Description of Artificial Sequence: Synthetic peptide
AATCGQN

SEQ ID NO: 49 - protein, 7 aa, Artificial Sequence
  Description of Artificial Sequence: Synthetic peptide
AATLATA

SEQ ID NO: 50 - protein, 7 aa, Artificial Sequence
  Description of Artificial Sequence: Synthetic peptide
AATPSKH

SEQ ID NO: 51 - protein, 7 aa, Artificial Sequence
  Description of Artificial Sequence: Synthetic peptide
AATSLNS

SEQ ID NO: 52 - protein, 7 aa, Artificial Sequence
  Description of Artificial Sequence: Synthetic peptide
AAVGASS

SEQ ID NO: 53 - protein, 7 aa, Artificial Sequence
  Description of Artificial Sequence: Synthetic peptide
AAVGGLG

SEQ ID NO: 54 - protein, 7 aa, Artificial Sequence
  Description of Artificial Sequence: Synthetic peptide
AAWADES

SEQ ID NO: 55 - protein, 7 aa, Artificial Sequence
  Description of Artificial Sequence: Synthetic peptide
AAYSFSP

SEQ ID NO: 56 - protein, 7 aa, Artificial Sequence
  Description of Artificial Sequence: Synthetic peptide
ADAHMNR

SEQ ID NO: 57 - protein, 7 aa, Artificial Sequence
  Description of Artificial Sequence: Synthetic peptide
ADDHHSH

SEQ ID NO: 58 - protein, 7 aa, Artificial Sequence
  Description of Artificial Sequence: Synthetic peptide
ADEEDSC

SEQ ID NO: 59 - protein, 7 aa, Artificial Sequence
  Description of Artificial Sequence: Synthetic peptide
ADGDVPR

SEQ ID NO: 60 - protein, 7 aa, Artificial Sequence
  Description of Artificial Sequence: Synthetic peptide
ADGKSSD

SEQ ID NO: 61 - protein, 7 aa, Artificial Sequence
  Description of Artificial Sequence: Synthetic peptide
ADGSTTL

SEQ ID NO: 62 - protein, 7 aa, Artificial Sequence
  Description of Artificial Sequence: Synthetic peptide
ADHVPYI

SEQ ID NO: 63 - protein, 7 aa, Artificial Sequence
  Description of Artificial Sequence: Synthetic peptide
ADKLGHT

SEQ ID NO: 64 - protein, 7 aa, Artificial Sequence
  Description of Artificial Sequence: Synthetic peptide
ADKPSDR

SEQ ID NO: 65 - protein, 7 aa, Artificial Sequence
  Description of Artificial Sequence: Synthetic peptide
ADKSRVG

SEQ ID NO: 66 - protein, 7 aa, Artificial Sequence
  Description of Artificial Sequence: Synthetic peptide
ADKVRLV

SEQ ID NO: 67 - protein, 7 aa, Artificial Sequence
  Description of Artificial Sequence: Synthetic peptide
ADLAISV

SEQ ID NO: 68 - protein, 7 aa, Artificial Sequence
  Description of Artificial Sequence: Synthetic peptide
ADLLPST

SEQ ID NO: 69 - protein, 7 aa, Artificial Sequence
  Description of Artificial Sequence: Synthetic peptide
ADLSPTE

SEQ ID NO: 70 - protein, 7 aa, Artificial Sequence
  Description of Artificial Sequence: Synthetic peptide
ADLYTRP

SEQ ID NO: 71 - protein, 7 aa, Artificial Sequence
  Description of Artificial Sequence: Synthetic peptide
ADMRSSA

SEQ ID NO: 72 - protein, 7 aa, Artificial Sequence
  Description of Artificial Sequence: Synthetic peptide
ADNQVPL

SEQ ID NO: 73 - protein, 7 aa, Artificial Sequence
  Description of Artificial Sequence: Synthetic peptide
ADPEGAS

SEQ ID NO: 74 - protein, 7 aa, Artificial Sequence
  Description of Artificial Sequence: Synthetic peptide
ADPERVR

SEQ ID NO: 75 - protein, 7 aa, Artificial Sequence
  Description of Artificial Sequence: Synthetic peptide
ADPHMPK

SEQ ID NO: 76 - protein, 7 aa, Artificial Sequence
  Description of Artificial Sequence: Synthetic peptide
ADPHRNQ

SEQ ID NO: 77 - protein, 7 aa, Artificial Sequence
  Description of Artificial Sequence: Synthetic peptide
ADPMHRA

SEQ ID NO: 78 - protein, 7 aa, Artificial Sequence
  Description of Artificial Sequence: Synthetic peptide
ADPPKFW

SEQ ID NO: 79 - protein, 7 aa, Artificial Sequence
  Description of Artificial Sequence: Synthetic peptide
ADPRQKS

SEQ ID NO: 80 - protein, 7 aa, Artificial Sequence
  Description of Artificial Sequence: Synthetic peptide
ADRAHAV

SEQ ID NO: 81 - protein, 7 aa, Artificial Sequence
  Description of Artificial Sequence: Synthetic peptide
ADRGSHS

SEQ ID NO: 82 - protein, 7 aa, Artificial Sequence
  Description of Artificial Sequence: Synthetic peptide
ADRLPFL

SEQ ID NO: 83 - protein, 7 aa, Artificial Sequence
  Description of Artificial Sequence: Synthetic peptide
ADRSPIT

SEQ ID NO: 84 - protein, 7 aa, Artificial Sequence
  Description of Artificial Sequence: Synthetic peptide
ADRYGRV

SEQ ID NO: 85 - protein, 7 aa, Artificial Sequence
  Description of Artificial Sequence: Synthetic peptide
ADSGRTI

SEQ ID NO: 86 - protein, 7 aa, Artificial Sequence
  Description of Artificial Sequence: Synthetic peptide
ADSTHAA

SEQ ID NO: 87 - protein, 7 aa, Artificial Sequence
  Description of Artificial Sequence: Synthetic peptide
ADTMTSS

SEQ ID NO: 88 - protein, 7 aa, Artificial Sequence
  Description of Artificial Sequence: Synthetic peptide
ADTMTTV

SEQ ID NO: 89 - protein, 7 aa, Artificial Sequence
  Description of Artificial Sequence: Synthetic peptide
ADTRLHS

SEQ ID NO: 90 - protein, 7 aa, Artificial Sequence
  Description of Artificial Sequence: Synthetic peptide
ADTRLQT

SEQ ID NO: 91 - protein, 7 aa, Artificial Sequence
  Description of Artificial Sequence: Synthetic peptide
ADVRTLS

SEQ ID NO: 92 - protein, 7 aa, Artificial Sequence
  Description of Artificial Sequence: Synthetic peptide
AEAGMFD

SEQ ID NO: 93 - protein, 7 aa, Artificial Sequence
  Description of Artificial Sequence: Synthetic peptide
AEAKNTR

SEQ ID NO: 94 - protein, 7 aa, Artificial Sequence
  Description of Artificial Sequence: Synthetic peptide
AEAPTRD

SEQ ID NO: 95 - protein, 7 aa, Artificial Sequence
  Description of Artificial Sequence: Synthetic peptide
AEATSVE

SEQ ID NO: 96 - protein, 7 aa, Artificial Sequence
  Description of Artificial Sequence: Synthetic peptide
AEGNPKI

SEQ ID NO: 97 - protein, 7 aa, Artificial Sequence
  Description of Artificial Sequence: Synthetic peptide
AEGPEWR

SEQ ID NO: 98 - protein, 7 aa, Artificial Sequence
  Description of Artificial Sequence: Synthetic peptide
AEHPNSL

SEQ ID NO: 99 - protein, 7 aa, Artificial Sequence
  Description of Artificial Sequence: Synthetic peptide
AEHSPSL

SEQ ID NO: 100 - protein, 7 aa, Artificial Sequence
  Description of Artificial Sequence: Synthetic peptide
AEIVRHV

SEQ ID NO: 101 - protein, 7 aa, Artificial Sequence
  Description of Artificial Sequence: Synthetic peptide
AELASPI

SEQ ID NO: 102 - protein, 7 aa, Artificial Sequence
  Description of Artificial Sequence: Synthetic peptide
AELKRGP

SEQ ID NO: 103 - protein, 7 aa, Artificial Sequence
  Description of Artificial Sequence: Synthetic peptide
AELPPRQ

SEQ ID NO: 104 - protein, 7 aa, Artificial Sequence
  Description of Artificial Sequence: Synthetic peptide
AELQPHL

SEQ ID NO: 105 - protein, 7 aa, Artificial Sequence
  Description of Artificial Sequence: Synthetic peptide
AEPRSWS

SEQ ID NO: 106 - protein, 7 aa, Artificial Sequence
  Description of Artificial Sequence: Synthetic peptide
AEPTDFL

SEQ ID NO: 107 - protein, 7 aa, Artificial Sequence
  Description of Artificial Sequence: Synthetic peptide
AERATWS

SEQ ID NO: 108 - protein, 7 aa, Artificial Sequence
  Description of Artificial Sequence: Synthetic peptide
AERNMAP

SEQ ID NO: 109 - protein, 7 aa, Artificial Sequence
  Description of Artificial Sequence: Synthetic peptide
AERQQYL

SEQ ID NO: 110 - protein, 7 aa, Artificial Sequence
  Description of Artificial Sequence: Synthetic peptide
AESAYVP

SEQ ID NO: 111 - protein, 7 aa, Artificial Sequence
  Description of Artificial Sequence: Synthetic peptide
AETSSSS

SEQ ID NO: 112 - protein, 7 aa, Artificial Sequence
  Description of Artificial Sequence: Synthetic peptide
AFAGVRG

SEQ ID NO: 113 - protein, 7 aa, Artificial Sequence
  Description of Artificial Sequence: Synthetic peptide
AFARSAP

SEQ ID NO: 114 - protein, 7 aa, Artificial Sequence
  Description of Artificial Sequence: Synthetic peptide
AFDTRGG

SEQ ID NO: 115 - protein, 7 aa, Artificial Sequence
  Description of Artificial Sequence: Synthetic peptide
AFEGRSP

SEQ ID NO: 116 - protein, 7 aa, Artificial Sequence
  Description of Artificial Sequence: Synthetic peptide
AFESPRA

SEQ ID NO: 117 - protein, 7 aa, Artificial Sequence
  Description of Artificial Sequence: Synthetic peptide
AFGASMS

SEQ ID NO: 118 - protein, 7 aa, Artificial Sequence
  Description of Artificial Sequence: Synthetic peptide
AFGKGHT

SEQ ID NO: 119 - protein, 7 aa, Artificial Sequence
  Description of Artificial Sequence: Synthetic peptide
AFGKNTV

SEQ ID NO: 120 - protein, 7 aa, Artificial Sequence
  Description of Artificial Sequence: Synthetic peptide
AFGTLKM

SEQ ID NO: 121 - protein, 7 aa, Artificial Sequence
  Description of Artificial Sequence: Synthetic peptide
AFLAANA

SEQ ID NO: 122 - protein, 7 aa, Artificial Sequence
  Description of Artificial Sequence: Synthetic peptide
AFLNQLS

SEQ ID NO: 123 - protein, 7 aa, Artificial Sequence
  Description of Artificial Sequence: Synthetic peptide
AFLSSAP

SEQ ID NO: 124 - protein, 7 aa, Artificial Sequence
  Description of Artificial Sequence: Synthetic peptide
AFMSKLE

SEQ ID NO: 125 - protein, 7 aa, Artificial Sequence
  Description of Artificial Sequence: Synthetic peptide
AFNGTDS

SEQ ID NO: 126 - protein, 7 aa, Artificial Sequence
  Description of Artificial Sequence: Synthetic peptide
AFNHELS

SEQ ID NO: 127 - protein, 7 aa, Artificial Sequence
  Description of Artificial Sequence: Synthetic peptide
AFNTSHD

SEQ ID NO: 128 - protein, 7 aa, Artificial Sequence
  Description of Artificial Sequence: Synthetic peptide
AFPLPPH

SEQ ID NO: 129 - protein, 7 aa, Artificial Sequence
  Description of Artificial Sequence: Synthetic peptide
AFPQSGN

SEQ ID NO: 130 - protein, 7 aa, Artificial Sequence
  Description of Artificial Sequence: Synthetic peptide
AFQDKQT

SEQ ID NO: 131 - protein, 7 aa, Artificial Sequence
  Description of Artificial Sequence: Synthetic peptide
AFQHQPP

SEQ ID NO: 132 - protein, 7 aa, Artificial Sequence
  Description of Artificial Sequence: Synthetic peptide
AFQSARA

SEQ ID NO: 133 - protein, 7 aa, Artificial Sequence
  Description of Artificial Sequence: Synthetic peptide
AFSNAGP

SEQ ID NO: 134 - protein, 7 aa, Artificial Sequence
  Description of Artificial Sequence: Synthetic peptide
AFSTTVM

SEQ ID NO: 135 - protein, 7 aa, Artificial Sequence
  Description of Artificial Sequence: Synthetic peptide
AFTGKSS

SEQ ID NO: 136 - protein, 7 aa, Artificial Sequence
  Description of Artificial Sequence: Synthetic peptide
AFVASSP

SEQ ID NO: 137 - protein, 7 aa, Artificial Sequence
  Description of Artificial Sequence: Synthetic peptide
AFVGKVT

SEQ ID NO: 138 - protein, 7 aa, Artificial Sequence
  Description of Artificial Sequence: Synthetic peptide
AFVPKSM

SEQ ID NO: 139 - protein, 7 aa, Artificial Sequence
  Description of Artificial Sequence: Synthetic peptide
AGAEEHM

SEQ ID NO: 140 - protein, 7 aa, Artificial Sequence
  Description of Artificial Sequence: Synthetic peptide
AGALMHL

SEQ ID NO: 141 - protein, 7 aa, Artificial Sequence
  Description of Artificial Sequence: Synthetic peptide
AGAPTGL

SEQ ID NO: 142 - protein, 7 aa, Artificial Sequence
  Description of Artificial Sequence: Synthetic peptide
AGATSFY

SEQ ID NO: 143 - protein, 7 aa, Artificial Sequence
  Description of Artificial Sequence: Synthetic peptide
AGGAGQM

SEQ ID NO: 144 - protein, 7 aa, Artificial Sequence
  Description of Artificial Sequence: Synthetic peptide
AGGQPSL

SEQ ID NO: 145 - protein, 7 aa, Artificial Sequence
  Description of Artificial Sequence: Synthetic peptide
AGGSWPA

SEQ ID NO: 146 - protein, 7 aa, Artificial Sequence
  Description of Artificial Sequence: Synthetic peptide
AGGTSMP

SEQ ID NO: 147 - protein, 7 aa, Artificial Sequence
  Description of Artificial Sequence: Synthetic peptide
AGGYLVP

SEQ ID NO: 148 - protein, 7 aa, Artificial Sequence
  Description of Artificial Sequence: Synthetic peptide
AGHRADS

SEQ ID NO: 149 - protein, 7 aa, Artificial Sequence
  Description of Artificial Sequence: Synthetic peptide
AGHTNLP

SEQ ID NO: 150 - protein, 7 aa, Artificial Sequence
  Description of Artificial Sequence: Synthetic peptide
AGHVVSM

SEQ ID NO: 151 - protein, 7 aa, Artificial Sequence
  Description of Artificial Sequence: Synthetic peptide
AGITTAV

SEQ ID NO: 152 - protein, 7 aa, Artificial Sequence
  Description of Artificial Sequence: Synthetic peptide
AGKATYI

SEQ ID NO: 153 - protein, 7 aa, Artificial Sequence
  Description of Artificial Sequence: Synthetic peptide
AGKLVSS

SEQ ID NO: 154 - protein, 7 aa, Artificial Sequence
  Description of Artificial Sequence: Synthetic peptide
AGLAVKP

SEQ ID NO: 155 - protein, 7 aa, Artificial Sequence
  Description of Artificial Sequence: Synthetic peptide
AGLDFYP

SEQ ID NO: 156 - protein, 7 aa, Artificial Sequence
  Description of Artificial Sequence: Synthetic peptide
AGLKDVT

SEQ ID NO: 157 - protein, 7 aa, Artificial Sequence
  Description of Artificial Sequence: Synthetic peptide
AGLLTQI

SEQ ID NO: 158 - protein, 7 aa, Artificial Sequence
  Description of Artificial Sequence: Synthetic peptide
AGLNGQG

SEQ ID NO: 159 - protein, 7 aa, Artificial Sequence
  Description of Artificial Sequence: Synthetic peptide
AGLNHSV

SEQ ID NO: 160 - protein, 7 aa, Artificial Sequence
  Description of Artificial Sequence: Synthetic peptide
AGLQQLS

SEQ ID NO: 161 - protein, 7 aa, Artificial Sequence
  Description of Artificial Sequence: Synthetic peptide
AGMDSND

SEQ ID NO: 162 - protein, 7 aa, Artificial Sequence
  Description of Artificial Sequence: Synthetic peptide
AGMHSMT

SEQ ID NO: 163 - protein, 7 aa, Artificial Sequence
  Description of Artificial Sequence: Synthetic peptide
AGMPPAP

SEQ ID NO: 164 - protein, 7 aa, Artificial Sequence
  Description of Artificial Sequence: Synthetic peptide
AGNHAVQ

SEQ ID NO: 165 - protein, 7 aa, Artificial Sequence
  Description of Artificial Sequence: Synthetic peptide
AGNSKTS

SEQ ID NO: 166 - protein, 7 aa, Artificial Sequence
  Description of Artificial Sequence: Synthetic peptide
AGNSLSS

SEQ ID NO: 167 - protein, 7 aa, Artificial Sequence
  Description of Artificial Sequence: Synthetic peptide
AGPHVLA

SEQ ID NO: 168 - protein, 7 aa, Artificial Sequence
  Description of Artificial Sequence: Synthetic peptide
AGPSNFD

SEQ ID NO: 169 - protein, 7 aa, Artificial Sequence
  Description of Artificial Sequence: Synthetic peptide
AGPTNPF

SEQ ID NO: 170 - protein, 7 aa, Artificial Sequence
  Description of Artificial Sequence: Synthetic peptide
AGQFTKS

SEQ ID NO: 171 - protein, 7 aa, Artificial Sequence
  Description of Artificial Sequence: Synthetic peptide
AGQGSQS

SEQ ID NO: 172 - protein, 7 aa, Artificial Sequence
  Description of Artificial Sequence: Synthetic peptide
AGQNSLV

SEQ ID NO: 173 - protein, 7 aa, Artificial Sequence
  Description of Artificial Sequence: Synthetic peptide
AGQSAPR

SEQ ID NO: 174 - protein, 7 aa, Artificial Sequence
  Description of Artificial Sequence: Synthetic peptide
AGRDSAW

SEQ ID NO: 175 - protein, 7 aa, Artificial Sequence
  Description of Artificial Sequence: Synthetic peptide
AGRNMHP

SEQ ID NO: 176 - protein, 7 aa, Artificial Sequence
  Description of Artificial Sequence: Synthetic peptide
AGRPPQS

SEQ ID NO: 177 - protein, 7 aa, Artificial Sequence
  Description of Artificial Sequence: Synthetic peptide
AGRVLTM

SEQ ID NO: 178 - protein, 7 aa, Artificial Sequence
  Description of Artificial Sequence: Synthetic peptide
AGSGGSP

SEQ ID NO: 179 - protein, 7 aa, Artificial Sequence
  Description of Artificial Sequence: Synthetic peptide
AGSGVLN

SEQ ID NO: 180 - protein, 7 aa, Artificial Sequence
  Description of Artificial Sequence: Synthetic peptide
AGSHQSE

SEQ ID NO: 181 - protein, 7 aa, Artificial Sequence
  Description of Artificial Sequence: Synthetic peptide
AGSIISR

SEQ ID NO: 182 - protein, 7 aa, Artificial Sequence
  Description of Artificial Sequence: Synthetic peptide
AGSLSVD

SEQ ID NO: 183 - protein, 7 aa, Artificial Sequence
  Description of Artificial Sequence: Synthetic peptide
AGSQHPA

SEQ ID NO: 184 - protein, 7 aa, Artificial Sequence
  Description of Artificial Sequence: Synthetic peptide
AGSQTPP

SEQ ID NO: 185 - protein, 7 aa, Artificial Sequence
  Description of Artificial Sequence: Synthetic peptide
AGSSRTF

SEQ ID NO: 186 - protein, 7 aa, Artificial Sequence
  Description of Artificial Sequence: Synthetic peptide
AGTGLGM

SEQ ID NO: 187 - protein, 7 aa, Artificial Sequence
  Description of Artificial Sequence: Synthetic peptide
AGTGPFA

SEQ ID NO: 188 - protein, 7 aa, Artificial Sequence
  Description of Artificial Sequence: Synthetic peptide
AGTIRIS

SEQ ID NO: 189 - protein, 7 aa, Artificial Sequence
  Description of Artificial Sequence: Synthetic peptide
AGTLVIM

SEQ ID NO: 190 - protein, 7 aa, Artificial Sequence
  Description of Artificial Sequence: Synthetic peptide
AGTNQRN

SEQ ID NO: 191 - protein, 7 aa, Artificial Sequence
  Description of Artificial Sequence: Synthetic peptide
AGTQPMT

SEQ ID NO: 192 - protein, 7 aa, Artificial Sequence
  Description of Artificial Sequence: Synthetic peptide
AGTQRAY

SEQ ID NO: 193 - protein, 7 aa, Artificial Sequence
  Description of Artificial Sequence: Synthetic peptide
AGTSHSH

SEQ ID NO: 194 - protein, 7 aa, Artificial Sequence
  Description of Artificial Sequence: Synthetic peptide
AGTVEHL

SEQ ID NO: 195 - protein, 7 aa, Artificial Sequence
  Description of Artificial Sequence: Synthetic peptide
AGVGKAQ

SEQ ID NO: 196 - protein, 7 aa, Artificial Sequence
  Description of Artificial Sequence: Synthetic peptide
AGVLKMS

SEQ ID NO: 197 - protein, 7 aa, Artificial Sequence
  Description of Artificial Sequence: Synthetic peptide
AGVPRME

SEQ ID NO: 198 - protein, 7 aa, Artificial Sequence
  Description of Artificial Sequence: Synthetic peptide
AGVPSPA

SEQ ID NO: 199 - protein, 7 aa, Artificial Sequence
  Description of Artificial Sequence: Synthetic peptide
AGVQPGQ

SEQ ID NO: 200 - protein, 7 aa, Artificial Sequence
  Description of Artificial Sequence: Synthetic peptide
AGVSEAI

SEQ ID NO: 201 - protein, 7 aa, Artificial Sequence
  Description of Artificial Sequence: Synthetic peptide
AHAVSLQ

SEQ ID NO: 202 - protein, 7 aa, Artificial Sequence
  Description of Artificial Sequence: Synthetic peptide
AHDEVPY

SEQ ID NO: 203 - protein, 7 aa, Artificial Sequence
  Description of Artificial Sequence: Synthetic peptide
AHDIPMS

SEQ ID NO: 204 - protein, 7 aa, Artificial Sequence
  Description of Artificial Sequence: Synthetic peptide
AHDNKSM

SEQ ID NO: 205 - protein, 7 aa, Artificial Sequence
  Description of Artificial Sequence: Synthetic peptide
AHEVLSF

SEQ ID NO: 206 - protein, 7 aa, Artificial Sequence
  Description of Artificial Sequence: Synthetic peptide
AHGESKP

SEQ ID NO: 207 - protein, 7 aa, Artificial Sequence
  Description of Artificial Sequence: Synthetic peptide
AHGNAPS

SEQ ID NO: 208 - protein, 7 aa, Artificial Sequence
  Description of Artificial Sequence: Synthetic peptide
AHGNSSL

SEQ ID NO: 209 - protein, 7 aa, Artificial Sequence
  Description of Artificial Sequence: Synthetic peptide
AHGSLQV

SEQ ID NO: 210 - protein, 7 aa, Artificial Sequence
  Description of Artificial Sequence: Synthetic peptide
AHGVAYI

SEQ ID NO: 211 - protein, 7 aa, Artificial Sequence
  Description of Artificial Sequence: Synthetic peptide
AHGVKTS

SEQ ID NO: 212 - protein, 7 aa, Artificial Sequence
  Description of Artificial Sequence: Synthetic peptide
AHHSVPP

SEQ ID NO: 213 - protein, 7 aa, Artificial Sequence
  Description of Artificial Sequence: Synthetic peptide
AHIARHG

SEQ ID NO: 214 - protein, 7 aa, Artificial Sequence
  Description of Artificial Sequence: Synthetic peptide
AHKSLPL

SEQ ID NO: 215 - protein, 7 aa, Artificial Sequence
  Description of Artificial Sequence: Synthetic peptide
AHLKYGS

SEQ ID NO: 216 - protein, 7 aa, Artificial Sequence
  Description of Artificial Sequence: Synthetic peptide
AHMDRTS

SEQ ID NO: 217 - protein, 7 aa, Artificial Sequence
  Description of Artificial Sequence: Synthetic peptide
AHMTDGE

SEQ ID NO: 218 - protein, 7 aa, Artificial Sequence
  Description of Artificial Sequence: Synthetic peptide
AHNVQGA

SEQ ID NO: 219 - protein, 7 aa, Artificial Sequence
  Description of Artificial Sequence: Synthetic peptide
AHPPQPG

SEQ ID NO: 220 - protein, 7 aa, Artificial Sequence
  Description of Artificial Sequence: Synthetic peptide
AHPSLPL

SEQ ID NO: 221 - protein, 7 aa, Artificial Sequence
  Description of Artificial Sequence: Synthetic peptide
AHPSRGI

SEQ ID NO: 222 - protein, 7 aa, Artificial Sequence
  Description of Artificial Sequence: Synthetic peptide
AHPSSHG

SEQ ID NO: 223 - protein, 7 aa, Artificial Sequence
  Description of Artificial Sequence: Synthetic peptide
AHQVGLA

SEQ ID NO: 224 - protein, 7 aa, Artificial Sequence
  Description of Artificial Sequence: Synthetic peptide
AHSHVPP

SEQ ID NO: 225 - protein, 7 aa, Artificial Sequence
  Description of Artificial Sequence: Synthetic peptide
AHSLKQV

SEQ ID NO: 226 - protein, 7 aa, Artificial Sequence
  Description of Artificial Sequence: Synthetic peptide
AHSPALV

SEQ ID NO: 227 - protein, 7 aa, Artificial Sequence
  Description of Artificial Sequence: Synthetic peptide
AHSRSGP

SEQ ID NO: 228 - protein, 7 aa, Artificial Sequence
  Description of Artificial Sequence: Synthetic peptide
AHTLTEP

SEQ ID NO: 229 - protein, 7 aa, Artificial Sequence
  Description of Artificial Sequence: Synthetic peptide
AHTNLTS

SEQ ID NO: 230 - protein, 7 aa, Artificial Sequence
  Description of Artificial Sequence: Synthetic peptide
AHTRIMP

SEQ ID NO: 231 - protein, 7 aa, Artificial Sequence
  Description of Artificial Sequence: Synthetic peptide
AHVNSFS

SEQ ID NO: 232 - protein, 7 aa, Artificial Sequence
  Description of Artificial Sequence: Synthetic peptide
AHVPAAD

SEQ ID NO: 233 - protein, 7 aa, Artificial Sequence
  Description of Artificial Sequence: Synthetic peptide
AHVSQSG

SEQ ID NO: 234 - protein, 7 aa, Artificial Sequence
  Description of Artificial Sequence: Synthetic peptide
AIAFRRE

SEQ ID NO: 235 - protein, 7 aa, Artificial Sequence
  Description of Artificial Sequence: Synthetic peptide
AIAPPYT

SEQ ID NO: 236 - protein, 7 aa, Artificial Sequence
  Description of Artificial Sequence: Synthetic peptide
AIAVSAG

SEQ ID NO: 237 - protein, 7 aa, Artificial Sequence
  Description of Artificial Sequence: Synthetic peptide
AIDSGYH

SEQ ID NO: 238 - protein, 7 aa, Artificial Sequence
  Description of Artificial Sequence: Synthetic peptide
AIGAIGS

SEQ ID NO: 239 - protein, 7 aa, Artificial Sequence
  Description of Artificial Sequence: Synthetic peptide
AIGPRGG

SEQ ID NO: 240 - protein, 7 aa, Artificial Sequence
  Description of Artificial Sequence: Synthetic peptide
AIGSTTS

SEQ ID NO: 241 - protein, 7 aa, Artificial Sequence
  Description of Artificial Sequence: Synthetic peptide
AIHAVSP

SEQ ID NO: 242 - protein, 7 aa, Artificial Sequence
  Description of Artificial Sequence: Synthetic peptide
AIHSTKS

SEQ ID NO: 243 - protein, 7 aa, Artificial Sequence
  Description of Artificial Sequence: Synthetic peptide
AIKGQDL

SEQ ID NO: 244 - protein, 7 aa, Artificial Sequence
  Description of Artificial Sequence: Synthetic peptide
AINFQAG

SEQ ID NO: 245 - protein, 7 aa, Artificial Sequence
  Description of Artificial Sequence: Synthetic peptide
AINHAMT

SEQ ID NO: 246 - protein, 7 aa, Artificial Sequence
  Description of Artificial Sequence: Synthetic peptide
AIPGHIM

SEQ ID NO: 247 - protein, 7 aa, Artificial Sequence
  Description of Artificial Sequence: Synthetic peptide
AIPGSSR

SEQ ID NO: 248 - protein, 7 aa, Artificial Sequence
  Description of Artificial Sequence: Synthetic peptide
AIPMTHD

SEQ ID NO: 249 - protein, 7 aa, Artificial Sequence
  Description of Artificial Sequence: Synthetic peptide
AIPNPLD

SEQ ID NO: 250 - protein, 7 aa, Artificial Sequence
  Description of Artificial Sequence: Synthetic peptide
AIRNVLA

SEQ ID NO: 251 - protein, 7 aa, Artificial Sequence
  Description of Artificial Sequence: Synthetic peptide
AIRSAND

SEQ ID NO: 252 - protein, 7 aa, Artificial Sequence
  Description of Artificial Sequence: Synthetic peptide
AIRSPSP

SEQ ID NO: 253 - protein, 7 aa, Artificial Sequence
  Description of Artificial Sequence: Synthetic peptide
AIRYTDP

SEQ ID NO: 254 - protein, 7 aa, Artificial Sequence
  Description of Artificial Sequence: Synthetic peptide
AISVGGS

SEQ ID NO: 255 - protein, 7 aa, Artificial Sequence
  Description of Artificial Sequence: Synthetic peptide
AITTARN

SEQ ID NO: 256 - protein, 7 aa, Artificial Sequence
  Description of Artificial Sequence: Synthetic peptide
AIYGGLT

SEQ ID NO: 257 - protein, 7 aa, Artificial Sequence
  Description of Artificial Sequence: Synthetic peptide
AIYMQQP

SEQ ID NO: 258 - protein, 7 aa, Artificial Sequence
  Description of Artificial Sequence: Synthetic peptide
AIYQGVD

SEQ ID NO: 259 - protein, 7 aa, Artificial Sequence
  Description of Artificial Sequence: Synthetic peptide
AKASNQD

SEQ ID NO: 260 - protein, 7 aa, Artificial Sequence
  Description of Artificial Sequence: Synthetic peptide
AKATALE

SEQ ID NO: 261 - protein, 7 aa, Artificial Sequence
  Description of Artificial Sequence: Synthetic peptide
AKDIGQI

SEQ ID NO: 262 - protein, 7 aa, Artificial Sequence
  Description of Artificial Sequence: Synthetic peptide
AKDIPPR

SEQ ID NO: 263 - protein, 7 aa, Artificial Sequence
  Description of Artificial Sequence: Synthetic peptide
AKFAPSE

SEQ ID NO: 264 - protein, 7 aa, Artificial Sequence
  Description of Artificial Sequence: Synthetic peptide
AKGDPRM

SEQ ID NO: 265 - protein, 7 aa, Artificial Sequence
  Description of Artificial Sequence: Synthetic peptide
AKGQIHV

SEQ ID NO: 266 - protein, 7 aa, Artificial Sequence
  Description of Artificial Sequence: Synthetic peptide
AKHTEFS

SEQ ID NO: 267 - protein, 7 aa, Artificial Sequence
  Description of Artificial Sequence: Synthetic peptide
AKISSAS

SEQ ID NO: 268 - protein, 7 aa, Artificial Sequence
  Description of Artificial Sequence: Synthetic peptide
AKLEAIP

SEQ ID NO: 269 - protein, 7 aa, Artificial Sequence
  Description of Artificial Sequence: Synthetic peptide
AKNRDSC

SEQ ID NO: 270 - protein, 7 aa, Artificial Sequence
  Description of Artificial Sequence: Synthetic peptide
AKNSPHP

SEQ ID NO: 271 - protein, 7 aa, Artificial Sequence
  Description of Artificial Sequence: Synthetic peptide
AKNSTFS

SEQ ID NO: 272 - protein, 7 aa, Artificial Sequence
  Description of Artificial Sequence: Synthetic peptide
AKPALLV

SEQ ID NO: 273 - protein, 7 aa, Artificial Sequence
  Description of Artificial Sequence: Synthetic peptide
AKPHLQF

SEQ ID NO: 274 - protein, 7 aa, Artificial Sequence
  Description of Artificial Sequence: Synthetic peptide
AKPIRPP

SEQ ID NO: 275 - protein, 7 aa, Artificial Sequence
  Description of Artificial Sequence: Synthetic peptide
AKPSEEK

SEQ ID NO: 276 - protein, 7 aa, Artificial Sequence
  Description of Artificial Sequence: Synthetic peptide
AKPTYQP

SEQ ID NO: 277 - protein, 7 aa, Artificial Sequence
  Description of Artificial Sequence: Synthetic peptide
AKRLDDA

SEQ ID NO: 278 - protein, 7 aa, Artificial Sequence
  Description of Artificial Sequence: Synthetic peptide
AKSIKLS

SEQ ID NO: 279 - protein, 7 aa, Artificial Sequence
  Description of Artificial Sequence: Synthetic peptide
AKSNVGL

SEQ ID NO: 280 - protein, 7 aa, Artificial Sequence
  Description of Artificial Sequence: Synthetic peptide
AKSSYPI

SEQ ID NO: 281 - protein, 7 aa, Artificial Sequence
  Description of Artificial Sequence: Synthetic peptide
AKSVALS

SEQ ID NO: 282 - protein, 7 aa, Artificial Sequence
  Description of Artificial Sequence: Synthetic peptide
AKTIEIS

SEQ ID NO: 283 - protein, 7 aa, Artificial Sequence
  Description of Artificial Sequence: Synthetic peptide
AKTLRDD

SEQ ID NO: 284 - protein, 7 aa, Artificial Sequence
  Description of Artificial Sequence: Synthetic peptide
AKTMGTM

SEQ ID NO: 285 - protein, 7 aa, Artificial Sequence
  Description of Artificial Sequence: Synthetic peptide
AKTTLSA

SEQ ID NO: 286 - protein, 7 aa, Artificial Sequence
  Description of Artificial Sequence: Synthetic peptide
AKYSPSA

SEQ ID NO: 287 - protein, 7 aa, Artificial Sequence
  Description of Artificial Sequence: Synthetic peptide
AKYSSMP

SEQ ID NO: 288 - protein, 7 aa, Artificial Sequence
  Description of Artificial Sequence: Synthetic peptide
ALAIGRD

SEQ ID NO: 289 - protein, 7 aa, Artificial Sequence
  Description of Artificial Sequence: Synthetic peptide
ALALKTS

SEQ ID NO: 290 - protein, 7 aa, Artificial Sequence
  Description of Artificial Sequence: Synthetic peptide
ALATKVI

SEQ ID NO: 291 - protein, 7 aa, Artificial Sequence
  Description of Artificial Sequence: Synthetic peptide
ALDARRV

SEQ ID NO: 292 - protein, 7 aa, Artificial Sequence
  Description of Artificial Sequence: Synthetic peptide
ALDQMTI

SEQ ID NO: 293 - protein, 7 aa, Artificial Sequence
  Description of Artificial Sequence: Synthetic peptide
ALECPRA

SEQ ID NO: 294 - protein, 7 aa, Artificial Sequence
  Description of Artificial Sequence: Synthetic peptide
ALEGLRP

SEQ ID NO: 295 - protein, 7 aa, Artificial Sequence
  Description of Artificial Sequence: Synthetic peptide
ALELGSE

SEQ ID NO: 296 - protein, 7 aa, Artificial Sequence
  Description of Artificial Sequence: Synthetic peptide
ALERTSL

SEQ ID NO: 297 - protein, 7 aa, Artificial Sequence
  Description of Artificial Sequence: Synthetic peptide
ALFPGMS

SEQ ID NO: 298 - protein, 7 aa, Artificial Sequence
  Description of Artificial Sequence: Synthetic peptide
ALGDFPS

SEQ ID NO: 299 - protein, 7 aa, Artificial Sequence
  Description of Artificial Sequence: Synthetic peptide
ALGHQAM

SEQ ID NO: 300 - protein, 7 aa, Artificial Sequence
  Description of Artificial Sequence: Synthetic peptide
ALGNNKS

SEQ ID NO: 301 - protein, 7 aa, Artificial Sequence
  Description of Artificial Sequence: Synthetic peptide
ALGRNEG

SEQ ID NO: 302 - protein, 7 aa, Artificial Sequence
  Description of Artificial Sequence: Synthetic peptide
ALGVPPS

SEQ ID NO: 303 - protein, 7 aa, Artificial Sequence
  Description of Artificial Sequence: Synthetic peptide
ALGVSAL

SEQ ID NO: 304 - protein, 7 aa, Artificial Sequence
  Description of Artificial Sequence: Synthetic peptide
ALGYHNT

SEQ ID NO: 305 - protein, 7 aa, Artificial Sequence
  Description of Artificial Sequence: Synthetic peptide
ALHPSAP

SEQ ID NO: 306 - protein, 7 aa, Artificial Sequence
  Description of Artificial Sequence: Synthetic peptide
ALIERVN

SEQ ID NO: 307 - protein, 7 aa, Artificial Sequence
  Description of Artificial Sequence: Synthetic peptide
ALIKVHN

SEQ ID NO: 308 - protein, 7 aa, Artificial Sequence
  Description of Artificial Sequence: Synthetic peptide
ALIPSPP

SEQ ID NO: 309 - protein, 7 aa, Artificial Sequence
  Description of Artificial Sequence: Synthetic peptide
ALLDSKL

SEQ ID NO: 310 - protein, 7 aa, Artificial Sequence
  Description of Artificial Sequence: Synthetic peptide
ALLEQRP

SEQ ID NO: 311 - protein, 7 aa, Artificial Sequence
  Description of Artificial Sequence: Synthetic peptide
ALLGVNR

SEQ ID NO: 312 - protein, 7 aa, Artificial Sequence
  Description of Artificial Sequence: Synthetic peptide
ALLHSIG

SEQ ID NO: 313 - protein, 7 aa, Artificial Sequence
  Description of Artificial Sequence: Synthetic peptide
ALLQNAS

SEQ ID NO: 314 - protein, 7 aa, Artificial Sequence
  Description of Artificial Sequence: Synthetic peptide
ALLSSGN

SEQ ID NO: 315 - protein, 7 aa, Artificial Sequence
  Description of Artificial Sequence: Synthetic peptide
ALMRGTI

SEQ ID NO: 316 - protein, 7 aa, Artificial Sequence
  Description of Artificial Sequence: Synthetic peptide
ALNDAAG

SEQ ID NO: 317 - protein, 7 aa, Artificial Sequence
  Description of Artificial Sequence: Synthetic peptide
ALNHDKP

SEQ ID NO: 318 - protein, 7 aa, Artificial Sequence
  Description of Artificial Sequence: Synthetic peptide
ALNIPEL

SEQ ID NO: 319 - protein, 7 aa, Artificial Sequence
  Description of Artificial Sequence: Synthetic peptide
ALNTHTV

SEQ ID NO: 320 - protein, 7 aa, Artificial Sequence
  Description of Artificial Sequence: Synthetic peptide
ALPAKSY

SEQ ID NO: 321 - protein, 7 aa, Artificial Sequence
  Description of Artificial Sequence: Synthetic peptide
ALPASVD

SEQ ID NO: 322 - protein, 7 aa, Artificial Sequence
  Description of Artificial Sequence: Synthetic peptide
ALPGTPN

SEQ ID NO: 323 - protein, 7 aa, Artificial Sequence
  Description of Artificial Sequence: Synthetic peptide
ALPLSRA

SEQ ID NO: 324 - protein, 7 aa, Artificial Sequence
  Description of Artificial Sequence: Synthetic peptide
ALPQLAV

SEQ ID NO: 325 - protein, 7 aa, Artificial Sequence
  Description of Artificial Sequence: Synthetic peptide
ALPQRRD

SEQ ID NO: 326 - protein, 7 aa, Artificial Sequence
  Description of Artificial Sequence: Synthetic peptide
ALPSSDH

SEQ ID NO: 327 - protein, 7 aa, Artificial Sequence
  Description of Artificial Sequence: Synthetic peptide
ALPSTLV

SEQ ID NO: 328 - protein, 7 aa, Artificial Sequence
  Description of Artificial Sequence: Synthetic peptide
ALPTTKA

SEQ ID NO: 329 - protein, 7 aa, Artificial Sequence
  Description of Artificial Sequence: Synthetic peptide
ALQAPHT

SEQ ID NO: 330 - protein, 7 aa, Artificial Sequence
  Description of Artificial Sequence: Synthetic peptide
ALQGYSV

SEQ ID NO: 331 - protein, 7 aa, Artificial Sequence
  Description of Artificial Sequence: Synthetic peptide
ALQRDWS

SEQ ID NO: 332 - protein, 7 aa, Artificial Sequence
  Description of Artificial Sequence: Synthetic peptide
ALQSDTV

SEQ ID NO: 333 - protein, 7 aa, Artificial Sequence
  Description of Artificial Sequence: Synthetic peptide
ALQSSVR

SEQ ID NO: 334 - protein, 7 aa, Artificial Sequence
  Description of Artificial Sequence: Synthetic peptide
ALRMGMT

SEQ ID NO: 335 - protein, 7 aa, Artificial Sequence
  Description of Artificial Sequence: Synthetic peptide
ALRNPIN

SEQ ID NO: 336 - protein, 7 aa, Artificial Sequence
  Description of Artificial Sequence: Synthetic peptide
ALRTSLT

SEQ ID NO: 337 - protein, 7 aa, Artificial Sequence
  Description of Artificial Sequence: Synthetic peptide
ALRVAAM

SEQ ID NO: 338 - protein, 7 aa, Artificial Sequence
  Description of Artificial Sequence: Synthetic peptide
ALSAGRV

SEQ ID NO: 339 - protein, 7 aa, Artificial Sequence
  Description of Artificial Sequence: Synthetic peptide
ALSELQI

SEQ ID NO: 340 - protein, 7 aa, Artificial Sequence
  Description of Artificial Sequence: Synthetic peptide
ALSGTFG

SEQ ID NO: 341 - protein, 7 aa, Artificial Sequence
  Description of Artificial Sequence: Synthetic peptide
ALSHDGN

SEQ ID NO: 342 - protein, 7 aa, Artificial Sequence
  Description of Artificial Sequence: Synthetic peptide
ALSHESN

SEQ ID NO: 343 - protein, 7 aa, Artificial Sequence
  Description of Artificial Sequence: Synthetic peptide
ALSKWAM

SEQ ID NO: 344 - protein, 7 aa, Artificial Sequence
  Description of Artificial Sequence: Synthetic peptide
ALSLNTI

SEQ ID NO: 345 - protein, 7 aa, Artificial Sequence
  Description of Artificial Sequence: Synthetic peptide
ALSPMPC

SEQ ID NO: 346 - protein, 7 aa, Artificial Sequence
  Description of Artificial Sequence: Synthetic peptide
ALSQAER

SEQ ID NO: 347 - protein, 7 aa, Artificial Sequence
  Description of Artificial Sequence: Synthetic peptide
ALSRDRP

SEQ ID NO: 348 - protein, 7 aa, Artificial Sequence
  Description of Artificial Sequence: Synthetic peptide
ALSSIHV

SEQ ID NO: 349 - protein, 7 aa, Artificial Sequence
  Description of Artificial Sequence: Synthetic peptide
ALSSSAL

SEQ ID NO: 350 - protein, 7 aa, Artificial Sequence
  Description of Artificial Sequence: Synthetic peptide
ALSTGMP

SEQ ID NO: 351 - protein, 7 aa, Artificial Sequence
  Description of Artificial Sequence: Synthetic peptide
ALSTPVP

SEQ ID NO: 352 - protein, 7 aa, Artificial Sequence
  Description of Artificial Sequence: Synthetic peptide
ALTHYDP

SEQ ID NO: 353 - protein, 7 aa, Artificial Sequence
  Description of Artificial Sequence: Synthetic peptide
ALTKNVA

SEQ ID NO: 354 - protein, 7 aa, Artificial Sequence
  Description of Artificial Sequence: Synthetic peptide
ALTRSAV

SEQ ID NO: 355 - protein, 7 aa, Artificial Sequence
  Description of Artificial Sequence: Synthetic peptide
ALTSTHV

SEQ ID NO: 356 - protein, 7 aa, Artificial Sequence
  Description of Artificial Sequence: Synthetic peptide
ALTTLAE

SEQ ID NO: 357 - protein, 7 aa, Artificial Sequence
  Description of Artificial Sequence: Synthetic peptide
ALTTLGP

SEQ ID NO: 358 - protein, 7 aa, Artificial Sequence
  Description of Artificial Sequence: Synthetic peptide
ALTVLLE

SEQ ID NO: 359 - protein, 7 aa, Artificial Sequence
  Description of Artificial Sequence: Synthetic peptide
ALVSSNL

SEQ ID NO: 360 - protein, 7 aa, Artificial Sequence
  Description of Artificial Sequence: Synthetic peptide
ALYDNAP

SEQ ID NO: 361 - protein, 7 aa, Artificial Sequence
  Description of Artificial Sequence: Synthetic peptide
ALYNTPP

SEQ ID NO: 362 - protein, 7 aa, Artificial Sequence
  Description of Artificial Sequence: Synthetic peptide
ALYTHLD

SEQ ID NO: 363 - protein, 7 aa, Artificial Sequence
  Description of Artificial Sequence: Synthetic peptide
AMAASPA

SEQ ID NO: 364 - protein, 7 aa, Artificial Sequence
  Description of Artificial Sequence: Synthetic peptide
AMAPKLS

SEQ ID NO: 365 - protein, 7 aa, Artificial Sequence
  Description of Artificial Sequence: Synthetic peptide
AMARPSG

SEQ ID NO: 366 - protein, 7 aa, Artificial Sequence
  Description of Artificial Sequence: Synthetic peptide
AMEHSVK

SEQ ID NO: 367 - protein, 7 aa, Artificial Sequence
  Description of Artificial Sequence: Synthetic peptide
AMETCDL

SEQ ID NO: 368 - protein, 7 aa, Artificial Sequence
  Description of Artificial Sequence: Synthetic peptide
AMGPSAS

SEQ ID NO: 369 - protein, 7 aa, Artificial Sequence
  Description of Artificial Sequence: Synthetic peptide
AMIQMRE

SEQ ID NO: 370 - protein, 7 aa, Artificial Sequence
  Description of Artificial Sequence: Synthetic peptide
AMKAQNT

SEQ ID NO: 371 - protein, 7 aa, Artificial Sequence
  Description of Artificial Sequence: Synthetic peptide
AMKDNRS

SEQ ID NO: 372 - protein, 7 aa, Artificial Sequence
  Description of Artificial Sequence: Synthetic peptide
AMKLNMP

SEQ ID NO: 373 - protein, 7 aa, Artificial Sequence
  Description of Artificial Sequence: Synthetic peptide
AMMQHVA

SEQ ID NO: 374 - protein, 7 aa, Artificial Sequence
  Description of Artificial Sequence: Synthetic peptide
AMMSAES

SEQ ID NO: 375 - protein, 7 aa, Artificial Sequence
  Description of Artificial Sequence: Synthetic peptide
AMPGLGV

SEQ ID NO: 376 - protein, 7 aa, Artificial Sequence
  Description of Artificial Sequence: Synthetic peptide
AMPGLQS

SEQ ID NO: 377 - protein, 7 aa, Artificial Sequence
  Description of Artificial Sequence: Synthetic peptide
AMPRLTP

SEQ ID NO: 378 - protein, 7 aa, Artificial Sequence
  Description of Artificial Sequence: Synthetic peptide
AMPRQVS

SEQ ID NO: 379 - protein, 7 aa, Artificial Sequence
  Description of Artificial Sequence: Synthetic peptide
AMPTVVA

SEQ ID NO: 380 - protein, 7 aa, Artificial Sequence
  Description of Artificial Sequence: Synthetic peptide
AMQTDRV

SEQ ID NO: 381 - protein, 7 aa, Artificial Sequence
  Description of Artificial Sequence: Synthetic peptide
AMRPSHE

SEQ ID NO: 382 - protein, 7 aa, Artificial Sequence
  Description of Artificial Sequence: Synthetic peptide
AMSLIHA

SEQ ID NO: 383 - protein, 7 aa, Artificial Sequence
  Description of Artificial Sequence: Synthetic peptide
AMSSASY

SEQ ID NO: 384 - protein, 7 aa, Artificial Sequence
  Description of Artificial Sequence: Synthetic peptide
AMSSIAG

SEQ ID NO: 385 - protein, 7 aa, Artificial Sequence
  Description of Artificial Sequence: Synthetic peptide
AMSTQLS

SEQ ID NO: 386 - protein, 7 aa, Artificial Sequence
  Description of Artificial Sequence: Synthetic peptide
AMTDKVQ

SEQ ID NO: 387 - protein, 7 aa, Artificial Sequence
  Description of Artificial Sequence: Synthetic peptide
AMTDVRG

SEQ ID NO: 388 - protein, 7 aa, Artificial Sequence
  Description of Artificial Sequence: Synthetic peptide
AMTHMPS

SEQ ID NO: 389 - protein, 7 aa, Artificial Sequence
  Description of Artificial Sequence: Synthetic peptide
AMTLRSD

SEQ ID NO: 390 - protein, 7 aa, Artificial Sequence
  Description of Artificial Sequence: Synthetic peptide
AMTSPKL

SEQ ID NO: 391 - protein, 7 aa, Artificial Sequence
  Description of Artificial Sequence: Synthetic peptide
AMWGADA

SEQ ID NO: 392 - protein, 7 aa, Artificial Sequence
  Description of Artificial Sequence: Synthetic peptide
ANAGGSP

SEQ ID NO: 393 - protein, 7 aa, Artificial Sequence
  Description of Artificial Sequence: Synthetic peptide
ANDSRAV

SEQ ID NO: 394 - protein, 7 aa, Artificial Sequence
  Description of Artificial Sequence: Synthetic peptide
ANEDFRK

SEQ ID NO: 395 - protein, 7 aa, Artificial Sequence
  Description of Artificial Sequence: Synthetic peptide
ANEPDVL

SEQ ID NO: 396 - protein, 7 aa, Artificial Sequence
  Description of Artificial Sequence: Synthetic peptide
ANGASSP

SEQ ID NO: 397 - protein, 7 aa, Artificial Sequence
  Description of Artificial Sequence: Synthetic peptide
ANHGATF

SEQ ID NO: 398 - protein, 7 aa, Artificial Sequence
  Description of Artificial Sequence: Synthetic peptide
ANHTTRS

SEQ ID NO: 399 - protein, 7 aa, Artificial Sequence
  Description of Artificial Sequence: Synthetic peptide
ANKPQVT

SEQ ID NO: 400 - protein, 7 aa, Artificial Sequence
  Description of Artificial Sequence: Synthetic peptide
ANLGLPP

SEQ ID NO: 401 - protein, 7 aa, Artificial Sequence
  Description of Artificial Sequence: Synthetic peptide
ANLGSAR

SEQ ID NO: 402 - protein, 7 aa, Artificial Sequence
  Description of Artificial Sequence: Synthetic peptide
ANLPGHL

SEQ ID NO: 403 - protein, 7 aa, Artificial Sequence
  Description of Artificial Sequence: Synthetic peptide
ANMTRVE

SEQ ID NO: 404 - protein, 7 aa, Artificial Sequence
  Description of Artificial Sequence: Synthetic peptide
ANMTVHC

SEQ ID NO: 405 - protein, 7 aa, Artificial Sequence
  Description of Artificial Sequence: Synthetic peptide
ANPAKTV

SEQ ID NO: 406 - protein, 7 aa, Artificial Sequence
  Description of Artificial Sequence: Synthetic peptide
ANPGKIY

SEQ ID NO: 407 - protein, 7 aa, Artificial Sequence
  Description of Artificial Sequence: Synthetic peptide
ANPGTAP

SEQ ID NO: 408 - protein, 7 aa, Artificial Sequence
  Description of Artificial Sequence: Synthetic peptide
ANPLLSS

SEQ ID NO: 409 - protein, 7 aa, Artificial Sequence
  Description of Artificial Sequence: Synthetic peptide
ANQGIDS

SEQ ID NO: 410 - protein, 7 aa, Artificial Sequence
  Description of Artificial Sequence: Synthetic peptide
ANQNNKN

SEQ ID NO: 411 - protein, 7 aa, Artificial Sequence
  Description of Artificial Sequence: Synthetic peptide
ANQSLPS

SEQ ID NO: 412 - protein, 7 aa, Artificial Sequence
  Description of Artificial Sequence: Synthetic peptide
ANRSGHG

SEQ ID NO: 413 - protein, 7 aa, Artificial Sequence
  Description of Artificial Sequence: Synthetic peptide
ANSDWGP

SEQ ID NO: 414 - protein, 7 aa, Artificial Sequence
  Description of Artificial Sequence: Synthetic peptide
ANSEEFV

SEQ ID NO: 415 - protein, 7 aa, Artificial Sequence
  Description of Artificial Sequence: Synthetic peptide
ANSGPPP

SEQ ID NO: 416 - protein, 7 aa, Artificial Sequence
  Description of Artificial Sequence: Synthetic peptide
ANSHEQM

SEQ ID NO: 417 - protein, 7 aa, Artificial Sequence
  Description of Artificial Sequence: Synthetic peptide
ANSHMLK

SEQ ID NO: 418 - protein, 7 aa, Artificial Sequence
  Description of Artificial Sequence: Synthetic peptide
ANSMMHP

SEQ ID NO: 419 - protein, 7 aa, Artificial Sequence
  Description of Artificial Sequence: Synthetic peptide
ANSNSVY

SEQ ID NO: 420 - protein, 7 aa, Artificial Sequence
  Description of Artificial Sequence: Synthetic peptide
ANSRLGG

SEQ ID NO: 421 - protein, 7 aa, Artificial Sequence
  Description of Artificial Sequence: Synthetic peptide
ANSRPTQ

SEQ ID NO: 422 - protein, 7 aa, Artificial Sequence
  Description of Artificial Sequence: Synthetic peptide
ANSRSMV

SEQ ID NO: 423 - protein, 7 aa, Artificial Sequence
  Description of Artificial Sequence: Synthetic peptide
ANSSSPG

SEQ ID NO: 424 - protein, 7 aa, Artificial Sequence
  Description of Artificial Sequence: Synthetic peptide
ANSTKGL

SEQ ID NO: 425 - protein, 7 aa, Artificial Sequence
  Description of Artificial Sequence: Synthetic peptide
ANTDPRN

SEQ ID NO: 426 - protein, 7 aa, Artificial Sequence
  Description of Artificial Sequence: Synthetic peptide
ANTETIW

SEQ ID NO: 427 - protein, 7 aa, Artificial Sequence
  Description of Artificial Sequence: Synthetic peptide
ANTLLHV

SEQ ID NO: 428 - protein, 7 aa, Artificial Sequence
  Description of Artificial Sequence: Synthetic peptide
ANVASSG

SEQ ID NO: 429 - protein, 7 aa, Artificial Sequence
  Description of Artificial Sequence: Synthetic peptide
ANVSSTH

SEQ ID NO: 430 - protein, 7 aa, Artificial Sequence
  Description of Artificial Sequence: Synthetic peptide
ANVSVQV

SEQ ID NO: 431 - protein, 7 aa, Artificial Sequence
  Description of Artificial Sequence: Synthetic peptide
APADHRM

SEQ ID NO: 432 - protein, 7 aa, Artificial Sequence
  Description of Artificial Sequence: Synthetic peptide
APADMTS

SEQ ID NO: 433 - protein, 7 aa, Artificial Sequence
  Description of Artificial Sequence: Synthetic peptide
APADWPV

SEQ ID NO: 434 - protein, 7 aa, Artificial Sequence
  Description of Artificial Sequence: Synthetic peptide
APAGRPS

SEQ ID NO: 435 - protein, 7 aa, Artificial Sequence
  Description of Artificial Sequence: Synthetic peptide
APALGLA

SEQ ID NO: 436 - protein, 7 aa, Artificial Sequence
  Description of Artificial Sequence: Synthetic peptide
APANDEG

SEQ ID NO: 437 - protein, 7 aa, Artificial Sequence
  Description of Artificial Sequence: Synthetic peptide
APAQRLY

SEQ ID NO: 438 - protein, 7 aa, Artificial Sequence
  Description of Artificial Sequence: Synthetic peptide
APARMVN

SEQ ID NO: 439 - protein, 7 aa, Artificial Sequence
  Description of Artificial Sequence: Synthetic peptide
APDGTYL

SEQ ID NO: 440 - protein, 7 aa, Artificial Sequence
  Description of Artificial Sequence: Synthetic peptide
APDPSSL

SEQ ID NO: 441 - protein, 7 aa, Artificial Sequence
  Description of Artificial Sequence: Synthetic peptide
APEDAGS

SEQ ID NO: 442 - protein, 7 aa, Artificial Sequence
  Description of Artificial Sequence: Synthetic peptide
APETNDS

SEQ ID NO: 443 - protein, 7 aa, Artificial Sequence
  Description of Artificial Sequence: Synthetic peptide
APFNTQG

SEQ ID NO: 444 - protein, 7 aa, Artificial Sequence
  Description of Artificial Sequence: Synthetic peptide
APFPEKW

SEQ ID NO: 445 - protein, 7 aa, Artificial Sequence
  Description of Artificial Sequence: Synthetic peptide
APFPEQP

SEQ ID NO: 446 - protein, 7 aa, Artificial Sequence
  Description of Artificial Sequence: Synthetic peptide
APGITNY

SEQ ID NO: 447 - protein, 7 aa, Artificial Sequence
  Description of Artificial Sequence: Synthetic peptide
APGLRHS

SEQ ID NO: 448 - protein, 7 aa, Artificial Sequence
  Description of Artificial Sequence: Synthetic peptide
APGRLSL

SEQ ID NO: 449 - protein, 7 aa, Artificial Sequence
  Description of Artificial Sequence: Synthetic peptide
APHFPST

SEQ ID NO: 450 - protein, 7 aa, Artificial Sequence
  Description of Artificial Sequence: Synthetic peptide
APHLPTH

SEQ ID NO: 451 - protein, 7 aa, Artificial Sequence
  Description of Artificial Sequence: Synthetic peptide
APILRTP

SEQ ID NO: 452 - protein, 7 aa, Artificial Sequence
  Description of Artificial Sequence: Synthetic peptide
APISHQM

SEQ ID NO: 453 - protein, 7 aa, Artificial Sequence
  Description of Artificial Sequence: Synthetic peptide
APLAVRP

SEQ ID NO: 454 - protein, 7 aa, Artificial Sequence
  Description of Artificial Sequence: Synthetic peptide
APLKSVQ

SEQ ID NO: 455 - protein, 7 aa, Artificial Sequence
  Description of Artificial Sequence: Synthetic peptide
APNLLIG

SEQ ID NO: 456 - protein, 7 aa, Artificial Sequence
  Description of Artificial Sequence: Synthetic peptide
APNSGVK

SEQ ID NO: 457 - protein, 7 aa, Artificial Sequence
  Description of Artificial Sequence: Synthetic peptide
APNTSVR

SEQ ID NO: 458 - protein, 7 aa, Artificial Sequence
  Description of Artificial Sequence: Synthetic peptide
APPNLES

SEQ ID NO: 459 - protein, 7 aa, Artificial Sequence
  Description of Artificial Sequence: Synthetic peptide
APPNVRT

SEQ ID NO: 460 - protein, 7 aa, Artificial Sequence
  Description of Artificial Sequence: Synthetic peptide
APPSLRT

SEQ ID NO: 461 - protein, 7 aa, Artificial Sequence
  Description of Artificial Sequence: Synthetic peptide
APQAKTP

SEQ ID NO: 462 - protein, 7 aa, Artificial Sequence
  Description of Artificial Sequence: Synthetic peptide
APQGRQI

SEQ ID NO: 463 - protein, 7 aa, Artificial Sequence
  Description of Artificial Sequence: Synthetic peptide
APQLQPA

SEQ ID NO: 464 - protein, 7 aa, Artificial Sequence
  Description of Artificial Sequence: Synthetic peptide
APQPKDP

SEQ ID NO: 465 - protein, 7 aa, Artificial Sequence
  Description of Artificial Sequence: Synthetic peptide
APRAVNY

SEQ ID NO: 466 - protein, 7 aa, Artificial Sequence
  Description of Artificial Sequence: Synthetic peptide
APRLTVS

SEQ ID NO: 467 - protein, 7 aa, Artificial Sequence
  Description of Artificial Sequence: Synthetic peptide
APRPPLV

SEQ ID NO: 468 - protein, 7 aa, Artificial Sequence
  Description of Artificial Sequence: Synthetic peptide
APRQTHN

SEQ ID NO: 469 - protein, 7 aa, Artificial Sequence
  Description of Artificial Sequence: Synthetic peptide
APRTHST

SEQ ID NO: 470 - protein, 7 aa, Artificial Sequence
  Description of Artificial Sequence: Synthetic peptide
APRVLQT

SEQ ID NO: 471 - protein, 7 aa, Artificial Sequence
  Description of Artificial Sequence: Synthetic peptide
APRYELR

SEQ ID NO: 472 - protein, 7 aa, Artificial Sequence
  Description of Artificial Sequence: Synthetic peptide
APSGSTS

SEQ ID NO: 473 - protein, 7 aa, Artificial Sequence
  Description of Artificial Sequence: Synthetic peptide
APSGVKP

SEQ ID NO: 474 - protein, 7 aa, Artificial Sequence
  Description of Artificial Sequence: Synthetic peptide
APSKMAI

SEQ ID NO: 475 - protein, 7 aa, Artificial Sequence
  Description of Artificial Sequence: Synthetic peptide
APSRCAL

SEQ ID NO: 476 - protein, 7 aa, Artificial Sequence
  Description of Artificial Sequence: Synthetic peptide
APSSAEN

SEQ ID NO: 477 - protein, 7 aa, Artificial Sequence
  Description of Artificial Sequence: Synthetic peptide
APSTLNN

SEQ ID NO: 478 - protein, 7 aa, Artificial Sequence
  Description of Artificial Sequence: Synthetic peptide
APSVRPI

SEQ ID NO: 479 - protein, 7 aa, Artificial Sequence
  Description of Artificial Sequence: Synthetic peptide
APSVVTT

SEQ ID NO: 480 - protein, 7 aa, Artificial Sequence
  Description of Artificial Sequence: Synthetic peptide
APTAGSM

SEQ ID NO: 481 - protein, 7 aa, Artificial Sequence
  Description of Artificial Sequence: Synthetic peptide
APTPHPS

SEQ ID NO: 482 - protein, 7 aa, Artificial Sequence
  Description of Artificial Sequence: Synthetic peptide
APTPKGI

SEQ ID NO: 483 - protein, 7 aa, Artificial Sequence
  Description of Artificial Sequence: Synthetic peptide
APTRNPQ

SEQ ID NO: 484 - protein, 7 aa, Artificial Sequence
  Description of Artificial Sequence: Synthetic peptide
APTTPSL

SEQ ID NO: 485 - protein, 7 aa, Artificial Sequence
  Description of Artificial Sequence: Synthetic peptide
APTVSNI

SEQ ID NO: 486 - protein, 7 aa, Artificial Sequence
  Description of Artificial Sequence: Synthetic peptide
APVPDQT

SEQ ID NO: 487 - protein, 7 aa, Artificial Sequence
  Description of Artificial Sequence: Synthetic peptide
APVTDNF

SEQ ID NO: 488 - protein, 7 aa, Artificial Sequence
  Description of Artificial Sequence: Synthetic peptide
AQALRGH

SEQ ID NO: 489 - protein, 7 aa, Artificial Sequence
  Description of Artificial Sequence: Synthetic peptide
AQAPRTE

SEQ ID NO: 490 - protein, 7 aa, Artificial Sequence
  Description of Artificial Sequence: Synthetic peptide
AQATSSL

SEQ ID NO: 491 - protein, 7 aa, Artificial Sequence
  Description of Artificial Sequence: Synthetic peptide
AQCSTHL

SEQ ID NO: 492 - protein, 7 aa, Artificial Sequence
  Description of Artificial Sequence: Synthetic peptide
AQDRATR

SEQ ID NO: 493 - protein, 7 aa, Artificial Sequence
  Description of Artificial Sequence: Synthetic peptide
AQFSTKD

SEQ ID NO: 494 - protein, 7 aa, Artificial Sequence
  Description of Artificial Sequence: Synthetic peptide
AQGQTML

SEQ ID NO: 495 - protein, 7 aa, Artificial Sequence
  Description of Artificial Sequence: Synthetic peptide
AQGQVTP

SEQ ID NO: 496 - protein, 7 aa, Artificial Sequence
  Description of Artificial Sequence: Synthetic peptide
AQGWTSG

SEQ ID NO: 497 - protein, 7 aa, Artificial Sequence
  Description of Artificial Sequence: Synthetic peptide
AQHKLGL

SEQ ID NO: 498 - protein, 7 aa, Artificial Sequence
  Description of Artificial Sequence: Synthetic peptide
AQHRGET

SEQ ID NO: 499 - protein, 7 aa, Artificial Sequence
  Description of Artificial Sequence: Synthetic peptide
AQIHMEM

SEQ ID NO: 500 - protein, 7 aa, Artificial Sequence
  Description of Artificial Sequence: Synthetic peptide
AQKPTTM

SEQ ID NO: 501 - protein, 7 aa, Artificial Sequence
  Description of Artificial Sequence: Synthetic peptide
AQKPVVI

SEQ ID NO: 502 - protein, 7 aa, Artificial Sequence
  Description of Artificial Sequence: Synthetic peptide
AQKQKAP

SEQ ID NO: 503 - protein, 7 aa, Artificial Sequence
  Description of Artificial Sequence: Synthetic peptide
AQNMRNN

SEQ ID NO: 504 - protein, 7 aa, Artificial Sequence
  Description of Artificial Sequence: Synthetic peptide
AQPGTVF

SEQ ID NO: 505 - protein, 7 aa, Artificial Sequence
  Description of Artificial Sequence: Synthetic peptide
AQPSLYA

SEQ ID NO: 506 - protein, 7 aa, Artificial Sequence
  Description of Artificial Sequence: Synthetic peptide
AQPTRAD

SEQ ID NO: 507 - protein, 7 aa, Artificial Sequence
  Description of Artificial Sequence: Synthetic peptide
AQPVSRL

SEQ ID NO: 508 - protein, 7 aa, Artificial Sequence
  Description of Artificial Sequence: Synthetic peptide
AQRLSGG

SEQ ID NO: 509 - protein, 7 aa, Artificial Sequence
  Description of Artificial Sequence: Synthetic peptide
AQRNTSP

SEQ ID NO: 510 - protein, 7 aa, Artificial Sequence
  Description of Artificial Sequence: Synthetic peptide
AQRPTSV

SEQ ID NO: 511 - protein, 7 aa, Artificial Sequence
  Description of Artificial Sequence: Synthetic peptide
AQSGAIS

SEQ ID NO: 512 - protein, 7 aa, Artificial Sequence
  Description of Artificial Sequence: Synthetic peptide
AQSRSPL

SEQ ID NO: 513 - protein, 7 aa, Artificial Sequence
  Description of Artificial Sequence: Synthetic peptide
AQTSLRL

SEQ ID NO: 514 - protein, 7 aa, Artificial Sequence
  Description of Artificial Sequence: Synthetic peptide
AQTSMHT

SEQ ID NO: 515 - protein, 7 aa, Artificial Sequence
  Description of Artificial Sequence: Synthetic peptide
AQYIPST

SEQ ID NO: 516 - protein, 7 aa, Artificial Sequence
  Description of Artificial Sequence: Synthetic peptide
AQYPKPN

SEQ ID NO: 517 - protein, 7 aa, Artificial Sequence
  Description of Artificial Sequence: Synthetic peptide
ARAGDLV

SEQ ID NO: 518 - protein, 7 aa, Artificial Sequence
  Description of Artificial Sequence: Synthetic peptide
ARAHDST

SEQ ID NO: 519 - protein, 7 aa, Artificial Sequence
  Description of Artificial Sequence: Synthetic peptide
ARAHLTA

SEQ ID NO: 520 - protein, 7 aa, Artificial Sequence
  Description of Artificial Sequence: Synthetic peptide
ARALSPN

SEQ ID NO: 521 - protein, 7 aa, Artificial Sequence
  Description of Artificial Sequence: Synthetic peptide
ARAPGEL

SEQ ID NO: 522 - protein, 7 aa, Artificial Sequence
  Description of Artificial Sequence: Synthetic peptide
ARAPGPI

SEQ ID NO: 523 - protein, 7 aa, Artificial Sequence
  Description of Artificial Sequence: Synthetic peptide
ARAPTLM

SEQ ID NO: 524 - protein, 7 aa, Artificial Sequence
  Description of Artificial Sequence: Synthetic peptide
ARASPMT

SEQ ID NO: 525 - protein, 7 aa, Artificial Sequence
  Description of Artificial Sequence: Synthetic peptide
ARDFNAS

SEQ ID NO: 526 - protein, 7 aa, Artificial Sequence
  Description of Artificial Sequence: Synthetic peptide
ARDGVSL

SEQ ID NO: 527 - protein, 7 aa, Artificial Sequence
  Description of Artificial Sequence: Synthetic peptide
ARDLPAY

SEQ ID NO: 528 - protein, 7 aa, Artificial Sequence
  Description of Artificial Sequence: Synthetic peptide
ARDMVPH

SEQ ID NO: 529 - protein, 7 aa, Artificial Sequence
  Description of Artificial Sequence: Synthetic peptide
ARDQRSP

SEQ ID NO: 530 - protein, 7 aa, Artificial Sequence
  Description of Artificial Sequence: Synthetic peptide
AREHSQL

SEQ ID NO: 531 - protein, 7 aa, Artificial Sequence
  Description of Artificial Sequence: Synthetic peptide
ARELGRS

SEQ ID NO: 532 - protein, 7 aa, Artificial Sequence
  Description of Artificial Sequence: Synthetic peptide
ARFDVGS

SEQ ID NO: 533 - protein, 7 aa, Artificial Sequence
  Description of Artificial Sequence: Synthetic peptide
ARFETGH

SEQ ID NO: 534 - protein, 7 aa, Artificial Sequence
  Description of Artificial Sequence: Synthetic peptide
ARGLAAH

SEQ ID NO: 535 - protein, 7 aa, Artificial Sequence
  Description of Artificial Sequence: Synthetic peptide
ARGNAQA

SEQ ID NO: 536 - protein, 7 aa, Artificial Sequence
  Description of Artificial Sequence: Synthetic peptide
ARGNVMI

SEQ ID NO: 537 - protein, 7 aa, Artificial Sequence
  Description of Artificial Sequence: Synthetic peptide
ARGSDAS

SEQ ID NO: 538 - protein, 7 aa, Artificial Sequence
  Description of Artificial Sequence: Synthetic peptide
ARGSMTL

SEQ ID NO: 539 - protein, 7 aa, Artificial Sequence
  Description of Artificial Sequence: Synthetic peptide
ARGVASP

SEQ ID NO: 540 - protein, 7 aa, Artificial Sequence
  Description of Artificial Sequence: Synthetic peptide
ARHASVA

SEQ ID NO: 541 - protein, 7 aa, Artificial Sequence
  Description of Artificial Sequence: Synthetic peptide
ARHMPIE

SEQ ID NO: 542 - protein, 7 aa, Artificial Sequence
  Description of Artificial Sequence: Synthetic peptide
ARIYESP

SEQ ID NO: 543 - protein, 7 aa, Artificial Sequence
  Description of Artificial Sequence: Synthetic peptide
ARLATSE

SEQ ID NO: 544 - protein, 7 aa, Artificial Sequence
  Description of Artificial Sequence: Synthetic peptide
ARLGYDG

SEQ ID NO: 545 - protein, 7 aa, Artificial Sequence
  Description of Artificial Sequence: Synthetic peptide
ARLNFAA

SEQ ID NO: 546 - protein, 7 aa, Artificial Sequence
  Description of Artificial Sequence: Synthetic peptide
ARLQTAV

SEQ ID NO: 547 - protein, 7 aa, Artificial Sequence
  Description of Artificial Sequence: Synthetic peptide
ARMGLGL

SEQ ID NO: 548 - protein, 7 aa, Artificial Sequence
  Description of Artificial Sequence: Synthetic peptide
ARMPMLE

SEQ ID NO: 549 - protein, 7 aa, Artificial Sequence
  Description of Artificial Sequence: Synthetic peptide
ARMPSPP

SEQ ID NO: 550 - protein, 7 aa, Artificial Sequence
  Description of Artificial Sequence: Synthetic peptide
ARMVDPI

SEQ ID NO: 551 - protein, 7 aa, Artificial Sequence
  Description of Artificial Sequence: Synthetic peptide
ARMVGEP

SEQ ID NO: 552 - protein, 7 aa, Artificial Sequence
  Description of Artificial Sequence: Synthetic peptide
ARNPGPD

SEQ ID NO: 553 - protein, 7 aa, Artificial Sequence
  Description of Artificial Sequence: Synthetic peptide
ARNQAAQ

SEQ ID NO: 554 - protein, 7 aa, Artificial Sequence
  Description of Artificial Sequence: Synthetic peptide
ARNSLSD

SEQ ID NO: 555 - protein, 7 aa, Artificial Sequence
  Description of Artificial Sequence: Synthetic peptide
ARPEIKY

SEQ ID NO: 556 - protein, 7 aa, Artificial Sequence
  Description of Artificial Sequence: Synthetic peptide
ARPEYRV

SEQ ID NO: 557 - protein, 7 aa, Artificial Sequence
  Description of Artificial Sequence: Synthetic peptide
ARPPNSY

SEQ ID NO: 558 - protein, 7 aa, Artificial Sequence
  Description of Artificial Sequence: Synthetic peptide
ARPTEHE

SEQ ID NO: 559 - protein, 7 aa, Artificial Sequence
  Description of Artificial Sequence: Synthetic peptide
ARQHFAP

SEQ ID NO: 560 - protein, 7 aa, Artificial Sequence
  Description of Artificial Sequence: Synthetic peptide
ARQHVGP

SEQ ID NO: 561 - protein, 7 aa, Artificial Sequence
  Description of Artificial Sequence: Synthetic peptide
ARQTMNE

SEQ ID NO: 562 - protein, 7 aa, Artificial Sequence
  Description of Artificial Sequence: Synthetic peptide
ARRDPPL

SEQ ID NO: 563 - protein, 7 aa, Artificial Sequence
  Description of Artificial Sequence: Synthetic peptide
ARSAALA

SEQ ID NO: 564 - protein, 7 aa, Artificial Sequence
  Description of Artificial Sequence: Synthetic peptide
ARSAQTN

SEQ ID NO: 565 - protein, 7 aa, Artificial Sequence
  Description of Artificial Sequence: Synthetic peptide
ARSDRVS

SEQ ID NO: 566 - protein, 7 aa, Artificial Sequence
  Description of Artificial Sequence: Synthetic peptide
ARSEPTP

SEQ ID NO: 567 - protein, 7 aa, Artificial Sequence
  Description of Artificial Sequence: Synthetic peptide
ARSGEGF

SEQ ID NO: 568 - protein, 7 aa, Artificial Sequence
  Description of Artificial Sequence: Synthetic peptide
ARSHIVS

SEQ ID NO: 569 - protein, 7 aa, Artificial Sequence
  Description of Artificial Sequence: Synthetic peptide
ARSISVV

SEQ ID NO: 570 - protein, 7 aa, Artificial Sequence
  Description of Artificial Sequence: Synthetic peptide
ARSIVGP

SEQ ID NO: 571 - protein, 7 aa, Artificial Sequence
  Description of Artificial Sequence: Synthetic peptide
ARSNELH

SEQ ID NO: 572 - protein, 7 aa, Artificial Sequence
  Description of Artificial Sequence: Synthetic peptide
ARSPDVL

SEQ ID NO: 573 - protein, 7 aa, Artificial Sequence
  Description of Artificial Sequence: Synthetic peptide
ARSPHVY

SEQ ID NO: 574 - protein, 7 aa, Artificial Sequence
  Description of Artificial Sequence: Synthetic peptide
ARSRPLE

SEQ ID NO: 575 - protein, 7 aa, Artificial Sequence
  Description of Artificial Sequence: Synthetic peptide
ARSSDLE

SEQ ID NO: 576 - protein, 7 aa, Artificial Sequence
  Description of Artificial Sequence: Synthetic peptide
ARSSPPL

SEQ ID NO: 577 - protein, 7 aa, Artificial Sequence
  Description of Artificial Sequence: Synthetic peptide
ARSTVLG

SEQ ID NO: 578 - protein, 7 aa, Artificial Sequence
  Description of Artificial Sequence: Synthetic peptide
ARSVATS

SEQ ID NO: 579 - protein, 7 aa, Artificial Sequence
  Description of Artificial Sequence: Synthetic peptide
ARSVQDS

SEQ ID NO: 580 - protein, 7 aa, Artificial Sequence
  Description of Artificial Sequence: Synthetic peptide
ARTASLP

SEQ ID NO: 581 - protein, 7 aa, Artificial Sequence
  Description of Artificial Sequence: Synthetic peptide
ARTGAYS

SEQ ID NO: 582 - protein, 7 aa, Artificial Sequence
  Description of Artificial Sequence: Synthetic peptide
ARTLPQL

SEQ ID NO: 583 - protein, 7 aa, Artificial Sequence
  Description of Artificial Sequence: Synthetic peptide
ARTLSTH

SEQ ID NO: 584 - protein, 7 aa, Artificial Sequence
  Description of Artificial Sequence: Synthetic peptide
ARTPVLY

SEQ ID NO: 585 - protein, 7 aa, Artificial Sequence
  Description of Artificial Sequence: Synthetic peptide
ARTSEEP

SEQ ID NO: 586 - protein, 7 aa, Artificial Sequence
  Description of Artificial Sequence: Synthetic peptide
ARTTVGL

SEQ ID NO: 587 - protein, 7 aa, Artificial Sequence
  Description of Artificial Sequence: Synthetic peptide
ARTVPSM

SEQ ID NO: 588 - protein, 7 aa, Artificial Sequence
  Description of Artificial Sequence: Synthetic peptide
ARVDVSM

SEQ ID NO: 589 - protein, 7 aa, Artificial Sequence
  Description of Artificial Sequence: Synthetic peptide
ARVNREP

SEQ ID NO: 590 - protein, 7 aa, Artificial Sequence
  Description of Artificial Sequence: Synthetic peptide
ARVSLEA

SEQ ID NO: 591 - protein, 7 aa, Artificial Sequence
  Description of Artificial Sequence: Synthetic peptide
ARVVAPE

SEQ ID NO: 592 - protein, 7 aa, Artificial Sequence
  Description of Artificial Sequence: Synthetic peptide
ARYGGMV

SEQ ID NO: 593 - protein, 7 aa, Artificial Sequence
  Description of Artificial Sequence: Synthetic peptide
ASAFKQP

SEQ ID NO: 594 - protein, 7 aa, Artificial Sequence
  Description of Artificial Sequence: Synthetic peptide
ASAGGQP

SEQ ID NO: 595 - protein, 7 aa, Artificial Sequence
  Description of Artificial Sequence: Synthetic peptide
ASAGPPP

SEQ ID NO: 596 - protein, 7 aa, Artificial Sequence
  Description of Artificial Sequence: Synthetic peptide
ASAQQVS

SEQ ID NO: 597 - protein, 7 aa, Artificial Sequence
  Description of Artificial Sequence: Synthetic peptide
ASASNRG

SEQ ID NO: 598 - protein, 7 aa, Artificial Sequence
  Description of Artificial Sequence: Synthetic peptide
ASCSSTT

SEQ ID NO: 599 - protein, 7 aa, Artificial Sequence
  Description of Artificial Sequence: Synthetic peptide
ASDASCS

SEQ ID NO: 600 - protein, 7 aa, Artificial Sequence
  Description of Artificial Sequence: Synthetic peptide
ASDLSLR

SEQ ID NO: 601 - protein, 7 aa, Artificial Sequence
  Description of Artificial Sequence: Synthetic peptide
ASDMLKS

SEQ ID NO: 602 - protein, 7 aa, Artificial Sequence
  Description of Artificial Sequence: Synthetic peptide
ASDNIRA

SEQ ID NO: 603 - protein, 7 aa, Artificial Sequence
  Description of Artificial Sequence: Synthetic peptide
ASDPMKG

SEQ ID NO: 604 - protein, 7 aa, Artificial Sequence
  Description of Artificial Sequence: Synthetic peptide
ASDTTTM

SEQ ID NO: 605 - protein, 7 aa, Artificial Sequence
  Description of Artificial Sequence: Synthetic peptide
ASDVSRP

SEQ ID NO: 606 - protein, 7 aa, Artificial Sequence
  Description of Artificial Sequence: Synthetic peptide
ASEERAN

SEQ ID NO: 607 - protein, 7 aa, Artificial Sequence
  Description of Artificial Sequence: Synthetic peptide
ASENSQN

SEQ ID NO: 608 - protein, 7 aa, Artificial Sequence
  Description of Artificial Sequence: Synthetic peptide
ASERNRL

SEQ ID NO: 609 - protein, 7 aa, Artificial Sequence
  Description of Artificial Sequence: Synthetic peptide
ASEVSNA

SEQ ID NO: 610 - protein, 7 aa, Artificial Sequence
  Description of Artificial Sequence: Synthetic peptide
ASFCTSW

SEQ ID NO: 611 - protein, 7 aa, Artificial Sequence
  Description of Artificial Sequence: Synthetic peptide
ASFHGGV

SEQ ID NO: 612 - protein, 7 aa, Artificial Sequence
  Description of Artificial Sequence: Synthetic peptide
ASFMEAA

SEQ ID NO: 613 - protein, 7 aa, Artificial Sequence
  Description of Artificial Sequence: Synthetic peptide
ASFPATS

SEQ ID NO: 614 - protein, 7 aa, Artificial Sequence
  Description of Artificial Sequence: Synthetic peptide
ASFRLMA

SEQ ID NO: 615 - protein, 7 aa, Artificial Sequence
  Description of Artificial Sequence: Synthetic peptide
ASGRAVG

SEQ ID NO: 616 - protein, 7 aa, Artificial Sequence
  Description of Artificial Sequence: Synthetic peptide
ASGRQDL

SEQ ID NO: 617 - protein, 7 aa, Artificial Sequence
  Description of Artificial Sequence: Synthetic peptide
ASGSDDS

SEQ ID NO: 618 - protein, 7 aa, Artificial Sequence
  Description of Artificial Sequence: Synthetic peptide
ASGSTSG

SEQ ID NO: 619 - protein, 7 aa, Artificial Sequence
  Description of Artificial Sequence: Synthetic peptide
ASGTRAA

SEQ ID NO: 620 - protein, 7 aa, Artificial Sequence
  Description of Artificial Sequence: Synthetic peptide
ASGTYTS

SEQ ID NO: 621 - protein, 7 aa, Artificial Sequence
  Description of Artificial Sequence: Synthetic peptide
ASGYLPQ

SEQ ID NO: 622 - protein, 7 aa, Artificial Sequence
  Description of Artificial Sequence: Synthetic peptide
ASHERDF

SEQ ID NO: 623 - protein, 7 aa, Artificial Sequence
  Description of Artificial Sequence: Synthetic peptide
ASHHLTE

SEQ ID NO: 624 - protein, 7 aa, Artificial Sequence
  Description of Artificial Sequence: Synthetic peptide
ASHRSGD

SEQ ID NO: 625 - protein, 7 aa, Artificial Sequence
  Description of Artificial Sequence: Synthetic peptide
ASIHTTS

SEQ ID NO: 626 - protein, 7 aa, Artificial Sequence
  Description of Artificial Sequence: Synthetic peptide
ASISGSA

SEQ ID NO: 627 - protein, 7 aa, Artificial Sequence
  Description of Artificial Sequence: Synthetic peptide
ASISIGA

SEQ ID NO: 628 - protein, 7 aa, Artificial Sequence
  Description of Artificial Sequence: Synthetic peptide
ASLPSPR

SEQ ID NO: 629 - protein, 7 aa, Artificial Sequence
  Description of Artificial Sequence: Synthetic peptide
ASLRATG

SEQ ID NO: 630 - protein, 7 aa, Artificial Sequence
  Description of Artificial Sequence: Synthetic peptide
ASLSAAM

SEQ ID NO: 631 - protein, 7 aa, Artificial Sequence
  Description of Artificial Sequence: Synthetic peptide
ASLSGSM

SEQ ID NO: 632 - protein, 7 aa, Artificial Sequence
  Description of Artificial Sequence: Synthetic peptide
ASLSNLP

SEQ ID NO: 633 - protein, 7 aa, Artificial Sequence
  Description of Artificial Sequence: Synthetic peptide
ASLSPLL

SEQ ID NO: 634 - protein, 7 aa, Artificial Sequence
  Description of Artificial Sequence: Synthetic peptide
ASMKPTI

SEQ ID NO: 635 - protein, 7 aa, Artificial Sequence
  Description of Artificial Sequence: Synthetic peptide
ASMNGLP

SEQ ID NO: 636 - protein, 7 aa, Artificial Sequence
  Description of Artificial Sequence: Synthetic peptide
ASMNMNA

SEQ ID NO: 637 - protein, 7 aa, Artificial Sequence
  Description of Artificial Sequence: Synthetic peptide
ASNKSSL

SEQ ID NO: 638 - protein, 7 aa, Artificial Sequence
  Description of Artificial Sequence: Synthetic peptide
ASNRVSY

SEQ ID NO: 639 - protein, 7 aa, Artificial Sequence
  Description of Artificial Sequence: Synthetic peptide
ASNSALR

SEQ ID NO: 640 - protein, 7 aa, Artificial Sequence
  Description of Artificial Sequence: Synthetic peptide
ASPAAVH

SEQ ID NO: 641 - protein, 7 aa, Artificial Sequence
  Description of Artificial Sequence: Synthetic peptide
ASPLNSS

SEQ ID NO: 642 - protein, 7 aa, Artificial Sequence
  Description of Artificial Sequence: Synthetic peptide
ASPPQTT

SEQ ID NO: 643 - protein, 7 aa, Artificial Sequence
  Description of Artificial Sequence: Synthetic peptide
ASPQFNS

SEQ ID NO: 644 - protein, 7 aa, Artificial Sequence
  Description of Artificial Sequence: Synthetic peptide
ASPRGRE

SEQ ID NO: 645 - protein, 7 aa, Artificial Sequence
  Description of Artificial Sequence: Synthetic peptide
ASQAACL

SEQ ID NO: 646 - protein, 7 aa, Artificial Sequence
  Description of Artificial Sequence: Synthetic peptide
ASQIEPT

SEQ ID NO: 647 - protein, 7 aa, Artificial Sequence
  Description of Artificial Sequence: Synthetic peptide
ASQIRTT

SEQ ID NO: 648 - protein, 7 aa, Artificial Sequence
  Description of Artificial Sequence: Synthetic peptide
ASQPSRV

SEQ ID NO: 649 - protein, 7 aa, Artificial Sequence
  Description of Artificial Sequence: Synthetic peptide
ASQQPRS

SEQ ID NO: 650 - protein, 7 aa, Artificial Sequence
  Description of Artificial Sequence: Synthetic peptide
ASQRLGG

SEQ ID NO: 651 - protein, 7 aa, Artificial Sequence
  Description of Artificial Sequence: Synthetic peptide
ASQSRDA

SEQ ID NO: 652 - protein, 7 aa, Artificial Sequence
  Description of Artificial Sequence: Synthetic peptide
ASQYRES

SEQ ID NO: 653 - protein, 7 aa, Artificial Sequence
  Description of Artificial Sequence: Synthetic peptide
ASRAPAG

SEQ ID NO: 654 - protein, 7 aa, Artificial Sequence
  Description of Artificial Sequence: Synthetic peptide
ASRAPSN

SEQ ID NO: 655 - protein, 7 aa, Artificial Sequence
  Description of Artificial Sequence: Synthetic peptide
ASRDNVD

SEQ ID NO: 656 - protein, 7 aa, Artificial Sequence
  Description of Artificial Sequence: Synthetic peptide
ASRGMST

SEQ ID NO: 657 - protein, 7 aa, Artificial Sequence
  Description of Artificial Sequence: Synthetic peptide
ASRPYLV

SEQ ID NO: 658 - protein, 7 aa, Artificial Sequence
  Description of Artificial Sequence: Synthetic peptide
ASRSTTS

SEQ ID NO: 659 - protein, 7 aa, Artificial Sequence
  Description of Artificial Sequence: Synthetic peptide
ASRTIAP

SEQ ID NO: 660 - protein, 7 aa, Artificial Sequence
  Description of Artificial Sequence: Synthetic peptide
ASRTTPL

SEQ ID NO: 661 - protein, 7 aa, Artificial Sequence
  Description of Artificial Sequence: Synthetic peptide
ASSARPI

SEQ ID NO: 662 - protein, 7 aa, Artificial Sequence
  Description of Artificial Sequence: Synthetic peptide
ASSAVLT

SEQ ID NO: 663 - protein, 7 aa, Artificial Sequence
  Description of Artificial Sequence: Synthetic peptide
ASSERGE

SEQ ID NO: 664 - protein, 7 aa, Artificial Sequence
  Description of Artificial Sequence: Synthetic peptide
ASSGDVL

SEQ ID NO: 665 - protein, 7 aa, Artificial Sequence
  Description of Artificial Sequence: Synthetic peptide
ASSGPDK

SEQ ID NO: 666 - protein, 7 aa, Artificial Sequence
  Description of Artificial Sequence: Synthetic peptide
ASSGRSA

SEQ ID NO: 667 - protein, 7 aa, Artificial Sequence
  Description of Artificial Sequence: Synthetic peptide
ASSGSGT

SEQ ID NO: 668 - protein, 7 aa, Artificial Sequence
  Description of Artificial Sequence: Synthetic peptide
ASSKGSN

SEQ ID NO: 669 - protein, 7 aa, Artificial Sequence
  Description of Artificial Sequence: Synthetic peptide
ASSKPAN

SEQ ID NO: 670 - protein, 7 aa, Artificial Sequence
  Description of Artificial Sequence: Synthetic peptide
ASSKPLG

SEQ ID NO: 671 - protein, 7 aa, Artificial Sequence
  Description of Artificial Sequence: Synthetic peptide
ASSPKIY

SEQ ID NO: 672 - protein, 7 aa, Artificial Sequence
  Description of Artificial Sequence: Synthetic peptide
ASSPVLS

SEQ ID NO: 673 - protein, 7 aa, Artificial Sequence
  Description of Artificial Sequence: Synthetic peptide
ASSQHGL

SEQ ID NO: 674 - protein, 7 aa, Artificial Sequence
  Description of Artificial Sequence: Synthetic peptide
ASSRTVN

SEQ ID NO: 675 - protein, 7 aa, Artificial Sequence
  Description of Artificial Sequence: Synthetic peptide
ASSSDSR

SEQ ID NO: 676 - protein, 7 aa, Artificial Sequence
  Description of Artificial Sequence: Synthetic peptide
ASSSLSF

SEQ ID NO: 677 - protein, 7 aa, Artificial Sequence
  Description of Artificial Sequence: Synthetic peptide
ASSTSLE

SEQ ID NO: 678 - protein, 7 aa, Artificial Sequence
  Description of Artificial Sequence: Synthetic peptide
ASSVNPS

SEQ ID NO: 679 - protein, 7 aa, Artificial Sequence
  Description of Artificial Sequence: Synthetic peptide
ASTALLL

SEQ ID NO: 680 - protein, 7 aa, Artificial Sequence
  Description of Artificial Sequence: Synthetic peptide
ASTGIVL

SEQ ID NO: 681 - protein, 7 aa, Artificial Sequence
  Description of Artificial Sequence: Synthetic peptide
ASTGSFG

SEQ ID NO: 682 - protein, 7 aa, Artificial Sequence
  Description of Artificial Sequence: Synthetic peptide
ASTGSQE

SEQ ID NO: 683 - protein, 7 aa, Artificial Sequence
  Description of Artificial Sequence: Synthetic peptide
ASTLQVG

SEQ ID NO: 684 - protein, 7 aa, Artificial Sequence
  Description of Artificial Sequence: Synthetic peptide
ASTPNLL

SEQ ID NO: 685 - protein, 7 aa, Artificial Sequence
  Description of Artificial Sequence: Synthetic peptide
ASTQKQA

SEQ ID NO: 686 - protein, 7 aa, Artificial Sequence
  Description of Artificial Sequence: Synthetic peptide
ASTRMLF

SEQ ID NO: 687 - protein, 7 aa, Artificial Sequence
  Description of Artificial Sequence: Synthetic peptide
ASTTFRP

SEQ ID NO: 688 - protein, 7 aa, Artificial Sequence
  Description of Artificial Sequence: Synthetic peptide
ASTTRML

SEQ ID NO: 689 - protein, 7 aa, Artificial Sequence
  Description of Artificial Sequence: Synthetic peptide
ASVLQEA

SEQ ID NO: 690 - protein, 7 aa, Artificial Sequence
  Description of Artificial Sequence: Synthetic peptide
ASVPLIP

SEQ ID NO: 691 - protein, 7 aa, Artificial Sequence
  Description of Artificial Sequence: Synthetic peptide
ASVRMGD

SEQ ID NO: 692 - protein, 7 aa, Artificial Sequence
  Description of Artificial Sequence: Synthetic peptide
ASVSMVA

SEQ ID NO: 693 - protein, 7 aa, Artificial Sequence
  Description of Artificial Sequence: Synthetic peptide
ASVSTEG

SEQ ID NO: 694 - protein, 7 aa, Artificial Sequence
  Description of Artificial Sequence: Synthetic peptide
ASWDINI

SEQ ID NO: 695 - protein, 7 aa, Artificial Sequence
  Description of Artificial Sequence: Synthetic peptide
ASWDSNI

SEQ ID NO: 696 - protein, 7 aa, Artificial Sequence
  Description of Artificial Sequence: Synthetic peptide
ASYDTSR

SEQ ID NO: 697 - protein, 7 aa, Artificial Sequence
  Description of Artificial Sequence: Synthetic peptide
ASYDVSS

SEQ ID NO: 698 - protein, 7 aa, Artificial Sequence
  Description of Artificial Sequence: Synthetic peptide
ATAATAY

SEQ ID NO: 699 - protein, 7 aa, Artificial Sequence
  Description of Artificial Sequence: Synthetic peptide
ATAATTS

SEQ ID NO: 700 - protein, 7 aa, Artificial Sequence
  Description of Artificial Sequence: Synthetic peptide
ATAGLYQ

SEQ ID NO: 701 - protein, 7 aa, Artificial Sequence
  Description of Artificial Sequence: Synthetic peptide
ATAKILD

SEQ ID NO: 702 - protein, 7 aa, Artificial Sequence
  Description of Artificial Sequence: Synthetic peptide
ATAKLLP

SEQ ID NO: 703 - protein, 7 aa, Artificial Sequence
  Description of Artificial Sequence: Synthetic peptide
ATAKPLI

SEQ ID NO: 704 - protein, 7 aa, Artificial Sequence
  Description of Artificial Sequence: Synthetic peptide
ATARQVQ

SEQ ID NO: 705 - protein, 7 aa, Artificial Sequence
  Description of Artificial Sequence: Synthetic peptide
ATASTSS

SEQ ID NO: 706 - protein, 7 aa, Artificial Sequence
  Description of Artificial Sequence: Synthetic peptide
ATASYNG

SEQ ID NO: 707 - protein, 7 aa, Artificial Sequence
  Description of Artificial Sequence: Synthetic peptide
ATAVHDY

SEQ ID NO: 708 - protein, 7 aa, Artificial Sequence
  Description of Artificial Sequence: Synthetic peptide
ATDHMSP

SEQ ID NO: 709 - protein, 7 aa, Artificial Sequence
  Description of Artificial Sequence: Synthetic peptide
ATDYQSM

SEQ ID NO: 710 - protein, 7 aa, Artificial Sequence
  Description of Artificial Sequence: Synthetic peptide
ATEAPLK

SEQ ID NO: 711 - protein, 7 aa, Artificial Sequence
  Description of Artificial Sequence: Synthetic peptide
ATEGHPW

SEQ ID NO: 712 - protein, 7 aa, Artificial Sequence
  Description of Artificial Sequence: Synthetic peptide
ATFVTSK

SEQ ID NO: 713 - protein, 7 aa, Artificial Sequence
  Description of Artificial Sequence: Synthetic peptide
ATGGHSP

SEQ ID NO: 714 - protein, 7 aa, Artificial Sequence
  Description of Artificial Sequence: Synthetic peptide
ATGTSAG

SEQ ID NO: 715 - protein, 7 aa, Artificial Sequence
  Description of Artificial Sequence: Synthetic peptide
ATGVLMS

SEQ ID NO: 716 - protein, 7 aa, Artificial Sequence
  Description of Artificial Sequence: Synthetic peptide
ATGVQNY

SEQ ID NO: 717 - protein, 7 aa, Artificial Sequence
  Description of Artificial Sequence: Synthetic peptide
ATHILKL

SEQ ID NO: 718 - protein, 7 aa, Artificial Sequence
  Description of Artificial Sequence: Synthetic peptide
ATHSLLS

SEQ ID NO: 719 - protein, 7 aa, Artificial Sequence
  Description of Artificial Sequence: Synthetic peptide
ATHVCVS

SEQ ID NO: 720 - protein, 7 aa, Artificial Sequence
  Description of Artificial Sequence: Synthetic peptide
ATIPRTP

SEQ ID NO: 721 - protein, 7 aa, Artificial Sequence
  Description of Artificial Sequence: Synthetic peptide
ATKFQGM

SEQ ID NO: 722 - protein, 7 aa, Artificial Sequence
  Description of Artificial Sequence: Synthetic peptide
ATKGISF

SEQ ID NO: 723 - protein, 7 aa, Artificial Sequence
  Description of Artificial Sequence: Synthetic peptide
ATKHDCK

SEQ ID NO: 724 - protein, 7 aa, Artificial Sequence
  Description of Artificial Sequence: Synthetic peptide
ATLHREL

SEQ ID NO: 725 - protein, 7 aa, Artificial Sequence
  Description of Artificial Sequence: Synthetic peptide
ATLKIPV

SEQ ID NO: 726 - protein, 7 aa, Artificial Sequence
  Description of Artificial Sequence: Synthetic peptide
ATLRIVE

SEQ ID NO: 727 - protein, 7 aa, Artificial Sequence
  Description of Artificial Sequence: Synthetic peptide
ATLRPND

SEQ ID NO: 728 - protein, 7 aa, Artificial Sequence
  Description of Artificial Sequence: Synthetic peptide
ATLRTAT

SEQ ID NO: 729 - protein, 7 aa, Artificial Sequence
  Description of Artificial Sequence: Synthetic peptide
ATLSTNA

SEQ ID NO: 730 - protein, 7 aa, Artificial Sequence
  Description of Artificial Sequence: Synthetic peptide
ATLTLSA

SEQ ID NO: 731 - protein, 7 aa, Artificial Sequence
  Description of Artificial Sequence: Synthetic peptide
ATLVSAE

SEQ ID NO: 732 - protein, 7 aa, Artificial Sequence
  Description of Artificial Sequence: Synthetic peptide
ATMPSTM

SEQ ID NO: 733 - protein, 7 aa, Artificial Sequence
  Description of Artificial Sequence: Synthetic peptide
ATMRPRD

SEQ ID NO: 734 - protein, 7 aa, Artificial Sequence
  Description of Artificial Sequence: Synthetic peptide
ATMSLSS

SEQ ID NO: 735 - protein, 7 aa, Artificial Sequence
  Description of Artificial Sequence: Synthetic peptide
ATMSMRG

SEQ ID NO: 736 - protein, 7 aa, Artificial Sequence
  Description of Artificial Sequence: Synthetic peptide
ATMVTTS

SEQ ID NO: 737 - protein, 7 aa, Artificial Sequence
  Description of Artificial Sequence: Synthetic peptide
ATNAHQS

SEQ ID NO: 738 - protein, 7 aa, Artificial Sequence
  Description of Artificial Sequence: Synthetic peptide
ATNRFPS

SEQ ID NO: 739 - protein, 7 aa, Artificial Sequence
  Description of Artificial Sequence: Synthetic peptide
ATNSSAT

SEQ ID NO: 740 - protein, 7 aa, Artificial Sequence
  Description of Artificial Sequence: Synthetic peptide
ATNTRIA

SEQ ID NO: 741 - protein, 7 aa, Artificial Sequence
  Description of Artificial Sequence: Synthetic peptide
ATPLRTS

SEQ ID NO: 742 - protein, 7 aa, Artificial Sequence
  Description of Artificial Sequence: Synthetic peptide
ATPPMQN

SEQ ID NO: 743 - protein, 7 aa, Artificial Sequence
  Description of Artificial Sequence: Synthetic peptide
ATPSAAI

SEQ ID NO: 744 - protein, 7 aa, Artificial Sequence
  Description of Artificial Sequence: Synthetic peptide
ATPTLSA

SEQ ID NO: 745 - protein, 7 aa, Artificial Sequence
  Description of Artificial Sequence: Synthetic peptide
ATPVPHP

SEQ ID NO: 746 - protein, 7 aa, Artificial Sequence
  Description of Artificial Sequence: Synthetic peptide
ATQNLPP

SEQ ID NO: 747 - protein, 7 aa, Artificial Sequence
  Description of Artificial Sequence: Synthetic peptide
ATQRIVY

SEQ ID NO: 748 - protein, 7 aa, Artificial Sequence
  Description of Artificial Sequence: Synthetic peptide
ATQYGMN

SEQ ID NO: 749 - protein, 7 aa, Artificial Sequence
  Description of Artificial Sequence: Synthetic peptide
ATRAESS

SEQ ID NO: 750 - protein, 7 aa, Artificial Sequence
  Description of Artificial Sequence: Synthetic peptide
ATRLPDS

SEQ ID NO: 751 - protein, 7 aa, Artificial Sequence
  Description of Artificial Sequence: Synthetic peptide
ATRLTEK

SEQ ID NO: 752 - protein, 7 aa, Artificial Sequence
  Description of Artificial Sequence: Synthetic peptide
ATRPQAD

SEQ ID NO: 753 - protein, 7 aa, Artificial Sequence
  Description of Artificial Sequence: Synthetic peptide
ATRTSLE

SEQ ID NO: 754 - protein, 7 aa, Artificial Sequence
  Description of Artificial Sequence: Synthetic peptide
ATSITKS

SEQ ID NO: 755 - protein, 7 aa, Artificial Sequence
  Description of Artificial Sequence: Synthetic peptide
ATSQMNF

SEQ ID NO: 756 - protein, 7 aa, Artificial Sequence
  Description of Artificial Sequence: Synthetic peptide
ATSTLNL

SEQ ID NO: 757 - protein, 7 aa, Artificial Sequence
  Description of Artificial Sequence: Synthetic peptide
ATSTMTT

SEQ ID NO: 758 - protein, 7 aa, Artificial Sequence
  Description of Artificial Sequence: Synthetic peptide
ATSTVFR

SEQ ID NO: 759 - protein, 7 aa, Artificial Sequence
  Description of Artificial Sequence: Synthetic peptide
ATTAGSN

SEQ ID NO: 760 - protein, 7 aa, Artificial Sequence
  Description of Artificial Sequence: Synthetic peptide
ATTAMGE

SEQ ID NO: 761 - protein, 7 aa, Artificial Sequence
  Description of Artificial Sequence: Synthetic peptide
ATTGPPC

SEQ ID NO: 762 - protein, 7 aa, Artificial Sequence
  Description of Artificial Sequence: Synthetic peptide
ATTKDTT

SEQ ID NO: 763 - protein, 7 aa, Artificial Sequence
  Description of Artificial Sequence: Synthetic peptide
ATTLIRP

SEQ ID NO: 764 - protein, 7 aa, Artificial Sequence
  Description of Artificial Sequence: Synthetic peptide
ATTSRSS

SEQ ID NO: 765 - protein, 7 aa, Artificial Sequence
  Description of Artificial Sequence: Synthetic peptide
ATTVASR

SEQ ID NO: 766 - protein, 7 aa, Artificial Sequence
  Description of Artificial Sequence: Synthetic peptide
ATVMPTA

SEQ ID NO: 767 - protein, 7 aa, Artificial Sequence
  Description of Artificial Sequence: Synthetic peptide
ATVMTLP

SEQ ID NO: 768 - protein, 7 aa, Artificial Sequence
  Description of Artificial Sequence: Synthetic peptide
ATVNPAV

SEQ ID NO: 769 - protein, 7 aa, Artificial Sequence
  Description of Artificial Sequence: Synthetic peptide
ATVPQRT

SEQ ID NO: 770 - protein, 7 aa, Artificial Sequence
  Description of Artificial Sequence: Synthetic peptide
ATVRTML

SEQ ID NO: 771 - protein, 7 aa, Artificial Sequence
  Description of Artificial Sequence: Synthetic peptide
ATVSDTL

SEQ ID NO: 772 - protein, 7 aa, Artificial Sequence
  Description of Artificial Sequence: Synthetic peptide
ATVSSLT

SEQ ID NO: 773 - protein, 7 aa, Artificial Sequence
  Description of Artificial Sequence: Synthetic peptide
ATWPYKE

SEQ ID NO: 774 - protein, 7 aa, Artificial Sequence
  Description of Artificial Sequence: Synthetic peptide
ATYARNE

SEQ ID NO: 775 - protein, 7 aa, Artificial Sequence
  Description of Artificial Sequence: Synthetic peptide
ATYTATA

SEQ ID NO: 776 - protein, 7 aa, Artificial Sequence
  Description of Artificial Sequence: Synthetic peptide
AVAGTLR

SEQ ID NO: 777 - protein, 7 aa, Artificial Sequence
  Description of Artificial Sequence: Synthetic peptide
AVALNTT

SEQ ID NO: 778 - protein, 7 aa, Artificial Sequence
  Description of Artificial Sequence: Synthetic peptide
AVAQMGI

SEQ ID NO: 779 - protein, 7 aa, Artificial Sequence
  Description of Artificial Sequence: Synthetic peptide
AVAVDFV

SEQ ID NO: 780 - protein, 7 aa, Artificial Sequence
  Description of Artificial Sequence: Synthetic peptide
AVDHEGL

SEQ ID NO: 781 - protein, 7 aa, Artificial Sequence
  Description of Artificial Sequence: Synthetic peptide
AVDPGNP

SEQ ID NO: 782 - protein, 7 aa, Artificial Sequence
  Description of Artificial Sequence: Synthetic peptide
AVDRSEI

SEQ ID NO: 783 - protein, 7 aa, Artificial Sequence
  Description of Artificial Sequence: Synthetic peptide
AVECMPP

SEQ ID NO: 784 - protein, 7 aa, Artificial Sequence
  Description of Artificial Sequence: Synthetic peptide
AVEPMWE

SEQ ID NO: 785 - protein, 7 aa, Artificial Sequence
  Description of Artificial Sequence: Synthetic peptide
AVETGYT

SEQ ID NO: 786 - protein, 7 aa, Artificial Sequence
  Description of Artificial Sequence: Synthetic peptide
AVFARLP

SEQ ID NO: 787 - protein, 7 aa, Artificial Sequence
  Description of Artificial Sequence: Synthetic peptide
AVGESEV

SEQ ID NO: 788 - protein, 7 aa, Artificial Sequence
  Description of Artificial Sequence: Synthetic peptide
AVGNSLY

SEQ ID NO: 789 - protein, 7 aa, Artificial Sequence
  Description of Artificial Sequence: Synthetic peptide
AVGQNMR

SEQ ID NO: 790 - protein, 7 aa, Artificial Sequence
  Description of Artificial Sequence: Synthetic peptide
AVHKMDM

SEQ ID NO: 791 - protein, 7 aa, Artificial Sequence
  Description of Artificial Sequence: Synthetic peptide
AVHQLTL

SEQ ID NO: 792 - protein, 7 aa, Artificial Sequence
  Description of Artificial Sequence: Synthetic peptide
AVHRENV

SEQ ID NO: 793 - protein, 7 aa, Artificial Sequence
  Description of Artificial Sequence: Synthetic peptide
AVIGGMT

SEQ ID NO: 794 - protein, 7 aa, Artificial Sequence
  Description of Artificial Sequence: Synthetic peptide
AVKGMPL

SEQ ID NO: 795 - protein, 7 aa, Artificial Sequence
  Description of Artificial Sequence: Synthetic peptide
AVKQLIV

SEQ ID NO: 796 - protein, 7 aa, Artificial Sequence
  Description of Artificial Sequence: Synthetic peptide
AVLHTLG

SEQ ID NO: 797 - protein, 7 aa, Artificial Sequence
  Description of Artificial Sequence: Synthetic peptide
AVLKNRD

SEQ ID NO: 798 - protein, 7 aa, Artificial Sequence
  Description of Artificial Sequence: Synthetic peptide
AVLNKED

SEQ ID NO: 799 - protein, 7 aa, Artificial Sequence
  Description of Artificial Sequence: Synthetic peptide
AVLNSAD

SEQ ID NO: 800 - protein, 7 aa, Artificial Sequence
  Description of Artificial Sequence: Synthetic peptide
AVLVPHA

SEQ ID NO: 801 - protein, 7 aa, Artificial Sequence
  Description of Artificial Sequence: Synthetic peptide
AVLVRED

SEQ ID NO: 802 - protein, 7 aa, Artificial Sequence
  Description of Artificial Sequence: Synthetic peptide
AVMGRSE

SEQ ID NO: 803 - protein, 7 aa, Artificial Sequence
  Description of Artificial Sequence: Synthetic peptide
AVMPRTP

SEQ ID NO: 804 - protein, 7 aa, Artificial Sequence
  Description of Artificial Sequence: Synthetic peptide
AVMRIAP

SEQ ID NO: 805 - protein, 7 aa, Artificial Sequence
  Description of Artificial Sequence: Synthetic peptide
AVNAAQA

SEQ ID NO: 806 - protein, 7 aa, Artificial Sequence
  Description of Artificial Sequence: Synthetic peptide
AVNFDVI

SEQ ID NO: 807 - protein, 7 aa, Artificial Sequence
  Description of Artificial Sequence: Synthetic peptide
AVNPPEL

SEQ ID NO: 808 - protein, 7 aa, Artificial Sequence
  Description of Artificial Sequence: Synthetic peptide
AVNRVPL

SEQ ID NO: 809 - protein, 7 aa, Artificial Sequence
  Description of Artificial Sequence: Synthetic peptide
AVPGPKS

SEQ ID NO: 810 - protein, 7 aa, Artificial Sequence
  Description of Artificial Sequence: Synthetic peptide
AVPLLLT

SEQ ID NO: 811 - protein, 7 aa, Artificial Sequence
  Description of Artificial Sequence: Synthetic peptide
AVPMRFP

SEQ ID NO: 812 - protein, 7 aa, Artificial Sequence
  Description of Artificial Sequence: Synthetic peptide
AVPSHAQ

SEQ ID NO: 813 - protein, 7 aa, Artificial Sequence
  Description of Artificial Sequence: Synthetic peptide
AVPVSHA

SEQ ID NO: 814 - protein, 7 aa, Artificial Sequence
  Description of Artificial Sequence: Synthetic peptide
AVQTHGF

SEQ ID NO: 815 - protein, 7 aa, Artificial Sequence
  Description of Artificial Sequence: Synthetic peptide
AVQTTDH

SEQ ID NO: 816 - protein, 7 aa, Artificial Sequence
  Description of Artificial Sequence: Synthetic peptide
AVRASQQ

SEQ ID NO: 817 - protein, 7 aa, Artificial Sequence
  Description of Artificial Sequence: Synthetic peptide
AVRASTP

SEQ ID NO: 818 - protein, 7 aa, Artificial Sequence
  Description of Artificial Sequence: Synthetic peptide
AVRDSVL

SEQ ID NO: 819 - protein, 7 aa, Artificial Sequence
  Description of Artificial Sequence: Synthetic peptide
AVRHQGD

SEQ ID NO: 820 - protein, 7 aa, Artificial Sequence
  Description of Artificial Sequence: Synthetic peptide
AVRLKME

SEQ ID NO: 821 - protein, 7 aa, Artificial Sequence
  Description of Artificial Sequence: Synthetic peptide
AVRPPPP

SEQ ID NO: 822 - protein, 7 aa, Artificial Sequence
  Description of Artificial Sequence: Synthetic peptide
AVRRDDA

SEQ ID NO: 823 - protein, 7 aa, Artificial Sequence
  Description of Artificial Sequence: Synthetic peptide
AVRSLTV

SEQ ID NO: 824 - protein, 7 aa, Artificial Sequence
  Description of Artificial Sequence: Synthetic peptide
AVRTNPL

SEQ ID NO: 825 - protein, 7 aa, Artificial Sequence
  Description of Artificial Sequence: Synthetic peptide
AVSGHSL

SEQ ID NO: 826 - protein, 7 aa, Artificial Sequence
  Description of Artificial Sequence: Synthetic peptide
AVSHASD

SEQ ID NO: 827 - protein, 7 aa, Artificial Sequence
  Description of Artificial Sequence: Synthetic peptide
AVSPYSL

SEQ ID NO: 828 - protein, 7 aa, Artificial Sequence
  Description of Artificial Sequence: Synthetic peptide
AVSRAGG

SEQ ID NO: 829 - protein, 7 aa, Artificial Sequence
  Description of Artificial Sequence: Synthetic peptide
AVSRPNS

SEQ ID NO: 830 - protein, 7 aa, Artificial Sequence
  Description of Artificial Sequence: Synthetic peptide
AVTNSMI

SEQ ID NO: 831 - protein, 7 aa, Artificial Sequence
  Description of Artificial Sequence: Synthetic peptide
AVTPLPL

SEQ ID NO: 832 - protein, 7 aa, Artificial Sequence
  Description of Artificial Sequence: Synthetic peptide
AVTSGFR

SEQ ID NO: 833 - protein, 7 aa, Artificial Sequence
  Description of Artificial Sequence: Synthetic peptide
AVTVNAY

SEQ ID NO: 834 - protein, 7 aa, Artificial Sequence
  Description of Artificial Sequence: Synthetic peptide
AVVGAIL

SEQ ID NO: 835 - protein, 7 aa, Artificial Sequence
  Description of Artificial Sequence: Synthetic peptide
AVVRNQS

SEQ ID NO: 836 - protein, 7 aa, Artificial Sequence
  Description of Artificial Sequence: Synthetic peptide
AVYNDVC

SEQ ID NO: 837 - protein, 7 aa, Artificial Sequence
  Description of Artificial Sequence: Synthetic peptide
AVYSSEP

SEQ ID NO: 838 - protein, 7 aa, Artificial Sequence
  Description of Artificial Sequence: Synthetic peptide
AWNPNEK

SEQ ID NO: 839 - protein, 7 aa, Artificial Sequence
  Description of Artificial Sequence: Synthetic peptide
AWPNSLK

SEQ ID NO: 840 - protein, 7 aa, Artificial Sequence
  Description of Artificial Sequence: Synthetic peptide
AWTQQGP

SEQ ID NO: 841 - protein, 7 aa, Artificial Sequence
  Description of Artificial Sequence: Synthetic peptide
AYAILEA

SEQ ID NO: 842 - protein, 7 aa, Artificial Sequence
  Description of Artificial Sequence: Synthetic peptide
AYAKAIA

SEQ ID NO: 843 - protein, 7 aa, Artificial Sequence
  Description of Artificial Sequence: Synthetic peptide
AYDKSLV

SEQ ID NO: 844 - protein, 7 aa, Artificial Sequence
  Description of Artificial Sequence: Synthetic peptide
AYDRAFS

SEQ ID NO: 845 - protein, 7 aa, Artificial Sequence
  Description of Artificial Sequence: Synthetic peptide
AYDSAPY

SEQ ID NO: 846 - protein, 7 aa, Artificial Sequence
  Description of Artificial Sequence: Synthetic peptide
AYDSRAA

SEQ ID NO: 847 - protein, 7 aa, Artificial Sequence
  Description of Artificial Sequence: Synthetic peptide
AYEARTH

SEQ ID NO: 848 - protein, 7 aa, Artificial Sequence
  Description of Artificial Sequence: Synthetic peptide
AYEGTLS

SEQ ID NO: 849 - protein, 7 aa, Artificial Sequence
  Description of Artificial Sequence: Synthetic peptide
AYEPISK

SEQ ID NO: 850 - protein, 7 aa, Artificial Sequence
  Description of Artificial Sequence: Synthetic peptide
AYFEVQP

SEQ ID NO: 851 - protein, 7 aa, Artificial Sequence
  Description of Artificial Sequence: Synthetic peptide
AYGGPSA

SEQ ID NO: 852 - protein, 7 aa, Artificial Sequence
  Description of Artificial Sequence: Synthetic peptide
AYGVTEK

SEQ ID NO: 853 - protein, 7 aa, Artificial Sequence
  Description of Artificial Sequence: Synthetic peptide
AYHEKGA

SEQ ID NO: 854 - protein, 7 aa, Artificial Sequence
  Description of Artificial Sequence: Synthetic peptide
AYHRADA

SEQ ID NO: 855 - protein, 7 aa, Artificial Sequence
  Description of Artificial Sequence: Synthetic peptide
AYHVRVD

SEQ ID NO: 856 - protein, 7 aa, Artificial Sequence
  Description of Artificial Sequence: Synthetic peptide
AYIQGSL

SEQ ID NO: 857 - protein, 7 aa, Artificial Sequence
  Description of Artificial Sequence: Synthetic peptide
AYKQQMS

SEQ ID NO: 858 - protein, 7 aa, Artificial Sequence
  Description of Artificial Sequence: Synthetic peptide
AYMPSAY

SEQ ID NO: 859 - protein, 7 aa, Artificial Sequence
  Description of Artificial Sequence: Synthetic peptide
AYNGTRP

SEQ ID NO: 860 - protein, 7 aa, Artificial Sequence
  Description of Artificial Sequence: Synthetic peptide
AYNQPGA

SEQ ID NO: 861 - protein, 7 aa, Artificial Sequence
  Description of Artificial Sequence: Synthetic peptide
AYNTTKQ

SEQ ID NO: 862 - protein, 7 aa, Artificial Sequence
  Description of Artificial Sequence: Synthetic peptide
AYPFKEH

SEQ ID NO: 863 - protein, 7 aa, Artificial Sequence
  Description of Artificial Sequence: Synthetic peptide
AYPRESG

SEQ ID NO: 864 - protein, 7 aa, Artificial Sequence
  Description of Artificial Sequence: Synthetic peptide
AYPSNAS

SEQ ID NO: 865 - protein, 7 aa, Artificial Sequence
  Description of Artificial Sequence: Synthetic peptide
AYPSSQF

SEQ ID NO: 866 - protein, 7 aa, Artificial Sequence
  Description of Artificial Sequence: Synthetic peptide
AYPTSFA

SEQ ID NO: 867 - protein, 7 aa, Artificial Sequence
  Description of Artificial Sequence: Synthetic peptide
AYRASSE

SEQ ID NO: 868 - protein, 7 aa, Artificial Sequence
  Description of Artificial Sequence: Synthetic peptide
AYRDSTT

SEQ ID NO: 869 - protein, 7 aa, Artificial Sequence
  Description of Artificial Sequence: Synthetic peptide
AYRGSTT

SEQ ID NO: 870 - protein, 7 aa, Artificial Sequence
  Description of Artificial Sequence: Synthetic peptide
AYSDSQR

SEQ ID NO: 871 - protein, 7 aa, Artificial Sequence
  Description of Artificial Sequence: Synthetic peptide
AYSKSAD

SEQ ID NO: 872 - protein, 7 aa, Artificial Sequence
  Description of Artificial Sequence: Synthetic peptide
AYSNRTM

SEQ ID NO: 873 - protein, 7 aa, Artificial Sequence
  Description of Artificial Sequence: Synthetic peptide
AYSPTRN

SEQ ID NO: 874 - protein, 7 aa, Artificial Sequence
  Description of Artificial Sequence: Synthetic peptide
AYVGTTP

SEQ ID NO: 875 - protein, 7 aa, Artificial Sequence
  Description of Artificial Sequence: Synthetic peptide
AYVNTPP

SEQ ID NO: 876 - protein, 7 aa, Artificial Sequence
  Description of Artificial Sequence: Synthetic peptide
AYVTPSS

SEQ ID NO: 877 - protein, 7 aa, Artificial Sequence
  Description of Artificial Sequence: Synthetic peptide
CAARSTA

SEQ ID NO: 878 - protein, 7 aa, Artificial Sequence
  Description of Artificial Sequence: Synthetic peptide
CAASQSE

SEQ ID NO: 879 - protein, 7 aa, Artificial Sequence
  Description of Artificial Sequence: Synthetic peptide
CAKTTAN

SEQ ID NO: 880 - protein, 7 aa, Artificial Sequence
  Description of Artificial Sequence: Synthetic peptide
CALGASY

SEQ ID NO: 881 - protein, 7 aa, Artificial Sequence
  Description of Artificial Sequence: Synthetic peptide
CAPLRPL

SEQ ID NO: 882 - protein, 7 aa, Artificial Sequence
  Description of Artificial Sequence: Synthetic peptide
CARDTHP

SEQ ID NO: 883 - protein, 7 aa, Artificial Sequence
  Description of Artificial Sequence: Synthetic peptide
CARMKEV

SEQ ID NO: 884 - protein, 7 aa, Artificial Sequence
  Description of Artificial Sequence: Synthetic peptide
CARSFEV

SEQ ID NO: 885 - protein, 7 aa, Artificial Sequence
  Description of Artificial Sequence: Synthetic peptide
CAVFQTG

SEQ ID NO: 886 - protein, 7 aa, Artificial Sequence
  Description of Artificial Sequence: Synthetic peptide
CAVGVRS

SEQ ID NO: 887 - protein, 7 aa, Artificial Sequence
  Description of Artificial Sequence: Synthetic peptide
CCAPGLS

SEQ ID NO: 888 - protein, 7 aa, Artificial Sequence
  Description of Artificial Sequence: Synthetic peptide
CDALNLA

SEQ ID NO: 889 - protein, 7 aa, Artificial Sequence
  Description of Artificial Sequence: Synthetic peptide
CDSSNSS

SEQ ID NO: 890 - protein, 7 aa, Artificial Sequence
  Description of Artificial Sequence: Synthetic peptide
CEASSKV

SEQ ID NO: 891 - protein, 7 aa, Artificial Sequence
  Description of Artificial Sequence: Synthetic peptide
CEKLVRV

SEQ ID NO: 892 - protein, 7 aa, Artificial Sequence
  Description of Artificial Sequence: Synthetic peptide
CEMEATL

SEQ ID NO: 893 - protein, 7 aa, Artificial Sequence
  Description of Artificial Sequence: Synthetic peptide
CEPCQEL

SEQ ID NO: 894 - protein, 7 aa, Artificial Sequence
  Description of Artificial Sequence: Synthetic peptide
CEPYERS

SEQ ID NO: 895 - protein, 7 aa, Artificial Sequence
  Description of Artificial Sequence: Synthetic peptide
CETITLA

SEQ ID NO: 896 - protein, 7 aa, Artificial Sequence
  Description of Artificial Sequence: Synthetic peptide
CETWQMH

SEQ ID NO: 897 - protein, 7 aa, Artificial Sequence
  Description of Artificial Sequence: Synthetic peptide
CEVEKKE

SEQ ID NO: 898 - protein, 7 aa, Artificial Sequence
  Description of Artificial Sequence: Synthetic peptide
CEVGAPS

SEQ ID NO: 899 - protein, 7 aa, Artificial Sequence
  Description of Artificial Sequence: Synthetic peptide
CFPKTVS

SEQ ID NO: 900 - protein, 7 aa, Artificial Sequence
  Description of Artificial Sequence: Synthetic peptide
CFTSERG

SEQ ID NO: 901 - protein, 7 aa, Artificial Sequence
  Description of Artificial Sequence: Synthetic peptide
CGLVICD

SEQ ID NO: 902 - protein, 7 aa, Artificial Sequence
  Description of Artificial Sequence: Synthetic peptide
CGMRQSS

SEQ ID NO: 903 - protein, 7 aa, Artificial Sequence
  Description of Artificial Sequence: Synthetic peptide
CGNHEAS

SEQ ID NO: 904 - protein, 7 aa, Artificial Sequence
  Description of Artificial Sequence: Synthetic peptide
CGSFITH

SEQ ID NO: 905 - protein, 7 aa, Artificial Sequence
  Description of Artificial Sequence: Synthetic peptide
CHPKMEF

SEQ ID NO: 906 - protein, 7 aa, Artificial Sequence
  Description of Artificial Sequence: Synthetic peptide
CHTASCS

SEQ ID NO: 907 - protein, 7 aa, Artificial Sequence
  Description of Artificial Sequence: Synthetic peptide
CIARPEC

SEQ ID NO: 908 - protein, 7 aa, Artificial Sequence
  Description of Artificial Sequence: Synthetic peptide
CIQSSLH

SEQ ID NO: 909 - protein, 7 aa, Artificial Sequence
  Description of Artificial Sequence: Synthetic peptide
CIVVETV

SEQ ID NO: 910 - protein, 7 aa, Artificial Sequence
  Description of Artificial Sequence: Synthetic peptide
CKEVPRA

SEQ ID NO: 911 - protein, 7 aa, Artificial Sequence
  Description of Artificial Sequence: Synthetic peptide
CKGTHNY

SEQ ID NO: 912 - protein, 7 aa, Artificial Sequence
  Description of Artificial Sequence: Synthetic peptide
CKHGTPM

SEQ ID NO: 913 - protein, 7 aa, Artificial Sequence
  Description of Artificial Sequence: Synthetic peptide
CKSNSTC

SEQ ID NO: 914 - protein, 7 aa, Artificial Sequence
  Description of Artificial Sequence: Synthetic peptide
CKSSIGS

SEQ ID NO: 915 - protein, 7 aa, Artificial Sequence
  Description of Artificial Sequence: Synthetic peptide
CLEDCMR

SEQ ID NO: 916 - protein, 7 aa, Artificial Sequence
  Description of Artificial Sequence: Synthetic peptide
CLEIPIS

SEQ ID NO: 917 - protein, 7 aa, Artificial Sequence
  Description of Artificial Sequence: Synthetic peptide
CLESDRP

SEQ ID NO: 918 - protein, 7 aa, Artificial Sequence
  Description of Artificial Sequence: Synthetic peptide
CLGTHML

SEQ ID NO: 919 - protein, 7 aa, Artificial Sequence
  Description of Artificial Sequence: Synthetic peptide
CLPADSE

SEQ ID NO: 920 - protein, 7 aa, Artificial Sequence
  Description of Artificial Sequence: Synthetic peptide
CLQTGLT

SEQ ID NO: 921 - protein, 7 aa, Artificial Sequence
  Description of Artificial Sequence: Synthetic peptide
CLRTSVP

SEQ ID NO: 922 - protein, 7 aa, Artificial Sequence
  Description of Artificial Sequence: Synthetic peptide
CLSSGSV

SEQ ID NO: 923 - protein, 7 aa, Artificial Sequence
  Description of Artificial Sequence: Synthetic peptide
CMAELMD

SEQ ID NO: 924 - protein, 7 aa, Artificial Sequence
  Description of Artificial Sequence: Synthetic peptide
CMAELRD

SEQ ID NO: 925 - protein, 7 aa, Artificial Sequence
  Description of Artificial Sequence: Synthetic peptide
CMPRTCE

SEQ ID NO: 926 - protein, 7 aa, Artificial Sequence
  Description of Artificial Sequence: Synthetic peptide
CMTIPNA

SEQ ID NO: 927 - protein, 7 aa, Artificial Sequence
  Description of Artificial Sequence: Synthetic peptide
CNASCGR

SEQ ID NO: 928 - protein, 7 aa, Artificial Sequence
  Description of Artificial Sequence: Synthetic peptide
CNEITEP

SEQ ID NO: 929 - protein, 7 aa, Artificial Sequence
  Description of Artificial Sequence: Synthetic peptide
CNPKTSS

SEQ ID NO: 930 - protein, 7 aa, Artificial Sequence
  Description of Artificial Sequence: Synthetic peptide
CNSSSCT

SEQ ID NO: 931 - protein, 7 aa, Artificial Sequence
  Description of Artificial Sequence: Synthetic peptide
CPAENQL

SEQ ID NO: 932 - protein, 7 aa, Artificial Sequence
  Description of Artificial Sequence: Synthetic peptide
CPAKSCG

SEQ ID NO: 933 - protein, 7 aa, Artificial Sequence
  Description of Artificial Sequence: Synthetic peptide
CPDRYQC

SEQ ID NO: 934 - protein, 7 aa, Artificial Sequence
  Description of Artificial Sequence: Synthetic peptide
CPLAPYS

SEQ ID NO: 935 - protein, 7 aa, Artificial Sequence
  Description of Artificial Sequence: Synthetic peptide
CPLDSTI

SEQ ID NO: 936 - protein, 7 aa, Artificial Sequence
  Description of Artificial Sequence: Synthetic peptide
CPLGDRH

SEQ ID NO: 937 - protein, 7 aa, Artificial Sequence
  Description of Artificial Sequence: Synthetic peptide
CPMVCSA

SEQ ID NO: 938 - protein, 7 aa, Artificial Sequence
  Description of Artificial Sequence: Synthetic peptide
CPPQPLP

SEQ ID NO: 939 - protein, 7 aa, Artificial Sequence
  Description of Artificial Sequence: Synthetic peptide
CPRTGLN

SEQ ID NO: 940 - protein, 7 aa, Artificial Sequence
  Description of Artificial Sequence: Synthetic peptide
CPSERMG

SEQ ID NO: 941 - protein, 7 aa, Artificial Sequence
  Description of Artificial Sequence: Synthetic peptide
CPSILHC

SEQ ID NO: 942 - protein, 7 aa, Artificial Sequence
  Description of Artificial Sequence: Synthetic peptide
CPSRAPC

SEQ ID NO: 943 - protein, 7 aa, Artificial Sequence
  Description of Artificial Sequence: Synthetic peptide
CPTPSSC

SEQ ID NO: 944 - protein, 7 aa, Artificial Sequence
  Description of Artificial Sequence: Synthetic peptide
CPTTKSA

SEQ ID NO: 945 - protein, 7 aa, Artificial Sequence
  Description of Artificial Sequence: Synthetic peptide
CQARSCI

SEQ ID NO: 946 - protein, 7 aa, Artificial Sequence
  Description of Artificial Sequence: Synthetic peptide
CRASSSP

SEQ ID NO: 947 - protein, 7 aa, Artificial Sequence
  Description of Artificial Sequence: Synthetic peptide
CRAVERP

SEQ ID NO: 948 - protein, 7 aa, Artificial Sequence
  Description of Artificial Sequence: Synthetic peptide
CRMMNRP

SEQ ID NO: 949 - protein, 7 aa, Artificial Sequence
  Description of Artificial Sequence: Synthetic peptide
CRMNDLV

SEQ ID NO: 950 - protein, 7 aa, Artificial Sequence
  Description of Artificial Sequence: Synthetic peptide
CRRTMDM

SEQ ID NO: 951 - protein, 7 aa, Artificial Sequence
  Description of Artificial Sequence: Synthetic peptide
CRSENKL

SEQ ID NO: 952 - protein, 7 aa, Artificial Sequence
  Description of Artificial Sequence: Synthetic peptide
CRSGGEA

SEQ ID NO: 953 - protein, 7 aa, Artificial Sequence
  Description of Artificial Sequence: Synthetic peptide
CSALHKC

SEQ ID NO: 954 - protein, 7 aa, Artificial Sequence
  Description of Artificial Sequence: Synthetic peptide
CSANFTG

SEQ ID NO: 955 - protein, 7 aa, Artificial Sequence
  Description of Artificial Sequence: Synthetic peptide
CSESLMA

SEQ ID NO: 956 - protein, 7 aa, Artificial Sequence
  Description of Artificial Sequence: Synthetic peptide
CSESSIF

SEQ ID NO: 957 - protein, 7 aa, Artificial Sequence
  Description of Artificial Sequence: Synthetic peptide
CSGTTNC

SEQ ID NO: 958 - protein, 7 aa, Artificial Sequence
  Description of Artificial Sequence: Synthetic peptide
CSPPHFP

SEQ ID NO: 959 - protein, 7 aa, Artificial Sequence
  Description of Artificial Sequence: Synthetic peptide
CSPSGVI

SEQ ID NO: 960 - protein, 7 aa, Artificial Sequence
  Description of Artificial Sequence: Synthetic peptide
CSSRPFA

SEQ ID NO: 961 - protein, 7 aa, Artificial Sequence
  Description of Artificial Sequence: Synthetic peptide
CSSTTKC

SEQ ID NO: 962 - protein, 7 aa, Artificial Sequence
  Description of Artificial Sequence: Synthetic peptide
CTAELPF

SEQ ID NO: 963 - protein, 7 aa, Artificial Sequence
  Description of Artificial Sequence: Synthetic peptide
CTDHPAC

SEQ ID NO: 964 - protein, 7 aa, Artificial Sequence
  Description of Artificial Sequence: Synthetic peptide
CTDSTCL

SEQ ID NO: 965 - protein, 7 aa, Artificial Sequence
  Description of Artificial Sequence: Synthetic peptide
CTGPLCS

SEQ ID NO: 966 - protein, 7 aa, Artificial Sequence
  Description of Artificial Sequence: Synthetic peptide
CTKSICT

SEQ ID NO: 967 - protein, 7 aa, Artificial Sequence
  Description of Artificial Sequence: Synthetic peptide
CTSTKIY

SEQ ID NO: 968 - protein, 7 aa, Artificial Sequence
  Description of Artificial Sequence: Synthetic peptide
CTTDALS

SEQ ID NO: 969 - protein, 7 aa, Artificial Sequence
  Description of Artificial Sequence: Synthetic peptide
CTYTLID

SEQ ID NO: 970 - protein, 7 aa, Artificial Sequence
  Description of Artificial Sequence: Synthetic peptide
CVPDSSK

SEQ ID NO: 971 - protein, 7 aa, Artificial Sequence
  Description of Artificial Sequence: Synthetic peptide
CVRLTTP

SEQ ID NO: 972 - protein, 7 aa, Artificial Sequence
  Description of Artificial Sequence: Synthetic peptide
CVTPEKV

SEQ ID NO: 973 - protein, 7 aa, Artificial Sequence
  Description of Artificial Sequence: Synthetic peptide
CVVNQQG

SEQ ID NO: 974 - protein, 7 aa, Artificial Sequence
  Description of Artificial Sequence: Synthetic peptide
CVVSRQD

SEQ ID NO: 975 - protein, 7 aa, Artificial Sequence
  Description of Artificial Sequence: Synthetic peptide
CYIGTQC

SEQ ID NO: 976 - protein, 7 aa, Artificial Sequence
  Description of Artificial Sequence: Synthetic peptide
CYLSTCT

SEQ ID NO: 977 - protein, 7 aa, Artificial Sequence
  Description of Artificial Sequence: Synthetic peptide
CYNRTEC

SEQ ID NO: 978 - protein, 7 aa, Artificial Sequence
  Description of Artificial Sequence: Synthetic peptide
CYPPENA

SEQ ID NO: 979 - protein, 7 aa, Artificial Sequence
  Description of Artificial Sequence: Synthetic peptide
DAAGTSK

SEQ ID NO: 980 - protein, 7 aa, Artificial Sequence
  Description of Artificial Sequence: Synthetic peptide
DAAKSAY

SEQ ID NO: 981 - protein, 7 aa, Artificial Sequence
  Description of Artificial Sequence: Synthetic peptide
DAATKAT

SEQ ID NO: 982 - protein, 7 aa, Artificial Sequence
  Description of Artificial Sequence: Synthetic peptide
DAERAKP

SEQ ID NO: 983 - protein, 7 aa, Artificial Sequence
  Description of Artificial Sequence: Synthetic peptide
DAEWPMY

SEQ ID NO: 984 - protein, 7 aa, Artificial Sequence
  Description of Artificial Sequence: Synthetic peptide
DAGIGGP

SEQ ID NO: 985 - protein, 7 aa, Artificial Sequence
  Description of Artificial Sequence: Synthetic peptide
DAGNWQP

SEQ ID NO: 986 - protein, 7 aa, Artificial Sequence
  Description of Artificial Sequence: Synthetic peptide
DAGPRAQ

SEQ ID NO: 987 - protein, 7 aa, Artificial Sequence
  Description of Artificial Sequence: Synthetic peptide
DAHNAPR

SEQ ID NO: 988 - protein, 7 aa, Artificial Sequence
  Description of Artificial Sequence: Synthetic peptide
DAHRLVT

SEQ ID NO: 989 - protein, 7 aa, Artificial Sequence
  Description of Artificial Sequence: Synthetic peptide
DAIKAMS

SEQ ID NO: 990 - protein, 7 aa, Artificial Sequence
  Description of Artificial Sequence: Synthetic peptide
DAINMGG

SEQ ID NO: 991 - protein, 7 aa, Artificial Sequence
  Description of Artificial Sequence: Synthetic peptide
DAIPLAS

SEQ ID NO: 992 - protein, 7 aa, Artificial Sequence
  Description of Artificial Sequence: Synthetic peptide
DAKVMVP

SEQ ID NO: 993 - protein, 7 aa, Artificial Sequence
  Description of Artificial Sequence: Synthetic peptide
DALKGAK

SEQ ID NO: 994 - protein, 7 aa, Artificial Sequence
  Description of Artificial Sequence: Synthetic peptide
DAPNSVM

SEQ ID NO: 995 - protein, 7 aa, Artificial Sequence
  Description of Artificial Sequence: Synthetic peptide
DAPPLRT

SEQ ID NO: 996 - protein, 7 aa, Artificial Sequence
  Description of Artificial Sequence: Synthetic peptide
DAPRESL

SEQ ID NO: 997 - protein, 7 aa, Artificial Sequence
  Description of Artificial Sequence: Synthetic peptide
DAPRNAE

SEQ ID NO: 998 - protein, 7 aa, Artificial Sequence
  Description of Artificial Sequence: Synthetic peptide
DAQPSQM

SEQ ID NO: 999 - protein, 7 aa, Artificial Sequence
  Description of Artificial Sequence: Synthetic peptide
DAQYSQR

SEQ ID NO: 1000 - protein, 7 aa, Artificial Sequence
  Description of Artificial Sequence: Synthetic peptide
DARAHPL

SEQ ID NO: 1001 - protein, 7 aa, Artificial Sequence
  Description of Artificial Sequence: Synthetic peptide
DARFSMQ

SEQ ID NO: 1002 - protein, 7 aa, Artificial Sequence
  Description of Artificial Sequence: Synthetic peptide
DARLAPE

SEQ ID NO: 1003 - protein, 7 aa, Artificial Sequence
  Description of Artificial Sequence: Synthetic peptide
DARMLIS

SEQ ID NO: 1004 - protein, 7 aa, Artificial Sequence
  Description of Artificial Sequence: Synthetic peptide
DARRDIV

SEQ ID NO: 1005 - protein, 7 aa, Artificial Sequence
  Description of Artificial Sequence: Synthetic peptide
DARTATF

SEQ ID NO: 1006 - protein, 7 aa, Artificial Sequence
  Description of Artificial Sequence: Synthetic peptide
DARVTRF

SEQ ID NO: 1007 - protein, 7 aa, Artificial Sequence
  Description of Artificial Sequence: Synthetic peptide
DASLMKM

SEQ ID NO: 1008 - protein, 7 aa, Artificial Sequence
  Description of Artificial Sequence: Synthetic peptide
DASPNRE

SEQ ID NO: 1009 - protein, 7 aa, Artificial Sequence
  Description of Artificial Sequence: Synthetic peptide
DASTIKD

SEQ ID NO: 1010 - protein, 7 aa, Artificial Sequence
  Description of Artificial Sequence: Synthetic peptide
DAVADDP

SEQ ID NO: 1011 - protein, 7 aa, Artificial Sequence
  Description of Artificial Sequence: Synthetic peptide
DAVERVS

SEQ ID NO: 1012 - protein, 7 aa, Artificial Sequence
  Description of Artificial Sequence: Synthetic peptide
DAVVERS

SEQ ID NO: 1013 - protein, 7 aa, Artificial Sequence
  Description of Artificial Sequence: Synthetic peptide
DCDTQKT

SEQ ID NO: 1014 - protein, 7 aa, Artificial Sequence
  Description of Artificial Sequence: Synthetic peptide
DCLLSGP

SEQ ID NO: 1015 - protein, 7 aa, Artificial Sequence
  Description of Artificial Sequence: Synthetic peptide
DCPFQKG

SEQ ID NO: 1016 - protein, 7 aa, Artificial Sequence
  Description of Artificial Sequence: Synthetic peptide
DCSFKCS

SEQ ID NO: 1017 - protein, 7 aa, Artificial Sequence
  Description of Artificial Sequence: Synthetic peptide
DDEHRST

SEQ ID NO: 1018 - protein, 7 aa, Artificial Sequence
  Description of Artificial Sequence: Synthetic peptide
DDGHPHL

SEQ ID NO: 1019 - protein, 7 aa, Artificial Sequence
  Description of Artificial Sequence: Synthetic peptide
DDIACDA

SEQ ID NO: 1020 - protein, 7 aa, Artificial Sequence
  Description of Artificial Sequence: Synthetic peptide
DDKERRE

SEQ ID NO: 1021 - protein, 7 aa, Artificial Sequence
  Description of Artificial Sequence: Synthetic peptide
DDMARGR

SEQ ID NO: 1022 - protein, 7 aa, Artificial Sequence
  Description of Artificial Sequence: Synthetic peptide
DDPHSSS

SEQ ID NO: 1023 - protein, 7 aa, Artificial Sequence
  Description of Artificial Sequence: Synthetic peptide
DDPRDGR

SEQ ID NO: 1024 - protein, 7 aa, Artificial Sequence
  Description of Artificial Sequence: Synthetic peptide
DDRRHFV

SEQ ID NO: 1025 - protein, 7 aa, Artificial Sequence
  Description of Artificial Sequence: Synthetic peptide
DDRSFPM

SEQ ID NO: 1026 - protein, 7 aa, Artificial Sequence
  Description of Artificial Sequence: Synthetic peptide
DDSLCQL

SEQ ID NO: 1027 - protein, 7 aa, Artificial Sequence
  Description of Artificial Sequence: Synthetic peptide
DDTRFDD

SEQ ID NO: 1028 - protein, 7 aa, Artificial Sequence
  Description of Artificial Sequence: Synthetic peptide
DDWPKVS

SEQ ID NO: 1029 - protein, 7 aa, Artificial Sequence
  Description of Artificial Sequence: Synthetic peptide
DDYHAPA

SEQ ID NO: 1030 - protein, 7 aa, Artificial Sequence
  Description of Artificial Sequence: Synthetic peptide
DEAKKHH

SEQ ID NO: 1031 - protein, 7 aa, Artificial Sequence
  Description of Artificial Sequence: Synthetic peptide
DEAPHPA

SEQ ID NO: 1032 - protein, 7 aa, Artificial Sequence
  Description of Artificial Sequence: Synthetic peptide
DEDIKRL

SEQ ID NO: 1033 - protein, 7 aa, Artificial Sequence
  Description of Artificial Sequence: Synthetic peptide
DEGKVKR

SEQ ID NO: 1034 - protein, 7 aa, Artificial Sequence
  Description of Artificial Sequence: Synthetic peptide
DEGRHQR

SEQ ID NO: 1035 - protein, 7 aa, Artificial Sequence
  Description of Artificial Sequence: Synthetic peptide
DENETGP

SEQ ID NO: 1036 - protein, 7 aa, Artificial Sequence
  Description of Artificial Sequence: Synthetic peptide
DENVALP

SEQ ID NO: 1037 - protein, 7 aa, Artificial Sequence
  Description of Artificial Sequence: Synthetic peptide
DEPFKKA

SEQ ID NO: 1038 - protein, 7 aa, Artificial Sequence
  Description of Artificial Sequence: Synthetic peptide
DEPGMTS

SEQ ID NO: 1039 - protein, 7 aa, Artificial Sequence
  Description of Artificial Sequence: Synthetic peptide
DEPRHQM

SEQ ID NO: 1040 - protein, 7 aa, Artificial Sequence
  Description of Artificial Sequence: Synthetic peptide
DERGFRS

SEQ ID NO: 1041 - protein, 7 aa, Artificial Sequence
  Description of Artificial Sequence: Synthetic peptide
DERRLDP

SEQ ID NO: 1042 - protein, 7 aa, Artificial Sequence
  Description of Artificial Sequence: Synthetic peptide
DESTMSR

SEQ ID NO: 1043 - protein, 7 aa, Artificial Sequence
  Description of Artificial Sequence: Synthetic peptide
DESYDRN

SEQ ID NO: 1044 - protein, 7 aa, Artificial Sequence
  Description of Artificial Sequence: Synthetic peptide
DEVKKEG

SEQ ID NO: 1045 - protein, 7 aa, Artificial Sequence
  Description of Artificial Sequence: Synthetic peptide
DEWAHAR

SEQ ID NO: 1046 - protein, 7 aa, Artificial Sequence
  Description of Artificial Sequence: Synthetic peptide
DFAGNSD

SEQ ID NO: 1047 - protein, 7 aa, Artificial Sequence
  Description of Artificial Sequence: Synthetic peptide
DFALASP

SEQ ID NO: 1048 - protein, 7 aa, Artificial Sequence
  Description of Artificial Sequence: Synthetic peptide
DFARQHD

SEQ ID NO: 1049 - protein, 7 aa, Artificial Sequence
  Description of Artificial Sequence: Synthetic peptide
DFECIGV

SEQ ID NO: 1050 - protein, 7 aa, Artificial Sequence
  Description of Artificial Sequence: Synthetic peptide
DFENPME

SEQ ID NO: 1051 - protein, 7 aa, Artificial Sequence
  Description of Artificial Sequence: Synthetic peptide
DFGGLAV

SEQ ID NO: 1052 - protein, 7 aa, Artificial Sequence
  Description of Artificial Sequence: Synthetic peptide
DFKAVCC

SEQ ID NO: 1053 - protein, 7 aa, Artificial Sequence
  Description of Artificial Sequence: Synthetic peptide
DFKVVSG

SEQ ID NO: 1054 - protein, 7 aa, Artificial Sequence
  Description of Artificial Sequence: Synthetic peptide
DFPLKPG

SEQ ID NO: 1055 - protein, 7 aa, Artificial Sequence
  Description of Artificial Sequence: Synthetic peptide
DFRKPEQ

SEQ ID NO: 1056 - protein, 7 aa, Artificial Sequence
  Description of Artificial Sequence: Synthetic peptide
DFSLGLL

SEQ ID NO: 1057 - protein, 7 aa, Artificial Sequence
  Description of Artificial Sequence: Synthetic peptide
DFSLNNS

SEQ ID NO: 1058 - protein, 7 aa, Artificial Sequence
  Description of Artificial Sequence: Synthetic peptide
DFSLQDA

SEQ ID NO: 1059 - protein, 7 aa, Artificial Sequence
  Description of Artificial Sequence: Synthetic peptide
DFSRRAD

SEQ ID NO: 1060 - protein, 7 aa, Artificial Sequence
  Description of Artificial Sequence: Synthetic peptide
DFTRADG

SEQ ID NO: 1061 - protein, 7 aa, Artificial Sequence
  Description of Artificial Sequence: Synthetic peptide
DFTVPAG

SEQ ID NO: 1062 - protein, 7 aa, Artificial Sequence
  Description of Artificial Sequence: Synthetic peptide
DFVPLKS

SEQ ID NO: 1063 - protein, 7 aa, Artificial Sequence
  Description of Artificial Sequence: Synthetic peptide
DFVTIPN

SEQ ID NO: 1064 - protein, 7 aa, Artificial Sequence
  Description of Artificial Sequence: Synthetic peptide
DGASGVP

SEQ ID NO: 1065 - protein, 7 aa, Artificial Sequence
  Description of Artificial Sequence: Synthetic peptide
DGGHSVR

SEQ ID NO: 1066 - protein, 7 aa, Artificial Sequence
  Description of Artificial Sequence: Synthetic peptide
DGIRDPR

SEQ ID NO: 1067 - protein, 7 aa, Artificial Sequence
  Description of Artificial Sequence: Synthetic peptide
DGKAKVS

SEQ ID NO: 1068 - protein, 7 aa, Artificial Sequence
  Description of Artificial Sequence: Synthetic peptide
DGKHTDY

SEQ ID NO: 1069 - protein, 7 aa, Artificial Sequence
  Description of Artificial Sequence: Synthetic peptide
DGLRTES

SEQ ID NO: 1070 - protein, 7 aa, Artificial Sequence
  Description of Artificial Sequence: Synthetic peptide
DGLSRLP

SEQ ID NO: 1071 - protein, 7 aa, Artificial Sequence
  Description of Artificial Sequence: Synthetic peptide
DGMLRDR

SEQ ID NO: 1072 - protein, 7 aa, Artificial Sequence
  Description of Artificial Sequence: Synthetic peptide
DGNSYHP

SEQ ID NO: 1073 - protein, 7 aa, Artificial Sequence
  Description of Artificial Sequence: Synthetic peptide
DGNTARG

SEQ ID NO: 1074 - protein, 7 aa, Artificial Sequence
  Description of Artificial Sequence: Synthetic peptide
DGPEEER

SEQ ID NO: 1075 - protein, 7 aa, Artificial Sequence
  Description of Artificial Sequence: Synthetic peptide
DGPGSPN

SEQ ID NO: 1076 - protein, 7 aa, Artificial Sequence
  Description of Artificial Sequence: Synthetic peptide
DGRHLSP

SEQ ID NO: 1077 - protein, 7 aa, Artificial Sequence
  Description of Artificial Sequence: Synthetic peptide
DGRTVAA

SEQ ID NO: 1078 - protein, 7 aa, Artificial Sequence
  Description of Artificial Sequence: Synthetic peptide
DGSFEPY

SEQ ID NO: 1079 - protein, 7 aa, Artificial Sequence
  Description of Artificial Sequence: Synthetic peptide
DGSGTLN

SEQ ID NO: 1080 - protein, 7 aa, Artificial Sequence
  Description of Artificial Sequence: Synthetic peptide
DGSPSWA

SEQ ID NO: 1081 - protein, 7 aa, Artificial Sequence
  Description of Artificial Sequence: Synthetic peptide
DGTDQSQ

SEQ ID NO: 1082 - protein, 7 aa, Artificial Sequence
  Description of Artificial Sequence: Synthetic peptide
DGTRAQW

SEQ ID NO: 1083 - protein, 7 aa, Artificial Sequence
  Description of Artificial Sequence: Synthetic peptide
DGTSLKH

SEQ ID NO: 1084 - protein, 7 aa, Artificial Sequence
  Description of Artificial Sequence: Synthetic peptide
DGTYRNM

SEQ ID NO: 1085 - protein, 7 aa, Artificial Sequence
  Description of Artificial Sequence: Synthetic peptide
DGVTTLS

SEQ ID NO: 1086 - protein, 7 aa, Artificial Sequence
  Description of Artificial Sequence: Synthetic peptide
DHAHRST

SEQ ID NO: 1087 - protein, 7 aa, Artificial Sequence
  Description of Artificial Sequence: Synthetic peptide
DHKSNSR

SEQ ID NO: 1088 - protein, 7 aa, Artificial Sequence
  Description of Artificial Sequence: Synthetic peptide
DHLAQEC

SEQ ID NO: 1089 - protein, 7 aa, Artificial Sequence
  Description of Artificial Sequence: Synthetic peptide
DHLDVNA

SEQ ID NO: 1090 - protein, 7 aa, Artificial Sequence
  Description of Artificial Sequence: Synthetic peptide
DHNHMGS

SEQ ID NO: 1091 - protein, 7 aa, Artificial Sequence
  Description of Artificial Sequence: Synthetic peptide
DHNLRQN

SEQ ID NO: 1092 - protein, 7 aa, Artificial Sequence
  Description of Artificial Sequence: Synthetic peptide
DHPYLSP

SEQ ID NO: 1093 - protein, 7 aa, Artificial Sequence
  Description of Artificial Sequence: Synthetic peptide
DHRTLES

SEQ ID NO: 1094 - protein, 7 aa, Artificial Sequence
  Description of Artificial Sequence: Synthetic peptide
DHSALSS

SEQ ID NO: 1095 - protein, 7 aa, Artificial Sequence
  Description of Artificial Sequence: Synthetic peptide
DHSGKKD

SEQ ID NO: 1096 - protein, 7 aa, Artificial Sequence
  Description of Artificial Sequence: Synthetic peptide
DHSMALR

SEQ ID NO: 1097 - protein, 7 aa, Artificial Sequence
  Description of Artificial Sequence: Synthetic peptide
DHSVPGT

SEQ ID NO: 1098 - protein, 7 aa, Artificial Sequence
  Description of Artificial Sequence: Synthetic peptide
DHTDRDG

SEQ ID NO: 1099 - protein, 7 aa, Artificial Sequence
  Description of Artificial Sequence: Synthetic peptide
DHTPLLS

SEQ ID NO: 1100 - protein, 7 aa, Artificial Sequence
  Description of Artificial Sequence: Synthetic peptide
DHWNGDS

SEQ ID NO: 1101 - protein, 7 aa, Artificial Sequence
  Description of Artificial Sequence: Synthetic peptide
DHYARLP

SEQ ID NO: 1102 - protein, 7 aa, Artificial Sequence
  Description of Artificial Sequence: Synthetic peptide
DIAHPRN

SEQ ID NO: 1103 - protein, 7 aa, Artificial Sequence
  Description of Artificial Sequence: Synthetic peptide
DIAQHET

SEQ ID NO: 1104 - protein, 7 aa, Artificial Sequence
  Description of Artificial Sequence: Synthetic peptide
DIEDTPV

SEQ ID NO: 1105 - protein, 7 aa, Artificial Sequence
  Description of Artificial Sequence: Synthetic peptide
DIHRSSY

SEQ ID NO: 1106 - protein, 7 aa, Artificial Sequence
  Description of Artificial Sequence: Synthetic peptide
DIHSHLY

SEQ ID NO: 1107 - protein, 7 aa, Artificial Sequence
  Description of Artificial Sequence: Synthetic peptide
DINFKAP

SEQ ID NO: 1108 - protein, 7 aa, Artificial Sequence
  Description of Artificial Sequence: Synthetic peptide
DINPTTL

SEQ ID NO: 1109 - protein, 7 aa, Artificial Sequence
  Description of Artificial Sequence: Synthetic peptide
DIPVASK

SEQ ID NO: 1110 - protein, 7 aa, Artificial Sequence
  Description of Artificial Sequence: Synthetic peptide
DIPVTSA

SEQ ID NO: 1111 - protein, 7 aa, Artificial Sequence
  Description of Artificial Sequence: Synthetic peptide
DIRHRLS

SEQ ID NO: 1112 - protein, 7 aa, Artificial Sequence
  Description of Artificial Sequence: Synthetic peptide
DIRRPTP

SEQ ID NO: 1113 - protein, 7 aa, Artificial Sequence
  Description of Artificial Sequence: Synthetic peptide
DIRTGSV

SEQ ID NO: 1114 - protein, 7 aa, Artificial Sequence
  Description of Artificial Sequence: Synthetic peptide
DISLPEA

SEQ ID NO: 1115 - protein, 7 aa, Artificial Sequence
  Description of Artificial Sequence: Synthetic peptide
DISNDQY

SEQ ID NO: 1116 - protein, 7 aa, Artificial Sequence
  Description of Artificial Sequence: Synthetic peptide
DISRPVR

SEQ ID NO: 1117 - protein, 7 aa, Artificial Sequence
  Description of Artificial Sequence: Synthetic peptide
DISRQNS

SEQ ID NO: 1118 - protein, 7 aa, Artificial Sequence
  Description of Artificial Sequence: Synthetic peptide
DITATTA

SEQ ID NO: 1119 - protein, 7 aa, Artificial Sequence
  Description of Artificial Sequence: Synthetic peptide
DITGRVP

SEQ ID NO: 1120 - protein, 7 aa, Artificial Sequence
  Description of Artificial Sequence: Synthetic peptide
DKAVGMI

SEQ ID NO: 1121 - protein, 7 aa, Artificial Sequence
  Description of Artificial Sequence: Synthetic peptide
DKDELMM

SEQ ID NO: 1122 - protein, 7 aa, Artificial Sequence
  Description of Artificial Sequence: Synthetic peptide
DKEVPPM

SEQ ID NO: 1123 - protein, 7 aa, Artificial Sequence
  Description of Artificial Sequence: Synthetic peptide
DKEYAGL

SEQ ID NO: 1124 - protein, 7 aa, Artificial Sequence
  Description of Artificial Sequence: Synthetic peptide
DKGKASP

SEQ ID NO: 1125 - protein, 7 aa, Artificial Sequence
  Description of Artificial Sequence: Synthetic peptide
DKGSLTM

SEQ ID NO: 1126 - protein, 7 aa, Artificial Sequence
  Description of Artificial Sequence: Synthetic peptide
DKIPNFS

SEQ ID NO: 1127 - protein, 7 aa, Artificial Sequence
  Description of Artificial Sequence: Synthetic peptide
DKLHGQA

SEQ ID NO: 1128 - protein, 7 aa, Artificial Sequence
  Description of Artificial Sequence: Synthetic peptide
DKLPGDR

SEQ ID NO: 1129 - protein, 7 aa, Artificial Sequence
  Description of Artificial Sequence: Synthetic peptide
DKLRANN

SEQ ID NO: 1130 - protein, 7 aa, Artificial Sequence
  Description of Artificial Sequence: Synthetic peptide
DKLTPRL

SEQ ID NO: 1131 - protein, 7 aa, Artificial Sequence
  Description of Artificial Sequence: Synthetic peptide
DKMNMPP

SEQ ID NO: 1132 - protein, 7 aa, Artificial Sequence
  Description of Artificial Sequence: Synthetic peptide
DKRDGRL

SEQ ID NO: 1133 - protein, 7 aa, Artificial Sequence
  Description of Artificial Sequence: Synthetic peptide
DKRSGTC

SEQ ID NO: 1134 - protein, 7 aa, Artificial Sequence
  Description of Artificial Sequence: Synthetic peptide
DKSIATN

SEQ ID NO: 1135 - protein, 7 aa, Artificial Sequence
  Description of Artificial Sequence: Synthetic peptide
DKSPMMR

SEQ ID NO: 1136 - protein, 7 aa, Artificial Sequence
  Description of Artificial Sequence: Synthetic peptide
DKSRLYA

SEQ ID NO: 1137 - protein, 7 aa, Artificial Sequence
  Description of Artificial Sequence: Synthetic peptide
DKSRNQM

SEQ ID NO: 1138 - protein, 7 aa, Artificial Sequence
  Description of Artificial Sequence: Synthetic peptide
DKTAVIS

SEQ ID NO: 1139 - protein, 7 aa, Artificial Sequence
  Description of Artificial Sequence: Synthetic peptide
DLALSRG

SEQ ID NO: 1140 - protein, 7 aa, Artificial Sequence
  Description of Artificial Sequence: Synthetic peptide
DLASVPR

SEQ ID NO: 1141 - protein, 7 aa, Artificial Sequence
  Description of Artificial Sequence: Synthetic peptide
DLDPICT

SEQ ID NO: 1142 - protein, 7 aa, Artificial Sequence
  Description of Artificial Sequence: Synthetic peptide
DLDSPHS

SEQ ID NO: 1143 - protein, 7 aa, Artificial Sequence
  Description of Artificial Sequence: Synthetic peptide
DLEHQCP

SEQ ID NO: 1144 - protein, 7 aa, Artificial Sequence
  Description of Artificial Sequence: Synthetic peptide
DLFKIER

SEQ ID NO: 1145 - protein, 7 aa, Artificial Sequence
  Description of Artificial Sequence: Synthetic peptide
DLGGLVH

SEQ ID NO: 1146 - protein, 7 aa, Artificial Sequence
  Description of Artificial Sequence: Synthetic peptide
DLGPDKG

SEQ ID NO: 1147 - protein, 7 aa, Artificial Sequence
  Description of Artificial Sequence: Synthetic peptide
DLHGAMR

SEQ ID NO: 1148 - protein, 7 aa, Artificial Sequence
  Description of Artificial Sequence: Synthetic peptide
DLHIQDP

SEQ ID NO: 1149 - protein, 7 aa, Artificial Sequence
  Description of Artificial Sequence: Synthetic peptide
DLIENRE

SEQ ID NO: 1150 - protein, 7 aa, Artificial Sequence
  Description of Artificial Sequence: Synthetic peptide
DLIERGS

SEQ ID NO: 1151 - protein, 7 aa, Artificial Sequence
  Description of Artificial Sequence: Synthetic peptide
DLIPSRP

SEQ ID NO: 1152 - protein, 7 aa, Artificial Sequence
  Description of Artificial Sequence: Synthetic peptide
DLIVRGL

SEQ ID NO: 1153 - protein, 7 aa, Artificial Sequence
  Description of Artificial Sequence: Synthetic peptide
DLKGGGF

SEQ ID NO: 1154 - protein, 7 aa, Artificial Sequence
  Description of Artificial Sequence: Synthetic peptide
DLKKPDF

SEQ ID NO: 1155 - protein, 7 aa, Artificial Sequence
  Description of Artificial Sequence: Synthetic peptide
DLKLHGP

SEQ ID NO: 1156 - protein, 7 aa, Artificial Sequence
  Description of Artificial Sequence: Synthetic peptide
DLKPSLL

SEQ ID NO: 1157 - protein, 7 aa, Artificial Sequence
  Description of Artificial Sequence: Synthetic peptide
DLKSSER

SEQ ID NO: 1158 - protein, 7 aa, Artificial Sequence
  Description of Artificial Sequence: Synthetic peptide
DLLERPS

SEQ ID NO: 1159 - protein, 7 aa, Artificial Sequence
  Description of Artificial Sequence: Synthetic peptide
DLLETRL

SEQ ID NO: 1160 - protein, 7 aa, Artificial Sequence
  Description of Artificial Sequence: Synthetic peptide
DLLTALA

SEQ ID NO: 1161 - protein, 7 aa, Artificial Sequence
  Description of Artificial Sequence: Synthetic peptide
DLMHTDA

SEQ ID NO: 1162 - protein, 7 aa, Artificial Sequence
  Description of Artificial Sequence: Synthetic peptide
DLMHVSG

SEQ ID NO: 1163 - protein, 7 aa, Artificial Sequence
  Description of Artificial Sequence: Synthetic peptide
DLMIHGL

SEQ ID NO: 1164 - protein, 7 aa, Artificial Sequence
  Description of Artificial Sequence: Synthetic peptide
DLNRGPR

SEQ ID NO: 1165 - protein, 7 aa, Artificial Sequence
  Description of Artificial Sequence: Synthetic peptide
DLNRIEC

SEQ ID NO: 1166 - protein, 7 aa, Artificial Sequence
  Description of Artificial Sequence: Synthetic peptide
DLNTTQH

SEQ ID NO: 1167 - protein, 7 aa, Artificial Sequence
  Description of Artificial Sequence: Synthetic peptide
DLPAVSH

SEQ ID NO: 1168 - protein, 7 aa, Artificial Sequence
  Description of Artificial Sequence: Synthetic peptide
DLPLGNS

SEQ ID NO: 1169 - protein, 7 aa, Artificial Sequence
  Description of Artificial Sequence: Synthetic peptide
DLPLRTT

SEQ ID NO: 1170 - protein, 7 aa, Artificial Sequence
  Description of Artificial Sequence: Synthetic peptide
DLPLTSL

SEQ ID NO: 1171 - protein, 7 aa, Artificial Sequence
  Description of Artificial Sequence: Synthetic peptide
DLPRQSV

SEQ ID NO: 1172 - protein, 7 aa, Artificial Sequence
  Description of Artificial Sequence: Synthetic peptide
DLPYSHP

SEQ ID NO: 1173 - protein, 7 aa, Artificial Sequence
  Description of Artificial Sequence: Synthetic peptide
DLQTGPQ

SEQ ID NO: 1174 - protein, 7 aa, Artificial Sequence
  Description of Artificial Sequence: Synthetic peptide
DLRCAEG

SEQ ID NO: 1175 - protein, 7 aa, Artificial Sequence
  Description of Artificial Sequence: Synthetic peptide
DLREAPR

SEQ ID NO: 1176 - protein, 7 aa, Artificial Sequence
  Description of Artificial Sequence: Synthetic peptide
DLRHASS

SEQ ID NO: 1177 - protein, 7 aa, Artificial Sequence
  Description of Artificial Sequence: Synthetic peptide
DLRHPPS

SEQ ID NO: 1178 - protein, 7 aa, Artificial Sequence
  Description of Artificial Sequence: Synthetic peptide
DLRPGGL

SEQ ID NO: 1179 - protein, 7 aa, Artificial Sequence
  Description of Artificial Sequence: Synthetic peptide
DLRRSML

SEQ ID NO: 1180 - protein, 7 aa, Artificial Sequence
  Description of Artificial Sequence: Synthetic peptide
DLRRTPF

SEQ ID NO: 1181 - protein, 7 aa, Artificial Sequence
  Description of Artificial Sequence: Synthetic peptide
DLSALRG

SEQ ID NO: 1182 - protein, 7 aa, Artificial Sequence
  Description of Artificial Sequence: Synthetic peptide
DLSGLTR

SEQ ID NO: 1183 - protein, 7 aa, Artificial Sequence
  Description of Artificial Sequence: Synthetic peptide
DLTHVGS

SEQ ID NO: 1184 - protein, 7 aa, Artificial Sequence
  Description of Artificial Sequence: Synthetic peptide
DLTRWPS

SEQ ID NO: 1185 - protein, 7 aa, Artificial Sequence
  Description of Artificial Sequence: Synthetic peptide
DLTTAPT

SEQ ID NO: 1186 - protein, 7 aa, Artificial Sequence
  Description of Artificial Sequence: Synthetic peptide
DLTVSYA

SEQ ID NO: 1187 - protein, 7 aa, Artificial Sequence
  Description of Artificial Sequence: Synthetic peptide
DLVETAS

SEQ ID NO: 1188 - protein, 7 aa, Artificial Sequence
  Description of Artificial Sequence: Synthetic peptide
DLVIPTR

SEQ ID NO: 1189 - protein, 7 aa, Artificial Sequence
  Description of Artificial Sequence: Synthetic peptide
DMDMQMA

SEQ ID NO: 1190 - protein, 7 aa, Artificial Sequence
  Description of Artificial Sequence: Synthetic peptide
DMGARQY

SEQ ID NO: 1191 - protein, 7 aa, Artificial Sequence
  Description of Artificial Sequence: Synthetic peptide
DMKPAVS

SEQ ID NO: 1192 - protein, 7 aa, Artificial Sequence
  Description of Artificial Sequence: Synthetic peptide
DMLKKFN

SEQ ID NO: 1193 - protein, 7 aa, Artificial Sequence
  Description of Artificial Sequence: Synthetic peptide
DMPFGPL

SEQ ID NO: 1194 - protein, 7 aa, Artificial Sequence
  Description of Artificial Sequence: Synthetic peptide
DMSARPS

SEQ ID NO: 1195 - protein, 7 aa, Artificial Sequence
  Description of Artificial Sequence: Synthetic peptide
DMSTRGM

SEQ ID NO: 1196 - protein, 7 aa, Artificial Sequence
  Description of Artificial Sequence: Synthetic peptide
DMTTGAV

SEQ ID NO: 1197 - protein, 7 aa, Artificial Sequence
  Description of Artificial Sequence: Synthetic peptide
DMVVPSD

SEQ ID NO: 1198 - protein, 7 aa, Artificial Sequence
  Description of Artificial Sequence: Synthetic peptide
DMYPTNR

SEQ ID NO: 1199 - protein, 7 aa, Artificial Sequence
  Description of Artificial Sequence: Synthetic peptide
DNASKLM

SEQ ID NO: 1200 - protein, 7 aa, Artificial Sequence
  Description of Artificial Sequence: Synthetic peptide
DNELLMS

SEQ ID NO: 1201 - protein, 7 aa, Artificial Sequence
  Description of Artificial Sequence: Synthetic peptide
DNESIPT

SEQ ID NO: 1202 - protein, 7 aa, Artificial Sequence
  Description of Artificial Sequence: Synthetic peptide
DNGSADN

SEQ ID NO: 1203 - protein, 7 aa, Artificial Sequence
  Description of Artificial Sequence: Synthetic peptide
DNLDGLC

SEQ ID NO: 1204 - protein, 7 aa, Artificial Sequence
  Description of Artificial Sequence: Synthetic peptide
DNLLGSR

SEQ ID NO: 1205 - protein, 7 aa, Artificial Sequence
  Description of Artificial Sequence: Synthetic peptide
DNLPTLA

SEQ ID NO: 1206 - protein, 7 aa, Artificial Sequence
  Description of Artificial Sequence: Synthetic peptide
DNLRPRP

SEQ ID NO: 1207 - protein, 7 aa, Artificial Sequence
  Description of Artificial Sequence: Synthetic peptide
DNLSHRM

SEQ ID NO: 1208 - protein, 7 aa, Artificial Sequence
  Description of Artificial Sequence: Synthetic peptide
DNPAMDR

SEQ ID NO: 1209 - protein, 7 aa, Artificial Sequence
  Description of Artificial Sequence: Synthetic peptide
DNPPTGV

SEQ ID NO: 1210 - protein, 7 aa, Artificial Sequence
  Description of Artificial Sequence: Synthetic peptide
DNQAAVP

SEQ ID NO: 1211 - protein, 7 aa, Artificial Sequence
  Description of Artificial Sequence: Synthetic peptide
DNRLNVV

SEQ ID NO: 1212 - protein, 7 aa, Artificial Sequence
  Description of Artificial Sequence: Synthetic peptide
DNRPRLM

SEQ ID NO: 1213 - protein, 7 aa, Artificial Sequence
  Description of Artificial Sequence: Synthetic peptide
DNRVSIP

SEQ ID NO: 1214 - protein, 7 aa, Artificial Sequence
  Description of Artificial Sequence: Synthetic peptide
DNSAFAV

SEQ ID NO: 1215 - protein, 7 aa, Artificial Sequence
  Description of Artificial Sequence: Synthetic peptide
DNTNWAK

SEQ ID NO: 1216 - protein, 7 aa, Artificial Sequence
  Description of Artificial Sequence: Synthetic peptide
DNTTRTA

SEQ ID NO: 1217 - protein, 7 aa, Artificial Sequence
  Description of Artificial Sequence: Synthetic peptide
DNVGIKS

SEQ ID NO: 1218 - protein, 7 aa, Artificial Sequence
  Description of Artificial Sequence: Synthetic peptide
DNYDPRP

SEQ ID NO: 1219 - protein, 7 aa, Artificial Sequence
  Description of Artificial Sequence: Synthetic peptide
DPAATLP

SEQ ID NO: 1220 - protein, 7 aa, Artificial Sequence
  Description of Artificial Sequence: Synthetic peptide
DPALQRA

SEQ ID NO: 1221 - protein, 7 aa, Artificial Sequence
  Description of Artificial Sequence: Synthetic peptide
DPAPTLP

SEQ ID NO: 1222 - protein, 7 aa, Artificial Sequence
  Description of Artificial Sequence: Synthetic peptide
DPCHRSL

SEQ ID NO: 1223 - protein, 7 aa, Artificial Sequence
  Description of Artificial Sequence: Synthetic peptide
DPDPASN

SEQ ID NO: 1224 - protein, 7 aa, Artificial Sequence
  Description of Artificial Sequence: Synthetic peptide
DPDPSLS

SEQ ID NO: 1225 - protein, 7 aa, Artificial Sequence
  Description of Artificial Sequence: Synthetic peptide
DPEVDPD

SEQ ID NO: 1226 - protein, 7 aa, Artificial Sequence
  Description of Artificial Sequence: Synthetic peptide
DPFTHNG

SEQ ID NO: 1227 - protein, 7 aa, Artificial Sequence
  Description of Artificial Sequence: Synthetic peptide
DPGHQRT

SEQ ID NO: 1228 - protein, 7 aa, Artificial Sequence
  Description of Artificial Sequence: Synthetic peptide
DPGLRTD

SEQ ID NO: 1229 - protein, 7 aa, Artificial Sequence
  Description of Artificial Sequence: Synthetic peptide
DPGMVPG

SEQ ID NO: 1230 - protein, 7 aa, Artificial Sequence
  Description of Artificial Sequence: Synthetic peptide
DPHGKYP

SEQ ID NO: 1231 - protein, 7 aa, Artificial Sequence
  Description of Artificial Sequence: Synthetic peptide
DPHLSSP

SEQ ID NO: 1232 - protein, 7 aa, Artificial Sequence
  Description of Artificial Sequence: Synthetic peptide
DPIAAPT

SEQ ID NO: 1233 - protein, 7 aa, Artificial Sequence
  Description of Artificial Sequence: Synthetic peptide
DPLAPMA

SEQ ID NO: 1234 - protein, 7 aa, Artificial Sequence
  Description of Artificial Sequence: Synthetic peptide
DPLYSSR

SEQ ID NO: 1235 - protein, 7 aa, Artificial Sequence
  Description of Artificial Sequence: Synthetic peptide
DPMARVG

SEQ ID NO: 1236 - protein, 7 aa, Artificial Sequence
  Description of Artificial Sequence: Synthetic peptide
DPNLNLA

SEQ ID NO: 1237 - protein, 7 aa, Artificial Sequence
  Description of Artificial Sequence: Synthetic peptide
DPPLMAN

SEQ ID NO: 1238 - protein, 7 aa, Artificial Sequence
  Description of Artificial Sequence: Synthetic peptide
DPPYAVS

SEQ ID NO: 1239 - protein, 7 aa, Artificial Sequence
  Description of Artificial Sequence: Synthetic peptide
DPPYDQR

SEQ ID NO: 1240 - protein, 7 aa, Artificial Sequence
  Description of Artificial Sequence: Synthetic peptide
DPQENHA

SEQ ID NO: 1241 - protein, 7 aa, Artificial Sequence
  Description of Artificial Sequence: Synthetic peptide
DPQRLVI

SEQ ID NO: 1242 - protein, 7 aa, Artificial Sequence
  Description of Artificial Sequence: Synthetic peptide
DPRFTLP

SEQ ID NO: 1243 - protein, 7 aa, Artificial Sequence
  Description of Artificial Sequence: Synthetic peptide
DPRKSSA

SEQ ID NO: 1244 - protein, 7 aa, Artificial Sequence
  Description of Artificial Sequence: Synthetic peptide
DPRLPSY

SEQ ID NO: 1245 - protein, 7 aa, Artificial Sequence
  Description of Artificial Sequence: Synthetic peptide
DPRPLAS

SEQ ID NO: 1246 - protein, 7 aa, Artificial Sequence
  Description of Artificial Sequence: Synthetic peptide
DPRSAVQ

SEQ ID NO: 1247 - protein, 7 aa, Artificial Sequence
  Description of Artificial Sequence: Synthetic peptide
DPRSSLT

SEQ ID NO: 1248 - protein, 7 aa, Artificial Sequence
  Description of Artificial Sequence: Synthetic peptide
DPRTEMV

SEQ ID NO: 1249 - protein, 7 aa, Artificial Sequence
  Description of Artificial Sequence: Synthetic peptide
DPSDDYV

SEQ ID NO: 1250 - protein, 7 aa, Artificial Sequence
  Description of Artificial Sequence: Synthetic peptide
DPSRRPS

SEQ ID NO: 1251 - protein, 7 aa, Artificial Sequence
  Description of Artificial Sequence: Synthetic peptide
DPSSLRL

SEQ ID NO: 1252 - protein, 7 aa, Artificial Sequence
  Description of Artificial Sequence: Synthetic peptide
DPSYDQH

SEQ ID NO: 1253 - protein, 7 aa, Artificial Sequence
  Description of Artificial Sequence: Synthetic peptide
DPTFSSE

SEQ ID NO: 1254 - protein, 7 aa, Artificial Sequence
  Description of Artificial Sequence: Synthetic peptide
DPTHRIV

SEQ ID NO: 1255 - protein, 7 aa, Artificial Sequence
  Description of Artificial Sequence: Synthetic peptide
DPTLHRP

SEQ ID NO: 1256 - protein, 7 aa, Artificial Sequence
  Description of Artificial Sequence: Synthetic peptide
DPTYRGG

SEQ ID NO: 1257 - protein, 7 aa, Artificial Sequence
  Description of Artificial Sequence: Synthetic peptide
DPVGRSL

SEQ ID NO: 1258 - protein, 7 aa, Artificial Sequence
  Description of Artificial Sequence: Synthetic peptide
DPVIRAA

SEQ ID NO: 1259 - protein, 7 aa, Artificial Sequence
  Description of Artificial Sequence: Synthetic peptide
DPVMPRR

SEQ ID NO: 1260 - protein, 7 aa, Artificial Sequence
  Description of Artificial Sequence: Synthetic peptide
DPVSSRA

SEQ ID NO: 1261 - protein, 7 aa, Artificial Sequence
  Description of Artificial Sequence: Synthetic peptide
DQAMSRN

SEQ ID NO: 1262 - protein, 7 aa, Artificial Sequence
  Description of Artificial Sequence: Synthetic peptide
DQDKSAS

SEQ ID NO: 1263 - protein, 7 aa, Artificial Sequence
  Description of Artificial Sequence: Synthetic peptide
DQDQGRA

SEQ ID NO: 1264 - protein, 7 aa, Artificial Sequence
  Description of Artificial Sequence: Synthetic peptide
DQFHPRP

SEQ ID NO: 1265 - protein, 7 aa, Artificial Sequence
  Description of Artificial Sequence: Synthetic peptide
DQLNPRG

SEQ ID NO: 1266 - protein, 7 aa, Artificial Sequence
  Description of Artificial Sequence: Synthetic peptide
DQLRSAT

SEQ ID NO: 1267 - protein, 7 aa, Artificial Sequence
  Description of Artificial Sequence: Synthetic peptide
DQPAYNA

SEQ ID NO: 1268 - protein, 7 aa, Artificial Sequence
  Description of Artificial Sequence: Synthetic peptide
DQQFEMG

SEQ ID NO: 1269 - protein, 7 aa, Artificial Sequence
  Description of Artificial Sequence: Synthetic peptide
DQQSFTR

SEQ ID NO: 1270 - protein, 7 aa, Artificial Sequence
  Description of Artificial Sequence: Synthetic peptide
DQRASSP

SEQ ID NO: 1271 - protein, 7 aa, Artificial Sequence
  Description of Artificial Sequence: Synthetic peptide
DQRLQMI

SEQ ID NO: 1272 - protein, 7 aa, Artificial Sequence
  Description of Artificial Sequence: Synthetic peptide
DQSGTVS

SEQ ID NO: 1273 - protein, 7 aa, Artificial Sequence
  Description of Artificial Sequence: Synthetic peptide
DQSPGMK

SEQ ID NO: 1274 - protein, 7 aa, Artificial Sequence
  Description of Artificial Sequence: Synthetic peptide
DRALSMG

SEQ ID NO: 1275 - protein, 7 aa, Artificial Sequence
  Description of Artificial Sequence: Synthetic peptide
DRDTSSF

SEQ ID NO: 1276 - protein, 7 aa, Artificial Sequence
  Description of Artificial Sequence: Synthetic peptide
DRERPYS

SEQ ID NO: 1277 - protein, 7 aa, Artificial Sequence
  Description of Artificial Sequence: Synthetic peptide
DRFNSYA

SEQ ID NO: 1278 - protein, 7 aa, Artificial Sequence
  Description of Artificial Sequence: Synthetic peptide
DRGCKDT

SEQ ID NO: 1279 - protein, 7 aa, Artificial Sequence
  Description of Artificial Sequence: Synthetic peptide
DRGGFND

SEQ ID NO: 1280 - protein, 7 aa, Artificial Sequence
  Description of Artificial Sequence: Synthetic peptide
DRGLRTA

SEQ ID NO: 1281 - protein, 7 aa, Artificial Sequence
  Description of Artificial Sequence: Synthetic peptide
DRGNGPR

SEQ ID NO: 1282 - protein, 7 aa, Artificial Sequence
  Description of Artificial Sequence: Synthetic peptide
DRGSDLS

SEQ ID NO: 1283 - protein, 7 aa, Artificial Sequence
  Description of Artificial Sequence: Synthetic peptide
DRGSLAR

SEQ ID NO: 1284 - protein, 7 aa, Artificial Sequence
  Description of Artificial Sequence: Synthetic peptide
DRIETQP

SEQ ID NO: 1285 - protein, 7 aa, Artificial Sequence
  Description of Artificial Sequence: Synthetic peptide
DRIMQEH

SEQ ID NO: 1286 - protein, 7 aa, Artificial Sequence
  Description of Artificial Sequence: Synthetic peptide
DRIQTAP

SEQ ID NO: 1287 - protein, 7 aa, Artificial Sequence
  Description of Artificial Sequence: Synthetic peptide
DRKKLNE

SEQ ID NO: 1288 - protein, 7 aa, Artificial Sequence
  Description of Artificial Sequence: Synthetic peptide
DRKLVTP

SEQ ID NO: 1289 - protein, 7 aa, Artificial Sequence
  Description of Artificial Sequence: Synthetic peptide
DRLATMS

SEQ ID NO: 1290 - protein, 7 aa, Artificial Sequence
  Description of Artificial Sequence: Synthetic peptide
DRLNQRG

SEQ ID NO: 1291 - protein, 7 aa, Artificial Sequence
  Description of Artificial Sequence: Synthetic peptide
DRMTNAV

SEQ ID NO: 1292 - protein, 7 aa, Artificial Sequence
  Description of Artificial Sequence: Synthetic peptide
DRNLVTR

SEQ ID NO: 1293 - protein, 7 aa, Artificial Sequence
  Description of Artificial Sequence: Synthetic peptide
DRNVKHV

SEQ ID NO: 1294 - protein, 7 aa, Artificial Sequence
  Description of Artificial Sequence: Synthetic peptide
DRPFEAP

SEQ ID NO: 1295 - protein, 7 aa, Artificial Sequence
  Description of Artificial Sequence: Synthetic peptide
DRPGGKP

SEQ ID NO: 1296 - protein, 7 aa, Artificial Sequence
  Description of Artificial Sequence: Synthetic peptide
DRPLHVV

SEQ ID NO: 1297 - protein, 7 aa, Artificial Sequence
  Description of Artificial Sequence: Synthetic peptide
DRPPCSR

SEQ ID NO: 1298 - protein, 7 aa, Artificial Sequence
  Description of Artificial Sequence: Synthetic peptide
DRPSSPL

SEQ ID NO: 1299 - protein, 7 aa, Artificial Sequence
  Description of Artificial Sequence: Synthetic peptide
DRQRPLS

SEQ ID NO: 1300 - protein, 7 aa, Artificial Sequence
  Description of Artificial Sequence: Synthetic peptide
DRQTLTR

SEQ ID NO: 1301 - protein, 7 aa, Artificial Sequence
  Description of Artificial Sequence: Synthetic peptide
DRRMGVA

SEQ ID NO: 1302 - protein, 7 aa, Artificial Sequence
  Description of Artificial Sequence: Synthetic peptide
DRRPAHD

SEQ ID NO: 1303 - protein, 7 aa, Artificial Sequence
  Description of Artificial Sequence: Synthetic peptide
DRRSEER

SEQ ID NO: 1304 - protein, 7 aa, Artificial Sequence
  Description of Artificial Sequence: Synthetic peptide
DRSAAII

SEQ ID NO: 1305 - protein, 7 aa, Artificial Sequence
  Description of Artificial Sequence: Synthetic peptide
DRSGPNE

SEQ ID NO: 1306 - protein, 7 aa, Artificial Sequence
  Description of Artificial Sequence: Synthetic peptide
DRSIALR

SEQ ID NO: 1307 - protein, 7 aa, Artificial Sequence
  Description of Artificial Sequence: Synthetic peptide
DRSLAFA

SEQ ID NO: 1308 - protein, 7 aa, Artificial Sequence
  Description of Artificial Sequence: Synthetic peptide
DRSLRSL

SEQ ID NO: 1309 - protein, 7 aa, Artificial Sequence
  Description of Artificial Sequence: Synthetic peptide
DRSNAGH

SEQ ID NO: 1310 - protein, 7 aa, Artificial Sequence
  Description of Artificial Sequence: Synthetic peptide
DRSQLTA

SEQ ID NO: 1311 - protein, 7 aa, Artificial Sequence
  Description of Artificial Sequence: Synthetic peptide
DRSQVLH

SEQ ID NO: 1312 - protein, 7 aa, Artificial Sequence
  Description of Artificial Sequence: Synthetic peptide
DRSVVLN

SEQ ID NO: 1313 - protein, 7 aa, Artificial Sequence
  Description of Artificial Sequence: Synthetic peptide
DRTARAP

SEQ ID NO: 1314 - protein, 7 aa, Artificial Sequence
  Description of Artificial Sequence: Synthetic peptide
DRTKSST

SEQ ID NO: 1315 - protein, 7 aa, Artificial Sequence
  Description of Artificial Sequence: Synthetic peptide
DRTTVPP

SEQ ID NO: 1316 - protein, 7 aa, Artificial Sequence
  Description of Artificial Sequence: Synthetic peptide
DRTVSLL

SEQ ID NO: 1317 - protein, 7 aa, Artificial Sequence
  Description of Artificial Sequence: Synthetic peptide
DRVHSSS

SEQ ID NO: 1318 - protein, 7 aa, Artificial Sequence
  Description of Artificial Sequence: Synthetic peptide
DRVSTSK

SEQ ID NO: 1319 - protein, 7 aa, Artificial Sequence
  Description of Artificial Sequence: Synthetic peptide
DRVTPEP

SEQ ID NO: 1320 - protein, 7 aa, Artificial Sequence
  Description of Artificial Sequence: Synthetic peptide
DRWTSSS

SEQ ID NO: 1321 - protein, 7 aa, Artificial Sequence
  Description of Artificial Sequence: Synthetic peptide
DSAPVAH

SEQ ID NO: 1322 - protein, 7 aa, Artificial Sequence
  Description of Artificial Sequence: Synthetic peptide
DSARSAI

SEQ ID NO: 1323 - protein, 7 aa, Artificial Sequence
  Description of Artificial Sequence: Synthetic peptide
DSDMMGE

SEQ ID NO: 1324 - protein, 7 aa, Artificial Sequence
  Description of Artificial Sequence: Synthetic peptide
DSDRDSK

SEQ ID NO: 1325 - protein, 7 aa, Artificial Sequence
  Description of Artificial Sequence: Synthetic peptide
DSDRLSA

SEQ ID NO: 1326 - protein, 7 aa, Artificial Sequence
  Description of Artificial Sequence: Synthetic peptide
DSEKTIP

SEQ ID NO: 1327 - protein, 7 aa, Artificial Sequence
  Description of Artificial Sequence: Synthetic peptide
DSEVPMY

SEQ ID NO: 1328 - protein, 7 aa, Artificial Sequence
  Description of Artificial Sequence: Synthetic peptide
DSEVSHP

SEQ ID NO: 1329 - protein, 7 aa, Artificial Sequence
  Description of Artificial Sequence: Synthetic peptide
DSFGRPQ

SEQ ID NO: 1330 - protein, 7 aa, Artificial Sequence
  Description of Artificial Sequence: Synthetic peptide
DSGASLG

SEQ ID NO: 1331 - protein, 7 aa, Artificial Sequence
  Description of Artificial Sequence: Synthetic peptide
DSGDPAR

SEQ ID NO: 1332 - protein, 7 aa, Artificial Sequence
  Description of Artificial Sequence: Synthetic peptide
DSGIGYP

SEQ ID NO: 1333 - protein, 7 aa, Artificial Sequence
  Description of Artificial Sequence: Synthetic peptide
DSGSNGL

SEQ ID NO: 1334 - protein, 7 aa, Artificial Sequence
  Description of Artificial Sequence: Synthetic peptide
DSHYRVP

SEQ ID NO: 1335 - protein, 7 aa, Artificial Sequence
  Description of Artificial Sequence: Synthetic peptide
DSIDPKF

SEQ ID NO: 1336 - protein, 7 aa, Artificial Sequence
  Description of Artificial Sequence: Synthetic peptide
DSIGPGT

SEQ ID NO: 1337 - protein, 7 aa, Artificial Sequence
  Description of Artificial Sequence: Synthetic peptide
DSIHIMA

SEQ ID NO: 1338 - protein, 7 aa, Artificial Sequence
  Description of Artificial Sequence: Synthetic peptide
DSISSRA

SEQ ID NO: 1339 - protein, 7 aa, Artificial Sequence
  Description of Artificial Sequence: Synthetic peptide
DSITRAS

SEQ ID NO: 1340 - protein, 7 aa, Artificial Sequence
  Description of Artificial Sequence: Synthetic peptide
DSITTRI

SEQ ID NO: 1341 - protein, 7 aa, Artificial Sequence
  Description of Artificial Sequence: Synthetic peptide
DSKRTIT

SEQ ID NO: 1342 - protein, 7 aa, Artificial Sequence
  Description of Artificial Sequence: Synthetic peptide
DSLASRP

SEQ ID NO: 1343 - protein, 7 aa, Artificial Sequence
  Description of Artificial Sequence: Synthetic peptide
DSLGKRS

SEQ ID NO: 1344 - protein, 7 aa, Artificial Sequence
  Description of Artificial Sequence: Synthetic peptide
DSLKLSS

SEQ ID NO: 1345 - protein, 7 aa, Artificial Sequence
  Description of Artificial Sequence: Synthetic peptide
DSMELYS

SEQ ID NO: 1346 - protein, 7 aa, Artificial Sequence
  Description of Artificial Sequence: Synthetic peptide
DSMGASG

SEQ ID NO: 1347 - protein, 7 aa, Artificial Sequence
  Description of Artificial Sequence: Synthetic peptide
DSNIPPR

SEQ ID NO: 1348 - protein, 7 aa, Artificial Sequence
  Description of Artificial Sequence: Synthetic peptide
DSNNEKS

SEQ ID NO: 1349 - protein, 7 aa, Artificial Sequence
  Description of Artificial Sequence: Synthetic peptide
DSNPSLS

SEQ ID NO: 1350 - protein, 7 aa, Artificial Sequence
  Description of Artificial Sequence: Synthetic peptide
DSNRLVD

SEQ ID NO: 1351 - protein, 7 aa, Artificial Sequence
  Description of Artificial Sequence: Synthetic peptide
DSPKYSH

SEQ ID NO: 1352 - protein, 7 aa, Artificial Sequence
  Description of Artificial Sequence: Synthetic peptide
DSPSFVL

SEQ ID NO: 1353 - protein, 7 aa, Artificial Sequence
  Description of Artificial Sequence: Synthetic peptide
DSQIYVS

SEQ ID NO: 1354 - protein, 7 aa, Artificial Sequence
  Description of Artificial Sequence: Synthetic peptide
DSQLNAP

SEQ ID NO: 1355 - protein, 7 aa, Artificial Sequence
  Description of Artificial Sequence: Synthetic peptide
DSQMRTM

SEQ ID NO: 1356 - protein, 7 aa, Artificial Sequence
  Description of Artificial Sequence: Synthetic peptide
DSRIAAL

SEQ ID NO: 1357 - protein, 7 aa, Artificial Sequence
  Description of Artificial Sequence: Synthetic peptide
DSRLLSG

SEQ ID NO: 1358 - protein, 7 aa, Artificial Sequence
  Description of Artificial Sequence: Synthetic peptide
DSRMAAS

SEQ ID NO: 1359 - protein, 7 aa, Artificial Sequence
  Description of Artificial Sequence: Synthetic peptide
DSRNAVT

SEQ ID NO: 1360 - protein, 7 aa, Artificial Sequence
  Description of Artificial Sequence: Synthetic peptide
DSRPLSV

SEQ ID NO: 1361 - protein, 7 aa, Artificial Sequence
  Description of Artificial Sequence: Synthetic peptide
DSRQGRV

SEQ ID NO: 1362 - protein, 7 aa, Artificial Sequence
  Description of Artificial Sequence: Synthetic peptide
DSRSLRA

SEQ ID NO: 1363 - protein, 7 aa, Artificial Sequence
  Description of Artificial Sequence: Synthetic peptide
DSSAKES

SEQ ID NO: 1364 - protein, 7 aa, Artificial Sequence
  Description of Artificial Sequence: Synthetic peptide
DSSEYSP

SEQ ID NO: 1365 - protein, 7 aa, Artificial Sequence
  Description of Artificial Sequence: Synthetic peptide
DSSHTLQ

SEQ ID NO: 1366 - protein, 7 aa, Artificial Sequence
  Description of Artificial Sequence: Synthetic peptide
DSSHTMM

SEQ ID NO: 1367 - protein, 7 aa, Artificial Sequence
  Description of Artificial Sequence: Synthetic peptide
DSSHYPG

SEQ ID NO: 1368 - protein, 7 aa, Artificial Sequence
  Description of Artificial Sequence: Synthetic peptide
DSSPLVR

SEQ ID NO: 1369 - protein, 7 aa, Artificial Sequence
  Description of Artificial Sequence: Synthetic peptide
DSTPEEG

SEQ ID NO: 1370 - protein, 7 aa, Artificial Sequence
  Description of Artificial Sequence: Synthetic peptide
DSTQFPR

SEQ ID NO: 1371 - protein, 7 aa, Artificial Sequence
  Description of Artificial Sequence: Synthetic peptide
DSVHLGR

SEQ ID NO: 1372 - protein, 7 aa, Artificial Sequence
  Description of Artificial Sequence: Synthetic peptide
DSVKASQ

SEQ ID NO: 1373 - protein, 7 aa, Artificial Sequence
  Description of Artificial Sequence: Synthetic peptide
DTAAKDS

SEQ ID NO: 1374 - protein, 7 aa, Artificial Sequence
  Description of Artificial Sequence: Synthetic peptide
DTASRLA

SEQ ID NO: 1375 - protein, 7 aa, Artificial Sequence
  Description of Artificial Sequence: Synthetic peptide
DTDGQRA

SEQ ID NO: 1376 - protein, 7 aa, Artificial Sequence
  Description of Artificial Sequence: Synthetic peptide
DTHAYDG

SEQ ID NO: 1377 - protein, 7 aa, Artificial Sequence
  Description of Artificial Sequence: Synthetic peptide
DTHIIAS

SEQ ID NO: 1378 - protein, 7 aa, Artificial Sequence
  Description of Artificial Sequence: Synthetic peptide
DTHRSER

SEQ ID NO: 1379 - protein, 7 aa, Artificial Sequence
  Description of Artificial Sequence: Synthetic peptide
DTHVIAS

SEQ ID NO: 1380 - protein, 7 aa, Artificial Sequence
  Description of Artificial Sequence: Synthetic peptide
DTIAHAP

SEQ ID NO: 1381 - protein, 7 aa, Artificial Sequence
  Description of Artificial Sequence: Synthetic peptide
DTLALSC

SEQ ID NO: 1382 - protein, 7 aa, Artificial Sequence
  Description of Artificial Sequence: Synthetic peptide
DTLANSA

SEQ ID NO: 1383 - protein, 7 aa, Artificial Sequence
  Description of Artificial Sequence: Synthetic peptide
DTLGLEP

SEQ ID NO: 1384 - protein, 7 aa, Artificial Sequence
  Description of Artificial Sequence: Synthetic peptide
DTLMIRG

SEQ ID NO: 1385 - protein, 7 aa, Artificial Sequence
  Description of Artificial Sequence: Synthetic peptide
DTLSTTR

SEQ ID NO: 1386 - protein, 7 aa, Artificial Sequence
  Description of Artificial Sequence: Synthetic peptide
DTNMLHV

SEQ ID NO: 1387 - protein, 7 aa, Artificial Sequence
  Description of Artificial Sequence: Synthetic peptide
DTPDALR

SEQ ID NO: 1388 - protein, 7 aa, Artificial Sequence
  Description of Artificial Sequence: Synthetic peptide
DTPHLSL

SEQ ID NO: 1389 - protein, 7 aa, Artificial Sequence
  Description of Artificial Sequence: Synthetic peptide
DTPLELA

SEQ ID NO: 1390 - protein, 7 aa, Artificial Sequence
  Description of Artificial Sequence: Synthetic peptide
DTPMPKI

SEQ ID NO: 1391 - protein, 7 aa, Artificial Sequence
  Description of Artificial Sequence: Synthetic peptide
DTPNDTA

SEQ ID NO: 1392 - protein, 7 aa, Artificial Sequence
  Description of Artificial Sequence: Synthetic peptide
DTQHLKP

SEQ ID NO: 1393 - protein, 7 aa, Artificial Sequence
  Description of Artificial Sequence: Synthetic peptide
DTQLPNP

SEQ ID NO: 1394 - protein, 7 aa, Artificial Sequence
  Description of Artificial Sequence: Synthetic peptide
DTQLTLA

SEQ ID NO: 1395 - protein, 7 aa, Artificial Sequence
  Description of Artificial Sequence: Synthetic peptide
DTQSVSL

SEQ ID NO: 1396 - protein, 7 aa, Artificial Sequence
  Description of Artificial Sequence: Synthetic peptide
DTRAFTG

SEQ ID NO: 1397 - protein, 7 aa, Artificial Sequence
  Description of Artificial Sequence: Synthetic peptide
DTRHSDL

SEQ ID NO: 1398 - protein, 7 aa, Artificial Sequence
  Description of Artificial Sequence: Synthetic peptide
DTRRECD

SEQ ID NO: 1399 - protein, 7 aa, Artificial Sequence
  Description of Artificial Sequence: Synthetic peptide
DTSRTSL

SEQ ID NO: 1400 - protein, 7 aa, Artificial Sequence
  Description of Artificial Sequence: Synthetic peptide
DTSSRMT

SEQ ID NO: 1401 - protein, 7 aa, Artificial Sequence
  Description of Artificial Sequence: Synthetic peptide
DTSWKST

SEQ ID NO: 1402 - protein, 7 aa, Artificial Sequence
  Description of Artificial Sequence: Synthetic peptide
DTTERPW

SEQ ID NO: 1403 - protein, 7 aa, Artificial Sequence
  Description of Artificial Sequence: Synthetic peptide
DTTGRYL

SEQ ID NO: 1404 - protein, 7 aa, Artificial Sequence
  Description of Artificial Sequence: Synthetic peptide
DTTLLRG

SEQ ID NO: 1405 - protein, 7 aa, Artificial Sequence
  Description of Artificial Sequence: Synthetic peptide
DTTPIVR

SEQ ID NO: 1406 - protein, 7 aa, Artificial Sequence
  Description of Artificial Sequence: Synthetic peptide
DTYAIAI

SEQ ID NO: 1407 - protein, 7 aa, Artificial Sequence
  Description of Artificial Sequence: Synthetic peptide
DTYNTPA

SEQ ID NO: 1408 - protein, 7 aa, Artificial Sequence
  Description of Artificial Sequence: Synthetic peptide
DVASRSL

SEQ ID NO: 1409 - protein, 7 aa, Artificial Sequence
  Description of Artificial Sequence: Synthetic peptide
DVASSRL

SEQ ID NO: 1410 - protein, 7 aa, Artificial Sequence
  Description of Artificial Sequence: Synthetic peptide
DVDDTMW

SEQ ID NO: 1411 - protein, 7 aa, Artificial Sequence
  Description of Artificial Sequence: Synthetic peptide
DVDLLPT

SEQ ID NO: 1412 - protein, 7 aa, Artificial Sequence
  Description of Artificial Sequence: Synthetic peptide
DVDRLNT

SEQ ID NO: 1413 - protein, 7 aa, Artificial Sequence
  Description of Artificial Sequence: Synthetic peptide
DVDSHHT

SEQ ID NO: 1414 - protein, 7 aa, Artificial Sequence
  Description of Artificial Sequence: Synthetic peptide
DVDVRHG

SEQ ID NO: 1415 - protein, 7 aa, Artificial Sequence
  Description of Artificial Sequence: Synthetic peptide
DVEPLQM

SEQ ID NO: 1416 - protein, 7 aa, Artificial Sequence
  Description of Artificial Sequence: Synthetic peptide
DVFRTQP

SEQ ID NO: 1417 - protein, 7 aa, Artificial Sequence
  Description of Artificial Sequence: Synthetic peptide
DVGTYGR

SEQ ID NO: 1418 - protein, 7 aa, Artificial Sequence
  Description of Artificial Sequence: Synthetic peptide
DVKTNVY

SEQ ID NO: 1419 - protein, 7 aa, Artificial Sequence
  Description of Artificial Sequence: Synthetic peptide
DVLFSKN

SEQ ID NO: 1420 - protein, 7 aa, Artificial Sequence
  Description of Artificial Sequence: Synthetic peptide
DVLGKHA

SEQ ID NO: 1421 - protein, 7 aa, Artificial Sequence
  Description of Artificial Sequence: Synthetic peptide
DVLKTDF

SEQ ID NO: 1422 - protein, 7 aa, Artificial Sequence
  Description of Artificial Sequence: Synthetic peptide
DVLNSTD

SEQ ID NO: 1423 - protein, 7 aa, Artificial Sequence
  Description of Artificial Sequence: Synthetic peptide
DVMSQLL

SEQ ID NO: 1424 - protein, 7 aa, Artificial Sequence
  Description of Artificial Sequence: Synthetic peptide
DVPNAPC

SEQ ID NO: 1425 - protein, 7 aa, Artificial Sequence
  Description of Artificial Sequence: Synthetic peptide
DVPNPTG

SEQ ID NO: 1426 - protein, 7 aa, Artificial Sequence
  Description of Artificial Sequence: Synthetic peptide
DVPNTMT

SEQ ID NO: 1427 - protein, 7 aa, Artificial Sequence
  Description of Artificial Sequence: Synthetic peptide
DVPYSLE

SEQ ID NO: 1428 - protein, 7 aa, Artificial Sequence
  Description of Artificial Sequence: Synthetic peptide
DVQMHKH

SEQ ID NO: 1429 - protein, 7 aa, Artificial Sequence
  Description of Artificial Sequence: Synthetic peptide
DVRNTRL

SEQ ID NO: 1430 - protein, 7 aa, Artificial Sequence
  Description of Artificial Sequence: Synthetic peptide
DVRQAYF

SEQ ID NO: 1431 - protein, 7 aa, Artificial Sequence
  Description of Artificial Sequence: Synthetic peptide
DVRVGHI

SEQ ID NO: 1432 - protein, 7 aa, Artificial Sequence
  Description of Artificial Sequence: Synthetic peptide
DVSGTIG

SEQ ID NO: 1433 - protein, 7 aa, Artificial Sequence
  Description of Artificial Sequence: Synthetic peptide
DVSLRVT

SEQ ID NO: 1434 - protein, 7 aa, Artificial Sequence
  Description of Artificial Sequence: Synthetic peptide
DVSSPLI

SEQ ID NO: 1435 - protein, 7 aa, Artificial Sequence
  Description of Artificial Sequence: Synthetic peptide
DVSVSDV

SEQ ID NO: 1436 - protein, 7 aa, Artificial Sequence
  Description of Artificial Sequence: Synthetic peptide
DVTVGSS

SEQ ID NO: 1437 - protein, 7 aa, Artificial Sequence
  Description of Artificial Sequence: Synthetic peptide
DVVAGPP

SEQ ID NO: 1438 - protein, 7 aa, Artificial Sequence
  Description of Artificial Sequence: Synthetic peptide
DVVNSLN

SEQ ID NO: 1439 - protein, 7 aa, Artificial Sequence
  Description of Artificial Sequence: Synthetic peptide
DVVPRSA

SEQ ID NO: 1440 - protein, 7 aa, Artificial Sequence
  Description of Artificial Sequence: Synthetic peptide
DWGPKQR

SEQ ID NO: 1441 - protein, 7 aa, Artificial Sequence
  Description of Artificial Sequence: Synthetic peptide
DWKPNHE

SEQ ID NO: 1442 - protein, 7 aa, Artificial Sequence
  Description of Artificial Sequence: Synthetic peptide
DWKQTTA

SEQ ID NO: 1443 - protein, 7 aa, Artificial Sequence
  Description of Artificial Sequence: Synthetic peptide
DWQRHGP

SEQ ID NO: 1444 - protein, 7 aa, Artificial Sequence
  Description of Artificial Sequence: Synthetic peptide
DWTHIDK

SEQ ID NO: 1445 - protein, 7 aa, Artificial Sequence
  Description of Artificial Sequence: Synthetic peptide
DWTPRTT

SEQ ID NO: 1446 - protein, 7 aa, Artificial Sequence
  Description of Artificial Sequence: Synthetic peptide
DYAIGKT

SEQ ID NO: 1447 - protein, 7 aa, Artificial Sequence
  Description of Artificial Sequence: Synthetic peptide
DYESFSR

SEQ ID NO: 1448 - protein, 7 aa, Artificial Sequence
  Description of Artificial Sequence: Synthetic peptide
DYGPEII

SEQ ID NO: 1449 - protein, 7 aa, Artificial Sequence
  Description of Artificial Sequence: Synthetic peptide
DYGQLSN

SEQ ID NO: 1450 - protein, 7 aa, Artificial Sequence
  Description of Artificial Sequence: Synthetic peptide
DYHQMHS

SEQ ID NO: 1451 - protein, 7 aa, Artificial Sequence
  Description of Artificial Sequence: Synthetic peptide
DYHRAPG

SEQ ID NO: 1452 - protein, 7 aa, Artificial Sequence
  Description of Artificial Sequence: Synthetic peptide
DYPPEVL

SEQ ID NO: 1453 - protein, 7 aa, Artificial Sequence
  Description of Artificial Sequence: Synthetic peptide
DYREYTR

SEQ ID NO: 1454 - protein, 7 aa, Artificial Sequence
  Description of Artificial Sequence: Synthetic peptide
DYRFADS

SEQ ID NO: 1455 - protein, 7 aa, Artificial Sequence
  Description of Artificial Sequence: Synthetic peptide
DYRITNS

SEQ ID NO: 1456 - protein, 7 aa, Artificial Sequence
  Description of Artificial Sequence: Synthetic peptide
DYRLLPE

SEQ ID NO: 1457 - protein, 7 aa, Artificial Sequence
  Description of Artificial Sequence: Synthetic peptide
DYRQIDQ

SEQ ID NO: 1458 - protein, 7 aa, Artificial Sequence
  Description of Artificial Sequence: Synthetic peptide
DYSEMSK

SEQ ID NO: 1459 - protein, 7 aa, Artificial Sequence
  Description of Artificial Sequence: Synthetic peptide
DYSSARA

SEQ ID NO: 1460 - protein, 7 aa, Artificial Sequence
  Description of Artificial Sequence: Synthetic peptide
DYSSSMR

SEQ ID NO: 1461 - protein, 7 aa, Artificial Sequence
  Description of Artificial Sequence: Synthetic peptide
DYTLTPS

SEQ ID NO: 1462 - protein, 7 aa, Artificial Sequence
  Description of Artificial Sequence: Synthetic peptide
DYVPVEL

SEQ ID NO: 1463 - protein, 7 aa, Artificial Sequence
  Description of Artificial Sequence: Synthetic peptide
EAAHPGM

SEQ ID NO: 1464 - protein, 7 aa, Artificial Sequence
  Description of Artificial Sequence: Synthetic peptide
EAAMTRE

SEQ ID NO: 1465 - protein, 7 aa, Artificial Sequence
  Description of Artificial Sequence: Synthetic peptide
EAAPIPR

SEQ ID NO: 1466 - protein, 7 aa, Artificial Sequence
  Description of Artificial Sequence: Synthetic peptide
EAASRHD

SEQ ID NO: 1467 - protein, 7 aa, Artificial Sequence
  Description of Artificial Sequence: Synthetic peptide
EAASSPK

SEQ ID NO: 1468 - protein, 7 aa, Artificial Sequence
  Description of Artificial Sequence: Synthetic peptide
EAATLTT

SEQ ID NO: 1469 - protein, 7 aa, Artificial Sequence
  Description of Artificial Sequence: Synthetic peptide
EAFHTSS

SEQ ID NO: 1470 - protein, 7 aa, Artificial Sequence
  Description of Artificial Sequence: Synthetic peptide
EAFSGRI

SEQ ID NO: 1471 - protein, 7 aa, Artificial Sequence
  Description of Artificial Sequence: Synthetic peptide
EAKTNRT

SEQ ID NO: 1472 - protein, 7 aa, Artificial Sequence
  Description of Artificial Sequence: Synthetic peptide
EALAVRP

SEQ ID NO: 1473 - protein, 7 aa, Artificial Sequence
  Description of Artificial Sequence: Synthetic peptide
EALRGPI

SEQ ID NO: 1474 - protein, 7 aa, Artificial Sequence
  Description of Artificial Sequence: Synthetic peptide
EAMHSRA

SEQ ID NO: 1475 - protein, 7 aa, Artificial Sequence
  Description of Artificial Sequence: Synthetic peptide
EANDETK

SEQ ID NO: 1476 - protein, 7 aa, Artificial Sequence
  Description of Artificial Sequence: Synthetic peptide
EANRSPM

SEQ ID NO: 1477 - protein, 7 aa, Artificial Sequence
  Description of Artificial Sequence: Synthetic peptide
EAQRAAP

SEQ ID NO: 1478 - protein, 7 aa, Artificial Sequence
  Description of Artificial Sequence: Synthetic peptide
EARHVYA

SEQ ID NO: 1479 - protein, 7 aa, Artificial Sequence
  Description of Artificial Sequence: Synthetic peptide
EARYESG

SEQ ID NO: 1480 - protein, 7 aa, Artificial Sequence
  Description of Artificial Sequence: Synthetic peptide
EARYVHV

SEQ ID NO: 1481 - protein, 7 aa, Artificial Sequence
  Description of Artificial Sequence: Synthetic peptide
EASHFTM

SEQ ID NO: 1482 - protein, 7 aa, Artificial Sequence
  Description of Artificial Sequence: Synthetic peptide
EASLAAK

SEQ ID NO: 1483 - protein, 7 aa, Artificial Sequence
  Description of Artificial Sequence: Synthetic peptide
EASNAIA

SEQ ID NO: 1484 - protein, 7 aa, Artificial Sequence
  Description of Artificial Sequence: Synthetic peptide
EASRVTV

SEQ ID NO: 1485 - protein, 7 aa, Artificial Sequence
  Description of Artificial Sequence: Synthetic peptide
EASSMHS

SEQ ID NO: 1486 - protein, 7 aa, Artificial Sequence
  Description of Artificial Sequence: Synthetic peptide
EASVLTR

SEQ ID NO: 1487 - protein, 7 aa, Artificial Sequence
  Description of Artificial Sequence: Synthetic peptide
EASYMPP

SEQ ID NO: 1488 - protein, 7 aa, Artificial Sequence
  Description of Artificial Sequence: Synthetic peptide
EATMVKD

SEQ ID NO: 1489 - protein, 7 aa, Artificial Sequence
  Description of Artificial Sequence: Synthetic peptide
EATNRHP

SEQ ID NO: 1490 - protein, 7 aa, Artificial Sequence
  Description of Artificial Sequence: Synthetic peptide
EATPPTI

SEQ ID NO: 1491 - protein, 7 aa, Artificial Sequence
  Description of Artificial Sequence: Synthetic peptide
EATTNFL

SEQ ID NO: 1492 - protein, 7 aa, Artificial Sequence
  Description of Artificial Sequence: Synthetic peptide
EATTPMP

SEQ ID NO: 1493 - protein, 7 aa, Artificial Sequence
  Description of Artificial Sequence: Synthetic peptide
EAVTPRH

SEQ ID NO: 1494 - protein, 7 aa, Artificial Sequence
  Description of Artificial Sequence: Synthetic peptide
EAVTVKM

SEQ ID NO: 1495 - protein, 7 aa, Artificial Sequence
  Description of Artificial Sequence: Synthetic peptide
EDAEREY

SEQ ID NO: 1496 - protein, 7 aa, Artificial Sequence
  Description of Artificial Sequence: Synthetic peptide
EDAPPSR

SEQ ID NO: 1497 - protein, 7 aa, Artificial Sequence
  Description of Artificial Sequence: Synthetic peptide
EDIRMPS

SEQ ID NO: 1498 - protein, 7 aa, Artificial Sequence
  Description of Artificial Sequence: Synthetic peptide
EDKQHLS

SEQ ID NO: 1499 - protein, 7 aa, Artificial Sequence
  Description of Artificial Sequence: Synthetic peptide
EDLPGKM

SEQ ID NO: 1500 - protein, 7 aa, Artificial Sequence
  Description of Artificial Sequence: Synthetic peptide
EDMPQLG

SEQ ID NO: 1501 - protein, 7 aa, Artificial Sequence
  Description of Artificial Sequence: Synthetic peptide
EDPLGQM

SEQ ID NO: 1502 - protein, 7 aa, Artificial Sequence
  Description of Artificial Sequence: Synthetic peptide
EDSHFAP

SEQ ID NO: 1503 - protein, 7 aa, Artificial Sequence
  Description of Artificial Sequence: Synthetic peptide
EEAMYPF

SEQ ID NO: 1504 - protein, 7 aa, Artificial Sequence
  Description of Artificial Sequence: Synthetic peptide
EEASLSL

SEQ ID NO: 1505 - protein, 7 aa, Artificial Sequence
  Description of Artificial Sequence: Synthetic peptide
EELAKAD

SEQ ID NO: 1506 - protein, 7 aa, Artificial Sequence
  Description of Artificial Sequence: Synthetic peptide
EELRRHV

SEQ ID NO: 1507 - protein, 7 aa, Artificial Sequence
  Description of Artificial Sequence: Synthetic peptide
EENLQRT

SEQ ID NO: 1508 - protein, 7 aa, Artificial Sequence
  Description of Artificial Sequence: Synthetic peptide
EESGRVA

SEQ ID NO: 1509 - protein, 7 aa, Artificial Sequence
  Description of Artificial Sequence: Synthetic peptide
EESKRSA

SEQ ID NO: 1510 - protein, 7 aa, Artificial Sequence
  Description of Artificial Sequence: Synthetic peptide
EESPESI

SEQ ID NO: 1511 - protein, 7 aa, Artificial Sequence
  Description of Artificial Sequence: Synthetic peptide
EETRKPL

SEQ ID NO: 1512 - protein, 7 aa, Artificial Sequence
  Description of Artificial Sequence: Synthetic peptide
EETWHRL

SEQ ID NO: 1513 - protein, 7 aa, Artificial Sequence
  Description of Artificial Sequence: Synthetic peptide
EEYVERI

SEQ ID NO: 1514 - protein, 7 aa, Artificial Sequence
  Description of Artificial Sequence: Synthetic peptide
EFDQRNI

SEQ ID NO: 1515 - protein, 7 aa, Artificial Sequence
  Description of Artificial Sequence: Synthetic peptide
EFERRTT

SEQ ID NO: 1516 - protein, 7 aa, Artificial Sequence
  Description of Artificial Sequence: Synthetic peptide
EFEVCCA

SEQ ID NO: 1517 - protein, 7 aa, Artificial Sequence
  Description of Artificial Sequence: Synthetic peptide
EFGMTVP

SEQ ID NO: 1518 - protein, 7 aa, Artificial Sequence
  Description of Artificial Sequence: Synthetic peptide
EFIEMRP

SEQ ID NO: 1519 - protein, 7 aa, Artificial Sequence
  Description of Artificial Sequence: Synthetic peptide
EFNGKND

SEQ ID NO: 1520 - protein, 7 aa, Artificial Sequence
  Description of Artificial Sequence: Synthetic peptide
EFNKSGA

SEQ ID NO: 1521 - protein, 7 aa, Artificial Sequence
  Description of Artificial Sequence: Synthetic peptide
EFNPALS

SEQ ID NO: 1522 - protein, 7 aa, Artificial Sequence
  Description of Artificial Sequence: Synthetic peptide
EFPSLDD

SEQ ID NO: 1523 - protein, 7 aa, Artificial Sequence
  Description of Artificial Sequence: Synthetic peptide
EFPTSLP

SEQ ID NO: 1524 - protein, 7 aa, Artificial Sequence
  Description of Artificial Sequence: Synthetic peptide
EFQKKSS

SEQ ID NO: 1525 - protein, 7 aa, Artificial Sequence
  Description of Artificial Sequence: Synthetic peptide
EFQSLHV

SEQ ID NO: 1526 - protein, 7 aa, Artificial Sequence
  Description of Artificial Sequence: Synthetic peptide
EFRLSAV

SEQ ID NO: 1527 - protein, 7 aa, Artificial Sequence
  Description of Artificial Sequence: Synthetic peptide
EFRSTGT

SEQ ID NO: 1528 - protein, 7 aa, Artificial Sequence
  Description of Artificial Sequence: Synthetic peptide
EFSQMTE

SEQ ID NO: 1529 - protein, 7 aa, Artificial Sequence
  Description of Artificial Sequence: Synthetic peptide
EFSRMNT

SEQ ID NO: 1530 - protein, 7 aa, Artificial Sequence
  Description of Artificial Sequence: Synthetic peptide
EFSTSLS

SEQ ID NO: 1531 - protein, 7 aa, Artificial Sequence
  Description of Artificial Sequence: Synthetic peptide
EFTHNKA

SEQ ID NO: 1532 - protein, 7 aa, Artificial Sequence
  Description of Artificial Sequence: Synthetic peptide
EFTSEDL

SEQ ID NO: 1533 - protein, 7 aa, Artificial Sequence
  Description of Artificial Sequence: Synthetic peptide
EFVLSLS

SEQ ID NO: 1534 - protein, 7 aa, Artificial Sequence
  Description of Artificial Sequence: Synthetic peptide
EFYKDWD

SEQ ID NO: 1535 - protein, 7 aa, Artificial Sequence
  Description of Artificial Sequence: Synthetic peptide
EGANAAT

SEQ ID NO: 1536 - protein, 7 aa, Artificial Sequence
  Description of Artificial Sequence: Synthetic peptide
EGDFVRA

SEQ ID NO: 1537 - protein, 7 aa, Artificial Sequence
  Description of Artificial Sequence: Synthetic peptide
EGDNRLF

SEQ ID NO: 1538 - protein, 7 aa, Artificial Sequence
  Description of Artificial Sequence: Synthetic peptide
EGENQTT

SEQ ID NO: 1539 - protein, 7 aa, Artificial Sequence
  Description of Artificial Sequence: Synthetic peptide
EGFVGPE

SEQ ID NO: 1540 - protein, 7 aa, Artificial Sequence
  Description of Artificial Sequence: Synthetic peptide
EGGHRLI

SEQ ID NO: 1541 - protein, 7 aa, Artificial Sequence
  Description of Artificial Sequence: Synthetic peptide
EGHDTLM

SEQ ID NO: 1542 - protein, 7 aa, Artificial Sequence
  Description of Artificial Sequence: Synthetic peptide
EGILKSL

SEQ ID NO: 1543 - protein, 7 aa, Artificial Sequence
  Description of Artificial Sequence: Synthetic peptide
EGIPPFS

SEQ ID NO: 1544 - protein, 7 aa, Artificial Sequence
  Description of Artificial Sequence: Synthetic peptide
EGISASV

SEQ ID NO: 1545 - protein, 7 aa, Artificial Sequence
  Description of Artificial Sequence: Synthetic peptide
EGKVRLP

SEQ ID NO: 1546 - protein, 7 aa, Artificial Sequence
  Description of Artificial Sequence: Synthetic peptide
EGLGLRV

SEQ ID NO: 1547 - protein, 7 aa, Artificial Sequence
  Description of Artificial Sequence: Synthetic peptide
EGMPLNH

SEQ ID NO: 1548 - protein, 7 aa, Artificial Sequence
  Description of Artificial Sequence: Synthetic peptide
EGPVLLA

SEQ ID NO: 1549 - protein, 7 aa, Artificial Sequence
  Description of Artificial Sequence: Synthetic peptide
EGRREPY

SEQ ID NO: 1550 - protein, 7 aa, Artificial Sequence
  Description of Artificial Sequence: Synthetic peptide
EGRVVPA

SEQ ID NO: 1551 - protein, 7 aa, Artificial Sequence
  Description of Artificial Sequence: Synthetic peptide
EGSFPLH

SEQ ID NO: 1552 - protein, 7 aa, Artificial Sequence
  Description of Artificial Sequence: Synthetic peptide
EGSGMLR

SEQ ID NO: 1553 - protein, 7 aa, Artificial Sequence
  Description of Artificial Sequence: Synthetic peptide
EGSKMMV

SEQ ID NO: 1554 - protein, 7 aa, Artificial Sequence
  Description of Artificial Sequence: Synthetic peptide
EGSPDLR

SEQ ID NO: 1555 - protein, 7 aa, Artificial Sequence
  Description of Artificial Sequence: Synthetic peptide
EGSPRAM

SEQ ID NO: 1556 - protein, 7 aa, Artificial Sequence
  Description of Artificial Sequence: Synthetic peptide
EGSQNDF

SEQ ID NO: 1557 - protein, 7 aa, Artificial Sequence
  Description of Artificial Sequence: Synthetic peptide
EGTARLY

SEQ ID NO: 1558 - protein, 7 aa, Artificial Sequence
  Description of Artificial Sequence: Synthetic peptide
EGVVTLQ

SEQ ID NO: 1559 - protein, 7 aa, Artificial Sequence
  Description of Artificial Sequence: Synthetic peptide
EGYDSTT

SEQ ID NO: 1560 - protein, 7 aa, Artificial Sequence
  Description of Artificial Sequence: Synthetic peptide
EGYENGA

SEQ ID NO: 1561 - protein, 7 aa, Artificial Sequence
  Description of Artificial Sequence: Synthetic peptide
EHCTNTC

SEQ ID NO: 1562 - protein, 7 aa, Artificial Sequence
  Description of Artificial Sequence: Synthetic peptide
EHGIAMD

SEQ ID NO: 1563 - protein, 7 aa, Artificial Sequence
  Description of Artificial Sequence: Synthetic peptide
EHGLNTL

SEQ ID NO: 1564 - protein, 7 aa, Artificial Sequence
  Description of Artificial Sequence: Synthetic peptide
EHGPALL

SEQ ID NO: 1565 - protein, 7 aa, Artificial Sequence
  Description of Artificial Sequence: Synthetic peptide
EHGSAMK

SEQ ID NO: 1566 - protein, 7 aa, Artificial Sequence
  Description of Artificial Sequence: Synthetic peptide
EHHVHSP

SEQ ID NO: 1567 - protein, 7 aa, Artificial Sequence
  Description of Artificial Sequence: Synthetic peptide
EHIPQAM

SEQ ID NO: 1568 - protein, 7 aa, Artificial Sequence
  Description of Artificial Sequence: Synthetic peptide
EHKGAHF

SEQ ID NO: 1569 - protein, 7 aa, Artificial Sequence
  Description of Artificial Sequence: Synthetic peptide
EHKLLVM

SEQ ID NO: 1570 - protein, 7 aa, Artificial Sequence
  Description of Artificial Sequence: Synthetic peptide
EHMPSLR

SEQ ID NO: 1571 - protein, 7 aa, Artificial Sequence
  Description of Artificial Sequence: Synthetic peptide
EHNVGQS

SEQ ID NO: 1572 - protein, 7 aa, Artificial Sequence
  Description of Artificial Sequence: Synthetic peptide
EHQGTTI

SEQ ID NO: 1573 - protein, 7 aa, Artificial Sequence
  Description of Artificial Sequence: Synthetic peptide
EHSDYQV

SEQ ID NO: 1574 - protein, 7 aa, Artificial Sequence
  Description of Artificial Sequence: Synthetic peptide
EHSELTP

SEQ ID NO: 1575 - protein, 7 aa, Artificial Sequence
  Description of Artificial Sequence: Synthetic peptide
EHSFKSA

SEQ ID NO: 1576 - protein, 7 aa, Artificial Sequence
  Description of Artificial Sequence: Synthetic peptide
EHSGTAI

SEQ ID NO: 1577 - protein, 7 aa, Artificial Sequence
  Description of Artificial Sequence: Synthetic peptide
EHSSGML

SEQ ID NO: 1578 - protein, 7 aa, Artificial Sequence
  Description of Artificial Sequence: Synthetic peptide
EIARGSF

SEQ ID NO: 1579 - protein, 7 aa, Artificial Sequence
  Description of Artificial Sequence: Synthetic peptide
EIGYMSA

SEQ ID NO: 1580 - protein, 7 aa, Artificial Sequence
  Description of Artificial Sequence: Synthetic peptide
EIHYPLE

SEQ ID NO: 1581 - protein, 7 aa, Artificial Sequence
  Description of Artificial Sequence: Synthetic peptide
EIKAQMS

SEQ ID NO: 1582 - protein, 7 aa, Artificial Sequence
  Description of Artificial Sequence: Synthetic peptide
EIKDEKL

SEQ ID NO: 1583 - protein, 7 aa, Artificial Sequence
  Description of Artificial Sequence: Synthetic peptide
EIKHSMH

SEQ ID NO: 1584 - protein, 7 aa, Artificial Sequence
  Description of Artificial Sequence: Synthetic peptide
EINSQTN

SEQ ID NO: 1585 - protein, 7 aa, Artificial Sequence
  Description of Artificial Sequence: Synthetic peptide
EIQHYHG

SEQ ID NO: 1586 - protein, 7 aa, Artificial Sequence
  Description of Artificial Sequence: Synthetic peptide
EIRKSII

SEQ ID NO: 1587 - protein, 7 aa, Artificial Sequence
  Description of Artificial Sequence: Synthetic peptide
EISTQRY

SEQ ID NO: 1588 - protein, 7 aa, Artificial Sequence
  Description of Artificial Sequence: Synthetic peptide
EKARAAS

SEQ ID NO: 1589 - protein, 7 aa, Artificial Sequence
  Description of Artificial Sequence: Synthetic peptide
EKERPML

SEQ ID NO: 1590 - protein, 7 aa, Artificial Sequence
  Description of Artificial Sequence: Synthetic peptide
EKGFLHS

SEQ ID NO: 1591 - protein, 7 aa, Artificial Sequence
  Description of Artificial Sequence: Synthetic peptide
EKGLSTQ

SEQ ID NO: 1592 - protein, 7 aa, Artificial Sequence
  Description of Artificial Sequence: Synthetic peptide
EKGSIMP

SEQ ID NO: 1593 - protein, 7 aa, Artificial Sequence
  Description of Artificial Sequence: Synthetic peptide
EKGSLGH

SEQ ID NO: 1594 - protein, 7 aa, Artificial Sequence
  Description of Artificial Sequence: Synthetic peptide
EKIDRLG

SEQ ID NO: 1595 - protein, 7 aa, Artificial Sequence
  Description of Artificial Sequence: Synthetic peptide
EKIKIYS

SEQ ID NO: 1596 - protein, 7 aa, Artificial Sequence
  Description of Artificial Sequence: Synthetic peptide
EKIPHSS

SEQ ID NO: 1597 - protein, 7 aa, Artificial Sequence
  Description of Artificial Sequence: Synthetic peptide
EKKLSAE

SEQ ID NO: 1598 - protein, 7 aa, Artificial Sequence
  Description of Artificial Sequence: Synthetic peptide
EKLARTG

SEQ ID NO: 1599 - protein, 7 aa, Artificial Sequence
  Description of Artificial Sequence: Synthetic peptide
EKMHANP

SEQ ID NO: 1600 - protein, 7 aa, Artificial Sequence
  Description of Artificial Sequence: Synthetic peptide
EKPYITM

SEQ ID NO: 1601 - protein, 7 aa, Artificial Sequence
  Description of Artificial Sequence: Synthetic peptide
EKQNLPL

SEQ ID NO: 1602 - protein, 7 aa, Artificial Sequence
  Description of Artificial Sequence: Synthetic peptide
EKVIRPV

SEQ ID NO: 1603 - protein, 7 aa, Artificial Sequence
  Description of Artificial Sequence: Synthetic peptide
EKVPKLL

SEQ ID NO: 1604 - protein, 7 aa, Artificial Sequence
  Description of Artificial Sequence: Synthetic peptide
ELAAEAR

SEQ ID NO: 1605 - protein, 7 aa, Artificial Sequence
  Description of Artificial Sequence: Synthetic peptide
ELESAEI

SEQ ID NO: 1606 - protein, 7 aa, Artificial Sequence
  Description of Artificial Sequence: Synthetic peptide
ELETAKL

SEQ ID NO: 1607 - protein, 7 aa, Artificial Sequence
  Description of Artificial Sequence: Synthetic peptide
ELFSDKF

SEQ ID NO: 1608 - protein, 7 aa, Artificial Sequence
  Description of Artificial Sequence: Synthetic peptide
ELGPPRA

SEQ ID NO: 1609 - protein, 7 aa, Artificial Sequence
  Description of Artificial Sequence: Synthetic peptide
ELGPRTS

SEQ ID NO: 1610 - protein, 7 aa, Artificial Sequence
  Description of Artificial Sequence: Synthetic peptide
ELILNSS

SEQ ID NO: 1611 - protein, 7 aa, Artificial Sequence
  Description of Artificial Sequence: Synthetic peptide
ELKAVAR

SEQ ID NO: 1612 - protein, 7 aa, Artificial Sequence
  Description of Artificial Sequence: Synthetic peptide
ELKFPDK

SEQ ID NO: 1613 - protein, 7 aa, Artificial Sequence
  Description of Artificial Sequence: Synthetic peptide
ELKQASG

SEQ ID NO: 1614 - protein, 7 aa, Artificial Sequence
  Description of Artificial Sequence: Synthetic peptide
ELKRYVG

SEQ ID NO: 1615 - protein, 7 aa, Artificial Sequence
  Description of Artificial Sequence: Synthetic peptide
ELLEPDD

SEQ ID NO: 1616 - protein, 7 aa, Artificial Sequence
  Description of Artificial Sequence: Synthetic peptide
ELMVNGG

SEQ ID NO: 1617 - protein, 7 aa, Artificial Sequence
  Description of Artificial Sequence: Synthetic peptide
ELNNLLR

SEQ ID NO: 1618 - protein, 7 aa, Artificial Sequence
  Description of Artificial Sequence: Synthetic peptide
ELNVHRG

SEQ ID NO: 1619 - protein, 7 aa, Artificial Sequence
  Description of Artificial Sequence: Synthetic peptide
ELPAKSM

SEQ ID NO: 1620 - protein, 7 aa, Artificial Sequence
  Description of Artificial Sequence: Synthetic peptide
ELPATYG

SEQ ID NO: 1621 - protein, 7 aa, Artificial Sequence
  Description of Artificial Sequence: Synthetic peptide
ELPGTPC

SEQ ID NO: 1622 - protein, 7 aa, Artificial Sequence
  Description of Artificial Sequence: Synthetic peptide
ELPLDWD

SEQ ID NO: 1623 - protein, 7 aa, Artificial Sequence
  Description of Artificial Sequence: Synthetic peptide
ELPSKQG

SEQ ID NO: 1624 - protein, 7 aa, Artificial Sequence
  Description of Artificial Sequence: Synthetic peptide
ELQGRIN

SEQ ID NO: 1625 - protein, 7 aa, Artificial Sequence
  Description of Artificial Sequence: Synthetic peptide
ELQLPKS

SEQ ID NO: 1626 - protein, 7 aa, Artificial Sequence
  Description of Artificial Sequence: Synthetic peptide
ELQVQMA

SEQ ID NO: 1627 - protein, 7 aa, Artificial Sequence
  Description of Artificial Sequence: Synthetic peptide
ELRGSVN

SEQ ID NO: 1628 - protein, 7 aa, Artificial Sequence
  Description of Artificial Sequence: Synthetic peptide
ELRVVHS

SEQ ID NO: 1629 - protein, 7 aa, Artificial Sequence
  Description of Artificial Sequence: Synthetic peptide
ELSARAT

SEQ ID NO: 1630 - protein, 7 aa, Artificial Sequence
  Description of Artificial Sequence: Synthetic peptide
ELSDGSG

SEQ ID NO: 1631 - protein, 7 aa, Artificial Sequence
  Description of Artificial Sequence: Synthetic peptide
ELSFQFD

SEQ ID NO: 1632 - protein, 7 aa, Artificial Sequence
  Description of Artificial Sequence: Synthetic peptide
ELSMGSY

SEQ ID NO: 1633 - protein, 7 aa, Artificial Sequence
  Description of Artificial Sequence: Synthetic peptide
ELSRNNV

SEQ ID NO: 1634 - protein, 7 aa, Artificial Sequence
  Description of Artificial Sequence: Synthetic peptide
ELSVNGL

SEQ ID NO: 1635 - protein, 7 aa, Artificial Sequence
  Description of Artificial Sequence: Synthetic peptide
ELSYRPT

SEQ ID NO: 1636 - protein, 7 aa, Artificial Sequence
  Description of Artificial Sequence: Synthetic peptide
ELTTGKS

SEQ ID NO: 1637 - protein, 7 aa, Artificial Sequence
  Description of Artificial Sequence: Synthetic peptide
ELTVRLA

SEQ ID NO: 1638 - protein, 7 aa, Artificial Sequence
  Description of Artificial Sequence: Synthetic peptide
ELTYPGR

SEQ ID NO: 1639 - protein, 7 aa, Artificial Sequence
  Description of Artificial Sequence: Synthetic peptide
ELVMSVR

SEQ ID NO: 1640 - protein, 7 aa, Artificial Sequence
  Description of Artificial Sequence: Synthetic peptide
ELYSRPA

SEQ ID NO: 1641 - protein, 7 aa, Artificial Sequence
  Description of Artificial Sequence: Synthetic peptide
EMAAHLE

SEQ ID NO: 1642 - protein, 7 aa, Artificial Sequence
  Description of Artificial Sequence: Synthetic peptide
EMAPYSK

SEQ ID NO: 1643 - protein, 7 aa, Artificial Sequence
  Description of Artificial Sequence: Synthetic peptide
EMDGNAY

SEQ ID NO: 1644 - protein, 7 aa, Artificial Sequence
  Description of Artificial Sequence: Synthetic peptide
EMEMLSD

SEQ ID NO: 1645 - protein, 7 aa, Artificial Sequence
  Description of Artificial Sequence: Synthetic peptide
EMGQLPD

SEQ ID NO: 1646 - protein, 7 aa, Artificial Sequence
  Description of Artificial Sequence: Synthetic peptide
EMGQTLE

SEQ ID NO: 1647 - protein, 7 aa, Artificial Sequence
  Description of Artificial Sequence: Synthetic peptide
EMHEDEK

SEQ ID NO: 1648 - protein, 7 aa, Artificial Sequence
  Description of Artificial Sequence: Synthetic peptide
EMLERFD

SEQ ID NO: 1649 - protein, 7 aa, Artificial Sequence
  Description of Artificial Sequence: Synthetic peptide
EMLRAGF

SEQ ID NO: 1650 - protein, 7 aa, Artificial Sequence
  Description of Artificial Sequence: Synthetic peptide
EMMANST

SEQ ID NO: 1651 - protein, 7 aa, Artificial Sequence
  Description of Artificial Sequence: Synthetic peptide
EMPKTPK

SEQ ID NO: 1652 - protein, 7 aa, Artificial Sequence
  Description of Artificial Sequence: Synthetic peptide
EMPTRQP

SEQ ID NO: 1653 - protein, 7 aa, Artificial Sequence
  Description of Artificial Sequence: Synthetic peptide
EMPTYND

SEQ ID NO: 1654 - protein, 7 aa, Artificial Sequence
  Description of Artificial Sequence: Synthetic peptide
EMRQQSI

SEQ ID NO: 1655 - protein, 7 aa, Artificial Sequence
  Description of Artificial Sequence: Synthetic peptide
EMRSSTS

SEQ ID NO: 1656 - protein, 7 aa, Artificial Sequence
  Description of Artificial Sequence: Synthetic peptide
EMTQLPA

SEQ ID NO: 1657 - protein, 7 aa, Artificial Sequence
  Description of Artificial Sequence: Synthetic peptide
EMYLTRV

SEQ ID NO: 1658 - protein, 7 aa, Artificial Sequence
  Description of Artificial Sequence: Synthetic peptide
ENAVPGV

SEQ ID NO: 1659 - protein, 7 aa, Artificial Sequence
  Description of Artificial Sequence: Synthetic peptide
ENDRSST

SEQ ID NO: 1660 - protein, 7 aa, Artificial Sequence
  Description of Artificial Sequence: Synthetic peptide
ENEGTGT

SEQ ID NO: 1661 - protein, 7 aa, Artificial Sequence
  Description of Artificial Sequence: Synthetic peptide
ENESHHL

SEQ ID NO: 1662 - protein, 7 aa, Artificial Sequence
  Description of Artificial Sequence: Synthetic peptide
ENGHSFT

SEQ ID NO: 1663 - protein, 7 aa, Artificial Sequence
  Description of Artificial Sequence: Synthetic peptide
ENGRTEI

SEQ ID NO: 1664 - protein, 7 aa, Artificial Sequence
  Description of Artificial Sequence: Synthetic peptide
ENKPGSP

SEQ ID NO: 1665 - protein, 7 aa, Artificial Sequence
  Description of Artificial Sequence: Synthetic peptide
ENMAYLS

SEQ ID NO: 1666 - protein, 7 aa, Artificial Sequence
  Description of Artificial Sequence: Synthetic peptide
ENPGSAS

SEQ ID NO: 1667 - protein, 7 aa, Artificial Sequence
  Description of Artificial Sequence: Synthetic peptide
ENPPREP

SEQ ID NO: 1668 - protein, 7 aa, Artificial Sequence
  Description of Artificial Sequence: Synthetic peptide
ENPRGSV

SEQ ID NO: 1669 - protein, 7 aa, Artificial Sequence
  Description of Artificial Sequence: Synthetic peptide
ENPTMYS

SEQ ID NO: 1670 - protein, 7 aa, Artificial Sequence
  Description of Artificial Sequence: Synthetic peptide
ENQYQDS

SEQ ID NO: 1671 - protein, 7 aa, Artificial Sequence
  Description of Artificial Sequence: Synthetic peptide
ENRLKNF

SEQ ID NO: 1672 - protein, 7 aa, Artificial Sequence
  Description of Artificial Sequence: Synthetic peptide
ENRSGED

SEQ ID NO: 1673 - protein, 7 aa, Artificial Sequence
  Description of Artificial Sequence: Synthetic peptide
ENSSLVD

SEQ ID NO: 1674 - protein, 7 aa, Artificial Sequence
  Description of Artificial Sequence: Synthetic peptide
ENTFSSR

SEQ ID NO: 1675 - protein, 7 aa, Artificial Sequence
  Description of Artificial Sequence: Synthetic peptide
ENTITSL

SEQ ID NO: 1676 - protein, 7 aa, Artificial Sequence
  Description of Artificial Sequence: Synthetic peptide
ENTLRLD

SEQ ID NO: 1677 - protein, 7 aa, Artificial Sequence
  Description of Artificial Sequence: Synthetic peptide
ENVKPGW

SEQ ID NO: 1678 - protein, 7 aa, Artificial Sequence
  Description of Artificial Sequence: Synthetic peptide
EPAARAV

SEQ ID NO: 1679 - protein, 7 aa, Artificial Sequence
  Description of Artificial Sequence: Synthetic peptide
EPADRTQ

SEQ ID NO: 1680 - protein, 7 aa, Artificial Sequence
  Description of Artificial Sequence: Synthetic peptide
EPAGPRL

SEQ ID NO: 1681 - protein, 7 aa, Artificial Sequence
  Description of Artificial Sequence: Synthetic peptide
EPALPYA

SEQ ID NO: 1682 - protein, 7 aa, Artificial Sequence
  Description of Artificial Sequence: Synthetic peptide
EPATGSS

SEQ ID NO: 1683 - protein, 7 aa, Artificial Sequence
  Description of Artificial Sequence: Synthetic peptide
EPDSAYS

SEQ ID NO: 1684 - protein, 7 aa, Artificial Sequence
  Description of Artificial Sequence: Synthetic peptide
EPFDAKT

SEQ ID NO: 1685 - protein, 7 aa, Artificial Sequence
  Description of Artificial Sequence: Synthetic peptide
EPFSNSP

SEQ ID NO: 1686 - protein, 7 aa, Artificial Sequence
  Description of Artificial Sequence: Synthetic peptide
EPGGNHL

SEQ ID NO: 1687 - protein, 7 aa, Artificial Sequence
  Description of Artificial Sequence: Synthetic peptide
EPGHARA

SEQ ID NO: 1688 - protein, 7 aa, Artificial Sequence
  Description of Artificial Sequence: Synthetic peptide
EPGRTGF

SEQ ID NO: 1689 - protein, 7 aa, Artificial Sequence
  Description of Artificial Sequence: Synthetic peptide
EPGVVGC

SEQ ID NO: 1690 - protein, 7 aa, Artificial Sequence
  Description of Artificial Sequence: Synthetic peptide
EPHAPER

SEQ ID NO: 1691 - protein, 7 aa, Artificial Sequence
  Description of Artificial Sequence: Synthetic peptide
EPHVPGA

SEQ ID NO: 1692 - protein, 7 aa, Artificial Sequence
  Description of Artificial Sequence: Synthetic peptide
EPKHQFS

SEQ ID NO: 1693 - protein, 7 aa, Artificial Sequence
  Description of Artificial Sequence: Synthetic peptide
EPKRGWS

SEQ ID NO: 1694 - protein, 7 aa, Artificial Sequence
  Description of Artificial Sequence: Synthetic peptide
EPKSASI

SEQ ID NO: 1695 - protein, 7 aa, Artificial Sequence
  Description of Artificial Sequence: Synthetic peptide
EPLNSSG

SEQ ID NO: 1696 - protein, 7 aa, Artificial Sequence
  Description of Artificial Sequence: Synthetic peptide
EPLSANR

SEQ ID NO: 1697 - protein, 7 aa, Artificial Sequence
  Description of Artificial Sequence: Synthetic peptide
EPNATSV

SEQ ID NO: 1698 - protein, 7 aa, Artificial Sequence
  Description of Artificial Sequence: Synthetic peptide
EPNHPVS

SEQ ID NO: 1699 - protein, 7 aa, Artificial Sequence
  Description of Artificial Sequence: Synthetic peptide
EPPSSLK

SEQ ID NO: 1700 - protein, 7 aa, Artificial Sequence
  Description of Artificial Sequence: Synthetic peptide
EPQRPLR

SEQ ID NO: 1701 - protein, 7 aa, Artificial Sequence
  Description of Artificial Sequence: Synthetic peptide
EPSNESA

SEQ ID NO: 1702 - protein, 7 aa, Artificial Sequence
  Description of Artificial Sequence: Synthetic peptide
EPSNSHA

SEQ ID NO: 1703 - protein, 7 aa, Artificial Sequence
  Description of Artificial Sequence: Synthetic peptide
EPSYLPS

SEQ ID NO: 1704 - protein, 7 aa, Artificial Sequence
  Description of Artificial Sequence: Synthetic peptide
EPTERIS

SEQ ID NO: 1705 - protein, 7 aa, Artificial Sequence
  Description of Artificial Sequence: Synthetic peptide
EPTIYLT

SEQ ID NO: 1706 - protein, 7 aa, Artificial Sequence
  Description of Artificial Sequence: Synthetic peptide
EPTMRSI

SEQ ID NO: 1707 - protein, 7 aa, Artificial Sequence
  Description of Artificial Sequence: Synthetic peptide
EPTRPAT

SEQ ID NO: 1708 - protein, 7 aa, Artificial Sequence
  Description of Artificial Sequence: Synthetic peptide
EPTRSSS

SEQ ID NO: 1709 - protein, 7 aa, Artificial Sequence
  Description of Artificial Sequence: Synthetic peptide
EPTRTKM

SEQ ID NO: 1710 - protein, 7 aa, Artificial Sequence
  Description of Artificial Sequence: Synthetic peptide
EPVIGFP

SEQ ID NO: 1711 - protein, 7 aa, Artificial Sequence
  Description of Artificial Sequence: Synthetic peptide
EPVSTAA

SEQ ID NO: 1712 - protein, 7 aa, Artificial Sequence
  Description of Artificial Sequence: Synthetic peptide
EPYLSAK

SEQ ID NO: 1713 - protein, 7 aa, Artificial Sequence
  Description of Artificial Sequence: Synthetic peptide
EPYSPAI

SEQ ID NO: 1714 - protein, 7 aa, Artificial Sequence
  Description of Artificial Sequence: Synthetic peptide
EQAALSF

SEQ ID NO: 1715 - protein, 7 aa, Artificial Sequence
  Description of Artificial Sequence: Synthetic peptide
EQALKPE

SEQ ID NO: 1716 - protein, 7 aa, Artificial Sequence
  Description of Artificial Sequence: Synthetic peptide
EQARLDV

SEQ ID NO: 1717 - protein, 7 aa, Artificial Sequence
  Description of Artificial Sequence: Synthetic peptide
EQASFKI

SEQ ID NO: 1718 - protein, 7 aa, Artificial Sequence
  Description of Artificial Sequence: Synthetic peptide
EQFAAPV

SEQ ID NO: 1719 - protein, 7 aa, Artificial Sequence
  Description of Artificial Sequence: Synthetic peptide
EQGTPSA

SEQ ID NO: 1720 - protein, 7 aa, Artificial Sequence
  Description of Artificial Sequence: Synthetic peptide
EQKPLTR

SEQ ID NO: 1721 - protein, 7 aa, Artificial Sequence
  Description of Artificial Sequence: Synthetic peptide
EQLKDYE

SEQ ID NO: 1722 - protein, 7 aa, Artificial Sequence
  Description of Artificial Sequence: Synthetic peptide
EQNSRGL

SEQ ID NO: 1723 - protein, 7 aa, Artificial Sequence
  Description of Artificial Sequence: Synthetic peptide
EQPKYSK

SEQ ID NO: 1724 - protein, 7 aa, Artificial Sequence
  Description of Artificial Sequence: Synthetic peptide
EQQCPRS

SEQ ID NO: 1725 - protein, 7 aa, Artificial Sequence
  Description of Artificial Sequence: Synthetic peptide
EQRDRNG

SEQ ID NO: 1726 - protein, 7 aa, Artificial Sequence
  Description of Artificial Sequence: Synthetic peptide
EQRGTIL

SEQ ID NO: 1727 - protein, 7 aa, Artificial Sequence
  Description of Artificial Sequence: Synthetic peptide
EQRLSQS

SEQ ID NO: 1728 - protein, 7 aa, Artificial Sequence
  Description of Artificial Sequence: Synthetic peptide
EQRRSET

SEQ ID NO: 1729 - protein, 7 aa, Artificial Sequence
  Description of Artificial Sequence: Synthetic peptide
EQSYRDS

SEQ ID NO: 1730 - protein, 7 aa, Artificial Sequence
  Description of Artificial Sequence: Synthetic peptide
EQTGHRA

SEQ ID NO: 1731 - protein, 7 aa, Artificial Sequence
  Description of Artificial Sequence: Synthetic peptide
EQYRDNS

SEQ ID NO: 1732 - protein, 7 aa, Artificial Sequence
  Description of Artificial Sequence: Synthetic peptide
ERAAGLR

SEQ ID NO: 1733 - protein, 7 aa, Artificial Sequence
  Description of Artificial Sequence: Synthetic peptide
ERAGPHD

SEQ ID NO: 1734 - protein, 7 aa, Artificial Sequence
  Description of Artificial Sequence: Synthetic peptide
ERAPPGL

SEQ ID NO: 1735 - protein, 7 aa, Artificial Sequence
  Description of Artificial Sequence: Synthetic peptide
ERDSRKA

SEQ ID NO: 1736 - protein, 7 aa, Artificial Sequence
  Description of Artificial Sequence: Synthetic peptide
ERFEGLR

SEQ ID NO: 1737 - protein, 7 aa, Artificial Sequence
  Description of Artificial Sequence: Synthetic peptide
ERFLPEL

SEQ ID NO: 1738 - protein, 7 aa, Artificial Sequence
  Description of Artificial Sequence: Synthetic peptide
ERFTSVP

SEQ ID NO: 1739 - protein, 7 aa, Artificial Sequence
  Description of Artificial Sequence: Synthetic peptide
ERGMTTP

SEQ ID NO: 1740 - protein, 7 aa, Artificial Sequence
  Description of Artificial Sequence: Synthetic peptide
ERGVIHP

SEQ ID NO: 1741 - protein, 7 aa, Artificial Sequence
  Description of Artificial Sequence: Synthetic peptide
ERHADMT

SEQ ID NO: 1742 - protein, 7 aa, Artificial Sequence
  Description of Artificial Sequence: Synthetic peptide
ERHDLPR

SEQ ID NO: 1743 - protein, 7 aa, Artificial Sequence
  Description of Artificial Sequence: Synthetic peptide
ERHDVGP

SEQ ID NO: 1744 - protein, 7 aa, Artificial Sequence
  Description of Artificial Sequence: Synthetic peptide
ERHIRME

SEQ ID NO: 1745 - protein, 7 aa, Artificial Sequence
  Description of Artificial Sequence: Synthetic peptide
ERHRVID

SEQ ID NO: 1746 - protein, 7 aa, Artificial Sequence
  Description of Artificial Sequence: Synthetic peptide
ERIRTPE

SEQ ID NO: 1747 - protein, 7 aa, Artificial Sequence
  Description of Artificial Sequence: Synthetic peptide
ERISPSI

SEQ ID NO: 1748 - protein, 7 aa, Artificial Sequence
  Description of Artificial Sequence: Synthetic peptide
ERKGLGL

SEQ ID NO: 1749 - protein, 7 aa, Artificial Sequence
  Description of Artificial Sequence: Synthetic peptide
ERKNQSP

SEQ ID NO: 1750 - protein, 7 aa, Artificial Sequence
  Description of Artificial Sequence: Synthetic peptide
ERKTPSD

SEQ ID NO: 1751 - protein, 7 aa, Artificial Sequence
  Description of Artificial Sequence: Synthetic peptide
ERLESSL

SEQ ID NO: 1752 - protein, 7 aa, Artificial Sequence
  Description of Artificial Sequence: Synthetic peptide
ERLSPVA

SEQ ID NO: 1753 - protein, 7 aa, Artificial Sequence
  Description of Artificial Sequence: Synthetic peptide
ERLSSEP

SEQ ID NO: 1754 - protein, 7 aa, Artificial Sequence
  Description of Artificial Sequence: Synthetic peptide
ERMAAPF

SEQ ID NO: 1755 - protein, 7 aa, Artificial Sequence
  Description of Artificial Sequence: Synthetic peptide
ERNFESG

SEQ ID NO: 1756 - protein, 7 aa, Artificial Sequence
  Description of Artificial Sequence: Synthetic peptide
ERNGLPA

SEQ ID NO: 1757 - protein, 7 aa, Artificial Sequence
  Description of Artificial Sequence: Synthetic peptide
ERNRVDS

SEQ ID NO: 1758 - protein, 7 aa, Artificial Sequence
  Description of Artificial Sequence: Synthetic peptide
ERNSPVA

SEQ ID NO: 1759 - protein, 7 aa, Artificial Sequence
  Description of Artificial Sequence: Synthetic peptide
ERPDGPS

SEQ ID NO: 1760 - protein, 7 aa, Artificial Sequence
  Description of Artificial Sequence: Synthetic peptide
ERPPLVM

SEQ ID NO: 1761 - protein, 7 aa, Artificial Sequence
  Description of Artificial Sequence: Synthetic peptide
ERPYATV

SEQ ID NO: 1762 - protein, 7 aa, Artificial Sequence
  Description of Artificial Sequence: Synthetic peptide
ERQAFHE

SEQ ID NO: 1763 - protein, 7 aa, Artificial Sequence
  Description of Artificial Sequence: Synthetic peptide
ERQPMIK

SEQ ID NO: 1764 - protein, 7 aa, Artificial Sequence
  Description of Artificial Sequence: Synthetic peptide
ERQRDSA

SEQ ID NO: 1765 - protein, 7 aa, Artificial Sequence
  Description of Artificial Sequence: Synthetic peptide
ERQTTLA

SEQ ID NO: 1766 - protein, 7 aa, Artificial Sequence
  Description of Artificial Sequence: Synthetic peptide
ERRIGAS

SEQ ID NO: 1767 - protein, 7 aa, Artificial Sequence
  Description of Artificial Sequence: Synthetic peptide
ERRPGTS

SEQ ID NO: 1768 - protein, 7 aa, Artificial Sequence
  Description of Artificial Sequence: Synthetic peptide
ERSKPVA

SEQ ID NO: 1769 - protein, 7 aa, Artificial Sequence
  Description of Artificial Sequence: Synthetic peptide
ERSRGQQ

SEQ ID NO: 1770 - protein, 7 aa, Artificial Sequence
  Description of Artificial Sequence: Synthetic peptide
ERSSPQP

SEQ ID NO: 1771 - protein, 7 aa, Artificial Sequence
  Description of Artificial Sequence: Synthetic peptide
ERSSRET

SEQ ID NO: 1772 - protein, 7 aa, Artificial Sequence
  Description of Artificial Sequence: Synthetic peptide
ERTAVGV

SEQ ID NO: 1773 - protein, 7 aa, Artificial Sequence
  Description of Artificial Sequence: Synthetic peptide
ERTKPPT

SEQ ID NO: 1774 - protein, 7 aa, Artificial Sequence
  Description of Artificial Sequence: Synthetic peptide
ERYPSIS

SEQ ID NO: 1775 - protein, 7 aa, Artificial Sequence
  Description of Artificial Sequence: Synthetic peptide
ESAFKRC

SEQ ID NO: 1776 - protein, 7 aa, Artificial Sequence
  Description of Artificial Sequence: Synthetic peptide
ESAWMQD

SEQ ID NO: 1777 - protein, 7 aa, Artificial Sequence
  Description of Artificial Sequence: Synthetic peptide
ESFTGVH

SEQ ID NO: 1778 - protein, 7 aa, Artificial Sequence
  Description of Artificial Sequence: Synthetic peptide
ESGDKLR

SEQ ID NO: 1779 - protein, 7 aa, Artificial Sequence
  Description of Artificial Sequence: Synthetic peptide
ESGILQL

SEQ ID NO: 1780 - protein, 7 aa, Artificial Sequence
  Description of Artificial Sequence: Synthetic peptide
ESGLTQT

SEQ ID NO: 1781 - protein, 7 aa, Artificial Sequence
  Description of Artificial Sequence: Synthetic peptide
ESGRPMV

SEQ ID NO: 1782 - protein, 7 aa, Artificial Sequence
  Description of Artificial Sequence: Synthetic peptide
ESITRSV

SEQ ID NO: 1783 - protein, 7 aa, Artificial Sequence
  Description of Artificial Sequence: Synthetic peptide
ESIVGRR

SEQ ID NO: 1784 - protein, 7 aa, Artificial Sequence
  Description of Artificial Sequence: Synthetic peptide
ESKELTS

SEQ ID NO: 1785 - protein, 7 aa, Artificial Sequence
  Description of Artificial Sequence: Synthetic peptide
ESKGAHA

SEQ ID NO: 1786 - protein, 7 aa, Artificial Sequence
  Description of Artificial Sequence: Synthetic peptide
ESKHFSP

SEQ ID NO: 1787 - protein, 7 aa, Artificial Sequence
  Description of Artificial Sequence: Synthetic peptide
ESKIGRP

SEQ ID NO: 1788 - protein, 7 aa, Artificial Sequence
  Description of Artificial Sequence: Synthetic peptide
ESKPNSR

SEQ ID NO: 1789 - protein, 7 aa, Artificial Sequence
  Description of Artificial Sequence: Synthetic peptide
ESPDRST

SEQ ID NO: 1790 - protein, 7 aa, Artificial Sequence
  Description of Artificial Sequence: Synthetic peptide
ESPFSVP

SEQ ID NO: 1791 - protein, 7 aa, Artificial Sequence
  Description of Artificial Sequence: Synthetic peptide
ESPKADP

SEQ ID NO: 1792 - protein, 7 aa, Artificial Sequence
  Description of Artificial Sequence: Synthetic peptide
ESPMVSP

SEQ ID NO: 1793 - protein, 7 aa, Artificial Sequence
  Description of Artificial Sequence: Synthetic peptide
ESQVLVY

SEQ ID NO: 1794 - protein, 7 aa, Artificial Sequence
  Description of Artificial Sequence: Synthetic peptide
ESRQAFP

SEQ ID NO: 1795 - protein, 7 aa, Artificial Sequence
  Description of Artificial Sequence: Synthetic peptide
ESRSAAY

SEQ ID NO: 1796 - protein, 7 aa, Artificial Sequence
  Description of Artificial Sequence: Synthetic peptide
ESRSALP

SEQ ID NO: 1797 - protein, 7 aa, Artificial Sequence
  Description of Artificial Sequence: Synthetic peptide
ESRVGYI

SEQ ID NO: 1798 - protein, 7 aa, Artificial Sequence
  Description of Artificial Sequence: Synthetic peptide
ESRVSLG

SEQ ID NO: 1799 - protein, 7 aa, Artificial Sequence
  Description of Artificial Sequence: Synthetic peptide
ESSQHLD

SEQ ID NO: 1800 - protein, 7 aa, Artificial Sequence
  Description of Artificial Sequence: Synthetic peptide
ESSREFH

SEQ ID NO: 1801 - protein, 7 aa, Artificial Sequence
  Description of Artificial Sequence: Synthetic peptide
ESSRELH

SEQ ID NO: 1802 - protein, 7 aa, Artificial Sequence
  Description of Artificial Sequence: Synthetic peptide
ESSSELH

SEQ ID NO: 1803 - protein, 7 aa, Artificial Sequence
  Description of Artificial Sequence: Synthetic peptide
ESSSRML

SEQ ID NO: 1804 - protein, 7 aa, Artificial Sequence
  Description of Artificial Sequence: Synthetic peptide
ESTALKR

SEQ ID NO: 1805 - protein, 7 aa, Artificial Sequence
  Description of Artificial Sequence: Synthetic peptide
ESTSSRS

SEQ ID NO: 1806 - protein, 7 aa, Artificial Sequence
  Description of Artificial Sequence: Synthetic peptide
ESVENDS

SEQ ID NO: 1807 - protein, 7 aa, Artificial Sequence
  Description of Artificial Sequence: Synthetic peptide
ESVFKAA

SEQ ID NO: 1808 - protein, 7 aa, Artificial Sequence
  Description of Artificial Sequence: Synthetic peptide
ESVGYAD

SEQ ID NO: 1809 - protein, 7 aa, Artificial Sequence
  Description of Artificial Sequence: Synthetic peptide
ESVRLQN

SEQ ID NO: 1810 - protein, 7 aa, Artificial Sequence
  Description of Artificial Sequence: Synthetic peptide
ESYTESL

SEQ ID NO: 1811 - protein, 7 aa, Artificial Sequence
  Description of Artificial Sequence: Synthetic peptide
ETAKSGQ

SEQ ID NO: 1812 - protein, 7 aa, Artificial Sequence
  Description of Artificial Sequence: Synthetic peptide
ETDRKLS

SEQ ID NO: 1813 - protein, 7 aa, Artificial Sequence
  Description of Artificial Sequence: Synthetic peptide
ETDRNAS

SEQ ID NO: 1814 - protein, 7 aa, Artificial Sequence
  Description of Artificial Sequence: Synthetic peptide
ETEHTVV

SEQ ID NO: 1815 - protein, 7 aa, Artificial Sequence
  Description of Artificial Sequence: Synthetic peptide
ETFTRSV

SEQ ID NO: 1816 - protein, 7 aa, Artificial Sequence
  Description of Artificial Sequence: Synthetic peptide
ETGKDRM

SEQ ID NO: 1817 - protein, 7 aa, Artificial Sequence
  Description of Artificial Sequence: Synthetic peptide
ETGSHTT

SEQ ID NO: 1818 - protein, 7 aa, Artificial Sequence
  Description of Artificial Sequence: Synthetic peptide
ETGSRAV

SEQ ID NO: 1819 - protein, 7 aa, Artificial Sequence
  Description of Artificial Sequence: Synthetic peptide
ETKFSMG

SEQ ID NO: 1820 - protein, 7 aa, Artificial Sequence
  Description of Artificial Sequence: Synthetic peptide
ETKGSVA

SEQ ID NO: 1821 - protein, 7 aa, Artificial Sequence
  Description of Artificial Sequence: Synthetic peptide
ETKKDYS

SEQ ID NO: 1822 - protein, 7 aa, Artificial Sequence
  Description of Artificial Sequence: Synthetic peptide
ETLEVSL

SEQ ID NO: 1823 - protein, 7 aa, Artificial Sequence
  Description of Artificial Sequence: Synthetic peptide
ETLSGNE

SEQ ID NO: 1824 - protein, 7 aa, Artificial Sequence
  Description of Artificial Sequence: Synthetic peptide
ETMRKDP

SEQ ID NO: 1825 - protein, 7 aa, Artificial Sequence
  Description of Artificial Sequence: Synthetic peptide
ETNFSGA

SEQ ID NO: 1826 - protein, 7 aa, Artificial Sequence
  Description of Artificial Sequence: Synthetic peptide
ETNPRCS

SEQ ID NO: 1827 - protein, 7 aa, Artificial Sequence
  Description of Artificial Sequence: Synthetic peptide
ETPFKPS

SEQ ID NO: 1828 - protein, 7 aa, Artificial Sequence
  Description of Artificial Sequence: Synthetic peptide
ETPIDSD

SEQ ID NO: 1829 - protein, 7 aa, Artificial Sequence
  Description of Artificial Sequence: Synthetic peptide
ETPNHSR

SEQ ID NO: 1830 - protein, 7 aa, Artificial Sequence
  Description of Artificial Sequence: Synthetic peptide
ETRGHLI

SEQ ID NO: 1831 - protein, 7 aa, Artificial Sequence
  Description of Artificial Sequence: Synthetic peptide
ETRLVPT

SEQ ID NO: 1832 - protein, 7 aa, Artificial Sequence
  Description of Artificial Sequence: Synthetic peptide
ETRNLHG

SEQ ID NO: 1833 - protein, 7 aa, Artificial Sequence
  Description of Artificial Sequence: Synthetic peptide
ETRNQFG

SEQ ID NO: 1834 - protein, 7 aa, Artificial Sequence
  Description of Artificial Sequence: Synthetic peptide
ETRSTRE

SEQ ID NO: 1835 - protein, 7 aa, Artificial Sequence
  Description of Artificial Sequence: Synthetic peptide
ETRYPDM

SEQ ID NO: 1836 - protein, 7 aa, Artificial Sequence
  Description of Artificial Sequence: Synthetic peptide
ETSHSVS

SEQ ID NO: 1837 - protein, 7 aa, Artificial Sequence
  Description of Artificial Sequence: Synthetic peptide
ETSRAST

SEQ ID NO: 1838 - protein, 7 aa, Artificial Sequence
  Description of Artificial Sequence: Synthetic peptide
ETSRPTV

SEQ ID NO: 1839 - protein, 7 aa, Artificial Sequence
  Description of Artificial Sequence: Synthetic peptide
ETSSAYL

SEQ ID NO: 1840 - protein, 7 aa, Artificial Sequence
  Description of Artificial Sequence: Synthetic peptide
ETTQNYI

SEQ ID NO: 1841 - protein, 7 aa, Artificial Sequence
  Description of Artificial Sequence: Synthetic peptide
ETTSLPR

SEQ ID NO: 1842 - protein, 7 aa, Artificial Sequence
  Description of Artificial Sequence: Synthetic peptide
ETTVQAS

SEQ ID NO: 1843 - protein, 7 aa, Artificial Sequence
  Description of Artificial Sequence: Synthetic peptide
ETVFHVA

SEQ ID NO: 1844 - protein, 7 aa, Artificial Sequence
  Description of Artificial Sequence: Synthetic peptide
EVAVQPM

SEQ ID NO: 1845 - protein, 7 aa, Artificial Sequence
  Description of Artificial Sequence: Synthetic peptide
EVGRNST

SEQ ID NO: 1846 - protein, 7 aa, Artificial Sequence
  Description of Artificial Sequence: Synthetic peptide
EVHPGQA

SEQ ID NO: 1847 - protein, 7 aa, Artificial Sequence
  Description of Artificial Sequence: Synthetic peptide
EVKEQTV

SEQ ID NO: 1848 - protein, 7 aa, Artificial Sequence
  Description of Artificial Sequence: Synthetic peptide
EVKSFSS

SEQ ID NO: 1849 - protein, 7 aa, Artificial Sequence
  Description of Artificial Sequence: Synthetic peptide
EVPAARS

SEQ ID NO: 1850 - protein, 7 aa, Artificial Sequence
  Description of Artificial Sequence: Synthetic peptide
EVPNSSA

SEQ ID NO: 1851 - protein, 7 aa, Artificial Sequence
  Description of Artificial Sequence: Synthetic peptide
EVQLPAR

SEQ ID NO: 1852 - protein, 7 aa, Artificial Sequence
  Description of Artificial Sequence: Synthetic peptide
EVRKGAQ

SEQ ID NO: 1853 - protein, 7 aa, Artificial Sequence
  Description of Artificial Sequence: Synthetic peptide
EVRLSNA

SEQ ID NO: 1854 - protein, 7 aa, Artificial Sequence
  Description of Artificial Sequence: Synthetic peptide
EVSFLPP

SEQ ID NO: 1855 - protein, 7 aa, Artificial Sequence
  Description of Artificial Sequence: Synthetic peptide
EVSLSTR

SEQ ID NO: 1856 - protein, 7 aa, Artificial Sequence
  Description of Artificial Sequence: Synthetic peptide
EVSMLSK

SEQ ID NO: 1857 - protein, 7 aa, Artificial Sequence
  Description of Artificial Sequence: Synthetic peptide
EVTGRAG

SEQ ID NO: 1858 - protein, 7 aa, Artificial Sequence
  Description of Artificial Sequence: Synthetic peptide
EVTMKHT

SEQ ID NO: 1859 - protein, 7 aa, Artificial Sequence
  Description of Artificial Sequence: Synthetic peptide
EVTNPSA

SEQ ID NO: 1860 - protein, 7 aa, Artificial Sequence
  Description of Artificial Sequence: Synthetic peptide
EVTVGLP

SEQ ID NO: 1861 - protein, 7 aa, Artificial Sequence
  Description of Artificial Sequence: Synthetic peptide
EWADSSG

SEQ ID NO: 1862 - protein, 7 aa, Artificial Sequence
  Description of Artificial Sequence: Synthetic peptide
EWNRQAN

SEQ ID NO: 1863 - protein, 7 aa, Artificial Sequence
  Description of Artificial Sequence: Synthetic peptide
EYASLGL

SEQ ID NO: 1864 - protein, 7 aa, Artificial Sequence
  Description of Artificial Sequence: Synthetic peptide
EYDHSML

SEQ ID NO: 1865 - protein, 7 aa, Artificial Sequence
  Description of Artificial Sequence: Synthetic peptide
EYIRGKE

SEQ ID NO: 1866 - protein, 7 aa, Artificial Sequence
  Description of Artificial Sequence: Synthetic peptide
EYLDESG

SEQ ID NO: 1867 - protein, 7 aa, Artificial Sequence
  Description of Artificial Sequence: Synthetic peptide
EYLPNSA

SEQ ID NO: 1868 - protein, 7 aa, Artificial Sequence
  Description of Artificial Sequence: Synthetic peptide
EYPAHLT

SEQ ID NO: 1869 - protein, 7 aa, Artificial Sequence
  Description of Artificial Sequence: Synthetic peptide
EYPLNTG

SEQ ID NO: 1870 - protein, 7 aa, Artificial Sequence
  Description of Artificial Sequence: Synthetic peptide
EYQRPDP

SEQ ID NO: 1871 - protein, 7 aa, Artificial Sequence
  Description of Artificial Sequence: Synthetic peptide
EYSFPKE

SEQ ID NO: 1872 - protein, 7 aa, Artificial Sequence
  Description of Artificial Sequence: Synthetic peptide
EYTPISG

SEQ ID NO: 1873 - protein, 7 aa, Artificial Sequence
  Description of Artificial Sequence: Synthetic peptide
EYVGVQR

SEQ ID NO: 1874 - protein, 7 aa, Artificial Sequence
  Description of Artificial Sequence: Synthetic peptide
FAAKDVT

SEQ ID NO: 1875 - protein, 7 aa, Artificial Sequence
  Description of Artificial Sequence: Synthetic peptide
FAAKMPS

SEQ ID NO: 1876 - protein, 7 aa, Artificial Sequence
  Description of Artificial Sequence: Synthetic peptide
FAALRVD

SEQ ID NO: 1877 - protein, 7 aa, Artificial Sequence
  Description of Artificial Sequence: Synthetic peptide
FAAQVED

SEQ ID NO: 1878 - protein, 7 aa, Artificial Sequence
  Description of Artificial Sequence: Synthetic peptide
FAASSQD

SEQ ID NO: 1879 - protein, 7 aa, Artificial Sequence
  Description of Artificial Sequence: Synthetic peptide
FADAMVM

SEQ ID NO: 1880 - protein, 7 aa, Artificial Sequence
  Description of Artificial Sequence: Synthetic peptide
FAEKSRG

SEQ ID NO: 1881 - protein, 7 aa, Artificial Sequence
  Description of Artificial Sequence: Synthetic peptide
FAGIAQY

SEQ ID NO: 1882 - protein, 7 aa, Artificial Sequence
  Description of Artificial Sequence: Synthetic peptide
FAGKHQN

SEQ ID NO: 1883 - protein, 7 aa, Artificial Sequence
  Description of Artificial Sequence: Synthetic peptide
FAGLTPV

SEQ ID NO: 1884 - protein, 7 aa, Artificial Sequence
  Description of Artificial Sequence: Synthetic peptide
FAGNSPS

SEQ ID NO: 1885 - protein, 7 aa, Artificial Sequence
  Description of Artificial Sequence: Synthetic peptide
FAHTARP

SEQ ID NO: 1886 - protein, 7 aa, Artificial Sequence
  Description of Artificial Sequence: Synthetic peptide
FAKHGGP

SEQ ID NO: 1887 - protein, 7 aa, Artificial Sequence
  Description of Artificial Sequence: Synthetic peptide
FAKPASL

SEQ ID NO: 1888 - protein, 7 aa, Artificial Sequence
  Description of Artificial Sequence: Synthetic peptide
FALEGRS

SEQ ID NO: 1889 - protein, 7 aa, Artificial Sequence
  Description of Artificial Sequence: Synthetic peptide
FALSASL

SEQ ID NO: 1890 - protein, 7 aa, Artificial Sequence
  Description of Artificial Sequence: Synthetic peptide
FAMANDK

SEQ ID NO: 1891 - protein, 7 aa, Artificial Sequence
  Description of Artificial Sequence: Synthetic peptide
FANRATI

SEQ ID NO: 1892 - protein, 7 aa, Artificial Sequence
  Description of Artificial Sequence: Synthetic peptide
FANSAVE

SEQ ID NO: 1893 - protein, 7 aa, Artificial Sequence
  Description of Artificial Sequence: Synthetic peptide
FAPGHAI

SEQ ID NO: 1894 - protein, 7 aa, Artificial Sequence
  Description of Artificial Sequence: Synthetic peptide
FAPLSPH

SEQ ID NO: 1895 - protein, 7 aa, Artificial Sequence
  Description of Artificial Sequence: Synthetic peptide
FAPPPAF

SEQ ID NO: 1896 - protein, 7 aa, Artificial Sequence
  Description of Artificial Sequence: Synthetic peptide
FAPSRND

SEQ ID NO: 1897 - protein, 7 aa, Artificial Sequence
  Description of Artificial Sequence: Synthetic peptide
FAQKLSP

SEQ ID NO: 1898 - protein, 7 aa, Artificial Sequence
  Description of Artificial Sequence: Synthetic peptide
FAQKNLS

SEQ ID NO: 1899 - protein, 7 aa, Artificial Sequence
  Description of Artificial Sequence: Synthetic peptide
FARNPDA

SEQ ID NO: 1900 - protein, 7 aa, Artificial Sequence
  Description of Artificial Sequence: Synthetic peptide
FARPDSM

SEQ ID NO: 1901 - protein, 7 aa, Artificial Sequence
  Description of Artificial Sequence: Synthetic peptide
FARSSIP

SEQ ID NO: 1902 - protein, 7 aa, Artificial Sequence
  Description of Artificial Sequence: Synthetic peptide
FASAAPR

SEQ ID NO: 1903 - protein, 7 aa, Artificial Sequence
  Description of Artificial Sequence: Synthetic peptide
FASARAQ

SEQ ID NO: 1904 - protein, 7 aa, Artificial Sequence
  Description of Artificial Sequence: Synthetic peptide
FASGHFN

SEQ ID NO: 1905 - protein, 7 aa, Artificial Sequence
  Description of Artificial Sequence: Synthetic peptide
FASLVTN

SEQ ID NO: 1906 - protein, 7 aa, Artificial Sequence
  Description of Artificial Sequence: Synthetic peptide
FASSRNN

SEQ ID NO: 1907 - protein, 7 aa, Artificial Sequence
  Description of Artificial Sequence: Synthetic peptide
FASSSSH

SEQ ID NO: 1908 - protein, 7 aa, Artificial Sequence
  Description of Artificial Sequence: Synthetic peptide
FASVRTV

SEQ ID NO: 1909 - protein, 7 aa, Artificial Sequence
  Description of Artificial Sequence: Synthetic peptide
FASYGSP

SEQ ID NO: 1910 - protein, 7 aa, Artificial Sequence
  Description of Artificial Sequence: Synthetic peptide
FATSGYA

SEQ ID NO: 1911 - protein, 7 aa, Artificial Sequence
  Description of Artificial Sequence: Synthetic peptide
FATSTTP

SEQ ID NO: 1912 - protein, 7 aa, Artificial Sequence
  Description of Artificial Sequence: Synthetic peptide
FATTKLD

SEQ ID NO: 1913 - protein, 7 aa, Artificial Sequence
  Description of Artificial Sequence: Synthetic peptide
FCSEQHS

SEQ ID NO: 1914 - protein, 7 aa, Artificial Sequence
  Description of Artificial Sequence: Synthetic peptide
FDAPQTR

SEQ ID NO: 1915 - protein, 7 aa, Artificial Sequence
  Description of Artificial Sequence: Synthetic peptide
FDAYHRL

SEQ ID NO: 1916 - protein, 7 aa, Artificial Sequence
  Description of Artificial Sequence: Synthetic peptide
FDDFALD

SEQ ID NO: 1917 - protein, 7 aa, Artificial Sequence
  Description of Artificial Sequence: Synthetic peptide
FDEAHAP

SEQ ID NO: 1918 - protein, 7 aa, Artificial Sequence
  Description of Artificial Sequence: Synthetic peptide
FDEDDLA

SEQ ID NO: 1919 - protein, 7 aa, Artificial Sequence
  Description of Artificial Sequence: Synthetic peptide
FDGARSE

SEQ ID NO: 1920 - protein, 7 aa, Artificial Sequence
  Description of Artificial Sequence: Synthetic peptide
FDGIRPT

SEQ ID NO: 1921 - protein, 7 aa, Artificial Sequence
  Description of Artificial Sequence: Synthetic peptide
FDHPSFP

SEQ ID NO: 1922 - protein, 7 aa, Artificial Sequence
  Description of Artificial Sequence: Synthetic peptide
FDHPVRM

SEQ ID NO: 1923 - protein, 7 aa, Artificial Sequence
  Description of Artificial Sequence: Synthetic peptide
FDHTKAW

SEQ ID NO: 1924 - protein, 7 aa, Artificial Sequence
  Description of Artificial Sequence: Synthetic peptide
FDKSTKY

SEQ ID NO: 1925 - protein, 7 aa, Artificial Sequence
  Description of Artificial Sequence: Synthetic peptide
FDQHTRS

SEQ ID NO: 1926 - protein, 7 aa, Artificial Sequence
  Description of Artificial Sequence: Synthetic peptide
FDRAMQR

SEQ ID NO: 1927 - protein, 7 aa, Artificial Sequence
  Description of Artificial Sequence: Synthetic peptide
FDRQTQI

SEQ ID NO: 1928 - protein, 7 aa, Artificial Sequence
  Description of Artificial Sequence: Synthetic peptide
FDSVRLS

SEQ ID NO: 1929 - protein, 7 aa, Artificial Sequence
  Description of Artificial Sequence: Synthetic peptide
FDTAVNA

SEQ ID NO: 1930 - protein, 7 aa, Artificial Sequence
  Description of Artificial Sequence: Synthetic peptide
FDTGKFA

SEQ ID NO: 1931 - protein, 7 aa, Artificial Sequence
  Description of Artificial Sequence: Synthetic peptide
FDYGPMD

SEQ ID NO: 1932 - protein, 7 aa, Artificial Sequence
  Description of Artificial Sequence: Synthetic peptide
FEAKSSL

SEQ ID NO: 1933 - protein, 7 aa, Artificial Sequence
  Description of Artificial Sequence: Synthetic peptide
FEAKVTR

SEQ ID NO: 1934 - protein, 7 aa, Artificial Sequence
  Description of Artificial Sequence: Synthetic peptide
FEARLGT

SEQ ID NO: 1935 - protein, 7 aa, Artificial Sequence
  Description of Artificial Sequence: Synthetic peptide
FEDGSLA

SEQ ID NO: 1936 - protein, 7 aa, Artificial Sequence
  Description of Artificial Sequence: Synthetic peptide
FEGSQPP

SEQ ID NO: 1937 - protein, 7 aa, Artificial Sequence
  Description of Artificial Sequence: Synthetic peptide
FEGVQSS

SEQ ID NO: 1938 - protein, 7 aa, Artificial Sequence
  Description of Artificial Sequence: Synthetic peptide
FEHHYTP

SEQ ID NO: 1939 - protein, 7 aa, Artificial Sequence
  Description of Artificial Sequence: Synthetic peptide
FEKRLTI

SEQ ID NO: 1940 - protein, 7 aa, Artificial Sequence
  Description of Artificial Sequence: Synthetic peptide
FEKSLPD

SEQ ID NO: 1941 - protein, 7 aa, Artificial Sequence
  Description of Artificial Sequence: Synthetic peptide
FEMVSSL

SEQ ID NO: 1942 - protein, 7 aa, Artificial Sequence
  Description of Artificial Sequence: Synthetic peptide
FENKYHV

SEQ ID NO: 1943 - protein, 7 aa, Artificial Sequence
  Description of Artificial Sequence: Synthetic peptide
FEPAHAS

SEQ ID NO: 1944 - protein, 7 aa, Artificial Sequence
  Description of Artificial Sequence: Synthetic peptide
FEPSQLR

SEQ ID NO: 1945 - protein, 7 aa, Artificial Sequence
  Description of Artificial Sequence: Synthetic peptide
FEPVQNT

SEQ ID NO: 1946 - protein, 7 aa, Artificial Sequence
  Description of Artificial Sequence: Synthetic peptide
FEQLLDF

SEQ ID NO: 1947 - protein, 7 aa, Artificial Sequence
  Description of Artificial Sequence: Synthetic peptide
FERNRTS

SEQ ID NO: 1948 - protein, 7 aa, Artificial Sequence
  Description of Artificial Sequence: Synthetic peptide
FERPTVI

SEQ ID NO: 1949 - protein, 7 aa, Artificial Sequence
  Description of Artificial Sequence: Synthetic peptide
FERSSGT

SEQ ID NO: 1950 - protein, 7 aa, Artificial Sequence
  Description of Artificial Sequence: Synthetic peptide
FERVPLD

SEQ ID NO: 1951 - protein, 7 aa, Artificial Sequence
  Description of Artificial Sequence: Synthetic peptide
FESNSVL

SEQ ID NO: 1952 - protein, 7 aa, Artificial Sequence
  Description of Artificial Sequence: Synthetic peptide
FESTTSV

SEQ ID NO: 1953 - protein, 7 aa, Artificial Sequence
  Description of Artificial Sequence: Synthetic peptide
FETRYEA

SEQ ID NO: 1954 - protein, 7 aa, Artificial Sequence
  Description of Artificial Sequence: Synthetic peptide
FETTIRL

SEQ ID NO: 1955 - protein, 7 aa, Artificial Sequence
  Description of Artificial Sequence: Synthetic peptide
FEVPSTR

SEQ ID NO: 1956 - protein, 7 aa, Artificial Sequence
  Description of Artificial Sequence: Synthetic peptide
FEYHASG

SEQ ID NO: 1957 - protein, 7 aa, Artificial Sequence
  Description of Artificial Sequence: Synthetic peptide
FFGPGPT

SEQ ID NO: 1958 - protein, 7 aa, Artificial Sequence
  Description of Artificial Sequence: Synthetic peptide
FFPITSA

SEQ ID NO: 1959 - protein, 7 aa, Artificial Sequence
  Description of Artificial Sequence: Synthetic peptide
FFSDGRV

SEQ ID NO: 1960 - protein, 7 aa, Artificial Sequence
  Description of Artificial Sequence: Synthetic peptide
FGACRVS

SEQ ID NO: 1961 - protein, 7 aa, Artificial Sequence
  Description of Artificial Sequence: Synthetic peptide
FGAEPDA

SEQ ID NO: 1962 - protein, 7 aa, Artificial Sequence
  Description of Artificial Sequence: Synthetic peptide
FGDRPFP

SEQ ID NO: 1963 - protein, 7 aa, Artificial Sequence
  Description of Artificial Sequence: Synthetic peptide
FGGGRPE

SEQ ID NO: 1964 - protein, 7 aa, Artificial Sequence
  Description of Artificial Sequence: Synthetic peptide
FGGQGGQ

SEQ ID NO: 1965 - protein, 7 aa, Artificial Sequence
  Description of Artificial Sequence: Synthetic peptide
FGGTGQF

SEQ ID NO: 1966 - protein, 7 aa, Artificial Sequence
  Description of Artificial Sequence: Synthetic peptide
FGHMKTP

SEQ ID NO: 1967 - protein, 7 aa, Artificial Sequence
  Description of Artificial Sequence: Synthetic peptide
FGHPIAS

SEQ ID NO: 1968 - protein, 7 aa, Artificial Sequence
  Description of Artificial Sequence: Synthetic peptide
FGHVHLN

SEQ ID NO: 1969 - protein, 7 aa, Artificial Sequence
  Description of Artificial Sequence: Synthetic peptide
FGIAGSP

SEQ ID NO: 1970 - protein, 7 aa, Artificial Sequence
  Description of Artificial Sequence: Synthetic peptide
FGKISMT

SEQ ID NO: 1971 - protein, 7 aa, Artificial Sequence
  Description of Artificial Sequence: Synthetic peptide
FGLSPLP

SEQ ID NO: 1972 - protein, 7 aa, Artificial Sequence
  Description of Artificial Sequence: Synthetic peptide
FGLSSAA

SEQ ID NO: 1973 - protein, 7 aa, Artificial Sequence
  Description of Artificial Sequence: Synthetic peptide
FGLTRPE

SEQ ID NO: 1974 - protein, 7 aa, Artificial Sequence
  Description of Artificial Sequence: Synthetic peptide
FGNRLSN

SEQ ID NO: 1975 - protein, 7 aa, Artificial Sequence
  Description of Artificial Sequence: Synthetic peptide
FGPMLLG

SEQ ID NO: 1976 - protein, 7 aa, Artificial Sequence
  Description of Artificial Sequence: Synthetic peptide
FGPNKAD

SEQ ID NO: 1977 - protein, 7 aa, Artificial Sequence
  Description of Artificial Sequence: Synthetic peptide
FGPPSGF

SEQ ID NO: 1978 - protein, 7 aa, Artificial Sequence
  Description of Artificial Sequence: Synthetic peptide
FGQHAVL

SEQ ID NO: 1979 - protein, 7 aa, Artificial Sequence
  Description of Artificial Sequence: Synthetic peptide
FGQKHTE

SEQ ID NO: 1980 - protein, 7 aa, Artificial Sequence
  Description of Artificial Sequence: Synthetic peptide
FGQNRVT

SEQ ID NO: 1981 - protein, 7 aa, Artificial Sequence
  Description of Artificial Sequence: Synthetic peptide
FGQTALG

SEQ ID NO: 1982 - protein, 7 aa, Artificial Sequence
  Description of Artificial Sequence: Synthetic peptide
FGRFPTE

SEQ ID NO: 1983 - protein, 7 aa, Artificial Sequence
  Description of Artificial Sequence: Synthetic peptide
FGRTPYS

SEQ ID NO: 1984 - protein, 7 aa, Artificial Sequence
  Description of Artificial Sequence: Synthetic peptide
FGSDTLI

SEQ ID NO: 1985 - protein, 7 aa, Artificial Sequence
  Description of Artificial Sequence: Synthetic peptide
FGSHGER

SEQ ID NO: 1986 - protein, 7 aa, Artificial Sequence
  Description of Artificial Sequence: Synthetic peptide
FGTGYAG

SEQ ID NO: 1987 - protein, 7 aa, Artificial Sequence
  Description of Artificial Sequence: Synthetic peptide
FGTRMEP

SEQ ID NO: 1988 - protein, 7 aa, Artificial Sequence
  Description of Artificial Sequence: Synthetic peptide
FGTSEDV

SEQ ID NO: 1989 - protein, 7 aa, Artificial Sequence
  Description of Artificial Sequence: Synthetic peptide
FGTTRMA

SEQ ID NO: 1990 - protein, 7 aa, Artificial Sequence
  Description of Artificial Sequence: Synthetic peptide
FGTVRPS

SEQ ID NO: 1991 - protein, 7 aa, Artificial Sequence
  Description of Artificial Sequence: Synthetic peptide
FGVQKIT

SEQ ID NO: 1992 - protein, 7 aa, Artificial Sequence
  Description of Artificial Sequence: Synthetic peptide
FHASHLG

SEQ ID NO: 1993 - protein, 7 aa, Artificial Sequence
  Description of Artificial Sequence: Synthetic peptide
FHDPYIW

SEQ ID NO: 1994 - protein, 7 aa, Artificial Sequence
  Description of Artificial Sequence: Synthetic peptide
FHGLTVA

SEQ ID NO: 1995 - protein, 7 aa, Artificial Sequence
  Description of Artificial Sequence: Synthetic peptide
FHGTSLG

SEQ ID NO: 1996 - protein, 7 aa, Artificial Sequence
  Description of Artificial Sequence: Synthetic peptide
FHLPPEL

SEQ ID NO: 1997 - protein, 7 aa, Artificial Sequence
  Description of Artificial Sequence: Synthetic peptide
FHLSSAS

SEQ ID NO: 1998 - protein, 7 aa, Artificial Sequence
  Description of Artificial Sequence: Synthetic peptide
FHPASVN

SEQ ID NO: 1999 - protein, 7 aa, Artificial Sequence
  Description of Artificial Sequence: Synthetic peptide
FHPHSPP

SEQ ID NO: 2000 - protein, 7 aa, Artificial Sequence
  Description of Artificial Sequence: Synthetic peptide
FHQRSQS

SEQ ID NO: 2001 - protein, 7 aa, Artificial Sequence
  Description of Artificial Sequence: Synthetic peptide
FHRNVAN

SEQ ID NO: 2002 - protein, 7 aa, Artificial Sequence
  Description of Artificial Sequence: Synthetic peptide
FHTANTE

SEQ ID NO: 2003 - protein, 7 aa, Artificial Sequence
  Description of Artificial Sequence: Synthetic peptide
FIDHSIA

SEQ ID NO: 2004 - protein, 7 aa, Artificial Sequence
  Description of Artificial Sequence: Synthetic peptide
FIGNATQ

SEQ ID NO: 2005 - protein, 7 aa, Artificial Sequence
  Description of Artificial Sequence: Synthetic peptide
FIGTASQ

SEQ ID NO: 2006 - protein, 7 aa, Artificial Sequence
  Description of Artificial Sequence: Synthetic peptide
FIGYPQG

SEQ ID NO: 2007 - protein, 7 aa, Artificial Sequence
  Description of Artificial Sequence: Synthetic peptide
FIPSVSV

SEQ ID NO: 2008 - protein, 7 aa, Artificial Sequence
  Description of Artificial Sequence: Synthetic peptide
FIQDKHV

SEQ ID NO: 2009 - protein, 7 aa, Artificial Sequence
  Description of Artificial Sequence: Synthetic peptide
FIRHESV

SEQ ID NO: 2010 - protein, 7 aa, Artificial Sequence
  Description of Artificial Sequence: Synthetic peptide
FIRPDLD

SEQ ID NO: 2011 - protein, 7 aa, Artificial Sequence
  Description of Artificial Sequence: Synthetic peptide
FITGALG

SEQ ID NO: 2012 - protein, 7 aa, Artificial Sequence
  Description of Artificial Sequence: Synthetic peptide
FKAYDNI

SEQ ID NO: 2013 - protein, 7 aa, Artificial Sequence
  Description of Artificial Sequence: Synthetic peptide
FKDWFED

SEQ ID NO: 2014 - protein, 7 aa, Artificial Sequence
  Description of Artificial Sequence: Synthetic peptide
FKESWPA

SEQ ID NO: 2015 - protein, 7 aa, Artificial Sequence
  Description of Artificial Sequence: Synthetic peptide
FKETSNH

SEQ ID NO: 2016 - protein, 7 aa, Artificial Sequence
  Description of Artificial Sequence: Synthetic peptide
FKGMGVG

SEQ ID NO: 2017 - protein, 7 aa, Artificial Sequence
  Description of Artificial Sequence: Synthetic peptide
FKHPMDG

SEQ ID NO: 2018 - protein, 7 aa, Artificial Sequence
  Description of Artificial Sequence: Synthetic peptide
FKLGPPE

SEQ ID NO: 2019 - protein, 7 aa, Artificial Sequence
  Description of Artificial Sequence: Synthetic peptide
FKLVTRE

SEQ ID NO: 2020 - protein, 7 aa, Artificial Sequence
  Description of Artificial Sequence: Synthetic peptide
FKNGTPP

SEQ ID NO: 2021 - protein, 7 aa, Artificial Sequence
  Description of Artificial Sequence: Synthetic peptide
FKNVLGT

SEQ ID NO: 2022 - protein, 7 aa, Artificial Sequence
  Description of Artificial Sequence: Synthetic peptide
FKPANNV

SEQ ID NO: 2023 - protein, 7 aa, Artificial Sequence
  Description of Artificial Sequence: Synthetic peptide
FKPPPMS

SEQ ID NO: 2024 - protein, 7 aa, Artificial Sequence
  Description of Artificial Sequence: Synthetic peptide
FKQPPYV

SEQ ID NO: 2025 - protein, 7 aa, Artificial Sequence
  Description of Artificial Sequence: Synthetic peptide
FKQPYAR

SEQ ID NO: 2026 - protein, 7 aa, Artificial Sequence
  Description of Artificial Sequence: Synthetic peptide
FKSVGTI

SEQ ID NO: 2027 - protein, 7 aa, Artificial Sequence
  Description of Artificial Sequence: Synthetic peptide
FKTMERL

SEQ ID NO: 2028 - protein, 7 aa, Artificial Sequence
  Description of Artificial Sequence: Synthetic peptide
FKVHASS

SEQ ID NO: 2029 - protein, 7 aa, Artificial Sequence
  Description of Artificial Sequence: Synthetic peptide
FLAKLQP

SEQ ID NO: 2030 - protein, 7 aa, Artificial Sequence
  Description of Artificial Sequence: Synthetic peptide
FLALERQ

SEQ ID NO: 2031 - protein, 7 aa, Artificial Sequence
  Description of Artificial Sequence: Synthetic peptide
FLASLND

SEQ ID NO: 2032 - protein, 7 aa, Artificial Sequence
  Description of Artificial Sequence: Synthetic peptide
FLDNRAV

SEQ ID NO: 2033 - protein, 7 aa, Artificial Sequence
  Description of Artificial Sequence: Synthetic peptide
FLGAAGQ

SEQ ID NO: 2034 - protein, 7 aa, Artificial Sequence
  Description of Artificial Sequence: Synthetic peptide
FLGAHSA

SEQ ID NO: 2035 - protein, 7 aa, Artificial Sequence
  Description of Artificial Sequence: Synthetic peptide
FLHAMDL

SEQ ID NO: 2036 - protein, 7 aa, Artificial Sequence
  Description of Artificial Sequence: Synthetic peptide
FLHGETG

SEQ ID NO: 2037 - protein, 7 aa, Artificial Sequence
  Description of Artificial Sequence: Synthetic peptide
FLKSNIA

SEQ ID NO: 2038 - protein, 7 aa, Artificial Sequence
  Description of Artificial Sequence: Synthetic peptide
FLKTAVP

SEQ ID NO: 2039 - protein, 7 aa, Artificial Sequence
  Description of Artificial Sequence: Synthetic peptide
FLKTDTG

SEQ ID NO: 2040 - protein, 7 aa, Artificial Sequence
  Description of Artificial Sequence: Synthetic peptide
FLPERGS

SEQ ID NO: 2041 - protein, 7 aa, Artificial Sequence
  Description of Artificial Sequence: Synthetic peptide
FLPQHSP

SEQ ID NO: 2042 - protein, 7 aa, Artificial Sequence
  Description of Artificial Sequence: Synthetic peptide
FLPSGGA

SEQ ID NO: 2043 - protein, 7 aa, Artificial Sequence
  Description of Artificial Sequence: Synthetic peptide
FLRENAS

SEQ ID NO: 2044 - protein, 7 aa, Artificial Sequence
  Description of Artificial Sequence: Synthetic peptide
FLRIPDD

SEQ ID NO: 2045 - protein, 7 aa, Artificial Sequence
  Description of Artificial Sequence: Synthetic peptide
FLSKPLS

SEQ ID NO: 2046 - protein, 7 aa, Artificial Sequence
  Description of Artificial Sequence: Synthetic peptide
FLSNSNA

SEQ ID NO: 2047 - protein, 7 aa, Artificial Sequence
  Description of Artificial Sequence: Synthetic peptide
FLSPNLI

SEQ ID NO: 2048 - protein, 7 aa, Artificial Sequence
  Description of Artificial Sequence: Synthetic peptide
FLSSDGR

SEQ ID NO: 2049 - protein, 7 aa, Artificial Sequence
  Description of Artificial Sequence: Synthetic peptide
FLSVPET

SEQ ID NO: 2050 - protein, 7 aa, Artificial Sequence
  Description of Artificial Sequence: Synthetic peptide
FLTAGMP

SEQ ID NO: 2051 - protein, 7 aa, Artificial Sequence
  Description of Artificial Sequence: Synthetic peptide
FLTSAKS

SEQ ID NO: 2052 - protein, 7 aa, Artificial Sequence
  Description of Artificial Sequence: Synthetic peptide
FLTTGVD

SEQ ID NO: 2053 - protein, 7 aa, Artificial Sequence
  Description of Artificial Sequence: Synthetic peptide
FMFNDSP

SEQ ID NO: 2054 - protein, 7 aa, Artificial Sequence
  Description of Artificial Sequence: Synthetic peptide
FMGTVVN

SEQ ID NO: 2055 - protein, 7 aa, Artificial Sequence
  Description of Artificial Sequence: Synthetic peptide
FMHQQGL

SEQ ID NO: 2056 - protein, 7 aa, Artificial Sequence
  Description of Artificial Sequence: Synthetic peptide
FMLRDAT

SEQ ID NO: 2057 - protein, 7 aa, Artificial Sequence
  Description of Artificial Sequence: Synthetic peptide
FMMTGTA

SEQ ID NO: 2058 - protein, 7 aa, Artificial Sequence
  Description of Artificial Sequence: Synthetic peptide
FMPKTSP

SEQ ID NO: 2059 - protein, 7 aa, Artificial Sequence
  Description of Artificial Sequence: Synthetic peptide
FMRSTQS

SEQ ID NO: 2060 - protein, 7 aa, Artificial Sequence
  Description of Artificial Sequence: Synthetic peptide
FMSRGLA

SEQ ID NO: 2061 - protein, 7 aa, Artificial Sequence
  Description of Artificial Sequence: Synthetic peptide
FMTERAA

SEQ ID NO: 2062 - protein, 7 aa, Artificial Sequence
  Description of Artificial Sequence: Synthetic peptide
FMTNLSG

SEQ ID NO: 2063 - protein, 7 aa, Artificial Sequence
  Description of Artificial Sequence: Synthetic peptide
FMTSGDL

SEQ ID NO: 2064 - protein, 7 aa, Artificial Sequence
  Description of Artificial Sequence: Synthetic peptide
FMVDPVN

SEQ ID NO: 2065 - protein, 7 aa, Artificial Sequence
  Description of Artificial Sequence: Synthetic peptide
FMVSAPL

SEQ ID NO: 2066 - protein, 7 aa, Artificial Sequence
  Description of Artificial Sequence: Synthetic peptide
FMYGNGV

SEQ ID NO: 2067 - protein, 7 aa, Artificial Sequence
  Description of Artificial Sequence: Synthetic peptide
FNAIHVS

SEQ ID NO: 2068 - protein, 7 aa, Artificial Sequence
  Description of Artificial Sequence: Synthetic peptide
FNELSGL

SEQ ID NO: 2069 - protein, 7 aa, Artificial Sequence
  Description of Artificial Sequence: Synthetic peptide
FNFNKMD

SEQ ID NO: 2070 - protein, 7 aa, Artificial Sequence
  Description of Artificial Sequence: Synthetic peptide
FNGDSPA

SEQ ID NO: 2071 - protein, 7 aa, Artificial Sequence
  Description of Artificial Sequence: Synthetic peptide
FNGPYEL

SEQ ID NO: 2072 - protein, 7 aa, Artificial Sequence
  Description of Artificial Sequence: Synthetic peptide
FNLSTSA

SEQ ID NO: 2073 - protein, 7 aa, Artificial Sequence
  Description of Artificial Sequence: Synthetic peptide
FNPTVRE

SEQ ID NO: 2074 - protein, 7 aa, Artificial Sequence
  Description of Artificial Sequence: Synthetic peptide
FNRPVTT

SEQ ID NO: 2075 - protein, 7 aa, Artificial Sequence
  Description of Artificial Sequence: Synthetic peptide
FNSDSNS

SEQ ID NO: 2076 - protein, 7 aa, Artificial Sequence
  Description of Artificial Sequence: Synthetic peptide
FNSSPDL

SEQ ID NO: 2077 - protein, 7 aa, Artificial Sequence
  Description of Artificial Sequence: Synthetic peptide
FNTPTKV

SEQ ID NO: 2078 - protein, 7 aa, Artificial Sequence
  Description of Artificial Sequence: Synthetic peptide
FNVMQER

SEQ ID NO: 2079 - protein, 7 aa, Artificial Sequence
  Description of Artificial Sequence: Synthetic peptide
FPALSGG

SEQ ID NO: 2080 - protein, 7 aa, Artificial Sequence
  Description of Artificial Sequence: Synthetic peptide
FPAVNVP

SEQ ID NO: 2081 - protein, 7 aa, Artificial Sequence
  Description of Artificial Sequence: Synthetic peptide
FPERGMV

SEQ ID NO: 2082 - protein, 7 aa, Artificial Sequence
  Description of Artificial Sequence: Synthetic peptide
FPFNSGS

SEQ ID NO: 2083 - protein, 7 aa, Artificial Sequence
  Description of Artificial Sequence: Synthetic peptide
FPGFPSK

SEQ ID NO: 2084 - protein, 7 aa, Artificial Sequence
  Description of Artificial Sequence: Synthetic peptide
FPGSDSL

SEQ ID NO: 2085 - protein, 7 aa, Artificial Sequence
  Description of Artificial Sequence: Synthetic peptide
FPHTLSE

SEQ ID NO: 2086 - protein, 7 aa, Artificial Sequence
  Description of Artificial Sequence: Synthetic peptide
FPKGSTP

SEQ ID NO: 2087 - protein, 7 aa, Artificial Sequence
  Description of Artificial Sequence: Synthetic peptide
FPKTDDT

SEQ ID NO: 2088 - protein, 7 aa, Artificial Sequence
  Description of Artificial Sequence: Synthetic peptide
FPKYAIA

SEQ ID NO: 2089 - protein, 7 aa, Artificial Sequence
  Description of Artificial Sequence: Synthetic peptide
FPLMSSN

SEQ ID NO: 2090 - protein, 7 aa, Artificial Sequence
  Description of Artificial Sequence: Synthetic peptide
FPLSDPY

SEQ ID NO: 2091 - protein, 7 aa, Artificial Sequence
  Description of Artificial Sequence: Synthetic peptide
FPLSQQA

SEQ ID NO: 2092 - protein, 7 aa, Artificial Sequence
  Description of Artificial Sequence: Synthetic peptide
FPMAKPY

SEQ ID NO: 2093 - protein, 7 aa, Artificial Sequence
  Description of Artificial Sequence: Synthetic peptide
FPMRGAP

SEQ ID NO: 2094 - protein, 7 aa, Artificial Sequence
  Description of Artificial Sequence: Synthetic peptide
FPMTNPA

SEQ ID NO: 2095 - protein, 7 aa, Artificial Sequence
  Description of Artificial Sequence: Synthetic peptide
FPNAQLV

SEQ ID NO: 2096 - protein, 7 aa, Artificial Sequence
  Description of Artificial Sequence: Synthetic peptide
FPNDLPL

SEQ ID NO: 2097 - protein, 7 aa, Artificial Sequence
  Description of Artificial Sequence: Synthetic peptide
FPNMSSV

SEQ ID NO: 2098 - protein, 7 aa, Artificial Sequence
  Description of Artificial Sequence: Synthetic peptide
FPNRFEA

SEQ ID NO: 2099 - protein, 7 aa, Artificial Sequence
  Description of Artificial Sequence: Synthetic peptide
FPPGVRP

SEQ ID NO: 2100 - protein, 7 aa, Artificial Sequence
  Description of Artificial Sequence: Synthetic peptide
FPPRDTP

SEQ ID NO: 2101 - protein, 7 aa, Artificial Sequence
  Description of Artificial Sequence: Synthetic peptide
FPPSCAN

SEQ ID NO: 2102 - protein, 7 aa, Artificial Sequence
  Description of Artificial Sequence: Synthetic peptide
FPPSLSA

SEQ ID NO: 2103 - protein, 7 aa, Artificial Sequence
  Description of Artificial Sequence: Synthetic peptide
FPPSSLP

SEQ ID NO: 2104 - protein, 7 aa, Artificial Sequence
  Description of Artificial Sequence: Synthetic peptide
FPPTNSF

SEQ ID NO: 2105 - protein, 7 aa, Artificial Sequence
  Description of Artificial Sequence: Synthetic peptide
FPQITLN

SEQ ID NO: 2106 - protein, 7 aa, Artificial Sequence
  Description of Artificial Sequence: Synthetic peptide
FPQKEGT

SEQ ID NO: 2107 - protein, 7 aa, Artificial Sequence
  Description of Artificial Sequence: Synthetic peptide
FPQPADM

SEQ ID NO: 2108 - protein, 7 aa, Artificial Sequence
  Description of Artificial Sequence: Synthetic peptide
FPRAIDA

SEQ ID NO: 2109 - protein, 7 aa, Artificial Sequence
  Description of Artificial Sequence: Synthetic peptide
FPRGAVL

SEQ ID NO: 2110 - protein, 7 aa, Artificial Sequence
  Description of Artificial Sequence: Synthetic peptide
FPRPQLG

SEQ ID NO: 2111 - protein, 7 aa, Artificial Sequence
  Description of Artificial Sequence: Synthetic peptide
FPSNPAH

SEQ ID NO: 2112 - protein, 7 aa, Artificial Sequence
  Description of Artificial Sequence: Synthetic peptide
FPSSQQT

SEQ ID NO: 2113 - protein, 7 aa, Artificial Sequence
  Description of Artificial Sequence: Synthetic peptide
FPSSRLS

SEQ ID NO: 2114 - protein, 7 aa, Artificial Sequence
  Description of Artificial Sequence: Synthetic peptide
FPSTTLP

SEQ ID NO: 2115 - protein, 7 aa, Artificial Sequence
  Description of Artificial Sequence: Synthetic peptide
FPTDYVP

SEQ ID NO: 2116 - protein, 7 aa, Artificial Sequence
  Description of Artificial Sequence: Synthetic peptide
FPTKGFV

SEQ ID NO: 2117 - protein, 7 aa, Artificial Sequence
  Description of Artificial Sequence: Synthetic peptide
FPTSTSS

SEQ ID NO: 2118 - protein, 7 aa, Artificial Sequence
  Description of Artificial Sequence: Synthetic peptide
FPTSTTP

SEQ ID NO: 2119 - protein, 7 aa, Artificial Sequence
  Description of Artificial Sequence: Synthetic peptide
FPVAQHD

SEQ ID NO: 2120 - protein, 7 aa, Artificial Sequence
  Description of Artificial Sequence: Synthetic peptide
FPVDGRQ

SEQ ID NO: 2121 - protein, 7 aa, Artificial Sequence
  Description of Artificial Sequence: Synthetic peptide
FPVGNRL

SEQ ID NO: 2122 - protein, 7 aa, Artificial Sequence
  Description of Artificial Sequence: Synthetic peptide
FPVGQLA

SEQ ID NO: 2123 - protein, 7 aa, Artificial Sequence
  Description of Artificial Sequence: Synthetic peptide
FPVKTMV

SEQ ID NO: 2124 - protein, 7 aa, Artificial Sequence
  Description of Artificial Sequence: Synthetic peptide
FPVSARD

SEQ ID NO: 2125 - protein, 7 aa, Artificial Sequence
  Description of Artificial Sequence: Synthetic peptide
FQAAPDH

SEQ ID NO: 2126 - protein, 7 aa, Artificial Sequence
  Description of Artificial Sequence: Synthetic peptide
FQAGKAV

SEQ ID NO: 2127 - protein, 7 aa, Artificial Sequence
  Description of Artificial Sequence: Synthetic peptide
FQGAISR

SEQ ID NO: 2128 - protein, 7 aa, Artificial Sequence
  Description of Artificial Sequence: Synthetic peptide
FQGLRLG

SEQ ID NO: 2129 - protein, 7 aa, Artificial Sequence
  Description of Artificial Sequence: Synthetic peptide
FQGSVPE

SEQ ID NO: 2130 - protein, 7 aa, Artificial Sequence
  Description of Artificial Sequence: Synthetic peptide
FQITAQG

SEQ ID NO: 2131 - protein, 7 aa, Artificial Sequence
  Description of Artificial Sequence: Synthetic peptide
FQKSHAG

SEQ ID NO: 2132 - protein, 7 aa, Artificial Sequence
  Description of Artificial Sequence: Synthetic peptide
FQNPQSS

SEQ ID NO: 2133 - protein, 7 aa, Artificial Sequence
  Description of Artificial Sequence: Synthetic peptide
FQNQGPL

SEQ ID NO: 2134 - protein, 7 aa, Artificial Sequence
  Description of Artificial Sequence: Synthetic peptide
FQQTGPR

SEQ ID NO: 2135 - protein, 7 aa, Artificial Sequence
  Description of Artificial Sequence: Synthetic peptide
FQRATLQ

SEQ ID NO: 2136 - protein, 7 aa, Artificial Sequence
  Description of Artificial Sequence: Synthetic peptide
FQSATVA

SEQ ID NO: 2137 - protein, 7 aa, Artificial Sequence
  Description of Artificial Sequence: Synthetic peptide
FQTPSGD

SEQ ID NO: 2138 - protein, 7 aa, Artificial Sequence
  Description of Artificial Sequence: Synthetic peptide
FQVVGSP

SEQ ID NO: 2139 - protein, 7 aa, Artificial Sequence
  Description of Artificial Sequence: Synthetic peptide
FQYEPAI

SEQ ID NO: 2140 - protein, 7 aa, Artificial Sequence
  Description of Artificial Sequence: Synthetic peptide
FRADLLN

SEQ ID NO: 2141 - protein, 7 aa, Artificial Sequence
  Description of Artificial Sequence: Synthetic peptide
FRAIGSG

SEQ ID NO: 2142 - protein, 7 aa, Artificial Sequence
  Description of Artificial Sequence: Synthetic peptide
FRALVEP

SEQ ID NO: 2143 - protein, 7 aa, Artificial Sequence
  Description of Artificial Sequence: Synthetic peptide
FRDEQPS

SEQ ID NO: 2144 - protein, 7 aa, Artificial Sequence
  Description of Artificial Sequence: Synthetic peptide
FRDQADG

SEQ ID NO: 2145 - protein, 7 aa, Artificial Sequence
  Description of Artificial Sequence: Synthetic peptide
FRDSPPS

SEQ ID NO: 2146 - protein, 7 aa, Artificial Sequence
  Description of Artificial Sequence: Synthetic peptide
FREEPQT

SEQ ID NO: 2147 - protein, 7 aa, Artificial Sequence
  Description of Artificial Sequence: Synthetic peptide
FRGPSSS

SEQ ID NO: 2148 - protein, 7 aa, Artificial Sequence
  Description of Artificial Sequence: Synthetic peptide
FRHADAV

SEQ ID NO: 2149 - protein, 7 aa, Artificial Sequence
  Description of Artificial Sequence: Synthetic peptide
FRHDHSV

SEQ ID NO: 2150 - protein, 7 aa, Artificial Sequence
  Description of Artificial Sequence: Synthetic peptide
FRLHSTS

SEQ ID NO: 2151 - protein, 7 aa, Artificial Sequence
  Description of Artificial Sequence: Synthetic peptide
FRLPHET

SEQ ID NO: 2152 - protein, 7 aa, Artificial Sequence
  Description of Artificial Sequence: Synthetic peptide
FRMGEAP

SEQ ID NO: 2153 - protein, 7 aa, Artificial Sequence
  Description of Artificial Sequence: Synthetic peptide
FRMQNAA

SEQ ID NO: 2154 - protein, 7 aa, Artificial Sequence
  Description of Artificial Sequence: Synthetic peptide
FRNGPEP

SEQ ID NO: 2155 - protein, 7 aa, Artificial Sequence
  Description of Artificial Sequence: Synthetic peptide
FRNNVSL

SEQ ID NO: 2156 - protein, 7 aa, Artificial Sequence
  Description of Artificial Sequence: Synthetic peptide
FRPLALE

SEQ ID NO: 2157 - protein, 7 aa, Artificial Sequence
  Description of Artificial Sequence: Synthetic peptide
FRPLSTP

SEQ ID NO: 2158 - protein, 7 aa, Artificial Sequence
  Description of Artificial Sequence: Synthetic peptide
FRPPALS

SEQ ID NO: 2159 - protein, 7 aa, Artificial Sequence
  Description of Artificial Sequence: Synthetic peptide
FRPQDTM

SEQ ID NO: 2160 - protein, 7 aa, Artificial Sequence
  Description of Artificial Sequence: Synthetic peptide
FRQTPNH

SEQ ID NO: 2161 - protein, 7 aa, Artificial Sequence
  Description of Artificial Sequence: Synthetic peptide
FRSDSHN

SEQ ID NO: 2162 - protein, 7 aa, Artificial Sequence
  Description of Artificial Sequence: Synthetic peptide
FRSGLAI

SEQ ID NO: 2163 - protein, 7 aa, Artificial Sequence
  Description of Artificial Sequence: Synthetic peptide
FRSGLEY

SEQ ID NO: 2164 - protein, 7 aa, Artificial Sequence
  Description of Artificial Sequence: Synthetic peptide
FRSGMVA

SEQ ID NO: 2165 - protein, 7 aa, Artificial Sequence
  Description of Artificial Sequence: Synthetic peptide
FRSKIDA

SEQ ID NO: 2166 - protein, 7 aa, Artificial Sequence
  Description of Artificial Sequence: Synthetic peptide
FRSPAGL

SEQ ID NO: 2167 - protein, 7 aa, Artificial Sequence
  Description of Artificial Sequence: Synthetic peptide
FRSTENN

SEQ ID NO: 2168 - protein, 7 aa, Artificial Sequence
  Description of Artificial Sequence: Synthetic peptide
FRTPHSE

SEQ ID NO: 2169 - protein, 7 aa, Artificial Sequence
  Description of Artificial Sequence: Synthetic peptide
FRTSTEG

SEQ ID NO: 2170 - protein, 7 aa, Artificial Sequence
  Description of Artificial Sequence: Synthetic peptide
FRVPDAD

SEQ ID NO: 2171 - protein, 7 aa, Artificial Sequence
  Description of Artificial Sequence: Synthetic peptide
FSADVDG

SEQ ID NO: 2172 - protein, 7 aa, Artificial Sequence
  Description of Artificial Sequence: Synthetic peptide
FSARGSG

SEQ ID NO: 2173 - protein, 7 aa, Artificial Sequence
  Description of Artificial Sequence: Synthetic peptide
FSDGESL

SEQ ID NO: 2174 - protein, 7 aa, Artificial Sequence
  Description of Artificial Sequence: Synthetic peptide
FSDHTAH

SEQ ID NO: 2175 - protein, 7 aa, Artificial Sequence
  Description of Artificial Sequence: Synthetic peptide
FSDNALD

SEQ ID NO: 2176 - protein, 7 aa, Artificial Sequence
  Description of Artificial Sequence: Synthetic peptide
FSDRPGD

SEQ ID NO: 2177 - protein, 7 aa, Artificial Sequence
  Description of Artificial Sequence: Synthetic peptide
FSEHVSK

SEQ ID NO: 2178 - protein, 7 aa, Artificial Sequence
  Description of Artificial Sequence: Synthetic peptide
FSERHSE

SEQ ID NO: 2179 - protein, 7 aa, Artificial Sequence
  Description of Artificial Sequence: Synthetic peptide
FSESKTP

SEQ ID NO: 2180 - protein, 7 aa, Artificial Sequence
  Description of Artificial Sequence: Synthetic peptide
FSETSNM

SEQ ID NO: 2181 - protein, 7 aa, Artificial Sequence
  Description of Artificial Sequence: Synthetic peptide
FSGEPLS

SEQ ID NO: 2182 - protein, 7 aa, Artificial Sequence
  Description of Artificial Sequence: Synthetic peptide
FSGHNTI

SEQ ID NO: 2183 - protein, 7 aa, Artificial Sequence
  Description of Artificial Sequence: Synthetic peptide
FSHPGAA

SEQ ID NO: 2184 - protein, 7 aa, Artificial Sequence
  Description of Artificial Sequence: Synthetic peptide
FSHPHPA

SEQ ID NO: 2185 - protein, 7 aa, Artificial Sequence
  Description of Artificial Sequence: Synthetic peptide
FSHSQST

SEQ ID NO: 2186 - protein, 7 aa, Artificial Sequence
  Description of Artificial Sequence: Synthetic peptide
FSHSSGK

SEQ ID NO: 2187 - protein, 7 aa, Artificial Sequence
  Description of Artificial Sequence: Synthetic peptide
FSITPIK

SEQ ID NO: 2188 - protein, 7 aa, Artificial Sequence
  Description of Artificial Sequence: Synthetic peptide
FSLMPRE

SEQ ID NO: 2189 - protein, 7 aa, Artificial Sequence
  Description of Artificial Sequence: Synthetic peptide
FSLTADK

SEQ ID NO: 2190 - protein, 7 aa, Artificial Sequence
  Description of Artificial Sequence: Synthetic peptide
FSMTAQD

SEQ ID NO: 2191 - protein, 7 aa, Artificial Sequence
  Description of Artificial Sequence: Synthetic peptide
FSMTVHH

SEQ ID NO: 2192 - protein, 7 aa, Artificial Sequence
  Description of Artificial Sequence: Synthetic peptide
FSNQMPI

SEQ ID NO: 2193 - protein, 7 aa, Artificial Sequence
  Description of Artificial Sequence: Synthetic peptide
FSNSGPF

SEQ ID NO: 2194 - protein, 7 aa, Artificial Sequence
  Description of Artificial Sequence: Synthetic peptide
FSNTTSL

SEQ ID NO: 2195 - protein, 7 aa, Artificial Sequence
  Description of Artificial Sequence: Synthetic peptide
FSNTTTT

SEQ ID NO: 2196 - protein, 7 aa, Artificial Sequence
  Description of Artificial Sequence: Synthetic peptide
FSPGSLA

SEQ ID NO: 2197 - protein, 7 aa, Artificial Sequence
  Description of Artificial Sequence: Synthetic peptide
FSPHTLP

SEQ ID NO: 2198 - protein, 7 aa, Artificial Sequence
  Description of Artificial Sequence: Synthetic peptide
FSPMEAS

SEQ ID NO: 2199 - protein, 7 aa, Artificial Sequence
  Description of Artificial Sequence: Synthetic peptide
FSPNIMR

SEQ ID NO: 2200 - protein, 7 aa, Artificial Sequence
  Description of Artificial Sequence: Synthetic peptide
FSPRSIG

SEQ ID NO: 2201 - protein, 7 aa, Artificial Sequence
  Description of Artificial Sequence: Synthetic peptide
FSPYADE

SEQ ID NO: 2202 - protein, 7 aa, Artificial Sequence
  Description of Artificial Sequence: Synthetic peptide
FSQPLRN

SEQ ID NO: 2203 - protein, 7 aa, Artificial Sequence
  Description of Artificial Sequence: Synthetic peptide
FSQSLPT

SEQ ID NO: 2204 - protein, 7 aa, Artificial Sequence
  Description of Artificial Sequence: Synthetic peptide
FSRGSGP

SEQ ID NO: 2205 - protein, 7 aa, Artificial Sequence
  Description of Artificial Sequence: Synthetic peptide
FSRLNPS

SEQ ID NO: 2206 - protein, 7 aa, Artificial Sequence
  Description of Artificial Sequence: Synthetic peptide
FSRSHIP

SEQ ID NO: 2207 - protein, 7 aa, Artificial Sequence
  Description of Artificial Sequence: Synthetic peptide
FSRTLTS

SEQ ID NO: 2208 - protein, 7 aa, Artificial Sequence
  Description of Artificial Sequence: Synthetic peptide
FSSHESS

SEQ ID NO: 2209 - protein, 7 aa, Artificial Sequence
  Description of Artificial Sequence: Synthetic peptide
FSSHGES

SEQ ID NO: 2210 - protein, 7 aa, Artificial Sequence
  Description of Artificial Sequence: Synthetic peptide
FSSNTEL

SEQ ID NO: 2211 - protein, 7 aa, Artificial Sequence
  Description of Artificial Sequence: Synthetic peptide
FSSNTFD

SEQ ID NO: 2212 - protein, 7 aa, Artificial Sequence
  Description of Artificial Sequence: Synthetic peptide
FSSNTSA

SEQ ID NO: 2213 - protein, 7 aa, Artificial Sequence
  Description of Artificial Sequence: Synthetic peptide
FSSNTSE

SEQ ID NO: 2214 - protein, 7 aa, Artificial Sequence
  Description of Artificial Sequence: Synthetic peptide
FSSPSGY

SEQ ID NO: 2215 - protein, 7 aa, Artificial Sequence
  Description of Artificial Sequence: Synthetic peptide
FSSRTQA

SEQ ID NO: 2216 - protein, 7 aa, Artificial Sequence
  Description of Artificial Sequence: Synthetic peptide
FSSSMAA

SEQ ID NO: 2217 - protein, 7 aa, Artificial Sequence
  Description of Artificial Sequence: Synthetic peptide
FSSSTLK

SEQ ID NO: 2218 - protein, 7 aa, Artificial Sequence
  Description of Artificial Sequence: Synthetic peptide
FSSSVTS

SEQ ID NO: 2219 - protein, 7 aa, Artificial Sequence
  Description of Artificial Sequence: Synthetic peptide
FSSTNLA

SEQ ID NO: 2220 - protein, 7 aa, Artificial Sequence
  Description of Artificial Sequence: Synthetic peptide
FSSTPGH

SEQ ID NO: 2221 - protein, 7 aa, Artificial Sequence
  Description of Artificial Sequence: Synthetic peptide
FSSTSPD

SEQ ID NO: 2222 - protein, 7 aa, Artificial Sequence
  Description of Artificial Sequence: Synthetic peptide
FSSTSPM

SEQ ID NO: 2223 - protein, 7 aa, Artificial Sequence
  Description of Artificial Sequence: Synthetic peptide
FSSTSSA

SEQ ID NO: 2224 - protein, 7 aa, Artificial Sequence
  Description of Artificial Sequence: Synthetic peptide
FSSVIPS

SEQ ID NO: 2225 - protein, 7 aa, Artificial Sequence
  Description of Artificial Sequence: Synthetic peptide
FSSVRNE

SEQ ID NO: 2226 - protein, 7 aa, Artificial Sequence
  Description of Artificial Sequence: Synthetic peptide
FSSVSTT

SEQ ID NO: 2227 - protein, 7 aa, Artificial Sequence
  Description of Artificial Sequence: Synthetic peptide
FSSYASM

SEQ ID NO: 2228 - protein, 7 aa, Artificial Sequence
  Description of Artificial Sequence: Synthetic peptide
FSSYNNA

SEQ ID NO: 2229 - protein, 7 aa, Artificial Sequence
  Description of Artificial Sequence: Synthetic peptide
FSTLSIP

SEQ ID NO: 2230 - protein, 7 aa, Artificial Sequence
  Description of Artificial Sequence: Synthetic peptide
FSTMPAK

SEQ ID NO: 2231 - protein, 7 aa, Artificial Sequence
  Description of Artificial Sequence: Synthetic peptide
FSTMPRD

SEQ ID NO: 2232 - protein, 7 aa, Artificial Sequence
  Description of Artificial Sequence: Synthetic peptide
FSTRTQP

SEQ ID NO: 2233 - protein, 7 aa, Artificial Sequence
  Description of Artificial Sequence: Synthetic peptide
FSTSGQE

SEQ ID NO: 2234 - protein, 7 aa, Artificial Sequence
  Description of Artificial Sequence: Synthetic peptide
FSTVHQA

SEQ ID NO: 2235 - protein, 7 aa, Artificial Sequence
  Description of Artificial Sequence: Synthetic peptide
FSTVKAD

SEQ ID NO: 2236 - protein, 7 aa, Artificial Sequence
  Description of Artificial Sequence: Synthetic peptide
FSTYSHH

SEQ ID NO: 2237 - protein, 7 aa, Artificial Sequence
  Description of Artificial Sequence: Synthetic peptide
FSVARIG

SEQ ID NO: 2238 - protein, 7 aa, Artificial Sequence
  Description of Artificial Sequence: Synthetic peptide
FSVPSAG

SEQ ID NO: 2239 - protein, 7 aa, Artificial Sequence
  Description of Artificial Sequence: Synthetic peptide
FTAKGIT

SEQ ID NO: 2240 - protein, 7 aa, Artificial Sequence
  Description of Artificial Sequence: Synthetic peptide
FTARTTA

SEQ ID NO: 2241 - protein, 7 aa, Artificial Sequence
  Description of Artificial Sequence: Synthetic peptide
FTASGVS

SEQ ID NO: 2242 - protein, 7 aa, Artificial Sequence
  Description of Artificial Sequence: Synthetic peptide
FTATVAI

SEQ ID NO: 2243 - protein, 7 aa, Artificial Sequence
  Description of Artificial Sequence: Synthetic peptide
FTCPAVS

SEQ ID NO: 2244 - protein, 7 aa, Artificial Sequence
  Description of Artificial Sequence: Synthetic peptide
FTDIDDR

SEQ ID NO: 2245 - protein, 7 aa, Artificial Sequence
  Description of Artificial Sequence: Synthetic peptide
FTDRQGY

SEQ ID NO: 2246 - protein, 7 aa, Artificial Sequence
  Description of Artificial Sequence: Synthetic peptide
FTDSSPY

SEQ ID NO: 2247 - protein, 7 aa, Artificial Sequence
  Description of Artificial Sequence: Synthetic peptide
FTEHGYS

SEQ ID NO: 2248 - protein, 7 aa, Artificial Sequence
  Description of Artificial Sequence: Synthetic peptide
FTEPSTS

SEQ ID NO: 2249 - protein, 7 aa, Artificial Sequence
  Description of Artificial Sequence: Synthetic peptide
FTGKGDV

SEQ ID NO: 2250 - protein, 7 aa, Artificial Sequence
  Description of Artificial Sequence: Synthetic peptide
FTGTHSA

SEQ ID NO: 2251 - protein, 7 aa, Artificial Sequence
  Description of Artificial Sequence: Synthetic peptide
FTHRVPD

SEQ ID NO: 2252 - protein, 7 aa, Artificial Sequence
  Description of Artificial Sequence: Synthetic peptide
FTIKTIL

SEQ ID NO: 2253 - protein, 7 aa, Artificial Sequence
  Description of Artificial Sequence: Synthetic peptide
FTKMQLS

SEQ ID NO: 2254 - protein, 7 aa, Artificial Sequence
  Description of Artificial Sequence: Synthetic peptide
FTKPSTT

SEQ ID NO: 2255 - protein, 7 aa, Artificial Sequence
  Description of Artificial Sequence: Synthetic peptide
FTKSKAD

SEQ ID NO: 2256 - protein, 7 aa, Artificial Sequence
  Description of Artificial Sequence: Synthetic peptide
FTLESKL

SEQ ID NO: 2257 - protein, 7 aa, Artificial Sequence
  Description of Artificial Sequence: Synthetic peptide
FTLVTLE

SEQ ID NO: 2258 - protein, 7 aa, Artificial Sequence
  Description of Artificial Sequence: Synthetic peptide
FTMAPIV

SEQ ID NO: 2259 - protein, 7 aa, Artificial Sequence
  Description of Artificial Sequence: Synthetic peptide
FTNDPSS

SEQ ID NO: 2260 - protein, 7 aa, Artificial Sequence
  Description of Artificial Sequence: Synthetic peptide
FTNRDVA

SEQ ID NO: 2261 - protein, 7 aa, Artificial Sequence
  Description of Artificial Sequence: Synthetic peptide
FTNSSSP

SEQ ID NO: 2262 - protein, 7 aa, Artificial Sequence
  Description of Artificial Sequence: Synthetic peptide
FTPLISH

SEQ ID NO: 2263 - protein, 7 aa, Artificial Sequence
  Description of Artificial Sequence: Synthetic peptide
FTQALFP

SEQ ID NO: 2264 - protein, 7 aa, Artificial Sequence
  Description of Artificial Sequence: Synthetic peptide
FTQLPSL

SEQ ID NO: 2265 - protein, 7 aa, Artificial Sequence
  Description of Artificial Sequence: Synthetic peptide
FTQMSLS

SEQ ID NO: 2266 - protein, 7 aa, Artificial Sequence
  Description of Artificial Sequence: Synthetic peptide
FTQNKPM

SEQ ID NO: 2267 - protein, 7 aa, Artificial Sequence
  Description of Artificial Sequence: Synthetic peptide
FTQSLPT

SEQ ID NO: 2268 - protein, 7 aa, Artificial Sequence
  Description of Artificial Sequence: Synthetic peptide
FTRLEPQ

SEQ ID NO: 2269 - protein, 7 aa, Artificial Sequence
  Description of Artificial Sequence: Synthetic peptide
FTRPSLA

SEQ ID NO: 2270 - protein, 7 aa, Artificial Sequence
  Description of Artificial Sequence: Synthetic peptide
FTRSVAA

SEQ ID NO: 2271 - protein, 7 aa, Artificial Sequence
  Description of Artificial Sequence: Synthetic peptide
FTSAPLL

SEQ ID NO: 2272 - protein, 7 aa, Artificial Sequence
  Description of Artificial Sequence: Synthetic peptide
FTSAPNM

SEQ ID NO: 2273 - protein, 7 aa, Artificial Sequence
  Description of Artificial Sequence: Synthetic peptide
FTSDGTE

SEQ ID NO: 2274 - protein, 7 aa, Artificial Sequence
  Description of Artificial Sequence: Synthetic peptide
FTSKGPF

SEQ ID NO: 2275 - protein, 7 aa, Artificial Sequence
  Description of Artificial Sequence: Synthetic peptide
FTSKHLG

SEQ ID NO: 2276 - protein, 7 aa, Artificial Sequence
  Description of Artificial Sequence: Synthetic peptide
FTSREDA

SEQ ID NO: 2277 - protein, 7 aa, Artificial Sequence
  Description of Artificial Sequence: Synthetic peptide
FTSTFPS

SEQ ID NO: 2278 - protein, 7 aa, Artificial Sequence
  Description of Artificial Sequence: Synthetic peptide
FTTAPIL

SEQ ID NO: 2279 - protein, 7 aa, Artificial Sequence
  Description of Artificial Sequence: Synthetic peptide
FTTDRVS

SEQ ID NO: 2280 - protein, 7 aa, Artificial Sequence
  Description of Artificial Sequence: Synthetic peptide
FTTKAAF

SEQ ID NO: 2281 - protein, 7 aa, Artificial Sequence
  Description of Artificial Sequence: Synthetic peptide
FTVNLLG

SEQ ID NO: 2282 - protein, 7 aa, Artificial Sequence
  Description of Artificial Sequence: Synthetic peptide
FVANVRP

SEQ ID NO: 2283 - protein, 7 aa, Artificial Sequence
  Description of Artificial Sequence: Synthetic peptide
FVASASH

SEQ ID NO: 2284 - protein, 7 aa, Artificial Sequence
  Description of Artificial Sequence: Synthetic peptide
FVDNNLS

SEQ ID NO: 2285 - protein, 7 aa, Artificial Sequence
  Description of Artificial Sequence: Synthetic peptide
FVDPYYE

SEQ ID NO: 2286 - protein, 7 aa, Artificial Sequence
  Description of Artificial Sequence: Synthetic peptide
FVERSSS

SEQ ID NO: 2287 - protein, 7 aa, Artificial Sequence
  Description of Artificial Sequence: Synthetic peptide
FVGATMS

SEQ ID NO: 2288 - protein, 7 aa, Artificial Sequence
  Description of Artificial Sequence: Synthetic peptide
FVGKPES

SEQ ID NO: 2289 - protein, 7 aa, Artificial Sequence
  Description of Artificial Sequence: Synthetic peptide
FVGNSRL

SEQ ID NO: 2290 - protein, 7 aa, Artificial Sequence
  Description of Artificial Sequence: Synthetic peptide
FVHSGRQ

SEQ ID NO: 2291 - protein, 7 aa, Artificial Sequence
  Description of Artificial Sequence: Synthetic peptide
FVMHTRD

SEQ ID NO: 2292 - protein, 7 aa, Artificial Sequence
  Description of Artificial Sequence: Synthetic peptide
FVNARVP

SEQ ID NO: 2293 - protein, 7 aa, Artificial Sequence
  Description of Artificial Sequence: Synthetic peptide
FVNPHPS

SEQ ID NO: 2294 - protein, 7 aa, Artificial Sequence
  Description of Artificial Sequence: Synthetic peptide
FVNQTTV

SEQ ID NO: 2295 - protein, 7 aa, Artificial Sequence
  Description of Artificial Sequence: Synthetic peptide
FVPHANQ

SEQ ID NO: 2296 - protein, 7 aa, Artificial Sequence
  Description of Artificial Sequence: Synthetic peptide
FVQQSKP

SEQ ID NO: 2297 - protein, 7 aa, Artificial Sequence
  Description of Artificial Sequence: Synthetic peptide
FVSHSQS

SEQ ID NO: 2298 - protein, 7 aa, Artificial Sequence
  Description of Artificial Sequence: Synthetic peptide
FVSRDRA

SEQ ID NO: 2299 - protein, 7 aa, Artificial Sequence
  Description of Artificial Sequence: Synthetic peptide
FVSSIHA

SEQ ID NO: 2300 - protein, 7 aa, Artificial Sequence
  Description of Artificial Sequence: Synthetic peptide
FVSTPGM

SEQ ID NO: 2301 - protein, 7 aa, Artificial Sequence
  Description of Artificial Sequence: Synthetic peptide
FVSTTSP

SEQ ID NO: 2302 - protein, 7 aa, Artificial Sequence
  Description of Artificial Sequence: Synthetic peptide
FVSTVAP

SEQ ID NO: 2303 - protein, 7 aa, Artificial Sequence
  Description of Artificial Sequence: Synthetic peptide
FVTATLP

SEQ ID NO: 2304 - protein, 7 aa, Artificial Sequence
  Description of Artificial Sequence: Synthetic peptide
FVTESML

SEQ ID NO: 2305 - protein, 7 aa, Artificial Sequence
  Description of Artificial Sequence: Synthetic peptide
FVVGSDG

SEQ ID NO: 2306 - protein, 7 aa, Artificial Sequence
  Description of Artificial Sequence: Synthetic peptide
FWKEGSP

SEQ ID NO: 2307 - protein, 7 aa, Artificial Sequence
  Description of Artificial Sequence: Synthetic peptide
FYPGPKI

SEQ ID NO: 2308 - protein, 7 aa, Artificial Sequence
  Description of Artificial Sequence: Synthetic peptide
FYPSMKD

SEQ ID NO: 2309 - protein, 7 aa, Artificial Sequence
  Description of Artificial Sequence: Synthetic peptide
FYPTELK

SEQ ID NO: 2310 - protein, 7 aa, Artificial Sequence
  Description of Artificial Sequence: Synthetic peptide
FYSATMP

SEQ ID NO: 2311 - protein, 7 aa, Artificial Sequence
  Description of Artificial Sequence: Synthetic peptide
GAAAQYT

SEQ ID NO: 2312 - protein, 7 aa, Artificial Sequence
  Description of Artificial Sequence: Synthetic peptide
GAAPQSI

SEQ ID NO: 2313 - protein, 7 aa, Artificial Sequence
  Description of Artificial Sequence: Synthetic peptide
GAASGLG

SEQ ID NO: 2314 - protein, 7 aa, Artificial Sequence
  Description of Artificial Sequence: Synthetic peptide
GAATLIS

SEQ ID NO: 2315 - protein, 7 aa, Artificial Sequence
  Description of Artificial Sequence: Synthetic peptide
GAATRNP

SEQ ID NO: 2316 - protein, 7 aa, Artificial Sequence
  Description of Artificial Sequence: Synthetic peptide
GADEPGG

SEQ ID NO: 2317 - protein, 7 aa, Artificial Sequence
  Description of Artificial Sequence: Synthetic peptide
GADLSGR

SEQ ID NO: 2318 - protein, 7 aa, Artificial Sequence
  Description of Artificial Sequence: Synthetic peptide
GADRNVP

SEQ ID NO: 2319 - protein, 7 aa, Artificial Sequence
  Description of Artificial Sequence: Synthetic peptide
GADSSRY

SEQ ID NO: 2320 - protein, 7 aa, Artificial Sequence
  Description of Artificial Sequence: Synthetic peptide
GAEGGGN

SEQ ID NO: 2321 - protein, 7 aa, Artificial Sequence
  Description of Artificial Sequence: Synthetic peptide
GAEKHLP

SEQ ID NO: 2322 - protein, 7 aa, Artificial Sequence
  Description of Artificial Sequence: Synthetic peptide
GAEPMLA

SEQ ID NO: 2323 - protein, 7 aa, Artificial Sequence
  Description of Artificial Sequence: Synthetic peptide
GAESLSV

SEQ ID NO: 2324 - protein, 7 aa, Artificial Sequence
  Description of Artificial Sequence: Synthetic peptide
GAFALSG

SEQ ID NO: 2325 - protein, 7 aa, Artificial Sequence
  Description of Artificial Sequence: Synthetic peptide
GAFGPTS

SEQ ID NO: 2326 - protein, 7 aa, Artificial Sequence
  Description of Artificial Sequence: Synthetic peptide
GAGAGSR

SEQ ID NO: 2327 - protein, 7 aa, Artificial Sequence
  Description of Artificial Sequence: Synthetic peptide
GAGELPP

SEQ ID NO: 2328 - protein, 7 aa, Artificial Sequence
  Description of Artificial Sequence: Synthetic peptide
GAGLKGS

SEQ ID NO: 2329 - protein, 7 aa, Artificial Sequence
  Description of Artificial Sequence: Synthetic peptide
GAGLPVT

SEQ ID NO: 2330 - protein, 7 aa, Artificial Sequence
  Description of Artificial Sequence: Synthetic peptide
GAGMNTA

SEQ ID NO: 2331 - protein, 7 aa, Artificial Sequence
  Description of Artificial Sequence: Synthetic peptide
GAGTAML

SEQ ID NO: 2332 - protein, 7 aa, Artificial Sequence
  Description of Artificial Sequence: Synthetic peptide
GAHDTVT

SEQ ID NO: 2333 - protein, 7 aa, Artificial Sequence
  Description of Artificial Sequence: Synthetic peptide
GAHECLS

SEQ ID NO: 2334 - protein, 7 aa, Artificial Sequence
  Description of Artificial Sequence: Synthetic peptide
GAHGAYQ

SEQ ID NO: 2335 - protein, 7 aa, Artificial Sequence
  Description of Artificial Sequence: Synthetic peptide
GAHSYNV

SEQ ID NO: 2336 - protein, 7 aa, Artificial Sequence
  Description of Artificial Sequence: Synthetic peptide
GAHTGLS

SEQ ID NO: 2337 - protein, 7 aa, Artificial Sequence
  Description of Artificial Sequence: Synthetic peptide
GAHTVRL

SEQ ID NO: 2338 - protein, 7 aa, Artificial Sequence
  Description of Artificial Sequence: Synthetic peptide
GAHVAPV

SEQ ID NO: 2339 - protein, 7 aa, Artificial Sequence
  Description of Artificial Sequence: Synthetic peptide
GALATAT

SEQ ID NO: 2340 - protein, 7 aa, Artificial Sequence
  Description of Artificial Sequence: Synthetic peptide
GALDGTA

SEQ ID NO: 2341 - protein, 7 aa, Artificial Sequence
  Description of Artificial Sequence: Synthetic peptide
GALGFPQ

SEQ ID NO: 2342 - protein, 7 aa, Artificial Sequence
  Description of Artificial Sequence: Synthetic peptide
GALGVAH

SEQ ID NO: 2343 - protein, 7 aa, Artificial Sequence
  Description of Artificial Sequence: Synthetic peptide
GALMQKN

SEQ ID NO: 2344 - protein, 7 aa, Artificial Sequence
  Description of Artificial Sequence: Synthetic peptide
GALMVSR

SEQ ID NO: 2345 - protein, 7 aa, Artificial Sequence
  Description of Artificial Sequence: Synthetic peptide
GALSANQ

SEQ ID NO: 2346 - protein, 7 aa, Artificial Sequence
  Description of Artificial Sequence: Synthetic peptide
GALVITS

SEQ ID NO: 2347 - protein, 7 aa, Artificial Sequence
  Description of Artificial Sequence: Synthetic peptide
GAMSINA

SEQ ID NO: 2348 - protein, 7 aa, Artificial Sequence
  Description of Artificial Sequence: Synthetic peptide
GANGALR

SEQ ID NO: 2349 - protein, 7 aa, Artificial Sequence
  Description of Artificial Sequence: Synthetic peptide
GANIRIA

SEQ ID NO: 2350 - protein, 7 aa, Artificial Sequence
  Description of Artificial Sequence: Synthetic peptide
GANRLDN

SEQ ID NO: 2351 - protein, 7 aa, Artificial Sequence
  Description of Artificial Sequence: Synthetic peptide
GAPPLPR

SEQ ID NO: 2352 - protein, 7 aa, Artificial Sequence
  Description of Artificial Sequence: Synthetic peptide
GAQLTRM

SEQ ID NO: 2353 - protein, 7 aa, Artificial Sequence
  Description of Artificial Sequence: Synthetic peptide
GAQRQLN

SEQ ID NO: 2354 - protein, 7 aa, Artificial Sequence
  Description of Artificial Sequence: Synthetic peptide
GARALGL

SEQ ID NO: 2355 - protein, 7 aa, Artificial Sequence
  Description of Artificial Sequence: Synthetic peptide
GARANGG

SEQ ID NO: 2356 - protein, 7 aa, Artificial Sequence
  Description of Artificial Sequence: Synthetic peptide
GAREIPS

SEQ ID NO: 2357 - protein, 7 aa, Artificial Sequence
  Description of Artificial Sequence: Synthetic peptide
GARPDLG

SEQ ID NO: 2358 - protein, 7 aa, Artificial Sequence
  Description of Artificial Sequence: Synthetic peptide
GARVLGS

SEQ ID NO: 2359 - protein, 7 aa, Artificial Sequence
  Description of Artificial Sequence: Synthetic peptide
GASDTDW

SEQ ID NO: 2360 - protein, 7 aa, Artificial Sequence
  Description of Artificial Sequence: Synthetic peptide
GASGTST

SEQ ID NO: 2361 - protein, 7 aa, Artificial Sequence
  Description of Artificial Sequence: Synthetic peptide
GASIKSS

SEQ ID NO: 2362 - protein, 7 aa, Artificial Sequence
  Description of Artificial Sequence: Synthetic peptide
GASKNPT

SEQ ID NO: 2363 - protein, 7 aa, Artificial Sequence
  Description of Artificial Sequence: Synthetic peptide
GASLADD

SEQ ID NO: 2364 - protein, 7 aa, Artificial Sequence
  Description of Artificial Sequence: Synthetic peptide
GASLKPV

SEQ ID NO: 2365 - protein, 7 aa, Artificial Sequence
  Description of Artificial Sequence: Synthetic peptide
GASSASG

SEQ ID NO: 2366 - protein, 7 aa, Artificial Sequence
  Description of Artificial Sequence: Synthetic peptide
GASSLKP

SEQ ID NO: 2367 - protein, 7 aa, Artificial Sequence
  Description of Artificial Sequence: Synthetic peptide
GASSRPV

SEQ ID NO: 2368 - protein, 7 aa, Artificial Sequence
  Description of Artificial Sequence: Synthetic peptide
GASTRNI

SEQ ID NO: 2369 - protein, 7 aa, Artificial Sequence
  Description of Artificial Sequence: Synthetic peptide
GASVNPT

SEQ ID NO: 2370 - protein, 7 aa, Artificial Sequence
  Description of Artificial Sequence: Synthetic peptide
GATPKTL

SEQ ID NO: 2371 - protein, 7 aa, Artificial Sequence
  Description of Artificial Sequence: Synthetic peptide
GATPPST

SEQ ID NO: 2372 - protein, 7 aa, Artificial Sequence
  Description of Artificial Sequence: Synthetic peptide
GATQFRE

SEQ ID NO: 2373 - protein, 7 aa, Artificial Sequence
  Description of Artificial Sequence: Synthetic peptide
GATSQIM

SEQ ID NO: 2374 - protein, 7 aa, Artificial Sequence
  Description of Artificial Sequence: Synthetic peptide
GAVRPLM

SEQ ID NO: 2375 - protein, 7 aa, Artificial Sequence
  Description of Artificial Sequence: Synthetic peptide
GAWKAET

SEQ ID NO: 2376 - protein, 7 aa, Artificial Sequence
  Description of Artificial Sequence: Synthetic peptide
GAWLPNA

SEQ ID NO: 2377 - protein, 7 aa, Artificial Sequence
  Description of Artificial Sequence: Synthetic peptide
GAWSLPD

SEQ ID NO: 2378 - protein, 7 aa, Artificial Sequence
  Description of Artificial Sequence: Synthetic peptide
GAYARAT

SEQ ID NO: 2379 - protein, 7 aa, Artificial Sequence
  Description of Artificial Sequence: Synthetic peptide
GAYAYNG

SEQ ID NO: 2380 - protein, 7 aa, Artificial Sequence
  Description of Artificial Sequence: Synthetic peptide
GAYGMSE

SEQ ID NO: 2381 - protein, 7 aa, Artificial Sequence
  Description of Artificial Sequence: Synthetic peptide
GAYRPDL

SEQ ID NO: 2382 - protein, 7 aa, Artificial Sequence
  Description of Artificial Sequence: Synthetic peptide
GCSGQQS

SEQ ID NO: 2383 - protein, 7 aa, Artificial Sequence
  Description of Artificial Sequence: Synthetic peptide
GCSSLPE

SEQ ID NO: 2384 - protein, 7 aa, Artificial Sequence
  Description of Artificial Sequence: Synthetic peptide
GCTGYQA

SEQ ID NO: 2385 - protein, 7 aa, Artificial Sequence
  Description of Artificial Sequence: Synthetic peptide
GCVGPFS

SEQ ID NO: 2386 - protein, 7 aa, Artificial Sequence
  Description of Artificial Sequence: Synthetic peptide
GDAAYKN

SEQ ID NO: 2387 - protein, 7 aa, Artificial Sequence
  Description of Artificial Sequence: Synthetic peptide
GDAFVVG

SEQ ID NO: 2388 - protein, 7 aa, Artificial Sequence
  Description of Artificial Sequence: Synthetic peptide
GDATDRM

SEQ ID NO: 2389 - protein, 7 aa, Artificial Sequence
  Description of Artificial Sequence: Synthetic peptide
GDFGMKL

SEQ ID NO: 2390 - protein, 7 aa, Artificial Sequence
  Description of Artificial Sequence: Synthetic peptide
GDGTRGA

SEQ ID NO: 2391 - protein, 7 aa, Artificial Sequence
  Description of Artificial Sequence: Synthetic peptide
GDGVYPA

SEQ ID NO: 2392 - protein, 7 aa, Artificial Sequence
  Description of Artificial Sequence: Synthetic peptide
GDHKSGA

SEQ ID NO: 2393 - protein, 7 aa, Artificial Sequence
  Description of Artificial Sequence: Synthetic peptide
GDKVRTL

SEQ ID NO: 2394 - protein, 7 aa, Artificial Sequence
  Description of Artificial Sequence: Synthetic peptide
GDLHIPV

SEQ ID NO: 2395 - protein, 7 aa, Artificial Sequence
  Description of Artificial Sequence: Synthetic peptide
GDLNPVP

SEQ ID NO: 2396 - protein, 7 aa, Artificial Sequence
  Description of Artificial Sequence: Synthetic peptide
GDLYYKA

SEQ ID NO: 2397 - protein, 7 aa, Artificial Sequence
  Description of Artificial Sequence: Synthetic peptide
GDMLNVI

SEQ ID NO: 2398 - protein, 7 aa, Artificial Sequence
  Description of Artificial Sequence: Synthetic peptide
GDPNPAE

SEQ ID NO: 2399 - protein, 7 aa, Artificial Sequence
  Description of Artificial Sequence: Synthetic peptide
GDPVHQS

SEQ ID NO: 2400 - protein, 7 aa, Artificial Sequence
  Description of Artificial Sequence: Synthetic peptide
GDRDGSW

SEQ ID NO: 2401 - protein, 7 aa, Artificial Sequence
  Description of Artificial Sequence: Synthetic peptide
GDRMPRS

SEQ ID NO: 2402 - protein, 7 aa, Artificial Sequence
  Description of Artificial Sequence: Synthetic peptide
GDRSTSH

SEQ ID NO: 2403 - protein, 7 aa, Artificial Sequence
  Description of Artificial Sequence: Synthetic peptide
GDRTSLR

SEQ ID NO: 2404 - protein, 7 aa, Artificial Sequence
  Description of Artificial Sequence: Synthetic peptide
GDRVVGV

SEQ ID NO: 2405 - protein, 7 aa, Artificial Sequence
  Description of Artificial Sequence: Synthetic peptide
GDSFPMS

SEQ ID NO: 2406 - protein, 7 aa, Artificial Sequence
  Description of Artificial Sequence: Synthetic peptide
GDSQLYY

SEQ ID NO: 2407 - protein, 7 aa, Artificial Sequence
  Description of Artificial Sequence: Synthetic peptide
GDSSLHS

SEQ ID NO: 2408 - protein, 7 aa, Artificial Sequence
  Description of Artificial Sequence: Synthetic peptide
GDTHLIG

SEQ ID NO: 2409 - protein, 7 aa, Artificial Sequence
  Description of Artificial Sequence: Synthetic peptide
GDTLKAP

SEQ ID NO: 2410 - protein, 7 aa, Artificial Sequence
  Description of Artificial Sequence: Synthetic peptide
GDTRPSL

SEQ ID NO: 2411 - protein, 7 aa, Artificial Sequence
  Description of Artificial Sequence: Synthetic peptide
GDVITTH

SEQ ID NO: 2412 - protein, 7 aa, Artificial Sequence
  Description of Artificial Sequence: Synthetic peptide
GDVSVYD

SEQ ID NO: 2413 - protein, 7 aa, Artificial Sequence
  Description of Artificial Sequence: Synthetic peptide
GEDAFLR

SEQ ID NO: 2414 - protein, 7 aa, Artificial Sequence
  Description of Artificial Sequence: Synthetic peptide
GEDGFSY

SEQ ID NO: 2415 - protein, 7 aa, Artificial Sequence
  Description of Artificial Sequence: Synthetic peptide
GEDHSPH

SEQ ID NO: 2416 - protein, 7 aa, Artificial Sequence
  Description of Artificial Sequence: Synthetic peptide
GEGSYPR

SEQ ID NO: 2417 - protein, 7 aa, Artificial Sequence
  Description of Artificial Sequence: Synthetic peptide
GEGTYQA

SEQ ID NO: 2418 - protein, 7 aa, Artificial Sequence
  Description of Artificial Sequence: Synthetic peptide
GEHKANS

SEQ ID NO: 2419 - protein, 7 aa, Artificial Sequence
  Description of Artificial Sequence: Synthetic peptide
GEKLRAY

SEQ ID NO: 2420 - protein, 7 aa, Artificial Sequence
  Description of Artificial Sequence: Synthetic peptide
GEKSIPP

SEQ ID NO: 2421 - protein, 7 aa, Artificial Sequence
  Description of Artificial Sequence: Synthetic peptide
GEKSLVV

SEQ ID NO: 2422 - protein, 7 aa, Artificial Sequence
  Description of Artificial Sequence: Synthetic peptide
GELFLSS

SEQ ID NO: 2423 - protein, 7 aa, Artificial Sequence
  Description of Artificial Sequence: Synthetic peptide
GENPLPV

SEQ ID NO: 2424 - protein, 7 aa, Artificial Sequence
  Description of Artificial Sequence: Synthetic peptide
GEPFMRA

SEQ ID NO: 2425 - protein, 7 aa, Artificial Sequence
  Description of Artificial Sequence: Synthetic peptide
GEPKHHS

SEQ ID NO: 2426 - protein, 7 aa, Artificial Sequence
  Description of Artificial Sequence: Synthetic peptide
GEPVDTW

SEQ ID NO: 2427 - protein, 7 aa, Artificial Sequence
  Description of Artificial Sequence: Synthetic peptide
GEPVLGA

SEQ ID NO: 2428 - protein, 7 aa, Artificial Sequence
  Description of Artificial Sequence: Synthetic peptide
GERFREW

SEQ ID NO: 2429 - protein, 7 aa, Artificial Sequence
  Description of Artificial Sequence: Synthetic peptide
GERMKID

SEQ ID NO: 2430 - protein, 7 aa, Artificial Sequence
  Description of Artificial Sequence: Synthetic peptide
GERSLNM

SEQ ID NO: 2431 - protein, 7 aa, Artificial Sequence
  Description of Artificial Sequence: Synthetic peptide
GERSPPE

SEQ ID NO: 2432 - protein, 7 aa, Artificial Sequence
  Description of Artificial Sequence: Synthetic peptide
GESPANL

SEQ ID NO: 2433 - protein, 7 aa, Artificial Sequence
  Description of Artificial Sequence: Synthetic peptide
GETPAHA

SEQ ID NO: 2434 - protein, 7 aa, Artificial Sequence
  Description of Artificial Sequence: Synthetic peptide
GETRHVG

SEQ ID NO: 2435 - protein, 7 aa, Artificial Sequence
  Description of Artificial Sequence: Synthetic peptide
GETSAMQ

SEQ ID NO: 2436 - protein, 7 aa, Artificial Sequence
  Description of Artificial Sequence: Synthetic peptide
GETTKMR

SEQ ID NO: 2437 - protein, 7 aa, Artificial Sequence
  Description of Artificial Sequence: Synthetic peptide
GEVAMLY

SEQ ID NO: 2438 - protein, 7 aa, Artificial Sequence
  Description of Artificial Sequence: Synthetic peptide
GEVTIMS

SEQ ID NO: 2439 - protein, 7 aa, Artificial Sequence
  Description of Artificial Sequence: Synthetic peptide
GEVVNTM

SEQ ID NO: 2440 - protein, 7 aa, Artificial Sequence
  Description of Artificial Sequence: Synthetic peptide
GFDAGKS

SEQ ID NO: 2441 - protein, 7 aa, Artificial Sequence
  Description of Artificial Sequence: Synthetic peptide
GFDIASG

SEQ ID NO: 2442 - protein, 7 aa, Artificial Sequence
  Description of Artificial Sequence: Synthetic peptide
GFDVKMS

SEQ ID NO: 2443 - protein, 7 aa, Artificial Sequence
  Description of Artificial Sequence: Synthetic peptide
GFEVQLI

SEQ ID NO: 2444 - protein, 7 aa, Artificial Sequence
  Description of Artificial Sequence: Synthetic peptide
GFFAQVP

SEQ ID NO: 2445 - protein, 7 aa, Artificial Sequence
  Description of Artificial Sequence: Synthetic peptide
GFHNAAP

SEQ ID NO: 2446 - protein, 7 aa, Artificial Sequence
  Description of Artificial Sequence: Synthetic peptide
GFISPSA

SEQ ID NO: 2447 - protein, 7 aa, Artificial Sequence
  Description of Artificial Sequence: Synthetic peptide
GFKNALP

SEQ ID NO: 2448 - protein, 7 aa, Artificial Sequence
  Description of Artificial Sequence: Synthetic peptide
GFNALTG

SEQ ID NO: 2449 - protein, 7 aa, Artificial Sequence
  Description of Artificial Sequence: Synthetic peptide
GFNPSLV

SEQ ID NO: 2450 - protein, 7 aa, Artificial Sequence
  Description of Artificial Sequence: Synthetic peptide
GFNVASG

SEQ ID NO: 2451 - protein, 7 aa, Artificial Sequence
  Description of Artificial Sequence: Synthetic peptide
GFNVGGP

SEQ ID NO: 2452 - protein, 7 aa, Artificial Sequence
  Description of Artificial Sequence: Synthetic peptide
GFPGPQF

SEQ ID NO: 2453 - protein, 7 aa, Artificial Sequence
  Description of Artificial Sequence: Synthetic peptide
GFSGTPY

SEQ ID NO: 2454 - protein, 7 aa, Artificial Sequence
  Description of Artificial Sequence: Synthetic peptide
GFSHISL

SEQ ID NO: 2455 - protein, 7 aa, Artificial Sequence
  Description of Artificial Sequence: Synthetic peptide
GFSIRST

SEQ ID NO: 2456 - protein, 7 aa, Artificial Sequence
  Description of Artificial Sequence: Synthetic peptide
GFSSLSS

SEQ ID NO: 2457 - protein, 7 aa, Artificial Sequence
  Description of Artificial Sequence: Synthetic peptide
GFTQSQM

SEQ ID NO: 2458 - protein, 7 aa, Artificial Sequence
  Description of Artificial Sequence: Synthetic peptide
GGAAREL

SEQ ID NO: 2459 - protein, 7 aa, Artificial Sequence
  Description of Artificial Sequence: Synthetic peptide
GGAATSV

SEQ ID NO: 2460 - protein, 7 aa, Artificial Sequence
  Description of Artificial Sequence: Synthetic peptide
GGAGART

SEQ ID NO: 2461 - protein, 7 aa, Artificial Sequence
  Description of Artificial Sequence: Synthetic peptide
GGARSSM

SEQ ID NO: 2462 - protein, 7 aa, Artificial Sequence
  Description of Artificial Sequence: Synthetic peptide
GGAVHTV

SEQ ID NO: 2463 - protein, 7 aa, Artificial Sequence
  Description of Artificial Sequence: Synthetic peptide
GGDSGAE

SEQ ID NO: 2464 - protein, 7 aa, Artificial Sequence
  Description of Artificial Sequence: Synthetic peptide
GGENVYI

SEQ ID NO: 2465 - protein, 7 aa, Artificial Sequence
  Description of Artificial Sequence: Synthetic peptide
GGFAHQS

SEQ ID NO: 2466 - protein, 7 aa, Artificial Sequence
  Description of Artificial Sequence: Synthetic peptide
GGFNGAN

SEQ ID NO: 2467 - protein, 7 aa, Artificial Sequence
  Description of Artificial Sequence: Synthetic peptide
GGGLTMT

SEQ ID NO: 2468 - protein, 7 aa, Artificial Sequence
  Description of Artificial Sequence: Synthetic peptide
GGGPALP

SEQ ID NO: 2469 - protein, 7 aa, Artificial Sequence
  Description of Artificial Sequence: Synthetic peptide
GGGVNKP

SEQ ID NO: 2470 - protein, 7 aa, Artificial Sequence
  Description of Artificial Sequence: Synthetic peptide
GGHMRDG

SEQ ID NO: 2471 - protein, 7 aa, Artificial Sequence
  Description of Artificial Sequence: Synthetic peptide
GGIESAV

SEQ ID NO: 2472 - protein, 7 aa, Artificial Sequence
  Description of Artificial Sequence: Synthetic peptide
GGIQSTG

SEQ ID NO: 2473 - protein, 7 aa, Artificial Sequence
  Description of Artificial Sequence: Synthetic peptide
GGKDRPE

SEQ ID NO: 2474 - protein, 7 aa, Artificial Sequence
  Description of Artificial Sequence: Synthetic peptide
GGKQPQA

SEQ ID NO: 2475 - protein, 7 aa, Artificial Sequence
  Description of Artificial Sequence: Synthetic peptide
GGKVATG

SEQ ID NO: 2476 - protein, 7 aa, Artificial Sequence
  Description of Artificial Sequence: Synthetic peptide
GGLNRNP

SEQ ID NO: 2477 - protein, 7 aa, Artificial Sequence
  Description of Artificial Sequence: Synthetic peptide
GGLPSPA

SEQ ID NO: 2478 - protein, 7 aa, Artificial Sequence
  Description of Artificial Sequence: Synthetic peptide
GGLSKSL

SEQ ID NO: 2479 - protein, 7 aa, Artificial Sequence
  Description of Artificial Sequence: Synthetic peptide
GGMAPGP

SEQ ID NO: 2480 - protein, 7 aa, Artificial Sequence
  Description of Artificial Sequence: Synthetic peptide
GGPAYVG

SEQ ID NO: 2481 - protein, 7 aa, Artificial Sequence
  Description of Artificial Sequence: Synthetic peptide
GGPGNNP

SEQ ID NO: 2482 - protein, 7 aa, Artificial Sequence
  Description of Artificial Sequence: Synthetic peptide
GGPLPKS

SEQ ID NO: 2483 - protein, 7 aa, Artificial Sequence
  Description of Artificial Sequence: Synthetic peptide
GGPLTGP

SEQ ID NO: 2484 - protein, 7 aa, Artificial Sequence
  Description of Artificial Sequence: Synthetic peptide
GGPRVAP

SEQ ID NO: 2485 - protein, 7 aa, Artificial Sequence
  Description of Artificial Sequence: Synthetic peptide
GGPYGPA

SEQ ID NO: 2486 - protein, 7 aa, Artificial Sequence
  Description of Artificial Sequence: Synthetic peptide
GGQAGKT

SEQ ID NO: 2487 - protein, 7 aa, Artificial Sequence
  Description of Artificial Sequence: Synthetic peptide
GGQHLAP

SEQ ID NO: 2488 - protein, 7 aa, Artificial Sequence
  Description of Artificial Sequence: Synthetic peptide
GGQSCRE

SEQ ID NO: 2489 - protein, 7 aa, Artificial Sequence
  Description of Artificial Sequence: Synthetic peptide
GGRLAVE

SEQ ID NO: 2490 - protein, 7 aa, Artificial Sequence
  Description of Artificial Sequence: Synthetic peptide
GGRLQQG

SEQ ID NO: 2491 - protein, 7 aa, Artificial Sequence
  Description of Artificial Sequence: Synthetic peptide
GGRPDPE

SEQ ID NO: 2492 - protein, 7 aa, Artificial Sequence
  Description of Artificial Sequence: Synthetic peptide
GGRPTIT

SEQ ID NO: 2493 - protein, 7 aa, Artificial Sequence
  Description of Artificial Sequence: Synthetic peptide
GGRVVYS

SEQ ID NO: 2494 - protein, 7 aa, Artificial Sequence
  Description of Artificial Sequence: Synthetic peptide
GGRYSEL

SEQ ID NO: 2495 - protein, 7 aa, Artificial Sequence
  Description of Artificial Sequence: Synthetic peptide
GGSGLAG

SEQ ID NO: 2496 - protein, 7 aa, Artificial Sequence
  Description of Artificial Sequence: Synthetic peptide
GGSMDSL

SEQ ID NO: 2497 - protein, 7 aa, Artificial Sequence
  Description of Artificial Sequence: Synthetic peptide
GGSVRTL

SEQ ID NO: 2498 - protein, 7 aa, Artificial Sequence
  Description of Artificial Sequence: Synthetic peptide
GGTSRSP

SEQ ID NO: 2499 - protein, 7 aa, Artificial Sequence
  Description of Artificial Sequence: Synthetic peptide
GGTTNLF

SEQ ID NO: 2500 - protein, 7 aa, Artificial Sequence
  Description of Artificial Sequence: Synthetic peptide
GGVAYIA

SEQ ID NO: 2501 - protein, 7 aa, Artificial Sequence
  Description of Artificial Sequence: Synthetic peptide
GGVGKPA

SEQ ID NO: 2502 - protein, 7 aa, Artificial Sequence
  Description of Artificial Sequence: Synthetic peptide
GGVNAMR

SEQ ID NO: 2503 - protein, 7 aa, Artificial Sequence
  Description of Artificial Sequence: Synthetic peptide
GGWSSAP

SEQ ID NO: 2504 - protein, 7 aa, Artificial Sequence
  Description of Artificial Sequence: Synthetic peptide
GGYESNN

SEQ ID NO: 2505 - protein, 7 aa, Artificial Sequence
  Description of Artificial Sequence: Synthetic peptide
GGYSMGH

SEQ ID NO: 2506 - protein, 7 aa, Artificial Sequence
  Description of Artificial Sequence: Synthetic peptide
GHAIQLL

SEQ ID NO: 2507 - protein, 7 aa, Artificial Sequence
  Description of Artificial Sequence: Synthetic peptide
GHAKHNV

SEQ ID NO: 2508 - protein, 7 aa, Artificial Sequence
  Description of Artificial Sequence: Synthetic peptide
GHAPHMI

SEQ ID NO: 2509 - protein, 7 aa, Artificial Sequence
  Description of Artificial Sequence: Synthetic peptide
GHCTSKN

SEQ ID NO: 2510 - protein, 7 aa, Artificial Sequence
  Description of Artificial Sequence: Synthetic peptide
GHDLKPV

SEQ ID NO: 2511 - protein, 7 aa, Artificial Sequence
  Description of Artificial Sequence: Synthetic peptide
GHETRQE

SEQ ID NO: 2512 - protein, 7 aa, Artificial Sequence
  Description of Artificial Sequence: Synthetic peptide
GHGLPRL

SEQ ID NO: 2513 - protein, 7 aa, Artificial Sequence
  Description of Artificial Sequence: Synthetic peptide
GHGPFVG

SEQ ID NO: 2514 - protein, 7 aa, Artificial Sequence
  Description of Artificial Sequence: Synthetic peptide
GHGQNPG

SEQ ID NO: 2515 - protein, 7 aa, Artificial Sequence
  Description of Artificial Sequence: Synthetic peptide
GHHQPDQ

SEQ ID NO: 2516 - protein, 7 aa, Artificial Sequence
  Description of Artificial Sequence: Synthetic peptide
GHKARPD

SEQ ID NO: 2517 - protein, 7 aa, Artificial Sequence
  Description of Artificial Sequence: Synthetic peptide
GHKDESL

SEQ ID NO: 2518 - protein, 7 aa, Artificial Sequence
  Description of Artificial Sequence: Synthetic peptide
GHLALHS

SEQ ID NO: 2519 - protein, 7 aa, Artificial Sequence
  Description of Artificial Sequence: Synthetic peptide
GHLQVNT

SEQ ID NO: 2520 - protein, 7 aa, Artificial Sequence
  Description of Artificial Sequence: Synthetic peptide
GHLSPSM

SEQ ID NO: 2521 - protein, 7 aa, Artificial Sequence
  Description of Artificial Sequence: Synthetic peptide
GHMAPVH

SEQ ID NO: 2522 - protein, 7 aa, Artificial Sequence
  Description of Artificial Sequence: Synthetic peptide
GHMSKTA

SEQ ID NO: 2523 - protein, 7 aa, Artificial Sequence
  Description of Artificial Sequence: Synthetic peptide
GHQGSDH

SEQ ID NO: 2524 - protein, 7 aa, Artificial Sequence
  Description of Artificial Sequence: Synthetic peptide
GHQGVLL

SEQ ID NO: 2525 - protein, 7 aa, Artificial Sequence
  Description of Artificial Sequence: Synthetic peptide
GHQTYPS

SEQ ID NO: 2526 - protein, 7 aa, Artificial Sequence
  Description of Artificial Sequence: Synthetic peptide
GHRSDQS

SEQ ID NO: 2527 - protein, 7 aa, Artificial Sequence
  Description of Artificial Sequence: Synthetic peptide
GHSAGAS

SEQ ID NO: 2528 - protein, 7 aa, Artificial Sequence
  Description of Artificial Sequence: Synthetic peptide
GHSGDRA

SEQ ID NO: 2529 - protein, 7 aa, Artificial Sequence
  Description of Artificial Sequence: Synthetic peptide
GHSHNAY

SEQ ID NO: 2530 - protein, 7 aa, Artificial Sequence
  Description of Artificial Sequence: Synthetic peptide
GHSSASN

SEQ ID NO: 2531 - protein, 7 aa, Artificial Sequence
  Description of Artificial Sequence: Synthetic peptide
GHSVTHP

SEQ ID NO: 2532 - protein, 7 aa, Artificial Sequence
  Description of Artificial Sequence: Synthetic peptide
GHSVVKS

SEQ ID NO: 2533 - protein, 7 aa, Artificial Sequence
  Description of Artificial Sequence: Synthetic peptide
GHSYPQA

SEQ ID NO: 2534 - protein, 7 aa, Artificial Sequence
  Description of Artificial Sequence: Synthetic peptide
GHTLKPP

SEQ ID NO: 2535 - protein, 7 aa, Artificial Sequence
  Description of Artificial Sequence: Synthetic peptide
GHVEPRY

SEQ ID NO: 2536 - protein, 7 aa, Artificial Sequence
  Description of Artificial Sequence: Synthetic peptide
GHVGSRV

SEQ ID NO: 2537 - protein, 7 aa, Artificial Sequence
  Description of Artificial Sequence: Synthetic peptide
GHVLVTP

SEQ ID NO: 2538 - protein, 7 aa, Artificial Sequence
  Description of Artificial Sequence: Synthetic peptide
GHVSVNT

SEQ ID NO: 2539 - protein, 7 aa, Artificial Sequence
  Description of Artificial Sequence: Synthetic peptide
GIADLAV

SEQ ID NO: 2540 - protein, 7 aa, Artificial Sequence
  Description of Artificial Sequence: Synthetic peptide
GIAGGRP

SEQ ID NO: 2541 - protein, 7 aa, Artificial Sequence
  Description of Artificial Sequence: Synthetic peptide
GIAGRAT

SEQ ID NO: 2542 - protein, 7 aa, Artificial Sequence
  Description of Artificial Sequence: Synthetic peptide
GIASELP

SEQ ID NO: 2543 - protein, 7 aa, Artificial Sequence
  Description of Artificial Sequence: Synthetic peptide
GIAYMTP

SEQ ID NO: 2544 - protein, 7 aa, Artificial Sequence
  Description of Artificial Sequence: Synthetic peptide
GIDLHTA

SEQ ID NO: 2545 - protein, 7 aa, Artificial Sequence
  Description of Artificial Sequence: Synthetic peptide
GIDNGTV

SEQ ID NO: 2546 - protein, 7 aa, Artificial Sequence
  Description of Artificial Sequence: Synthetic peptide
GIEIDTQ

SEQ ID NO: 2547 - protein, 7 aa, Artificial Sequence
  Description of Artificial Sequence: Synthetic peptide
GIERNSI

SEQ ID NO: 2548 - protein, 7 aa, Artificial Sequence
  Description of Artificial Sequence: Synthetic peptide
GIFAATS

SEQ ID NO: 2549 - protein, 7 aa, Artificial Sequence
  Description of Artificial Sequence: Synthetic peptide
GIGSDRD

SEQ ID NO: 2550 - protein, 7 aa, Artificial Sequence
  Description of Artificial Sequence: Synthetic peptide
GIGTHNP

SEQ ID NO: 2551 - protein, 7 aa, Artificial Sequence
  Description of Artificial Sequence: Synthetic peptide
GIHIKYA

SEQ ID NO: 2552 - protein, 7 aa, Artificial Sequence
  Description of Artificial Sequence: Synthetic peptide
GIKMTIS

SEQ ID NO: 2553 - protein, 7 aa, Artificial Sequence
  Description of Artificial Sequence: Synthetic peptide
GINWQSP

SEQ ID NO: 2554 - protein, 7 aa, Artificial Sequence
  Description of Artificial Sequence: Synthetic peptide
GIPRGAT

SEQ ID NO: 2555 - protein, 7 aa, Artificial Sequence
  Description of Artificial Sequence: Synthetic peptide
GIPSNSR

SEQ ID NO: 2556 - protein, 7 aa, Artificial Sequence
  Description of Artificial Sequence: Synthetic peptide
GIPVRGE

SEQ ID NO: 2557 - protein, 7 aa, Artificial Sequence
  Description of Artificial Sequence: Synthetic peptide
GIQTFAP

SEQ ID NO: 2558 - protein, 7 aa, Artificial Sequence
  Description of Artificial Sequence: Synthetic peptide
GIQTVMS

SEQ ID NO: 2559 - protein, 7 aa, Artificial Sequence
  Description of Artificial Sequence: Synthetic peptide
GIREHPY

SEQ ID NO: 2560 - protein, 7 aa, Artificial Sequence
  Description of Artificial Sequence: Synthetic peptide
GIRILEA

SEQ ID NO: 2561 - protein, 7 aa, Artificial Sequence
  Description of Artificial Sequence: Synthetic peptide
GIRMPAN

SEQ ID NO: 2562 - protein, 7 aa, Artificial Sequence
  Description of Artificial Sequence: Synthetic peptide
GISAGIL

SEQ ID NO: 2563 - protein, 7 aa, Artificial Sequence
  Description of Artificial Sequence: Synthetic peptide
GISGSTV

SEQ ID NO: 2564 - protein, 7 aa, Artificial Sequence
  Description of Artificial Sequence: Synthetic peptide
GISLSSA

SEQ ID NO: 2565 - protein, 7 aa, Artificial Sequence
  Description of Artificial Sequence: Synthetic peptide
GISRTVD

SEQ ID NO: 2566 - protein, 7 aa, Artificial Sequence
  Description of Artificial Sequence: Synthetic peptide
GISVDAL

SEQ ID NO: 2567 - protein, 7 aa, Artificial Sequence
  Description of Artificial Sequence: Synthetic peptide
GITTSQR

SEQ ID NO: 2568 - protein, 7 aa, Artificial Sequence
  Description of Artificial Sequence: Synthetic peptide
GIVTNNT

SEQ ID NO: 2569 - protein, 7 aa, Artificial Sequence
  Description of Artificial Sequence: Synthetic peptide
GIVVTGP

SEQ ID NO: 2570 - protein, 7 aa, Artificial Sequence
  Description of Artificial Sequence: Synthetic peptide
GKDRLLA

SEQ ID NO: 2571 - protein, 7 aa, Artificial Sequence
  Description of Artificial Sequence: Synthetic peptide
GKEFSYT

SEQ ID NO: 2572 - protein, 7 aa, Artificial Sequence
  Description of Artificial Sequence: Synthetic peptide
GKFLPQT

SEQ ID NO: 2573 - protein, 7 aa, Artificial Sequence
  Description of Artificial Sequence: Synthetic peptide
GKGFDSP

SEQ ID NO: 2574 - protein, 7 aa, Artificial Sequence
  Description of Artificial Sequence: Synthetic peptide
GKGLTAT

SEQ ID NO: 2575 - protein, 7 aa, Artificial Sequence
  Description of Artificial Sequence: Synthetic peptide
GKHVKEM

SEQ ID NO: 2576 - protein, 7 aa, Artificial Sequence
  Description of Artificial Sequence: Synthetic peptide
GKISSSL

SEQ ID NO: 2577 - protein, 7 aa, Artificial Sequence
  Description of Artificial Sequence: Synthetic peptide
GKLELAP

SEQ ID NO: 2578 - protein, 7 aa, Artificial Sequence
  Description of Artificial Sequence: Synthetic peptide
GKLLMPQ

SEQ ID NO: 2579 - protein, 7 aa, Artificial Sequence
  Description of Artificial Sequence: Synthetic peptide
GKLTSTL

SEQ ID NO: 2580 - protein, 7 aa, Artificial Sequence
  Description of Artificial Sequence: Synthetic peptide
GKLVSYD

SEQ ID NO: 2581 - protein, 7 aa, Artificial Sequence
  Description of Artificial Sequence: Synthetic peptide
GKMSVGN

SEQ ID NO: 2582 - protein, 7 aa, Artificial Sequence
  Description of Artificial Sequence: Synthetic peptide
GKNATFP

SEQ ID NO: 2583 - protein, 7 aa, Artificial Sequence
  Description of Artificial Sequence: Synthetic peptide
GKNGDRT

SEQ ID NO: 2584 - protein, 7 aa, Artificial Sequence
  Description of Artificial Sequence: Synthetic peptide
GKPAGAI

SEQ ID NO: 2585 - protein, 7 aa, Artificial Sequence
  Description of Artificial Sequence: Synthetic peptide
GKPASPY

SEQ ID NO: 2586 - protein, 7 aa, Artificial Sequence
  Description of Artificial Sequence: Synthetic peptide
GKQNQYT

SEQ ID NO: 2587 - protein, 7 aa, Artificial Sequence
  Description of Artificial Sequence: Synthetic peptide
GKQTPPS

SEQ ID NO: 2588 - protein, 7 aa, Artificial Sequence
  Description of Artificial Sequence: Synthetic peptide
GKRAPVD

SEQ ID NO: 2589 - protein, 7 aa, Artificial Sequence
  Description of Artificial Sequence: Synthetic peptide
GKSPGPL

SEQ ID NO: 2590 - protein, 7 aa, Artificial Sequence
  Description of Artificial Sequence: Synthetic peptide
GKSQSGL

SEQ ID NO: 2591 - protein, 7 aa, Artificial Sequence
  Description of Artificial Sequence: Synthetic peptide
GKSVTVS

SEQ ID NO: 2592 - protein, 7 aa, Artificial Sequence
  Description of Artificial Sequence: Synthetic peptide
GKTEERP

SEQ ID NO: 2593 - protein, 7 aa, Artificial Sequence
  Description of Artificial Sequence: Synthetic peptide
GKTKPDY

SEQ ID NO: 2594 - protein, 7 aa, Artificial Sequence
  Description of Artificial Sequence: Synthetic peptide
GKTVDWG

SEQ ID NO: 2595 - protein, 7 aa, Artificial Sequence
  Description of Artificial Sequence: Synthetic peptide
GKTVNIV

SEQ ID NO: 2596 - protein, 7 aa, Artificial Sequence
  Description of Artificial Sequence: Synthetic peptide
GKTVVSV

SEQ ID NO: 2597 - protein, 7 aa, Artificial Sequence
  Description of Artificial Sequence: Synthetic peptide
GKVEFAI

SEQ ID NO: 2598 - protein, 7 aa, Artificial Sequence
  Description of Artificial Sequence: Synthetic peptide
GKVHEGM

SEQ ID NO: 2599 - protein, 7 aa, Artificial Sequence
  Description of Artificial Sequence: Synthetic peptide
GKVPTIS

SEQ ID NO: 2600 - protein, 7 aa, Artificial Sequence
  Description of Artificial Sequence: Synthetic peptide
GKVVQTP

SEQ ID NO: 2601 - protein, 7 aa, Artificial Sequence
  Description of Artificial Sequence: Synthetic peptide
GLAAKAD

SEQ ID NO: 2602 - protein, 7 aa, Artificial Sequence
  Description of Artificial Sequence: Synthetic peptide
GLAATVP

SEQ ID NO: 2603 - protein, 7 aa, Artificial Sequence
  Description of Artificial Sequence: Synthetic peptide
GLAHQGT

SEQ ID NO: 2604 - protein, 7 aa, Artificial Sequence
  Description of Artificial Sequence: Synthetic peptide
GLAKYAE

SEQ ID NO: 2605 - protein, 7 aa, Artificial Sequence
  Description of Artificial Sequence: Synthetic peptide
GLALSSP

SEQ ID NO: 2606 - protein, 7 aa, Artificial Sequence
  Description of Artificial Sequence: Synthetic peptide
GLANSPS

SEQ ID NO: 2607 - protein, 7 aa, Artificial Sequence
  Description of Artificial Sequence: Synthetic peptide
GLAVGTR

SEQ ID NO: 2608 - protein, 7 aa, Artificial Sequence
  Description of Artificial Sequence: Synthetic peptide
GLEHHVT

SEQ ID NO: 2609 - protein, 7 aa, Artificial Sequence
  Description of Artificial Sequence: Synthetic peptide
GLGAPER

SEQ ID NO: 2610 - protein, 7 aa, Artificial Sequence
  Description of Artificial Sequence: Synthetic peptide
GLGLVTG

SEQ ID NO: 2611 - protein, 7 aa, Artificial Sequence
  Description of Artificial Sequence: Synthetic peptide
GLGMPQS

SEQ ID NO: 2612 - protein, 7 aa, Artificial Sequence
  Description of Artificial Sequence: Synthetic peptide
GLGSTLG

SEQ ID NO: 2613 - protein, 7 aa, Artificial Sequence
  Description of Artificial Sequence: Synthetic peptide
GLGTASA

SEQ ID NO: 2614 - protein, 7 aa, Artificial Sequence
  Description of Artificial Sequence: Synthetic peptide
GLGTMVI

SEQ ID NO: 2615 - protein, 7 aa, Artificial Sequence
  Description of Artificial Sequence: Synthetic peptide
GLGTPSP

SEQ ID NO: 2616 - protein, 7 aa, Artificial Sequence
  Description of Artificial Sequence: Synthetic peptide
GLGTTGR

SEQ ID NO: 2617 - protein, 7 aa, Artificial Sequence
  Description of Artificial Sequence: Synthetic peptide
GLHDPPV

SEQ ID NO: 2618 - protein, 7 aa, Artificial Sequence
  Description of Artificial Sequence: Synthetic peptide
GLHLMDV

SEQ ID NO: 2619 - protein, 7 aa, Artificial Sequence
  Description of Artificial Sequence: Synthetic peptide
GLISQTD

SEQ ID NO: 2620 - protein, 7 aa, Artificial Sequence
  Description of Artificial Sequence: Synthetic peptide
GLKAVDG

SEQ ID NO: 2621 - protein, 7 aa, Artificial Sequence
  Description of Artificial Sequence: Synthetic peptide
GLKITTE

SEQ ID NO: 2622 - protein, 7 aa, Artificial Sequence
  Description of Artificial Sequence: Synthetic peptide
GLKNPQM

SEQ ID NO: 2623 - protein, 7 aa, Artificial Sequence
  Description of Artificial Sequence: Synthetic peptide
GLKSTIN

SEQ ID NO: 2624 - protein, 7 aa, Artificial Sequence
  Description of Artificial Sequence: Synthetic peptide
GLLGEKS

SEQ ID NO: 2625 - protein, 7 aa, Artificial Sequence
  Description of Artificial Sequence: Synthetic peptide
GLLGRYE

SEQ ID NO: 2626 - protein, 7 aa, Artificial Sequence
  Description of Artificial Sequence: Synthetic peptide
GLLGTKL

SEQ ID NO: 2627 - protein, 7 aa, Artificial Sequence
  Description of Artificial Sequence: Synthetic peptide
GLLSRAE

SEQ ID NO: 2628 - protein, 7 aa, Artificial Sequence
  Description of Artificial Sequence: Synthetic peptide
GLLVLYP

SEQ ID NO: 2629 - protein, 7 aa, Artificial Sequence
  Description of Artificial Sequence: Synthetic peptide
GLMAHRN

SEQ ID NO: 2630 - protein, 7 aa, Artificial Sequence
  Description of Artificial Sequence: Synthetic peptide
GLMLMNG

SEQ ID NO: 2631 - protein, 7 aa, Artificial Sequence
  Description of Artificial Sequence: Synthetic peptide
GLNPGTH

SEQ ID NO: 2632 - protein, 7 aa, Artificial Sequence
  Description of Artificial Sequence: Synthetic peptide
GLNRFSG

SEQ ID NO: 2633 - protein, 7 aa, Artificial Sequence
  Description of Artificial Sequence: Synthetic peptide
GLNVTKF

SEQ ID NO: 2634 - protein, 7 aa, Artificial Sequence
  Description of Artificial Sequence: Synthetic peptide
GLPGELA

SEQ ID NO: 2635 - protein, 7 aa, Artificial Sequence
  Description of Artificial Sequence: Synthetic peptide
GLPGGRS

SEQ ID NO: 2636 - protein, 7 aa, Artificial Sequence
  Description of Artificial Sequence: Synthetic peptide
GLPGRHA

SEQ ID NO: 2637 - protein, 7 aa, Artificial Sequence
  Description of Artificial Sequence: Synthetic peptide
GLPHRYE

SEQ ID NO: 2638 - protein, 7 aa, Artificial Sequence
  Description of Artificial Sequence: Synthetic peptide
GLPIPSL

SEQ ID NO: 2639 - protein, 7 aa, Artificial Sequence
  Description of Artificial Sequence: Synthetic peptide
GLPKHPP

SEQ ID NO: 2640 - protein, 7 aa, Artificial Sequence
  Description of Artificial Sequence: Synthetic peptide
GLPMATA

SEQ ID NO: 2641 - protein, 7 aa, Artificial Sequence
  Description of Artificial Sequence: Synthetic peptide
GLPNREP

SEQ ID NO: 2642 - protein, 7 aa, Artificial Sequence
  Description of Artificial Sequence: Synthetic peptide
GLPPASK

SEQ ID NO: 2643 - protein, 7 aa, Artificial Sequence
  Description of Artificial Sequence: Synthetic peptide
GLPQASH

SEQ ID NO: 2644 - protein, 7 aa, Artificial Sequence
  Description of Artificial Sequence: Synthetic peptide
GLPQHKQ

SEQ ID NO: 2645 - protein, 7 aa, Artificial Sequence
  Description of Artificial Sequence: Synthetic peptide
GLPSNLT

SEQ ID NO: 2646 - protein, 7 aa, Artificial Sequence
  Description of Artificial Sequence: Synthetic peptide
GLPTEDR

SEQ ID NO: 2647 - protein, 7 aa, Artificial Sequence
  Description of Artificial Sequence: Synthetic peptide
GLPYGNS

SEQ ID NO: 2648 - protein, 7 aa, Artificial Sequence
  Description of Artificial Sequence: Synthetic peptide
GLQQEVR

SEQ ID NO: 2649 - protein, 7 aa, Artificial Sequence
  Description of Artificial Sequence: Synthetic peptide
GLQSTGL

SEQ ID NO: 2650 - protein, 7 aa, Artificial Sequence
  Description of Artificial Sequence: Synthetic peptide
GLREPVA

SEQ ID NO: 2651 - protein, 7 aa, Artificial Sequence
  Description of Artificial Sequence: Synthetic peptide
GLRFTVE

SEQ ID NO: 2652 - protein, 7 aa, Artificial Sequence
  Description of Artificial Sequence: Synthetic peptide
GLRNLGS

SEQ ID NO: 2653 - protein, 7 aa, Artificial Sequence
  Description of Artificial Sequence: Synthetic peptide
GLRNQEL

SEQ ID NO: 2654 - protein, 7 aa, Artificial Sequence
  Description of Artificial Sequence: Synthetic peptide
GLRPGQD

SEQ ID NO: 2655 - protein, 7 aa, Artificial Sequence
  Description of Artificial Sequence: Synthetic peptide
GLRSLSA

SEQ ID NO: 2656 - protein, 7 aa, Artificial Sequence
  Description of Artificial Sequence: Synthetic peptide
GLRSMPE

SEQ ID NO: 2657 - protein, 7 aa, Artificial Sequence
  Description of Artificial Sequence: Synthetic peptide
GLRSSYA

SEQ ID NO: 2658 - protein, 7 aa, Artificial Sequence
  Description of Artificial Sequence: Synthetic peptide
GLRTASN

SEQ ID NO: 2659 - protein, 7 aa, Artificial Sequence
  Description of Artificial Sequence: Synthetic peptide
GLRTDML

SEQ ID NO: 2660 - protein, 7 aa, Artificial Sequence
  Description of Artificial Sequence: Synthetic peptide
GLSAAAT

SEQ ID NO: 2661 - protein, 7 aa, Artificial Sequence
  Description of Artificial Sequence: Synthetic peptide
GLSALAS

SEQ ID NO: 2662 - protein, 7 aa, Artificial Sequence
  Description of Artificial Sequence: Synthetic peptide
GLSAYIP

SEQ ID NO: 2663 - protein, 7 aa, Artificial Sequence
  Description of Artificial Sequence: Synthetic peptide
GLSHSAL

SEQ ID NO: 2664 - protein, 7 aa, Artificial Sequence
  Description of Artificial Sequence: Synthetic peptide
GLSLDDY

SEQ ID NO: 2665 - protein, 7 aa, Artificial Sequence
  Description of Artificial Sequence: Synthetic peptide
GLSLKYG

SEQ ID NO: 2666 - protein, 7 aa, Artificial Sequence
  Description of Artificial Sequence: Synthetic peptide
GLSLLRN

SEQ ID NO: 2667 - protein, 7 aa, Artificial Sequence
  Description of Artificial Sequence: Synthetic peptide
GLSMPLP

SEQ ID NO: 2668 - protein, 7 aa, Artificial Sequence
  Description of Artificial Sequence: Synthetic peptide
GLSPRQT

SEQ ID NO: 2669 - protein, 7 aa, Artificial Sequence
  Description of Artificial Sequence: Synthetic peptide
GLSRAPP

SEQ ID NO: 2670 - protein, 7 aa, Artificial Sequence
  Description of Artificial Sequence: Synthetic peptide
GLSSHHP

SEQ ID NO: 2671 - protein, 7 aa, Artificial Sequence
  Description of Artificial Sequence: Synthetic peptide
GLSTKTS

SEQ ID NO: 2672 - protein, 7 aa, Artificial Sequence
  Description of Artificial Sequence: Synthetic peptide
GLSTVLM

SEQ ID NO: 2673 - protein, 7 aa, Artificial Sequence
  Description of Artificial Sequence: Synthetic peptide
GLSVTRV

SEQ ID NO: 2674 - protein, 7 aa, Artificial Sequence
  Description of Artificial Sequence: Synthetic peptide
GLTHVVQ

SEQ ID NO: 2675 - protein, 7 aa, Artificial Sequence
  Description of Artificial Sequence: Synthetic peptide
GLTLDLR

SEQ ID NO: 2676 - protein, 7 aa, Artificial Sequence
  Description of Artificial Sequence: Synthetic peptide
GLTLVPA

SEQ ID NO: 2677 - protein, 7 aa, Artificial Sequence
  Description of Artificial Sequence: Synthetic peptide
GLTNTGS

SEQ ID NO: 2678 - protein, 7 aa, Artificial Sequence
  Description of Artificial Sequence: Synthetic peptide
GLTPDHG

SEQ ID NO: 2679 - protein, 7 aa, Artificial Sequence
  Description of Artificial Sequence: Synthetic peptide
GLTQPGP

SEQ ID NO: 2680 - protein, 7 aa, Artificial Sequence
  Description of Artificial Sequence: Synthetic peptide
GLTSHPI

SEQ ID NO: 2681 - protein, 7 aa, Artificial Sequence
  Description of Artificial Sequence: Synthetic peptide
GLTYALT

SEQ ID NO: 2682 - protein, 7 aa, Artificial Sequence
  Description of Artificial Sequence: Synthetic peptide
GLVAHTI

SEQ ID NO: 2683 - protein, 7 aa, Artificial Sequence
  Description of Artificial Sequence: Synthetic peptide
GLVGRVQ

SEQ ID NO: 2684 - protein, 7 aa, Artificial Sequence
  Description of Artificial Sequence: Synthetic peptide
GLVIGVA

SEQ ID NO: 2685 - protein, 7 aa, Artificial Sequence
  Description of Artificial Sequence: Synthetic peptide
GLVPTDA

SEQ ID NO: 2686 - protein, 7 aa, Artificial Sequence
  Description of Artificial Sequence: Synthetic peptide
GLVSTHD

SEQ ID NO: 2687 - protein, 7 aa, Artificial Sequence
  Description of Artificial Sequence: Synthetic peptide
GLYDTRS

SEQ ID NO: 2688 - protein, 7 aa, Artificial Sequence
  Description of Artificial Sequence: Synthetic peptide
GLYHLNA

SEQ ID NO: 2689 - protein, 7 aa, Artificial Sequence
  Description of Artificial Sequence: Synthetic peptide
GLYNTST

SEQ ID NO: 2690 - protein, 7 aa, Artificial Sequence
  Description of Artificial Sequence: Synthetic peptide
GLYPNFT

SEQ ID NO: 2691 - protein, 7 aa, Artificial Sequence
  Description of Artificial Sequence: Synthetic peptide
GMAAGHS

SEQ ID NO: 2692 - protein, 7 aa, Artificial Sequence
  Description of Artificial Sequence: Synthetic peptide
GMAATAS

SEQ ID NO: 2693 - protein, 7 aa, Artificial Sequence
  Description of Artificial Sequence: Synthetic peptide
GMAGIRD

SEQ ID NO: 2694 - protein, 7 aa, Artificial Sequence
  Description of Artificial Sequence: Synthetic peptide
GMAMTLS

SEQ ID NO: 2695 - protein, 7 aa, Artificial Sequence
  Description of Artificial Sequence: Synthetic peptide
GMATGVD

SEQ ID NO: 2696 - protein, 7 aa, Artificial Sequence
  Description of Artificial Sequence: Synthetic peptide
GMDQVLR

SEQ ID NO: 2697 - protein, 7 aa, Artificial Sequence
  Description of Artificial Sequence: Synthetic peptide
GMGTAYG

SEQ ID NO: 2698 - protein, 7 aa, Artificial Sequence
  Description of Artificial Sequence: Synthetic peptide
GMKPPVD

SEQ ID NO: 2699 - protein, 7 aa, Artificial Sequence
  Description of Artificial Sequence: Synthetic peptide
GMLRAVS

SEQ ID NO: 2700 - protein, 7 aa, Artificial Sequence
  Description of Artificial Sequence: Synthetic peptide
GMNNTVR

SEQ ID NO: 2701 - protein, 7 aa, Artificial Sequence
  Description of Artificial Sequence: Synthetic peptide
GMNSSLV

SEQ ID NO: 2702 - protein, 7 aa, Artificial Sequence
  Description of Artificial Sequence: Synthetic peptide
GMPHLPP

SEQ ID NO: 2703 - protein, 7 aa, Artificial Sequence
  Description of Artificial Sequence: Synthetic peptide
GMPIPSN

SEQ ID NO: 2704 - protein, 7 aa, Artificial Sequence
  Description of Artificial Sequence: Synthetic peptide
GMRDLQP

SEQ ID NO: 2705 - protein, 7 aa, Artificial Sequence
  Description of Artificial Sequence: Synthetic peptide
GMRQTQA

SEQ ID NO: 2706 - protein, 7 aa, Artificial Sequence
  Description of Artificial Sequence: Synthetic peptide
GMSMITR

SEQ ID NO: 2707 - protein, 7 aa, Artificial Sequence
  Description of Artificial Sequence: Synthetic peptide
GMSQGSY

SEQ ID NO: 2708 - protein, 7 aa, Artificial Sequence
  Description of Artificial Sequence: Synthetic peptide
GMSRSFS

SEQ ID NO: 2709 - protein, 7 aa, Artificial Sequence
  Description of Artificial Sequence: Synthetic peptide
GMSSALS

SEQ ID NO: 2710 - protein, 7 aa, Artificial Sequence
  Description of Artificial Sequence: Synthetic peptide
GMSVPMD

SEQ ID NO: 2711 - protein, 7 aa, Artificial Sequence
  Description of Artificial Sequence: Synthetic peptide
GMTRPQV

SEQ ID NO: 2712 - protein, 7 aa, Artificial Sequence
  Description of Artificial Sequence: Synthetic peptide
GNAATLR

SEQ ID NO: 2713 - protein, 7 aa, Artificial Sequence
  Description of Artificial Sequence: Synthetic peptide
GNARPIT

SEQ ID NO: 2714 - protein, 7 aa, Artificial Sequence
  Description of Artificial Sequence: Synthetic peptide
GNASPQM

SEQ ID NO: 2715 - protein, 7 aa, Artificial Sequence
  Description of Artificial Sequence: Synthetic peptide
GNAVGGD

SEQ ID NO: 2716 - protein, 7 aa, Artificial Sequence
  Description of Artificial Sequence: Synthetic peptide
GNDDSKY

SEQ ID NO: 2717 - protein, 7 aa, Artificial Sequence
  Description of Artificial Sequence: Synthetic peptide
GNFQKNA

SEQ ID NO: 2718 - protein, 7 aa, Artificial Sequence
  Description of Artificial Sequence: Synthetic peptide
GNGRGFQ

SEQ ID NO: 2719 - protein, 7 aa, Artificial Sequence
  Description of Artificial Sequence: Synthetic peptide
GNGTPEH

SEQ ID NO: 2720 - protein, 7 aa, Artificial Sequence
  Description of Artificial Sequence: Synthetic peptide
GNHAFHA

SEQ ID NO: 2721 - protein, 7 aa, Artificial Sequence
  Description of Artificial Sequence: Synthetic peptide
GNHLHLC

SEQ ID NO: 2722 - protein, 7 aa, Artificial Sequence
  Description of Artificial Sequence: Synthetic peptide
GNHVLQP

SEQ ID NO: 2723 - protein, 7 aa, Artificial Sequence
  Description of Artificial Sequence: Synthetic peptide
GNLLTIS

SEQ ID NO: 2724 - protein, 7 aa, Artificial Sequence
  Description of Artificial Sequence: Synthetic peptide
GNLSQRF

SEQ ID NO: 2725 - protein, 7 aa, Artificial Sequence
  Description of Artificial Sequence: Synthetic peptide
GNMHTLT

SEQ ID NO: 2726 - protein, 7 aa, Artificial Sequence
  Description of Artificial Sequence: Synthetic peptide
GNPLKPQ

SEQ ID NO: 2727 - protein, 7 aa, Artificial Sequence
  Description of Artificial Sequence: Synthetic peptide
GNREALA

SEQ ID NO: 2728 - protein, 7 aa, Artificial Sequence
  Description of Artificial Sequence: Synthetic peptide
GNRNSNV

SEQ ID NO: 2729 - protein, 7 aa, Artificial Sequence
  Description of Artificial Sequence: Synthetic peptide
GNSAMNS

SEQ ID NO: 2730 - protein, 7 aa, Artificial Sequence
  Description of Artificial Sequence: Synthetic peptide
GNSDQTR

SEQ ID NO: 2731 - protein, 7 aa, Artificial Sequence
  Description of Artificial Sequence: Synthetic peptide
GNSLAPQ

SEQ ID NO: 2732 - protein, 7 aa, Artificial Sequence
  Description of Artificial Sequence: Synthetic peptide
GNSSAGN

SEQ ID NO: 2733 - protein, 7 aa, Artificial Sequence
  Description of Artificial Sequence: Synthetic peptide
GNSSHSD

SEQ ID NO: 2734 - protein, 7 aa, Artificial Sequence
  Description of Artificial Sequence: Synthetic peptide
GNSTVDP

SEQ ID NO: 2735 - protein, 7 aa, Artificial Sequence
  Description of Artificial Sequence: Synthetic peptide
GNSVPHN

SEQ ID NO: 2736 - protein, 7 aa, Artificial Sequence
  Description of Artificial Sequence: Synthetic peptide
GNSVQHR

SEQ ID NO: 2737 - protein, 7 aa, Artificial Sequence
  Description of Artificial Sequence: Synthetic peptide
GNTAPQS

SEQ ID NO: 2738 - protein, 7 aa, Artificial Sequence
  Description of Artificial Sequence: Synthetic peptide
GNTHNMQ

SEQ ID NO: 2739 - protein, 7 aa, Artificial Sequence
  Description of Artificial Sequence: Synthetic peptide
GNTKSPG

SEQ ID NO: 2740 - protein, 7 aa, Artificial Sequence
  Description of Artificial Sequence: Synthetic peptide
GNTNRNG

SEQ ID NO: 2741 - protein, 7 aa, Artificial Sequence
  Description of Artificial Sequence: Synthetic peptide
GNTSSRA

SEQ ID NO: 2742 - protein, 7 aa, Artificial Sequence
  Description of Artificial Sequence: Synthetic peptide
GNTVRIP

SEQ ID NO: 2743 - protein, 7 aa, Artificial Sequence
  Description of Artificial Sequence: Synthetic peptide
GNVLRVV

SEQ ID NO: 2744 - protein, 7 aa, Artificial Sequence
  Description of Artificial Sequence: Synthetic peptide
GNVTKGL

SEQ ID NO: 2745 - protein, 7 aa, Artificial Sequence
  Description of Artificial Sequence: Synthetic peptide
GNYILKP

SEQ ID NO: 2746 - protein, 7 aa, Artificial Sequence
  Description of Artificial Sequence: Synthetic peptide
GNYISAS

SEQ ID NO: 2747 - protein, 7 aa, Artificial Sequence
  Description of Artificial Sequence: Synthetic peptide
GNYNLDL

SEQ ID NO: 2748 - protein, 7 aa, Artificial Sequence
  Description of Artificial Sequence: Synthetic peptide
GNYSSEV

SEQ ID NO: 2749 - protein, 7 aa, Artificial Sequence
  Description of Artificial Sequence: Synthetic peptide
GPAADVR

SEQ ID NO: 2750 - protein, 7 aa, Artificial Sequence
  Description of Artificial Sequence: Synthetic peptide
GPALLMD

SEQ ID NO: 2751 - protein, 7 aa, Artificial Sequence
  Description of Artificial Sequence: Synthetic peptide
GPALPIA

SEQ ID NO: 2752 - protein, 7 aa, Artificial Sequence
  Description of Artificial Sequence: Synthetic peptide
GPAMGSL

SEQ ID NO: 2753 - protein, 7 aa, Artificial Sequence
  Description of Artificial Sequence: Synthetic peptide
GPAPSIS

SEQ ID NO: 2754 - protein, 7 aa, Artificial Sequence
  Description of Artificial Sequence: Synthetic peptide
GPAQRLQ

SEQ ID NO: 2755 - protein, 7 aa, Artificial Sequence
  Description of Artificial Sequence: Synthetic peptide
GPASIVS

SEQ ID NO: 2756 - protein, 7 aa, Artificial Sequence
  Description of Artificial Sequence: Synthetic peptide
GPATHLT

SEQ ID NO: 2757 - protein, 7 aa, Artificial Sequence
  Description of Artificial Sequence: Synthetic peptide
GPDLTTG

SEQ ID NO: 2758 - protein, 7 aa, Artificial Sequence
  Description of Artificial Sequence: Synthetic peptide
GPDQEEH

SEQ ID NO: 2759 - protein, 7 aa, Artificial Sequence
  Description of Artificial Sequence: Synthetic peptide
GPEAMYK

SEQ ID NO: 2760 - protein, 7 aa, Artificial Sequence
  Description of Artificial Sequence: Synthetic peptide
GPEQDIM

SEQ ID NO: 2761 - protein, 7 aa, Artificial Sequence
  Description of Artificial Sequence: Synthetic peptide
GPEWVTG

SEQ ID NO: 2762 - protein, 7 aa, Artificial Sequence
  Description of Artificial Sequence: Synthetic peptide
GPFEQTD

SEQ ID NO: 2763 - protein, 7 aa, Artificial Sequence
  Description of Artificial Sequence: Synthetic peptide
GPGAIHY

SEQ ID NO: 2764 - protein, 7 aa, Artificial Sequence
  Description of Artificial Sequence: Synthetic peptide
GPGIASF

SEQ ID NO: 2765 - protein, 7 aa, Artificial Sequence
  Description of Artificial Sequence: Synthetic peptide
GPGKETR

SEQ ID NO: 2766 - protein, 7 aa, Artificial Sequence
  Description of Artificial Sequence: Synthetic peptide
GPGMLCA

SEQ ID NO: 2767 - protein, 7 aa, Artificial Sequence
  Description of Artificial Sequence: Synthetic peptide
GPGPIGS

SEQ ID NO: 2768 - protein, 7 aa, Artificial Sequence
  Description of Artificial Sequence: Synthetic peptide
GPGSFRP

SEQ ID NO: 2769 - protein, 7 aa, Artificial Sequence
  Description of Artificial Sequence: Synthetic peptide
GPGSSSM

SEQ ID NO: 2770 - protein, 7 aa, Artificial Sequence
  Description of Artificial Sequence: Synthetic peptide
GPHIRIA

SEQ ID NO: 2771 - protein, 7 aa, Artificial Sequence
  Description of Artificial Sequence: Synthetic peptide
GPHLVQH

SEQ ID NO: 2772 - protein, 7 aa, Artificial Sequence
  Description of Artificial Sequence: Synthetic peptide
GPHTSMI

SEQ ID NO: 2773 - protein, 7 aa, Artificial Sequence
  Description of Artificial Sequence: Synthetic peptide
GPHYNDP

SEQ ID NO: 2774 - protein, 7 aa, Artificial Sequence
  Description of Artificial Sequence: Synthetic peptide
GPIELTL

SEQ ID NO: 2775 - protein, 7 aa, Artificial Sequence
  Description of Artificial Sequence: Synthetic peptide
GPKLTPV

SEQ ID NO: 2776 - protein, 7 aa, Artificial Sequence
  Description of Artificial Sequence: Synthetic peptide
GPKMEPH

SEQ ID NO: 2777 - protein, 7 aa, Artificial Sequence
  Description of Artificial Sequence: Synthetic peptide
GPLLVRG

SEQ ID NO: 2778 - protein, 7 aa, Artificial Sequence
  Description of Artificial Sequence: Synthetic peptide
GPLNSVM

SEQ ID NO: 2779 - protein, 7 aa, Artificial Sequence
  Description of Artificial Sequence: Synthetic peptide
GPLPEGH

SEQ ID NO: 2780 - protein, 7 aa, Artificial Sequence
  Description of Artificial Sequence: Synthetic peptide
GPLPPTT

SEQ ID NO: 2781 - protein, 7 aa, Artificial Sequence
  Description of Artificial Sequence: Synthetic peptide
GPLPVAT

SEQ ID NO: 2782 - protein, 7 aa, Artificial Sequence
  Description of Artificial Sequence: Synthetic peptide
GPLSAMP

SEQ ID NO: 2783 - protein, 7 aa, Artificial Sequence
  Description of Artificial Sequence: Synthetic peptide
GPLSNVK

SEQ ID NO: 2784 - protein, 7 aa, Artificial Sequence
  Description of Artificial Sequence: Synthetic peptide
GPLVYAD

SEQ ID NO: 2785 - protein, 7 aa, Artificial Sequence
  Description of Artificial Sequence: Synthetic peptide
GPMQMPS

SEQ ID NO: 2786 - protein, 7 aa, Artificial Sequence
  Description of Artificial Sequence: Synthetic peptide
GPMREME

SEQ ID NO: 2787 - protein, 7 aa, Artificial Sequence
  Description of Artificial Sequence: Synthetic peptide
GPMYANP

SEQ ID NO: 2788 - protein, 7 aa, Artificial Sequence
  Description of Artificial Sequence: Synthetic peptide
GPNDVQK

SEQ ID NO: 2789 - protein, 7 aa, Artificial Sequence
  Description of Artificial Sequence: Synthetic peptide
GPNFLLP

SEQ ID NO: 2790 - protein, 7 aa, Artificial Sequence
  Description of Artificial Sequence: Synthetic peptide
GPNGAVG

SEQ ID NO: 2791 - protein, 7 aa, Artificial Sequence
  Description of Artificial Sequence: Synthetic peptide
GPNMRNG

SEQ ID NO: 2792 - protein, 7 aa, Artificial Sequence
  Description of Artificial Sequence: Synthetic peptide
GPNRGSL

SEQ ID NO: 2793 - protein, 7 aa, Artificial Sequence
  Description of Artificial Sequence: Synthetic peptide
GPNRLTV

SEQ ID NO: 2794 - protein, 7 aa, Artificial Sequence
  Description of Artificial Sequence: Synthetic peptide
GPNVLSP

SEQ ID NO: 2795 - protein, 7 aa, Artificial Sequence
  Description of Artificial Sequence: Synthetic peptide
GPPAVKV

SEQ ID NO: 2796 - protein, 7 aa, Artificial Sequence
  Description of Artificial Sequence: Synthetic peptide
GPPHGHS

SEQ ID NO: 2797 - protein, 7 aa, Artificial Sequence
  Description of Artificial Sequence: Synthetic peptide
GPPKANP

SEQ ID NO: 2798 - protein, 7 aa, Artificial Sequence
  Description of Artificial Sequence: Synthetic peptide
GPPLLAP

SEQ ID NO: 2799 - protein, 7 aa, Artificial Sequence
  Description of Artificial Sequence: Synthetic peptide
GPPMRPS

SEQ ID NO: 2800 - protein, 7 aa, Artificial Sequence
  Description of Artificial Sequence: Synthetic peptide
GPPPQPS

SEQ ID NO: 2801 - protein, 7 aa, Artificial Sequence
  Description of Artificial Sequence: Synthetic peptide
GPPPTNW

SEQ ID NO: 2802 - protein, 7 aa, Artificial Sequence
  Description of Artificial Sequence: Synthetic peptide
GPQTVTG

SEQ ID NO: 2803 - protein, 7 aa, Artificial Sequence
  Description of Artificial Sequence: Synthetic peptide
GPRDPRN

SEQ ID NO: 2804 - protein, 7 aa, Artificial Sequence
  Description of Artificial Sequence: Synthetic peptide
GPRGFLN

SEQ ID NO: 2805 - protein, 7 aa, Artificial Sequence
  Description of Artificial Sequence: Synthetic peptide
GPRPQHL

SEQ ID NO: 2806 - protein, 7 aa, Artificial Sequence
  Description of Artificial Sequence: Synthetic peptide
GPRVTND

SEQ ID NO: 2807 - protein, 7 aa, Artificial Sequence
  Description of Artificial Sequence: Synthetic peptide
GPSDHGS

SEQ ID NO: 2808 - protein, 7 aa, Artificial Sequence
  Description of Artificial Sequence: Synthetic peptide
GPSKALA

SEQ ID NO: 2809 - protein, 7 aa, Artificial Sequence
  Description of Artificial Sequence: Synthetic peptide
GPSLNTT

SEQ ID NO: 2810 - protein, 7 aa, Artificial Sequence
  Description of Artificial Sequence: Synthetic peptide
GPSPESS

SEQ ID NO: 2811 - protein, 7 aa, Artificial Sequence
  Description of Artificial Sequence: Synthetic peptide
GPSRNAP

SEQ ID NO: 2812 - protein, 7 aa, Artificial Sequence
  Description of Artificial Sequence: Synthetic peptide
GPSSAKL

SEQ ID NO: 2813 - protein, 7 aa, Artificial Sequence
  Description of Artificial Sequence: Synthetic peptide
GPSSSAY

SEQ ID NO: 2814 - protein, 7 aa, Artificial Sequence
  Description of Artificial Sequence: Synthetic peptide
GPSSVPD

SEQ ID NO: 2815 - protein, 7 aa, Artificial Sequence
  Description of Artificial Sequence: Synthetic peptide
GPSTSLI

SEQ ID NO: 2816 - protein, 7 aa, Artificial Sequence
  Description of Artificial Sequence: Synthetic peptide
GPSVHPA

SEQ ID NO: 2817 - protein, 7 aa, Artificial Sequence
  Description of Artificial Sequence: Synthetic peptide
GPSVHTD

SEQ ID NO: 2818 - protein, 7 aa, Artificial Sequence
  Description of Artificial Sequence: Synthetic peptide
GPSYIDS

SEQ ID NO: 2819 - protein, 7 aa, Artificial Sequence
  Description of Artificial Sequence: Synthetic peptide
GPTETPL

SEQ ID NO: 2820 - protein, 7 aa, Artificial Sequence
  Description of Artificial Sequence: Synthetic peptide
GPTGDLV

SEQ ID NO: 2821 - protein, 7 aa, Artificial Sequence
  Description of Artificial Sequence: Synthetic peptide
GPTGSSE

SEQ ID NO: 2822 - protein, 7 aa, Artificial Sequence
  Description of Artificial Sequence: Synthetic peptide
GPTHPRI

SEQ ID NO: 2823 - protein, 7 aa, Artificial Sequence
  Description of Artificial Sequence: Synthetic peptide
GPTMSMT

SEQ ID NO: 2824 - protein, 7 aa, Artificial Sequence
  Description of Artificial Sequence: Synthetic peptide
GPTSLAI

SEQ ID NO: 2825 - protein, 7 aa, Artificial Sequence
  Description of Artificial Sequence: Synthetic peptide
GPTYPHA

SEQ ID NO: 2826 - protein, 7 aa, Artificial Sequence
  Description of Artificial Sequence: Synthetic peptide
GPVKPRD

SEQ ID NO: 2827 - protein, 7 aa, Artificial Sequence
  Description of Artificial Sequence: Synthetic peptide
GPVNAPD

SEQ ID NO: 2828 - protein, 7 aa, Artificial Sequence
  Description of Artificial Sequence: Synthetic peptide
GPVSGVS

SEQ ID NO: 2829 - protein, 7 aa, Artificial Sequence
  Description of Artificial Sequence: Synthetic peptide
GPYNVDV

SEQ ID NO: 2830 - protein, 7 aa, Artificial Sequence
  Description of Artificial Sequence: Synthetic peptide
GPYSAPG

SEQ ID NO: 2831 - protein, 7 aa, Artificial Sequence
  Description of Artificial Sequence: Synthetic peptide
GQAIGHP

SEQ ID NO: 2832 - protein, 7 aa, Artificial Sequence
  Description of Artificial Sequence: Synthetic peptide
GQARNET

SEQ ID NO: 2833 - protein, 7 aa, Artificial Sequence
  Description of Artificial Sequence: Synthetic peptide
GQASAPF

SEQ ID NO: 2834 - protein, 7 aa, Artificial Sequence
  Description of Artificial Sequence: Synthetic peptide
GQASISS

SEQ ID NO: 2835 - protein, 7 aa, Artificial Sequence
  Description of Artificial Sequence: Synthetic peptide
GQASRQS

SEQ ID NO: 2836 - protein, 7 aa, Artificial Sequence
  Description of Artificial Sequence: Synthetic peptide
GQAVKVN

SEQ ID NO: 2837 - protein, 7 aa, Artificial Sequence
  Description of Artificial Sequence: Synthetic peptide
GQDDVNI

SEQ ID NO: 2838 - protein, 7 aa, Artificial Sequence
  Description of Artificial Sequence: Synthetic peptide
GQDMHDS

SEQ ID NO: 2839 - protein, 7 aa, Artificial Sequence
  Description of Artificial Sequence: Synthetic peptide
GQEWQAG

SEQ ID NO: 2840 - protein, 7 aa, Artificial Sequence
  Description of Artificial Sequence: Synthetic peptide
GQFVVRQ

SEQ ID NO: 2841 - protein, 7 aa, Artificial Sequence
  Description of Artificial Sequence: Synthetic peptide
GQGHPPN

SEQ ID NO: 2842 - protein, 7 aa, Artificial Sequence
  Description of Artificial Sequence: Synthetic peptide
GQGSTPL

SEQ ID NO: 2843 - protein, 7 aa, Artificial Sequence
  Description of Artificial Sequence: Synthetic peptide
GQHARLQ

SEQ ID NO: 2844 - protein, 7 aa, Artificial Sequence
  Description of Artificial Sequence: Synthetic peptide
GQHGKPA

SEQ ID NO: 2845 - protein, 7 aa, Artificial Sequence
  Description of Artificial Sequence: Synthetic peptide
GQHLSPN

SEQ ID NO: 2846 - protein, 7 aa, Artificial Sequence
  Description of Artificial Sequence: Synthetic peptide
GQIVAPT

SEQ ID NO: 2847 - protein, 7 aa, Artificial Sequence
  Description of Artificial Sequence: Synthetic peptide
GQIVTSG

SEQ ID NO: 2848 - protein, 7 aa, Artificial Sequence
  Description of Artificial Sequence: Synthetic peptide
GQLDMTT

SEQ ID NO: 2849 - protein, 7 aa, Artificial Sequence
  Description of Artificial Sequence: Synthetic peptide
GQLNLRP

SEQ ID NO: 2850 - protein, 7 aa, Artificial Sequence
  Description of Artificial Sequence: Synthetic peptide
GQLQSGS

SEQ ID NO: 2851 - protein, 7 aa, Artificial Sequence
  Description of Artificial Sequence: Synthetic peptide
GQMARPD

SEQ ID NO: 2852 - protein, 7 aa, Artificial Sequence
  Description of Artificial Sequence: Synthetic peptide
GQMISAQ

SEQ ID NO: 2853 - protein, 7 aa, Artificial Sequence
  Description of Artificial Sequence: Synthetic peptide
GQPSPWP

SEQ ID NO: 2854 - protein, 7 aa, Artificial Sequence
  Description of Artificial Sequence: Synthetic peptide
GQQDNRD

SEQ ID NO: 2855 - protein, 7 aa, Artificial Sequence
  Description of Artificial Sequence: Synthetic peptide
GQQQGFI

SEQ ID NO: 2856 - protein, 7 aa, Artificial Sequence
  Description of Artificial Sequence: Synthetic peptide
GQRKLEG

SEQ ID NO: 2857 - protein, 7 aa, Artificial Sequence
  Description of Artificial Sequence: Synthetic peptide
GQRMSMT

SEQ ID NO: 2858 - protein, 7 aa, Artificial Sequence
  Description of Artificial Sequence: Synthetic peptide
GQRTTYV

SEQ ID NO: 2859 - protein, 7 aa, Artificial Sequence
  Description of Artificial Sequence: Synthetic peptide
GQSFERT

SEQ ID NO: 2860 - protein, 7 aa, Artificial Sequence
  Description of Artificial Sequence: Synthetic peptide
GQSLAIR

SEQ ID NO: 2861 - protein, 7 aa, Artificial Sequence
  Description of Artificial Sequence: Synthetic peptide
GQSLTHP

SEQ ID NO: 2862 - protein, 7 aa, Artificial Sequence
  Description of Artificial Sequence: Synthetic peptide
GQSTRQD

SEQ ID NO: 2863 - protein, 7 aa, Artificial Sequence
  Description of Artificial Sequence: Synthetic peptide
GQTCTSL

SEQ ID NO: 2864 - protein, 7 aa, Artificial Sequence
  Description of Artificial Sequence: Synthetic peptide
GQTLALD

SEQ ID NO: 2865 - protein, 7 aa, Artificial Sequence
  Description of Artificial Sequence: Synthetic peptide
GQTYPTL

SEQ ID NO: 2866 - protein, 7 aa, Artificial Sequence
  Description of Artificial Sequence: Synthetic peptide
GQVHLNP

SEQ ID NO: 2867 - protein, 7 aa, Artificial Sequence
  Description of Artificial Sequence: Synthetic peptide
GQYGRQP

SEQ ID NO: 2868 - protein, 7 aa, Artificial Sequence
  Description of Artificial Sequence: Synthetic peptide
GQYHRDT

SEQ ID NO: 2869 - protein, 7 aa, Artificial Sequence
  Description of Artificial Sequence: Synthetic peptide
GQYSAST

SEQ ID NO: 2870 - protein, 7 aa, Artificial Sequence
  Description of Artificial Sequence: Synthetic peptide
GRAAPIS

SEQ ID NO: 2871 - protein, 7 aa, Artificial Sequence
  Description of Artificial Sequence: Synthetic peptide
GRANTGF

SEQ ID NO: 2872 - protein, 7 aa, Artificial Sequence
  Description of Artificial Sequence: Synthetic peptide
GRARPLP

SEQ ID NO: 2873 - protein, 7 aa, Artificial Sequence
  Description of Artificial Sequence: Synthetic peptide
GRASTYV

SEQ ID NO: 2874 - protein, 7 aa, Artificial Sequence
  Description of Artificial Sequence: Synthetic peptide
GRDEVPL

SEQ ID NO: 2875 - protein, 7 aa, Artificial Sequence
  Description of Artificial Sequence: Synthetic peptide
GRDGMPS

SEQ ID NO: 2876 - protein, 7 aa, Artificial Sequence
  Description of Artificial Sequence: Synthetic peptide
GRDPTPV

SEQ ID NO: 2877 - protein, 7 aa, Artificial Sequence
  Description of Artificial Sequence: Synthetic peptide
GRDPVRH

SEQ ID NO: 2878 - protein, 7 aa, Artificial Sequence
  Description of Artificial Sequence: Synthetic peptide
GREHMHT

SEQ ID NO: 2879 - protein, 7 aa, Artificial Sequence
  Description of Artificial Sequence: Synthetic peptide
GRELLHS

SEQ ID NO: 2880 - protein, 7 aa, Artificial Sequence
  Description of Artificial Sequence: Synthetic peptide
GRESQIP

SEQ ID NO: 2881 - protein, 7 aa, Artificial Sequence
  Description of Artificial Sequence: Synthetic peptide
GRESVTS

SEQ ID NO: 2882 - protein, 7 aa, Artificial Sequence
  Description of Artificial Sequence: Synthetic peptide
GREYVGN

SEQ ID NO: 2883 - protein, 7 aa, Artificial Sequence
  Description of Artificial Sequence: Synthetic peptide
GRFGTSD

SEQ ID NO: 2884 - protein, 7 aa, Artificial Sequence
  Description of Artificial Sequence: Synthetic peptide
GRGAQPG

SEQ ID NO: 2885 - protein, 7 aa, Artificial Sequence
  Description of Artificial Sequence: Synthetic peptide
GRGDNPA

SEQ ID NO: 2886 - protein, 7 aa, Artificial Sequence
  Description of Artificial Sequence: Synthetic peptide
GRGEAGL

SEQ ID NO: 2887 - protein, 7 aa, Artificial Sequence
  Description of Artificial Sequence: Synthetic peptide
GRGGESV

SEQ ID NO: 2888 - protein, 7 aa, Artificial Sequence
  Description of Artificial Sequence: Synthetic peptide
GRGLPMS

SEQ ID NO: 2889 - protein, 7 aa, Artificial Sequence
  Description of Artificial Sequence: Synthetic peptide
GRGPPPP

SEQ ID NO: 2890 - protein, 7 aa, Artificial Sequence
  Description of Artificial Sequence: Synthetic peptide
GRGQSAS

SEQ ID NO: 2891 - protein, 7 aa, Artificial Sequence
  Description of Artificial Sequence: Synthetic peptide
GRGTPPD

SEQ ID NO: 2892 - protein, 7 aa, Artificial Sequence
  Description of Artificial Sequence: Synthetic peptide
GRIAPVP

SEQ ID NO: 2893 - protein, 7 aa, Artificial Sequence
  Description of Artificial Sequence: Synthetic peptide
GRIYTAE

SEQ ID NO: 2894 - protein, 7 aa, Artificial Sequence
  Description of Artificial Sequence: Synthetic peptide
GRLLPEV

SEQ ID NO: 2895 - protein, 7 aa, Artificial Sequence
  Description of Artificial Sequence: Synthetic peptide
GRLPASL

SEQ ID NO: 2896 - protein, 7 aa, Artificial Sequence
  Description of Artificial Sequence: Synthetic peptide
GRMEGGG

SEQ ID NO: 2897 - protein, 7 aa, Artificial Sequence
  Description of Artificial Sequence: Synthetic peptide
GRMENTV

SEQ ID NO: 2898 - protein, 7 aa, Artificial Sequence
  Description of Artificial Sequence: Synthetic peptide
GRMMNSS

SEQ ID NO: 2899 - protein, 7 aa, Artificial Sequence
  Description of Artificial Sequence: Synthetic peptide
GRMVTGE

SEQ ID NO: 2900 - protein, 7 aa, Artificial Sequence
  Description of Artificial Sequence: Synthetic peptide
GRNDAYA

SEQ ID NO: 2901 - protein, 7 aa, Artificial Sequence
  Description of Artificial Sequence: Synthetic peptide
GRNEPWS

SEQ ID NO: 2902 - protein, 7 aa, Artificial Sequence
  Description of Artificial Sequence: Synthetic peptide
GRNPPLY

SEQ ID NO: 2903 - protein, 7 aa, Artificial Sequence
  Description of Artificial Sequence: Synthetic peptide
GRNPPSA

SEQ ID NO: 2904 - protein, 7 aa, Artificial Sequence
  Description of Artificial Sequence: Synthetic peptide
GRNSNYD

SEQ ID NO: 2905 - protein, 7 aa, Artificial Sequence
  Description of Artificial Sequence: Synthetic peptide
GRNVAGL

SEQ ID NO: 2906 - protein, 7 aa, Artificial Sequence
  Description of Artificial Sequence: Synthetic peptide
GRPDTEH

SEQ ID NO: 2907 - protein, 7 aa, Artificial Sequence
  Description of Artificial Sequence: Synthetic peptide
GRPLPTS

SEQ ID NO: 2908 - protein, 7 aa, Artificial Sequence
  Description of Artificial Sequence: Synthetic peptide
GRPLQAP

SEQ ID NO: 2909 - protein, 7 aa, Artificial Sequence
  Description of Artificial Sequence: Synthetic peptide
GRPPLLP

SEQ ID NO: 2910 - protein, 7 aa, Artificial Sequence
  Description of Artificial Sequence: Synthetic peptide
GRPPSMS

SEQ ID NO: 2911 - protein, 7 aa, Artificial Sequence
  Description of Artificial Sequence: Synthetic peptide
GRPPTDK

SEQ ID NO: 2912 - protein, 7 aa, Artificial Sequence
  Description of Artificial Sequence: Synthetic peptide
GRQDHPG

SEQ ID NO: 2913 - protein, 7 aa, Artificial Sequence
  Description of Artificial Sequence: Synthetic peptide
GRQLACN

SEQ ID NO: 2914 - protein, 7 aa, Artificial Sequence
  Description of Artificial Sequence: Synthetic peptide
GRQMGIT

SEQ ID NO: 2915 - protein, 7 aa, Artificial Sequence
  Description of Artificial Sequence: Synthetic peptide
GRQPSGE

SEQ ID NO: 2916 - protein, 7 aa, Artificial Sequence
  Description of Artificial Sequence: Synthetic peptide
GRQSVSN

SEQ ID NO: 2917 - protein, 7 aa, Artificial Sequence
  Description of Artificial Sequence: Synthetic peptide
GRQVDFV

SEQ ID NO: 2918 - protein, 7 aa, Artificial Sequence
  Description of Artificial Sequence: Synthetic peptide
GRSDLSN

SEQ ID NO: 2919 - protein, 7 aa, Artificial Sequence
  Description of Artificial Sequence: Synthetic peptide
GRSEYNQ

SEQ ID NO: 2920 - protein, 7 aa, Artificial Sequence
  Description of Artificial Sequence: Synthetic peptide
GRSIMSE

SEQ ID NO: 2921 - protein, 7 aa, Artificial Sequence
  Description of Artificial Sequence: Synthetic peptide
GRSLLRE

SEQ ID NO: 2922 - protein, 7 aa, Artificial Sequence
  Description of Artificial Sequence: Synthetic peptide
GRSPIQS

SEQ ID NO: 2923 - protein, 7 aa, Artificial Sequence
  Description of Artificial Sequence: Synthetic peptide
GRSSVAT

SEQ ID NO: 2924 - protein, 7 aa, Artificial Sequence
  Description of Artificial Sequence: Synthetic peptide
GRSVQHL

SEQ ID NO: 2925 - protein, 7 aa, Artificial Sequence
  Description of Artificial Sequence: Synthetic peptide
GRTGSPG

SEQ ID NO: 2926 - protein, 7 aa, Artificial Sequence
  Description of Artificial Sequence: Synthetic peptide
GRTSGSS

SEQ ID NO: 2927 - protein, 7 aa, Artificial Sequence
  Description of Artificial Sequence: Synthetic peptide
GRTSMAT

SEQ ID NO: 2928 - protein, 7 aa, Artificial Sequence
  Description of Artificial Sequence: Synthetic peptide
GRTSRAE

SEQ ID NO: 2929 - protein, 7 aa, Artificial Sequence
  Description of Artificial Sequence: Synthetic peptide
GRTYQIP

SEQ ID NO: 2930 - protein, 7 aa, Artificial Sequence
  Description of Artificial Sequence: Synthetic peptide
GRVLLLD

SEQ ID NO: 2931 - protein, 7 aa, Artificial Sequence
  Description of Artificial Sequence: Synthetic peptide
GRVQVPP

SEQ ID NO: 2932 - protein, 7 aa, Artificial Sequence
  Description of Artificial Sequence: Synthetic peptide
GRVVYID

SEQ ID NO: 2933 - protein, 7 aa, Artificial Sequence
  Description of Artificial Sequence: Synthetic peptide
GRYMAPL

SEQ ID NO: 2934 - protein, 7 aa, Artificial Sequence
  Description of Artificial Sequence: Synthetic peptide
GRYRAGQ

SEQ ID NO: 2935 - protein, 7 aa, Artificial Sequence
  Description of Artificial Sequence: Synthetic peptide
GSAISEL

SEQ ID NO: 2936 - protein, 7 aa, Artificial Sequence
  Description of Artificial Sequence: Synthetic peptide
GSALPTR

SEQ ID NO: 2937 - protein, 7 aa, Artificial Sequence
  Description of Artificial Sequence: Synthetic peptide
GSAPVVL

SEQ ID NO: 2938 - protein, 7 aa, Artificial Sequence
  Description of Artificial Sequence: Synthetic peptide
GSAQGAR

SEQ ID NO: 2939 - protein, 7 aa, Artificial Sequence
  Description of Artificial Sequence: Synthetic peptide
GSARTHP

SEQ ID NO: 2940 - protein, 7 aa, Artificial Sequence
  Description of Artificial Sequence: Synthetic peptide
GSASPMM

SEQ ID NO: 2941 - protein, 7 aa, Artificial Sequence
  Description of Artificial Sequence: Synthetic peptide
GSASSGF

SEQ ID NO: 2942 - protein, 7 aa, Artificial Sequence
  Description of Artificial Sequence: Synthetic peptide
GSDGFSN

SEQ ID NO: 2943 - protein, 7 aa, Artificial Sequence
  Description of Artificial Sequence: Synthetic peptide
GSDGQKG

SEQ ID NO: 2944 - protein, 7 aa, Artificial Sequence
  Description of Artificial Sequence: Synthetic peptide
GSDRIVS

SEQ ID NO: 2945 - protein, 7 aa, Artificial Sequence
  Description of Artificial Sequence: Synthetic peptide
GSDTPSP

SEQ ID NO: 2946 - protein, 7 aa, Artificial Sequence
  Description of Artificial Sequence: Synthetic peptide
GSDTTEI

SEQ ID NO: 2947 - protein, 7 aa, Artificial Sequence
  Description of Artificial Sequence: Synthetic peptide
GSDVIHE

SEQ ID NO: 2948 - protein, 7 aa, Artificial Sequence
  Description of Artificial Sequence: Synthetic peptide
GSEVVAC

SEQ ID NO: 2949 - protein, 7 aa, Artificial Sequence
  Description of Artificial Sequence: Synthetic peptide
GSFTSQI

SEQ ID NO: 2950 - protein, 7 aa, Artificial Sequence
  Description of Artificial Sequence: Synthetic peptide
GSGLIRG

SEQ ID NO: 2951 - protein, 7 aa, Artificial Sequence
  Description of Artificial Sequence: Synthetic peptide
GSGNDVL

SEQ ID NO: 2952 - protein, 7 aa, Artificial Sequence
  Description of Artificial Sequence: Synthetic peptide
GSGPNKS

SEQ ID NO: 2953 - protein, 7 aa, Artificial Sequence
  Description of Artificial Sequence: Synthetic peptide
GSGPTIR

SEQ ID NO: 2954 - protein, 7 aa, Artificial Sequence
  Description of Artificial Sequence: Synthetic peptide
GSGPVEH

SEQ ID NO: 2955 - protein, 7 aa, Artificial Sequence
  Description of Artificial Sequence: Synthetic peptide
GSGSSQT

SEQ ID NO: 2956 - protein, 7 aa, Artificial Sequence
  Description of Artificial Sequence: Synthetic peptide
GSGSTSG

SEQ ID NO: 2957 - protein, 7 aa, Artificial Sequence
  Description of Artificial Sequence: Synthetic peptide
GSGTYTV

SEQ ID NO: 2958 - protein, 7 aa, Artificial Sequence
  Description of Artificial Sequence: Synthetic peptide
GSHAVTS

SEQ ID NO: 2959 - protein, 7 aa, Artificial Sequence
  Description of Artificial Sequence: Synthetic peptide
GSHHSPH

SEQ ID NO: 2960 - protein, 7 aa, Artificial Sequence
  Description of Artificial Sequence: Synthetic peptide
GSHITPL

SEQ ID NO: 2961 - protein, 7 aa, Artificial Sequence
  Description of Artificial Sequence: Synthetic peptide
GSHPIVR

SEQ ID NO: 2962 - protein, 7 aa, Artificial Sequence
  Description of Artificial Sequence: Synthetic peptide
GSHPRGE

SEQ ID NO: 2963 - protein, 7 aa, Artificial Sequence
  Description of Artificial Sequence: Synthetic peptide
GSHQGQS

SEQ ID NO: 2964 - protein, 7 aa, Artificial Sequence
  Description of Artificial Sequence: Synthetic peptide
GSHSGGP

SEQ ID NO: 2965 - protein, 7 aa, Artificial Sequence
  Description of Artificial Sequence: Synthetic peptide
GSHSPAM

SEQ ID NO: 2966 - protein, 7 aa, Artificial Sequence
  Description of Artificial Sequence: Synthetic peptide
GSHTWTE

SEQ ID NO: 2967 - protein, 7 aa, Artificial Sequence
  Description of Artificial Sequence: Synthetic peptide
GSIGEQV

SEQ ID NO: 2968 - protein, 7 aa, Artificial Sequence
  Description of Artificial Sequence: Synthetic peptide
GSIQVTA

SEQ ID NO: 2969 - protein, 7 aa, Artificial Sequence
  Description of Artificial Sequence: Synthetic peptide
GSIVLHE

SEQ ID NO: 2970 - protein, 7 aa, Artificial Sequence
  Description of Artificial Sequence: Synthetic peptide
GSKNQEK

SEQ ID NO: 2971 - protein, 7 aa, Artificial Sequence
  Description of Artificial Sequence: Synthetic peptide
GSKPFLS

SEQ ID NO: 2972 - protein, 7 aa, Artificial Sequence
  Description of Artificial Sequence: Synthetic peptide
GSKRQDQ

SEQ ID NO: 2973 - protein, 7 aa, Artificial Sequence
  Description of Artificial Sequence: Synthetic peptide
GSKSFGS

SEQ ID NO: 2974 - protein, 7 aa, Artificial Sequence
  Description of Artificial Sequence: Synthetic peptide
GSKTFLS

SEQ ID NO: 2975 - protein, 7 aa, Artificial Sequence
  Description of Artificial Sequence: Synthetic peptide
GSKVAGL

SEQ ID NO: 2976 - protein, 7 aa, Artificial Sequence
  Description of Artificial Sequence: Synthetic peptide
GSKVGPL

SEQ ID NO: 2977 - protein, 7 aa, Artificial Sequence
  Description of Artificial Sequence: Synthetic peptide
GSLEQRY

SEQ ID NO: 2978 - protein, 7 aa, Artificial Sequence
  Description of Artificial Sequence: Synthetic peptide
GSLGHMR

SEQ ID NO: 2979 - protein, 7 aa, Artificial Sequence
  Description of Artificial Sequence: Synthetic peptide
GSLGTHS

SEQ ID NO: 2980 - protein, 7 aa, Artificial Sequence
  Description of Artificial Sequence: Synthetic peptide
GSLIAAQ

SEQ ID NO: 2981 - protein, 7 aa, Artificial Sequence
  Description of Artificial Sequence: Synthetic peptide
GSLNPVP

SEQ ID NO: 2982 - protein, 7 aa, Artificial Sequence
  Description of Artificial Sequence: Synthetic peptide
GSLPYSS

SEQ ID NO: 2983 - protein, 7 aa, Artificial Sequence
  Description of Artificial Sequence: Synthetic peptide
GSLYRTE

SEQ ID NO: 2984 - protein, 7 aa, Artificial Sequence
  Description of Artificial Sequence: Synthetic peptide
GSMAYLG

SEQ ID NO: 2985 - protein, 7 aa, Artificial Sequence
  Description of Artificial Sequence: Synthetic peptide
GSMLAHP

SEQ ID NO: 2986 - protein, 7 aa, Artificial Sequence
  Description of Artificial Sequence: Synthetic peptide
GSMNPPS

SEQ ID NO: 2987 - protein, 7 aa, Artificial Sequence
  Description of Artificial Sequence: Synthetic peptide
GSMPVIV

SEQ ID NO: 2988 - protein, 7 aa, Artificial Sequence
  Description of Artificial Sequence: Synthetic peptide
GSMRPGE

SEQ ID NO: 2989 - protein, 7 aa, Artificial Sequence
  Description of Artificial Sequence: Synthetic peptide
GSMSSAN

SEQ ID NO: 2990 - protein, 7 aa, Artificial Sequence
  Description of Artificial Sequence: Synthetic peptide
GSMTSLI

SEQ ID NO: 2991 - protein, 7 aa, Artificial Sequence
  Description of Artificial Sequence: Synthetic peptide
GSMYAVP

SEQ ID NO: 2992 - protein, 7 aa, Artificial Sequence
  Description of Artificial Sequence: Synthetic peptide
GSNGGIS

SEQ ID NO: 2993 - protein, 7 aa, Artificial Sequence
  Description of Artificial Sequence: Synthetic peptide
GSNPMSL

SEQ ID NO: 2994 - protein, 7 aa, Artificial Sequence
  Description of Artificial Sequence: Synthetic peptide
GSPAMAH

SEQ ID NO: 2995 - protein, 7 aa, Artificial Sequence
  Description of Artificial Sequence: Synthetic peptide
GSPGRVA

SEQ ID NO: 2996 - protein, 7 aa, Artificial Sequence
  Description of Artificial Sequence: Synthetic peptide
GSPIGGM

SEQ ID NO: 2997 - protein, 7 aa, Artificial Sequence
  Description of Artificial Sequence: Synthetic peptide
GSPKPHV

SEQ ID NO: 2998 - protein, 7 aa, Artificial Sequence
  Description of Artificial Sequence: Synthetic peptide
GSPMGYT

SEQ ID NO: 2999 - protein, 7 aa, Artificial Sequence
  Description of Artificial Sequence: Synthetic peptide
GSPMPII

SEQ ID NO: 3000 - protein, 7 aa, Artificial Sequence
  Description of Artificial Sequence: Synthetic peptide
GSPNSCM

SEQ ID NO: 3001 - protein, 7 aa, Artificial Sequence
  Description of Artificial Sequence: Synthetic peptide
GSPPTLR

SEQ ID NO: 3002 - protein, 7 aa, Artificial Sequence
  Description of Artificial Sequence: Synthetic peptide
GSPRSLS

SEQ ID NO: 3003 - protein, 7 aa, Artificial Sequence
  Description of Artificial Sequence: Synthetic peptide
GSPRVGT

SEQ ID NO: 3004 - protein, 7 aa, Artificial Sequence
  Description of Artificial Sequence: Synthetic peptide
GSPSPMR

SEQ ID NO: 3005 - protein, 7 aa, Artificial Sequence
  Description of Artificial Sequence: Synthetic peptide
GSPTTGS

SEQ ID NO: 3006 - protein, 7 aa, Artificial Sequence
  Description of Artificial Sequence: Synthetic peptide
GSPYSQA

SEQ ID NO: 3007 - protein, 7 aa, Artificial Sequence
  Description of Artificial Sequence: Synthetic peptide
GSQLHPV

SEQ ID NO: 3008 - protein, 7 aa, Artificial Sequence
  Description of Artificial Sequence: Synthetic peptide
GSQPIRT

SEQ ID NO: 3009 - protein, 7 aa, Artificial Sequence
  Description of Artificial Sequence: Synthetic peptide
GSQQLAA

SEQ ID NO: 3010 - protein, 7 aa, Artificial Sequence
  Description of Artificial Sequence: Synthetic peptide
GSRASDP

SEQ ID NO: 3011 - protein, 7 aa, Artificial Sequence
  Description of Artificial Sequence: Synthetic peptide
GSRLQHD

SEQ ID NO: 3012 - protein, 7 aa, Artificial Sequence
  Description of Artificial Sequence: Synthetic peptide
GSRNFPT

SEQ ID NO: 3013 - protein, 7 aa, Artificial Sequence
  Description of Artificial Sequence: Synthetic peptide
GSRNYIA

SEQ ID NO: 3014 - protein, 7 aa, Artificial Sequence
  Description of Artificial Sequence: Synthetic peptide
GSRPGSL

SEQ ID NO: 3015 - protein, 7 aa, Artificial Sequence
  Description of Artificial Sequence: Synthetic peptide
GSRQPAD

SEQ ID NO: 3016 - protein, 7 aa, Artificial Sequence
  Description of Artificial Sequence: Synthetic peptide
GSRTFTG

SEQ ID NO: 3017 - protein, 7 aa, Artificial Sequence
  Description of Artificial Sequence: Synthetic peptide
GSRTGPT

SEQ ID NO: 3018 - protein, 7 aa, Artificial Sequence
  Description of Artificial Sequence: Synthetic peptide
GSRVSGE

SEQ ID NO: 3019 - protein, 7 aa, Artificial Sequence
  Description of Artificial Sequence: Synthetic peptide
GSSATVF

SEQ ID NO: 3020 - protein, 7 aa, Artificial Sequence
  Description of Artificial Sequence: Synthetic peptide
GSSDTCV

SEQ ID NO: 3021 - protein, 7 aa, Artificial Sequence
  Description of Artificial Sequence: Synthetic peptide
GSSGIAR

SEQ ID NO: 3022 - protein, 7 aa, Artificial Sequence
  Description of Artificial Sequence: Synthetic peptide
GSSHGIL

SEQ ID NO: 3023 - protein, 7 aa, Artificial Sequence
  Description of Artificial Sequence: Synthetic peptide
GSSMPPP

SEQ ID NO: 3024 - protein, 7 aa, Artificial Sequence
  Description of Artificial Sequence: Synthetic peptide
GSSPART

SEQ ID NO: 3025 - protein, 7 aa, Artificial Sequence
  Description of Artificial Sequence: Synthetic peptide
GSSPLHK

SEQ ID NO: 3026 - protein, 7 aa, Artificial Sequence
  Description of Artificial Sequence: Synthetic peptide
GSSPVGA

SEQ ID NO: 3027 - protein, 7 aa, Artificial Sequence
  Description of Artificial Sequence: Synthetic peptide
GSSQLFL

SEQ ID NO: 3028 - protein, 7 aa, Artificial Sequence
  Description of Artificial Sequence: Synthetic peptide
GSSRADA

SEQ ID NO: 3029 - protein, 7 aa, Artificial Sequence
  Description of Artificial Sequence: Synthetic peptide
GSSSHVS

SEQ ID NO: 3030 - protein, 7 aa, Artificial Sequence
  Description of Artificial Sequence: Synthetic peptide
GSSSIAS

SEQ ID NO: 3031 - protein, 7 aa, Artificial Sequence
  Description of Artificial Sequence: Synthetic peptide
GSSSLHS

SEQ ID NO: 3032 - protein, 7 aa, Artificial Sequence
  Description of Artificial Sequence: Synthetic peptide
GSSSNAR

SEQ ID NO: 3033 - protein, 7 aa, Artificial Sequence
  Description of Artificial Sequence: Synthetic peptide
GSSYHSP

SEQ ID NO: 3034 - protein, 7 aa, Artificial Sequence
  Description of Artificial Sequence: Synthetic peptide
GSTGDRQ

SEQ ID NO: 3035 - protein, 7 aa, Artificial Sequence
  Description of Artificial Sequence: Synthetic peptide
GSTGNTV

SEQ ID NO: 3036 - protein, 7 aa, Artificial Sequence
  Description of Artificial Sequence: Synthetic peptide
GSTGSAA

SEQ ID NO: 3037 - protein, 7 aa, Artificial Sequence
  Description of Artificial Sequence: Synthetic peptide
GSTGSGH

SEQ ID NO: 3038 - protein, 7 aa, Artificial Sequence
  Description of Artificial Sequence: Synthetic peptide
GSTMTIA

SEQ ID NO: 3039 - protein, 7 aa, Artificial Sequence
  Description of Artificial Sequence: Synthetic peptide
GSTNELV

SEQ ID NO: 3040 - protein, 7 aa, Artificial Sequence
  Description of Artificial Sequence: Synthetic peptide
GSTNPLA

SEQ ID NO: 3041 - protein, 7 aa, Artificial Sequence
  Description of Artificial Sequence: Synthetic peptide
GSTNRLA

SEQ ID NO: 3042 - protein, 7 aa, Artificial Sequence
  Description of Artificial Sequence: Synthetic peptide
GSTNSPA

SEQ ID NO: 3043 - protein, 7 aa, Artificial Sequence
  Description of Artificial Sequence: Synthetic peptide
GSTPLPL

SEQ ID NO: 3044 - protein, 7 aa, Artificial Sequence
  Description of Artificial Sequence: Synthetic peptide
GSTQGSG

SEQ ID NO: 3045 - protein, 7 aa, Artificial Sequence
  Description of Artificial Sequence: Synthetic peptide
GSTSKDR

SEQ ID NO: 3046 - protein, 7 aa, Artificial Sequence
  Description of Artificial Sequence: Synthetic peptide
GSTSSRT

SEQ ID NO: 3047 - protein, 7 aa, Artificial Sequence
  Description of Artificial Sequence: Synthetic peptide
GSTTRPQ

SEQ ID NO: 3048 - protein, 7 aa, Artificial Sequence
  Description of Artificial Sequence: Synthetic peptide
GSTWSSP

SEQ ID NO: 3049 - protein, 7 aa, Artificial Sequence
  Description of Artificial Sequence: Synthetic peptide
GSTYASM

SEQ ID NO: 3050 - protein, 7 aa, Artificial Sequence
  Description of Artificial Sequence: Synthetic peptide
GSVADRV

SEQ ID NO: 3051 - protein, 7 aa, Artificial Sequence
  Description of Artificial Sequence: Synthetic peptide
GSVATNP

SEQ ID NO: 3052 - protein, 7 aa, Artificial Sequence
  Description of Artificial Sequence: Synthetic peptide
GSVEESR

SEQ ID NO: 3053 - protein, 7 aa, Artificial Sequence
  Description of Artificial Sequence: Synthetic peptide
GSVNPRS

SEQ ID NO: 3054 - protein, 7 aa, Artificial Sequence
  Description of Artificial Sequence: Synthetic peptide
GSVPDSR

SEQ ID NO: 3055 - protein, 7 aa, Artificial Sequence
  Description of Artificial Sequence: Synthetic peptide
GSVPNVI

SEQ ID NO: 3056 - protein, 7 aa, Artificial Sequence
  Description of Artificial Sequence: Synthetic peptide
GSVQIRP

SEQ ID NO: 3057 - protein, 7 aa, Artificial Sequence
  Description of Artificial Sequence: Synthetic peptide
GSYANAA

SEQ ID NO: 3058 - protein, 7 aa, Artificial Sequence
  Description of Artificial Sequence: Synthetic peptide
GTADLVP

SEQ ID NO: 3059 - protein, 7 aa, Artificial Sequence
  Description of Artificial Sequence: Synthetic peptide
GTAHLKP

SEQ ID NO: 3060 - protein, 7 aa, Artificial Sequence
  Description of Artificial Sequence: Synthetic peptide
GTANRNA

SEQ ID NO: 3061 - protein, 7 aa, Artificial Sequence
  Description of Artificial Sequence: Synthetic peptide
GTAPSVM

SEQ ID NO: 3062 - protein, 7 aa, Artificial Sequence
  Description of Artificial Sequence: Synthetic peptide
GTAVQRL

SEQ ID NO: 3063 - protein, 7 aa, Artificial Sequence
  Description of Artificial Sequence: Synthetic peptide
GTDFVPS

SEQ ID NO: 3064 - protein, 7 aa, Artificial Sequence
  Description of Artificial Sequence: Synthetic peptide
GTDIRMP

SEQ ID NO: 3065 - protein, 7 aa, Artificial Sequence
  Description of Artificial Sequence: Synthetic peptide
GTEEFGY

SEQ ID NO: 3066 - protein, 7 aa, Artificial Sequence
  Description of Artificial Sequence: Synthetic peptide
GTEHTTA

SEQ ID NO: 3067 - protein, 7 aa, Artificial Sequence
  Description of Artificial Sequence: Synthetic peptide
GTESNGR

SEQ ID NO: 3068 - protein, 7 aa, Artificial Sequence
  Description of Artificial Sequence: Synthetic peptide
GTEYNTC

SEQ ID NO: 3069 - protein, 7 aa, Artificial Sequence
  Description of Artificial Sequence: Synthetic peptide
GTFGTTA

SEQ ID NO: 3070 - protein, 7 aa, Artificial Sequence
  Description of Artificial Sequence: Synthetic peptide
GTFKASH

SEQ ID NO: 3071 - protein, 7 aa, Artificial Sequence
  Description of Artificial Sequence: Synthetic peptide
GTGGVKI

SEQ ID NO: 3072 - protein, 7 aa, Artificial Sequence
  Description of Artificial Sequence: Synthetic peptide
GTGINHL

SEQ ID NO: 3073 - protein, 7 aa, Artificial Sequence
  Description of Artificial Sequence: Synthetic peptide
GTGKPMG

SEQ ID NO: 3074 - protein, 7 aa, Artificial Sequence
  Description of Artificial Sequence: Synthetic peptide
GTGNVGA

SEQ ID NO: 3075 - protein, 7 aa, Artificial Sequence
  Description of Artificial Sequence: Synthetic peptide
GTGPSVP

SEQ ID NO: 3076 - protein, 7 aa, Artificial Sequence
  Description of Artificial Sequence: Synthetic peptide
GTGRDGS

SEQ ID NO: 3077 - protein, 7 aa, Artificial Sequence
  Description of Artificial Sequence: Synthetic peptide
GTGSRVV

SEQ ID NO: 3078 - protein, 7 aa, Artificial Sequence
  Description of Artificial Sequence: Synthetic peptide
GTIYGPV

SEQ ID NO: 3079 - protein, 7 aa, Artificial Sequence
  Description of Artificial Sequence: Synthetic peptide
GTKLYTT

SEQ ID NO: 3080 - protein, 7 aa, Artificial Sequence
  Description of Artificial Sequence: Synthetic peptide
GTKYAAS

SEQ ID NO: 3081 - protein, 7 aa, Artificial Sequence
  Description of Artificial Sequence: Synthetic peptide
GTLDTVI

SEQ ID NO: 3082 - protein, 7 aa, Artificial Sequence
  Description of Artificial Sequence: Synthetic peptide
GTLEYSM

SEQ ID NO: 3083 - protein, 7 aa, Artificial Sequence
  Description of Artificial Sequence: Synthetic peptide
GTLGCRE

SEQ ID NO: 3084 - protein, 7 aa, Artificial Sequence
  Description of Artificial Sequence: Synthetic peptide
GTLGLRQ

SEQ ID NO: 3085 - protein, 7 aa, Artificial Sequence
  Description of Artificial Sequence: Synthetic peptide
GTLHGSE

SEQ ID NO: 3086 - protein, 7 aa, Artificial Sequence
  Description of Artificial Sequence: Synthetic peptide
GTLNYAS

SEQ ID NO: 3087 - protein, 7 aa, Artificial Sequence
  Description of Artificial Sequence: Synthetic peptide
GTLSGLE

SEQ ID NO: 3088 - protein, 7 aa, Artificial Sequence
  Description of Artificial Sequence: Synthetic peptide
GTLTPTM

SEQ ID NO: 3089 - protein, 7 aa, Artificial Sequence
  Description of Artificial Sequence: Synthetic peptide
GTMNVVI

SEQ ID NO: 3090 - protein, 7 aa, Artificial Sequence
  Description of Artificial Sequence: Synthetic peptide
GTMSLGP

SEQ ID NO: 3091 - protein, 7 aa, Artificial Sequence
  Description of Artificial Sequence: Synthetic peptide
GTMTNSA

SEQ ID NO: 3092 - protein, 7 aa, Artificial Sequence
  Description of Artificial Sequence: Synthetic peptide
GTNGLML

SEQ ID NO: 3093 - protein, 7 aa, Artificial Sequence
  Description of Artificial Sequence: Synthetic peptide
GTNGLPA

SEQ ID NO: 3094 - protein, 7 aa, Artificial Sequence
  Description of Artificial Sequence: Synthetic peptide
GTNHAQK

SEQ ID NO: 3095 - protein, 7 aa, Artificial Sequence
  Description of Artificial Sequence: Synthetic peptide
GTNPVLT

SEQ ID NO: 3096 - protein, 7 aa, Artificial Sequence
  Description of Artificial Sequence: Synthetic peptide
GTPAHAA

SEQ ID NO: 3097 - protein, 7 aa, Artificial Sequence
  Description of Artificial Sequence: Synthetic peptide
GTPERLP

SEQ ID NO: 3098 - protein, 7 aa, Artificial Sequence
  Description of Artificial Sequence: Synthetic peptide
GTPMTQG

SEQ ID NO: 3099 - protein, 7 aa, Artificial Sequence
  Description of Artificial Sequence: Synthetic peptide
GTPNNRN

SEQ ID NO: 3100 - protein, 7 aa, Artificial Sequence
  Description of Artificial Sequence: Synthetic peptide
GTPNVHG

SEQ ID NO: 3101 - protein, 7 aa, Artificial Sequence
  Description of Artificial Sequence: Synthetic peptide
GTPPGPS

SEQ ID NO: 3102 - protein, 7 aa, Artificial Sequence
  Description of Artificial Sequence: Synthetic peptide
GTPPTRL

SEQ ID NO: 3103 - protein, 7 aa, Artificial Sequence
  Description of Artificial Sequence: Synthetic peptide
GTPVVDC

SEQ ID NO: 3104 - protein, 7 aa, Artificial Sequence
  Description of Artificial Sequence: Synthetic peptide
GTQAERQ

SEQ ID NO: 3105 - protein, 7 aa, Artificial Sequence
  Description of Artificial Sequence: Synthetic peptide
GTQARIC

SEQ ID NO: 3106 - protein, 7 aa, Artificial Sequence
  Description of Artificial Sequence: Synthetic peptide
GTQMARA

SEQ ID NO: 3107 - protein, 7 aa, Artificial Sequence
  Description of Artificial Sequence: Synthetic peptide
GTQSTYD

SEQ ID NO: 3108 - protein, 7 aa, Artificial Sequence
  Description of Artificial Sequence: Synthetic peptide
GTRPAHV

SEQ ID NO: 3109 - protein, 7 aa, Artificial Sequence
  Description of Artificial Sequence: Synthetic peptide
GTRSTFA

SEQ ID NO: 3110 - protein, 7 aa, Artificial Sequence
  Description of Artificial Sequence: Synthetic peptide
GTRTVVL

SEQ ID NO: 3111 - protein, 7 aa, Artificial Sequence
  Description of Artificial Sequence: Synthetic peptide
GTRVLSY

SEQ ID NO: 3112 - protein, 7 aa, Artificial Sequence
  Description of Artificial Sequence: Synthetic peptide
GTSGYSP

SEQ ID NO: 3113 - protein, 7 aa, Artificial Sequence
  Description of Artificial Sequence: Synthetic peptide
GTSNLSP

SEQ ID NO: 3114 - protein, 7 aa, Artificial Sequence
  Description of Artificial Sequence: Synthetic peptide
GTSPDQK

SEQ ID NO: 3115 - protein, 7 aa, Artificial Sequence
  Description of Artificial Sequence: Synthetic peptide
GTSPVMC

SEQ ID NO: 3116 - protein, 7 aa, Artificial Sequence
  Description of Artificial Sequence: Synthetic peptide
GTSQKLP

SEQ ID NO: 3117 - protein, 7 aa, Artificial Sequence
  Description of Artificial Sequence: Synthetic peptide
GTSQKTS

SEQ ID NO: 3118 - protein, 7 aa, Artificial Sequence
  Description of Artificial Sequence: Synthetic peptide
GTSSRAP

SEQ ID NO: 3119 - protein, 7 aa, Artificial Sequence
  Description of Artificial Sequence: Synthetic peptide
GTSSSGL

SEQ ID NO: 3120 - protein, 7 aa, Artificial Sequence
  Description of Artificial Sequence: Synthetic peptide
GTTEIHS

SEQ ID NO: 3121 - protein, 7 aa, Artificial Sequence
  Description of Artificial Sequence: Synthetic peptide
GTTHTNI

SEQ ID NO: 3122 - protein, 7 aa, Artificial Sequence
  Description of Artificial Sequence: Synthetic peptide
GTTKLGP

SEQ ID NO: 3123 - protein, 7 aa, Artificial Sequence
  Description of Artificial Sequence: Synthetic peptide
GTTMVPA

SEQ ID NO: 3124 - protein, 7 aa, Artificial Sequence
  Description of Artificial Sequence: Synthetic peptide
GTTNLAG

SEQ ID NO: 3125 - protein, 7 aa, Artificial Sequence
  Description of Artificial Sequence: Synthetic peptide
GTTNNMF

SEQ ID NO: 3126 - protein, 7 aa, Artificial Sequence
  Description of Artificial Sequence: Synthetic peptide
GTTNNNA

SEQ ID NO: 3127 - protein, 7 aa, Artificial Sequence
  Description of Artificial Sequence: Synthetic peptide
GTTSAES

SEQ ID NO: 3128 - protein, 7 aa, Artificial Sequence
  Description of Artificial Sequence: Synthetic peptide
GTTSPKS

SEQ ID NO: 3129 - protein, 7 aa, Artificial Sequence
  Description of Artificial Sequence: Synthetic peptide
GTTSSHE

SEQ ID NO: 3130 - protein, 7 aa, Artificial Sequence
  Description of Artificial Sequence: Synthetic peptide
GTTTGHS

SEQ ID NO: 3131 - protein, 7 aa, Artificial Sequence
  Description of Artificial Sequence: Synthetic peptide
GTVDRGQ

SEQ ID NO: 3132 - protein, 7 aa, Artificial Sequence
  Description of Artificial Sequence: Synthetic peptide
GTVGLNV

SEQ ID NO: 3133 - protein, 7 aa, Artificial Sequence
  Description of Artificial Sequence: Synthetic peptide
GTVGSDR

SEQ ID NO: 3134 - protein, 7 aa, Artificial Sequence
  Description of Artificial Sequence: Synthetic peptide
GTVHNNL

SEQ ID NO: 3135 - protein, 7 aa, Artificial Sequence
  Description of Artificial Sequence: Synthetic peptide
GTVHTNA

SEQ ID NO: 3136 - protein, 7 aa, Artificial Sequence
  Description of Artificial Sequence: Synthetic peptide
GTVPEGP

SEQ ID NO: 3137 - protein, 7 aa, Artificial Sequence
  Description of Artificial Sequence: Synthetic peptide
GTVQKSD

SEQ ID NO: 3138 - protein, 7 aa, Artificial Sequence
  Description of Artificial Sequence: Synthetic peptide
GTVRSAV

SEQ ID NO: 3139 - protein, 7 aa, Artificial Sequence
  Description of Artificial Sequence: Synthetic peptide
GTYANAV

SEQ ID NO: 3140 - protein, 7 aa, Artificial Sequence
  Description of Artificial Sequence: Synthetic peptide
GTYVEST

SEQ ID NO: 3141 - protein, 7 aa, Artificial Sequence
  Description of Artificial Sequence: Synthetic peptide
GVAHEKN

SEQ ID NO: 3142 - protein, 7 aa, Artificial Sequence
  Description of Artificial Sequence: Synthetic peptide
GVAKLLA

SEQ ID NO: 3143 - protein, 7 aa, Artificial Sequence
  Description of Artificial Sequence: Synthetic peptide
GVASSPG

SEQ ID NO: 3144 - protein, 7 aa, Artificial Sequence
  Description of Artificial Sequence: Synthetic peptide
GVASTRA

SEQ ID NO: 3145 - protein, 7 aa, Artificial Sequence
  Description of Artificial Sequence: Synthetic peptide
GVATLTL

SEQ ID NO: 3146 - protein, 7 aa, Artificial Sequence
  Description of Artificial Sequence: Synthetic peptide
GVAVTER

SEQ ID NO: 3147 - protein, 7 aa, Artificial Sequence
  Description of Artificial Sequence: Synthetic peptide
GVCAESW

SEQ ID NO: 3148 - protein, 7 aa, Artificial Sequence
  Description of Artificial Sequence: Synthetic peptide
GVDVKWS

SEQ ID NO: 3149 - protein, 7 aa, Artificial Sequence
  Description of Artificial Sequence: Synthetic peptide
GVEAMRA

SEQ ID NO: 3150 - protein, 7 aa, Artificial Sequence
  Description of Artificial Sequence: Synthetic peptide
GVEHNDS

SEQ ID NO: 3151 - protein, 7 aa, Artificial Sequence
  Description of Artificial Sequence: Synthetic peptide
GVFKETG

SEQ ID NO: 3152 - protein, 7 aa, Artificial Sequence
  Description of Artificial Sequence: Synthetic peptide
GVGASHI

SEQ ID NO: 3153 - protein, 7 aa, Artificial Sequence
  Description of Artificial Sequence: Synthetic peptide
GVGASRS

SEQ ID NO: 3154 - protein, 7 aa, Artificial Sequence
  Description of Artificial Sequence: Synthetic peptide
GVGNMPD

SEQ ID NO: 3155 - protein, 7 aa, Artificial Sequence
  Description of Artificial Sequence: Synthetic peptide
GVGQVRS

SEQ ID NO: 3156 - protein, 7 aa, Artificial Sequence
  Description of Artificial Sequence: Synthetic peptide
GVHLSSP

SEQ ID NO: 3157 - protein, 7 aa, Artificial Sequence
  Description of Artificial Sequence: Synthetic peptide
GVHSMVE

SEQ ID NO: 3158 - protein, 7 aa, Artificial Sequence
  Description of Artificial Sequence: Synthetic peptide
GVHVKPE

SEQ ID NO: 3159 - protein, 7 aa, Artificial Sequence
  Description of Artificial Sequence: Synthetic peptide
GVIAHHS

SEQ ID NO: 3160 - protein, 7 aa, Artificial Sequence
  Description of Artificial Sequence: Synthetic peptide
GVILARM

SEQ ID NO: 3161 - protein, 7 aa, Artificial Sequence
  Description of Artificial Sequence: Synthetic peptide
GVINPTL

SEQ ID NO: 3162 - protein, 7 aa, Artificial Sequence
  Description of Artificial Sequence: Synthetic peptide
GVKASIL

SEQ ID NO: 3163 - protein, 7 aa, Artificial Sequence
  Description of Artificial Sequence: Synthetic peptide
GVKFGGS

SEQ ID NO: 3164 - protein, 7 aa, Artificial Sequence
  Description of Artificial Sequence: Synthetic peptide
GVKHGHY

SEQ ID NO: 3165 - protein, 7 aa, Artificial Sequence
  Description of Artificial Sequence: Synthetic peptide
GVKLSPS

SEQ ID NO: 3166 - protein, 7 aa, Artificial Sequence
  Description of Artificial Sequence: Synthetic peptide
GVKPDPV

SEQ ID NO: 3167 - protein, 7 aa, Artificial Sequence
  Description of Artificial Sequence: Synthetic peptide
GVLGPPL

SEQ ID NO: 3168 - protein, 7 aa, Artificial Sequence
  Description of Artificial Sequence: Synthetic peptide
GVLRMSS

SEQ ID NO: 3169 - protein, 7 aa, Artificial Sequence
  Description of Artificial Sequence: Synthetic peptide
GVLTNIL

SEQ ID NO: 3170 - protein, 7 aa, Artificial Sequence
  Description of Artificial Sequence: Synthetic peptide
GVNERNV

SEQ ID NO: 3171 - protein, 7 aa, Artificial Sequence
  Description of Artificial Sequence: Synthetic peptide
GVNITSL

SEQ ID NO: 3172 - protein, 7 aa, Artificial Sequence
  Description of Artificial Sequence: Synthetic peptide
GVNPSRL

SEQ ID NO: 3173 - protein, 7 aa, Artificial Sequence
  Description of Artificial Sequence: Synthetic peptide
GVPATSY

SEQ ID NO: 3174 - protein, 7 aa, Artificial Sequence
  Description of Artificial Sequence: Synthetic peptide
GVPGISA

SEQ ID NO: 3175 - protein, 7 aa, Artificial Sequence
  Description of Artificial Sequence: Synthetic peptide
GVPIQTP

SEQ ID NO: 3176 - protein, 7 aa, Artificial Sequence
  Description of Artificial Sequence: Synthetic peptide
GVRDMGL

SEQ ID NO: 3177 - protein, 7 aa, Artificial Sequence
  Description of Artificial Sequence: Synthetic peptide
GVRGAPL

SEQ ID NO: 3178 - protein, 7 aa, Artificial Sequence
  Description of Artificial Sequence: Synthetic peptide
GVRLDAT

SEQ ID NO: 3179 - protein, 7 aa, Artificial Sequence
  Description of Artificial Sequence: Synthetic peptide
GVRLNET

SEQ ID NO: 3180 - protein, 7 aa, Artificial Sequence
  Description of Artificial Sequence: Synthetic peptide
GVRLQNA

SEQ ID NO: 3181 - protein, 7 aa, Artificial Sequence
  Description of Artificial Sequence: Synthetic peptide
GVRSHTM

SEQ ID NO: 3182 - protein, 7 aa, Artificial Sequence
  Description of Artificial Sequence: Synthetic peptide
GVSFQSM

SEQ ID NO: 3183 - protein, 7 aa, Artificial Sequence
  Description of Artificial Sequence: Synthetic peptide
GVSKIDS

SEQ ID NO: 3184 - protein, 7 aa, Artificial Sequence
  Description of Artificial Sequence: Synthetic peptide
GVSRSAN

SEQ ID NO: 3185 - protein, 7 aa, Artificial Sequence
  Description of Artificial Sequence: Synthetic peptide
GVSSSQR

SEQ ID NO: 3186 - protein, 7 aa, Artificial Sequence
  Description of Artificial Sequence: Synthetic peptide
GVSSVQS

SEQ ID NO: 3187 - protein, 7 aa, Artificial Sequence
  Description of Artificial Sequence: Synthetic peptide
GVSTARI

SEQ ID NO: 3188 - protein, 7 aa, Artificial Sequence
  Description of Artificial Sequence: Synthetic peptide
GVSVSRP

SEQ ID NO: 3189 - protein, 7 aa, Artificial Sequence
  Description of Artificial Sequence: Synthetic peptide
GVTKAVS

SEQ ID NO: 3190 - protein, 7 aa, Artificial Sequence
  Description of Artificial Sequence: Synthetic peptide
GVTPSYS

SEQ ID NO: 3191 - protein, 7 aa, Artificial Sequence
  Description of Artificial Sequence: Synthetic peptide
GVTQATA

SEQ ID NO: 3192 - protein, 7 aa, Artificial Sequence
  Description of Artificial Sequence: Synthetic peptide
GVTSGGG

SEQ ID NO: 3193 - protein, 7 aa, Artificial Sequence
  Description of Artificial Sequence: Synthetic peptide
GVTSTSS

SEQ ID NO: 3194 - protein, 7 aa, Artificial Sequence
  Description of Artificial Sequence: Synthetic peptide
GVTTSIH

SEQ ID NO: 3195 - protein, 7 aa, Artificial Sequence
  Description of Artificial Sequence: Synthetic peptide
GVTTYSA

SEQ ID NO: 3196 - protein, 7 aa, Artificial Sequence
  Description of Artificial Sequence: Synthetic peptide
GVVGSHH

SEQ ID NO: 3197 - protein, 7 aa, Artificial Sequence
  Description of Artificial Sequence: Synthetic peptide
GVVHTRT

SEQ ID NO: 3198 - protein, 7 aa, Artificial Sequence
  Description of Artificial Sequence: Synthetic peptide
GWALTNG

SEQ ID NO: 3199 - protein, 7 aa, Artificial Sequence
  Description of Artificial Sequence: Synthetic peptide
GWEPTSD

SEQ ID NO: 3200 - protein, 7 aa, Artificial Sequence
  Description of Artificial Sequence: Synthetic peptide
GWGAETI

SEQ ID NO: 3201 - protein, 7 aa, Artificial Sequence
  Description of Artificial Sequence: Synthetic peptide
GWGLVND

SEQ ID NO: 3202 - protein, 7 aa, Artificial Sequence
  Description of Artificial Sequence: Synthetic peptide
GWHPALP

SEQ ID NO: 3203 - protein, 7 aa, Artificial Sequence
  Description of Artificial Sequence: Synthetic peptide
GWKGHAD

SEQ ID NO: 3204 - protein, 7 aa, Artificial Sequence
  Description of Artificial Sequence: Synthetic peptide
GWNADAS

SEQ ID NO: 3205 - protein, 7 aa, Artificial Sequence
  Description of Artificial Sequence: Synthetic peptide
GWNVDGL

SEQ ID NO: 3206 - protein, 7 aa, Artificial Sequence
  Description of Artificial Sequence: Synthetic peptide
GWPPKYE

SEQ ID NO: 3207 - protein, 7 aa, Artificial Sequence
  Description of Artificial Sequence: Synthetic peptide
GWQGHNL

SEQ ID NO: 3208 - protein, 7 aa, Artificial Sequence
  Description of Artificial Sequence: Synthetic peptide
GWREVVD

SEQ ID NO: 3209 - protein, 7 aa, Artificial Sequence
  Description of Artificial Sequence: Synthetic peptide
GWRSELE

SEQ ID NO: 3210 - protein, 7 aa, Artificial Sequence
  Description of Artificial Sequence: Synthetic peptide
GWSSAGH

SEQ ID NO: 3211 - protein, 7 aa, Artificial Sequence
  Description of Artificial Sequence: Synthetic peptide
GYAMPVP

SEQ ID NO: 3212 - protein, 7 aa, Artificial Sequence
  Description of Artificial Sequence: Synthetic peptide
GYAMSSS

SEQ ID NO: 3213 - protein, 7 aa, Artificial Sequence
  Description of Artificial Sequence: Synthetic peptide
GYATTVH

SEQ ID NO: 3214 - protein, 7 aa, Artificial Sequence
  Description of Artificial Sequence: Synthetic peptide
GYDFNPG

SEQ ID NO: 3215 - protein, 7 aa, Artificial Sequence
  Description of Artificial Sequence: Synthetic peptide
GYGPMRQ

SEQ ID NO: 3216 - protein, 7 aa, Artificial Sequence
  Description of Artificial Sequence: Synthetic peptide
GYGQAYT

SEQ ID NO: 3217 - protein, 7 aa, Artificial Sequence
  Description of Artificial Sequence: Synthetic peptide
GYIHVSG

SEQ ID NO: 3218 - protein, 7 aa, Artificial Sequence
  Description of Artificial Sequence: Synthetic peptide
GYKTATQ

SEQ ID NO: 3219 - protein, 7 aa, Artificial Sequence
  Description of Artificial Sequence: Synthetic peptide
GYLPVDH

SEQ ID NO: 3220 - protein, 7 aa, Artificial Sequence
  Description of Artificial Sequence: Synthetic peptide
GYLSETH

SEQ ID NO: 3221 - protein, 7 aa, Artificial Sequence
  Description of Artificial Sequence: Synthetic peptide
GYLSKMP

SEQ ID NO: 3222 - protein, 7 aa, Artificial Sequence
  Description of Artificial Sequence: Synthetic peptide
GYLTERL

SEQ ID NO: 3223 - protein, 7 aa, Artificial Sequence
  Description of Artificial Sequence: Synthetic peptide
GYMIKMP

SEQ ID NO: 3224 - protein, 7 aa, Artificial Sequence
  Description of Artificial Sequence: Synthetic peptide
GYPSHAA

SEQ ID NO: 3225 - protein, 7 aa, Artificial Sequence
  Description of Artificial Sequence: Synthetic peptide
GYPSKGP

SEQ ID NO: 3226 - protein, 7 aa, Artificial Sequence
  Description of Artificial Sequence: Synthetic peptide
GYPTASA

SEQ ID NO: 3227 - protein, 7 aa, Artificial Sequence
  Description of Artificial Sequence: Synthetic peptide
GYPVGPA

SEQ ID NO: 3228 - protein, 7 aa, Artificial Sequence
  Description of Artificial Sequence: Synthetic peptide
GYQSRCA

SEQ ID NO: 3229 - protein, 7 aa, Artificial Sequence
  Description of Artificial Sequence: Synthetic peptide
GYRATET

SEQ ID NO: 3230 - protein, 7 aa, Artificial Sequence
  Description of Artificial Sequence: Synthetic peptide
GYRLMPE

SEQ ID NO: 3231 - protein, 7 aa, Artificial Sequence
  Description of Artificial Sequence: Synthetic peptide
GYRSNET

SEQ ID NO: 3232 - protein, 7 aa, Artificial Sequence
  Description of Artificial Sequence: Synthetic peptide
GYSLPVT

SEQ ID NO: 3233 - protein, 7 aa, Artificial Sequence
  Description of Artificial Sequence: Synthetic peptide
GYSNNKP

SEQ ID NO: 3234 - protein, 7 aa, Artificial Sequence
  Description of Artificial Sequence: Synthetic peptide
GYTSGQP

SEQ ID NO: 3235 - protein, 7 aa, Artificial Sequence
  Description of Artificial Sequence: Synthetic peptide
GYVPVSQ

SEQ ID NO: 3236 - protein, 7 aa, Artificial Sequence
  Description of Artificial Sequence: Synthetic peptide
GYWASSN

SEQ ID NO: 3237 - protein, 7 aa, Artificial Sequence
  Description of Artificial Sequence: Synthetic peptide
HAAAQPS

SEQ ID NO: 3238 - protein, 7 aa, Artificial Sequence
  Description of Artificial Sequence: Synthetic peptide
HAAHQSL

SEQ ID NO: 3239 - protein, 7 aa, Artificial Sequence
  Description of Artificial Sequence: Synthetic peptide
HAASPMV

SEQ ID NO: 3240 - protein, 7 aa, Artificial Sequence
  Description of Artificial Sequence: Synthetic peptide
HAASSVP

SEQ ID NO: 3241 - protein, 7 aa, Artificial Sequence
  Description of Artificial Sequence: Synthetic peptide
HAESAHP

SEQ ID NO: 3242 - protein, 7 aa, Artificial Sequence
  Description of Artificial Sequence: Synthetic peptide
HAGTVKM

SEQ ID NO: 3243 - protein, 7 aa, Artificial Sequence
  Description of Artificial Sequence: Synthetic peptide
HAHLTPS

SEQ ID NO: 3244 - protein, 7 aa, Artificial Sequence
  Description of Artificial Sequence: Synthetic peptide
HAIPTLL

SEQ ID NO: 3245 - protein, 7 aa, Artificial Sequence
  Description of Artificial Sequence: Synthetic peptide
HAKSRNE

SEQ ID NO: 3246 - protein, 7 aa, Artificial Sequence
  Description of Artificial Sequence: Synthetic peptide
HAKSVSA

SEQ ID NO: 3247 - protein, 7 aa, Artificial Sequence
  Description of Artificial Sequence: Synthetic peptide
HAKTALT

SEQ ID NO: 3248 - protein, 7 aa, Artificial Sequence
  Description of Artificial Sequence: Synthetic peptide
HAKVMRD

SEQ ID NO: 3249 - protein, 7 aa, Artificial Sequence
  Description of Artificial Sequence: Synthetic peptide
HALEHFP

SEQ ID NO: 3250 - protein, 7 aa, Artificial Sequence
  Description of Artificial Sequence: Synthetic peptide
HALRNTM

SEQ ID NO: 3251 - protein, 7 aa, Artificial Sequence
  Description of Artificial Sequence: Synthetic peptide
HALSDSP

SEQ ID NO: 3252 - protein, 7 aa, Artificial Sequence
  Description of Artificial Sequence: Synthetic peptide
HAMSSNV

SEQ ID NO: 3253 - protein, 7 aa, Artificial Sequence
  Description of Artificial Sequence: Synthetic peptide
HANKHTQ

SEQ ID NO: 3254 - protein, 7 aa, Artificial Sequence
  Description of Artificial Sequence: Synthetic peptide
HANNDPH

SEQ ID NO: 3255 - protein, 7 aa, Artificial Sequence
  Description of Artificial Sequence: Synthetic peptide
HANPLNG

SEQ ID NO: 3256 - protein, 7 aa, Artificial Sequence
  Description of Artificial Sequence: Synthetic peptide
HANPVVG

SEQ ID NO: 3257 - protein, 7 aa, Artificial Sequence
  Description of Artificial Sequence: Synthetic peptide
HANSTTR

SEQ ID NO: 3258 - protein, 7 aa, Artificial Sequence
  Description of Artificial Sequence: Synthetic peptide
HANTTNT

SEQ ID NO: 3259 - protein, 7 aa, Artificial Sequence
  Description of Artificial Sequence: Synthetic peptide
HAPPNYA

SEQ ID NO: 3260 - protein, 7 aa, Artificial Sequence
  Description of Artificial Sequence: Synthetic peptide
HAQLSGT

SEQ ID NO: 3261 - protein, 7 aa, Artificial Sequence
  Description of Artificial Sequence: Synthetic peptide
HAQQGGL

SEQ ID NO: 3262 - protein, 7 aa, Artificial Sequence
  Description of Artificial Sequence: Synthetic peptide
HAQVETL

SEQ ID NO: 3263 - protein, 7 aa, Artificial Sequence
  Description of Artificial Sequence: Synthetic peptide
HARDSSP

SEQ ID NO: 3264 - protein, 7 aa, Artificial Sequence
  Description of Artificial Sequence: Synthetic peptide
HARDTFP

SEQ ID NO: 3265 - protein, 7 aa, Artificial Sequence
  Description of Artificial Sequence: Synthetic peptide
HARIDSS

SEQ ID NO: 3266 - protein, 7 aa, Artificial Sequence
  Description of Artificial Sequence: Synthetic peptide
HARPGGL

SEQ ID NO: 3267 - protein, 7 aa, Artificial Sequence
  Description of Artificial Sequence: Synthetic peptide
HARVEAT

SEQ ID NO: 3268 - protein, 7 aa, Artificial Sequence
  Description of Artificial Sequence: Synthetic peptide
HASGPDH

SEQ ID NO: 3269 - protein, 7 aa, Artificial Sequence
  Description of Artificial Sequence: Synthetic peptide
HASLSLS

SEQ ID NO: 3270 - protein, 7 aa, Artificial Sequence
  Description of Artificial Sequence: Synthetic peptide
HASNSQH

SEQ ID NO: 3271 - protein, 7 aa, Artificial Sequence
  Description of Artificial Sequence: Synthetic peptide
HASPGQT

SEQ ID NO: 3272 - protein, 7 aa, Artificial Sequence
  Description of Artificial Sequence: Synthetic peptide
HASRIGV

SEQ ID NO: 3273 - protein, 7 aa, Artificial Sequence
  Description of Artificial Sequence: Synthetic peptide
HASSKPD

SEQ ID NO: 3274 - protein, 7 aa, Artificial Sequence
  Description of Artificial Sequence: Synthetic peptide
HASSTRQ

SEQ ID NO: 3275 - protein, 7 aa, Artificial Sequence
  Description of Artificial Sequence: Synthetic peptide
HASTVRT

SEQ ID NO: 3276 - protein, 7 aa, Artificial Sequence
  Description of Artificial Sequence: Synthetic peptide
HATDQPH

SEQ ID NO: 3277 - protein, 7 aa, Artificial Sequence
  Description of Artificial Sequence: Synthetic peptide
HATEMVR

SEQ ID NO: 3278 - protein, 7 aa, Artificial Sequence
  Description of Artificial Sequence: Synthetic peptide
HATIRTH

SEQ ID NO: 3279 - protein, 7 aa, Artificial Sequence
  Description of Artificial Sequence: Synthetic peptide
HATSKLT

SEQ ID NO: 3280 - protein, 7 aa, Artificial Sequence
  Description of Artificial Sequence: Synthetic peptide
HAVDHKS

SEQ ID NO: 3281 - protein, 7 aa, Artificial Sequence
  Description of Artificial Sequence: Synthetic peptide
HAVELAD

SEQ ID NO: 3282 - protein, 7 aa, Artificial Sequence
  Description of Artificial Sequence: Synthetic peptide
HAYTLDG

SEQ ID NO: 3283 - protein, 7 aa, Artificial Sequence
  Description of Artificial Sequence: Synthetic peptide
HDASVHR

SEQ ID NO: 3284 - protein, 7 aa, Artificial Sequence
  Description of Artificial Sequence: Synthetic peptide
HDDAWTA

SEQ ID NO: 3285 - protein, 7 aa, Artificial Sequence
  Description of Artificial Sequence: Synthetic peptide
HDGRVNL

SEQ ID NO: 3286 - protein, 7 aa, Artificial Sequence
  Description of Artificial Sequence: Synthetic peptide
HDGSRST

SEQ ID NO: 3287 - protein, 7 aa, Artificial Sequence
  Description of Artificial Sequence: Synthetic peptide
HDHLGTP

SEQ ID NO: 3288 - protein, 7 aa, Artificial Sequence
  Description of Artificial Sequence: Synthetic peptide
HDIAKTN

SEQ ID NO: 3289 - protein, 7 aa, Artificial Sequence
  Description of Artificial Sequence: Synthetic peptide
HDIEFNT

SEQ ID NO: 3290 - protein, 7 aa, Artificial Sequence
  Description of Artificial Sequence: Synthetic peptide
HDLAYRP

SEQ ID NO: 3291 - protein, 7 aa, Artificial Sequence
  Description of Artificial Sequence: Synthetic peptide
HDLNPEN

SEQ ID NO: 3292 - protein, 7 aa, Artificial Sequence
  Description of Artificial Sequence: Synthetic peptide
HDNRIND

SEQ ID NO: 3293 - protein, 7 aa, Artificial Sequence
  Description of Artificial Sequence: Synthetic peptide
HDPHAVT

SEQ ID NO: 3294 - protein, 7 aa, Artificial Sequence
  Description of Artificial Sequence: Synthetic peptide
HDPIRLG

SEQ ID NO: 3295 - protein, 7 aa, Artificial Sequence
  Description of Artificial Sequence: Synthetic peptide
HDPMMLL

SEQ ID NO: 3296 - protein, 7 aa, Artificial Sequence
  Description of Artificial Sequence: Synthetic peptide
HDPSDGA

SEQ ID NO: 3297 - protein, 7 aa, Artificial Sequence
  Description of Artificial Sequence: Synthetic peptide
HDRIAGL

SEQ ID NO: 3298 - protein, 7 aa, Artificial Sequence
  Description of Artificial Sequence: Synthetic peptide
HDRVSSG

SEQ ID NO: 3299 - protein, 7 aa, Artificial Sequence
  Description of Artificial Sequence: Synthetic peptide
HDSARHP

SEQ ID NO: 3300 - protein, 7 aa, Artificial Sequence
  Description of Artificial Sequence: Synthetic peptide
HDSLSEK

SEQ ID NO: 3301 - protein, 7 aa, Artificial Sequence
  Description of Artificial Sequence: Synthetic peptide
HDSRFAN

SEQ ID NO: 3302 - protein, 7 aa, Artificial Sequence
  Description of Artificial Sequence: Synthetic peptide
HDSTLGS

SEQ ID NO: 3303 - protein, 7 aa, Artificial Sequence
  Description of Artificial Sequence: Synthetic peptide
HDTIHGI

SEQ ID NO: 3304 - protein, 7 aa, Artificial Sequence
  Description of Artificial Sequence: Synthetic peptide
HDVPKNP

SEQ ID NO: 3305 - protein, 7 aa, Artificial Sequence
  Description of Artificial Sequence: Synthetic peptide
HDYPRQL

SEQ ID NO: 3306 - protein, 7 aa, Artificial Sequence
  Description of Artificial Sequence: Synthetic peptide
HEALLPN

SEQ ID NO: 3307 - protein, 7 aa, Artificial Sequence
  Description of Artificial Sequence: Synthetic peptide
HEALTGL

SEQ ID NO: 3308 - protein, 7 aa, Artificial Sequence
  Description of Artificial Sequence: Synthetic peptide
HEDGSAM

SEQ ID NO: 3309 - protein, 7 aa, Artificial Sequence
  Description of Artificial Sequence: Synthetic peptide
HEFGVAF

SEQ ID NO: 3310 - protein, 7 aa, Artificial Sequence
  Description of Artificial Sequence: Synthetic peptide
HEGGHPY

SEQ ID NO: 3311 - protein, 7 aa, Artificial Sequence
  Description of Artificial Sequence: Synthetic peptide
HEGHRGV

SEQ ID NO: 3312 - protein, 7 aa, Artificial Sequence
  Description of Artificial Sequence: Synthetic peptide
HEKVRVH

SEQ ID NO: 3313 - protein, 7 aa, Artificial Sequence
  Description of Artificial Sequence: Synthetic peptide
HEQARSI

SEQ ID NO: 3314 - protein, 7 aa, Artificial Sequence
  Description of Artificial Sequence: Synthetic peptide
HEQCEAY

SEQ ID NO: 3315 - protein, 7 aa, Artificial Sequence
  Description of Artificial Sequence: Synthetic peptide
HEQVERP

SEQ ID NO: 3316 - protein, 7 aa, Artificial Sequence
  Description of Artificial Sequence: Synthetic peptide
HESDQFP

SEQ ID NO: 3317 - protein, 7 aa, Artificial Sequence
  Description of Artificial Sequence: Synthetic peptide
HETRVMS

SEQ ID NO: 3318 - protein, 7 aa, Artificial Sequence
  Description of Artificial Sequence: Synthetic peptide
HEVGFMG

SEQ ID NO: 3319 - protein, 7 aa, Artificial Sequence
  Description of Artificial Sequence: Synthetic peptide
HEVNHNT

SEQ ID NO: 3320 - protein, 7 aa, Artificial Sequence
  Description of Artificial Sequence: Synthetic peptide
HEVRFSQ

SEQ ID NO: 3321 - protein, 7 aa, Artificial Sequence
  Description of Artificial Sequence: Synthetic peptide
HEVSVKC

SEQ ID NO: 3322 - protein, 7 aa, Artificial Sequence
  Description of Artificial Sequence: Synthetic peptide
HEVYRNM

SEQ ID NO: 3323 - protein, 7 aa, Artificial Sequence
  Description of Artificial Sequence: Synthetic peptide
HFAQAPS

SEQ ID NO: 3324 - protein, 7 aa, Artificial Sequence
  Description of Artificial Sequence: Synthetic peptide
HFGSSIP

SEQ ID NO: 3325 - protein, 7 aa, Artificial Sequence
  Description of Artificial Sequence: Synthetic peptide
HFGTNGD

SEQ ID NO: 3326 - protein, 7 aa, Artificial Sequence
  Description of Artificial Sequence: Synthetic peptide
HFNDATV

SEQ ID NO: 3327 - protein, 7 aa, Artificial Sequence
  Description of Artificial Sequence: Synthetic peptide
HFNSSSR

SEQ ID NO: 3328 - protein, 7 aa, Artificial Sequence
  Description of Artificial Sequence: Synthetic peptide
HFRGAML

SEQ ID NO: 3329 - protein, 7 aa, Artificial Sequence
  Description of Artificial Sequence: Synthetic peptide
HFSHERS

SEQ ID NO: 3330 - protein, 7 aa, Artificial Sequence
  Description of Artificial Sequence: Synthetic peptide
HFSPKGT

SEQ ID NO: 3331 - protein, 7 aa, Artificial Sequence
  Description of Artificial Sequence: Synthetic peptide
HFSSTTI

SEQ ID NO: 3332 - protein, 7 aa, Artificial Sequence
  Description of Artificial Sequence: Synthetic peptide
HFTSREL

SEQ ID NO: 3333 - protein, 7 aa, Artificial Sequence
  Description of Artificial Sequence: Synthetic peptide
HFTSTPS

SEQ ID NO: 3334 - protein, 7 aa, Artificial Sequence
  Description of Artificial Sequence: Synthetic peptide
HFVPSSA

SEQ ID NO: 3335 - protein, 7 aa, Artificial Sequence
  Description of Artificial Sequence: Synthetic peptide
HGAAALV

SEQ ID NO: 3336 - protein, 7 aa, Artificial Sequence
  Description of Artificial Sequence: Synthetic peptide
HGAKLLS

SEQ ID NO: 3337 - protein, 7 aa, Artificial Sequence
  Description of Artificial Sequence: Synthetic peptide
HGALSEA

SEQ ID NO: 3338 - protein, 7 aa, Artificial Sequence
  Description of Artificial Sequence: Synthetic peptide
HGANRLT

SEQ ID NO: 3339 - protein, 7 aa, Artificial Sequence
  Description of Artificial Sequence: Synthetic peptide
HGDGHST

SEQ ID NO: 3340 - protein, 7 aa, Artificial Sequence
  Description of Artificial Sequence: Synthetic peptide
HGDRALM

SEQ ID NO: 3341 - protein, 7 aa, Artificial Sequence
  Description of Artificial Sequence: Synthetic peptide
HGDVNRT

SEQ ID NO: 3342 - protein, 7 aa, Artificial Sequence
  Description of Artificial Sequence: Synthetic peptide
HGEMMES

SEQ ID NO: 3343 - protein, 7 aa, Artificial Sequence
  Description of Artificial Sequence: Synthetic peptide
HGFHTGS

SEQ ID NO: 3344 - protein, 7 aa, Artificial Sequence
  Description of Artificial Sequence: Synthetic peptide
HGFQNVD

SEQ ID NO: 3345 - protein, 7 aa, Artificial Sequence
  Description of Artificial Sequence: Synthetic peptide
HGGEVTF

SEQ ID NO: 3346 - protein, 7 aa, Artificial Sequence
  Description of Artificial Sequence: Synthetic peptide
HGGFRGE

SEQ ID NO: 3347 - protein, 7 aa, Artificial Sequence
  Description of Artificial Sequence: Synthetic peptide
HGHFSMA

SEQ ID NO: 3348 - protein, 7 aa, Artificial Sequence
  Description of Artificial Sequence: Synthetic peptide
HGKHVFV

SEQ ID NO: 3349 - protein, 7 aa, Artificial Sequence
  Description of Artificial Sequence: Synthetic peptide
HGLIAVA

SEQ ID NO: 3350 - protein, 7 aa, Artificial Sequence
  Description of Artificial Sequence: Synthetic peptide
HGLNSMP

SEQ ID NO: 3351 - protein, 7 aa, Artificial Sequence
  Description of Artificial Sequence: Synthetic peptide
HGLSEDY

SEQ ID NO: 3352 - protein, 7 aa, Artificial Sequence
  Description of Artificial Sequence: Synthetic peptide
HGLSLKD

SEQ ID NO: 3353 - protein, 7 aa, Artificial Sequence
  Description of Artificial Sequence: Synthetic peptide
HGMEDGL

SEQ ID NO: 3354 - protein, 7 aa, Artificial Sequence
  Description of Artificial Sequence: Synthetic peptide
HGNLNYH

SEQ ID NO: 3355 - protein, 7 aa, Artificial Sequence
  Description of Artificial Sequence: Synthetic peptide
HGPNASD

SEQ ID NO: 3356 - protein, 7 aa, Artificial Sequence
  Description of Artificial Sequence: Synthetic peptide
HGREVHQ

SEQ ID NO: 3357 - protein, 7 aa, Artificial Sequence
  Description of Artificial Sequence: Synthetic peptide
HGSGSCC

SEQ ID NO: 3358 - protein, 7 aa, Artificial Sequence
  Description of Artificial Sequence: Synthetic peptide
HGSIESQ

SEQ ID NO: 3359 - protein, 7 aa, Artificial Sequence
  Description of Artificial Sequence: Synthetic peptide
HGSKTMS

SEQ ID NO: 3360 - protein, 7 aa, Artificial Sequence
  Description of Artificial Sequence: Synthetic peptide
HGSMWPE

SEQ ID NO: 3361 - protein, 7 aa, Artificial Sequence
  Description of Artificial Sequence: Synthetic peptide
HGSSTRN

SEQ ID NO: 3362 - protein, 7 aa, Artificial Sequence
  Description of Artificial Sequence: Synthetic peptide
HGSTENS

SEQ ID NO: 3363 - protein, 7 aa, Artificial Sequence
  Description of Artificial Sequence: Synthetic peptide
HGSTKLP

SEQ ID NO: 3364 - protein, 7 aa, Artificial Sequence
  Description of Artificial Sequence: Synthetic peptide
HGTGVFG

SEQ ID NO: 3365 - protein, 7 aa, Artificial Sequence
  Description of Artificial Sequence: Synthetic peptide
HGTNRTH

SEQ ID NO: 3366 - protein, 7 aa, Artificial Sequence
  Description of Artificial Sequence: Synthetic peptide
HGTSKHS

SEQ ID NO: 3367 - protein, 7 aa, Artificial Sequence
  Description of Artificial Sequence: Synthetic peptide
HGTSSRP

SEQ ID NO: 3368 - protein, 7 aa, Artificial Sequence
  Description of Artificial Sequence: Synthetic peptide
HGVHHQV

SEQ ID NO: 3369 - protein, 7 aa, Artificial Sequence
  Description of Artificial Sequence: Synthetic peptide
HGVYPHL

SEQ ID NO: 3370 - protein, 7 aa, Artificial Sequence
  Description of Artificial Sequence: Synthetic peptide
HHAAGAV

SEQ ID NO: 3371 - protein, 7 aa, Artificial Sequence
  Description of Artificial Sequence: Synthetic peptide
HHAKANL

SEQ ID NO: 3372 - protein, 7 aa, Artificial Sequence
  Description of Artificial Sequence: Synthetic peptide
HHALPPD

SEQ ID NO: 3373 - protein, 7 aa, Artificial Sequence
  Description of Artificial Sequence: Synthetic peptide
HHAPNTP

SEQ ID NO: 3374 - protein, 7 aa, Artificial Sequence
  Description of Artificial Sequence: Synthetic peptide
HHAQGEA

SEQ ID NO: 3375 - protein, 7 aa, Artificial Sequence
  Description of Artificial Sequence: Synthetic peptide
HHDDRLQ

SEQ ID NO: 3376 - protein, 7 aa, Artificial Sequence
  Description of Artificial Sequence: Synthetic peptide
HHDLSIP

SEQ ID NO: 3377 - protein, 7 aa, Artificial Sequence
  Description of Artificial Sequence: Synthetic peptide
HHDPTTR

SEQ ID NO: 3378 - protein, 7 aa, Artificial Sequence
  Description of Artificial Sequence: Synthetic peptide
HHGTDRP

SEQ ID NO: 3379 - protein, 7 aa, Artificial Sequence
  Description of Artificial Sequence: Synthetic peptide
HHLAFLD

SEQ ID NO: 3380 - protein, 7 aa, Artificial Sequence
  Description of Artificial Sequence: Synthetic peptide
HHMSTAS

SEQ ID NO: 3381 - protein, 7 aa, Artificial Sequence
  Description of Artificial Sequence: Synthetic peptide
HHNVNSL

SEQ ID NO: 3382 - protein, 7 aa, Artificial Sequence
  Description of Artificial Sequence: Synthetic peptide
HHPRLDT

SEQ ID NO: 3383 - protein, 7 aa, Artificial Sequence
  Description of Artificial Sequence: Synthetic peptide
HHRVETG

SEQ ID NO: 3384 - protein, 7 aa, Artificial Sequence
  Description of Artificial Sequence: Synthetic peptide
HHSPAIT

SEQ ID NO: 3385 - protein, 7 aa, Artificial Sequence
  Description of Artificial Sequence: Synthetic peptide
HHTNPDP

SEQ ID NO: 3386 - protein, 7 aa, Artificial Sequence
  Description of Artificial Sequence: Synthetic peptide
HIALTSP

SEQ ID NO: 3387 - protein, 7 aa, Artificial Sequence
  Description of Artificial Sequence: Synthetic peptide
HILTSAP

SEQ ID NO: 3388 - protein, 7 aa, Artificial Sequence
  Description of Artificial Sequence: Synthetic peptide
HIPLKQA

SEQ ID NO: 3389 - protein, 7 aa, Artificial Sequence
  Description of Artificial Sequence: Synthetic peptide
HIPSSSG

SEQ ID NO: 3390 - protein, 7 aa, Artificial Sequence
  Description of Artificial Sequence: Synthetic peptide
HIPVMTP

SEQ ID NO: 3391 - protein, 7 aa, Artificial Sequence
  Description of Artificial Sequence: Synthetic peptide
HIRHDPK

SEQ ID NO: 3392 - protein, 7 aa, Artificial Sequence
  Description of Artificial Sequence: Synthetic peptide
HIRTGMP

SEQ ID NO: 3393 - protein, 7 aa, Artificial Sequence
  Description of Artificial Sequence: Synthetic peptide
HISPMPV

SEQ ID NO: 3394 - protein, 7 aa, Artificial Sequence
  Description of Artificial Sequence: Synthetic peptide
HISSSTV

SEQ ID NO: 3395 - protein, 7 aa, Artificial Sequence
  Description of Artificial Sequence: Synthetic peptide
HITQQLT

SEQ ID NO: 3396 - protein, 7 aa, Artificial Sequence
  Description of Artificial Sequence: Synthetic peptide
HKADSVS

SEQ ID NO: 3397 - protein, 7 aa, Artificial Sequence
  Description of Artificial Sequence: Synthetic peptide
HKFSSPL

SEQ ID NO: 3398 - protein, 7 aa, Artificial Sequence
  Description of Artificial Sequence: Synthetic peptide
HKGLSPL

SEQ ID NO: 3399 - protein, 7 aa, Artificial Sequence
  Description of Artificial Sequence: Synthetic peptide
HKLGGSF

SEQ ID NO: 3400 - protein, 7 aa, Artificial Sequence
  Description of Artificial Sequence: Synthetic peptide
HKLPGHH

SEQ ID NO: 3401 - protein, 7 aa, Artificial Sequence
  Description of Artificial Sequence: Synthetic peptide
HKLTSNG

SEQ ID NO: 3402 - protein, 7 aa, Artificial Sequence
  Description of Artificial Sequence: Synthetic peptide
HKNIGVV

SEQ ID NO: 3403 - protein, 7 aa, Artificial Sequence
  Description of Artificial Sequence: Synthetic peptide
HKPPIVP

SEQ ID NO: 3404 - protein, 7 aa, Artificial Sequence
  Description of Artificial Sequence: Synthetic peptide
HKPQVGV

SEQ ID NO: 3405 - protein, 7 aa, Artificial Sequence
  Description of Artificial Sequence: Synthetic peptide
HKPRPEV

SEQ ID NO: 3406 - protein, 7 aa, Artificial Sequence
  Description of Artificial Sequence: Synthetic peptide
HKQSQAG

SEQ ID NO: 3407 - protein, 7 aa, Artificial Sequence
  Description of Artificial Sequence: Synthetic peptide
HKQTMER

SEQ ID NO: 3408 - protein, 7 aa, Artificial Sequence
  Description of Artificial Sequence: Synthetic peptide
HKSSDRL

SEQ ID NO: 3409 - protein, 7 aa, Artificial Sequence
  Description of Artificial Sequence: Synthetic peptide
HKSVLVP

SEQ ID NO: 3410 - protein, 7 aa, Artificial Sequence
  Description of Artificial Sequence: Synthetic peptide
HKTSVPI

SEQ ID NO: 3411 - protein, 7 aa, Artificial Sequence
  Description of Artificial Sequence: Synthetic peptide
HKVPAQN

SEQ ID NO: 3412 - protein, 7 aa, Artificial Sequence
  Description of Artificial Sequence: Synthetic peptide
HKVPGLG

SEQ ID NO: 3413 - protein, 7 aa, Artificial Sequence
  Description of Artificial Sequence: Synthetic peptide
HKYNLGA

SEQ ID NO: 3414 - protein, 7 aa, Artificial Sequence
  Description of Artificial Sequence: Synthetic peptide
HLAALSH

SEQ ID NO: 3415 - protein, 7 aa, Artificial Sequence
  Description of Artificial Sequence: Synthetic peptide
HLAEVRE

SEQ ID NO: 3416 - protein, 7 aa, Artificial Sequence
  Description of Artificial Sequence: Synthetic peptide
HLAGTGA

SEQ ID NO: 3417 - protein, 7 aa, Artificial Sequence
  Description of Artificial Sequence: Synthetic peptide
HLALAPS

SEQ ID NO: 3418 - protein, 7 aa, Artificial Sequence
  Description of Artificial Sequence: Synthetic peptide
HLAPAIN

SEQ ID NO: 3419 - protein, 7 aa, Artificial Sequence
  Description of Artificial Sequence: Synthetic peptide
HLELGTR

SEQ ID NO: 3420 - protein, 7 aa, Artificial Sequence
  Description of Artificial Sequence: Synthetic peptide
HLERPLS

SEQ ID NO: 3421 - protein, 7 aa, Artificial Sequence
  Description of Artificial Sequence: Synthetic peptide
HLGPDAI

SEQ ID NO: 3422 - protein, 7 aa, Artificial Sequence
  Description of Artificial Sequence: Synthetic peptide
HLGSSNW

SEQ ID NO: 3423 - protein, 7 aa, Artificial Sequence
  Description of Artificial Sequence: Synthetic peptide
HLHSDSG

SEQ ID NO: 3424 - protein, 7 aa, Artificial Sequence
  Description of Artificial Sequence: Synthetic peptide
HLHSHES

SEQ ID NO: 3425 - protein, 7 aa, Artificial Sequence
  Description of Artificial Sequence: Synthetic peptide
HLHYPVA

SEQ ID NO: 3426 - protein, 7 aa, Artificial Sequence
  Description of Artificial Sequence: Synthetic peptide
HLNAKFA

SEQ ID NO: 3427 - protein, 7 aa, Artificial Sequence
  Description of Artificial Sequence: Synthetic peptide
HLNAPAT

SEQ ID NO: 3428 - protein, 7 aa, Artificial Sequence
  Description of Artificial Sequence: Synthetic peptide
HLNLEGR

SEQ ID NO: 3429 - protein, 7 aa, Artificial Sequence
  Description of Artificial Sequence: Synthetic peptide
HLPAHPL

SEQ ID NO: 3430 - protein, 7 aa, Artificial Sequence
  Description of Artificial Sequence: Synthetic peptide
HLPKNPS

SEQ ID NO: 3431 - protein, 7 aa, Artificial Sequence
  Description of Artificial Sequence: Synthetic peptide
HLPSGLT

SEQ ID NO: 3432 - protein, 7 aa, Artificial Sequence
  Description of Artificial Sequence: Synthetic peptide
HLPTSDA

SEQ ID NO: 3433 - protein, 7 aa, Artificial Sequence
  Description of Artificial Sequence: Synthetic peptide
HLPYNVP

SEQ ID NO: 3434 - protein, 7 aa, Artificial Sequence
  Description of Artificial Sequence: Synthetic peptide
HLQILEA

SEQ ID NO: 3435 - protein, 7 aa, Artificial Sequence
  Description of Artificial Sequence: Synthetic peptide
HLRELIS

SEQ ID NO: 3436 - protein, 7 aa, Artificial Sequence
  Description of Artificial Sequence: Synthetic peptide
HLRSGVG

SEQ ID NO: 3437 - protein, 7 aa, Artificial Sequence
  Description of Artificial Sequence: Synthetic peptide
HLSDWPI

SEQ ID NO: 3438 - protein, 7 aa, Artificial Sequence
  Description of Artificial Sequence: Synthetic peptide
HLSGMHA

SEQ ID NO: 3439 - protein, 7 aa, Artificial Sequence
  Description of Artificial Sequence: Synthetic peptide
HLSIAAS

SEQ ID NO: 3440 - protein, 7 aa, Artificial Sequence
  Description of Artificial Sequence: Synthetic peptide
HLSPFTD

SEQ ID NO: 3441 - protein, 7 aa, Artificial Sequence
  Description of Artificial Sequence: Synthetic peptide
HLSPLVR

SEQ ID NO: 3442 - protein, 7 aa, Artificial Sequence
  Description of Artificial Sequence: Synthetic peptide
HLSPRPP

SEQ ID NO: 3443 - protein, 7 aa, Artificial Sequence
  Description of Artificial Sequence: Synthetic peptide
HLSVRLS

SEQ ID NO: 3444 - protein, 7 aa, Artificial Sequence
  Description of Artificial Sequence: Synthetic peptide
HLSVSGS

SEQ ID NO: 3445 - protein, 7 aa, Artificial Sequence
  Description of Artificial Sequence: Synthetic peptide
HLTALTG

SEQ ID NO: 3446 - protein, 7 aa, Artificial Sequence
  Description of Artificial Sequence: Synthetic peptide
HLTDTRR

SEQ ID NO: 3447 - protein, 7 aa, Artificial Sequence
  Description of Artificial Sequence: Synthetic peptide
HLTSGAA

SEQ ID NO: 3448 - protein, 7 aa, Artificial Sequence
  Description of Artificial Sequence: Synthetic peptide
HLTSNSL

SEQ ID NO: 3449 - protein, 7 aa, Artificial Sequence
  Description of Artificial Sequence: Synthetic peptide
HLTSRAG

SEQ ID NO: 3450 - protein, 7 aa, Artificial Sequence
  Description of Artificial Sequence: Synthetic peptide
HLVRGEP

SEQ ID NO: 3451 - protein, 7 aa, Artificial Sequence
  Description of Artificial Sequence: Synthetic peptide
HLVSNRS

SEQ ID NO: 3452 - protein, 7 aa, Artificial Sequence
  Description of Artificial Sequence: Synthetic peptide
HLVSTTS

SEQ ID NO: 3453 - protein, 7 aa, Artificial Sequence
  Description of Artificial Sequence: Synthetic peptide
HLVSTVA

SEQ ID NO: 3454 - protein, 7 aa, Artificial Sequence
  Description of Artificial Sequence: Synthetic peptide
HMAGGDY

SEQ ID NO: 3455 - protein, 7 aa, Artificial Sequence
  Description of Artificial Sequence: Synthetic peptide
HMDSTIS

SEQ ID NO: 3456 - protein, 7 aa, Artificial Sequence
  Description of Artificial Sequence: Synthetic peptide
HMGDMNR

SEQ ID NO: 3457 - protein, 7 aa, Artificial Sequence
  Description of Artificial Sequence: Synthetic peptide
HMIIVDS

SEQ ID NO: 3458 - protein, 7 aa, Artificial Sequence
  Description of Artificial Sequence: Synthetic peptide
HMKPQSD

SEQ ID NO: 3459 - protein, 7 aa, Artificial Sequence
  Description of Artificial Sequence: Synthetic peptide
HMLTHTH

SEQ ID NO: 3460 - protein, 7 aa, Artificial Sequence
  Description of Artificial Sequence: Synthetic peptide
HMMKLGS

SEQ ID NO: 3461 - protein, 7 aa, Artificial Sequence
  Description of Artificial Sequence: Synthetic peptide
HMMSHGP

SEQ ID NO: 3462 - protein, 7 aa, Artificial Sequence
  Description of Artificial Sequence: Synthetic peptide
HMNADHK

SEQ ID NO: 3463 - protein, 7 aa, Artificial Sequence
  Description of Artificial Sequence: Synthetic peptide
HMNLKDA

SEQ ID NO: 3464 - protein, 7 aa, Artificial Sequence
  Description of Artificial Sequence: Synthetic peptide
HMPDDPS

SEQ ID NO: 3465 - protein, 7 aa, Artificial Sequence
  Description of Artificial Sequence: Synthetic peptide
HMPNMYS

SEQ ID NO: 3466 - protein, 7 aa, Artificial Sequence
  Description of Artificial Sequence: Synthetic peptide
HMSNPSF

SEQ ID NO: 3467 - protein, 7 aa, Artificial Sequence
  Description of Artificial Sequence: Synthetic peptide
HMSVLQK

SEQ ID NO: 3468 - protein, 7 aa, Artificial Sequence
  Description of Artificial Sequence: Synthetic peptide
HMSVRDP

SEQ ID NO: 3469 - protein, 7 aa, Artificial Sequence
  Description of Artificial Sequence: Synthetic peptide
HMTGTNL

SEQ ID NO: 3470 - protein, 7 aa, Artificial Sequence
  Description of Artificial Sequence: Synthetic peptide
HMVANPA

SEQ ID NO: 3471 - protein, 7 aa, Artificial Sequence
  Description of Artificial Sequence: Synthetic peptide
HNAAQNQ

SEQ ID NO: 3472 - protein, 7 aa, Artificial Sequence
  Description of Artificial Sequence: Synthetic peptide
HNAGYMP

SEQ ID NO: 3473 - protein, 7 aa, Artificial Sequence
  Description of Artificial Sequence: Synthetic peptide
HNASAVN

SEQ ID NO: 3474 - protein, 7 aa, Artificial Sequence
  Description of Artificial Sequence: Synthetic peptide
HNELPPP

SEQ ID NO: 3475 - protein, 7 aa, Artificial Sequence
  Description of Artificial Sequence: Synthetic peptide
HNEPDKG

SEQ ID NO: 3476 - protein, 7 aa, Artificial Sequence
  Description of Artificial Sequence: Synthetic peptide
HNHDTVL

SEQ ID NO: 3477 - protein, 7 aa, Artificial Sequence
  Description of Artificial Sequence: Synthetic peptide
HNHIVHA

SEQ ID NO: 3478 - protein, 7 aa, Artificial Sequence
  Description of Artificial Sequence: Synthetic peptide
HNKSSYV

SEQ ID NO: 3479 - protein, 7 aa, Artificial Sequence
  Description of Artificial Sequence: Synthetic peptide
HNMRIPS

SEQ ID NO: 3480 - protein, 7 aa, Artificial Sequence
  Description of Artificial Sequence: Synthetic peptide
HNNTVNQ

SEQ ID NO: 3481 - protein, 7 aa, Artificial Sequence
  Description of Artificial Sequence: Synthetic peptide
HNPPKLT

SEQ ID NO: 3482 - protein, 7 aa, Artificial Sequence
  Description of Artificial Sequence: Synthetic peptide
HNPRELG

SEQ ID NO: 3483 - protein, 7 aa, Artificial Sequence
  Description of Artificial Sequence: Synthetic peptide
HNPSLRT

SEQ ID NO: 3484 - protein, 7 aa, Artificial Sequence
  Description of Artificial Sequence: Synthetic peptide
HNQTLGS

SEQ ID NO: 3485 - protein, 7 aa, Artificial Sequence
  Description of Artificial Sequence: Synthetic peptide
HNRNDGF

SEQ ID NO: 3486 - protein, 7 aa, Artificial Sequence
  Description of Artificial Sequence: Synthetic peptide
HNSHHYA

SEQ ID NO: 3487 - protein, 7 aa, Artificial Sequence
  Description of Artificial Sequence: Synthetic peptide
HNSHSMR

SEQ ID NO: 3488 - protein, 7 aa, Artificial Sequence
  Description of Artificial Sequence: Synthetic peptide
HNSPGVG

SEQ ID NO: 3489 - protein, 7 aa, Artificial Sequence
  Description of Artificial Sequence: Synthetic peptide
HNSSFDM

SEQ ID NO: 3490 - protein, 7 aa, Artificial Sequence
  Description of Artificial Sequence: Synthetic peptide
HPAILQL

SEQ ID NO: 3491 - protein, 7 aa, Artificial Sequence
  Description of Artificial Sequence: Synthetic peptide
HPATKLG

SEQ ID NO: 3492 - protein, 7 aa, Artificial Sequence
  Description of Artificial Sequence: Synthetic peptide
HPDPHST

SEQ ID NO: 3493 - protein, 7 aa, Artificial Sequence
  Description of Artificial Sequence: Synthetic peptide
HPEKRNP

SEQ ID NO: 3494 - protein, 7 aa, Artificial Sequence
  Description of Artificial Sequence: Synthetic peptide
HPELPLH

SEQ ID NO: 3495 - protein, 7 aa, Artificial Sequence
  Description of Artificial Sequence: Synthetic peptide
HPEMLVT

SEQ ID NO: 3496 - protein, 7 aa, Artificial Sequence
  Description of Artificial Sequence: Synthetic peptide
HPFGTAS

SEQ ID NO: 3497 - protein, 7 aa, Artificial Sequence
  Description of Artificial Sequence: Synthetic peptide
HPGFNHD

SEQ ID NO: 3498 - protein, 7 aa, Artificial Sequence
  Description of Artificial Sequence: Synthetic peptide
HPGPLVA

SEQ ID NO: 3499 - protein, 7 aa, Artificial Sequence
  Description of Artificial Sequence: Synthetic peptide
HPGQSPV

SEQ ID NO: 3500 - protein, 7 aa, Artificial Sequence
  Description of Artificial Sequence: Synthetic peptide
HPGYSSN

SEQ ID NO: 3501 - protein, 7 aa, Artificial Sequence
  Description of Artificial Sequence: Synthetic peptide
HPIIPIS

SEQ ID NO: 3502 - protein, 7 aa, Artificial Sequence
  Description of Artificial Sequence: Synthetic peptide
HPINTRS

SEQ ID NO: 3503 - protein, 7 aa, Artificial Sequence
  Description of Artificial Sequence: Synthetic peptide
HPIPFPG

SEQ ID NO: 3504 - protein, 7 aa, Artificial Sequence
  Description of Artificial Sequence: Synthetic peptide
HPKGEPP

SEQ ID NO: 3505 - protein, 7 aa, Artificial Sequence
  Description of Artificial Sequence: Synthetic peptide
HPKLVSV

SEQ ID NO: 3506 - protein, 7 aa, Artificial Sequence
  Description of Artificial Sequence: Synthetic peptide
HPLEDQL

SEQ ID NO: 3507 - protein, 7 aa, Artificial Sequence
  Description of Artificial Sequence: Synthetic peptide
HPLNARP

SEQ ID NO: 3508 - protein, 7 aa, Artificial Sequence
  Description of Artificial Sequence: Synthetic peptide
HPMTSNS

SEQ ID NO: 3509 - protein, 7 aa, Artificial Sequence
  Description of Artificial Sequence: Synthetic peptide
HPPKYVT

SEQ ID NO: 3510 - protein, 7 aa, Artificial Sequence
  Description of Artificial Sequence: Synthetic peptide
HPPPSHM

SEQ ID NO: 3511 - protein, 7 aa, Artificial Sequence
  Description of Artificial Sequence: Synthetic peptide
HPPPTDS

SEQ ID NO: 3512 - protein, 7 aa, Artificial Sequence
  Description of Artificial Sequence: Synthetic peptide
HPPRTPA

SEQ ID NO: 3513 - protein, 7 aa, Artificial Sequence
  Description of Artificial Sequence: Synthetic peptide
HPQRQAS

SEQ ID NO: 3514 - protein, 7 aa, Artificial Sequence
  Description of Artificial Sequence: Synthetic peptide
HPQSSHW

SEQ ID NO: 3515 - protein, 7 aa, Artificial Sequence
  Description of Artificial Sequence: Synthetic peptide
HPSFSPL

SEQ ID NO: 3516 - protein, 7 aa, Artificial Sequence
  Description of Artificial Sequence: Synthetic peptide
HPSGYSN

SEQ ID NO: 3517 - protein, 7 aa, Artificial Sequence
  Description of Artificial Sequence: Synthetic peptide
HPSIAGM

SEQ ID NO: 3518 - protein, 7 aa, Artificial Sequence
  Description of Artificial Sequence: Synthetic peptide
HPSIVRD

SEQ ID NO: 3519 - protein, 7 aa, Artificial Sequence
  Description of Artificial Sequence: Synthetic peptide
HPSLAIG

SEQ ID NO: 3520 - protein, 7 aa, Artificial Sequence
  Description of Artificial Sequence: Synthetic peptide
HPSRVIM

SEQ ID NO: 3521 - protein, 7 aa, Artificial Sequence
  Description of Artificial Sequence: Synthetic peptide
HPSSQLH

SEQ ID NO: 3522 - protein, 7 aa, Artificial Sequence
  Description of Artificial Sequence: Synthetic peptide
HPSYSSG

SEQ ID NO: 3523 - protein, 7 aa, Artificial Sequence
  Description of Artificial Sequence: Synthetic peptide
HPTAKLP

SEQ ID NO: 3524 - protein, 7 aa, Artificial Sequence
  Description of Artificial Sequence: Synthetic peptide
HPTETTE

SEQ ID NO: 3525 - protein, 7 aa, Artificial Sequence
  Description of Artificial Sequence: Synthetic peptide
HPTGTKD

SEQ ID NO: 3526 - protein, 7 aa, Artificial Sequence
  Description of Artificial Sequence: Synthetic peptide
HPTLSHY

SEQ ID NO: 3527 - protein, 7 aa, Artificial Sequence
  Description of Artificial Sequence: Synthetic peptide
HPTNNSN

SEQ ID NO: 3528 - protein, 7 aa, Artificial Sequence
  Description of Artificial Sequence: Synthetic peptide
HPTSIIL

SEQ ID NO: 3529 - protein, 7 aa, Artificial Sequence
  Description of Artificial Sequence: Synthetic peptide
HPTTRFG

SEQ ID NO: 3530 - protein, 7 aa, Artificial Sequence
  Description of Artificial Sequence: Synthetic peptide
HPVSSRQ

SEQ ID NO: 3531 - protein, 7 aa, Artificial Sequence
  Description of Artificial Sequence: Synthetic peptide
HPYQNSL

SEQ ID NO: 3532 - protein, 7 aa, Artificial Sequence
  Description of Artificial Sequence: Synthetic peptide
HQAEAYS

SEQ ID NO: 3533 - protein, 7 aa, Artificial Sequence
  Description of Artificial Sequence: Synthetic peptide
HQAPGLQ

SEQ ID NO: 3534 - protein, 7 aa, Artificial Sequence
  Description of Artificial Sequence: Synthetic peptide
HQDIAHL

SEQ ID NO: 3535 - protein, 7 aa, Artificial Sequence
  Description of Artificial Sequence: Synthetic peptide
HQFNREP

SEQ ID NO: 3536 - protein, 7 aa, Artificial Sequence
  Description of Artificial Sequence: Synthetic peptide
HQGDQNI

SEQ ID NO: 3537 - protein, 7 aa, Artificial Sequence
  Description of Artificial Sequence: Synthetic peptide
HQGHPRD

SEQ ID NO: 3538 - protein, 7 aa, Artificial Sequence
  Description of Artificial Sequence: Synthetic peptide
HQGSPTF

SEQ ID NO: 3539 - protein, 7 aa, Artificial Sequence
  Description of Artificial Sequence: Synthetic peptide
HQLGSQM

SEQ ID NO: 3540 - protein, 7 aa, Artificial Sequence
  Description of Artificial Sequence: Synthetic peptide
HQPHIVQ

SEQ ID NO: 3541 - protein, 7 aa, Artificial Sequence
  Description of Artificial Sequence: Synthetic peptide
HQPHSSL

SEQ ID NO: 3542 - protein, 7 aa, Artificial Sequence
  Description of Artificial Sequence: Synthetic peptide
HQQSTNN

SEQ ID NO: 3543 - protein, 7 aa, Artificial Sequence
  Description of Artificial Sequence: Synthetic peptide
HQRTVGV

SEQ ID NO: 3544 - protein, 7 aa, Artificial Sequence
  Description of Artificial Sequence: Synthetic peptide
HQSPSDR

SEQ ID NO: 3545 - protein, 7 aa, Artificial Sequence
  Description of Artificial Sequence: Synthetic peptide
HQTASVL

SEQ ID NO: 3546 - protein, 7 aa, Artificial Sequence
  Description of Artificial Sequence: Synthetic peptide
HQTVGQN

SEQ ID NO: 3547 - protein, 7 aa, Artificial Sequence
  Description of Artificial Sequence: Synthetic peptide
HRASYVD

SEQ ID NO: 3548 - protein, 7 aa, Artificial Sequence
  Description of Artificial Sequence: Synthetic peptide
HRDALQQ

SEQ ID NO: 3549 - protein, 7 aa, Artificial Sequence
  Description of Artificial Sequence: Synthetic peptide
HRDISTG

SEQ ID NO: 3550 - protein, 7 aa, Artificial Sequence
  Description of Artificial Sequence: Synthetic peptide
HREEKAS

SEQ ID NO: 3551 - protein, 7 aa, Artificial Sequence
  Description of Artificial Sequence: Synthetic peptide
HREGLEH

SEQ ID NO: 3552 - protein, 7 aa, Artificial Sequence
  Description of Artificial Sequence: Synthetic peptide
HREHGYP

SEQ ID NO: 3553 - protein, 7 aa, Artificial Sequence
  Description of Artificial Sequence: Synthetic peptide
HRENKVA

SEQ ID NO: 3554 - protein, 7 aa, Artificial Sequence
  Description of Artificial Sequence: Synthetic peptide
HRIGDVP

SEQ ID NO: 3555 - protein, 7 aa, Artificial Sequence
  Description of Artificial Sequence: Synthetic peptide
HRLPNVA

SEQ ID NO: 3556 - protein, 7 aa, Artificial Sequence
  Description of Artificial Sequence: Synthetic peptide
HRPEMLS

SEQ ID NO: 3557 - protein, 7 aa, Artificial Sequence
  Description of Artificial Sequence: Synthetic peptide
HRPIATY

SEQ ID NO: 3558 - protein, 7 aa, Artificial Sequence
  Description of Artificial Sequence: Synthetic peptide
HRTGLPE

SEQ ID NO: 3559 - protein, 7 aa, Artificial Sequence
  Description of Artificial Sequence: Synthetic peptide
HRTSMPL

SEQ ID NO: 3560 - protein, 7 aa, Artificial Sequence
  Description of Artificial Sequence: Synthetic peptide
HRTTNNF

SEQ ID NO: 3561 - protein, 7 aa, Artificial Sequence
  Description of Artificial Sequence: Synthetic peptide
HRVGGLS

SEQ ID NO: 3562 - protein, 7 aa, Artificial Sequence
  Description of Artificial Sequence: Synthetic peptide
HRVVAIP

SEQ ID NO: 3563 - protein, 7 aa, Artificial Sequence
  Description of Artificial Sequence: Synthetic peptide
HSAALCM

SEQ ID NO: 3564 - protein, 7 aa, Artificial Sequence
  Description of Artificial Sequence: Synthetic peptide
HSAAMPS

SEQ ID NO: 3565 - protein, 7 aa, Artificial Sequence
  Description of Artificial Sequence: Synthetic peptide
HSAGTET

SEQ ID NO: 3566 - protein, 7 aa, Artificial Sequence
  Description of Artificial Sequence: Synthetic peptide
HSAKMSG

SEQ ID NO: 3567 - protein, 7 aa, Artificial Sequence
  Description of Artificial Sequence: Synthetic peptide
HSAKSMH

SEQ ID NO: 3568 - protein, 7 aa, Artificial Sequence
  Description of Artificial Sequence: Synthetic peptide
HSALLHM

SEQ ID NO: 3569 - protein, 7 aa, Artificial Sequence
  Description of Artificial Sequence: Synthetic peptide
HSAQITI

SEQ ID NO: 3570 - protein, 7 aa, Artificial Sequence
  Description of Artificial Sequence: Synthetic peptide
HSATMCS

SEQ ID NO: 3571 - protein, 7 aa, Artificial Sequence
  Description of Artificial Sequence: Synthetic peptide
HSDRSSA

SEQ ID NO: 3572 - protein, 7 aa, Artificial Sequence
  Description of Artificial Sequence: Synthetic peptide
HSEKSGF

SEQ ID NO: 3573 - protein, 7 aa, Artificial Sequence
  Description of Artificial Sequence: Synthetic peptide
HSEYPTK

SEQ ID NO: 3574 - protein, 7 aa, Artificial Sequence
  Description of Artificial Sequence: Synthetic peptide
HSFLDLE

SEQ ID NO: 3575 - protein, 7 aa, Artificial Sequence
  Description of Artificial Sequence: Synthetic peptide
HSFSMME

SEQ ID NO: 3576 - protein, 7 aa, Artificial Sequence
  Description of Artificial Sequence: Synthetic peptide
HSGHSQG

SEQ ID NO: 3577 - protein, 7 aa, Artificial Sequence
  Description of Artificial Sequence: Synthetic peptide
HSGKILH

SEQ ID NO: 3578 - protein, 7 aa, Artificial Sequence
  Description of Artificial Sequence: Synthetic peptide
HSGRAYS

SEQ ID NO: 3579 - protein, 7 aa, Artificial Sequence
  Description of Artificial Sequence: Synthetic peptide
HSGSSET

SEQ ID NO: 3580 - protein, 7 aa, Artificial Sequence
  Description of Artificial Sequence: Synthetic peptide
HSHGVPS

SEQ ID NO: 3581 - protein, 7 aa, Artificial Sequence
  Description of Artificial Sequence: Synthetic peptide
HSHVNSS

SEQ ID NO: 3582 - protein, 7 aa, Artificial Sequence
  Description of Artificial Sequence: Synthetic peptide
HSIHSRE

SEQ ID NO: 3583 - protein, 7 aa, Artificial Sequence
  Description of Artificial Sequence: Synthetic peptide
HSIQHIP

SEQ ID NO: 3584 - protein, 7 aa, Artificial Sequence
  Description of Artificial Sequence: Synthetic peptide
HSKASVI

SEQ ID NO: 3585 - protein, 7 aa, Artificial Sequence
  Description of Artificial Sequence: Synthetic peptide
HSKPAQI

SEQ ID NO: 3586 - protein, 7 aa, Artificial Sequence
  Description of Artificial Sequence: Synthetic peptide
HSKSVVT

SEQ ID NO: 3587 - protein, 7 aa, Artificial Sequence
  Description of Artificial Sequence: Synthetic peptide
HSLGAIP

SEQ ID NO: 3588 - protein, 7 aa, Artificial Sequence
  Description of Artificial Sequence: Synthetic peptide
HSLGTSG

SEQ ID NO: 3589 - protein, 7 aa, Artificial Sequence
  Description of Artificial Sequence: Synthetic peptide
HSLLNST

SEQ ID NO: 3590 - protein, 7 aa, Artificial Sequence
  Description of Artificial Sequence: Synthetic peptide
HSLPGLK

SEQ ID NO: 3591 - protein, 7 aa, Artificial Sequence
  Description of Artificial Sequence: Synthetic peptide
HSLRTPQ

SEQ ID NO: 3592 - protein, 7 aa, Artificial Sequence
  Description of Artificial Sequence: Synthetic peptide
HSMEEAL

SEQ ID NO: 3593 - protein, 7 aa, Artificial Sequence
  Description of Artificial Sequence: Synthetic peptide
HSMPDQI

SEQ ID NO: 3594 - protein, 7 aa, Artificial Sequence
  Description of Artificial Sequence: Synthetic peptide
HSMSEAK

SEQ ID NO: 3595 - protein, 7 aa, Artificial Sequence
  Description of Artificial Sequence: Synthetic peptide
HSNKQPN

SEQ ID NO: 3596 - protein, 7 aa, Artificial Sequence
  Description of Artificial Sequence: Synthetic peptide
HSNKTSL

SEQ ID NO: 3597 - protein, 7 aa, Artificial Sequence
  Description of Artificial Sequence: Synthetic peptide
HSNLRAM

SEQ ID NO: 3598 - protein, 7 aa, Artificial Sequence
  Description of Artificial Sequence: Synthetic peptide
HSNTISS

SEQ ID NO: 3599 - protein, 7 aa, Artificial Sequence
  Description of Artificial Sequence: Synthetic peptide
HSPARTA

SEQ ID NO: 3600 - protein, 7 aa, Artificial Sequence
  Description of Artificial Sequence: Synthetic peptide
HSPASPP

SEQ ID NO: 3601 - protein, 7 aa, Artificial Sequence
  Description of Artificial Sequence: Synthetic peptide
HSPGQIS

SEQ ID NO: 3602 - protein, 7 aa, Artificial Sequence
  Description of Artificial Sequence: Synthetic peptide
HSPMAVP

SEQ ID NO: 3603 - protein, 7 aa, Artificial Sequence
  Description of Artificial Sequence: Synthetic peptide
HSPNGYA

SEQ ID NO: 3604 - protein, 7 aa, Artificial Sequence
  Description of Artificial Sequence: Synthetic peptide
HSQAQMS

SEQ ID NO: 3605 - protein, 7 aa, Artificial Sequence
  Description of Artificial Sequence: Synthetic peptide
HSQNQYS

SEQ ID NO: 3606 - protein, 7 aa, Artificial Sequence
  Description of Artificial Sequence: Synthetic peptide
HSQRAVP

SEQ ID NO: 3607 - protein, 7 aa, Artificial Sequence
  Description of Artificial Sequence: Synthetic peptide
HSRASPE

SEQ ID NO: 3608 - protein, 7 aa, Artificial Sequence
  Description of Artificial Sequence: Synthetic peptide
HSRDNRN

SEQ ID NO: 3609 - protein, 7 aa, Artificial Sequence
  Description of Artificial Sequence: Synthetic peptide
HSRELSP

SEQ ID NO: 3610 - protein, 7 aa, Artificial Sequence
  Description of Artificial Sequence: Synthetic peptide
HSRGTML

SEQ ID NO: 3611 - protein, 7 aa, Artificial Sequence
  Description of Artificial Sequence: Synthetic peptide
HSRHDML

SEQ ID NO: 3612 - protein, 7 aa, Artificial Sequence
  Description of Artificial Sequence: Synthetic peptide
HSRPQPQ

SEQ ID NO: 3613 - protein, 7 aa, Artificial Sequence
  Description of Artificial Sequence: Synthetic peptide
HSRPSGC

SEQ ID NO: 3614 - protein, 7 aa, Artificial Sequence
  Description of Artificial Sequence: Synthetic peptide
HSRSTFA

SEQ ID NO: 3615 - protein, 7 aa, Artificial Sequence
  Description of Artificial Sequence: Synthetic peptide
HSSIPGP

SEQ ID NO: 3616 - protein, 7 aa, Artificial Sequence
  Description of Artificial Sequence: Synthetic peptide
HSSMATM

SEQ ID NO: 3617 - protein, 7 aa, Artificial Sequence
  Description of Artificial Sequence: Synthetic peptide
HSSNLGV

SEQ ID NO: 3618 - protein, 7 aa, Artificial Sequence
  Description of Artificial Sequence: Synthetic peptide
HSSSVNP

SEQ ID NO: 3619 - protein, 7 aa, Artificial Sequence
  Description of Artificial Sequence: Synthetic peptide
HSSTGAN

SEQ ID NO: 3620 - protein, 7 aa, Artificial Sequence
  Description of Artificial Sequence: Synthetic peptide
HSSVPGA

SEQ ID NO: 3621 - protein, 7 aa, Artificial Sequence
  Description of Artificial Sequence: Synthetic peptide
HSTDSLP

SEQ ID NO: 3622 - protein, 7 aa, Artificial Sequence
  Description of Artificial Sequence: Synthetic peptide
HSTHREL

SEQ ID NO: 3623 - protein, 7 aa, Artificial Sequence
  Description of Artificial Sequence: Synthetic peptide
HSTLISH

SEQ ID NO: 3624 - protein, 7 aa, Artificial Sequence
  Description of Artificial Sequence: Synthetic peptide
HSTPLNS

SEQ ID NO: 3625 - protein, 7 aa, Artificial Sequence
  Description of Artificial Sequence: Synthetic peptide
HSTREGF

SEQ ID NO: 3626 - protein, 7 aa, Artificial Sequence
  Description of Artificial Sequence: Synthetic peptide
HSTTDPL

SEQ ID NO: 3627 - protein, 7 aa, Artificial Sequence
  Description of Artificial Sequence: Synthetic peptide
HSVASVT

SEQ ID NO: 3628 - protein, 7 aa, Artificial Sequence
  Description of Artificial Sequence: Synthetic peptide
HSVDSRG

SEQ ID NO: 3629 - protein, 7 aa, Artificial Sequence
  Description of Artificial Sequence: Synthetic peptide
HSVERDH

SEQ ID NO: 3630 - protein, 7 aa, Artificial Sequence
  Description of Artificial Sequence: Synthetic peptide
HSYVDSF

SEQ ID NO: 3631 - protein, 7 aa, Artificial Sequence
  Description of Artificial Sequence: Synthetic peptide
HTAGDAE

SEQ ID NO: 3632 - protein, 7 aa, Artificial Sequence
  Description of Artificial Sequence: Synthetic peptide
HTALLSN

SEQ ID NO: 3633 - protein, 7 aa, Artificial Sequence
  Description of Artificial Sequence: Synthetic peptide
HTARTTP

SEQ ID NO: 3634 - protein, 7 aa, Artificial Sequence
  Description of Artificial Sequence: Synthetic peptide
HTASLPA

SEQ ID NO: 3635 - protein, 7 aa, Artificial Sequence
  Description of Artificial Sequence: Synthetic peptide
HTDRYAV

SEQ ID NO: 3636 - protein, 7 aa, Artificial Sequence
  Description of Artificial Sequence: Synthetic peptide
HTEAGRV

SEQ ID NO: 3637 - protein, 7 aa, Artificial Sequence
  Description of Artificial Sequence: Synthetic peptide
HTETFGE

SEQ ID NO: 3638 - protein, 7 aa, Artificial Sequence
  Description of Artificial Sequence: Synthetic peptide
HTGLVRG

SEQ ID NO: 3639 - protein, 7 aa, Artificial Sequence
  Description of Artificial Sequence: Synthetic peptide
HTGSLSS

SEQ ID NO: 3640 - protein, 7 aa, Artificial Sequence
  Description of Artificial Sequence: Synthetic peptide
HTHLASL

SEQ ID NO: 3641 - protein, 7 aa, Artificial Sequence
  Description of Artificial Sequence: Synthetic peptide
HTIKDAY

SEQ ID NO: 3642 - protein, 7 aa, Artificial Sequence
  Description of Artificial Sequence: Synthetic peptide
HTKSPHP

SEQ ID NO: 3643 - protein, 7 aa, Artificial Sequence
  Description of Artificial Sequence: Synthetic peptide
HTLKPDV

SEQ ID NO: 3644 - protein, 7 aa, Artificial Sequence
  Description of Artificial Sequence: Synthetic peptide
HTLPSTS

SEQ ID NO: 3645 - protein, 7 aa, Artificial Sequence
  Description of Artificial Sequence: Synthetic peptide
HTLPTTA

SEQ ID NO: 3646 - protein, 7 aa, Artificial Sequence
  Description of Artificial Sequence: Synthetic peptide
HTMASGS

SEQ ID NO: 3647 - protein, 7 aa, Artificial Sequence
  Description of Artificial Sequence: Synthetic peptide
HTNSNTG

SEQ ID NO: 3648 - protein, 7 aa, Artificial Sequence
  Description of Artificial Sequence: Synthetic peptide
HTPAVNF

SEQ ID NO: 3649 - protein, 7 aa, Artificial Sequence
  Description of Artificial Sequence: Synthetic peptide
HTPGLHT

SEQ ID NO: 3650 - protein, 7 aa, Artificial Sequence
  Description of Artificial Sequence: Synthetic peptide
HTPLTSH

SEQ ID NO: 3651 - protein, 7 aa, Artificial Sequence
  Description of Artificial Sequence: Synthetic peptide
HTPNILY

SEQ ID NO: 3652 - protein, 7 aa, Artificial Sequence
  Description of Artificial Sequence: Synthetic peptide
HTPQPNA

SEQ ID NO: 3653 - protein, 7 aa, Artificial Sequence
  Description of Artificial Sequence: Synthetic peptide
HTQLRTP

SEQ ID NO: 3654 - protein, 7 aa, Artificial Sequence
  Description of Artificial Sequence: Synthetic peptide
HTQRLSS

SEQ ID NO: 3655 - protein, 7 aa, Artificial Sequence
  Description of Artificial Sequence: Synthetic peptide
HTQVTRC

SEQ ID NO: 3656 - protein, 7 aa, Artificial Sequence
  Description of Artificial Sequence: Synthetic peptide
HTRDSDP

SEQ ID NO: 3657 - protein, 7 aa, Artificial Sequence
  Description of Artificial Sequence: Synthetic peptide
HTRGKAE

SEQ ID NO: 3658 - protein, 7 aa, Artificial Sequence
  Description of Artificial Sequence: Synthetic peptide
HTSGESY

SEQ ID NO: 3659 - protein, 7 aa, Artificial Sequence
  Description of Artificial Sequence: Synthetic peptide
HTSHQLP

SEQ ID NO: 3660 - protein, 7 aa, Artificial Sequence
  Description of Artificial Sequence: Synthetic peptide
HTSIDYV

SEQ ID NO: 3661 - protein, 7 aa, Artificial Sequence
  Description of Artificial Sequence: Synthetic peptide
HTSKSAL

SEQ ID NO: 3662 - protein, 7 aa, Artificial Sequence
  Description of Artificial Sequence: Synthetic peptide
HTSPPIS

SEQ ID NO: 3663 - protein, 7 aa, Artificial Sequence
  Description of Artificial Sequence: Synthetic peptide
HTSPVYD

SEQ ID NO: 3664 - protein, 7 aa, Artificial Sequence
  Description of Artificial Sequence: Synthetic peptide
HTSQQRQ

SEQ ID NO: 3665 - protein, 7 aa, Artificial Sequence
  Description of Artificial Sequence: Synthetic peptide
HTSTTKW

SEQ ID NO: 3666 - protein, 7 aa, Artificial Sequence
  Description of Artificial Sequence: Synthetic peptide
HTSWDGL

SEQ ID NO: 3667 - protein, 7 aa, Artificial Sequence
  Description of Artificial Sequence: Synthetic peptide
HTTAAPP

SEQ ID NO: 3668 - protein, 7 aa, Artificial Sequence
  Description of Artificial Sequence: Synthetic peptide
HTTKVDP

SEQ ID NO: 3669 - protein, 7 aa, Artificial Sequence
  Description of Artificial Sequence: Synthetic peptide
HTTPTHT

SEQ ID NO: 3670 - protein, 7 aa, Artificial Sequence
  Description of Artificial Sequence: Synthetic peptide
HTTQCTM

SEQ ID NO: 3671 - protein, 7 aa, Artificial Sequence
  Description of Artificial Sequence: Synthetic peptide
HTTTIHG

SEQ ID NO: 3672 - protein, 7 aa, Artificial Sequence
  Description of Artificial Sequence: Synthetic peptide
HTVRSGL

SEQ ID NO: 3673 - protein, 7 aa, Artificial Sequence
  Description of Artificial Sequence: Synthetic peptide
HTVTSAG

SEQ ID NO: 3674 - protein, 7 aa, Artificial Sequence
  Description of Artificial Sequence: Synthetic peptide
HTVVQSS

SEQ ID NO: 3675 - protein, 7 aa, Artificial Sequence
  Description of Artificial Sequence: Synthetic peptide
HTYSSED

SEQ ID NO: 3676 - protein, 7 aa, Artificial Sequence
  Description of Artificial Sequence: Synthetic peptide
HVDRSGA

SEQ ID NO: 3677 - protein, 7 aa, Artificial Sequence
  Description of Artificial Sequence: Synthetic peptide
HVDRTQF

SEQ ID NO: 3678 - protein, 7 aa, Artificial Sequence
  Description of Artificial Sequence: Synthetic peptide
HVGITSA

SEQ ID NO: 3679 - protein, 7 aa, Artificial Sequence
  Description of Artificial Sequence: Synthetic peptide
HVGYGPS

SEQ ID NO: 3680 - protein, 7 aa, Artificial Sequence
  Description of Artificial Sequence: Synthetic peptide
HVGYKAD

SEQ ID NO: 3681 - protein, 7 aa, Artificial Sequence
  Description of Artificial Sequence: Synthetic peptide
HVHTNSS

SEQ ID NO: 3682 - protein, 7 aa, Artificial Sequence
  Description of Artificial Sequence: Synthetic peptide
HVIDSAG

SEQ ID NO: 3683 - protein, 7 aa, Artificial Sequence
  Description of Artificial Sequence: Synthetic peptide
HVKALGS

SEQ ID NO: 3684 - protein, 7 aa, Artificial Sequence
  Description of Artificial Sequence: Synthetic peptide
HVKLSSN

SEQ ID NO: 3685 - protein, 7 aa, Artificial Sequence
  Description of Artificial Sequence: Synthetic peptide
HVLKNPT

SEQ ID NO: 3686 - protein, 7 aa, Artificial Sequence
  Description of Artificial Sequence: Synthetic peptide
HVLPTRP

SEQ ID NO: 3687 - protein, 7 aa, Artificial Sequence
  Description of Artificial Sequence: Synthetic peptide
HVLSPTR

SEQ ID NO: 3688 - protein, 7 aa, Artificial Sequence
  Description of Artificial Sequence: Synthetic peptide
HVMEASS

SEQ ID NO: 3689 - protein, 7 aa, Artificial Sequence
  Description of Artificial Sequence: Synthetic peptide
HVPMSMP

SEQ ID NO: 3690 - protein, 7 aa, Artificial Sequence
  Description of Artificial Sequence: Synthetic peptide
HVQNSQT

SEQ ID NO: 3691 - protein, 7 aa, Artificial Sequence
  Description of Artificial Sequence: Synthetic peptide
HVRGTGS

SEQ ID NO: 3692 - protein, 7 aa, Artificial Sequence
  Description of Artificial Sequence: Synthetic peptide
HVRPGFT

SEQ ID NO: 3693 - protein, 7 aa, Artificial Sequence
  Description of Artificial Sequence: Synthetic peptide
HVSEHTY

SEQ ID NO: 3694 - protein, 7 aa, Artificial Sequence
  Description of Artificial Sequence: Synthetic peptide
HVSGPRA

SEQ ID NO: 3695 - protein, 7 aa, Artificial Sequence
  Description of Artificial Sequence: Synthetic peptide
HVSHAMQ

SEQ ID NO: 3696 - protein, 7 aa, Artificial Sequence
  Description of Artificial Sequence: Synthetic peptide
HVSHSVI

SEQ ID NO: 3697 - protein, 7 aa, Artificial Sequence
  Description of Artificial Sequence: Synthetic peptide
HVSKLDT

SEQ ID NO: 3698 - protein, 7 aa, Artificial Sequence
  Description of Artificial Sequence: Synthetic peptide
HVSMSVP

SEQ ID NO: 3699 - protein, 7 aa, Artificial Sequence
  Description of Artificial Sequence: Synthetic peptide
HVSNIIS

SEQ ID NO: 3700 - protein, 7 aa, Artificial Sequence
  Description of Artificial Sequence: Synthetic peptide
HVSNQLN

SEQ ID NO: 3701 - protein, 7 aa, Artificial Sequence
  Description of Artificial Sequence: Synthetic peptide
HVSPPAN

SEQ ID NO: 3702 - protein, 7 aa, Artificial Sequence
  Description of Artificial Sequence: Synthetic peptide
HVSSASL

SEQ ID NO: 3703 - protein, 7 aa, Artificial Sequence
  Description of Artificial Sequence: Synthetic peptide
HVSSDSR

SEQ ID NO: 3704 - protein, 7 aa, Artificial Sequence
  Description of Artificial Sequence: Synthetic peptide
HVSSPSL

SEQ ID NO: 3705 - protein, 7 aa, Artificial Sequence
  Description of Artificial Sequence: Synthetic peptide
HVSTEPS

SEQ ID NO: 3706 - protein, 7 aa, Artificial Sequence
  Description of Artificial Sequence: Synthetic peptide
HVSYDLT

SEQ ID NO: 3707 - protein, 7 aa, Artificial Sequence
  Description of Artificial Sequence: Synthetic peptide
HVTPGFE

SEQ ID NO: 3708 - protein, 7 aa, Artificial Sequence
  Description of Artificial Sequence: Synthetic peptide
HVTSPYL

SEQ ID NO: 3709 - protein, 7 aa, Artificial Sequence
  Description of Artificial Sequence: Synthetic peptide
HVVGGSS

SEQ ID NO: 3710 - protein, 7 aa, Artificial Sequence
  Description of Artificial Sequence: Synthetic peptide
HVVSRFV

SEQ ID NO: 3711 - protein, 7 aa, Artificial Sequence
  Description of Artificial Sequence: Synthetic peptide
HYAPICE

SEQ ID NO: 3712 - protein, 7 aa, Artificial Sequence
  Description of Artificial Sequence: Synthetic peptide
HYDSNAP

SEQ ID NO: 3713 - protein, 7 aa, Artificial Sequence
  Description of Artificial Sequence: Synthetic peptide
HYEFVDK

SEQ ID NO: 3714 - protein, 7 aa, Artificial Sequence
  Description of Artificial Sequence: Synthetic peptide
HYESCNP

SEQ ID NO: 3715 - protein, 7 aa, Artificial Sequence
  Description of Artificial Sequence: Synthetic peptide
HYESNDV

SEQ ID NO: 3716 - protein, 7 aa, Artificial Sequence
  Description of Artificial Sequence: Synthetic peptide
HYFDMGP

SEQ ID NO: 3717 - protein, 7 aa, Artificial Sequence
  Description of Artificial Sequence: Synthetic peptide
HYGMVSA

SEQ ID NO: 3718 - protein, 7 aa, Artificial Sequence
  Description of Artificial Sequence: Synthetic peptide
HYGSTRE

SEQ ID NO: 3719 - protein, 7 aa, Artificial Sequence
  Description of Artificial Sequence: Synthetic peptide
HYINPTN

SEQ ID NO: 3720 - protein, 7 aa, Artificial Sequence
  Description of Artificial Sequence: Synthetic peptide
HYPPTYD

SEQ ID NO: 3721 - protein, 7 aa, Artificial Sequence
  Description of Artificial Sequence: Synthetic peptide
HYPSTSS

SEQ ID NO: 3722 - protein, 7 aa, Artificial Sequence
  Description of Artificial Sequence: Synthetic peptide
HYQISTT

SEQ ID NO: 3723 - protein, 7 aa, Artificial Sequence
  Description of Artificial Sequence: Synthetic peptide
HYSISGA

SEQ ID NO: 3724 - protein, 7 aa, Artificial Sequence
  Description of Artificial Sequence: Synthetic peptide
HYSPKPS

SEQ ID NO: 3725 - protein, 7 aa, Artificial Sequence
  Description of Artificial Sequence: Synthetic peptide
HYVEHRQ

SEQ ID NO: 3726 - protein, 7 aa, Artificial Sequence
  Description of Artificial Sequence: Synthetic peptide
IAAAAMT

SEQ ID NO: 3727 - protein, 7 aa, Artificial Sequence
  Description of Artificial Sequence: Synthetic peptide
IAANMHN

SEQ ID NO: 3728 - protein, 7 aa, Artificial Sequence
  Description of Artificial Sequence: Synthetic peptide
IAATPEQ

SEQ ID NO: 3729 - protein, 7 aa, Artificial Sequence
  Description of Artificial Sequence: Synthetic peptide
IACSSEL

SEQ ID NO: 3730 - protein, 7 aa, Artificial Sequence
  Description of Artificial Sequence: Synthetic peptide
IADVLGY

SEQ ID NO: 3731 - protein, 7 aa, Artificial Sequence
  Description of Artificial Sequence: Synthetic peptide
IAGISDI

SEQ ID NO: 3732 - protein, 7 aa, Artificial Sequence
  Description of Artificial Sequence: Synthetic peptide
IAHERSD

SEQ ID NO: 3733 - protein, 7 aa, Artificial Sequence
  Description of Artificial Sequence: Synthetic peptide
IAHRASA

SEQ ID NO: 3734 - protein, 7 aa, Artificial Sequence
  Description of Artificial Sequence: Synthetic peptide
IALPKVA

SEQ ID NO: 3735 - protein, 7 aa, Artificial Sequence
  Description of Artificial Sequence: Synthetic peptide
IANLTQS

SEQ ID NO: 3736 - protein, 7 aa, Artificial Sequence
  Description of Artificial Sequence: Synthetic peptide
IAPGVSS

SEQ ID NO: 3737 - protein, 7 aa, Artificial Sequence
  Description of Artificial Sequence: Synthetic peptide
IAPLTVS

SEQ ID NO: 3738 - protein, 7 aa, Artificial Sequence
  Description of Artificial Sequence: Synthetic peptide
IAPNKLT

SEQ ID NO: 3739 - protein, 7 aa, Artificial Sequence
  Description of Artificial Sequence: Synthetic peptide
IAQQHQI

SEQ ID NO: 3740 - protein, 7 aa, Artificial Sequence
  Description of Artificial Sequence: Synthetic peptide
IARAANF

SEQ ID NO: 3741 - protein, 7 aa, Artificial Sequence
  Description of Artificial Sequence: Synthetic peptide
IARGQPF

SEQ ID NO: 3742 - protein, 7 aa, Artificial Sequence
  Description of Artificial Sequence: Synthetic peptide
IARGYDN

SEQ ID NO: 3743 - protein, 7 aa, Artificial Sequence
  Description of Artificial Sequence: Synthetic peptide
IARHPTQ

SEQ ID NO: 3744 - protein, 7 aa, Artificial Sequence
  Description of Artificial Sequence: Synthetic peptide
IASEYRQ

SEQ ID NO: 3745 - protein, 7 aa, Artificial Sequence
  Description of Artificial Sequence: Synthetic peptide
IASSQLR

SEQ ID NO: 3746 - protein, 7 aa, Artificial Sequence
  Description of Artificial Sequence: Synthetic peptide
IATPESL

SEQ ID NO: 3747 - protein, 7 aa, Artificial Sequence
  Description of Artificial Sequence: Synthetic peptide
IAVHGRG

SEQ ID NO: 3748 - protein, 7 aa, Artificial Sequence
  Description of Artificial Sequence: Synthetic peptide
IDASKRF

SEQ ID NO: 3749 - protein, 7 aa, Artificial Sequence
  Description of Artificial Sequence: Synthetic peptide
IDGGSSD

SEQ ID NO: 3750 - protein, 7 aa, Artificial Sequence
  Description of Artificial Sequence: Synthetic peptide
IDGRVIG

SEQ ID NO: 3751 - protein, 7 aa, Artificial Sequence
  Description of Artificial Sequence: Synthetic peptide
IDKLLTF

SEQ ID NO: 3752 - protein, 7 aa, Artificial Sequence
  Description of Artificial Sequence: Synthetic peptide
IDLLVRS

SEQ ID NO: 3753 - protein, 7 aa, Artificial Sequence
  Description of Artificial Sequence: Synthetic peptide
IDNLHAG

SEQ ID NO: 3754 - protein, 7 aa, Artificial Sequence
  Description of Artificial Sequence: Synthetic peptide
IDNPVRP

SEQ ID NO: 3755 - protein, 7 aa, Artificial Sequence
  Description of Artificial Sequence: Synthetic peptide
IDNVKPV

SEQ ID NO: 3756 - protein, 7 aa, Artificial Sequence
  Description of Artificial Sequence: Synthetic peptide
IDSATTD

SEQ ID NO: 3757 - protein, 7 aa, Artificial Sequence
  Description of Artificial Sequence: Synthetic peptide
IDSHPSS

SEQ ID NO: 3758 - protein, 7 aa, Artificial Sequence
  Description of Artificial Sequence: Synthetic peptide
IDSSTNC

SEQ ID NO: 3759 - protein, 7 aa, Artificial Sequence
  Description of Artificial Sequence: Synthetic peptide
IDSYTPP

SEQ ID NO: 3760 - protein, 7 aa, Artificial Sequence
  Description of Artificial Sequence: Synthetic peptide
IDTISTS

SEQ ID NO: 3761 - protein, 7 aa, Artificial Sequence
  Description of Artificial Sequence: Synthetic peptide
IDTPRGT

SEQ ID NO: 3762 - protein, 7 aa, Artificial Sequence
  Description of Artificial Sequence: Synthetic peptide
IDTVPSR

SEQ ID NO: 3763 - protein, 7 aa, Artificial Sequence
  Description of Artificial Sequence: Synthetic peptide
IDVFTNA

SEQ ID NO: 3764 - protein, 7 aa, Artificial Sequence
  Description of Artificial Sequence: Synthetic peptide
IDYKSSS

SEQ ID NO: 3765 - protein, 7 aa, Artificial Sequence
  Description of Artificial Sequence: Synthetic peptide
IDYRAAA

SEQ ID NO: 3766 - protein, 7 aa, Artificial Sequence
  Description of Artificial Sequence: Synthetic peptide
IEASRVQ

SEQ ID NO: 3767 - protein, 7 aa, Artificial Sequence
  Description of Artificial Sequence: Synthetic peptide
IEKNLTL

SEQ ID NO: 3768 - protein, 7 aa, Artificial Sequence
  Description of Artificial Sequence: Synthetic peptide
IEKVNRV

SEQ ID NO: 3769 - protein, 7 aa, Artificial Sequence
  Description of Artificial Sequence: Synthetic peptide
IELASSC

SEQ ID NO: 3770 - protein, 7 aa, Artificial Sequence
  Description of Artificial Sequence: Synthetic peptide
IELKMTS

SEQ ID NO: 3771 - protein, 7 aa, Artificial Sequence
  Description of Artificial Sequence: Synthetic peptide
IEMLKTA

SEQ ID NO: 3772 - protein, 7 aa, Artificial Sequence
  Description of Artificial Sequence: Synthetic peptide
IEPKTHL

SEQ ID NO: 3773 - protein, 7 aa, Artificial Sequence
  Description of Artificial Sequence: Synthetic peptide
IEPSHYP

SEQ ID NO: 3774 - protein, 7 aa, Artificial Sequence
  Description of Artificial Sequence: Synthetic peptide
IERPTSP

SEQ ID NO: 3775 - protein, 7 aa, Artificial Sequence
  Description of Artificial Sequence: Synthetic peptide
IERTSSM

SEQ ID NO: 3776 - protein, 7 aa, Artificial Sequence
  Description of Artificial Sequence: Synthetic peptide
IESANLN

SEQ ID NO: 3777 - protein, 7 aa, Artificial Sequence
  Description of Artificial Sequence: Synthetic peptide
IESHLPR

SEQ ID NO: 3778 - protein, 7 aa, Artificial Sequence
  Description of Artificial Sequence: Synthetic peptide
IETAPDH

SEQ ID NO: 3779 - protein, 7 aa, Artificial Sequence
  Description of Artificial Sequence: Synthetic peptide
IETVNKT

SEQ ID NO: 3780 - protein, 7 aa, Artificial Sequence
  Description of Artificial Sequence: Synthetic peptide
IEVRTSI

SEQ ID NO: 3781 - protein, 7 aa, Artificial Sequence
  Description of Artificial Sequence: Synthetic peptide
IEWGWED

SEQ ID NO: 3782 - protein, 7 aa, Artificial Sequence
  Description of Artificial Sequence: Synthetic peptide
IFAGTGE

SEQ ID NO: 3783 - protein, 7 aa, Artificial Sequence
  Description of Artificial Sequence: Synthetic peptide
IFAGVLH

SEQ ID NO: 3784 - protein, 7 aa, Artificial Sequence
  Description of Artificial Sequence: Synthetic peptide
IFAVAAE

SEQ ID NO: 3785 - protein, 7 aa, Artificial Sequence
  Description of Artificial Sequence: Synthetic peptide
IFKPAMT

SEQ ID NO: 3786 - protein, 7 aa, Artificial Sequence
  Description of Artificial Sequence: Synthetic peptide
IFNNAAP

SEQ ID NO: 3787 - protein, 7 aa, Artificial Sequence
  Description of Artificial Sequence: Synthetic peptide
IFPLTGS

SEQ ID NO: 3788 - protein, 7 aa, Artificial Sequence
  Description of Artificial Sequence: Synthetic peptide
IFRDGVS

SEQ ID NO: 3789 - protein, 7 aa, Artificial Sequence
  Description of Artificial Sequence: Synthetic peptide
IFSAGPL

SEQ ID NO: 3790 - protein, 7 aa, Artificial Sequence
  Description of Artificial Sequence: Synthetic peptide
IFSHVGS

SEQ ID NO: 3791 - protein, 7 aa, Artificial Sequence
  Description of Artificial Sequence: Synthetic peptide
IFVPEPG

SEQ ID NO: 3792 - protein, 7 aa, Artificial Sequence
  Description of Artificial Sequence: Synthetic peptide
IGAGASM

SEQ ID NO: 3793 - protein, 7 aa, Artificial Sequence
  Description of Artificial Sequence: Synthetic peptide
IGAIADV

SEQ ID NO: 3794 - protein, 7 aa, Artificial Sequence
  Description of Artificial Sequence: Synthetic peptide
IGALVSP

SEQ ID NO: 3795 - protein, 7 aa, Artificial Sequence
  Description of Artificial Sequence: Synthetic peptide
IGAMSSA

SEQ ID NO: 3796 - protein, 7 aa, Artificial Sequence
  Description of Artificial Sequence: Synthetic peptide
IGAPYNS

SEQ ID NO: 3797 - protein, 7 aa, Artificial Sequence
  Description of Artificial Sequence: Synthetic peptide
IGASLLG

SEQ ID NO: 3798 - protein, 7 aa, Artificial Sequence
  Description of Artificial Sequence: Synthetic peptide
IGERRPV

SEQ ID NO: 3799 - protein, 7 aa, Artificial Sequence
  Description of Artificial Sequence: Synthetic peptide
IGGFVKA

SEQ ID NO: 3800 - protein, 7 aa, Artificial Sequence
  Description of Artificial Sequence: Synthetic peptide
IGGTMTH

SEQ ID NO: 3801 - protein, 7 aa, Artificial Sequence
  Description of Artificial Sequence: Synthetic peptide
IGHGHPN

SEQ ID NO: 3802 - protein, 7 aa, Artificial Sequence
  Description of Artificial Sequence: Synthetic peptide
IGHSDNT

SEQ ID NO: 3803 - protein, 7 aa, Artificial Sequence
  Description of Artificial Sequence: Synthetic peptide
IGKLLNT

SEQ ID NO: 3804 - protein, 7 aa, Artificial Sequence
  Description of Artificial Sequence: Synthetic peptide
IGKNHSS

SEQ ID NO: 3805 - protein, 7 aa, Artificial Sequence
  Description of Artificial Sequence: Synthetic peptide
IGKPGYL

SEQ ID NO: 3806 - protein, 7 aa, Artificial Sequence
  Description of Artificial Sequence: Synthetic peptide
IGLAKTL

SEQ ID NO: 3807 - protein, 7 aa, Artificial Sequence
  Description of Artificial Sequence: Synthetic peptide
IGLTSQV

SEQ ID NO: 3808 - protein, 7 aa, Artificial Sequence
  Description of Artificial Sequence: Synthetic peptide
IGMHSQS

SEQ ID NO: 3809 - protein, 7 aa, Artificial Sequence
  Description of Artificial Sequence: Synthetic peptide
IGNSRLG

SEQ ID NO: 3810 - protein, 7 aa, Artificial Sequence
  Description of Artificial Sequence: Synthetic peptide
IGQFSRV

SEQ ID NO: 3811 - protein, 7 aa, Artificial Sequence
  Description of Artificial Sequence: Synthetic peptide
IGRDMHA

SEQ ID NO: 3812 - protein, 7 aa, Artificial Sequence
  Description of Artificial Sequence: Synthetic peptide
IGRPSYE

SEQ ID NO: 3813 - protein, 7 aa, Artificial Sequence
  Description of Artificial Sequence: Synthetic peptide
IGRQTGI

SEQ ID NO: 3814 - protein, 7 aa, Artificial Sequence
  Description of Artificial Sequence: Synthetic peptide
IGRSEGT

SEQ ID NO: 3815 - protein, 7 aa, Artificial Sequence
  Description of Artificial Sequence: Synthetic peptide
IGRSPSP

SEQ ID NO: 3816 - protein, 7 aa, Artificial Sequence
  Description of Artificial Sequence: Synthetic peptide
IGSHHSN

SEQ ID NO: 3817 - protein, 7 aa, Artificial Sequence
  Description of Artificial Sequence: Synthetic peptide
IGSNALS

SEQ ID NO: 3818 - protein, 7 aa, Artificial Sequence
  Description of Artificial Sequence: Synthetic peptide
IGSTMYQ

SEQ ID NO: 3819 - protein, 7 aa, Artificial Sequence
  Description of Artificial Sequence: Synthetic peptide
IGTSTYV

SEQ ID NO: 3820 - protein, 7 aa, Artificial Sequence
  Description of Artificial Sequence: Synthetic peptide
IGTTMKG

SEQ ID NO: 3821 - protein, 7 aa, Artificial Sequence
  Description of Artificial Sequence: Synthetic peptide
IGVKTLP

SEQ ID NO: 3822 - protein, 7 aa, Artificial Sequence
  Description of Artificial Sequence: Synthetic peptide
IGVLHLP

SEQ ID NO: 3823 - protein, 7 aa, Artificial Sequence
  Description of Artificial Sequence: Synthetic peptide
IHAASTD

SEQ ID NO: 3824 - protein, 7 aa, Artificial Sequence
  Description of Artificial Sequence: Synthetic peptide
IHANWID

SEQ ID NO: 3825 - protein, 7 aa, Artificial Sequence
  Description of Artificial Sequence: Synthetic peptide
IHDFTSV

SEQ ID NO: 3826 - protein, 7 aa, Artificial Sequence
  Description of Artificial Sequence: Synthetic peptide
IHELSGL

SEQ ID NO: 3827 - protein, 7 aa, Artificial Sequence
  Description of Artificial Sequence: Synthetic peptide
IHFQSSQ

SEQ ID NO: 3828 - protein, 7 aa, Artificial Sequence
  Description of Artificial Sequence: Synthetic peptide
IHGGSYT

SEQ ID NO: 3829 - protein, 7 aa, Artificial Sequence
  Description of Artificial Sequence: Synthetic peptide
IHGSTDR

SEQ ID NO: 3830 - protein, 7 aa, Artificial Sequence
  Description of Artificial Sequence: Synthetic peptide
IHHDPAS

SEQ ID NO: 3831 - protein, 7 aa, Artificial Sequence
  Description of Artificial Sequence: Synthetic peptide
IHLPTSL

SEQ ID NO: 3832 - protein, 7 aa, Artificial Sequence
  Description of Artificial Sequence: Synthetic peptide
IHNRPLM

SEQ ID NO: 3833 - protein, 7 aa, Artificial Sequence
  Description of Artificial Sequence: Synthetic peptide
IHNTLAA

SEQ ID NO: 3834 - protein, 7 aa, Artificial Sequence
  Description of Artificial Sequence: Synthetic peptide
IHNVVVQ

SEQ ID NO: 3835 - protein, 7 aa, Artificial Sequence
  Description of Artificial Sequence: Synthetic peptide
IHPGRVA

SEQ ID NO: 3836 - protein, 7 aa, Artificial Sequence
  Description of Artificial Sequence: Synthetic peptide
IHPTRQG

SEQ ID NO: 3837 - protein, 7 aa, Artificial Sequence
  Description of Artificial Sequence: Synthetic peptide
IHQAGQP

SEQ ID NO: 3838 - protein, 7 aa, Artificial Sequence
  Description of Artificial Sequence: Synthetic peptide
IHQSSES

SEQ ID NO: 3839 - protein, 7 aa, Artificial Sequence
  Description of Artificial Sequence: Synthetic peptide
IHRVITS

SEQ ID NO: 3840 - protein, 7 aa, Artificial Sequence
  Description of Artificial Sequence: Synthetic peptide
IHSEGSL

SEQ ID NO: 3841 - protein, 7 aa, Artificial Sequence
  Description of Artificial Sequence: Synthetic peptide
IHSLQQE

SEQ ID NO: 3842 - protein, 7 aa, Artificial Sequence
  Description of Artificial Sequence: Synthetic peptide
IHSSIDF

SEQ ID NO: 3843 - protein, 7 aa, Artificial Sequence
  Description of Artificial Sequence: Synthetic peptide
IHSSPAA

SEQ ID NO: 3844 - protein, 7 aa, Artificial Sequence
  Description of Artificial Sequence: Synthetic peptide
IHSYDRS

SEQ ID NO: 3845 - protein, 7 aa, Artificial Sequence
  Description of Artificial Sequence: Synthetic peptide
IHTAVEL

SEQ ID NO: 3846 - protein, 7 aa, Artificial Sequence
  Description of Artificial Sequence: Synthetic peptide
IHTGNYM

SEQ ID NO: 3847 - protein, 7 aa, Artificial Sequence
  Description of Artificial Sequence: Synthetic peptide
IHTNAPP

SEQ ID NO: 3848 - protein, 7 aa, Artificial Sequence
  Description of Artificial Sequence: Synthetic peptide
IHTTQRT

SEQ ID NO: 3849 - protein, 7 aa, Artificial Sequence
  Description of Artificial Sequence: Synthetic peptide
IIAEHPA

SEQ ID NO: 3850 - protein, 7 aa, Artificial Sequence
  Description of Artificial Sequence: Synthetic peptide
IIARLPP

SEQ ID NO: 3851 - protein, 7 aa, Artificial Sequence
  Description of Artificial Sequence: Synthetic peptide
IIDNHIR

SEQ ID NO: 3852 - protein, 7 aa, Artificial Sequence
  Description of Artificial Sequence: Synthetic peptide
IIFQDMP

SEQ ID NO: 3853 - protein, 7 aa, Artificial Sequence
  Description of Artificial Sequence: Synthetic peptide
IIGANEP

SEQ ID NO: 3854 - protein, 7 aa, Artificial Sequence
  Description of Artificial Sequence: Synthetic peptide
IIGKGTG

SEQ ID NO: 3855 - protein, 7 aa, Artificial Sequence
  Description of Artificial Sequence: Synthetic peptide
IIHDTHN

SEQ ID NO: 3856 - protein, 7 aa, Artificial Sequence
  Description of Artificial Sequence: Synthetic peptide
IIHEARP

SEQ ID NO: 3857 - protein, 7 aa, Artificial Sequence
  Description of Artificial Sequence: Synthetic peptide
IIRDSQL

SEQ ID NO: 3858 - protein, 7 aa, Artificial Sequence
  Description of Artificial Sequence: Synthetic peptide
IISLTTS

SEQ ID NO: 3859 - protein, 7 aa, Artificial Sequence
  Description of Artificial Sequence: Synthetic peptide
IKDAGSP

SEQ ID NO: 3860 - protein, 7 aa, Artificial Sequence
  Description of Artificial Sequence: Synthetic peptide
IKDAQPW

SEQ ID NO: 3861 - protein, 7 aa, Artificial Sequence
  Description of Artificial Sequence: Synthetic peptide
IKDQWNM

SEQ ID NO: 3862 - protein, 7 aa, Artificial Sequence
  Description of Artificial Sequence: Synthetic peptide
IKFPTAD

SEQ ID NO: 3863 - protein, 7 aa, Artificial Sequence
  Description of Artificial Sequence: Synthetic peptide
IKIEDPR

SEQ ID NO: 3864 - protein, 7 aa, Artificial Sequence
  Description of Artificial Sequence: Synthetic peptide
IKMAQGF

SEQ ID NO: 3865 - protein, 7 aa, Artificial Sequence
  Description of Artificial Sequence: Synthetic peptide
IKNLASH

SEQ ID NO: 3866 - protein, 7 aa, Artificial Sequence
  Description of Artificial Sequence: Synthetic peptide
IKPIGGV

SEQ ID NO: 3867 - protein, 7 aa, Artificial Sequence
  Description of Artificial Sequence: Synthetic peptide
IKPMSGT

SEQ ID NO: 3868 - protein, 7 aa, Artificial Sequence
  Description of Artificial Sequence: Synthetic peptide
IKQPLHN

SEQ ID NO: 3869 - protein, 7 aa, Artificial Sequence
  Description of Artificial Sequence: Synthetic peptide
IKRTLSD

SEQ ID NO: 3870 - protein, 7 aa, Artificial Sequence
  Description of Artificial Sequence: Synthetic peptide
IKSDDGS

SEQ ID NO: 3871 - protein, 7 aa, Artificial Sequence
  Description of Artificial Sequence: Synthetic peptide
IKSEGSL

SEQ ID NO: 3872 - protein, 7 aa, Artificial Sequence
  Description of Artificial Sequence: Synthetic peptide
IKTEWSH

SEQ ID NO: 3873 - protein, 7 aa, Artificial Sequence
  Description of Artificial Sequence: Synthetic peptide
IKTFTSS

SEQ ID NO: 3874 - protein, 7 aa, Artificial Sequence
  Description of Artificial Sequence: Synthetic peptide
ILDFLPD

SEQ ID NO: 3875 - protein, 7 aa, Artificial Sequence
  Description of Artificial Sequence: Synthetic peptide
ILGGLDR

SEQ ID NO: 3876 - protein, 7 aa, Artificial Sequence
  Description of Artificial Sequence: Synthetic peptide
ILGNTRE

SEQ ID NO: 3877 - protein, 7 aa, Artificial Sequence
  Description of Artificial Sequence: Synthetic peptide
ILGRSAA

SEQ ID NO: 3878 - protein, 7 aa, Artificial Sequence
  Description of Artificial Sequence: Synthetic peptide
ILGTRPL

SEQ ID NO: 3879 - protein, 7 aa, Artificial Sequence
  Description of Artificial Sequence: Synthetic peptide
ILGTSVQ

SEQ ID NO: 3880 - protein, 7 aa, Artificial Sequence
  Description of Artificial Sequence: Synthetic peptide
ILHGRGA

SEQ ID NO: 3881 - protein, 7 aa, Artificial Sequence
  Description of Artificial Sequence: Synthetic peptide
ILHLVRL

SEQ ID NO: 3882 - protein, 7 aa, Artificial Sequence
  Description of Artificial Sequence: Synthetic peptide
ILHSPTV

SEQ ID NO: 3883 - protein, 7 aa, Artificial Sequence
  Description of Artificial Sequence: Synthetic peptide
ILHVEMR

SEQ ID NO: 3884 - protein, 7 aa, Artificial Sequence
  Description of Artificial Sequence: Synthetic peptide
ILKHIGL

SEQ ID NO: 3885 - protein, 7 aa, Artificial Sequence
  Description of Artificial Sequence: Synthetic peptide
ILKQQAN

SEQ ID NO: 3886 - protein, 7 aa, Artificial Sequence
  Description of Artificial Sequence: Synthetic peptide
ILLDDES

SEQ ID NO: 3887 - protein, 7 aa, Artificial Sequence
  Description of Artificial Sequence: Synthetic peptide
ILLHPRG

SEQ ID NO: 3888 - protein, 7 aa, Artificial Sequence
  Description of Artificial Sequence: Synthetic peptide
ILLMGTS

SEQ ID NO: 3889 - protein, 7 aa, Artificial Sequence
  Description of Artificial Sequence: Synthetic peptide
ILLRKDP

SEQ ID NO: 3890 - protein, 7 aa, Artificial Sequence
  Description of Artificial Sequence: Synthetic peptide
ILLSEGH

SEQ ID NO: 3891 - protein, 7 aa, Artificial Sequence
  Description of Artificial Sequence: Synthetic peptide
ILLSIRD

SEQ ID NO: 3892 - protein, 7 aa, Artificial Sequence
  Description of Artificial Sequence: Synthetic peptide
ILMSAQS

SEQ ID NO: 3893 - protein, 7 aa, Artificial Sequence
  Description of Artificial Sequence: Synthetic peptide
ILMVDDT

SEQ ID NO: 3894 - protein, 7 aa, Artificial Sequence
  Description of Artificial Sequence: Synthetic peptide
ILNDRSA

SEQ ID NO: 3895 - protein, 7 aa, Artificial Sequence
  Description of Artificial Sequence: Synthetic peptide
ILNHGKG

SEQ ID NO: 3896 - protein, 7 aa, Artificial Sequence
  Description of Artificial Sequence: Synthetic peptide
ILNKPLS

SEQ ID NO: 3897 - protein, 7 aa, Artificial Sequence
  Description of Artificial Sequence: Synthetic peptide
ILPHTTT

SEQ ID NO: 3898 - protein, 7 aa, Artificial Sequence
  Description of Artificial Sequence: Synthetic peptide
ILPNSMP

SEQ ID NO: 3899 - protein, 7 aa, Artificial Sequence
  Description of Artificial Sequence: Synthetic peptide
ILPNTGP

SEQ ID NO: 3900 - protein, 7 aa, Artificial Sequence
  Description of Artificial Sequence: Synthetic peptide
ILPPITD

SEQ ID NO: 3901 - protein, 7 aa, Artificial Sequence
  Description of Artificial Sequence: Synthetic peptide
ILPSLTA

SEQ ID NO: 3902 - protein, 7 aa, Artificial Sequence
  Description of Artificial Sequence: Synthetic peptide
ILPSSFS

SEQ ID NO: 3903 - protein, 7 aa, Artificial Sequence
  Description of Artificial Sequence: Synthetic peptide
ILPYSSP

SEQ ID NO: 3904 - protein, 7 aa, Artificial Sequence
  Description of Artificial Sequence: Synthetic peptide
ILQAHQT

SEQ ID NO: 3905 - protein, 7 aa, Artificial Sequence
  Description of Artificial Sequence: Synthetic peptide
ILQSEFT

SEQ ID NO: 3906 - protein, 7 aa, Artificial Sequence
  Description of Artificial Sequence: Synthetic peptide
ILRGDGP

SEQ ID NO: 3907 - protein, 7 aa, Artificial Sequence
  Description of Artificial Sequence: Synthetic peptide
ILRGNGS

SEQ ID NO: 3908 - protein, 7 aa, Artificial Sequence
  Description of Artificial Sequence: Synthetic peptide
ILRTEYK

SEQ ID NO: 3909 - protein, 7 aa, Artificial Sequence
  Description of Artificial Sequence: Synthetic peptide
ILRVHTP

SEQ ID NO: 3910 - protein, 7 aa, Artificial Sequence
  Description of Artificial Sequence: Synthetic peptide
ILSERTP

SEQ ID NO: 3911 - protein, 7 aa, Artificial Sequence
  Description of Artificial Sequence: Synthetic peptide
ILSMDTA

SEQ ID NO: 3912 - protein, 7 aa, Artificial Sequence
  Description of Artificial Sequence: Synthetic peptide
ILTGSHA

SEQ ID NO: 3913 - protein, 7 aa, Artificial Sequence
  Description of Artificial Sequence: Synthetic peptide
ILTKDVS

SEQ ID NO: 3914 - protein, 7 aa, Artificial Sequence
  Description of Artificial Sequence: Synthetic peptide
ILTKSPT

SEQ ID NO: 3915 - protein, 7 aa, Artificial Sequence
  Description of Artificial Sequence: Synthetic peptide
ILTRVSP

SEQ ID NO: 3916 - protein, 7 aa, Artificial Sequence
  Description of Artificial Sequence: Synthetic peptide
ILTSVTK

SEQ ID NO: 3917 - protein, 7 aa, Artificial Sequence
  Description of Artificial Sequence: Synthetic peptide
ILVSELR

SEQ ID NO: 3918 - protein, 7 aa, Artificial Sequence
  Description of Artificial Sequence: Synthetic peptide
IMAPTTQ

SEQ ID NO: 3919 - protein, 7 aa, Artificial Sequence
  Description of Artificial Sequence: Synthetic peptide
IMDAHIA

SEQ ID NO: 3920 - protein, 7 aa, Artificial Sequence
  Description of Artificial Sequence: Synthetic peptide
IMDVKFH

SEQ ID NO: 3921 - protein, 7 aa, Artificial Sequence
  Description of Artificial Sequence: Synthetic peptide
IMEVRGP

SEQ ID NO: 3922 - protein, 7 aa, Artificial Sequence
  Description of Artificial Sequence: Synthetic peptide
IMGEPRK

SEQ ID NO: 3923 - protein, 7 aa, Artificial Sequence
  Description of Artificial Sequence: Synthetic peptide
IMGSAPS

SEQ ID NO: 3924 - protein, 7 aa, Artificial Sequence
  Description of Artificial Sequence: Synthetic peptide
IMGSAPY

SEQ ID NO: 3925 - protein, 7 aa, Artificial Sequence
  Description of Artificial Sequence: Synthetic peptide
IMLPDAD

SEQ ID NO: 3926 - protein, 7 aa, Artificial Sequence
  Description of Artificial Sequence: Synthetic peptide
IMNANRA

SEQ ID NO: 3927 - protein, 7 aa, Artificial Sequence
  Description of Artificial Sequence: Synthetic peptide
IMNRISA

SEQ ID NO: 3928 - protein, 7 aa, Artificial Sequence
  Description of Artificial Sequence: Synthetic peptide
IMPNSSD

SEQ ID NO: 3929 - protein, 7 aa, Artificial Sequence
  Description of Artificial Sequence: Synthetic peptide
IMPSSTN

SEQ ID NO: 3930 - protein, 7 aa, Artificial Sequence
  Description of Artificial Sequence: Synthetic peptide
IMRPSDP

SEQ ID NO: 3931 - protein, 7 aa, Artificial Sequence
  Description of Artificial Sequence: Synthetic peptide
IMSTTTL

SEQ ID NO: 3932 - protein, 7 aa, Artificial Sequence
  Description of Artificial Sequence: Synthetic peptide
IMTMTPS

SEQ ID NO: 3933 - protein, 7 aa, Artificial Sequence
  Description of Artificial Sequence: Synthetic peptide
INAQTHL

SEQ ID NO: 3934 - protein, 7 aa, Artificial Sequence
  Description of Artificial Sequence: Synthetic peptide
INAYHVP

SEQ ID NO: 3935 - protein, 7 aa, Artificial Sequence
  Description of Artificial Sequence: Synthetic peptide
INEHVRL

SEQ ID NO: 3936 - protein, 7 aa, Artificial Sequence
  Description of Artificial Sequence: Synthetic peptide
INESNRG

SEQ ID NO: 3937 - protein, 7 aa, Artificial Sequence
  Description of Artificial Sequence: Synthetic peptide
INGSDRQ

SEQ ID NO: 3938 - protein, 7 aa, Artificial Sequence
  Description of Artificial Sequence: Synthetic peptide
INGTAKH

SEQ ID NO: 3939 - protein, 7 aa, Artificial Sequence
  Description of Artificial Sequence: Synthetic peptide
INHSSMG

SEQ ID NO: 3940 - protein, 7 aa, Artificial Sequence
  Description of Artificial Sequence: Synthetic peptide
INIASAG

SEQ ID NO: 3941 - protein, 7 aa, Artificial Sequence
  Description of Artificial Sequence: Synthetic peptide
INKPSNG

SEQ ID NO: 3942 - protein, 7 aa, Artificial Sequence
  Description of Artificial Sequence: Synthetic peptide
INLHVKS

SEQ ID NO: 3943 - protein, 7 aa, Artificial Sequence
  Description of Artificial Sequence: Synthetic peptide
INLRPAA

SEQ ID NO: 3944 - protein, 7 aa, Artificial Sequence
  Description of Artificial Sequence: Synthetic peptide
INLTPRF

SEQ ID NO: 3945 - protein, 7 aa, Artificial Sequence
  Description of Artificial Sequence: Synthetic peptide
INMAGVH

SEQ ID NO: 3946 - protein, 7 aa, Artificial Sequence
  Description of Artificial Sequence: Synthetic peptide
INMSTGS

SEQ ID NO: 3947 - protein, 7 aa, Artificial Sequence
  Description of Artificial Sequence: Synthetic peptide
INPQNRT

SEQ ID NO: 3948 - protein, 7 aa, Artificial Sequence
  Description of Artificial Sequence: Synthetic peptide
INRGVNS

SEQ ID NO: 3949 - protein, 7 aa, Artificial Sequence
  Description of Artificial Sequence: Synthetic peptide
INRTTME

SEQ ID NO: 3950 - protein, 7 aa, Artificial Sequence
  Description of Artificial Sequence: Synthetic peptide
INRVTAE

SEQ ID NO: 3951 - protein, 7 aa, Artificial Sequence
  Description of Artificial Sequence: Synthetic peptide
INSAAVL

SEQ ID NO: 3952 - protein, 7 aa, Artificial Sequence
  Description of Artificial Sequence: Synthetic peptide
INSGRSN

SEQ ID NO: 3953 - protein, 7 aa, Artificial Sequence
  Description of Artificial Sequence: Synthetic peptide
INSHTLQ

SEQ ID NO: 3954 - protein, 7 aa, Artificial Sequence
  Description of Artificial Sequence: Synthetic peptide
INSQKPP

SEQ ID NO: 3955 - protein, 7 aa, Artificial Sequence
  Description of Artificial Sequence: Synthetic peptide
INSRNGV

SEQ ID NO: 3956 - protein, 7 aa, Artificial Sequence
  Description of Artificial Sequence: Synthetic peptide
INTLGNS

SEQ ID NO: 3957 - protein, 7 aa, Artificial Sequence
  Description of Artificial Sequence: Synthetic peptide
INTPGYT

SEQ ID NO: 3958 - protein, 7 aa, Artificial Sequence
  Description of Artificial Sequence: Synthetic peptide
INVLRSA

SEQ ID NO: 3959 - protein, 7 aa, Artificial Sequence
  Description of Artificial Sequence: Synthetic peptide
IPANSQV

SEQ ID NO: 3960 - protein, 7 aa, Artificial Sequence
  Description of Artificial Sequence: Synthetic peptide
IPASSSW

SEQ ID NO: 3961 - protein, 7 aa, Artificial Sequence
  Description of Artificial Sequence: Synthetic peptide
IPDLKRT

SEQ ID NO: 3962 - protein, 7 aa, Artificial Sequence
  Description of Artificial Sequence: Synthetic peptide
IPEGLPL

SEQ ID NO: 3963 - protein, 7 aa, Artificial Sequence
  Description of Artificial Sequence: Synthetic peptide
IPGFPKS

SEQ ID NO: 3964 - protein, 7 aa, Artificial Sequence
  Description of Artificial Sequence: Synthetic peptide
IPGTELQ

SEQ ID NO: 3965 - protein, 7 aa, Artificial Sequence
  Description of Artificial Sequence: Synthetic peptide
IPHNQAY

SEQ ID NO: 3966 - protein, 7 aa, Artificial Sequence
  Description of Artificial Sequence: Synthetic peptide
IPHPANS

SEQ ID NO: 3967 - protein, 7 aa, Artificial Sequence
  Description of Artificial Sequence: Synthetic peptide
IPHTQTQ

SEQ ID NO: 3968 - protein, 7 aa, Artificial Sequence
  Description of Artificial Sequence: Synthetic peptide
IPIGYKT

SEQ ID NO: 3969 - protein, 7 aa, Artificial Sequence
  Description of Artificial Sequence: Synthetic peptide
IPIKNGM

SEQ ID NO: 3970 - protein, 7 aa, Artificial Sequence
  Description of Artificial Sequence: Synthetic peptide
IPIPVAM

SEQ ID NO: 3971 - protein, 7 aa, Artificial Sequence
  Description of Artificial Sequence: Synthetic peptide
IPKTRPE

SEQ ID NO: 3972 - protein, 7 aa, Artificial Sequence
  Description of Artificial Sequence: Synthetic peptide
IPLKAYG

SEQ ID NO: 3973 - protein, 7 aa, Artificial Sequence
  Description of Artificial Sequence: Synthetic peptide
IPLPNDG

SEQ ID NO: 3974 - protein, 7 aa, Artificial Sequence
  Description of Artificial Sequence: Synthetic peptide
IPLTSHT

SEQ ID NO: 3975 - protein, 7 aa, Artificial Sequence
  Description of Artificial Sequence: Synthetic peptide
IPMSAAK

SEQ ID NO: 3976 - protein, 7 aa, Artificial Sequence
  Description of Artificial Sequence: Synthetic peptide
IPNFVHS

SEQ ID NO: 3977 - protein, 7 aa, Artificial Sequence
  Description of Artificial Sequence: Synthetic peptide
IPNHKSI

SEQ ID NO: 3978 - protein, 7 aa, Artificial Sequence
  Description of Artificial Sequence: Synthetic peptide
IPNKTPF

SEQ ID NO: 3979 - protein, 7 aa, Artificial Sequence
  Description of Artificial Sequence: Synthetic peptide
IPNLKIS

SEQ ID NO: 3980 - protein, 7 aa, Artificial Sequence
  Description of Artificial Sequence: Synthetic peptide
IPNPPMA

SEQ ID NO: 3981 - protein, 7 aa, Artificial Sequence
  Description of Artificial Sequence: Synthetic peptide
IPNRHLS

SEQ ID NO: 3982 - protein, 7 aa, Artificial Sequence
  Description of Artificial Sequence: Synthetic peptide
IPNVSHQ

SEQ ID NO: 3983 - protein, 7 aa, Artificial Sequence
  Description of Artificial Sequence: Synthetic peptide
IPNYAVS

SEQ ID NO: 3984 - protein, 7 aa, Artificial Sequence
  Description of Artificial Sequence: Synthetic peptide
IPPRSNS

SEQ ID NO: 3985 - protein, 7 aa, Artificial Sequence
  Description of Artificial Sequence: Synthetic peptide
IPQASLM

SEQ ID NO: 3986 - protein, 7 aa, Artificial Sequence
  Description of Artificial Sequence: Synthetic peptide
IPQNRIL

SEQ ID NO: 3987 - protein, 7 aa, Artificial Sequence
  Description of Artificial Sequence: Synthetic peptide
IPQPVHL

SEQ ID NO: 3988 - protein, 7 aa, Artificial Sequence
  Description of Artificial Sequence: Synthetic peptide
IPRADAR

SEQ ID NO: 3989 - protein, 7 aa, Artificial Sequence
  Description of Artificial Sequence: Synthetic peptide
IPRFSTM

SEQ ID NO: 3990 - protein, 7 aa, Artificial Sequence
  Description of Artificial Sequence: Synthetic peptide
IPRPSVH

SEQ ID NO: 3991 - protein, 7 aa, Artificial Sequence
  Description of Artificial Sequence: Synthetic peptide
IPRSNIS

SEQ ID NO: 3992 - protein, 7 aa, Artificial Sequence
  Description of Artificial Sequence: Synthetic peptide
IPRTALQ

SEQ ID NO: 3993 - protein, 7 aa, Artificial Sequence
  Description of Artificial Sequence: Synthetic peptide
IPSFKRE

SEQ ID NO: 3994 - protein, 7 aa, Artificial Sequence
  Description of Artificial Sequence: Synthetic peptide
IPSFSKP

SEQ ID NO: 3995 - protein, 7 aa, Artificial Sequence
  Description of Artificial Sequence: Synthetic peptide
IPSNCKP

SEQ ID NO: 3996 - protein, 7 aa, Artificial Sequence
  Description of Artificial Sequence: Synthetic peptide
IPSPSHE

SEQ ID NO: 3997 - protein, 7 aa, Artificial Sequence
  Description of Artificial Sequence: Synthetic peptide
IPSRYAM

SEQ ID NO: 3998 - protein, 7 aa, Artificial Sequence
  Description of Artificial Sequence: Synthetic peptide
IPSVPVS

SEQ ID NO: 3999 - protein, 7 aa, Artificial Sequence
  Description of Artificial Sequence: Synthetic peptide
IPTISHG

SEQ ID NO: 4000 - protein, 7 aa, Artificial Sequence
  Description of Artificial Sequence: Synthetic peptide
IPTLPAM

SEQ ID NO: 4001 - protein, 7 aa, Artificial Sequence
  Description of Artificial Sequence: Synthetic peptide
IPTPNNV

SEQ ID NO: 4002 - protein, 7 aa, Artificial Sequence
  Description of Artificial Sequence: Synthetic peptide
IPTTALG

SEQ ID NO: 4003 - protein, 7 aa, Artificial Sequence
  Description of Artificial Sequence: Synthetic peptide
IPVFRSE

SEQ ID NO: 4004 - protein, 7 aa, Artificial Sequence
  Description of Artificial Sequence: Synthetic peptide
IPVGQYN

SEQ ID NO: 4005 - protein, 7 aa, Artificial Sequence
  Description of Artificial Sequence: Synthetic peptide
IPVRLTQ

SEQ ID NO: 4006 - protein, 7 aa, Artificial Sequence
  Description of Artificial Sequence: Synthetic peptide
IPYMLDP

SEQ ID NO: 4007 - protein, 7 aa, Artificial Sequence
  Description of Artificial Sequence: Synthetic peptide
IQAVSSL

SEQ ID NO: 4008 - protein, 7 aa, Artificial Sequence
  Description of Artificial Sequence: Synthetic peptide
IQDETVS

SEQ ID NO: 4009 - protein, 7 aa, Artificial Sequence
  Description of Artificial Sequence: Synthetic peptide
IQESARM

SEQ ID NO: 4010 - protein, 7 aa, Artificial Sequence
  Description of Artificial Sequence: Synthetic peptide
IQFRSAT

SEQ ID NO: 4011 - protein, 7 aa, Artificial Sequence
  Description of Artificial Sequence: Synthetic peptide
IQFVPVD

SEQ ID NO: 4012 - protein, 7 aa, Artificial Sequence
  Description of Artificial Sequence: Synthetic peptide
IQGLSAL

SEQ ID NO: 4013 - protein, 7 aa, Artificial Sequence
  Description of Artificial Sequence: Synthetic peptide
IQGRLTT

SEQ ID NO: 4014 - protein, 7 aa, Artificial Sequence
  Description of Artificial Sequence: Synthetic peptide
IQHQPLT

SEQ ID NO: 4015 - protein, 7 aa, Artificial Sequence
  Description of Artificial Sequence: Synthetic peptide
IQIKSLN

SEQ ID NO: 4016 - protein, 7 aa, Artificial Sequence
  Description of Artificial Sequence: Synthetic peptide
IQIQERR

SEQ ID NO: 4017 - protein, 7 aa, Artificial Sequence
  Description of Artificial Sequence: Synthetic peptide
IQLKSTV

SEQ ID NO: 4018 - protein, 7 aa, Artificial Sequence
  Description of Artificial Sequence: Synthetic peptide
IQLRINA

SEQ ID NO: 4019 - protein, 7 aa, Artificial Sequence
  Description of Artificial Sequence: Synthetic peptide
IQLSAAS

SEQ ID NO: 4020 - protein, 7 aa, Artificial Sequence
  Description of Artificial Sequence: Synthetic peptide
IQNGYQF

SEQ ID NO: 4021 - protein, 7 aa, Artificial Sequence
  Description of Artificial Sequence: Synthetic peptide
IQNHHQL

SEQ ID NO: 4022 - protein, 7 aa, Artificial Sequence
  Description of Artificial Sequence: Synthetic peptide
IQNTPPT

SEQ ID NO: 4023 - protein, 7 aa, Artificial Sequence
  Description of Artificial Sequence: Synthetic peptide
IQNVPLH

SEQ ID NO: 4024 - protein, 7 aa, Artificial Sequence
  Description of Artificial Sequence: Synthetic peptide
IQRPSDI

SEQ ID NO: 4025 - protein, 7 aa, Artificial Sequence
  Description of Artificial Sequence: Synthetic peptide
IQRSVEA

SEQ ID NO: 4026 - protein, 7 aa, Artificial Sequence
  Description of Artificial Sequence: Synthetic peptide
IQRVAQG

SEQ ID NO: 4027 - protein, 7 aa, Artificial Sequence
  Description of Artificial Sequence: Synthetic peptide
IQSINLP

SEQ ID NO: 4028 - protein, 7 aa, Artificial Sequence
  Description of Artificial Sequence: Synthetic peptide
IQSPLLA

SEQ ID NO: 4029 - protein, 7 aa, Artificial Sequence
  Description of Artificial Sequence: Synthetic peptide
IQSTRLV

SEQ ID NO: 4030 - protein, 7 aa, Artificial Sequence
  Description of Artificial Sequence: Synthetic peptide
IQSYNTL

SEQ ID NO: 4031 - protein, 7 aa, Artificial Sequence
  Description of Artificial Sequence: Synthetic peptide
IQTRSDM

SEQ ID NO: 4032 - protein, 7 aa, Artificial Sequence
  Description of Artificial Sequence: Synthetic peptide
IQTVSAV

SEQ ID NO: 4033 - protein, 7 aa, Artificial Sequence
  Description of Artificial Sequence: Synthetic peptide
IRALAGH

SEQ ID NO: 4034 - protein, 7 aa, Artificial Sequence
  Description of Artificial Sequence: Synthetic peptide
IRASQTI

SEQ ID NO: 4035 - protein, 7 aa, Artificial Sequence
  Description of Artificial Sequence: Synthetic peptide
IRATSSE

SEQ ID NO: 4036 - protein, 7 aa, Artificial Sequence
  Description of Artificial Sequence: Synthetic peptide
IRDVHVV

SEQ ID NO: 4037 - protein, 7 aa, Artificial Sequence
  Description of Artificial Sequence: Synthetic peptide
IREPTAM

SEQ ID NO: 4038 - protein, 7 aa, Artificial Sequence
  Description of Artificial Sequence: Synthetic peptide
IRGALGI

SEQ ID NO: 4039 - protein, 7 aa, Artificial Sequence
  Description of Artificial Sequence: Synthetic peptide
IRGNFLS

SEQ ID NO: 4040 - protein, 7 aa, Artificial Sequence
  Description of Artificial Sequence: Synthetic peptide
IRGTPAF

SEQ ID NO: 4041 - protein, 7 aa, Artificial Sequence
  Description of Artificial Sequence: Synthetic peptide
IRHGIAA

SEQ ID NO: 4042 - protein, 7 aa, Artificial Sequence
  Description of Artificial Sequence: Synthetic peptide
IRIPELP

SEQ ID NO: 4043 - protein, 7 aa, Artificial Sequence
  Description of Artificial Sequence: Synthetic peptide
IRIPMTP

SEQ ID NO: 4044 - protein, 7 aa, Artificial Sequence
  Description of Artificial Sequence: Synthetic peptide
IRKSPNE

SEQ ID NO: 4045 - protein, 7 aa, Artificial Sequence
  Description of Artificial Sequence: Synthetic peptide
IRLEYSA

SEQ ID NO: 4046 - protein, 7 aa, Artificial Sequence
  Description of Artificial Sequence: Synthetic peptide
IRLGSFA

SEQ ID NO: 4047 - protein, 7 aa, Artificial Sequence
  Description of Artificial Sequence: Synthetic peptide
IRLQNSI

SEQ ID NO: 4048 - protein, 7 aa, Artificial Sequence
  Description of Artificial Sequence: Synthetic peptide
IRLSDKA

SEQ ID NO: 4049 - protein, 7 aa, Artificial Sequence
  Description of Artificial Sequence: Synthetic peptide
IRMSTQL

SEQ ID NO: 4050 - protein, 7 aa, Artificial Sequence
  Description of Artificial Sequence: Synthetic peptide
IRNGSDD

SEQ ID NO: 4051 - protein, 7 aa, Artificial Sequence
  Description of Artificial Sequence: Synthetic peptide
IRNIIDF

SEQ ID NO: 4052 - protein, 7 aa, Artificial Sequence
  Description of Artificial Sequence: Synthetic peptide
IRPLNMP

SEQ ID NO: 4053 - protein, 7 aa, Artificial Sequence
  Description of Artificial Sequence: Synthetic peptide
IRPTEGM

SEQ ID NO: 4054 - protein, 7 aa, Artificial Sequence
  Description of Artificial Sequence: Synthetic peptide
IRQECRI

SEQ ID NO: 4055 - protein, 7 aa, Artificial Sequence
  Description of Artificial Sequence: Synthetic peptide
IRQIPYA

SEQ ID NO: 4056 - protein, 7 aa, Artificial Sequence
  Description of Artificial Sequence: Synthetic peptide
IRQSSVN

SEQ ID NO: 4057 - protein, 7 aa, Artificial Sequence
  Description of Artificial Sequence: Synthetic peptide
IRSGQPL

SEQ ID NO: 4058 - protein, 7 aa, Artificial Sequence
  Description of Artificial Sequence: Synthetic peptide
IRSITDT

SEQ ID NO: 4059 - protein, 7 aa, Artificial Sequence
  Description of Artificial Sequence: Synthetic peptide
IRSLATA

SEQ ID NO: 4060 - protein, 7 aa, Artificial Sequence
  Description of Artificial Sequence: Synthetic peptide
IRSPLPS

SEQ ID NO: 4061 - protein, 7 aa, Artificial Sequence
  Description of Artificial Sequence: Synthetic peptide
IRSSGMM

SEQ ID NO: 4062 - protein, 7 aa, Artificial Sequence
  Description of Artificial Sequence: Synthetic peptide
IRSSPPT

SEQ ID NO: 4063 - protein, 7 aa, Artificial Sequence
  Description of Artificial Sequence: Synthetic peptide
IRSVSEV

SEQ ID NO: 4064 - protein, 7 aa, Artificial Sequence
  Description of Artificial Sequence: Synthetic peptide
IRTLGST

SEQ ID NO: 4065 - protein, 7 aa, Artificial Sequence
  Description of Artificial Sequence: Synthetic peptide
IRTTAAF

SEQ ID NO: 4066 - protein, 7 aa, Artificial Sequence
  Description of Artificial Sequence: Synthetic peptide
IRVENEL

SEQ ID NO: 4067 - protein, 7 aa, Artificial Sequence
  Description of Artificial Sequence: Synthetic peptide
IRVNDTG

SEQ ID NO: 4068 - protein, 7 aa, Artificial Sequence
  Description of Artificial Sequence: Synthetic peptide
IRVPTSS

SEQ ID NO: 4069 - protein, 7 aa, Artificial Sequence
  Description of Artificial Sequence: Synthetic peptide
IRVSAIH

SEQ ID NO: 4070 - protein, 7 aa, Artificial Sequence
  Description of Artificial Sequence: Synthetic peptide
ISAASRA

SEQ ID NO: 4071 - protein, 7 aa, Artificial Sequence
  Description of Artificial Sequence: Synthetic peptide
ISAAVMA

SEQ ID NO: 4072 - protein, 7 aa, Artificial Sequence
  Description of Artificial Sequence: Synthetic peptide
ISAGPMP

SEQ ID NO: 4073 - protein, 7 aa, Artificial Sequence
  Description of Artificial Sequence: Synthetic peptide
ISAISAQ

SEQ ID NO: 4074 - protein, 7 aa, Artificial Sequence
  Description of Artificial Sequence: Synthetic peptide
ISANMFS

SEQ ID NO: 4075 - protein, 7 aa, Artificial Sequence
  Description of Artificial Sequence: Synthetic peptide
ISARPTI

SEQ ID NO: 4076 - protein, 7 aa, Artificial Sequence
  Description of Artificial Sequence: Synthetic peptide
ISASHSS

SEQ ID NO: 4077 - protein, 7 aa, Artificial Sequence
  Description of Artificial Sequence: Synthetic peptide
ISATTSS

SEQ ID NO: 4078 - protein, 7 aa, Artificial Sequence
  Description of Artificial Sequence: Synthetic peptide
ISDQQYT

SEQ ID NO: 4079 - protein, 7 aa, Artificial Sequence
  Description of Artificial Sequence: Synthetic peptide
ISECVGG

SEQ ID NO: 4080 - protein, 7 aa, Artificial Sequence
  Description of Artificial Sequence: Synthetic peptide
ISEHIMS

SEQ ID NO: 4081 - protein, 7 aa, Artificial Sequence
  Description of Artificial Sequence: Synthetic peptide
ISEPTSV

SEQ ID NO: 4082 - protein, 7 aa, Artificial Sequence
  Description of Artificial Sequence: Synthetic peptide
ISESSRY

SEQ ID NO: 4083 - protein, 7 aa, Artificial Sequence
  Description of Artificial Sequence: Synthetic peptide
ISFRIEN

SEQ ID NO: 4084 - protein, 7 aa, Artificial Sequence
  Description of Artificial Sequence: Synthetic peptide
ISGAVDR

SEQ ID NO: 4085 - protein, 7 aa, Artificial Sequence
  Description of Artificial Sequence: Synthetic peptide
ISGKLAT

SEQ ID NO: 4086 - protein, 7 aa, Artificial Sequence
  Description of Artificial Sequence: Synthetic peptide
ISGNPNA

SEQ ID NO: 4087 - protein, 7 aa, Artificial Sequence
  Description of Artificial Sequence: Synthetic peptide
ISGPPTP

SEQ ID NO: 4088 - protein, 7 aa, Artificial Sequence
  Description of Artificial Sequence: Synthetic peptide
ISGRNAT

SEQ ID NO: 4089 - protein, 7 aa, Artificial Sequence
  Description of Artificial Sequence: Synthetic peptide
ISHSDNA

SEQ ID NO: 4090 - protein, 7 aa, Artificial Sequence
  Description of Artificial Sequence: Synthetic peptide
ISIQLRD

SEQ ID NO: 4091 - protein, 7 aa, Artificial Sequence
  Description of Artificial Sequence: Synthetic peptide
ISIRTGP

SEQ ID NO: 4092 - protein, 7 aa, Artificial Sequence
  Description of Artificial Sequence: Synthetic peptide
ISKAEAI

SEQ ID NO: 4093 - protein, 7 aa, Artificial Sequence
  Description of Artificial Sequence: Synthetic peptide
ISKAYPN

SEQ ID NO: 4094 - protein, 7 aa, Artificial Sequence
  Description of Artificial Sequence: Synthetic peptide
ISKDGAV

SEQ ID NO: 4095 - protein, 7 aa, Artificial Sequence
  Description of Artificial Sequence: Synthetic peptide
ISKDNAL

SEQ ID NO: 4096 - protein, 7 aa, Artificial Sequence
  Description of Artificial Sequence: Synthetic peptide
ISKLNGP

SEQ ID NO: 4097 - protein, 7 aa, Artificial Sequence
  Description of Artificial Sequence: Synthetic peptide
ISKSYNG

SEQ ID NO: 4098 - protein, 7 aa, Artificial Sequence
  Description of Artificial Sequence: Synthetic peptide
ISLDRHS

SEQ ID NO: 4099 - protein, 7 aa, Artificial Sequence
  Description of Artificial Sequence: Synthetic peptide
ISLLRNT

SEQ ID NO: 4100 - protein, 7 aa, Artificial Sequence
  Description of Artificial Sequence: Synthetic peptide
ISLQTSL

SEQ ID NO: 4101 - protein, 7 aa, Artificial Sequence
  Description of Artificial Sequence: Synthetic peptide
ISLRFND

SEQ ID NO: 4102 - protein, 7 aa, Artificial Sequence
  Description of Artificial Sequence: Synthetic peptide
ISLSALA

SEQ ID NO: 4103 - protein, 7 aa, Artificial Sequence
  Description of Artificial Sequence: Synthetic peptide
ISMKPIS

SEQ ID NO: 4104 - protein, 7 aa, Artificial Sequence
  Description of Artificial Sequence: Synthetic peptide
ISMLRPT

SEQ ID NO: 4105 - protein, 7 aa, Artificial Sequence
  Description of Artificial Sequence: Synthetic peptide
ISMTVHS

SEQ ID NO: 4106 - protein, 7 aa, Artificial Sequence
  Description of Artificial Sequence: Synthetic peptide
ISMVRQG

SEQ ID NO: 4107 - protein, 7 aa, Artificial Sequence
  Description of Artificial Sequence: Synthetic peptide
ISNAMTQ

SEQ ID NO: 4108 - protein, 7 aa, Artificial Sequence
  Description of Artificial Sequence: Synthetic peptide
ISNGRAV

SEQ ID NO: 4109 - protein, 7 aa, Artificial Sequence
  Description of Artificial Sequence: Synthetic peptide
ISNSRST

SEQ ID NO: 4110 - protein, 7 aa, Artificial Sequence
  Description of Artificial Sequence: Synthetic peptide
ISNSSPS

SEQ ID NO: 4111 - protein, 7 aa, Artificial Sequence
  Description of Artificial Sequence: Synthetic peptide
ISNVQLA

SEQ ID NO: 4112 - protein, 7 aa, Artificial Sequence
  Description of Artificial Sequence: Synthetic peptide
ISPAPFP

SEQ ID NO: 4113 - protein, 7 aa, Artificial Sequence
  Description of Artificial Sequence: Synthetic peptide
ISPDPML

SEQ ID NO: 4114 - protein, 7 aa, Artificial Sequence
  Description of Artificial Sequence: Synthetic peptide
ISPFTVE

SEQ ID NO: 4115 - protein, 7 aa, Artificial Sequence
  Description of Artificial Sequence: Synthetic peptide
ISPRDVS

SEQ ID NO: 4116 - protein, 7 aa, Artificial Sequence
  Description of Artificial Sequence: Synthetic peptide
ISPRKAT

SEQ ID NO: 4117 - protein, 7 aa, Artificial Sequence
  Description of Artificial Sequence: Synthetic peptide
ISPRNNS

SEQ ID NO: 4118 - protein, 7 aa, Artificial Sequence
  Description of Artificial Sequence: Synthetic peptide
ISPRYPH

SEQ ID NO: 4119 - protein, 7 aa, Artificial Sequence
  Description of Artificial Sequence: Synthetic peptide
ISPSGPA

SEQ ID NO: 4120 - protein, 7 aa, Artificial Sequence
  Description of Artificial Sequence: Synthetic peptide
ISPVRNV

SEQ ID NO: 4121 - protein, 7 aa, Artificial Sequence
  Description of Artificial Sequence: Synthetic peptide
ISPYENA

SEQ ID NO: 4122 - protein, 7 aa, Artificial Sequence
  Description of Artificial Sequence: Synthetic peptide
ISPYRVS

SEQ ID NO: 4123 - protein, 7 aa, Artificial Sequence
  Description of Artificial Sequence: Synthetic peptide
ISQQRLK

SEQ ID NO: 4124 - protein, 7 aa, Artificial Sequence
  Description of Artificial Sequence: Synthetic peptide
ISQRWPD

SEQ ID NO: 4125 - protein, 7 aa, Artificial Sequence
  Description of Artificial Sequence: Synthetic peptide
ISQTRYD

SEQ ID NO: 4126 - protein, 7 aa, Artificial Sequence
  Description of Artificial Sequence: Synthetic peptide
ISRDTVM

SEQ ID NO: 4127 - protein, 7 aa, Artificial Sequence
  Description of Artificial Sequence: Synthetic peptide
ISRLVSS

SEQ ID NO: 4128 - protein, 7 aa, Artificial Sequence
  Description of Artificial Sequence: Synthetic peptide
ISRSNII

SEQ ID NO: 4129 - protein, 7 aa, Artificial Sequence
  Description of Artificial Sequence: Synthetic peptide
ISRVVTM

SEQ ID NO: 4130 - protein, 7 aa, Artificial Sequence
  Description of Artificial Sequence: Synthetic peptide
ISSAFAP

SEQ ID NO: 4131 - protein, 7 aa, Artificial Sequence
  Description of Artificial Sequence: Synthetic peptide
ISSHCMA

SEQ ID NO: 4132 - protein, 7 aa, Artificial Sequence
  Description of Artificial Sequence: Synthetic peptide
ISSKLVS

SEQ ID NO: 4133 - protein, 7 aa, Artificial Sequence
  Description of Artificial Sequence: Synthetic peptide
ISSNPTV

SEQ ID NO: 4134 - protein, 7 aa, Artificial Sequence
  Description of Artificial Sequence: Synthetic peptide
ISSSATL

SEQ ID NO: 4135 - protein, 7 aa, Artificial Sequence
  Description of Artificial Sequence: Synthetic peptide
ISSTNTA

SEQ ID NO: 4136 - protein, 7 aa, Artificial Sequence
  Description of Artificial Sequence: Synthetic peptide
ISSTVEI

SEQ ID NO: 4137 - protein, 7 aa, Artificial Sequence
  Description of Artificial Sequence: Synthetic peptide
ISSVQNP

SEQ ID NO: 4138 - protein, 7 aa, Artificial Sequence
  Description of Artificial Sequence: Synthetic peptide
ISTHLKS

SEQ ID NO: 4139 - protein, 7 aa, Artificial Sequence
  Description of Artificial Sequence: Synthetic peptide
ISTHTKS

SEQ ID NO: 4140 - protein, 7 aa, Artificial Sequence
  Description of Artificial Sequence: Synthetic peptide
ISTNVRS

SEQ ID NO: 4141 - protein, 7 aa, Artificial Sequence
  Description of Artificial Sequence: Synthetic peptide
ISTRNPE

SEQ ID NO: 4142 - protein, 7 aa, Artificial Sequence
  Description of Artificial Sequence: Synthetic peptide
ISTSQQH

SEQ ID NO: 4143 - protein, 7 aa, Artificial Sequence
  Description of Artificial Sequence: Synthetic peptide
ISTTTVP

SEQ ID NO: 4144 - protein, 7 aa, Artificial Sequence
  Description of Artificial Sequence: Synthetic peptide
ISTVLVD

SEQ ID NO: 4145 - protein, 7 aa, Artificial Sequence
  Description of Artificial Sequence: Synthetic peptide
ISTWEYE

SEQ ID NO: 4146 - protein, 7 aa, Artificial Sequence
  Description of Artificial Sequence: Synthetic peptide
ISTWRPT

SEQ ID NO: 4147 - protein, 7 aa, Artificial Sequence
  Description of Artificial Sequence: Synthetic peptide
ISVKGQP

SEQ ID NO: 4148 - protein, 7 aa, Artificial Sequence
  Description of Artificial Sequence: Synthetic peptide
ISVSQTD

SEQ ID NO: 4149 - protein, 7 aa, Artificial Sequence
  Description of Artificial Sequence: Synthetic peptide
ISVTSSS

SEQ ID NO: 4150 - protein, 7 aa, Artificial Sequence
  Description of Artificial Sequence: Synthetic peptide
ISYGTRS

SEQ ID NO: 4151 - protein, 7 aa, Artificial Sequence
  Description of Artificial Sequence: Synthetic peptide
ISYNAKV

SEQ ID NO: 4152 - protein, 7 aa, Artificial Sequence
  Description of Artificial Sequence: Synthetic peptide
ISYPKPV

SEQ ID NO: 4153 - protein, 7 aa, Artificial Sequence
  Description of Artificial Sequence: Synthetic peptide
ITAPHSM

SEQ ID NO: 4154 - protein, 7 aa, Artificial Sequence
  Description of Artificial Sequence: Synthetic peptide
ITARVNA

SEQ ID NO: 4155 - protein, 7 aa, Artificial Sequence
  Description of Artificial Sequence: Synthetic peptide
ITARYPT

SEQ ID NO: 4156 - protein, 7 aa, Artificial Sequence
  Description of Artificial Sequence: Synthetic peptide
ITASGLV

SEQ ID NO: 4157 - protein, 7 aa, Artificial Sequence
  Description of Artificial Sequence: Synthetic peptide
ITATQRM

SEQ ID NO: 4158 - protein, 7 aa, Artificial Sequence
  Description of Artificial Sequence: Synthetic peptide
ITDAANP

SEQ ID NO: 4159 - protein, 7 aa, Artificial Sequence
  Description of Artificial Sequence: Synthetic peptide
ITDRVAI

SEQ ID NO: 4160 - protein, 7 aa, Artificial Sequence
  Description of Artificial Sequence: Synthetic peptide
ITERSCT

SEQ ID NO: 4161 - protein, 7 aa, Artificial Sequence
  Description of Artificial Sequence: Synthetic peptide
ITEVKRG

SEQ ID NO: 4162 - protein, 7 aa, Artificial Sequence
  Description of Artificial Sequence: Synthetic peptide
ITFDHVT

SEQ ID NO: 4163 - protein, 7 aa, Artificial Sequence
  Description of Artificial Sequence: Synthetic peptide
ITFSGSS

SEQ ID NO: 4164 - protein, 7 aa, Artificial Sequence
  Description of Artificial Sequence: Synthetic peptide
ITGDLNG

SEQ ID NO: 4165 - protein, 7 aa, Artificial Sequence
  Description of Artificial Sequence: Synthetic peptide
ITGGRPG

SEQ ID NO: 4166 - protein, 7 aa, Artificial Sequence
  Description of Artificial Sequence: Synthetic peptide
ITGNRTP

SEQ ID NO: 4167 - protein, 7 aa, Artificial Sequence
  Description of Artificial Sequence: Synthetic peptide
ITGSNRD

SEQ ID NO: 4168 - protein, 7 aa, Artificial Sequence
  Description of Artificial Sequence: Synthetic peptide
ITHASSD

SEQ ID NO: 4169 - protein, 7 aa, Artificial Sequence
  Description of Artificial Sequence: Synthetic peptide
ITHIRLD

SEQ ID NO: 4170 - protein, 7 aa, Artificial Sequence
  Description of Artificial Sequence: Synthetic peptide
ITHSIQR

SEQ ID NO: 4171 - protein, 7 aa, Artificial Sequence
  Description of Artificial Sequence: Synthetic peptide
ITLGSTG

SEQ ID NO: 4172 - protein, 7 aa, Artificial Sequence
  Description of Artificial Sequence: Synthetic peptide
ITLSSQG

SEQ ID NO: 4173 - protein, 7 aa, Artificial Sequence
  Description of Artificial Sequence: Synthetic peptide
ITLYPNS

SEQ ID NO: 4174 - protein, 7 aa, Artificial Sequence
  Description of Artificial Sequence: Synthetic peptide
ITMLAGD

SEQ ID NO: 4175 - protein, 7 aa, Artificial Sequence
  Description of Artificial Sequence: Synthetic peptide
ITNDRTV

SEQ ID NO: 4176 - protein, 7 aa, Artificial Sequence
  Description of Artificial Sequence: Synthetic peptide
ITNEPPR

SEQ ID NO: 4177 - protein, 7 aa, Artificial Sequence
  Description of Artificial Sequence: Synthetic peptide
ITPLTAG

SEQ ID NO: 4178 - protein, 7 aa, Artificial Sequence
  Description of Artificial Sequence: Synthetic peptide
ITPMSIV

SEQ ID NO: 4179 - protein, 7 aa, Artificial Sequence
  Description of Artificial Sequence: Synthetic peptide
ITPSHGS

SEQ ID NO: 4180 - protein, 7 aa, Artificial Sequence
  Description of Artificial Sequence: Synthetic peptide
ITPVHAE

SEQ ID NO: 4181 - protein, 7 aa, Artificial Sequence
  Description of Artificial Sequence: Synthetic peptide
ITPYVRG

SEQ ID NO: 4182 - protein, 7 aa, Artificial Sequence
  Description of Artificial Sequence: Synthetic peptide
ITQPHAK

SEQ ID NO: 4183 - protein, 7 aa, Artificial Sequence
  Description of Artificial Sequence: Synthetic peptide
ITRLKLD

SEQ ID NO: 4184 - protein, 7 aa, Artificial Sequence
  Description of Artificial Sequence: Synthetic peptide
ITRSVAP

SEQ ID NO: 4185 - protein, 7 aa, Artificial Sequence
  Description of Artificial Sequence: Synthetic peptide
ITSADPQ

SEQ ID NO: 4186 - protein, 7 aa, Artificial Sequence
  Description of Artificial Sequence: Synthetic peptide
ITSKTQA

SEQ ID NO: 4187 - protein, 7 aa, Artificial Sequence
  Description of Artificial Sequence: Synthetic peptide
ITSPRLQ

SEQ ID NO: 4188 - protein, 7 aa, Artificial Sequence
  Description of Artificial Sequence: Synthetic peptide
ITSTLPP

SEQ ID NO: 4189 - protein, 7 aa, Artificial Sequence
  Description of Artificial Sequence: Synthetic peptide
ITSTRAS

SEQ ID NO: 4190 - protein, 7 aa, Artificial Sequence
  Description of Artificial Sequence: Synthetic peptide
ITSVDRL

SEQ ID NO: 4191 - protein, 7 aa, Artificial Sequence
  Description of Artificial Sequence: Synthetic peptide
ITSVPVS

SEQ ID NO: 4192 - protein, 7 aa, Artificial Sequence
  Description of Artificial Sequence: Synthetic peptide
ITTKYSQ

SEQ ID NO: 4193 - protein, 7 aa, Artificial Sequence
  Description of Artificial Sequence: Synthetic peptide
ITTLGPT

SEQ ID NO: 4194 - protein, 7 aa, Artificial Sequence
  Description of Artificial Sequence: Synthetic peptide
ITTNSGR

SEQ ID NO: 4195 - protein, 7 aa, Artificial Sequence
  Description of Artificial Sequence: Synthetic peptide
ITTPAEQ

SEQ ID NO: 4196 - protein, 7 aa, Artificial Sequence
  Description of Artificial Sequence: Synthetic peptide
ITTRETT

SEQ ID NO: 4197 - protein, 7 aa, Artificial Sequence
  Description of Artificial Sequence: Synthetic peptide
ITTSDRA

SEQ ID NO: 4198 - protein, 7 aa, Artificial Sequence
  Description of Artificial Sequence: Synthetic peptide
ITTYNEN

SEQ ID NO: 4199 - protein, 7 aa, Artificial Sequence
  Description of Artificial Sequence: Synthetic peptide
ITVPHHY

SEQ ID NO: 4200 - protein, 7 aa, Artificial Sequence
  Description of Artificial Sequence: Synthetic peptide
ITVSRAD

SEQ ID NO: 4201 - protein, 7 aa, Artificial Sequence
  Description of Artificial Sequence: Synthetic peptide
ITYQNAE

SEQ ID NO: 4202 - protein, 7 aa, Artificial Sequence
  Description of Artificial Sequence: Synthetic peptide
IVATCTA

SEQ ID NO: 4203 - protein, 7 aa, Artificial Sequence
  Description of Artificial Sequence: Synthetic peptide
IVEASII

SEQ ID NO: 4204 - protein, 7 aa, Artificial Sequence
  Description of Artificial Sequence: Synthetic peptide
IVEGLGD

SEQ ID NO: 4205 - protein, 7 aa, Artificial Sequence
  Description of Artificial Sequence: Synthetic peptide
IVETYLT

SEQ ID NO: 4206 - protein, 7 aa, Artificial Sequence
  Description of Artificial Sequence: Synthetic peptide
IVGSKLD

SEQ ID NO: 4207 - protein, 7 aa, Artificial Sequence
  Description of Artificial Sequence: Synthetic peptide
IVKGIPM

SEQ ID NO: 4208 - protein, 7 aa, Artificial Sequence
  Description of Artificial Sequence: Synthetic peptide
IVLESMS

SEQ ID NO: 4209 - protein, 7 aa, Artificial Sequence
  Description of Artificial Sequence: Synthetic peptide
IVLHLDG

SEQ ID NO: 4210 - protein, 7 aa, Artificial Sequence
  Description of Artificial Sequence: Synthetic peptide
IVNLSTY

SEQ ID NO: 4211 - protein, 7 aa, Artificial Sequence
  Description of Artificial Sequence: Synthetic peptide
IVQVATS

SEQ ID NO: 4212 - protein, 7 aa, Artificial Sequence
  Description of Artificial Sequence: Synthetic peptide
IVRQTIS

SEQ ID NO: 4213 - protein, 7 aa, Artificial Sequence
  Description of Artificial Sequence: Synthetic peptide
IVRSRPE

SEQ ID NO: 4214 - protein, 7 aa, Artificial Sequence
  Description of Artificial Sequence: Synthetic peptide
IVSHDFE

SEQ ID NO: 4215 - protein, 7 aa, Artificial Sequence
  Description of Artificial Sequence: Synthetic peptide
IVSRINS

SEQ ID NO: 4216 - protein, 7 aa, Artificial Sequence
  Description of Artificial Sequence: Synthetic peptide
IVSSYTD

SEQ ID NO: 4217 - protein, 7 aa, Artificial Sequence
  Description of Artificial Sequence: Synthetic peptide
IVTGSGG

SEQ ID NO: 4218 - protein, 7 aa, Artificial Sequence
  Description of Artificial Sequence: Synthetic peptide
IVTGSRE

SEQ ID NO: 4219 - protein, 7 aa, Artificial Sequence
  Description of Artificial Sequence: Synthetic peptide
IVTKCPG

SEQ ID NO: 4220 - protein, 7 aa, Artificial Sequence
  Description of Artificial Sequence: Synthetic peptide
IVTSNVT

SEQ ID NO: 4221 - protein, 7 aa, Artificial Sequence
  Description of Artificial Sequence: Synthetic peptide
IVTSTQP

SEQ ID NO: 4222 - protein, 7 aa, Artificial Sequence
  Description of Artificial Sequence: Synthetic peptide
IWDSCRD

SEQ ID NO: 4223 - protein, 7 aa, Artificial Sequence
  Description of Artificial Sequence: Synthetic peptide
IYKVDSS

SEQ ID NO: 4224 - protein, 7 aa, Artificial Sequence
  Description of Artificial Sequence: Synthetic peptide
IYLRNDQ

SEQ ID NO: 4225 - protein, 7 aa, Artificial Sequence
  Description of Artificial Sequence: Synthetic peptide
IYQSESH

SEQ ID NO: 4226 - protein, 7 aa, Artificial Sequence
  Description of Artificial Sequence: Synthetic peptide
IYQSQHH

SEQ ID NO: 4227 - protein, 7 aa, Artificial Sequence
  Description of Artificial Sequence: Synthetic peptide
IYSAKQP

SEQ ID NO: 4228 - protein, 7 aa, Artificial Sequence
  Description of Artificial Sequence: Synthetic peptide
IYSVGAT

SEQ ID NO: 4229 - protein, 7 aa, Artificial Sequence
  Description of Artificial Sequence: Synthetic peptide
IYTGQVH

SEQ ID NO: 4230 - protein, 7 aa, Artificial Sequence
  Description of Artificial Sequence: Synthetic peptide
KAAKLLD

SEQ ID NO: 4231 - protein, 7 aa, Artificial Sequence
  Description of Artificial Sequence: Synthetic peptide
KAANQSS

SEQ ID NO: 4232 - protein, 7 aa, Artificial Sequence
  Description of Artificial Sequence: Synthetic peptide
KADHSKE

SEQ ID NO: 4233 - protein, 7 aa, Artificial Sequence
  Description of Artificial Sequence: Synthetic peptide
KADIQVR

SEQ ID NO: 4234 - protein, 7 aa, Artificial Sequence
  Description of Artificial Sequence: Synthetic peptide
KAETVAP

SEQ ID NO: 4235 - protein, 7 aa, Artificial Sequence
  Description of Artificial Sequence: Synthetic peptide
KAFIGID

SEQ ID NO: 4236 - protein, 7 aa, Artificial Sequence
  Description of Artificial Sequence: Synthetic peptide
KAFSPAL

SEQ ID NO: 4237 - protein, 7 aa, Artificial Sequence
  Description of Artificial Sequence: Synthetic peptide
KAGCSIS

SEQ ID NO: 4238 - protein, 7 aa, Artificial Sequence
  Description of Artificial Sequence: Synthetic peptide
KAGVPVP

SEQ ID NO: 4239 - protein, 7 aa, Artificial Sequence
  Description of Artificial Sequence: Synthetic peptide
KAHSTQT

SEQ ID NO: 4240 - protein, 7 aa, Artificial Sequence
  Description of Artificial Sequence: Synthetic peptide
KAISQPF

SEQ ID NO: 4241 - protein, 7 aa, Artificial Sequence
  Description of Artificial Sequence: Synthetic peptide
KALPNYS

SEQ ID NO: 4242 - protein, 7 aa, Artificial Sequence
  Description of Artificial Sequence: Synthetic peptide
KALQRYD

SEQ ID NO: 4243 - protein, 7 aa, Artificial Sequence
  Description of Artificial Sequence: Synthetic peptide
KAMSMDS

SEQ ID NO: 4244 - protein, 7 aa, Artificial Sequence
  Description of Artificial Sequence: Synthetic peptide
KANQLDT

SEQ ID NO: 4245 - protein, 7 aa, Artificial Sequence
  Description of Artificial Sequence: Synthetic peptide
KAPLPDF

SEQ ID NO: 4246 - protein, 7 aa, Artificial Sequence
  Description of Artificial Sequence: Synthetic peptide
KAPTPSV

SEQ ID NO: 4247 - protein, 7 aa, Artificial Sequence
  Description of Artificial Sequence: Synthetic peptide
KAQERAT

SEQ ID NO: 4248 - protein, 7 aa, Artificial Sequence
  Description of Artificial Sequence: Synthetic peptide
KAQSANF

SEQ ID NO: 4249 - protein, 7 aa, Artificial Sequence
  Description of Artificial Sequence: Synthetic peptide
KASASIA

SEQ ID NO: 4250 - protein, 7 aa, Artificial Sequence
  Description of Artificial Sequence: Synthetic peptide
KASFSPD

SEQ ID NO: 4251 - protein, 7 aa, Artificial Sequence
  Description of Artificial Sequence: Synthetic peptide
KASQACM

SEQ ID NO: 4252 - protein, 7 aa, Artificial Sequence
  Description of Artificial Sequence: Synthetic peptide
KASQFSP

SEQ ID NO: 4253 - protein, 7 aa, Artificial Sequence
  Description of Artificial Sequence: Synthetic peptide
KASQSGT

SEQ ID NO: 4254 - protein, 7 aa, Artificial Sequence
  Description of Artificial Sequence: Synthetic peptide
KATPGVH

SEQ ID NO: 4255 - protein, 7 aa, Artificial Sequence
  Description of Artificial Sequence: Synthetic peptide
KATPNVG

SEQ ID NO: 4256 - protein, 7 aa, Artificial Sequence
  Description of Artificial Sequence: Synthetic peptide
KAVASTF

SEQ ID NO: 4257 - protein, 7 aa, Artificial Sequence
  Description of Artificial Sequence: Synthetic peptide
KAVISPT

SEQ ID NO: 4258 - protein, 7 aa, Artificial Sequence
  Description of Artificial Sequence: Synthetic peptide
KAVNGLS

SEQ ID NO: 4259 - protein, 7 aa, Artificial Sequence
  Description of Artificial Sequence: Synthetic peptide
KAVSWGP

SEQ ID NO: 4260 - protein, 7 aa, Artificial Sequence
  Description of Artificial Sequence: Synthetic peptide
KCRTCSV

SEQ ID NO: 4261 - protein, 7 aa, Artificial Sequence
  Description of Artificial Sequence: Synthetic peptide
KDEPNYG

SEQ ID NO: 4262 - protein, 7 aa, Artificial Sequence
  Description of Artificial Sequence: Synthetic peptide
KDFSNTL

SEQ ID NO: 4263 - protein, 7 aa, Artificial Sequence
  Description of Artificial Sequence: Synthetic peptide
KDGPFPM

SEQ ID NO: 4264 - protein, 7 aa, Artificial Sequence
  Description of Artificial Sequence: Synthetic peptide
KDKNPSD

SEQ ID NO: 4265 - protein, 7 aa, Artificial Sequence
  Description of Artificial Sequence: Synthetic peptide
KDKVEMN

SEQ ID NO: 4266 - protein, 7 aa, Artificial Sequence
  Description of Artificial Sequence: Synthetic peptide
KDLTRHA

SEQ ID NO: 4267 - protein, 7 aa, Artificial Sequence
  Description of Artificial Sequence: Synthetic peptide
KDMRSKD

SEQ ID NO: 4268 - protein, 7 aa, Artificial Sequence
  Description of Artificial Sequence: Synthetic peptide
KDNKIQS

SEQ ID NO: 4269 - protein, 7 aa, Artificial Sequence
  Description of Artificial Sequence: Synthetic peptide
KDPGRIS

SEQ ID NO: 4270 - protein, 7 aa, Artificial Sequence
  Description of Artificial Sequence: Synthetic peptide
KDPISSV

SEQ ID NO: 4271 - protein, 7 aa, Artificial Sequence
  Description of Artificial Sequence: Synthetic peptide
KDPLNCA

SEQ ID NO: 4272 - protein, 7 aa, Artificial Sequence
  Description of Artificial Sequence: Synthetic peptide
KDPPQLH

SEQ ID NO: 4273 - protein, 7 aa, Artificial Sequence
  Description of Artificial Sequence: Synthetic peptide
KDPQTTD

SEQ ID NO: 4274 - protein, 7 aa, Artificial Sequence
  Description of Artificial Sequence: Synthetic peptide
KDRSAPP

SEQ ID NO: 4275 - protein, 7 aa, Artificial Sequence
  Description of Artificial Sequence: Synthetic peptide
KDRSLDP

SEQ ID NO: 4276 - protein, 7 aa, Artificial Sequence
  Description of Artificial Sequence: Synthetic peptide
KDSAANF

SEQ ID NO: 4277 - protein, 7 aa, Artificial Sequence
  Description of Artificial Sequence: Synthetic peptide
KDSTLLS

SEQ ID NO: 4278 - protein, 7 aa, Artificial Sequence
  Description of Artificial Sequence: Synthetic peptide
KDTDPLS

SEQ ID NO: 4279 - protein, 7 aa, Artificial Sequence
  Description of Artificial Sequence: Synthetic peptide
KDTIHVS

SEQ ID NO: 4280 - protein, 7 aa, Artificial Sequence
  Description of Artificial Sequence: Synthetic peptide
KDTLTFR

SEQ ID NO: 4281 - protein, 7 aa, Artificial Sequence
  Description of Artificial Sequence: Synthetic peptide
KDTPNTV

SEQ ID NO: 4282 - protein, 7 aa, Artificial Sequence
  Description of Artificial Sequence: Synthetic peptide
KDTVFYP

SEQ ID NO: 4283 - protein, 7 aa, Artificial Sequence
  Description of Artificial Sequence: Synthetic peptide
KEDSYHP

SEQ ID NO: 4284 - protein, 7 aa, Artificial Sequence
  Description of Artificial Sequence: Synthetic peptide
KEDTNRT

SEQ ID NO: 4285 - protein, 7 aa, Artificial Sequence
  Description of Artificial Sequence: Synthetic peptide
KEGGEPR

SEQ ID NO: 4286 - protein, 7 aa, Artificial Sequence
  Description of Artificial Sequence: Synthetic peptide
KEGSNRG

SEQ ID NO: 4287 - protein, 7 aa, Artificial Sequence
  Description of Artificial Sequence: Synthetic peptide
KEHGVIF

SEQ ID NO: 4288 - protein, 7 aa, Artificial Sequence
  Description of Artificial Sequence: Synthetic peptide
KEIGFAT

SEQ ID NO: 4289 - protein, 7 aa, Artificial Sequence
  Description of Artificial Sequence: Synthetic peptide
KEKPLNS

SEQ ID NO: 4290 - protein, 7 aa, Artificial Sequence
  Description of Artificial Sequence: Synthetic peptide
KELAVGL

SEQ ID NO: 4291 - protein, 7 aa, Artificial Sequence
  Description of Artificial Sequence: Synthetic peptide
KELELHP

SEQ ID NO: 4292 - protein, 7 aa, Artificial Sequence
  Description of Artificial Sequence: Synthetic peptide
KEMDIHW

SEQ ID NO: 4293 - protein, 7 aa, Artificial Sequence
  Description of Artificial Sequence: Synthetic peptide
KEMSPTR

SEQ ID NO: 4294 - protein, 7 aa, Artificial Sequence
  Description of Artificial Sequence: Synthetic peptide
KENPAIV

SEQ ID NO: 4295 - protein, 7 aa, Artificial Sequence
  Description of Artificial Sequence: Synthetic peptide
KEPKVWL

SEQ ID NO: 4296 - protein, 7 aa, Artificial Sequence
  Description of Artificial Sequence: Synthetic peptide
KEPSTTS

SEQ ID NO: 4297 - protein, 7 aa, Artificial Sequence
  Description of Artificial Sequence: Synthetic peptide
KESIRQS

SEQ ID NO: 4298 - protein, 7 aa, Artificial Sequence
  Description of Artificial Sequence: Synthetic peptide
KESSSYL

SEQ ID NO: 4299 - protein, 7 aa, Artificial Sequence
  Description of Artificial Sequence: Synthetic peptide
KETQNMP

SEQ ID NO: 4300 - protein, 7 aa, Artificial Sequence
  Description of Artificial Sequence: Synthetic peptide
KEVKTSG

SEQ ID NO: 4301 - protein, 7 aa, Artificial Sequence
  Description of Artificial Sequence: Synthetic peptide
KEWTNSG

SEQ ID NO: 4302 - protein, 7 aa, Artificial Sequence
  Description of Artificial Sequence: Synthetic peptide
KFAAMLN

SEQ ID NO: 4303 - protein, 7 aa, Artificial Sequence
  Description of Artificial Sequence: Synthetic peptide
KFDLASD

SEQ ID NO: 4304 - protein, 7 aa, Artificial Sequence
  Description of Artificial Sequence: Synthetic peptide
KFDSELS

SEQ ID NO: 4305 - protein, 7 aa, Artificial Sequence
  Description of Artificial Sequence: Synthetic peptide
KFGDNVL

SEQ ID NO: 4306 - protein, 7 aa, Artificial Sequence
  Description of Artificial Sequence: Synthetic peptide
KFNSASD

SEQ ID NO: 4307 - protein, 7 aa, Artificial Sequence
  Description of Artificial Sequence: Synthetic peptide
KFPEAQG

SEQ ID NO: 4308 - protein, 7 aa, Artificial Sequence
  Description of Artificial Sequence: Synthetic peptide
KFPHPPA

SEQ ID NO: 4309 - protein, 7 aa, Artificial Sequence
  Description of Artificial Sequence: Synthetic peptide
KFQRDQV

SEQ ID NO: 4310 - protein, 7 aa, Artificial Sequence
  Description of Artificial Sequence: Synthetic peptide
KFQSVGI

SEQ ID NO: 4311 - protein, 7 aa, Artificial Sequence
  Description of Artificial Sequence: Synthetic peptide
KFSQTVP

SEQ ID NO: 4312 - protein, 7 aa, Artificial Sequence
  Description of Artificial Sequence: Synthetic peptide
KFSSNID

SEQ ID NO: 4313 - protein, 7 aa, Artificial Sequence
  Description of Artificial Sequence: Synthetic peptide
KGALGVP

SEQ ID NO: 4314 - protein, 7 aa, Artificial Sequence
  Description of Artificial Sequence: Synthetic peptide
KGDHVTD

SEQ ID NO: 4315 - protein, 7 aa, Artificial Sequence
  Description of Artificial Sequence: Synthetic peptide
KGDIISE

SEQ ID NO: 4316 - protein, 7 aa, Artificial Sequence
  Description of Artificial Sequence: Synthetic peptide
KGDIQVS

SEQ ID NO: 4317 - protein, 7 aa, Artificial Sequence
  Description of Artificial Sequence: Synthetic peptide
KGEIPIE

SEQ ID NO: 4318 - protein, 7 aa, Artificial Sequence
  Description of Artificial Sequence: Synthetic peptide
KGEVQSM

SEQ ID NO: 4319 - protein, 7 aa, Artificial Sequence
  Description of Artificial Sequence: Synthetic peptide
KGEWPRE

SEQ ID NO: 4320 - protein, 7 aa, Artificial Sequence
  Description of Artificial Sequence: Synthetic peptide
KGFDERS

SEQ ID NO: 4321 - protein, 7 aa, Artificial Sequence
  Description of Artificial Sequence: Synthetic peptide
KGGVAQY

SEQ ID NO: 4322 - protein, 7 aa, Artificial Sequence
  Description of Artificial Sequence: Synthetic peptide
KGLGVVP

SEQ ID NO: 4323 - protein, 7 aa, Artificial Sequence
  Description of Artificial Sequence: Synthetic peptide
KGPSIAW

SEQ ID NO: 4324 - protein, 7 aa, Artificial Sequence
  Description of Artificial Sequence: Synthetic peptide
KGPSPGL

SEQ ID NO: 4325 - protein, 7 aa, Artificial Sequence
  Description of Artificial Sequence: Synthetic peptide
KGQGQLN

SEQ ID NO: 4326 - protein, 7 aa, Artificial Sequence
  Description of Artificial Sequence: Synthetic peptide
KGQSSNS

SEQ ID NO: 4327 - protein, 7 aa, Artificial Sequence
  Description of Artificial Sequence: Synthetic peptide
KGRDATS

SEQ ID NO: 4328 - protein, 7 aa, Artificial Sequence
  Description of Artificial Sequence: Synthetic peptide
KGSGVIV

SEQ ID NO: 4329 - protein, 7 aa, Artificial Sequence
  Description of Artificial Sequence: Synthetic peptide
KGSSSMH

SEQ ID NO: 4330 - protein, 7 aa, Artificial Sequence
  Description of Artificial Sequence: Synthetic peptide
KGTDLLA

SEQ ID NO: 4331 - protein, 7 aa, Artificial Sequence
  Description of Artificial Sequence: Synthetic peptide
KGTTVSN

SEQ ID NO: 4332 - protein, 7 aa, Artificial Sequence
  Description of Artificial Sequence: Synthetic peptide
KGTTVVV

SEQ ID NO: 4333 - protein, 7 aa, Artificial Sequence
  Description of Artificial Sequence: Synthetic peptide
KGTYANT

SEQ ID NO: 4334 - protein, 7 aa, Artificial Sequence
  Description of Artificial Sequence: Synthetic peptide
KGTYNAH

SEQ ID NO: 4335 - protein, 7 aa, Artificial Sequence
  Description of Artificial Sequence: Synthetic peptide
KGVIPEK

SEQ ID NO: 4336 - protein, 7 aa, Artificial Sequence
  Description of Artificial Sequence: Synthetic peptide
KGVLTAV

SEQ ID NO: 4337 - protein, 7 aa, Artificial Sequence
  Description of Artificial Sequence: Synthetic peptide
KGVNFLD

SEQ ID NO: 4338 - protein, 7 aa, Artificial Sequence
  Description of Artificial Sequence: Synthetic peptide
KHAQTIP

SEQ ID NO: 4339 - protein, 7 aa, Artificial Sequence
  Description of Artificial Sequence: Synthetic peptide
KHDDSGM

SEQ ID NO: 4340 - protein, 7 aa, Artificial Sequence
  Description of Artificial Sequence: Synthetic peptide
KHENWMT

SEQ ID NO: 4341 - protein, 7 aa, Artificial Sequence
  Description of Artificial Sequence: Synthetic peptide
KHEPHGS

SEQ ID NO: 4342 - protein, 7 aa, Artificial Sequence
  Description of Artificial Sequence: Synthetic peptide
KHGVEIL

SEQ ID NO: 4343 - protein, 7 aa, Artificial Sequence
  Description of Artificial Sequence: Synthetic peptide
KHHTVEM

SEQ ID NO: 4344 - protein, 7 aa, Artificial Sequence
  Description of Artificial Sequence: Synthetic peptide
KHIPGPD

SEQ ID NO: 4345 - protein, 7 aa, Artificial Sequence
  Description of Artificial Sequence: Synthetic peptide
KHIPSDR

SEQ ID NO: 4346 - protein, 7 aa, Artificial Sequence
  Description of Artificial Sequence: Synthetic peptide
KHPNVPT

SEQ ID NO: 4347 - protein, 7 aa, Artificial Sequence
  Description of Artificial Sequence: Synthetic peptide
KHPPALT

SEQ ID NO: 4348 - protein, 7 aa, Artificial Sequence
  Description of Artificial Sequence: Synthetic peptide
KHPPAVL

SEQ ID NO: 4349 - protein, 7 aa, Artificial Sequence
  Description of Artificial Sequence: Synthetic peptide
KHQSTII

SEQ ID NO: 4350 - protein, 7 aa, Artificial Sequence
  Description of Artificial Sequence: Synthetic peptide
KHSAELG

SEQ ID NO: 4351 - protein, 7 aa, Artificial Sequence
  Description of Artificial Sequence: Synthetic peptide
KHSMATN

SEQ ID NO: 4352 - protein, 7 aa, Artificial Sequence
  Description of Artificial Sequence: Synthetic peptide
KHSNTPN

SEQ ID NO: 4353 - protein, 7 aa, Artificial Sequence
  Description of Artificial Sequence: Synthetic peptide
KHSYMET

SEQ ID NO: 4354 - protein, 7 aa, Artificial Sequence
  Description of Artificial Sequence: Synthetic peptide
KHTALVP

SEQ ID NO: 4355 - protein, 7 aa, Artificial Sequence
  Description of Artificial Sequence: Synthetic peptide
KHTASMA

SEQ ID NO: 4356 - protein, 7 aa, Artificial Sequence
  Description of Artificial Sequence: Synthetic peptide
KHTQNDG

SEQ ID NO: 4357 - protein, 7 aa, Artificial Sequence
  Description of Artificial Sequence: Synthetic peptide
KHTSFAQ

SEQ ID NO: 4358 - protein, 7 aa, Artificial Sequence
  Description of Artificial Sequence: Synthetic peptide
KHTTTMF

SEQ ID NO: 4359 - protein, 7 aa, Artificial Sequence
  Description of Artificial Sequence: Synthetic peptide
KIAPMPH

SEQ ID NO: 4360 - protein, 7 aa, Artificial Sequence
  Description of Artificial Sequence: Synthetic peptide
KIARSEG

SEQ ID NO: 4361 - protein, 7 aa, Artificial Sequence
  Description of Artificial Sequence: Synthetic peptide
KIASSLG

SEQ ID NO: 4362 - protein, 7 aa, Artificial Sequence
  Description of Artificial Sequence: Synthetic peptide
KIATTPL

SEQ ID NO: 4363 - protein, 7 aa, Artificial Sequence
  Description of Artificial Sequence: Synthetic peptide
KIHNLNS

SEQ ID NO: 4364 - protein, 7 aa, Artificial Sequence
  Description of Artificial Sequence: Synthetic peptide
KINTALT

SEQ ID NO: 4365 - protein, 7 aa, Artificial Sequence
  Description of Artificial Sequence: Synthetic peptide
KIPMQSA

SEQ ID NO: 4366 - protein, 7 aa, Artificial Sequence
  Description of Artificial Sequence: Synthetic peptide
KITATVT

SEQ ID NO: 4367 - protein, 7 aa, Artificial Sequence
  Description of Artificial Sequence: Synthetic peptide
KKDLSMY

SEQ ID NO: 4368 - protein, 7 aa, Artificial Sequence
  Description of Artificial Sequence: Synthetic peptide
KKDTGIN

SEQ ID NO: 4369 - protein, 7 aa, Artificial Sequence
  Description of Artificial Sequence: Synthetic peptide
KKPEDWR

SEQ ID NO: 4370 - protein, 7 aa, Artificial Sequence
  Description of Artificial Sequence: Synthetic peptide
KKQSVEP

SEQ ID NO: 4371 - protein, 7 aa, Artificial Sequence
  Description of Artificial Sequence: Synthetic peptide
KKVSDAL

SEQ ID NO: 4372 - protein, 7 aa, Artificial Sequence
  Description of Artificial Sequence: Synthetic peptide
KLAGKSD

SEQ ID NO: 4373 - protein, 7 aa, Artificial Sequence
  Description of Artificial Sequence: Synthetic peptide
KLAPSVT

SEQ ID NO: 4374 - protein, 7 aa, Artificial Sequence
  Description of Artificial Sequence: Synthetic peptide
KLASGLP

SEQ ID NO: 4375 - protein, 7 aa, Artificial Sequence
  Description of Artificial Sequence: Synthetic peptide
KLASPSP

SEQ ID NO: 4376 - protein, 7 aa, Artificial Sequence
  Description of Artificial Sequence: Synthetic peptide
KLASVSV

SEQ ID NO: 4377 - protein, 7 aa, Artificial Sequence
  Description of Artificial Sequence: Synthetic peptide
KLATTRD

SEQ ID NO: 4378 - protein, 7 aa, Artificial Sequence
  Description of Artificial Sequence: Synthetic peptide
KLDINYP

SEQ ID NO: 4379 - protein, 7 aa, Artificial Sequence
  Description of Artificial Sequence: Synthetic peptide
KLENGSW

SEQ ID NO: 4380 - protein, 7 aa, Artificial Sequence
  Description of Artificial Sequence: Synthetic peptide
KLGAVSL

SEQ ID NO: 4381 - protein, 7 aa, Artificial Sequence
  Description of Artificial Sequence: Synthetic peptide
KLGENTD

SEQ ID NO: 4382 - protein, 7 aa, Artificial Sequence
  Description of Artificial Sequence: Synthetic peptide
KLGHLHS

SEQ ID NO: 4383 - protein, 7 aa, Artificial Sequence
  Description of Artificial Sequence: Synthetic peptide
KLGTTSS

SEQ ID NO: 4384 - protein, 7 aa, Artificial Sequence
  Description of Artificial Sequence: Synthetic peptide
KLHVNTP

SEQ ID NO: 4385 - protein, 7 aa, Artificial Sequence
  Description of Artificial Sequence: Synthetic peptide
KLLGAVG

SEQ ID NO: 4386 - protein, 7 aa, Artificial Sequence
  Description of Artificial Sequence: Synthetic peptide
KLLKAPL

SEQ ID NO: 4387 - protein, 7 aa, Artificial Sequence
  Description of Artificial Sequence: Synthetic peptide
KLLPEPG

SEQ ID NO: 4388 - protein, 7 aa, Artificial Sequence
  Description of Artificial Sequence: Synthetic peptide
KLLPGQP

SEQ ID NO: 4389 - protein, 7 aa, Artificial Sequence
  Description of Artificial Sequence: Synthetic peptide
KLLPNPP

SEQ ID NO: 4390 - protein, 7 aa, Artificial Sequence
  Description of Artificial Sequence: Synthetic peptide
KLLSIMG

SEQ ID NO: 4391 - protein, 7 aa, Artificial Sequence
  Description of Artificial Sequence: Synthetic peptide
KLLSTGT

SEQ ID NO: 4392 - protein, 7 aa, Artificial Sequence
  Description of Artificial Sequence: Synthetic peptide
KLNSPDD

SEQ ID NO: 4393 - protein, 7 aa, Artificial Sequence
  Description of Artificial Sequence: Synthetic peptide
KLPNVTP

SEQ ID NO: 4394 - protein, 7 aa, Artificial Sequence
  Description of Artificial Sequence: Synthetic peptide
KLPSELI

SEQ ID NO: 4395 - protein, 7 aa, Artificial Sequence
  Description of Artificial Sequence: Synthetic peptide
KLQVPFS

SEQ ID NO: 4396 - protein, 7 aa, Artificial Sequence
  Description of Artificial Sequence: Synthetic peptide
KLRDIYP

SEQ ID NO: 4397 - protein, 7 aa, Artificial Sequence
  Description of Artificial Sequence: Synthetic peptide
KLSGEIV

SEQ ID NO: 4398 - protein, 7 aa, Artificial Sequence
  Description of Artificial Sequence: Synthetic peptide
KLSHQQF

SEQ ID NO: 4399 - protein, 7 aa, Artificial Sequence
  Description of Artificial Sequence: Synthetic peptide
KLSPTLS

SEQ ID NO: 4400 - protein, 7 aa, Artificial Sequence
  Description of Artificial Sequence: Synthetic peptide
KLSSPAL

SEQ ID NO: 4401 - protein, 7 aa, Artificial Sequence
  Description of Artificial Sequence: Synthetic peptide
KLSSSSW

SEQ ID NO: 4402 - protein, 7 aa, Artificial Sequence
  Description of Artificial Sequence: Synthetic peptide
KLSTESW

SEQ ID NO: 4403 - protein, 7 aa, Artificial Sequence
  Description of Artificial Sequence: Synthetic peptide
KLSYSTL

SEQ ID NO: 4404 - protein, 7 aa, Artificial Sequence
  Description of Artificial Sequence: Synthetic peptide
KLTEIVA

SEQ ID NO: 4405 - protein, 7 aa, Artificial Sequence
  Description of Artificial Sequence: Synthetic peptide
KLTGCND

SEQ ID NO: 4406 - protein, 7 aa, Artificial Sequence
  Description of Artificial Sequence: Synthetic peptide
KLTMTAP

SEQ ID NO: 4407 - protein, 7 aa, Artificial Sequence
  Description of Artificial Sequence: Synthetic peptide
KLTSPYA

SEQ ID NO: 4408 - protein, 7 aa, Artificial Sequence
  Description of Artificial Sequence: Synthetic peptide
KLTSSPT

SEQ ID NO: 4409 - protein, 7 aa, Artificial Sequence
  Description of Artificial Sequence: Synthetic peptide
KLTSSTV

SEQ ID NO: 4410 - protein, 7 aa, Artificial Sequence
  Description of Artificial Sequence: Synthetic peptide
KMAEDKV

SEQ ID NO: 4411 - protein, 7 aa, Artificial Sequence
  Description of Artificial Sequence: Synthetic peptide
KMDSVLP

SEQ ID NO: 4412 - protein, 7 aa, Artificial Sequence
  Description of Artificial Sequence: Synthetic peptide
KMEHRML

SEQ ID NO: 4413 - protein, 7 aa, Artificial Sequence
  Description of Artificial Sequence: Synthetic peptide
KMGTTLG

SEQ ID NO: 4414 - protein, 7 aa, Artificial Sequence
  Description of Artificial Sequence: Synthetic peptide
KMLSPQV

SEQ ID NO: 4415 - protein, 7 aa, Artificial Sequence
  Description of Artificial Sequence: Synthetic peptide
KMNSAAG

SEQ ID NO: 4416 - protein, 7 aa, Artificial Sequence
  Description of Artificial Sequence: Synthetic peptide
KMPEALR

SEQ ID NO: 4417 - protein, 7 aa, Artificial Sequence
  Description of Artificial Sequence: Synthetic peptide
KMPIPVP

SEQ ID NO: 4418 - protein, 7 aa, Artificial Sequence
  Description of Artificial Sequence: Synthetic peptide
KMSHSLD

SEQ ID NO: 4419 - protein, 7 aa, Artificial Sequence
  Description of Artificial Sequence: Synthetic peptide
KNAINMI

SEQ ID NO: 4420 - protein, 7 aa, Artificial Sequence
  Description of Artificial Sequence: Synthetic peptide
KNAKTIP

SEQ ID NO: 4421 - protein, 7 aa, Artificial Sequence
  Description of Artificial Sequence: Synthetic peptide
KNALPTS

SEQ ID NO: 4422 - protein, 7 aa, Artificial Sequence
  Description of Artificial Sequence: Synthetic peptide
KNAVSGS

SEQ ID NO: 4423 - protein, 7 aa, Artificial Sequence
  Description of Artificial Sequence: Synthetic peptide
KNAVTSV

SEQ ID NO: 4424 - protein, 7 aa, Artificial Sequence
  Description of Artificial Sequence: Synthetic peptide
KNERLPM

SEQ ID NO: 4425 - protein, 7 aa, Artificial Sequence
  Description of Artificial Sequence: Synthetic peptide
KNETSSP

SEQ ID NO: 4426 - protein, 7 aa, Artificial Sequence
  Description of Artificial Sequence: Synthetic peptide
KNGDIHC

SEQ ID NO: 4427 - protein, 7 aa, Artificial Sequence
  Description of Artificial Sequence: Synthetic peptide
KNGITPN

SEQ ID NO: 4428 - protein, 7 aa, Artificial Sequence
  Description of Artificial Sequence: Synthetic peptide
KNGLSPA

SEQ ID NO: 4429 - protein, 7 aa, Artificial Sequence
  Description of Artificial Sequence: Synthetic peptide
KNGTAQS

SEQ ID NO: 4430 - protein, 7 aa, Artificial Sequence
  Description of Artificial Sequence: Synthetic peptide
KNHQYAA

SEQ ID NO: 4431 - protein, 7 aa, Artificial Sequence
  Description of Artificial Sequence: Synthetic peptide
KNLPLVS

SEQ ID NO: 4432 - protein, 7 aa, Artificial Sequence
  Description of Artificial Sequence: Synthetic peptide
KNLSLGG

SEQ ID NO: 4433 - protein, 7 aa, Artificial Sequence
  Description of Artificial Sequence: Synthetic peptide
KNPLLSP

SEQ ID NO: 4434 - protein, 7 aa, Artificial Sequence
  Description of Artificial Sequence: Synthetic peptide
KNPMTAP

SEQ ID NO: 4435 - protein, 7 aa, Artificial Sequence
  Description of Artificial Sequence: Synthetic peptide
KNPQEPT

SEQ ID NO: 4436 - protein, 7 aa, Artificial Sequence
  Description of Artificial Sequence: Synthetic peptide
KNPRDLG

SEQ ID NO: 4437 - protein, 7 aa, Artificial Sequence
  Description of Artificial Sequence: Synthetic peptide
KNQPLGY

SEQ ID NO: 4438 - protein, 7 aa, Artificial Sequence
  Description of Artificial Sequence: Synthetic peptide
KNSTSQL

SEQ ID NO: 4439 - protein, 7 aa, Artificial Sequence
  Description of Artificial Sequence: Synthetic peptide
KNVMSGA

SEQ ID NO: 4440 - protein, 7 aa, Artificial Sequence
  Description of Artificial Sequence: Synthetic peptide
KNYSAAV

SEQ ID NO: 4441 - protein, 7 aa, Artificial Sequence
  Description of Artificial Sequence: Synthetic peptide
KPAGTDS

SEQ ID NO: 4442 - protein, 7 aa, Artificial Sequence
  Description of Artificial Sequence: Synthetic peptide
KPASNYD

SEQ ID NO: 4443 - protein, 7 aa, Artificial Sequence
  Description of Artificial Sequence: Synthetic peptide
KPATSPG

SEQ ID NO: 4444 - protein, 7 aa, Artificial Sequence
  Description of Artificial Sequence: Synthetic peptide
KPAVPVY

SEQ ID NO: 4445 - protein, 7 aa, Artificial Sequence
  Description of Artificial Sequence: Synthetic peptide
KPDRPPD

SEQ ID NO: 4446 - protein, 7 aa, Artificial Sequence
  Description of Artificial Sequence: Synthetic peptide
KPENSHS

SEQ ID NO: 4447 - protein, 7 aa, Artificial Sequence
  Description of Artificial Sequence: Synthetic peptide
KPFETGR

SEQ ID NO: 4448 - protein, 7 aa, Artificial Sequence
  Description of Artificial Sequence: Synthetic peptide
KPHPPSF

SEQ ID NO: 4449 - protein, 7 aa, Artificial Sequence
  Description of Artificial Sequence: Synthetic peptide
KPILQSS

SEQ ID NO: 4450 - protein, 7 aa, Artificial Sequence
  Description of Artificial Sequence: Synthetic peptide
KPLAQLS

SEQ ID NO: 4451 - protein, 7 aa, Artificial Sequence
  Description of Artificial Sequence: Synthetic peptide
KPLDHLT

SEQ ID NO: 4452 - protein, 7 aa, Artificial Sequence
  Description of Artificial Sequence: Synthetic peptide
KPLEVEG

SEQ ID NO: 4453 - protein, 7 aa, Artificial Sequence
  Description of Artificial Sequence: Synthetic peptide
KPLQVDP

SEQ ID NO: 4454 - protein, 7 aa, Artificial Sequence
  Description of Artificial Sequence: Synthetic peptide
KPMAHLE

SEQ ID NO: 4455 - protein, 7 aa, Artificial Sequence
  Description of Artificial Sequence: Synthetic peptide
KPMDPTL

SEQ ID NO: 4456 - protein, 7 aa, Artificial Sequence
  Description of Artificial Sequence: Synthetic peptide
KPMSITP

SEQ ID NO: 4457 - protein, 7 aa, Artificial Sequence
  Description of Artificial Sequence: Synthetic peptide
KPNAVSM

SEQ ID NO: 4458 - protein, 7 aa, Artificial Sequence
  Description of Artificial Sequence: Synthetic peptide
KPPILTS

SEQ ID NO: 4459 - protein, 7 aa, Artificial Sequence
  Description of Artificial Sequence: Synthetic peptide
KPPLAQD

SEQ ID NO: 4460 - protein, 7 aa, Artificial Sequence
  Description of Artificial Sequence: Synthetic peptide
KPPREAD

SEQ ID NO: 4461 - protein, 7 aa, Artificial Sequence
  Description of Artificial Sequence: Synthetic peptide
KPRAPSD

SEQ ID NO: 4462 - protein, 7 aa, Artificial Sequence
  Description of Artificial Sequence: Synthetic peptide
KPSGHSS

SEQ ID NO: 4463 - protein, 7 aa, Artificial Sequence
  Description of Artificial Sequence: Synthetic peptide
KPSGPPT

SEQ ID NO: 4464 - protein, 7 aa, Artificial Sequence
  Description of Artificial Sequence: Synthetic peptide
KPSVPTV

SEQ ID NO: 4465 - protein, 7 aa, Artificial Sequence
  Description of Artificial Sequence: Synthetic peptide
KPTGMHL

SEQ ID NO: 4466 - protein, 7 aa, Artificial Sequence
  Description of Artificial Sequence: Synthetic peptide
KPTPTLM

SEQ ID NO: 4467 - protein, 7 aa, Artificial Sequence
  Description of Artificial Sequence: Synthetic peptide
KPTVIPA

SEQ ID NO: 4468 - protein, 7 aa, Artificial Sequence
  Description of Artificial Sequence: Synthetic peptide
KPVGEFT

SEQ ID NO: 4469 - protein, 7 aa, Artificial Sequence
  Description of Artificial Sequence: Synthetic peptide
KPVPQPD

SEQ ID NO: 4470 - protein, 7 aa, Artificial Sequence
  Description of Artificial Sequence: Synthetic peptide
KPVTLDN

SEQ ID NO: 4471 - protein, 7 aa, Artificial Sequence
  Description of Artificial Sequence: Synthetic peptide
KPVTPHS

SEQ ID NO: 4472 - protein, 7 aa, Artificial Sequence
  Description of Artificial Sequence: Synthetic peptide
KPYLPEN

SEQ ID NO: 4473 - protein, 7 aa, Artificial Sequence
  Description of Artificial Sequence: Synthetic peptide
KQADIPR

SEQ ID NO: 4474 - protein, 7 aa, Artificial Sequence
  Description of Artificial Sequence: Synthetic peptide
KQALTMT

SEQ ID NO: 4475 - protein, 7 aa, Artificial Sequence
  Description of Artificial Sequence: Synthetic peptide
KQDRDRL

SEQ ID NO: 4476 - protein, 7 aa, Artificial Sequence
  Description of Artificial Sequence: Synthetic peptide
KQGLTPS

SEQ ID NO: 4477 - protein, 7 aa, Artificial Sequence
  Description of Artificial Sequence: Synthetic peptide
KQGVWPN

SEQ ID NO: 4478 - protein, 7 aa, Artificial Sequence
  Description of Artificial Sequence: Synthetic peptide
KQIQPKN

SEQ ID NO: 4479 - protein, 7 aa, Artificial Sequence
  Description of Artificial Sequence: Synthetic peptide
KQKHQFE

SEQ ID NO: 4480 - protein, 7 aa, Artificial Sequence
  Description of Artificial Sequence: Synthetic peptide
KQLPINV

SEQ ID NO: 4481 - protein, 7 aa, Artificial Sequence
  Description of Artificial Sequence: Synthetic peptide
KQMLDPT

SEQ ID NO: 4482 - protein, 7 aa, Artificial Sequence
  Description of Artificial Sequence: Synthetic peptide
KQMNDLA

SEQ ID NO: 4483 - protein, 7 aa, Artificial Sequence
  Description of Artificial Sequence: Synthetic peptide
KQNVINT

SEQ ID NO: 4484 - protein, 7 aa, Artificial Sequence
  Description of Artificial Sequence: Synthetic peptide
KQPPQPP

SEQ ID NO: 4485 - protein, 7 aa, Artificial Sequence
  Description of Artificial Sequence: Synthetic peptide
KQREQPM

SEQ ID NO: 4486 - protein, 7 aa, Artificial Sequence
  Description of Artificial Sequence: Synthetic peptide
KQSSHTT

SEQ ID NO: 4487 - protein, 7 aa, Artificial Sequence
  Description of Artificial Sequence: Synthetic peptide
KQSSTSI

SEQ ID NO: 4488 - protein, 7 aa, Artificial Sequence
  Description of Artificial Sequence: Synthetic peptide
KQTSVTG

SEQ ID NO: 4489 - protein, 7 aa, Artificial Sequence
  Description of Artificial Sequence: Synthetic peptide
KQTTPVL

SEQ ID NO: 4490 - protein, 7 aa, Artificial Sequence
  Description of Artificial Sequence: Synthetic peptide
KQVGSMP

SEQ ID NO: 4491 - protein, 7 aa, Artificial Sequence
  Description of Artificial Sequence: Synthetic peptide
KQVSSER

SEQ ID NO: 4492 - protein, 7 aa, Artificial Sequence
  Description of Artificial Sequence: Synthetic peptide
KQVVSVT

SEQ ID NO: 4493 - protein, 7 aa, Artificial Sequence
  Description of Artificial Sequence: Synthetic peptide
KQYSSSV

SEQ ID NO: 4494 - protein, 7 aa, Artificial Sequence
  Description of Artificial Sequence: Synthetic peptide
KRANAIP

SEQ ID NO: 4495 - protein, 7 aa, Artificial Sequence
  Description of Artificial Sequence: Synthetic peptide
KRAVAAE

SEQ ID NO: 4496 - protein, 7 aa, Artificial Sequence
  Description of Artificial Sequence: Synthetic peptide
KRDAAMP

SEQ ID NO: 4497 - protein, 7 aa, Artificial Sequence
  Description of Artificial Sequence: Synthetic peptide
KRDDMNV

SEQ ID NO: 4498 - protein, 7 aa, Artificial Sequence
  Description of Artificial Sequence: Synthetic peptide
KRDMGAG

SEQ ID NO: 4499 - protein, 7 aa, Artificial Sequence
  Description of Artificial Sequence: Synthetic peptide
KRDSTSP

SEQ ID NO: 4500 - protein, 7 aa, Artificial Sequence
  Description of Artificial Sequence: Synthetic peptide
KREFENI

SEQ ID NO: 4501 - protein, 7 aa, Artificial Sequence
  Description of Artificial Sequence: Synthetic peptide
KRESMPI

SEQ ID NO: 4502 - protein, 7 aa, Artificial Sequence
  Description of Artificial Sequence: Synthetic peptide
KREVLPT

SEQ ID NO: 4503 - protein, 7 aa, Artificial Sequence
  Description of Artificial Sequence: Synthetic peptide
KRFSGVE

SEQ ID NO: 4504 - protein, 7 aa, Artificial Sequence
  Description of Artificial Sequence: Synthetic peptide
KRHESMS

SEQ ID NO: 4505 - protein, 7 aa, Artificial Sequence
  Description of Artificial Sequence: Synthetic peptide
KRNSLNE

SEQ ID NO: 4506 - protein, 7 aa, Artificial Sequence
  Description of Artificial Sequence: Synthetic peptide
KRPAEHD

SEQ ID NO: 4507 - protein, 7 aa, Artificial Sequence
  Description of Artificial Sequence: Synthetic peptide
KRQHPEI

SEQ ID NO: 4508 - protein, 7 aa, Artificial Sequence
  Description of Artificial Sequence: Synthetic peptide
KRSLDSP

SEQ ID NO: 4509 - protein, 7 aa, Artificial Sequence
  Description of Artificial Sequence: Synthetic peptide
KRSLTET

SEQ ID NO: 4510 - protein, 7 aa, Artificial Sequence
  Description of Artificial Sequence: Synthetic peptide
KRTDGLG

SEQ ID NO: 4511 - protein, 7 aa, Artificial Sequence
  Description of Artificial Sequence: Synthetic peptide
KRTSEGV

SEQ ID NO: 4512 - protein, 7 aa, Artificial Sequence
  Description of Artificial Sequence: Synthetic peptide
KSAAIAY

SEQ ID NO: 4513 - protein, 7 aa, Artificial Sequence
  Description of Artificial Sequence: Synthetic peptide
KSAEETS

SEQ ID NO: 4514 - protein, 7 aa, Artificial Sequence
  Description of Artificial Sequence: Synthetic peptide
KSALMGP

SEQ ID NO: 4515 - protein, 7 aa, Artificial Sequence
  Description of Artificial Sequence: Synthetic peptide
KSASLSM

SEQ ID NO: 4516 - protein, 7 aa, Artificial Sequence
  Description of Artificial Sequence: Synthetic peptide
KSASWSE

SEQ ID NO: 4517 - protein, 7 aa, Artificial Sequence
  Description of Artificial Sequence: Synthetic peptide
KSDMPFN

SEQ ID NO: 4518 - protein, 7 aa, Artificial Sequence
  Description of Artificial Sequence: Synthetic peptide
KSDPEWP

SEQ ID NO: 4519 - protein, 7 aa, Artificial Sequence
  Description of Artificial Sequence: Synthetic peptide
KSDVMFQ

SEQ ID NO: 4520 - protein, 7 aa, Artificial Sequence
  Description of Artificial Sequence: Synthetic peptide
KSERYAV

SEQ ID NO: 4521 - protein, 7 aa, Artificial Sequence
  Description of Artificial Sequence: Synthetic peptide
KSFPVVQ

SEQ ID NO: 4522 - protein, 7 aa, Artificial Sequence
  Description of Artificial Sequence: Synthetic peptide
KSFQSTP

SEQ ID NO: 4523 - protein, 7 aa, Artificial Sequence
  Description of Artificial Sequence: Synthetic peptide
KSGPVTL

SEQ ID NO: 4524 - protein, 7 aa, Artificial Sequence
  Description of Artificial Sequence: Synthetic peptide
KSGTAFS

SEQ ID NO: 4525 - protein, 7 aa, Artificial Sequence
  Description of Artificial Sequence: Synthetic peptide
KSGVQSP

SEQ ID NO: 4526 - protein, 7 aa, Artificial Sequence
  Description of Artificial Sequence: Synthetic peptide
KSIATSG

SEQ ID NO: 4527 - protein, 7 aa, Artificial Sequence
  Description of Artificial Sequence: Synthetic peptide
KSIEFFA

SEQ ID NO: 4528 - protein, 7 aa, Artificial Sequence
  Description of Artificial Sequence: Synthetic peptide
KSIREDP

SEQ ID NO: 4529 - protein, 7 aa, Artificial Sequence
  Description of Artificial Sequence: Synthetic peptide
KSKDVRY

SEQ ID NO: 4530 - protein, 7 aa, Artificial Sequence
  Description of Artificial Sequence: Synthetic peptide
KSMDTTG

SEQ ID NO: 4531 - protein, 7 aa, Artificial Sequence
  Description of Artificial Sequence: Synthetic peptide
KSNACLH

SEQ ID NO: 4532 - protein, 7 aa, Artificial Sequence
  Description of Artificial Sequence: Synthetic peptide
KSNDRTD

SEQ ID NO: 4533 - protein, 7 aa, Artificial Sequence
  Description of Artificial Sequence: Synthetic peptide
KSNTPAA

SEQ ID NO: 4534 - protein, 7 aa, Artificial Sequence
  Description of Artificial Sequence: Synthetic peptide
KSNTTAD

SEQ ID NO: 4535 - protein, 7 aa, Artificial Sequence
  Description of Artificial Sequence: Synthetic peptide
KSPAEIA

SEQ ID NO: 4536 - protein, 7 aa, Artificial Sequence
  Description of Artificial Sequence: Synthetic peptide
KSPDGMV

SEQ ID NO: 4537 - protein, 7 aa, Artificial Sequence
  Description of Artificial Sequence: Synthetic peptide
KSPDRYH

SEQ ID NO: 4538 - protein, 7 aa, Artificial Sequence
  Description of Artificial Sequence: Synthetic peptide
KSPGVMV

SEQ ID NO: 4539 - protein, 7 aa, Artificial Sequence
  Description of Artificial Sequence: Synthetic peptide
KSPRTPE

SEQ ID NO: 4540 - protein, 7 aa, Artificial Sequence
  Description of Artificial Sequence: Synthetic peptide
KSPSHAA

SEQ ID NO: 4541 - protein, 7 aa, Artificial Sequence
  Description of Artificial Sequence: Synthetic peptide
KSPSTFH

SEQ ID NO: 4542 - protein, 7 aa, Artificial Sequence
  Description of Artificial Sequence: Synthetic peptide
KSPTLAS

SEQ ID NO: 4543 - protein, 7 aa, Artificial Sequence
  Description of Artificial Sequence: Synthetic peptide
KSPVRDT

SEQ ID NO: 4544 - protein, 7 aa, Artificial Sequence
  Description of Artificial Sequence: Synthetic peptide
KSPVSGN

SEQ ID NO: 4545 - protein, 7 aa, Artificial Sequence
  Description of Artificial Sequence: Synthetic peptide
KSPVSSY

SEQ ID NO: 4546 - protein, 7 aa, Artificial Sequence
  Description of Artificial Sequence: Synthetic peptide
KSQAEFG

SEQ ID NO: 4547 - protein, 7 aa, Artificial Sequence
  Description of Artificial Sequence: Synthetic peptide
KSQALTD

SEQ ID NO: 4548 - protein, 7 aa, Artificial Sequence
  Description of Artificial Sequence: Synthetic peptide
KSQGSHY

SEQ ID NO: 4549 - protein, 7 aa, Artificial Sequence
  Description of Artificial Sequence: Synthetic peptide
KSQHYPS

SEQ ID NO: 4550 - protein, 7 aa, Artificial Sequence
  Description of Artificial Sequence: Synthetic peptide
KSQSDKV

SEQ ID NO: 4551 - protein, 7 aa, Artificial Sequence
  Description of Artificial Sequence: Synthetic peptide
KSQSGNM

SEQ ID NO: 4552 - protein, 7 aa, Artificial Sequence
  Description of Artificial Sequence: Synthetic peptide
KSRDNLN

SEQ ID NO: 4553 - protein, 7 aa, Artificial Sequence
  Description of Artificial Sequence: Synthetic peptide
KSRNLEP

SEQ ID NO: 4554 - protein, 7 aa, Artificial Sequence
  Description of Artificial Sequence: Synthetic peptide
KSRTGTE

SEQ ID NO: 4555 - protein, 7 aa, Artificial Sequence
  Description of Artificial Sequence: Synthetic peptide
KSSAHAW

SEQ ID NO: 4556 - protein, 7 aa, Artificial Sequence
  Description of Artificial Sequence: Synthetic peptide
KSSDMVV

SEQ ID NO: 4557 - protein, 7 aa, Artificial Sequence
  Description of Artificial Sequence: Synthetic peptide
KSSHPPV

SEQ ID NO: 4558 - protein, 7 aa, Artificial Sequence
  Description of Artificial Sequence: Synthetic peptide
KSSPLTS

SEQ ID NO: 4559 - protein, 7 aa, Artificial Sequence
  Description of Artificial Sequence: Synthetic peptide
KSSQQSI

SEQ ID NO: 4560 - protein, 7 aa, Artificial Sequence
  Description of Artificial Sequence: Synthetic peptide
KSSSGDK

SEQ ID NO: 4561 - protein, 7 aa, Artificial Sequence
  Description of Artificial Sequence: Synthetic peptide
KSSSGLE

SEQ ID NO: 4562 - protein, 7 aa, Artificial Sequence
  Description of Artificial Sequence: Synthetic peptide
KSSTAGV

SEQ ID NO: 4563 - protein, 7 aa, Artificial Sequence
  Description of Artificial Sequence: Synthetic peptide
KSSTSGN

SEQ ID NO: 4564 - protein, 7 aa, Artificial Sequence
  Description of Artificial Sequence: Synthetic peptide
KSSYYPA

SEQ ID NO: 4565 - protein, 7 aa, Artificial Sequence
  Description of Artificial Sequence: Synthetic peptide
KSTHDVP

SEQ ID NO: 4566 - protein, 7 aa, Artificial Sequence
  Description of Artificial Sequence: Synthetic peptide
KSTPREG

SEQ ID NO: 4567 - protein, 7 aa, Artificial Sequence
  Description of Artificial Sequence: Synthetic peptide
KSTSGMP

SEQ ID NO: 4568 - protein, 7 aa, Artificial Sequence
  Description of Artificial Sequence: Synthetic peptide
KSTVPDL

SEQ ID NO: 4569 - protein, 7 aa, Artificial Sequence
  Description of Artificial Sequence: Synthetic peptide
KSTVTHF

SEQ ID NO: 4570 - protein, 7 aa, Artificial Sequence
  Description of Artificial Sequence: Synthetic peptide
KSVAISV

SEQ ID NO: 4571 - protein, 7 aa, Artificial Sequence
  Description of Artificial Sequence: Synthetic peptide
KSVGLSS

SEQ ID NO: 4572 - protein, 7 aa, Artificial Sequence
  Description of Artificial Sequence: Synthetic peptide
KSVLVES

SEQ ID NO: 4573 - protein, 7 aa, Artificial Sequence
  Description of Artificial Sequence: Synthetic peptide
KSYNSPY

SEQ ID NO: 4574 - protein, 7 aa, Artificial Sequence
  Description of Artificial Sequence: Synthetic peptide
KSYPNDH

SEQ ID NO: 4575 - protein, 7 aa, Artificial Sequence
  Description of Artificial Sequence: Synthetic peptide
KSYPPAL

SEQ ID NO: 4576 - protein, 7 aa, Artificial Sequence
  Description of Artificial Sequence: Synthetic peptide
KTADAPR

SEQ ID NO: 4577 - protein, 7 aa, Artificial Sequence
  Description of Artificial Sequence: Synthetic peptide
KTASLGP

SEQ ID NO: 4578 - protein, 7 aa, Artificial Sequence
  Description of Artificial Sequence: Synthetic peptide
KTASMPT

SEQ ID NO: 4579 - protein, 7 aa, Artificial Sequence
  Description of Artificial Sequence: Synthetic peptide
KTDRTLQ

SEQ ID NO: 4580 - protein, 7 aa, Artificial Sequence
  Description of Artificial Sequence: Synthetic peptide
KTDSRVP

SEQ ID NO: 4581 - protein, 7 aa, Artificial Sequence
  Description of Artificial Sequence: Synthetic peptide
KTEFRNP

SEQ ID NO: 4582 - protein, 7 aa, Artificial Sequence
  Description of Artificial Sequence: Synthetic peptide
KTEGSGW

SEQ ID NO: 4583 - protein, 7 aa, Artificial Sequence
  Description of Artificial Sequence: Synthetic peptide
KTERTLI

SEQ ID NO: 4584 - protein, 7 aa, Artificial Sequence
  Description of Artificial Sequence: Synthetic peptide
KTFTEKT

SEQ ID NO: 4585 - protein, 7 aa, Artificial Sequence
  Description of Artificial Sequence: Synthetic peptide
KTGPPPV

SEQ ID NO: 4586 - protein, 7 aa, Artificial Sequence
  Description of Artificial Sequence: Synthetic peptide
KTGVSSD

SEQ ID NO: 4587 - protein, 7 aa, Artificial Sequence
  Description of Artificial Sequence: Synthetic peptide
KTHGLCL

SEQ ID NO: 4588 - protein, 7 aa, Artificial Sequence
  Description of Artificial Sequence: Synthetic peptide
KTIITDL

SEQ ID NO: 4589 - protein, 7 aa, Artificial Sequence
  Description of Artificial Sequence: Synthetic peptide
KTLPLPE

SEQ ID NO: 4590 - protein, 7 aa, Artificial Sequence
  Description of Artificial Sequence: Synthetic peptide
KTMTTVP

SEQ ID NO: 4591 - protein, 7 aa, Artificial Sequence
  Description of Artificial Sequence: Synthetic peptide
KTMVPVV

SEQ ID NO: 4592 - protein, 7 aa, Artificial Sequence
  Description of Artificial Sequence: Synthetic peptide
KTNGHNY

SEQ ID NO: 4593 - protein, 7 aa, Artificial Sequence
  Description of Artificial Sequence: Synthetic peptide
KTNPLAQ

SEQ ID NO: 4594 - protein, 7 aa, Artificial Sequence
  Description of Artificial Sequence: Synthetic peptide
KTNSEII

SEQ ID NO: 4595 - protein, 7 aa, Artificial Sequence
  Description of Artificial Sequence: Synthetic peptide
KTPDPKK

SEQ ID NO: 4596 - protein, 7 aa, Artificial Sequence
  Description of Artificial Sequence: Synthetic peptide
KTPMVEL

SEQ ID NO: 4597 - protein, 7 aa, Artificial Sequence
  Description of Artificial Sequence: Synthetic peptide
KTQLMTS

SEQ ID NO: 4598 - protein, 7 aa, Artificial Sequence
  Description of Artificial Sequence: Synthetic peptide
KTQPGSV

SEQ ID NO: 4599 - protein, 7 aa, Artificial Sequence
  Description of Artificial Sequence: Synthetic peptide
KTQSILS

SEQ ID NO: 4600 - protein, 7 aa, Artificial Sequence
  Description of Artificial Sequence: Synthetic peptide
KTSEVRW

SEQ ID NO: 4601 - protein, 7 aa, Artificial Sequence
  Description of Artificial Sequence: Synthetic peptide
KTSQSHT

SEQ ID NO: 4602 - protein, 7 aa, Artificial Sequence
  Description of Artificial Sequence: Synthetic peptide
KTSVTRD

SEQ ID NO: 4603 - protein, 7 aa, Artificial Sequence
  Description of Artificial Sequence: Synthetic peptide
KTTAPHI

SEQ ID NO: 4604 - protein, 7 aa, Artificial Sequence
  Description of Artificial Sequence: Synthetic peptide
KTTDRIP

SEQ ID NO: 4605 - protein, 7 aa, Artificial Sequence
  Description of Artificial Sequence: Synthetic peptide
KTTLMTS

SEQ ID NO: 4606 - protein, 7 aa, Artificial Sequence
  Description of Artificial Sequence: Synthetic peptide
KTTPVLV

SEQ ID NO: 4607 - protein, 7 aa, Artificial Sequence
  Description of Artificial Sequence: Synthetic peptide
KTTQNSN

SEQ ID NO: 4608 - protein, 7 aa, Artificial Sequence
  Description of Artificial Sequence: Synthetic peptide
KTTSKPP

SEQ ID NO: 4609 - protein, 7 aa, Artificial Sequence
  Description of Artificial Sequence: Synthetic peptide
KTVAMER

SEQ ID NO: 4610 - protein, 7 aa, Artificial Sequence
  Description of Artificial Sequence: Synthetic peptide
KTVRETS

SEQ ID NO: 4611 - protein, 7 aa, Artificial Sequence
  Description of Artificial Sequence: Synthetic peptide
KTVTNVL

SEQ ID NO: 4612 - protein, 7 aa, Artificial Sequence
  Description of Artificial Sequence: Synthetic peptide
KTVVANP

SEQ ID NO: 4613 - protein, 7 aa, Artificial Sequence
  Description of Artificial Sequence: Synthetic peptide
KTYGTHA

SEQ ID NO: 4614 - protein, 7 aa, Artificial Sequence
  Description of Artificial Sequence: Synthetic peptide
KVALATL

SEQ ID NO: 4615 - protein, 7 aa, Artificial Sequence
  Description of Artificial Sequence: Synthetic peptide
KVAMPVL

SEQ ID NO: 4616 - protein, 7 aa, Artificial Sequence
  Description of Artificial Sequence: Synthetic peptide
KVATSTI

SEQ ID NO: 4617 - protein, 7 aa, Artificial Sequence
  Description of Artificial Sequence: Synthetic peptide
KVDSREP

SEQ ID NO: 4618 - protein, 7 aa, Artificial Sequence
  Description of Artificial Sequence: Synthetic peptide
KVDVLYN

SEQ ID NO: 4619 - protein, 7 aa, Artificial Sequence
  Description of Artificial Sequence: Synthetic peptide
KVESMDS

SEQ ID NO: 4620 - protein, 7 aa, Artificial Sequence
  Description of Artificial Sequence: Synthetic peptide
KVGAGNT

SEQ ID NO: 4621 - protein, 7 aa, Artificial Sequence
  Description of Artificial Sequence: Synthetic peptide
KVGNNAY

SEQ ID NO: 4622 - protein, 7 aa, Artificial Sequence
  Description of Artificial Sequence: Synthetic peptide
KVGSVYT

SEQ ID NO: 4623 - protein, 7 aa, Artificial Sequence
  Description of Artificial Sequence: Synthetic peptide
KVLQPHP

SEQ ID NO: 4624 - protein, 7 aa, Artificial Sequence
  Description of Artificial Sequence: Synthetic peptide
KVNITAF

SEQ ID NO: 4625 - protein, 7 aa, Artificial Sequence
  Description of Artificial Sequence: Synthetic peptide
KVNLFAG

SEQ ID NO: 4626 - protein, 7 aa, Artificial Sequence
  Description of Artificial Sequence: Synthetic peptide
KVNSVAF

SEQ ID NO: 4627 - protein, 7 aa, Artificial Sequence
  Description of Artificial Sequence: Synthetic peptide
KVQERSQ

SEQ ID NO: 4628 - protein, 7 aa, Artificial Sequence
  Description of Artificial Sequence: Synthetic peptide
KVSAALS

SEQ ID NO: 4629 - protein, 7 aa, Artificial Sequence
  Description of Artificial Sequence: Synthetic peptide
KVSGLSM

SEQ ID NO: 4630 - protein, 7 aa, Artificial Sequence
  Description of Artificial Sequence: Synthetic peptide
KVSRISD

SEQ ID NO: 4631 - protein, 7 aa, Artificial Sequence
  Description of Artificial Sequence: Synthetic peptide
KVSSTVE

SEQ ID NO: 4632 - protein, 7 aa, Artificial Sequence
  Description of Artificial Sequence: Synthetic peptide
KVTAPNA

SEQ ID NO: 4633 - protein, 7 aa, Artificial Sequence
  Description of Artificial Sequence: Synthetic peptide
KVTGMPV

SEQ ID NO: 4634 - protein, 7 aa, Artificial Sequence
  Description of Artificial Sequence: Synthetic peptide
KVTGYSE

SEQ ID NO: 4635 - protein, 7 aa, Artificial Sequence
  Description of Artificial Sequence: Synthetic peptide
KVTTPLP

SEQ ID NO: 4636 - protein, 7 aa, Artificial Sequence
  Description of Artificial Sequence: Synthetic peptide
KVVAPAL

SEQ ID NO: 4637 - protein, 7 aa, Artificial Sequence
  Description of Artificial Sequence: Synthetic peptide
KVVLREG

SEQ ID NO: 4638 - protein, 7 aa, Artificial Sequence
  Description of Artificial Sequence: Synthetic peptide
KVVTAPE

SEQ ID NO: 4639 - protein, 7 aa, Artificial Sequence
  Description of Artificial Sequence: Synthetic peptide
KWTDGPA

SEQ ID NO: 4640 - protein, 7 aa, Artificial Sequence
  Description of Artificial Sequence: Synthetic peptide
KWVPESP

SEQ ID NO: 4641 - protein, 7 aa, Artificial Sequence
  Description of Artificial Sequence: Synthetic peptide
KYAHSPT

SEQ ID NO: 4642 - protein, 7 aa, Artificial Sequence
  Description of Artificial Sequence: Synthetic peptide
KYATNAA

SEQ ID NO: 4643 - protein, 7 aa, Artificial Sequence
  Description of Artificial Sequence: Synthetic peptide
KYDGGQH

SEQ ID NO: 4644 - protein, 7 aa, Artificial Sequence
  Description of Artificial Sequence: Synthetic peptide
KYGSTVV

SEQ ID NO: 4645 - protein, 7 aa, Artificial Sequence
  Description of Artificial Sequence: Synthetic peptide
KYKDLPA

SEQ ID NO: 4646 - protein, 7 aa, Artificial Sequence
  Description of Artificial Sequence: Synthetic peptide
KYPALSA

SEQ ID NO: 4647 - protein, 7 aa, Artificial Sequence
  Description of Artificial Sequence: Synthetic peptide
KYRENNV

SEQ ID NO: 4648 - protein, 7 aa, Artificial Sequence
  Description of Artificial Sequence: Synthetic peptide
KYSKPDT

SEQ ID NO: 4649 - protein, 7 aa, Artificial Sequence
  Description of Artificial Sequence: Synthetic peptide
KYTGRQE

SEQ ID NO: 4650 - protein, 7 aa, Artificial Sequence
  Description of Artificial Sequence: Synthetic peptide
KYTLTPN

SEQ ID NO: 4651 - protein, 7 aa, Artificial Sequence
  Description of Artificial Sequence: Synthetic peptide
KYVCGPN

SEQ ID NO: 4652 - protein, 7 aa, Artificial Sequence
  Description of Artificial Sequence: Synthetic peptide
KYVGGPN

SEQ ID NO: 4653 - protein, 7 aa, Artificial Sequence
  Description of Artificial Sequence: Synthetic peptide
KYVNGVD

SEQ ID NO: 4654 - protein, 7 aa, Artificial Sequence
  Description of Artificial Sequence: Synthetic peptide
KYVTTSP

SEQ ID NO: 4655 - protein, 7 aa, Artificial Sequence
  Description of Artificial Sequence: Synthetic peptide
LAADVRF

SEQ ID NO: 4656 - protein, 7 aa, Artificial Sequence
  Description of Artificial Sequence: Synthetic peptide
LAAGCPV

SEQ ID NO: 4657 - protein, 7 aa, Artificial Sequence
  Description of Artificial Sequence: Synthetic peptide
LAAGIRF

SEQ ID NO: 4658 - protein, 7 aa, Artificial Sequence
  Description of Artificial Sequence: Synthetic peptide
LAAKPLI

SEQ ID NO: 4659 - protein, 7 aa, Artificial Sequence
  Description of Artificial Sequence: Synthetic peptide
LAANGAH

SEQ ID NO: 4660 - protein, 7 aa, Artificial Sequence
  Description of Artificial Sequence: Synthetic peptide
LAAPTSS

SEQ ID NO: 4661 - protein, 7 aa, Artificial Sequence
  Description of Artificial Sequence: Synthetic peptide
LAAQDKE

SEQ ID NO: 4662 - protein, 7 aa, Artificial Sequence
  Description of Artificial Sequence: Synthetic peptide
LAARMQP

SEQ ID NO: 4663 - protein, 7 aa, Artificial Sequence
  Description of Artificial Sequence: Synthetic peptide
LAARRPD

SEQ ID NO: 4664 - protein, 7 aa, Artificial Sequence
  Description of Artificial Sequence: Synthetic peptide
LAASSRP

SEQ ID NO: 4665 - protein, 7 aa, Artificial Sequence
  Description of Artificial Sequence: Synthetic peptide
LADKPAM

SEQ ID NO: 4666 - protein, 7 aa, Artificial Sequence
  Description of Artificial Sequence: Synthetic peptide
LADMLKS

SEQ ID NO: 4667 - protein, 7 aa, Artificial Sequence
  Description of Artificial Sequence: Synthetic peptide
LADRENT

SEQ ID NO: 4668 - protein, 7 aa, Artificial Sequence
  Description of Artificial Sequence: Synthetic peptide
LADRRIE

SEQ ID NO: 4669 - protein, 7 aa, Artificial Sequence
  Description of Artificial Sequence: Synthetic peptide
LAEAVTS

SEQ ID NO: 4670 - protein, 7 aa, Artificial Sequence
  Description of Artificial Sequence: Synthetic peptide
LAEELGR

SEQ ID NO: 4671 - protein, 7 aa, Artificial Sequence
  Description of Artificial Sequence: Synthetic peptide
LAENSRT

SEQ ID NO: 4672 - protein, 7 aa, Artificial Sequence
  Description of Artificial Sequence: Synthetic peptide
LAESRGY

SEQ ID NO: 4673 - protein, 7 aa, Artificial Sequence
  Description of Artificial Sequence: Synthetic peptide
LAEVIYD

SEQ ID NO: 4674 - protein, 7 aa, Artificial Sequence
  Description of Artificial Sequence: Synthetic peptide
LAGALQE

SEQ ID NO: 4675 - protein, 7 aa, Artificial Sequence
  Description of Artificial Sequence: Synthetic peptide
LAGDRQW

SEQ ID NO: 4676 - protein, 7 aa, Artificial Sequence
  Description of Artificial Sequence: Synthetic peptide
LAGHLMP

SEQ ID NO: 4677 - protein, 7 aa, Artificial Sequence
  Description of Artificial Sequence: Synthetic peptide
LAGKGLL

SEQ ID NO: 4678 - protein, 7 aa, Artificial Sequence
  Description of Artificial Sequence: Synthetic peptide
LAGKNIA

SEQ ID NO: 4679 - protein, 7 aa, Artificial Sequence
  Description of Artificial Sequence: Synthetic peptide
LAGLGHL

SEQ ID NO: 4680 - protein, 7 aa, Artificial Sequence
  Description of Artificial Sequence: Synthetic peptide
LAGLVRN

SEQ ID NO: 4681 - protein, 7 aa, Artificial Sequence
  Description of Artificial Sequence: Synthetic peptide
LAHGTGL

SEQ ID NO: 4682 - protein, 7 aa, Artificial Sequence
  Description of Artificial Sequence: Synthetic peptide
LAHKANS

SEQ ID NO: 4683 - protein, 7 aa, Artificial Sequence
  Description of Artificial Sequence: Synthetic peptide
LAHKGIV

SEQ ID NO: 4684 - protein, 7 aa, Artificial Sequence
  Description of Artificial Sequence: Synthetic peptide
LAHPVQF

SEQ ID NO: 4685 - protein, 7 aa, Artificial Sequence
  Description of Artificial Sequence: Synthetic peptide
LAHSTSV

SEQ ID NO: 4686 - protein, 7 aa, Artificial Sequence
  Description of Artificial Sequence: Synthetic peptide
LAIDPAD

SEQ ID NO: 4687 - protein, 7 aa, Artificial Sequence
  Description of Artificial Sequence: Synthetic peptide
LAIGPLR

SEQ ID NO: 4688 - protein, 7 aa, Artificial Sequence
  Description of Artificial Sequence: Synthetic peptide
LAKFAPD

SEQ ID NO: 4689 - protein, 7 aa, Artificial Sequence
  Description of Artificial Sequence: Synthetic peptide
LAKSLQA

SEQ ID NO: 4690 - protein, 7 aa, Artificial Sequence
  Description of Artificial Sequence: Synthetic peptide
LALAGSD

SEQ ID NO: 4691 - protein, 7 aa, Artificial Sequence
  Description of Artificial Sequence: Synthetic peptide
LALGVLR

SEQ ID NO: 4692 - protein, 7 aa, Artificial Sequence
  Description of Artificial Sequence: Synthetic peptide
LALGVPY

SEQ ID NO: 4693 - protein, 7 aa, Artificial Sequence
  Description of Artificial Sequence: Synthetic peptide
LALKISS

SEQ ID NO: 4694 - protein, 7 aa, Artificial Sequence
  Description of Artificial Sequence: Synthetic peptide
LALKSHP

SEQ ID NO: 4695 - protein, 7 aa, Artificial Sequence
  Description of Artificial Sequence: Synthetic peptide
LALKSRD

SEQ ID NO: 4696 - protein, 7 aa, Artificial Sequence
  Description of Artificial Sequence: Synthetic peptide
LALPAHA

SEQ ID NO: 4697 - protein, 7 aa, Artificial Sequence
  Description of Artificial Sequence: Synthetic peptide
LALRGPG

SEQ ID NO: 4698 - protein, 7 aa, Artificial Sequence
  Description of Artificial Sequence: Synthetic peptide
LALSGNT

SEQ ID NO: 4699 - protein, 7 aa, Artificial Sequence
  Description of Artificial Sequence: Synthetic peptide
LALVTDR

SEQ ID NO: 4700 - protein, 7 aa, Artificial Sequence
  Description of Artificial Sequence: Synthetic peptide
LAMGGIR

SEQ ID NO: 4701 - protein, 7 aa, Artificial Sequence
  Description of Artificial Sequence: Synthetic peptide
LAMQSRN

SEQ ID NO: 4702 - protein, 7 aa, Artificial Sequence
  Description of Artificial Sequence: Synthetic peptide
LANGNPA

SEQ ID NO: 4703 - protein, 7 aa, Artificial Sequence
  Description of Artificial Sequence: Synthetic peptide
LANIATK

SEQ ID NO: 4704 - protein, 7 aa, Artificial Sequence
  Description of Artificial Sequence: Synthetic peptide
LANKIPP

SEQ ID NO: 4705 - protein, 7 aa, Artificial Sequence
  Description of Artificial Sequence: Synthetic peptide
LANKSMS

SEQ ID NO: 4706 - protein, 7 aa, Artificial Sequence
  Description of Artificial Sequence: Synthetic peptide
LANPANG

SEQ ID NO: 4707 - protein, 7 aa, Artificial Sequence
  Description of Artificial Sequence: Synthetic peptide
LANPLGR

SEQ ID NO: 4708 - protein, 7 aa, Artificial Sequence
  Description of Artificial Sequence: Synthetic peptide
LANPMSA

SEQ ID NO: 4709 - protein, 7 aa, Artificial Sequence
  Description of Artificial Sequence: Synthetic peptide
LANSFVA

SEQ ID NO: 4710 - protein, 7 aa, Artificial Sequence
  Description of Artificial Sequence: Synthetic peptide
LANSKSL

SEQ ID NO: 4711 - protein, 7 aa, Artificial Sequence
  Description of Artificial Sequence: Synthetic peptide
LANVRAS

SEQ ID NO: 4712 - protein, 7 aa, Artificial Sequence
  Description of Artificial Sequence: Synthetic peptide
LAPGLAM

SEQ ID NO: 4713 - protein, 7 aa, Artificial Sequence
  Description of Artificial Sequence: Synthetic peptide
LAPHTSS

SEQ ID NO: 4714 - protein, 7 aa, Artificial Sequence
  Description of Artificial Sequence: Synthetic peptide
LAPLSKV

SEQ ID NO: 4715 - protein, 7 aa, Artificial Sequence
  Description of Artificial Sequence: Synthetic peptide
LAPPLRQ

SEQ ID NO: 4716 - protein, 7 aa, Artificial Sequence
  Description of Artificial Sequence: Synthetic peptide
LAPSYLP

SEQ ID NO: 4717 - protein, 7 aa, Artificial Sequence
  Description of Artificial Sequence: Synthetic peptide
LAPTLTP

SEQ ID NO: 4718 - protein, 7 aa, Artificial Sequence
  Description of Artificial Sequence: Synthetic peptide
LAQGSIS

SEQ ID NO: 4719 - protein, 7 aa, Artificial Sequence
  Description of Artificial Sequence: Synthetic peptide
LAQQKDT

SEQ ID NO: 4720 - protein, 7 aa, Artificial Sequence
  Description of Artificial Sequence: Synthetic peptide
LAQRPHQ

SEQ ID NO: 4721 - protein, 7 aa, Artificial Sequence
  Description of Artificial Sequence: Synthetic peptide
LAQSSSR

SEQ ID NO: 4722 - protein, 7 aa, Artificial Sequence
  Description of Artificial Sequence: Synthetic peptide
LAQVSAS

SEQ ID NO: 4723 - protein, 7 aa, Artificial Sequence
  Description of Artificial Sequence: Synthetic peptide
LARGPGD

SEQ ID NO: 4724 - protein, 7 aa, Artificial Sequence
  Description of Artificial Sequence: Synthetic peptide
LARLSPT

SEQ ID NO: 4725 - protein, 7 aa, Artificial Sequence
  Description of Artificial Sequence: Synthetic peptide
LARQSPE

SEQ ID NO: 4726 - protein, 7 aa, Artificial Sequence
  Description of Artificial Sequence: Synthetic peptide
LARQTSS

SEQ ID NO: 4727 - protein, 7 aa, Artificial Sequence
  Description of Artificial Sequence: Synthetic peptide
LARSPTL

SEQ ID NO: 4728 - protein, 7 aa, Artificial Sequence
  Description of Artificial Sequence: Synthetic peptide
LARVNSS

SEQ ID NO: 4729 - protein, 7 aa, Artificial Sequence
  Description of Artificial Sequence: Synthetic peptide
LARVSQT

SEQ ID NO: 4730 - protein, 7 aa, Artificial Sequence
  Description of Artificial Sequence: Synthetic peptide
LASAMKT

SEQ ID NO: 4731 - protein, 7 aa, Artificial Sequence
  Description of Artificial Sequence: Synthetic peptide
LASAVQS

SEQ ID NO: 4732 - protein, 7 aa, Artificial Sequence
  Description of Artificial Sequence: Synthetic peptide
LASDSRA

SEQ ID NO: 4733 - protein, 7 aa, Artificial Sequence
  Description of Artificial Sequence: Synthetic peptide
LASEFIA

SEQ ID NO: 4734 - protein, 7 aa, Artificial Sequence
  Description of Artificial Sequence: Synthetic peptide
LASEKVS

SEQ ID NO: 4735 - protein, 7 aa, Artificial Sequence
  Description of Artificial Sequence: Synthetic peptide
LASLVSV

SEQ ID NO: 4736 - protein, 7 aa, Artificial Sequence
  Description of Artificial Sequence: Synthetic peptide
LASPTDY

SEQ ID NO: 4737 - protein, 7 aa, Artificial Sequence
  Description of Artificial Sequence: Synthetic peptide
LASQGFN

SEQ ID NO: 4738 - protein, 7 aa, Artificial Sequence
  Description of Artificial Sequence: Synthetic peptide
LASQGPG

SEQ ID NO: 4739 - protein, 7 aa, Artificial Sequence
  Description of Artificial Sequence: Synthetic peptide
LASRPAH

SEQ ID NO: 4740 - protein, 7 aa, Artificial Sequence
  Description of Artificial Sequence: Synthetic peptide
LASVNTS

SEQ ID NO: 4741 - protein, 7 aa, Artificial Sequence
  Description of Artificial Sequence: Synthetic peptide
LATAHRP

SEQ ID NO: 4742 - protein, 7 aa, Artificial Sequence
  Description of Artificial Sequence: Synthetic peptide
LATAVVD

SEQ ID NO: 4743 - protein, 7 aa, Artificial Sequence
  Description of Artificial Sequence: Synthetic peptide
LATKSYT

SEQ ID NO: 4744 - protein, 7 aa, Artificial Sequence
  Description of Artificial Sequence: Synthetic peptide
LATPPII

SEQ ID NO: 4745 - protein, 7 aa, Artificial Sequence
  Description of Artificial Sequence: Synthetic peptide
LATRQVG

SEQ ID NO: 4746 - protein, 7 aa, Artificial Sequence
  Description of Artificial Sequence: Synthetic peptide
LATRVRE

SEQ ID NO: 4747 - protein, 7 aa, Artificial Sequence
  Description of Artificial Sequence: Synthetic peptide
LATSPLH

SEQ ID NO: 4748 - protein, 7 aa, Artificial Sequence
  Description of Artificial Sequence: Synthetic peptide
LATSPNH

SEQ ID NO: 4749 - protein, 7 aa, Artificial Sequence
  Description of Artificial Sequence: Synthetic peptide
LATSRSL

SEQ ID NO: 4750 - protein, 7 aa, Artificial Sequence
  Description of Artificial Sequence: Synthetic peptide
LATTSGA

SEQ ID NO: 4751 - protein, 7 aa, Artificial Sequence
  Description of Artificial Sequence: Synthetic peptide
LAVEKLP

SEQ ID NO: 4752 - protein, 7 aa, Artificial Sequence
  Description of Artificial Sequence: Synthetic peptide
LAVGTKG

SEQ ID NO: 4753 - protein, 7 aa, Artificial Sequence
  Description of Artificial Sequence: Synthetic peptide
LAVSPMP

SEQ ID NO: 4754 - protein, 7 aa, Artificial Sequence
  Description of Artificial Sequence: Synthetic peptide
LAVVESL

SEQ ID NO: 4755 - protein, 7 aa, Artificial Sequence
  Description of Artificial Sequence: Synthetic peptide
LCRNSHS

SEQ ID NO: 4756 - protein, 7 aa, Artificial Sequence
  Description of Artificial Sequence: Synthetic peptide
LDARRFF

SEQ ID NO: 4757 - protein, 7 aa, Artificial Sequence
  Description of Artificial Sequence: Synthetic peptide
LDDPGGC

SEQ ID NO: 4758 - protein, 7 aa, Artificial Sequence
  Description of Artificial Sequence: Synthetic peptide
LDDSSLL

SEQ ID NO: 4759 - protein, 7 aa, Artificial Sequence
  Description of Artificial Sequence: Synthetic peptide
LDDVMPG

SEQ ID NO: 4760 - protein, 7 aa, Artificial Sequence
  Description of Artificial Sequence: Synthetic peptide
LDERWPT

SEQ ID NO: 4761 - protein, 7 aa, Artificial Sequence
  Description of Artificial Sequence: Synthetic peptide
LDFPASS

SEQ ID NO: 4762 - protein, 7 aa, Artificial Sequence
  Description of Artificial Sequence: Synthetic peptide
LDFREDS

SEQ ID NO: 4763 - protein, 7 aa, Artificial Sequence
  Description of Artificial Sequence: Synthetic peptide
LDGGSTR

SEQ ID NO: 4764 - protein, 7 aa, Artificial Sequence
  Description of Artificial Sequence: Synthetic peptide
LDGQMLA

SEQ ID NO: 4765 - protein, 7 aa, Artificial Sequence
  Description of Artificial Sequence: Synthetic peptide
LDGRPLV

SEQ ID NO: 4766 - protein, 7 aa, Artificial Sequence
  Description of Artificial Sequence: Synthetic peptide
LDIERHS

SEQ ID NO: 4767 - protein, 7 aa, Artificial Sequence
  Description of Artificial Sequence: Synthetic peptide
LDITNVK

SEQ ID NO: 4768 - protein, 7 aa, Artificial Sequence
  Description of Artificial Sequence: Synthetic peptide
LDKFNSK

SEQ ID NO: 4769 - protein, 7 aa, Artificial Sequence
  Description of Artificial Sequence: Synthetic peptide
LDKKHQS

SEQ ID NO: 4770 - protein, 7 aa, Artificial Sequence
  Description of Artificial Sequence: Synthetic peptide
LDKMRTT

SEQ ID NO: 4771 - protein, 7 aa, Artificial Sequence
  Description of Artificial Sequence: Synthetic peptide
LDKRDIL

SEQ ID NO: 4772 - protein, 7 aa, Artificial Sequence
  Description of Artificial Sequence: Synthetic peptide
LDKTSRL

SEQ ID NO: 4773 - protein, 7 aa, Artificial Sequence
  Description of Artificial Sequence: Synthetic peptide
LDLANSM

SEQ ID NO: 4774 - protein, 7 aa, Artificial Sequence
  Description of Artificial Sequence: Synthetic peptide
LDLHLQA

SEQ ID NO: 4775 - protein, 7 aa, Artificial Sequence
  Description of Artificial Sequence: Synthetic peptide
LDLKSVM

SEQ ID NO: 4776 - protein, 7 aa, Artificial Sequence
  Description of Artificial Sequence: Synthetic peptide
LDLQTTK

SEQ ID NO: 4777 - protein, 7 aa, Artificial Sequence
  Description of Artificial Sequence: Synthetic peptide
LDLVAFE

SEQ ID NO: 4778 - protein, 7 aa, Artificial Sequence
  Description of Artificial Sequence: Synthetic peptide
LDMRDSG

SEQ ID NO: 4779 - protein, 7 aa, Artificial Sequence
  Description of Artificial Sequence: Synthetic peptide
LDMRTQG

SEQ ID NO: 4780 - protein, 7 aa, Artificial Sequence
  Description of Artificial Sequence: Synthetic peptide
LDNPHHV

SEQ ID NO: 4781 - protein, 7 aa, Artificial Sequence
  Description of Artificial Sequence: Synthetic peptide
LDNPVSA

SEQ ID NO: 4782 - protein, 7 aa, Artificial Sequence
  Description of Artificial Sequence: Synthetic peptide
LDPDARR

SEQ ID NO: 4783 - protein, 7 aa, Artificial Sequence
  Description of Artificial Sequence: Synthetic peptide
LDPGLKS

SEQ ID NO: 4784 - protein, 7 aa, Artificial Sequence
  Description of Artificial Sequence: Synthetic peptide
LDRLSSI

SEQ ID NO: 4785 - protein, 7 aa, Artificial Sequence
  Description of Artificial Sequence: Synthetic peptide
LDRLVTG

SEQ ID NO: 4786 - protein, 7 aa, Artificial Sequence
  Description of Artificial Sequence: Synthetic peptide
LDRMVVG

SEQ ID NO: 4787 - protein, 7 aa, Artificial Sequence
  Description of Artificial Sequence: Synthetic peptide
LDRPSAW

SEQ ID NO: 4788 - protein, 7 aa, Artificial Sequence
  Description of Artificial Sequence: Synthetic peptide
LDRRPIQ

SEQ ID NO: 4789 - protein, 7 aa, Artificial Sequence
  Description of Artificial Sequence: Synthetic peptide
LDRRPML

SEQ ID NO: 4790 - protein, 7 aa, Artificial Sequence
  Description of Artificial Sequence: Synthetic peptide
LDRYTPP

SEQ ID NO: 4791 - protein, 7 aa, Artificial Sequence
  Description of Artificial Sequence: Synthetic peptide
LDSGRPS

SEQ ID NO: 4792 - protein, 7 aa, Artificial Sequence
  Description of Artificial Sequence: Synthetic peptide
LDSLHIP

SEQ ID NO: 4793 - protein, 7 aa, Artificial Sequence
  Description of Artificial Sequence: Synthetic peptide
LDSNVTS

SEQ ID NO: 4794 - protein, 7 aa, Artificial Sequence
  Description of Artificial Sequence: Synthetic peptide
LDSPAMA

SEQ ID NO: 4795 - protein, 7 aa, Artificial Sequence
  Description of Artificial Sequence: Synthetic peptide
LDSPPNN

SEQ ID NO: 4796 - protein, 7 aa, Artificial Sequence
  Description of Artificial Sequence: Synthetic peptide
LDSSHGH

SEQ ID NO: 4797 - protein, 7 aa, Artificial Sequence
  Description of Artificial Sequence: Synthetic peptide
LDSSRSS

SEQ ID NO: 4798 - protein, 7 aa, Artificial Sequence
  Description of Artificial Sequence: Synthetic peptide
LDSSWTP

SEQ ID NO: 4799 - protein, 7 aa, Artificial Sequence
  Description of Artificial Sequence: Synthetic peptide
LDSTPRP

SEQ ID NO: 4800 - protein, 7 aa, Artificial Sequence
  Description of Artificial Sequence: Synthetic peptide
LDTQAGR

SEQ ID NO: 4801 - protein, 7 aa, Artificial Sequence
  Description of Artificial Sequence: Synthetic peptide
LDTQSRL

SEQ ID NO: 4802 - protein, 7 aa, Artificial Sequence
  Description of Artificial Sequence: Synthetic peptide
LDTRGIS

SEQ ID NO: 4803 - protein, 7 aa, Artificial Sequence
  Description of Artificial Sequence: Synthetic peptide
LDTRYRY

SEQ ID NO: 4804 - protein, 7 aa, Artificial Sequence
  Description of Artificial Sequence: Synthetic peptide
LDTVQSK

SEQ ID NO: 4805 - protein, 7 aa, Artificial Sequence
  Description of Artificial Sequence: Synthetic peptide
LDVATSR

SEQ ID NO: 4806 - protein, 7 aa, Artificial Sequence
  Description of Artificial Sequence: Synthetic peptide
LDVKCDP

SEQ ID NO: 4807 - protein, 7 aa, Artificial Sequence
  Description of Artificial Sequence: Synthetic peptide
LDVLDCK

SEQ ID NO: 4808 - protein, 7 aa, Artificial Sequence
  Description of Artificial Sequence: Synthetic peptide
LDVNGLR

SEQ ID NO: 4809 - protein, 7 aa, Artificial Sequence
  Description of Artificial Sequence: Synthetic peptide
LDVSQRL

SEQ ID NO: 4810 - protein, 7 aa, Artificial Sequence
  Description of Artificial Sequence: Synthetic peptide
LDVVTRV

SEQ ID NO: 4811 - protein, 7 aa, Artificial Sequence
  Description of Artificial Sequence: Synthetic peptide
LDVYSRE

SEQ ID NO: 4812 - protein, 7 aa, Artificial Sequence
  Description of Artificial Sequence: Synthetic peptide
LEANLKV

SEQ ID NO: 4813 - protein, 7 aa, Artificial Sequence
  Description of Artificial Sequence: Synthetic peptide
LEAPRAT

SEQ ID NO: 4814 - protein, 7 aa, Artificial Sequence
  Description of Artificial Sequence: Synthetic peptide
LEEDKVK

SEQ ID NO: 4815 - protein, 7 aa, Artificial Sequence
  Description of Artificial Sequence: Synthetic peptide
LEFDSKE

SEQ ID NO: 4816 - protein, 7 aa, Artificial Sequence
  Description of Artificial Sequence: Synthetic peptide
LEFGSDQ

SEQ ID NO: 4817 - protein, 7 aa, Artificial Sequence
  Description of Artificial Sequence: Synthetic peptide
LEFTRIG

SEQ ID NO: 4818 - protein, 7 aa, Artificial Sequence
  Description of Artificial Sequence: Synthetic peptide
LEGTRRD

SEQ ID NO: 4819 - protein, 7 aa, Artificial Sequence
  Description of Artificial Sequence: Synthetic peptide
LEGVRGS

SEQ ID NO: 4820 - protein, 7 aa, Artificial Sequence
  Description of Artificial Sequence: Synthetic peptide
LEHLRSA

SEQ ID NO: 4821 - protein, 7 aa, Artificial Sequence
  Description of Artificial Sequence: Synthetic peptide
LEHSAHV

SEQ ID NO: 4822 - protein, 7 aa, Artificial Sequence
  Description of Artificial Sequence: Synthetic peptide
LEHSVSL

SEQ ID NO: 4823 - protein, 7 aa, Artificial Sequence
  Description of Artificial Sequence: Synthetic peptide
LEITGPG

SEQ ID NO: 4824 - protein, 7 aa, Artificial Sequence
  Description of Artificial Sequence: Synthetic peptide
LEKMGLY

SEQ ID NO: 4825 - protein, 7 aa, Artificial Sequence
  Description of Artificial Sequence: Synthetic peptide
LEKQTGD

SEQ ID NO: 4826 - protein, 7 aa, Artificial Sequence
  Description of Artificial Sequence: Synthetic peptide
LELKPAN

SEQ ID NO: 4827 - protein, 7 aa, Artificial Sequence
  Description of Artificial Sequence: Synthetic peptide
LEMRGLA

SEQ ID NO: 4828 - protein, 7 aa, Artificial Sequence
  Description of Artificial Sequence: Synthetic peptide
LENAQTP

SEQ ID NO: 4829 - protein, 7 aa, Artificial Sequence
  Description of Artificial Sequence: Synthetic peptide
LENDWRV

SEQ ID NO: 4830 - protein, 7 aa, Artificial Sequence
  Description of Artificial Sequence: Synthetic peptide
LENHPDR

SEQ ID NO: 4831 - protein, 7 aa, Artificial Sequence
  Description of Artificial Sequence: Synthetic peptide
LENNPAL

SEQ ID NO: 4832 - protein, 7 aa, Artificial Sequence
  Description of Artificial Sequence: Synthetic peptide
LENSHLV

SEQ ID NO: 4833 - protein, 7 aa, Artificial Sequence
  Description of Artificial Sequence: Synthetic peptide
LEPIVRN

SEQ ID NO: 4834 - protein, 7 aa, Artificial Sequence
  Description of Artificial Sequence: Synthetic peptide
LEPQTHS

SEQ ID NO: 4835 - protein, 7 aa, Artificial Sequence
  Description of Artificial Sequence: Synthetic peptide
LEPSHTI

SEQ ID NO: 4836 - protein, 7 aa, Artificial Sequence
  Description of Artificial Sequence: Synthetic peptide
LEPYKHF

SEQ ID NO: 4837 - protein, 7 aa, Artificial Sequence
  Description of Artificial Sequence: Synthetic peptide
LEQFSTA

SEQ ID NO: 4838 - protein, 7 aa, Artificial Sequence
  Description of Artificial Sequence: Synthetic peptide
LEQPPEH

SEQ ID NO: 4839 - protein, 7 aa, Artificial Sequence
  Description of Artificial Sequence: Synthetic peptide
LEQYNKE

SEQ ID NO: 4840 - protein, 7 aa, Artificial Sequence
  Description of Artificial Sequence: Synthetic peptide
LERGSSE

SEQ ID NO: 4841 - protein, 7 aa, Artificial Sequence
  Description of Artificial Sequence: Synthetic peptide
LERISSV

SEQ ID NO: 4842 - protein, 7 aa, Artificial Sequence
  Description of Artificial Sequence: Synthetic peptide
LESALSS

SEQ ID NO: 4843 - protein, 7 aa, Artificial Sequence
  Description of Artificial Sequence: Synthetic peptide
LESAWIG

SEQ ID NO: 4844 - protein, 7 aa, Artificial Sequence
  Description of Artificial Sequence: Synthetic peptide
LESKPSP

SEQ ID NO: 4845 - protein, 7 aa, Artificial Sequence
  Description of Artificial Sequence: Synthetic peptide
LESNNYL

SEQ ID NO: 4846 - protein, 7 aa, Artificial Sequence
  Description of Artificial Sequence: Synthetic peptide
LESQTRN

SEQ ID NO: 4847 - protein, 7 aa, Artificial Sequence
  Description of Artificial Sequence: Synthetic peptide
LESRSGM

SEQ ID NO: 4848 - protein, 7 aa, Artificial Sequence
  Description of Artificial Sequence: Synthetic peptide
LESSHTR

SEQ ID NO: 4849 - protein, 7 aa, Artificial Sequence
  Description of Artificial Sequence: Synthetic peptide
LESSVRV

SEQ ID NO: 4850 - protein, 7 aa, Artificial Sequence
  Description of Artificial Sequence: Synthetic peptide
LETASTK

SEQ ID NO: 4851 - protein, 7 aa, Artificial Sequence
  Description of Artificial Sequence: Synthetic peptide
LETRQIG

SEQ ID NO: 4852 - protein, 7 aa, Artificial Sequence
  Description of Artificial Sequence: Synthetic peptide
LETSDSV

SEQ ID NO: 4853 - protein, 7 aa, Artificial Sequence
  Description of Artificial Sequence: Synthetic peptide
LEVALRT

SEQ ID NO: 4854 - protein, 7 aa, Artificial Sequence
  Description of Artificial Sequence: Synthetic peptide
LEVASNP

SEQ ID NO: 4855 - protein, 7 aa, Artificial Sequence
  Description of Artificial Sequence: Synthetic peptide
LEVTEPW

SEQ ID NO: 4856 - protein, 7 aa, Artificial Sequence
  Description of Artificial Sequence: Synthetic peptide
LFAISVP

SEQ ID NO: 4857 - protein, 7 aa, Artificial Sequence
  Description of Artificial Sequence: Synthetic peptide
LFANTIS

SEQ ID NO: 4858 - protein, 7 aa, Artificial Sequence
  Description of Artificial Sequence: Synthetic peptide
LFDAALP

SEQ ID NO: 4859 - protein, 7 aa, Artificial Sequence
  Description of Artificial Sequence: Synthetic peptide
LFDFTKE

SEQ ID NO: 4860 - protein, 7 aa, Artificial Sequence
  Description of Artificial Sequence: Synthetic peptide
LFDPNRG

SEQ ID NO: 4861 - protein, 7 aa, Artificial Sequence
  Description of Artificial Sequence: Synthetic peptide
LFDRTAL

SEQ ID NO: 4862 - protein, 7 aa, Artificial Sequence
  Description of Artificial Sequence: Synthetic peptide
LFDSSTT

SEQ ID NO: 4863 - protein, 7 aa, Artificial Sequence
  Description of Artificial Sequence: Synthetic peptide
LFELQHR

SEQ ID NO: 4864 - protein, 7 aa, Artificial Sequence
  Description of Artificial Sequence: Synthetic peptide
LFFTAAP

SEQ ID NO: 4865 - protein, 7 aa, Artificial Sequence
  Description of Artificial Sequence: Synthetic peptide
LFGKVSG

SEQ ID NO: 4866 - protein, 7 aa, Artificial Sequence
  Description of Artificial Sequence: Synthetic peptide
LFGSRPT

SEQ ID NO: 4867 - protein, 7 aa, Artificial Sequence
  Description of Artificial Sequence: Synthetic peptide
LFGTNRS

SEQ ID NO: 4868 - protein, 7 aa, Artificial Sequence
  Description of Artificial Sequence: Synthetic peptide
LFHESTY

SEQ ID NO: 4869 - protein, 7 aa, Artificial Sequence
  Description of Artificial Sequence: Synthetic peptide
LFHSNDD

SEQ ID NO: 4870 - protein, 7 aa, Artificial Sequence
  Description of Artificial Sequence: Synthetic peptide
LFINHGS

SEQ ID NO: 4871 - protein, 7 aa, Artificial Sequence
  Description of Artificial Sequence: Synthetic peptide
LFITTTS

SEQ ID NO: 4872 - protein, 7 aa, Artificial Sequence
  Description of Artificial Sequence: Synthetic peptide
LFKHSRE

SEQ ID NO: 4873 - protein, 7 aa, Artificial Sequence
  Description of Artificial Sequence: Synthetic peptide
LFLSQVP

SEQ ID NO: 4874 - protein, 7 aa, Artificial Sequence
  Description of Artificial Sequence: Synthetic peptide
LFNQQVL

SEQ ID NO: 4875 - protein, 7 aa, Artificial Sequence
  Description of Artificial Sequence: Synthetic peptide
LFNSSPE

SEQ ID NO: 4876 - protein, 7 aa, Artificial Sequence
  Description of Artificial Sequence: Synthetic peptide
LFPGSID

SEQ ID NO: 4877 - protein, 7 aa, Artificial Sequence
  Description of Artificial Sequence: Synthetic peptide
LFPTGSL

SEQ ID NO: 4878 - protein, 7 aa, Artificial Sequence
  Description of Artificial Sequence: Synthetic peptide
LFRASDR

SEQ ID NO: 4879 - protein, 7 aa, Artificial Sequence
  Description of Artificial Sequence: Synthetic peptide
LFSESRS

SEQ ID NO: 4880 - protein, 7 aa, Artificial Sequence
  Description of Artificial Sequence: Synthetic peptide
LFSGAES

SEQ ID NO: 4881 - protein, 7 aa, Artificial Sequence
  Description of Artificial Sequence: Synthetic peptide
LFSMPVS

SEQ ID NO: 4882 - protein, 7 aa, Artificial Sequence
  Description of Artificial Sequence: Synthetic peptide
LFTSADL

SEQ ID NO: 4883 - protein, 7 aa, Artificial Sequence
  Description of Artificial Sequence: Synthetic peptide
LFTSESI

SEQ ID NO: 4884 - protein, 7 aa, Artificial Sequence
  Description of Artificial Sequence: Synthetic peptide
LFTSPSM

SEQ ID NO: 4885 - protein, 7 aa, Artificial Sequence
  Description of Artificial Sequence: Synthetic peptide
LFTTMVP

SEQ ID NO: 4886 - protein, 7 aa, Artificial Sequence
  Description of Artificial Sequence: Synthetic peptide
LGAAVNL

SEQ ID NO: 4887 - protein, 7 aa, Artificial Sequence
  Description of Artificial Sequence: Synthetic peptide
LGAGSSV

SEQ ID NO: 4888 - protein, 7 aa, Artificial Sequence
  Description of Artificial Sequence: Synthetic peptide
LGALSGP

SEQ ID NO: 4889 - protein, 7 aa, Artificial Sequence
  Description of Artificial Sequence: Synthetic peptide
LGALTHA

SEQ ID NO: 4890 - protein, 7 aa, Artificial Sequence
  Description of Artificial Sequence: Synthetic peptide
LGARIQL

SEQ ID NO: 4891 - protein, 7 aa, Artificial Sequence
  Description of Artificial Sequence: Synthetic peptide
LGARTAA

SEQ ID NO: 4892 - protein, 7 aa, Artificial Sequence
  Description of Artificial Sequence: Synthetic peptide
LGASSSL

SEQ ID NO: 4893 - protein, 7 aa, Artificial Sequence
  Description of Artificial Sequence: Synthetic peptide
LGAYLGP

SEQ ID NO: 4894 - protein, 7 aa, Artificial Sequence
  Description of Artificial Sequence: Synthetic peptide
LGAYNAQ

SEQ ID NO: 4895 - protein, 7 aa, Artificial Sequence
  Description of Artificial Sequence: Synthetic peptide
LGDAGFS

SEQ ID NO: 4896 - protein, 7 aa, Artificial Sequence
  Description of Artificial Sequence: Synthetic peptide
LGDHYRH

SEQ ID NO: 4897 - protein, 7 aa, Artificial Sequence
  Description of Artificial Sequence: Synthetic peptide
LGDPFPP

SEQ ID NO: 4898 - protein, 7 aa, Artificial Sequence
  Description of Artificial Sequence: Synthetic peptide
LGDRTDF

SEQ ID NO: 4899 - protein, 7 aa, Artificial Sequence
  Description of Artificial Sequence: Synthetic peptide
LGDRTHI

SEQ ID NO: 4900 - protein, 7 aa, Artificial Sequence
  Description of Artificial Sequence: Synthetic peptide
LGDTAHH

SEQ ID NO: 4901 - protein, 7 aa, Artificial Sequence
  Description of Artificial Sequence: Synthetic peptide
LGFGATQ

SEQ ID NO: 4902 - protein, 7 aa, Artificial Sequence
  Description of Artificial Sequence: Synthetic peptide
LGFNVVV

SEQ ID NO: 4903 - protein, 7 aa, Artificial Sequence
  Description of Artificial Sequence: Synthetic peptide
LGFNYQD

SEQ ID NO: 4904 - protein, 7 aa, Artificial Sequence
  Description of Artificial Sequence: Synthetic peptide
LGFPSTE

SEQ ID NO: 4905 - protein, 7 aa, Artificial Sequence
  Description of Artificial Sequence: Synthetic peptide
LGGDAQI

SEQ ID NO: 4906 - protein, 7 aa, Artificial Sequence
  Description of Artificial Sequence: Synthetic peptide
LGGGRSL

SEQ ID NO: 4907 - protein, 7 aa, Artificial Sequence
  Description of Artificial Sequence: Synthetic peptide
LGGSLSM

SEQ ID NO: 4908 - protein, 7 aa, Artificial Sequence
  Description of Artificial Sequence: Synthetic peptide
LGGSYPL

SEQ ID NO: 4909 - protein, 7 aa, Artificial Sequence
  Description of Artificial Sequence: Synthetic peptide
LGHATSA

SEQ ID NO: 4910 - protein, 7 aa, Artificial Sequence
  Description of Artificial Sequence: Synthetic peptide
LGHGPGH

SEQ ID NO: 4911 - protein, 7 aa, Artificial Sequence
  Description of Artificial Sequence: Synthetic peptide
LGHSKPP

SEQ ID NO: 4912 - protein, 7 aa, Artificial Sequence
  Description of Artificial Sequence: Synthetic peptide
LGIITHA

SEQ ID NO: 4913 - protein, 7 aa, Artificial Sequence
  Description of Artificial Sequence: Synthetic peptide
LGIMKTA

SEQ ID NO: 4914 - protein, 7 aa, Artificial Sequence
  Description of Artificial Sequence: Synthetic peptide
LGKLTTV

SEQ ID NO: 4915 - protein, 7 aa, Artificial Sequence
  Description of Artificial Sequence: Synthetic peptide
LGKSLLT

SEQ ID NO: 4916 - protein, 7 aa, Artificial Sequence
  Description of Artificial Sequence: Synthetic peptide
LGKYGIV

SEQ ID NO: 4917 - protein, 7 aa, Artificial Sequence
  Description of Artificial Sequence: Synthetic peptide
LGLNHQT

SEQ ID NO: 4918 - protein, 7 aa, Artificial Sequence
  Description of Artificial Sequence: Synthetic peptide
LGLPSKG

SEQ ID NO: 4919 - protein, 7 aa, Artificial Sequence
  Description of Artificial Sequence: Synthetic peptide
LGLRDKD

SEQ ID NO: 4920 - protein, 7 aa, Artificial Sequence
  Description of Artificial Sequence: Synthetic peptide
LGLRESS

SEQ ID NO: 4921 - protein, 7 aa, Artificial Sequence
  Description of Artificial Sequence: Synthetic peptide
LGLSTVH

SEQ ID NO: 4922 - protein, 7 aa, Artificial Sequence
  Description of Artificial Sequence: Synthetic peptide
LGLVLNQ

SEQ ID NO: 4923 - protein, 7 aa, Artificial Sequence
  Description of Artificial Sequence: Synthetic peptide
LGMLKTE

SEQ ID NO: 4924 - protein, 7 aa, Artificial Sequence
  Description of Artificial Sequence: Synthetic peptide
LGMMPAS

SEQ ID NO: 4925 - protein, 7 aa, Artificial Sequence
  Description of Artificial Sequence: Synthetic peptide
LGNHPSV

SEQ ID NO: 4926 - protein, 7 aa, Artificial Sequence
  Description of Artificial Sequence: Synthetic peptide
LGNPDKM

SEQ ID NO: 4927 - protein, 7 aa, Artificial Sequence
  Description of Artificial Sequence: Synthetic peptide
LGNPSPC

SEQ ID NO: 4928 - protein, 7 aa, Artificial Sequence
  Description of Artificial Sequence: Synthetic peptide
LGNPVTV

SEQ ID NO: 4929 - protein, 7 aa, Artificial Sequence
  Description of Artificial Sequence: Synthetic peptide
LGNQRSD

SEQ ID NO: 4930 - protein, 7 aa, Artificial Sequence
  Description of Artificial Sequence: Synthetic peptide
LGPAGMP

SEQ ID NO: 4931 - protein, 7 aa, Artificial Sequence
  Description of Artificial Sequence: Synthetic peptide
LGPAGPY

SEQ ID NO: 4932 - protein, 7 aa, Artificial Sequence
  Description of Artificial Sequence: Synthetic peptide
LGPFHGE

SEQ ID NO: 4933 - protein, 7 aa, Artificial Sequence
  Description of Artificial Sequence: Synthetic peptide
LGPGSYP

SEQ ID NO: 4934 - protein, 7 aa, Artificial Sequence
  Description of Artificial Sequence: Synthetic peptide
LGPSSKV

SEQ ID NO: 4935 - protein, 7 aa, Artificial Sequence
  Description of Artificial Sequence: Synthetic peptide
LGPSYTN

SEQ ID NO: 4936 - protein, 7 aa, Artificial Sequence
  Description of Artificial Sequence: Synthetic peptide
LGPTIRS

SEQ ID NO: 4937 - protein, 7 aa, Artificial Sequence
  Description of Artificial Sequence: Synthetic peptide
LGPTKLP

SEQ ID NO: 4938 - protein, 7 aa, Artificial Sequence
  Description of Artificial Sequence: Synthetic peptide
LGQALRV

SEQ ID NO: 4939 - protein, 7 aa, Artificial Sequence
  Description of Artificial Sequence: Synthetic peptide
LGQKPNE

SEQ ID NO: 4940 - protein, 7 aa, Artificial Sequence
  Description of Artificial Sequence: Synthetic peptide
LGQSGCR

SEQ ID NO: 4941 - protein, 7 aa, Artificial Sequence
  Description of Artificial Sequence: Synthetic peptide
LGQSGTK

SEQ ID NO: 4942 - protein, 7 aa, Artificial Sequence
  Description of Artificial Sequence: Synthetic peptide
LGRALEH

SEQ ID NO: 4943 - protein, 7 aa, Artificial Sequence
  Description of Artificial Sequence: Synthetic peptide
LGRAYSQ

SEQ ID NO: 4944 - protein, 7 aa, Artificial Sequence
  Description of Artificial Sequence: Synthetic peptide
LGRERPT

SEQ ID NO: 4945 - protein, 7 aa, Artificial Sequence
  Description of Artificial Sequence: Synthetic peptide
LGRIAVN

SEQ ID NO: 4946 - protein, 7 aa, Artificial Sequence
  Description of Artificial Sequence: Synthetic peptide
LGRLNSG

SEQ ID NO: 4947 - protein, 7 aa, Artificial Sequence
  Description of Artificial Sequence: Synthetic peptide
LGRPQMD

SEQ ID NO: 4948 - protein, 7 aa, Artificial Sequence
  Description of Artificial Sequence: Synthetic peptide
LGRSGAL

SEQ ID NO: 4949 - protein, 7 aa, Artificial Sequence
  Description of Artificial Sequence: Synthetic peptide
LGSAGPP

SEQ ID NO: 4950 - protein, 7 aa, Artificial Sequence
  Description of Artificial Sequence: Synthetic peptide
LGSAGYS

SEQ ID NO: 4951 - protein, 7 aa, Artificial Sequence
  Description of Artificial Sequence: Synthetic peptide
LGSAHSP

SEQ ID NO: 4952 - protein, 7 aa, Artificial Sequence
  Description of Artificial Sequence: Synthetic peptide
LGSATSG

SEQ ID NO: 4953 - protein, 7 aa, Artificial Sequence
  Description of Artificial Sequence: Synthetic peptide
LGSHYSN

SEQ ID NO: 4954 - protein, 7 aa, Artificial Sequence
  Description of Artificial Sequence: Synthetic peptide
LGSLTVA

SEQ ID NO: 4955 - protein, 7 aa, Artificial Sequence
  Description of Artificial Sequence: Synthetic peptide
LGSMPLL

SEQ ID NO: 4956 - protein, 7 aa, Artificial Sequence
  Description of Artificial Sequence: Synthetic peptide
LGSNHKP

SEQ ID NO: 4957 - protein, 7 aa, Artificial Sequence
  Description of Artificial Sequence: Synthetic peptide
LGSPSPD

SEQ ID NO: 4958 - protein, 7 aa, Artificial Sequence
  Description of Artificial Sequence: Synthetic peptide
LGSQVIA

SEQ ID NO: 4959 - protein, 7 aa, Artificial Sequence
  Description of Artificial Sequence: Synthetic peptide
LGSQYAV

SEQ ID NO: 4960 - protein, 7 aa, Artificial Sequence
  Description of Artificial Sequence: Synthetic peptide
LGSRSDL

SEQ ID NO: 4961 - protein, 7 aa, Artificial Sequence
  Description of Artificial Sequence: Synthetic peptide
LGSSLRA

SEQ ID NO: 4962 - protein, 7 aa, Artificial Sequence
  Description of Artificial Sequence: Synthetic peptide
LGSSLRN

SEQ ID NO: 4963 - protein, 7 aa, Artificial Sequence
  Description of Artificial Sequence: Synthetic peptide
LGSSQSR

SEQ ID NO: 4964 - protein, 7 aa, Artificial Sequence
  Description of Artificial Sequence: Synthetic peptide
LGSTSAV

SEQ ID NO: 4965 - protein, 7 aa, Artificial Sequence
  Description of Artificial Sequence: Synthetic peptide
LGSVKFS

SEQ ID NO: 4966 - protein, 7 aa, Artificial Sequence
  Description of Artificial Sequence: Synthetic peptide
LGTALHL

SEQ ID NO: 4967 - protein, 7 aa, Artificial Sequence
  Description of Artificial Sequence: Synthetic peptide
LGTGRLY

SEQ ID NO: 4968 - protein, 7 aa, Artificial Sequence
  Description of Artificial Sequence: Synthetic peptide
LGTLNTV

SEQ ID NO: 4969 - protein, 7 aa, Artificial Sequence
  Description of Artificial Sequence: Synthetic peptide
LGTRASG

SEQ ID NO: 4970 - protein, 7 aa, Artificial Sequence
  Description of Artificial Sequence: Synthetic peptide
LGTRPML

SEQ ID NO: 4971 - protein, 7 aa, Artificial Sequence
  Description of Artificial Sequence: Synthetic peptide
LGTSDVL

SEQ ID NO: 4972 - protein, 7 aa, Artificial Sequence
  Description of Artificial Sequence: Synthetic peptide
LGTSHVA

SEQ ID NO: 4973 - protein, 7 aa, Artificial Sequence
  Description of Artificial Sequence: Synthetic peptide
LGTSQTG

SEQ ID NO: 4974 - protein, 7 aa, Artificial Sequence
  Description of Artificial Sequence: Synthetic peptide
LGTVRVY

SEQ ID NO: 4975 - protein, 7 aa, Artificial Sequence
  Description of Artificial Sequence: Synthetic peptide
LGVAKPA

SEQ ID NO: 4976 - protein, 7 aa, Artificial Sequence
  Description of Artificial Sequence: Synthetic peptide
LGVDKNA

SEQ ID NO: 4977 - protein, 7 aa, Artificial Sequence
  Description of Artificial Sequence: Synthetic peptide
LGVEVLK

SEQ ID NO: 4978 - protein, 7 aa, Artificial Sequence
  Description of Artificial Sequence: Synthetic peptide
LGVKAAG

SEQ ID NO: 4979 - protein, 7 aa, Artificial Sequence
  Description of Artificial Sequence: Synthetic peptide
LGVKSVD

SEQ ID NO: 4980 - protein, 7 aa, Artificial Sequence
  Description of Artificial Sequence: Synthetic peptide
LGVLRSS

SEQ ID NO: 4981 - protein, 7 aa, Artificial Sequence
  Description of Artificial Sequence: Synthetic peptide
LGVNTSQ

SEQ ID NO: 4982 - protein, 7 aa, Artificial Sequence
  Description of Artificial Sequence: Synthetic peptide
LGVPPQS

SEQ ID NO: 4983 - protein, 7 aa, Artificial Sequence
  Description of Artificial Sequence: Synthetic peptide
LGVSREL

SEQ ID NO: 4984 - protein, 7 aa, Artificial Sequence
  Description of Artificial Sequence: Synthetic peptide
LGVSTHM

SEQ ID NO: 4985 - protein, 7 aa, Artificial Sequence
  Description of Artificial Sequence: Synthetic peptide
LGYNLGE

SEQ ID NO: 4986 - protein, 7 aa, Artificial Sequence
  Description of Artificial Sequence: Synthetic peptide
LGYPPRE

SEQ ID NO: 4987 - protein, 7 aa, Artificial Sequence
  Description of Artificial Sequence: Synthetic peptide
LGYSTGA

SEQ ID NO: 4988 - protein, 7 aa, Artificial Sequence
  Description of Artificial Sequence: Synthetic peptide
LHAAPAS

SEQ ID NO: 4989 - protein, 7 aa, Artificial Sequence
  Description of Artificial Sequence: Synthetic peptide
LHANRTE

SEQ ID NO: 4990 - protein, 7 aa, Artificial Sequence
  Description of Artificial Sequence: Synthetic peptide
LHAPEVA

SEQ ID NO: 4991 - protein, 7 aa, Artificial Sequence
  Description of Artificial Sequence: Synthetic peptide
LHATSST

SEQ ID NO: 4992 - protein, 7 aa, Artificial Sequence
  Description of Artificial Sequence: Synthetic peptide
LHATTGP

SEQ ID NO: 4993 - protein, 7 aa, Artificial Sequence
  Description of Artificial Sequence: Synthetic peptide
LHEYRSP

SEQ ID NO: 4994 - protein, 7 aa, Artificial Sequence
  Description of Artificial Sequence: Synthetic peptide
LHFGPEG

SEQ ID NO: 4995 - protein, 7 aa, Artificial Sequence
  Description of Artificial Sequence: Synthetic peptide
LHGLGSG

SEQ ID NO: 4996 - protein, 7 aa, Artificial Sequence
  Description of Artificial Sequence: Synthetic peptide
LHGMPER

SEQ ID NO: 4997 - protein, 7 aa, Artificial Sequence
  Description of Artificial Sequence: Synthetic peptide
LHIREMA

SEQ ID NO: 4998 - protein, 7 aa, Artificial Sequence
  Description of Artificial Sequence: Synthetic peptide
LHKSGFN

SEQ ID NO: 4999 - protein, 7 aa, Artificial Sequence
  Description of Artificial Sequence: Synthetic peptide
LHLQGNS

SEQ ID NO: 5000 - protein, 7 aa, Artificial Sequence
  Description of Artificial Sequence: Synthetic peptide
LHLSRPL

SEQ ID NO: 5001 - protein, 7 aa, Artificial Sequence
  Description of Artificial Sequence: Synthetic peptide
LHLSTAP

SEQ ID NO: 5002 - protein, 7 aa, Artificial Sequence
  Description of Artificial Sequence: Synthetic peptide
LHMTTTR

SEQ ID NO: 5003 - protein, 7 aa, Artificial Sequence
  Description of Artificial Sequence: Synthetic peptide
LHNDLIR

SEQ ID NO: 5004 - protein, 7 aa, Artificial Sequence
  Description of Artificial Sequence: Synthetic peptide
LHNIRQQ

SEQ ID NO: 5005 - protein, 7 aa, Artificial Sequence
  Description of Artificial Sequence: Synthetic peptide
LHNKMYD

SEQ ID NO: 5006 - protein, 7 aa, Artificial Sequence
  Description of Artificial Sequence: Synthetic peptide
LHNQAAR

SEQ ID NO: 5007 - protein, 7 aa, Artificial Sequence
  Description of Artificial Sequence: Synthetic peptide
LHNTAAA

SEQ ID NO: 5008 - protein, 7 aa, Artificial Sequence
  Description of Artificial Sequence: Synthetic peptide
LHNTRNM

SEQ ID NO: 5009 - protein, 7 aa, Artificial Sequence
  Description of Artificial Sequence: Synthetic peptide
LHNTRTV

SEQ ID NO: 5010 - protein, 7 aa, Artificial Sequence
  Description of Artificial Sequence: Synthetic peptide
LHPGSTA

SEQ ID NO: 5011 - protein, 7 aa, Artificial Sequence
  Description of Artificial Sequence: Synthetic peptide
LHPLSPR

SEQ ID NO: 5012 - protein, 7 aa, Artificial Sequence
  Description of Artificial Sequence: Synthetic peptide
LHPVHAP

SEQ ID NO: 5013 - protein, 7 aa, Artificial Sequence
  Description of Artificial Sequence: Synthetic peptide
LHQDRLA

SEQ ID NO: 5014 - protein, 7 aa, Artificial Sequence
  Description of Artificial Sequence: Synthetic peptide
LHQMGNS

SEQ ID NO: 5015 - protein, 7 aa, Artificial Sequence
  Description of Artificial Sequence: Synthetic peptide
LHQSYNQ

SEQ ID NO: 5016 - protein, 7 aa, Artificial Sequence
  Description of Artificial Sequence: Synthetic peptide
LHRDLPV

SEQ ID NO: 5017 - protein, 7 aa, Artificial Sequence
  Description of Artificial Sequence: Synthetic peptide
LHRRPSE

SEQ ID NO: 5018 - protein, 7 aa, Artificial Sequence
  Description of Artificial Sequence: Synthetic peptide
LHSALTR

SEQ ID NO: 5019 - protein, 7 aa, Artificial Sequence
  Description of Artificial Sequence: Synthetic peptide
LHSASPQ

SEQ ID NO: 5020 - protein, 7 aa, Artificial Sequence
  Description of Artificial Sequence: Synthetic peptide
LHSDTRG

SEQ ID NO: 5021 - protein, 7 aa, Artificial Sequence
  Description of Artificial Sequence: Synthetic peptide
LHSELTS

SEQ ID NO: 5022 - protein, 7 aa, Artificial Sequence
  Description of Artificial Sequence: Synthetic peptide
LHSGERQ

SEQ ID NO: 5023 - protein, 7 aa, Artificial Sequence
  Description of Artificial Sequence: Synthetic peptide
LHSNVTK

SEQ ID NO: 5024 - protein, 7 aa, Artificial Sequence
  Description of Artificial Sequence: Synthetic peptide
LHSRADS

SEQ ID NO: 5025 - protein, 7 aa, Artificial Sequence
  Description of Artificial Sequence: Synthetic peptide
LHSRAIS

SEQ ID NO: 5026 - protein, 7 aa, Artificial Sequence
  Description of Artificial Sequence: Synthetic peptide
LHSRGTA

SEQ ID NO: 5027 - protein, 7 aa, Artificial Sequence
  Description of Artificial Sequence: Synthetic peptide
LHSSPQD

SEQ ID NO: 5028 - protein, 7 aa, Artificial Sequence
  Description of Artificial Sequence: Synthetic peptide
LHTAKAG

SEQ ID NO: 5029 - protein, 7 aa, Artificial Sequence
  Description of Artificial Sequence: Synthetic peptide
LHTDWLR

SEQ ID NO: 5030 - protein, 7 aa, Artificial Sequence
  Description of Artificial Sequence: Synthetic peptide
LHTPQLS

SEQ ID NO: 5031 - protein, 7 aa, Artificial Sequence
  Description of Artificial Sequence: Synthetic peptide
LHTSARP

SEQ ID NO: 5032 - protein, 7 aa, Artificial Sequence
  Description of Artificial Sequence: Synthetic peptide
LHVPQPP

SEQ ID NO: 5033 - protein, 7 aa, Artificial Sequence
  Description of Artificial Sequence: Synthetic peptide
LIASHRL

SEQ ID NO: 5034 - protein, 7 aa, Artificial Sequence
  Description of Artificial Sequence: Synthetic peptide
LIASSGV

SEQ ID NO: 5035 - protein, 7 aa, Artificial Sequence
  Description of Artificial Sequence: Synthetic peptide
LIASTTS

SEQ ID NO: 5036 - protein, 7 aa, Artificial Sequence
  Description of Artificial Sequence: Synthetic peptide
LIGNVVM

SEQ ID NO: 5037 - protein, 7 aa, Artificial Sequence
  Description of Artificial Sequence: Synthetic peptide
LIGRPME

SEQ ID NO: 5038 - protein, 7 aa, Artificial Sequence
  Description of Artificial Sequence: Synthetic peptide
LIGRTIS

SEQ ID NO: 5039 - protein, 7 aa, Artificial Sequence
  Description of Artificial Sequence: Synthetic peptide
LIGTASL

SEQ ID NO: 5040 - protein, 7 aa, Artificial Sequence
  Description of Artificial Sequence: Synthetic peptide
LIGTPVV

SEQ ID NO: 5041 - protein, 7 aa, Artificial Sequence
  Description of Artificial Sequence: Synthetic peptide
LIHASGG

SEQ ID NO: 5042 - protein, 7 aa, Artificial Sequence
  Description of Artificial Sequence: Synthetic peptide
LIHLSGA

SEQ ID NO: 5043 - protein, 7 aa, Artificial Sequence
  Description of Artificial Sequence: Synthetic peptide
LIKENVL

SEQ ID NO: 5044 - protein, 7 aa, Artificial Sequence
  Description of Artificial Sequence: Synthetic peptide
LIKGAAS

SEQ ID NO: 5045 - protein, 7 aa, Artificial Sequence
  Description of Artificial Sequence: Synthetic peptide
LIKGSLD

SEQ ID NO: 5046 - protein, 7 aa, Artificial Sequence
  Description of Artificial Sequence: Synthetic peptide
LIKPSVP

SEQ ID NO: 5047 - protein, 7 aa, Artificial Sequence
  Description of Artificial Sequence: Synthetic peptide
LIKSSEP

SEQ ID NO: 5048 - protein, 7 aa, Artificial Sequence
  Description of Artificial Sequence: Synthetic peptide
LIKSTLV

SEQ ID NO: 5049 - protein, 7 aa, Artificial Sequence
  Description of Artificial Sequence: Synthetic peptide
LIKTTHG

SEQ ID NO: 5050 - protein, 7 aa, Artificial Sequence
  Description of Artificial Sequence: Synthetic peptide
LILPNHS

SEQ ID NO: 5051 - protein, 7 aa, Artificial Sequence
  Description of Artificial Sequence: Synthetic peptide
LIMRHDC

SEQ ID NO: 5052 - protein, 7 aa, Artificial Sequence
  Description of Artificial Sequence: Synthetic peptide
LINENPH

SEQ ID NO: 5053 - protein, 7 aa, Artificial Sequence
  Description of Artificial Sequence: Synthetic peptide
LINKISP

SEQ ID NO: 5054 - protein, 7 aa, Artificial Sequence
  Description of Artificial Sequence: Synthetic peptide
LINPEMY

SEQ ID NO: 5055 - protein, 7 aa, Artificial Sequence
  Description of Artificial Sequence: Synthetic peptide
LIPPHHD

SEQ ID NO: 5056 - protein, 7 aa, Artificial Sequence
  Description of Artificial Sequence: Synthetic peptide
LIPTVMN

SEQ ID NO: 5057 - protein, 7 aa, Artificial Sequence
  Description of Artificial Sequence: Synthetic peptide
LIQEVLQ

SEQ ID NO: 5058 - protein, 7 aa, Artificial Sequence
  Description of Artificial Sequence: Synthetic peptide
LIQISQQ

SEQ ID NO: 5059 - protein, 7 aa, Artificial Sequence
  Description of Artificial Sequence: Synthetic peptide
LIQNQGT

SEQ ID NO: 5060 - protein, 7 aa, Artificial Sequence
  Description of Artificial Sequence: Synthetic peptide
LIREQNP

SEQ ID NO: 5061 - protein, 7 aa, Artificial Sequence
  Description of Artificial Sequence: Synthetic peptide
LIRLSDN

SEQ ID NO: 5062 - protein, 7 aa, Artificial Sequence
  Description of Artificial Sequence: Synthetic peptide
LIRSDTI

SEQ ID NO: 5063 - protein, 7 aa, Artificial Sequence
  Description of Artificial Sequence: Synthetic peptide
LIRSIPP

SEQ ID NO: 5064 - protein, 7 aa, Artificial Sequence
  Description of Artificial Sequence: Synthetic peptide
LISASHI

SEQ ID NO: 5065 - protein, 7 aa, Artificial Sequence
  Description of Artificial Sequence: Synthetic peptide
LISDASS

SEQ ID NO: 5066 - protein, 7 aa, Artificial Sequence
  Description of Artificial Sequence: Synthetic peptide
LISPTVT

SEQ ID NO: 5067 - protein, 7 aa, Artificial Sequence
  Description of Artificial Sequence: Synthetic peptide
LISREVT

SEQ ID NO: 5068 - protein, 7 aa, Artificial Sequence
  Description of Artificial Sequence: Synthetic peptide
LISRVPD

SEQ ID NO: 5069 - protein, 7 aa, Artificial Sequence
  Description of Artificial Sequence: Synthetic peptide
LITAALA

SEQ ID NO: 5070 - protein, 7 aa, Artificial Sequence
  Description of Artificial Sequence: Synthetic peptide
LITGHST

SEQ ID NO: 5071 - protein, 7 aa, Artificial Sequence
  Description of Artificial Sequence: Synthetic peptide
LITPGAS

SEQ ID NO: 5072 - protein, 7 aa, Artificial Sequence
  Description of Artificial Sequence: Synthetic peptide
LITPLPS

SEQ ID NO: 5073 - protein, 7 aa, Artificial Sequence
  Description of Artificial Sequence: Synthetic peptide
LITSAAG

SEQ ID NO: 5074 - protein, 7 aa, Artificial Sequence
  Description of Artificial Sequence: Synthetic peptide
LIVALKG

SEQ ID NO: 5075 - protein, 7 aa, Artificial Sequence
  Description of Artificial Sequence: Synthetic peptide
LIVEQAR

SEQ ID NO: 5076 - protein, 7 aa, Artificial Sequence
  Description of Artificial Sequence: Synthetic peptide
LIVTENK

SEQ ID NO: 5077 - protein, 7 aa, Artificial Sequence
  Description of Artificial Sequence: Synthetic peptide
LKAGSSS

SEQ ID NO: 5078 - protein, 7 aa, Artificial Sequence
  Description of Artificial Sequence: Synthetic peptide
LKAGTYG

SEQ ID NO: 5079 - protein, 7 aa, Artificial Sequence
  Description of Artificial Sequence: Synthetic peptide
LKAIPYG

SEQ ID NO: 5080 - protein, 7 aa, Artificial Sequence
  Description of Artificial Sequence: Synthetic peptide
LKAQVEL

SEQ ID NO: 5081 - protein, 7 aa, Artificial Sequence
  Description of Artificial Sequence: Synthetic peptide
LKATITS

SEQ ID NO: 5082 - protein, 7 aa, Artificial Sequence
  Description of Artificial Sequence: Synthetic peptide
LKDGRAS

SEQ ID NO: 5083 - protein, 7 aa, Artificial Sequence
  Description of Artificial Sequence: Synthetic peptide
LKDMRLT

SEQ ID NO: 5084 - protein, 7 aa, Artificial Sequence
  Description of Artificial Sequence: Synthetic peptide
LKDPARL

SEQ ID NO: 5085 - protein, 7 aa, Artificial Sequence
  Description of Artificial Sequence: Synthetic peptide
LKDPTAW

SEQ ID NO: 5086 - protein, 7 aa, Artificial Sequence
  Description of Artificial Sequence: Synthetic peptide
LKDSLTC

SEQ ID NO: 5087 - protein, 7 aa, Artificial Sequence
  Description of Artificial Sequence: Synthetic peptide
LKDYGGA

SEQ ID NO: 5088 - protein, 7 aa, Artificial Sequence
  Description of Artificial Sequence: Synthetic peptide
LKEIAGL

SEQ ID NO: 5089 - protein, 7 aa, Artificial Sequence
  Description of Artificial Sequence: Synthetic peptide
LKFSESK

SEQ ID NO: 5090 - protein, 7 aa, Artificial Sequence
  Description of Artificial Sequence: Synthetic peptide
LKGAVVV

SEQ ID NO: 5091 - protein, 7 aa, Artificial Sequence
  Description of Artificial Sequence: Synthetic peptide
LKGDAGY

SEQ ID NO: 5092 - protein, 7 aa, Artificial Sequence
  Description of Artificial Sequence: Synthetic peptide
LKGGADT

SEQ ID NO: 5093 - protein, 7 aa, Artificial Sequence
  Description of Artificial Sequence: Synthetic peptide
LKGMTGL

SEQ ID NO: 5094 - protein, 7 aa, Artificial Sequence
  Description of Artificial Sequence: Synthetic peptide
LKGPNAV

SEQ ID NO: 5095 - protein, 7 aa, Artificial Sequence
  Description of Artificial Sequence: Synthetic peptide
LKGYIDS

SEQ ID NO: 5096 - protein, 7 aa, Artificial Sequence
  Description of Artificial Sequence: Synthetic peptide
LKHQLLA

SEQ ID NO: 5097 - protein, 7 aa, Artificial Sequence
  Description of Artificial Sequence: Synthetic peptide
LKHSLPD

SEQ ID NO: 5098 - protein, 7 aa, Artificial Sequence
  Description of Artificial Sequence: Synthetic peptide
LKIGTVT

SEQ ID NO: 5099 - protein, 7 aa, Artificial Sequence
  Description of Artificial Sequence: Synthetic peptide
LKLAPNV

SEQ ID NO: 5100 - protein, 7 aa, Artificial Sequence
  Description of Artificial Sequence: Synthetic peptide
LKLDEGL

SEQ ID NO: 5101 - protein, 7 aa, Artificial Sequence
  Description of Artificial Sequence: Synthetic peptide
LKLRASE

SEQ ID NO: 5102 - protein, 7 aa, Artificial Sequence
  Description of Artificial Sequence: Synthetic peptide
LKMSSTP

SEQ ID NO: 5103 - protein, 7 aa, Artificial Sequence
  Description of Artificial Sequence: Synthetic peptide
LKMVDNV

SEQ ID NO: 5104 - protein, 7 aa, Artificial Sequence
  Description of Artificial Sequence: Synthetic peptide
LKNGSMV

SEQ ID NO: 5105 - protein, 7 aa, Artificial Sequence
  Description of Artificial Sequence: Synthetic peptide
LKNPLPS

SEQ ID NO: 5106 - protein, 7 aa, Artificial Sequence
  Description of Artificial Sequence: Synthetic peptide
LKNPSNV

SEQ ID NO: 5107 - protein, 7 aa, Artificial Sequence
  Description of Artificial Sequence: Synthetic peptide
LKPDMTR

SEQ ID NO: 5108 - protein, 7 aa, Artificial Sequence
  Description of Artificial Sequence: Synthetic peptide
LKPDRPD

SEQ ID NO: 5109 - protein, 7 aa, Artificial Sequence
  Description of Artificial Sequence: Synthetic peptide
LKPNEIS

SEQ ID NO: 5110 - protein, 7 aa, Artificial Sequence
  Description of Artificial Sequence: Synthetic peptide
LKPSPIP

SEQ ID NO: 5111 - protein, 7 aa, Artificial Sequence
  Description of Artificial Sequence: Synthetic peptide
LKPSSYV

SEQ ID NO: 5112 - protein, 7 aa, Artificial Sequence
  Description of Artificial Sequence: Synthetic peptide
LKPVPSL

SEQ ID NO: 5113 - protein, 7 aa, Artificial Sequence
  Description of Artificial Sequence: Synthetic peptide
LKQIDLG

SEQ ID NO: 5114 - protein, 7 aa, Artificial Sequence
  Description of Artificial Sequence: Synthetic peptide
LKQPTQC

SEQ ID NO: 5115 - protein, 7 aa, Artificial Sequence
  Description of Artificial Sequence: Synthetic peptide
LKREFDY

SEQ ID NO: 5116 - protein, 7 aa, Artificial Sequence
  Description of Artificial Sequence: Synthetic peptide
LKSATTI

SEQ ID NO: 5117 - protein, 7 aa, Artificial Sequence
  Description of Artificial Sequence: Synthetic peptide
LKSGVSP

SEQ ID NO: 5118 - protein, 7 aa, Artificial Sequence
  Description of Artificial Sequence: Synthetic peptide
LKSPSTP

SEQ ID NO: 5119 - protein, 7 aa, Artificial Sequence
  Description of Artificial Sequence: Synthetic peptide
LKSQLSD

SEQ ID NO: 5120 - protein, 7 aa, Artificial Sequence
  Description of Artificial Sequence: Synthetic peptide
LKSQSFT

SEQ ID NO: 5121 - protein, 7 aa, Artificial Sequence
  Description of Artificial Sequence: Synthetic peptide
LKSTLMP

SEQ ID NO: 5122 - protein, 7 aa, Artificial Sequence
  Description of Artificial Sequence: Synthetic peptide
LKSTPPG

SEQ ID NO: 5123 - protein, 7 aa, Artificial Sequence
  Description of Artificial Sequence: Synthetic peptide
LKSTSQV

SEQ ID NO: 5124 - protein, 7 aa, Artificial Sequence
  Description of Artificial Sequence: Synthetic peptide
LKTGRDS

SEQ ID NO: 5125 - protein, 7 aa, Artificial Sequence
  Description of Artificial Sequence: Synthetic peptide
LKTGYMP

SEQ ID NO: 5126 - protein, 7 aa, Artificial Sequence
  Description of Artificial Sequence: Synthetic peptide
LKTLLKT

SEQ ID NO: 5127 - protein, 7 aa, Artificial Sequence
  Description of Artificial Sequence: Synthetic peptide
LKTNERV

SEQ ID NO: 5128 - protein, 7 aa, Artificial Sequence
  Description of Artificial Sequence: Synthetic peptide
LKTSGVI

SEQ ID NO: 5129 - protein, 7 aa, Artificial Sequence
  Description of Artificial Sequence: Synthetic peptide
LKTSNRD

SEQ ID NO: 5130 - protein, 7 aa, Artificial Sequence
  Description of Artificial Sequence: Synthetic peptide
LKTTNPP

SEQ ID NO: 5131 - protein, 7 aa, Artificial Sequence
  Description of Artificial Sequence: Synthetic peptide
LKTVHSD

SEQ ID NO: 5132 - protein, 7 aa, Artificial Sequence
  Description of Artificial Sequence: Synthetic peptide
LKVEMSP

SEQ ID NO: 5133 - protein, 7 aa, Artificial Sequence
  Description of Artificial Sequence: Synthetic peptide
LKWEHTS

SEQ ID NO: 5134 - protein, 7 aa, Artificial Sequence
  Description of Artificial Sequence: Synthetic peptide
LKWGPPD

SEQ ID NO: 5135 - protein, 7 aa, Artificial Sequence
  Description of Artificial Sequence: Synthetic peptide
LKYNIPV

SEQ ID NO: 5136 - protein, 7 aa, Artificial Sequence
  Description of Artificial Sequence: Synthetic peptide
LLAAMGP

SEQ ID NO: 5137 - protein, 7 aa, Artificial Sequence
  Description of Artificial Sequence: Synthetic peptide
LLAFEKQ

SEQ ID NO: 5138 - protein, 7 aa, Artificial Sequence
  Description of Artificial Sequence: Synthetic peptide
LLAGHHG

SEQ ID NO: 5139 - protein, 7 aa, Artificial Sequence
  Description of Artificial Sequence: Synthetic peptide
LLARGVN

SEQ ID NO: 5140 - protein, 7 aa, Artificial Sequence
  Description of Artificial Sequence: Synthetic peptide
LLATSLT

SEQ ID NO: 5141 - protein, 7 aa, Artificial Sequence
  Description of Artificial Sequence: Synthetic peptide
LLDGRAR

SEQ ID NO: 5142 - protein, 7 aa, Artificial Sequence
  Description of Artificial Sequence: Synthetic peptide
LLDKERE

SEQ ID NO: 5143 - protein, 7 aa, Artificial Sequence
  Description of Artificial Sequence: Synthetic peptide
LLDQDFF

SEQ ID NO: 5144 - protein, 7 aa, Artificial Sequence
  Description of Artificial Sequence: Synthetic peptide
LLDTGVP

SEQ ID NO: 5145 - protein, 7 aa, Artificial Sequence
  Description of Artificial Sequence: Synthetic peptide
LLEKGQS

SEQ ID NO: 5146 - protein, 7 aa, Artificial Sequence
  Description of Artificial Sequence: Synthetic peptide
LLERSYP

SEQ ID NO: 5147 - protein, 7 aa, Artificial Sequence
  Description of Artificial Sequence: Synthetic peptide
LLEVPIR

SEQ ID NO: 5148 - protein, 7 aa, Artificial Sequence
  Description of Artificial Sequence: Synthetic peptide
LLFKSSS

SEQ ID NO: 5149 - protein, 7 aa, Artificial Sequence
  Description of Artificial Sequence: Synthetic peptide
LLGARHL

SEQ ID NO: 5150 - protein, 7 aa, Artificial Sequence
  Description of Artificial Sequence: Synthetic peptide
LLGASSA

SEQ ID NO: 5151 - protein, 7 aa, Artificial Sequence
  Description of Artificial Sequence: Synthetic peptide
LLGHAAS

SEQ ID NO: 5152 - protein, 7 aa, Artificial Sequence
  Description of Artificial Sequence: Synthetic peptide
LLGPDPS

SEQ ID NO: 5153 - protein, 7 aa, Artificial Sequence
  Description of Artificial Sequence: Synthetic peptide
LLGPLQG

SEQ ID NO: 5154 - protein, 7 aa, Artificial Sequence
  Description of Artificial Sequence: Synthetic peptide
LLGRLQP

SEQ ID NO: 5155 - protein, 7 aa, Artificial Sequence
  Description of Artificial Sequence: Synthetic peptide
LLGRSTG

SEQ ID NO: 5156 - protein, 7 aa, Artificial Sequence
  Description of Artificial Sequence: Synthetic peptide
LLGSRPS

SEQ ID NO: 5157 - protein, 7 aa, Artificial Sequence
  Description of Artificial Sequence: Synthetic peptide
LLGVLHP

SEQ ID NO: 5158 - protein, 7 aa, Artificial Sequence
  Description of Artificial Sequence: Synthetic peptide
LLGVTNP

SEQ ID NO: 5159 - protein, 7 aa, Artificial Sequence
  Description of Artificial Sequence: Synthetic peptide
LLHLGQT

SEQ ID NO: 5160 - protein, 7 aa, Artificial Sequence
  Description of Artificial Sequence: Synthetic peptide
LLHPAPR

SEQ ID NO: 5161 - protein, 7 aa, Artificial Sequence
  Description of Artificial Sequence: Synthetic peptide
LLHPEAI

SEQ ID NO: 5162 - protein, 7 aa, Artificial Sequence
  Description of Artificial Sequence: Synthetic peptide
LLHSSSQ

SEQ ID NO: 5163 - protein, 7 aa, Artificial Sequence
  Description of Artificial Sequence: Synthetic peptide
LLHTQGN

SEQ ID NO: 5164 - protein, 7 aa, Artificial Sequence
  Description of Artificial Sequence: Synthetic peptide
LLHTVSE

SEQ ID NO: 5165 - protein, 7 aa, Artificial Sequence
  Description of Artificial Sequence: Synthetic peptide
LLHVPRE

SEQ ID NO: 5166 - protein, 7 aa, Artificial Sequence
  Description of Artificial Sequence: Synthetic peptide
LLICGEH

SEQ ID NO: 5167 - protein, 7 aa, Artificial Sequence
  Description of Artificial Sequence: Synthetic peptide
LLKGFSV

SEQ ID NO: 5168 - protein, 7 aa, Artificial Sequence
  Description of Artificial Sequence: Synthetic peptide
LLKPAAP

SEQ ID NO: 5169 - protein, 7 aa, Artificial Sequence
  Description of Artificial Sequence: Synthetic peptide
LLKSPVP

SEQ ID NO: 5170 - protein, 7 aa, Artificial Sequence
  Description of Artificial Sequence: Synthetic peptide
LLLAPTS

SEQ ID NO: 5171 - protein, 7 aa, Artificial Sequence
  Description of Artificial Sequence: Synthetic peptide
LLLARTV

SEQ ID NO: 5172 - protein, 7 aa, Artificial Sequence
  Description of Artificial Sequence: Synthetic peptide
LLLDDHT

SEQ ID NO: 5173 - protein, 7 aa, Artificial Sequence
  Description of Artificial Sequence: Synthetic peptide
LLLPARG

SEQ ID NO: 5174 - protein, 7 aa, Artificial Sequence
  Description of Artificial Sequence: Synthetic peptide
LLLQARA

SEQ ID NO: 5175 - protein, 7 aa, Artificial Sequence
  Description of Artificial Sequence: Synthetic peptide
LLLQKGP

SEQ ID NO: 5176 - protein, 7 aa, Artificial Sequence
  Description of Artificial Sequence: Synthetic peptide
LLLRADG

SEQ ID NO: 5177 - protein, 7 aa, Artificial Sequence
  Description of Artificial Sequence: Synthetic peptide
LLLSVGT

SEQ ID NO: 5178 - protein, 7 aa, Artificial Sequence
  Description of Artificial Sequence: Synthetic peptide
LLLTGVA

SEQ ID NO: 5179 - protein, 7 aa, Artificial Sequence
  Description of Artificial Sequence: Synthetic peptide
LLMPSGL

SEQ ID NO: 5180 - protein, 7 aa, Artificial Sequence
  Description of Artificial Sequence: Synthetic peptide
LLNDAYV

SEQ ID NO: 5181 - protein, 7 aa, Artificial Sequence
  Description of Artificial Sequence: Synthetic peptide
LLNGHEA

SEQ ID NO: 5182 - protein, 7 aa, Artificial Sequence
  Description of Artificial Sequence: Synthetic peptide
LLNMART

SEQ ID NO: 5183 - protein, 7 aa, Artificial Sequence
  Description of Artificial Sequence: Synthetic peptide
LLNTSSA

SEQ ID NO: 5184 - protein, 7 aa, Artificial Sequence
  Description of Artificial Sequence: Synthetic peptide
LLPAERA

SEQ ID NO: 5185 - protein, 7 aa, Artificial Sequence
  Description of Artificial Sequence: Synthetic peptide
LLPEYSR

SEQ ID NO: 5186 - protein, 7 aa, Artificial Sequence
  Description of Artificial Sequence: Synthetic peptide
LLPGRTD

SEQ ID NO: 5187 - protein, 7 aa, Artificial Sequence
  Description of Artificial Sequence: Synthetic peptide
LLPHEGT

SEQ ID NO: 5188 - protein, 7 aa, Artificial Sequence
  Description of Artificial Sequence: Synthetic peptide
LLPKASS

SEQ ID NO: 5189 - protein, 7 aa, Artificial Sequence
  Description of Artificial Sequence: Synthetic peptide
LLPLAPR

SEQ ID NO: 5190 - protein, 7 aa, Artificial Sequence
  Description of Artificial Sequence: Synthetic peptide
LLPNPPT

SEQ ID NO: 5191 - protein, 7 aa, Artificial Sequence
  Description of Artificial Sequence: Synthetic peptide
LLPNQSF

SEQ ID NO: 5192 - protein, 7 aa, Artificial Sequence
  Description of Artificial Sequence: Synthetic peptide
LLPNTPP

SEQ ID NO: 5193 - protein, 7 aa, Artificial Sequence
  Description of Artificial Sequence: Synthetic peptide
LLPPRDP

SEQ ID NO: 5194 - protein, 7 aa, Artificial Sequence
  Description of Artificial Sequence: Synthetic peptide
LLPPSSS

SEQ ID NO: 5195 - protein, 7 aa, Artificial Sequence
  Description of Artificial Sequence: Synthetic peptide
LLPQFRS

SEQ ID NO: 5196 - protein, 7 aa, Artificial Sequence
  Description of Artificial Sequence: Synthetic peptide
LLPRTHY

SEQ ID NO: 5197 - protein, 7 aa, Artificial Sequence
  Description of Artificial Sequence: Synthetic peptide
LLPSLAS

SEQ ID NO: 5198 - protein, 7 aa, Artificial Sequence
  Description of Artificial Sequence: Synthetic peptide
LLPSRGA

SEQ ID NO: 5199 - protein, 7 aa, Artificial Sequence
  Description of Artificial Sequence: Synthetic peptide
LLPTSKL

SEQ ID NO: 5200 - protein, 7 aa, Artificial Sequence
  Description of Artificial Sequence: Synthetic peptide
LLPVLSE

SEQ ID NO: 5201 - protein, 7 aa, Artificial Sequence
  Description of Artificial Sequence: Synthetic peptide
LLQPSVP

SEQ ID NO: 5202 - protein, 7 aa, Artificial Sequence
  Description of Artificial Sequence: Synthetic peptide
LLQQPEW

SEQ ID NO: 5203 - protein, 7 aa, Artificial Sequence
  Description of Artificial Sequence: Synthetic peptide
LLQRSLS

SEQ ID NO: 5204 - protein, 7 aa, Artificial Sequence
  Description of Artificial Sequence: Synthetic peptide
LLQTLKP

SEQ ID NO: 5205 - protein, 7 aa, Artificial Sequence
  Description of Artificial Sequence: Synthetic peptide
LLRGAVA

SEQ ID NO: 5206 - protein, 7 aa, Artificial Sequence
  Description of Artificial Sequence: Synthetic peptide
LLRGDAA

SEQ ID NO: 5207 - protein, 7 aa, Artificial Sequence
  Description of Artificial Sequence: Synthetic peptide
LLRKDEA

SEQ ID NO: 5208 - protein, 7 aa, Artificial Sequence
  Description of Artificial Sequence: Synthetic peptide
LLRNNPH

SEQ ID NO: 5209 - protein, 7 aa, Artificial Sequence
  Description of Artificial Sequence: Synthetic peptide
LLRNVLP

SEQ ID NO: 5210 - protein, 7 aa, Artificial Sequence
  Description of Artificial Sequence: Synthetic peptide
LLRSQSA

SEQ ID NO: 5211 - protein, 7 aa, Artificial Sequence
  Description of Artificial Sequence: Synthetic peptide
LLRTPSS

SEQ ID NO: 5212 - protein, 7 aa, Artificial Sequence
  Description of Artificial Sequence: Synthetic peptide
LLRVPNP

SEQ ID NO: 5213 - protein, 7 aa, Artificial Sequence
  Description of Artificial Sequence: Synthetic peptide
LLSAADR

SEQ ID NO: 5214 - protein, 7 aa, Artificial Sequence
  Description of Artificial Sequence: Synthetic peptide
LLSAPYT

SEQ ID NO: 5215 - protein, 7 aa, Artificial Sequence
  Description of Artificial Sequence: Synthetic peptide
LLSASTS

SEQ ID NO: 5216 - protein, 7 aa, Artificial Sequence
  Description of Artificial Sequence: Synthetic peptide
LLSDSAR

SEQ ID NO: 5217 - protein, 7 aa, Artificial Sequence
  Description of Artificial Sequence: Synthetic peptide
LLSFTTD

SEQ ID NO: 5218 - protein, 7 aa, Artificial Sequence
  Description of Artificial Sequence: Synthetic peptide
LLSGALQ

SEQ ID NO: 5219 - protein, 7 aa, Artificial Sequence
  Description of Artificial Sequence: Synthetic peptide
LLSGRVT

SEQ ID NO: 5220 - protein, 7 aa, Artificial Sequence
  Description of Artificial Sequence: Synthetic peptide
LLSKGHS

SEQ ID NO: 5221 - protein, 7 aa, Artificial Sequence
  Description of Artificial Sequence: Synthetic peptide
LLSMRTP

SEQ ID NO: 5222 - protein, 7 aa, Artificial Sequence
  Description of Artificial Sequence: Synthetic peptide
LLSPDEY

SEQ ID NO: 5223 - protein, 7 aa, Artificial Sequence
  Description of Artificial Sequence: Synthetic peptide
LLSPGPL

SEQ ID NO: 5224 - protein, 7 aa, Artificial Sequence
  Description of Artificial Sequence: Synthetic peptide
LLSRVHD

SEQ ID NO: 5225 - protein, 7 aa, Artificial Sequence
  Description of Artificial Sequence: Synthetic peptide
LLSTAVS

SEQ ID NO: 5226 - protein, 7 aa, Artificial Sequence
  Description of Artificial Sequence: Synthetic peptide
LLSTDGS

SEQ ID NO: 5227 - protein, 7 aa, Artificial Sequence
  Description of Artificial Sequence: Synthetic peptide
LLSVHEM

SEQ ID NO: 5228 - protein, 7 aa, Artificial Sequence
  Description of Artificial Sequence: Synthetic peptide
LLTDECT

SEQ ID NO: 5229 - protein, 7 aa, Artificial Sequence
  Description of Artificial Sequence: Synthetic peptide
LLTDRRL

SEQ ID NO: 5230 - protein, 7 aa, Artificial Sequence
  Description of Artificial Sequence: Synthetic peptide
LLTHFSS

SEQ ID NO: 5231 - protein, 7 aa, Artificial Sequence
  Description of Artificial Sequence: Synthetic peptide
LLTIGKP

SEQ ID NO: 5232 - protein, 7 aa, Artificial Sequence
  Description of Artificial Sequence: Synthetic peptide
LLTLSEV

SEQ ID NO: 5233 - protein, 7 aa, Artificial Sequence
  Description of Artificial Sequence: Synthetic peptide
LLTLSTP

SEQ ID NO: 5234 - protein, 7 aa, Artificial Sequence
  Description of Artificial Sequence: Synthetic peptide
LLTNAIP

SEQ ID NO: 5235 - protein, 7 aa, Artificial Sequence
  Description of Artificial Sequence: Synthetic peptide
LLTPYNP

SEQ ID NO: 5236 - protein, 7 aa, Artificial Sequence
  Description of Artificial Sequence: Synthetic peptide
LLTRSTE

SEQ ID NO: 5237 - protein, 7 aa, Artificial Sequence
  Description of Artificial Sequence: Synthetic peptide
LLVHKVV

SEQ ID NO: 5238 - protein, 7 aa, Artificial Sequence
  Description of Artificial Sequence: Synthetic peptide
LLVRHRD

SEQ ID NO: 5239 - protein, 7 aa, Artificial Sequence
  Description of Artificial Sequence: Synthetic peptide
LLVRNTD

SEQ ID NO: 5240 - protein, 7 aa, Artificial Sequence
  Description of Artificial Sequence: Synthetic peptide
LLVSENS

SEQ ID NO: 5241 - protein, 7 aa, Artificial Sequence
  Description of Artificial Sequence: Synthetic peptide
LLVTDKM

SEQ ID NO: 5242 - protein, 7 aa, Artificial Sequence
  Description of Artificial Sequence: Synthetic peptide
LLVVPSR

SEQ ID NO: 5243 - protein, 7 aa, Artificial Sequence
  Description of Artificial Sequence: Synthetic peptide
LLYAERP

SEQ ID NO: 5244 - protein, 7 aa, Artificial Sequence
  Description of Artificial Sequence: Synthetic peptide
LLYQNSS

SEQ ID NO: 5245 - protein, 7 aa, Artificial Sequence
  Description of Artificial Sequence: Synthetic peptide
LLYSTDK

SEQ ID NO: 5246 - protein, 7 aa, Artificial Sequence
  Description of Artificial Sequence: Synthetic peptide
LMAHSQL

SEQ ID NO: 5247 - protein, 7 aa, Artificial Sequence
  Description of Artificial Sequence: Synthetic peptide
LMAIHKP

SEQ ID NO: 5248 - protein, 7 aa, Artificial Sequence
  Description of Artificial Sequence: Synthetic peptide
LMATRVP

SEQ ID NO: 5249 - protein, 7 aa, Artificial Sequence
  Description of Artificial Sequence: Synthetic peptide
LMDSRKY

SEQ ID NO: 5250 - protein, 7 aa, Artificial Sequence
  Description of Artificial Sequence: Synthetic peptide
LMEATFK

SEQ ID NO: 5251 - protein, 7 aa, Artificial Sequence
  Description of Artificial Sequence: Synthetic peptide
LMEHIIE

SEQ ID NO: 5252 - protein, 7 aa, Artificial Sequence
  Description of Artificial Sequence: Synthetic peptide
LMENHMA

SEQ ID NO: 5253 - protein, 7 aa, Artificial Sequence
  Description of Artificial Sequence: Synthetic peptide
LMGQGRT

SEQ ID NO: 5254 - protein, 7 aa, Artificial Sequence
  Description of Artificial Sequence: Synthetic peptide
LMGQVAG

SEQ ID NO: 5255 - protein, 7 aa, Artificial Sequence
  Description of Artificial Sequence: Synthetic peptide
LMKPSAG

SEQ ID NO: 5256 - protein, 7 aa, Artificial Sequence
  Description of Artificial Sequence: Synthetic peptide
LMKRVET

SEQ ID NO: 5257 - protein, 7 aa, Artificial Sequence
  Description of Artificial Sequence: Synthetic peptide
LMLARND

SEQ ID NO: 5258 - protein, 7 aa, Artificial Sequence
  Description of Artificial Sequence: Synthetic peptide
LMLRSSQ

SEQ ID NO: 5259 - protein, 7 aa, Artificial Sequence
  Description of Artificial Sequence: Synthetic peptide
LMNGGST

SEQ ID NO: 5260 - protein, 7 aa, Artificial Sequence
  Description of Artificial Sequence: Synthetic peptide
LMNSAIA

SEQ ID NO: 5261 - protein, 7 aa, Artificial Sequence
  Description of Artificial Sequence: Synthetic peptide
LMPSMRP

SEQ ID NO: 5262 - protein, 7 aa, Artificial Sequence
  Description of Artificial Sequence: Synthetic peptide
LMQPKSA

SEQ ID NO: 5263 - protein, 7 aa, Artificial Sequence
  Description of Artificial Sequence: Synthetic peptide
LMRISTA

SEQ ID NO: 5264 - protein, 7 aa, Artificial Sequence
  Description of Artificial Sequence: Synthetic peptide
LMRPAEL

SEQ ID NO: 5265 - protein, 7 aa, Artificial Sequence
  Description of Artificial Sequence: Synthetic peptide
LMRTNPD

SEQ ID NO: 5266 - protein, 7 aa, Artificial Sequence
  Description of Artificial Sequence: Synthetic peptide
LMSLTTV

SEQ ID NO: 5267 - protein, 7 aa, Artificial Sequence
  Description of Artificial Sequence: Synthetic peptide
LMSPQSP

SEQ ID NO: 5268 - protein, 7 aa, Artificial Sequence
  Description of Artificial Sequence: Synthetic peptide
LMSQELR

SEQ ID NO: 5269 - protein, 7 aa, Artificial Sequence
  Description of Artificial Sequence: Synthetic peptide
LMSQTQR

SEQ ID NO: 5270 - protein, 7 aa, Artificial Sequence
  Description of Artificial Sequence: Synthetic peptide
LMSSKPP

SEQ ID NO: 5271 - protein, 7 aa, Artificial Sequence
  Description of Artificial Sequence: Synthetic peptide
LMSTAEP

SEQ ID NO: 5272 - protein, 7 aa, Artificial Sequence
  Description of Artificial Sequence: Synthetic peptide
LMSTASP

SEQ ID NO: 5273 - protein, 7 aa, Artificial Sequence
  Description of Artificial Sequence: Synthetic peptide
LMTGITI

SEQ ID NO: 5274 - protein, 7 aa, Artificial Sequence
  Description of Artificial Sequence: Synthetic peptide
LMTGVPL

SEQ ID NO: 5275 - protein, 7 aa, Artificial Sequence
  Description of Artificial Sequence: Synthetic peptide
LMTNAQL

SEQ ID NO: 5276 - protein, 7 aa, Artificial Sequence
  Description of Artificial Sequence: Synthetic peptide
LMTNPVP

SEQ ID NO: 5277 - protein, 7 aa, Artificial Sequence
  Description of Artificial Sequence: Synthetic peptide
LMTSGHK

SEQ ID NO: 5278 - protein, 7 aa, Artificial Sequence
  Description of Artificial Sequence: Synthetic peptide
LMTSNGA

SEQ ID NO: 5279 - protein, 7 aa, Artificial Sequence
  Description of Artificial Sequence: Synthetic peptide
LMTTHVD

SEQ ID NO: 5280 - protein, 7 aa, Artificial Sequence
  Description of Artificial Sequence: Synthetic peptide
LMVESHV

SEQ ID NO: 5281 - protein, 7 aa, Artificial Sequence
  Description of Artificial Sequence: Synthetic peptide
LMVGRKL

SEQ ID NO: 5282 - protein, 7 aa, Artificial Sequence
  Description of Artificial Sequence: Synthetic peptide
LNANALA

SEQ ID NO: 5283 - protein, 7 aa, Artificial Sequence
  Description of Artificial Sequence: Synthetic peptide
LNAPGRT

SEQ ID NO: 5284 - protein, 7 aa, Artificial Sequence
  Description of Artificial Sequence: Synthetic peptide
LNAPNPM

SEQ ID NO: 5285 - protein, 7 aa, Artificial Sequence
  Description of Artificial Sequence: Synthetic peptide
LNAQVST

SEQ ID NO: 5286 - protein, 7 aa, Artificial Sequence
  Description of Artificial Sequence: Synthetic peptide
LNASTKT

SEQ ID NO: 5287 - protein, 7 aa, Artificial Sequence
  Description of Artificial Sequence: Synthetic peptide
LNATDGK

SEQ ID NO: 5288 - protein, 7 aa, Artificial Sequence
  Description of Artificial Sequence: Synthetic peptide
LNDDAWS

SEQ ID NO: 5289 - protein, 7 aa, Artificial Sequence
  Description of Artificial Sequence: Synthetic peptide
LNDVLTQ

SEQ ID NO: 5290 - protein, 7 aa, Artificial Sequence
  Description of Artificial Sequence: Synthetic peptide
LNEITRS

SEQ ID NO: 5291 - protein, 7 aa, Artificial Sequence
  Description of Artificial Sequence: Synthetic peptide
LNELQFQ

SEQ ID NO: 5292 - protein, 7 aa, Artificial Sequence
  Description of Artificial Sequence: Synthetic peptide
LNERPRS

SEQ ID NO: 5293 - protein, 7 aa, Artificial Sequence
  Description of Artificial Sequence: Synthetic peptide
LNGEYLK

SEQ ID NO: 5294 - protein, 7 aa, Artificial Sequence
  Description of Artificial Sequence: Synthetic peptide
LNGFTAT

SEQ ID NO: 5295 - protein, 7 aa, Artificial Sequence
  Description of Artificial Sequence: Synthetic peptide
LNGRRAE

SEQ ID NO: 5296 - protein, 7 aa, Artificial Sequence
  Description of Artificial Sequence: Synthetic peptide
LNGSYIQ

SEQ ID NO: 5297 - protein, 7 aa, Artificial Sequence
  Description of Artificial Sequence: Synthetic peptide
LNHEKDG

SEQ ID NO: 5298 - protein, 7 aa, Artificial Sequence
  Description of Artificial Sequence: Synthetic peptide
LNHNPGL

SEQ ID NO: 5299 - protein, 7 aa, Artificial Sequence
  Description of Artificial Sequence: Synthetic peptide
LNHNSLR

SEQ ID NO: 5300 - protein, 7 aa, Artificial Sequence
  Description of Artificial Sequence: Synthetic peptide
LNHTRPL

SEQ ID NO: 5301 - protein, 7 aa, Artificial Sequence
  Description of Artificial Sequence: Synthetic peptide
LNIPSDP

SEQ ID NO: 5302 - protein, 7 aa, Artificial Sequence
  Description of Artificial Sequence: Synthetic peptide
LNITTSG

SEQ ID NO: 5303 - protein, 7 aa, Artificial Sequence
  Description of Artificial Sequence: Synthetic peptide
LNKEFAS

SEQ ID NO: 5304 - protein, 7 aa, Artificial Sequence
  Description of Artificial Sequence: Synthetic peptide
LNKNSPV

SEQ ID NO: 5305 - protein, 7 aa, Artificial Sequence
  Description of Artificial Sequence: Synthetic peptide
LNKQPFV

SEQ ID NO: 5306 - protein, 7 aa, Artificial Sequence
  Description of Artificial Sequence: Synthetic peptide
LNKRAPD

SEQ ID NO: 5307 - protein, 7 aa, Artificial Sequence
  Description of Artificial Sequence: Synthetic peptide
LNKSSTG

SEQ ID NO: 5308 - protein, 7 aa, Artificial Sequence
  Description of Artificial Sequence: Synthetic peptide
LNLARPA

SEQ ID NO: 5309 - protein, 7 aa, Artificial Sequence
  Description of Artificial Sequence: Synthetic peptide
LNLELYD

SEQ ID NO: 5310 - protein, 7 aa, Artificial Sequence
  Description of Artificial Sequence: Synthetic peptide
LNLGRPD

SEQ ID NO: 5311 - protein, 7 aa, Artificial Sequence
  Description of Artificial Sequence: Synthetic peptide
LNLHAPT

SEQ ID NO: 5312 - protein, 7 aa, Artificial Sequence
  Description of Artificial Sequence: Synthetic peptide
LNLPNHG

SEQ ID NO: 5313 - protein, 7 aa, Artificial Sequence
  Description of Artificial Sequence: Synthetic peptide
LNLQSQS

SEQ ID NO: 5314 - protein, 7 aa, Artificial Sequence
  Description of Artificial Sequence: Synthetic peptide
LNLSGLV

SEQ ID NO: 5315 - protein, 7 aa, Artificial Sequence
  Description of Artificial Sequence: Synthetic peptide
LNLTSVS

SEQ ID NO: 5316 - protein, 7 aa, Artificial Sequence
  Description of Artificial Sequence: Synthetic peptide
LNMSEPR

SEQ ID NO: 5317 - protein, 7 aa, Artificial Sequence
  Description of Artificial Sequence: Synthetic peptide
LNMSPTG

SEQ ID NO: 5318 - protein, 7 aa, Artificial Sequence
  Description of Artificial Sequence: Synthetic peptide
LNNHQFS

SEQ ID NO: 5319 - protein, 7 aa, Artificial Sequence
  Description of Artificial Sequence: Synthetic peptide
LNNLPSR

SEQ ID NO: 5320 - protein, 7 aa, Artificial Sequence
  Description of Artificial Sequence: Synthetic peptide
LNPAARI

SEQ ID NO: 5321 - protein, 7 aa, Artificial Sequence
  Description of Artificial Sequence: Synthetic peptide
LNPAKAS

SEQ ID NO: 5322 - protein, 7 aa, Artificial Sequence
  Description of Artificial Sequence: Synthetic peptide
LNPHENG

SEQ ID NO: 5323 - protein, 7 aa, Artificial Sequence
  Description of Artificial Sequence: Synthetic peptide
LNPSRVP

SEQ ID NO: 5324 - protein, 7 aa, Artificial Sequence
  Description of Artificial Sequence: Synthetic peptide
LNPVNVM

SEQ ID NO: 5325 - protein, 7 aa, Artificial Sequence
  Description of Artificial Sequence: Synthetic peptide
LNQGNMT

SEQ ID NO: 5326 - protein, 7 aa, Artificial Sequence
  Description of Artificial Sequence: Synthetic peptide
LNQHVPV

SEQ ID NO: 5327 - protein, 7 aa, Artificial Sequence
  Description of Artificial Sequence: Synthetic peptide
LNQSRST

SEQ ID NO: 5328 - protein, 7 aa, Artificial Sequence
  Description of Artificial Sequence: Synthetic peptide
LNQSVRV

SEQ ID NO: 5329 - protein, 7 aa, Artificial Sequence
  Description of Artificial Sequence: Synthetic peptide
LNRADVD

SEQ ID NO: 5330 - protein, 7 aa, Artificial Sequence
  Description of Artificial Sequence: Synthetic peptide
LNRDMSY

SEQ ID NO: 5331 - protein, 7 aa, Artificial Sequence
  Description of Artificial Sequence: Synthetic peptide
LNREQAS

SEQ ID NO: 5332 - protein, 7 aa, Artificial Sequence
  Description of Artificial Sequence: Synthetic peptide
LNRSSMP

SEQ ID NO: 5333 - protein, 7 aa, Artificial Sequence
  Description of Artificial Sequence: Synthetic peptide
LNRTNPD

SEQ ID NO: 5334 - protein, 7 aa, Artificial Sequence
  Description of Artificial Sequence: Synthetic peptide
LNRVTPS

SEQ ID NO: 5335 - protein, 7 aa, Artificial Sequence
  Description of Artificial Sequence: Synthetic peptide
LNSDAPY

SEQ ID NO: 5336 - protein, 7 aa, Artificial Sequence
  Description of Artificial Sequence: Synthetic peptide
LNSLGTF

SEQ ID NO: 5337 - protein, 7 aa, Artificial Sequence
  Description of Artificial Sequence: Synthetic peptide
LNSPLIA

SEQ ID NO: 5338 - protein, 7 aa, Artificial Sequence
  Description of Artificial Sequence: Synthetic peptide
LNSQPGL

SEQ ID NO: 5339 - protein, 7 aa, Artificial Sequence
  Description of Artificial Sequence: Synthetic peptide
LNSQRFG

SEQ ID NO: 5340 - protein, 7 aa, Artificial Sequence
  Description of Artificial Sequence: Synthetic peptide
LNSSHDA

SEQ ID NO: 5341 - protein, 7 aa, Artificial Sequence
  Description of Artificial Sequence: Synthetic peptide
LNSSRSA

SEQ ID NO: 5342 - protein, 7 aa, Artificial Sequence
  Description of Artificial Sequence: Synthetic peptide
LNSSSHG

SEQ ID NO: 5343 - protein, 7 aa, Artificial Sequence
  Description of Artificial Sequence: Synthetic peptide
LNSTNPH

SEQ ID NO: 5344 - protein, 7 aa, Artificial Sequence
  Description of Artificial Sequence: Synthetic peptide
LNSVRNN

SEQ ID NO: 5345 - protein, 7 aa, Artificial Sequence
  Description of Artificial Sequence: Synthetic peptide
LNTAALP

SEQ ID NO: 5346 - protein, 7 aa, Artificial Sequence
  Description of Artificial Sequence: Synthetic peptide
LNTHSYV

SEQ ID NO: 5347 - protein, 7 aa, Artificial Sequence
  Description of Artificial Sequence: Synthetic peptide
LNTKPFS

SEQ ID NO: 5348 - protein, 7 aa, Artificial Sequence
  Description of Artificial Sequence: Synthetic peptide
LNTRQQT

SEQ ID NO: 5349 - protein, 7 aa, Artificial Sequence
  Description of Artificial Sequence: Synthetic peptide
LNTRSLS

SEQ ID NO: 5350 - protein, 7 aa, Artificial Sequence
  Description of Artificial Sequence: Synthetic peptide
LNVEVER

SEQ ID NO: 5351 - protein, 7 aa, Artificial Sequence
  Description of Artificial Sequence: Synthetic peptide
LNVKSGL

SEQ ID NO: 5352 - protein, 7 aa, Artificial Sequence
  Description of Artificial Sequence: Synthetic peptide
LNVNIAP

SEQ ID NO: 5353 - protein, 7 aa, Artificial Sequence
  Description of Artificial Sequence: Synthetic peptide
LNVRESV

SEQ ID NO: 5354 - protein, 7 aa, Artificial Sequence
  Description of Artificial Sequence: Synthetic peptide
LNVRRVA

SEQ ID NO: 5355 - protein, 7 aa, Artificial Sequence
  Description of Artificial Sequence: Synthetic peptide
LNVRTDR

SEQ ID NO: 5356 - protein, 7 aa, Artificial Sequence
  Description of Artificial Sequence: Synthetic peptide
LNVSGNA

SEQ ID NO: 5357 - protein, 7 aa, Artificial Sequence
  Description of Artificial Sequence: Synthetic peptide
LNVSSTG

SEQ ID NO: 5358 - protein, 7 aa, Artificial Sequence
  Description of Artificial Sequence: Synthetic peptide
LNVVSTY

SEQ ID NO: 5359 - protein, 7 aa, Artificial Sequence
  Description of Artificial Sequence: Synthetic peptide
LNYDPMT

SEQ ID NO: 5360 - protein, 7 aa, Artificial Sequence
  Description of Artificial Sequence: Synthetic peptide
LNYGPAL

SEQ ID NO: 5361 - protein, 7 aa, Artificial Sequence
  Description of Artificial Sequence: Synthetic peptide
LNYHASV

SEQ ID NO: 5362 - protein, 7 aa, Artificial Sequence
  Description of Artificial Sequence: Synthetic peptide
LPAGNTS

SEQ ID NO: 5363 - protein, 7 aa, Artificial Sequence
  Description of Artificial Sequence: Synthetic peptide
LPAGNYH

SEQ ID NO: 5364 - protein, 7 aa, Artificial Sequence
  Description of Artificial Sequence: Synthetic peptide
LPANNSI

SEQ ID NO: 5365 - protein, 7 aa, Artificial Sequence
  Description of Artificial Sequence: Synthetic peptide
LPAPKPA

SEQ ID NO: 5366 - protein, 7 aa, Artificial Sequence
  Description of Artificial Sequence: Synthetic peptide
LPARLAT

SEQ ID NO: 5367 - protein, 7 aa, Artificial Sequence
  Description of Artificial Sequence: Synthetic peptide
LPASGAA

SEQ ID NO: 5368 - protein, 7 aa, Artificial Sequence
  Description of Artificial Sequence: Synthetic peptide
LPATRSI

SEQ ID NO: 5369 - protein, 7 aa, Artificial Sequence
  Description of Artificial Sequence: Synthetic peptide
LPAVCGP

SEQ ID NO: 5370 - protein, 7 aa, Artificial Sequence
  Description of Artificial Sequence: Synthetic peptide
LPDKSLM

SEQ ID NO: 5371 - protein, 7 aa, Artificial Sequence
  Description of Artificial Sequence: Synthetic peptide
LPDMSRE

SEQ ID NO: 5372 - protein, 7 aa, Artificial Sequence
  Description of Artificial Sequence: Synthetic peptide
LPDPRPD

SEQ ID NO: 5373 - protein, 7 aa, Artificial Sequence
  Description of Artificial Sequence: Synthetic peptide
LPDTIRS

SEQ ID NO: 5374 - protein, 7 aa, Artificial Sequence
  Description of Artificial Sequence: Synthetic peptide
LPDTRTL

SEQ ID NO: 5375 - protein, 7 aa, Artificial Sequence
  Description of Artificial Sequence: Synthetic peptide
LPDVARY

SEQ ID NO: 5376 - protein, 7 aa, Artificial Sequence
  Description of Artificial Sequence: Synthetic peptide
LPEAGVP

SEQ ID NO: 5377 - protein, 7 aa, Artificial Sequence
  Description of Artificial Sequence: Synthetic peptide
LPEISPH

SEQ ID NO: 5378 - protein, 7 aa, Artificial Sequence
  Description of Artificial Sequence: Synthetic peptide
LPENTPY

SEQ ID NO: 5379 - protein, 7 aa, Artificial Sequence
  Description of Artificial Sequence: Synthetic peptide
LPEQTVI

SEQ ID NO: 5380 - protein, 7 aa, Artificial Sequence
  Description of Artificial Sequence: Synthetic peptide
LPERVGL

SEQ ID NO: 5381 - protein, 7 aa, Artificial Sequence
  Description of Artificial Sequence: Synthetic peptide
LPETGMS

SEQ ID NO: 5382 - protein, 7 aa, Artificial Sequence
  Description of Artificial Sequence: Synthetic peptide
LPFATSP

SEQ ID NO: 5383 - protein, 7 aa, Artificial Sequence
  Description of Artificial Sequence: Synthetic peptide
LPGATIE

SEQ ID NO: 5384 - protein, 7 aa, Artificial Sequence
  Description of Artificial Sequence: Synthetic peptide
LPGKVTT

SEQ ID NO: 5385 - protein, 7 aa, Artificial Sequence
  Description of Artificial Sequence: Synthetic peptide
LPGRAAP

SEQ ID NO: 5386 - protein, 7 aa, Artificial Sequence
  Description of Artificial Sequence: Synthetic peptide
LPGTPRG

SEQ ID NO: 5387 - protein, 7 aa, Artificial Sequence
  Description of Artificial Sequence: Synthetic peptide
LPGTVGV

SEQ ID NO: 5388 - protein, 7 aa, Artificial Sequence
  Description of Artificial Sequence: Synthetic peptide
LPGWPLD

SEQ ID NO: 5389 - protein, 7 aa, Artificial Sequence
  Description of Artificial Sequence: Synthetic peptide
LPHPSQN

SEQ ID NO: 5390 - protein, 7 aa, Artificial Sequence
  Description of Artificial Sequence: Synthetic peptide
LPHRPNS

SEQ ID NO: 5391 - protein, 7 aa, Artificial Sequence
  Description of Artificial Sequence: Synthetic peptide
LPHSTPM

SEQ ID NO: 5392 - protein, 7 aa, Artificial Sequence
  Description of Artificial Sequence: Synthetic peptide
LPIATSK

SEQ ID NO: 5393 - protein, 7 aa, Artificial Sequence
  Description of Artificial Sequence: Synthetic peptide
LPIGKQV

SEQ ID NO: 5394 - protein, 7 aa, Artificial Sequence
  Description of Artificial Sequence: Synthetic peptide
LPILTSH

SEQ ID NO: 5395 - protein, 7 aa, Artificial Sequence
  Description of Artificial Sequence: Synthetic peptide
LPILTSS

SEQ ID NO: 5396 - protein, 7 aa, Artificial Sequence
  Description of Artificial Sequence: Synthetic peptide
LPINHKF

SEQ ID NO: 5397 - protein, 7 aa, Artificial Sequence
  Description of Artificial Sequence: Synthetic peptide
LPIPVDA

SEQ ID NO: 5398 - protein, 7 aa, Artificial Sequence
  Description of Artificial Sequence: Synthetic peptide
LPISLQP

SEQ ID NO: 5399 - protein, 7 aa, Artificial Sequence
  Description of Artificial Sequence: Synthetic peptide
LPITYAD

SEQ ID NO: 5400 - protein, 7 aa, Artificial Sequence
  Description of Artificial Sequence: Synthetic peptide
LPKASTS

SEQ ID NO: 5401 - protein, 7 aa, Artificial Sequence
  Description of Artificial Sequence: Synthetic peptide
LPKFRDQ

SEQ ID NO: 5402 - protein, 7 aa, Artificial Sequence
  Description of Artificial Sequence: Synthetic peptide
LPKIDNT

SEQ ID NO: 5403 - protein, 7 aa, Artificial Sequence
  Description of Artificial Sequence: Synthetic peptide
LPKNYDA

SEQ ID NO: 5404 - protein, 7 aa, Artificial Sequence
  Description of Artificial Sequence: Synthetic peptide
LPKSSDA

SEQ ID NO: 5405 - protein, 7 aa, Artificial Sequence
  Description of Artificial Sequence: Synthetic peptide
LPKVVAT

SEQ ID NO: 5406 - protein, 7 aa, Artificial Sequence
  Description of Artificial Sequence: Synthetic peptide
LPLAQQP

SEQ ID NO: 5407 - protein, 7 aa, Artificial Sequence
  Description of Artificial Sequence: Synthetic peptide
LPLAVYD

SEQ ID NO: 5408 - protein, 7 aa, Artificial Sequence
  Description of Artificial Sequence: Synthetic peptide
LPLGNRM

SEQ ID NO: 5409 - protein, 7 aa, Artificial Sequence
  Description of Artificial Sequence: Synthetic peptide
LPLHRSS

SEQ ID NO: 5410 - protein, 7 aa, Artificial Sequence
  Description of Artificial Sequence: Synthetic peptide
LPLHSPR

SEQ ID NO: 5411 - protein, 7 aa, Artificial Sequence
  Description of Artificial Sequence: Synthetic peptide
LPLIFTE

SEQ ID NO: 5412 - protein, 7 aa, Artificial Sequence
  Description of Artificial Sequence: Synthetic peptide
LPLKGAD

SEQ ID NO: 5413 - protein, 7 aa, Artificial Sequence
  Description of Artificial Sequence: Synthetic peptide
LPLMKPG

SEQ ID NO: 5414 - protein, 7 aa, Artificial Sequence
  Description of Artificial Sequence: Synthetic peptide
LPLNFDR

SEQ ID NO: 5415 - protein, 7 aa, Artificial Sequence
  Description of Artificial Sequence: Synthetic peptide
LPLNKSH

SEQ ID NO: 5416 - protein, 7 aa, Artificial Sequence
  Description of Artificial Sequence: Synthetic peptide
LPLNTYT

SEQ ID NO: 5417 - protein, 7 aa, Artificial Sequence
  Description of Artificial Sequence: Synthetic peptide
LPLPPYV

SEQ ID NO: 5418 - protein, 7 aa, Artificial Sequence
  Description of Artificial Sequence: Synthetic peptide
LPLPTSG

SEQ ID NO: 5419 - protein, 7 aa, Artificial Sequence
  Description of Artificial Sequence: Synthetic peptide
LPLREPK

SEQ ID NO: 5420 - protein, 7 aa, Artificial Sequence
  Description of Artificial Sequence: Synthetic peptide
LPLRMSD

SEQ ID NO: 5421 - protein, 7 aa, Artificial Sequence
  Description of Artificial Sequence: Synthetic peptide
LPLSPMH

SEQ ID NO: 5422 - protein, 7 aa, Artificial Sequence
  Description of Artificial Sequence: Synthetic peptide
LPMDLVA

SEQ ID NO: 5423 - protein, 7 aa, Artificial Sequence
  Description of Artificial Sequence: Synthetic peptide
LPMMAHL

SEQ ID NO: 5424 - protein, 7 aa, Artificial Sequence
  Description of Artificial Sequence: Synthetic peptide
LPMSHLP

SEQ ID NO: 5425 - protein, 7 aa, Artificial Sequence
  Description of Artificial Sequence: Synthetic peptide
LPNAYMH

SEQ ID NO: 5426 - protein, 7 aa, Artificial Sequence
  Description of Artificial Sequence: Synthetic peptide
LPNEPSD

SEQ ID NO: 5427 - protein, 7 aa, Artificial Sequence
  Description of Artificial Sequence: Synthetic peptide
LPNHISP

SEQ ID NO: 5428 - protein, 7 aa, Artificial Sequence
  Description of Artificial Sequence: Synthetic peptide
LPNLRDQ

SEQ ID NO: 5429 - protein, 7 aa, Artificial Sequence
  Description of Artificial Sequence: Synthetic peptide
LPNNSRD

SEQ ID NO: 5430 - protein, 7 aa, Artificial Sequence
  Description of Artificial Sequence: Synthetic peptide
LPNPRSD

SEQ ID NO: 5431 - protein, 7 aa, Artificial Sequence
  Description of Artificial Sequence: Synthetic peptide
LPNSVFT

SEQ ID NO: 5432 - protein, 7 aa, Artificial Sequence
  Description of Artificial Sequence: Synthetic peptide
LPPAAHR

SEQ ID NO: 5433 - protein, 7 aa, Artificial Sequence
  Description of Artificial Sequence: Synthetic peptide
LPPAHAH

SEQ ID NO: 5434 - protein, 7 aa, Artificial Sequence
  Description of Artificial Sequence: Synthetic peptide
LPPCLTN

SEQ ID NO: 5435 - protein, 7 aa, Artificial Sequence
  Description of Artificial Sequence: Synthetic peptide
LPPEHRG

SEQ ID NO: 5436 - protein, 7 aa, Artificial Sequence
  Description of Artificial Sequence: Synthetic peptide
LPPETFP

SEQ ID NO: 5437 - protein, 7 aa, Artificial Sequence
  Description of Artificial Sequence: Synthetic peptide
LPPGPAT

SEQ ID NO: 5438 - protein, 7 aa, Artificial Sequence
  Description of Artificial Sequence: Synthetic peptide
LPPHGNV

SEQ ID NO: 5439 - protein, 7 aa, Artificial Sequence
  Description of Artificial Sequence: Synthetic peptide
LPPHGSA

SEQ ID NO: 5440 - protein, 7 aa, Artificial Sequence
  Description of Artificial Sequence: Synthetic peptide
LPPHGYA

SEQ ID NO: 5441 - protein, 7 aa, Artificial Sequence
  Description of Artificial Sequence: Synthetic peptide
LPPLVQY

SEQ ID NO: 5442 - protein, 7 aa, Artificial Sequence
  Description of Artificial Sequence: Synthetic peptide
LPPNGHR

SEQ ID NO: 5443 - protein, 7 aa, Artificial Sequence
  Description of Artificial Sequence: Synthetic peptide
LPPNKFM

SEQ ID NO: 5444 - protein, 7 aa, Artificial Sequence
  Description of Artificial Sequence: Synthetic peptide
LPPRDDR

SEQ ID NO: 5445 - protein, 7 aa, Artificial Sequence
  Description of Artificial Sequence: Synthetic peptide
LPPRSSY

SEQ ID NO: 5446 - protein, 7 aa, Artificial Sequence
  Description of Artificial Sequence: Synthetic peptide
LPPSHAM

SEQ ID NO: 5447 - protein, 7 aa, Artificial Sequence
  Description of Artificial Sequence: Synthetic peptide
LPPSIDN

SEQ ID NO: 5448 - protein, 7 aa, Artificial Sequence
  Description of Artificial Sequence: Synthetic peptide
LPPYRGP

SEQ ID NO: 5449 - protein, 7 aa, Artificial Sequence
  Description of Artificial Sequence: Synthetic peptide
LPPYSPA

SEQ ID NO: 5450 - protein, 7 aa, Artificial Sequence
  Description of Artificial Sequence: Synthetic peptide
LPQPGAA

SEQ ID NO: 5451 - protein, 7 aa, Artificial Sequence
  Description of Artificial Sequence: Synthetic peptide
LPQRTSH

SEQ ID NO: 5452 - protein, 7 aa, Artificial Sequence
  Description of Artificial Sequence: Synthetic peptide
LPREPLT

SEQ ID NO: 5453 - protein, 7 aa, Artificial Sequence
  Description of Artificial Sequence: Synthetic peptide
LPRFPVD

SEQ ID NO: 5454 - protein, 7 aa, Artificial Sequence
  Description of Artificial Sequence: Synthetic peptide
LPRGMTS

SEQ ID NO: 5455 - protein, 7 aa, Artificial Sequence
  Description of Artificial Sequence: Synthetic peptide
LPRHQQT

SEQ ID NO: 5456 - protein, 7 aa, Artificial Sequence
  Description of Artificial Sequence: Synthetic peptide
LPRIPTG

SEQ ID NO: 5457 - protein, 7 aa, Artificial Sequence
  Description of Artificial Sequence: Synthetic peptide
LPRLMAP

SEQ ID NO: 5458 - protein, 7 aa, Artificial Sequence
  Description of Artificial Sequence: Synthetic peptide
LPRQAAL

SEQ ID NO: 5459 - protein, 7 aa, Artificial Sequence
  Description of Artificial Sequence: Synthetic peptide
LPRSQFI

SEQ ID NO: 5460 - protein, 7 aa, Artificial Sequence
  Description of Artificial Sequence: Synthetic peptide
LPRVNAG

SEQ ID NO: 5461 - protein, 7 aa, Artificial Sequence
  Description of Artificial Sequence: Synthetic peptide
LPSADRV

SEQ ID NO: 5462 - protein, 7 aa, Artificial Sequence
  Description of Artificial Sequence: Synthetic peptide
LPSCIGP

SEQ ID NO: 5463 - protein, 7 aa, Artificial Sequence
  Description of Artificial Sequence: Synthetic peptide
LPSFNGS

SEQ ID NO: 5464 - protein, 7 aa, Artificial Sequence
  Description of Artificial Sequence: Synthetic peptide
LPSILLP

SEQ ID NO: 5465 - protein, 7 aa, Artificial Sequence
  Description of Artificial Sequence: Synthetic peptide
LPSIPRT

SEQ ID NO: 5466 - protein, 7 aa, Artificial Sequence
  Description of Artificial Sequence: Synthetic peptide
LPSMSLS

SEQ ID NO: 5467 - protein, 7 aa, Artificial Sequence
  Description of Artificial Sequence: Synthetic peptide
LPSNAVS

SEQ ID NO: 5468 - protein, 7 aa, Artificial Sequence
  Description of Artificial Sequence: Synthetic peptide
LPSNTRL

SEQ ID NO: 5469 - protein, 7 aa, Artificial Sequence
  Description of Artificial Sequence: Synthetic peptide
LPSPPGV

SEQ ID NO: 5470 - protein, 7 aa, Artificial Sequence
  Description of Artificial Sequence: Synthetic peptide
LPSPPIS

SEQ ID NO: 5471 - protein, 7 aa, Artificial Sequence
  Description of Artificial Sequence: Synthetic peptide
LPSQLIG

SEQ ID NO: 5472 - protein, 7 aa, Artificial Sequence
  Description of Artificial Sequence: Synthetic peptide
LPSRAFS

SEQ ID NO: 5473 - protein, 7 aa, Artificial Sequence
  Description of Artificial Sequence: Synthetic peptide
LPSSTPN

SEQ ID NO: 5474 - protein, 7 aa, Artificial Sequence
  Description of Artificial Sequence: Synthetic peptide
LPSSVYT

SEQ ID NO: 5475 - protein, 7 aa, Artificial Sequence
  Description of Artificial Sequence: Synthetic peptide
LPSTCGK

SEQ ID NO: 5476 - protein, 7 aa, Artificial Sequence
  Description of Artificial Sequence: Synthetic peptide
LPSTGGL

SEQ ID NO: 5477 - protein, 7 aa, Artificial Sequence
  Description of Artificial Sequence: Synthetic peptide
LPSTPPR

SEQ ID NO: 5478 - protein, 7 aa, Artificial Sequence
  Description of Artificial Sequence: Synthetic peptide
LPSYNAS

SEQ ID NO: 5479 - protein, 7 aa, Artificial Sequence
  Description of Artificial Sequence: Synthetic peptide
LPTHLEA

SEQ ID NO: 5480 - protein, 7 aa, Artificial Sequence
  Description of Artificial Sequence: Synthetic peptide
LPTINAV

SEQ ID NO: 5481 - protein, 7 aa, Artificial Sequence
  Description of Artificial Sequence: Synthetic peptide
LPTKEAV

SEQ ID NO: 5482 - protein, 7 aa, Artificial Sequence
  Description of Artificial Sequence: Synthetic peptide
LPTLRIP

SEQ ID NO: 5483 - protein, 7 aa, Artificial Sequence
  Description of Artificial Sequence: Synthetic peptide
LPTLSYV

SEQ ID NO: 5484 - protein, 7 aa, Artificial Sequence
  Description of Artificial Sequence: Synthetic peptide
LPTMHNT

SEQ ID NO: 5485 - protein, 7 aa, Artificial Sequence
  Description of Artificial Sequence: Synthetic peptide
LPTNKGI

SEQ ID NO: 5486 - protein, 7 aa, Artificial Sequence
  Description of Artificial Sequence: Synthetic peptide
LPTNYAA

SEQ ID NO: 5487 - protein, 7 aa, Artificial Sequence
  Description of Artificial Sequence: Synthetic peptide
LPTPFSS

SEQ ID NO: 5488 - protein, 7 aa, Artificial Sequence
  Description of Artificial Sequence: Synthetic peptide
LPTPLTS

SEQ ID NO: 5489 - protein, 7 aa, Artificial Sequence
  Description of Artificial Sequence: Synthetic peptide
LPTSPSA

SEQ ID NO: 5490 - protein, 7 aa, Artificial Sequence
  Description of Artificial Sequence: Synthetic peptide
LPTSTSI

SEQ ID NO: 5491 - protein, 7 aa, Artificial Sequence
  Description of Artificial Sequence: Synthetic peptide
LPTSVVL

SEQ ID NO: 5492 - protein, 7 aa, Artificial Sequence
  Description of Artificial Sequence: Synthetic peptide
LPVGDPL

SEQ ID NO: 5493 - protein, 7 aa, Artificial Sequence
  Description of Artificial Sequence: Synthetic peptide
LPVNIVG

SEQ ID NO: 5494 - protein, 7 aa, Artificial Sequence
  Description of Artificial Sequence: Synthetic peptide
LPVSDRY

SEQ ID NO: 5495 - protein, 7 aa, Artificial Sequence
  Description of Artificial Sequence: Synthetic peptide
LPVSSRH

SEQ ID NO: 5496 - protein, 7 aa, Artificial Sequence
  Description of Artificial Sequence: Synthetic peptide
LPVSTRH

SEQ ID NO: 5497 - protein, 7 aa, Artificial Sequence
  Description of Artificial Sequence: Synthetic peptide
LPVVNAS

SEQ ID NO: 5498 - protein, 7 aa, Artificial Sequence
  Description of Artificial Sequence: Synthetic peptide
LPYTVGT

SEQ ID NO: 5499 - protein, 7 aa, Artificial Sequence
  Description of Artificial Sequence: Synthetic peptide
LQARTLN

SEQ ID NO: 5500 - protein, 7 aa, Artificial Sequence
  Description of Artificial Sequence: Synthetic peptide
LQASKAD

SEQ ID NO: 5501 - protein, 7 aa, Artificial Sequence
  Description of Artificial Sequence: Synthetic peptide
LQASNDI

SEQ ID NO: 5502 - protein, 7 aa, Artificial Sequence
  Description of Artificial Sequence: Synthetic peptide
LQATRGA

SEQ ID NO: 5503 - protein, 7 aa, Artificial Sequence
  Description of Artificial Sequence: Synthetic peptide
LQDAVCN

SEQ ID NO: 5504 - protein, 7 aa, Artificial Sequence
  Description of Artificial Sequence: Synthetic peptide
LQDPRSP

SEQ ID NO: 5505 - protein, 7 aa, Artificial Sequence
  Description of Artificial Sequence: Synthetic peptide
LQDVSMG

SEQ ID NO: 5506 - protein, 7 aa, Artificial Sequence
  Description of Artificial Sequence: Synthetic peptide
LQEKSWE

SEQ ID NO: 5507 - protein, 7 aa, Artificial Sequence
  Description of Artificial Sequence: Synthetic peptide
LQEPGNL

SEQ ID NO: 5508 - protein, 7 aa, Artificial Sequence
  Description of Artificial Sequence: Synthetic peptide
LQFSPPS

SEQ ID NO: 5509 - protein, 7 aa, Artificial Sequence
  Description of Artificial Sequence: Synthetic peptide
LQGAFAS

SEQ ID NO: 5510 - protein, 7 aa, Artificial Sequence
  Description of Artificial Sequence: Synthetic peptide
LQGSRQI

SEQ ID NO: 5511 - protein, 7 aa, Artificial Sequence
  Description of Artificial Sequence: Synthetic peptide
LQGWHAQ

SEQ ID NO: 5512 - protein, 7 aa, Artificial Sequence
  Description of Artificial Sequence: Synthetic peptide
LQHHSNG

SEQ ID NO: 5513 - protein, 7 aa, Artificial Sequence
  Description of Artificial Sequence: Synthetic peptide
LQHLQPS

SEQ ID NO: 5514 - protein, 7 aa, Artificial Sequence
  Description of Artificial Sequence: Synthetic peptide
LQKMVPL

SEQ ID NO: 5515 - protein, 7 aa, Artificial Sequence
  Description of Artificial Sequence: Synthetic peptide
LQKPTMS

SEQ ID NO: 5516 - protein, 7 aa, Artificial Sequence
  Description of Artificial Sequence: Synthetic peptide
LQKPTSA

SEQ ID NO: 5517 - protein, 7 aa, Artificial Sequence
  Description of Artificial Sequence: Synthetic peptide
LQLNQQK

SEQ ID NO: 5518 - protein, 7 aa, Artificial Sequence
  Description of Artificial Sequence: Synthetic peptide
LQLRQTS

SEQ ID NO: 5519 - protein, 7 aa, Artificial Sequence
  Description of Artificial Sequence: Synthetic peptide
LQLTRGE

SEQ ID NO: 5520 - protein, 7 aa, Artificial Sequence
  Description of Artificial Sequence: Synthetic peptide
LQMARGG

SEQ ID NO: 5521 - protein, 7 aa, Artificial Sequence
  Description of Artificial Sequence: Synthetic peptide
LQMRPMT

SEQ ID NO: 5522 - protein, 7 aa, Artificial Sequence
  Description of Artificial Sequence: Synthetic peptide
LQNGCKS

SEQ ID NO: 5523 - protein, 7 aa, Artificial Sequence
  Description of Artificial Sequence: Synthetic peptide
LQNTSSS

SEQ ID NO: 5524 - protein, 7 aa, Artificial Sequence
  Description of Artificial Sequence: Synthetic peptide
LQPFKHQ

SEQ ID NO: 5525 - protein, 7 aa, Artificial Sequence
  Description of Artificial Sequence: Synthetic peptide
LQPREPV

SEQ ID NO: 5526 - protein, 7 aa, Artificial Sequence
  Description of Artificial Sequence: Synthetic peptide
LQPSSRT

SEQ ID NO: 5527 - protein, 7 aa, Artificial Sequence
  Description of Artificial Sequence: Synthetic peptide
LQPTGEA

SEQ ID NO: 5528 - protein, 7 aa, Artificial Sequence
  Description of Artificial Sequence: Synthetic peptide
LQQTGLR

SEQ ID NO: 5529 - protein, 7 aa, Artificial Sequence
  Description of Artificial Sequence: Synthetic peptide
LQRANMV

SEQ ID NO: 5530 - protein, 7 aa, Artificial Sequence
  Description of Artificial Sequence: Synthetic peptide
LQREAHT

SEQ ID NO: 5531 - protein, 7 aa, Artificial Sequence
  Description of Artificial Sequence: Synthetic peptide
LQRSRGP

SEQ ID NO: 5532 - protein, 7 aa, Artificial Sequence
  Description of Artificial Sequence: Synthetic peptide
LQSARAP

SEQ ID NO: 5533 - protein, 7 aa, Artificial Sequence
  Description of Artificial Sequence: Synthetic peptide
LQSFSSP

SEQ ID NO: 5534 - protein, 7 aa, Artificial Sequence
  Description of Artificial Sequence: Synthetic peptide
LQSGPQP

SEQ ID NO: 5535 - protein, 7 aa, Artificial Sequence
  Description of Artificial Sequence: Synthetic peptide
LQSPENE

SEQ ID NO: 5536 - protein, 7 aa, Artificial Sequence
  Description of Artificial Sequence: Synthetic peptide
LQSYTPP

SEQ ID NO: 5537 - protein, 7 aa, Artificial Sequence
  Description of Artificial Sequence: Synthetic peptide
LQTGRFS

SEQ ID NO: 5538 - protein, 7 aa, Artificial Sequence
  Description of Artificial Sequence: Synthetic peptide
LQTKSSS

SEQ ID NO: 5539 - protein, 7 aa, Artificial Sequence
  Description of Artificial Sequence: Synthetic peptide
LQTVDID

SEQ ID NO: 5540 - protein, 7 aa, Artificial Sequence
  Description of Artificial Sequence: Synthetic peptide
LQVDSNV

SEQ ID NO: 5541 - protein, 7 aa, Artificial Sequence
  Description of Artificial Sequence: Synthetic peptide
LQVPSSL

SEQ ID NO: 5542 - protein, 7 aa, Artificial Sequence
  Description of Artificial Sequence: Synthetic peptide
LQVSGLD

SEQ ID NO: 5543 - protein, 7 aa, Artificial Sequence
  Description of Artificial Sequence: Synthetic peptide
LQYATSD

SEQ ID NO: 5544 - protein, 7 aa, Artificial Sequence
  Description of Artificial Sequence: Synthetic peptide
LRAAEIS

SEQ ID NO: 5545 - protein, 7 aa, Artificial Sequence
  Description of Artificial Sequence: Synthetic peptide
LRAANAL

SEQ ID NO: 5546 - protein, 7 aa, Artificial Sequence
  Description of Artificial Sequence: Synthetic peptide
LRADGKA

SEQ ID NO: 5547 - protein, 7 aa, Artificial Sequence
  Description of Artificial Sequence: Synthetic peptide
LRAGTAQ

SEQ ID NO: 5548 - protein, 7 aa, Artificial Sequence
  Description of Artificial Sequence: Synthetic peptide
LRAGTSS

SEQ ID NO: 5549 - protein, 7 aa, Artificial Sequence
  Description of Artificial Sequence: Synthetic peptide
LRAILEE

SEQ ID NO: 5550 - protein, 7 aa, Artificial Sequence
  Description of Artificial Sequence: Synthetic peptide
LRALTGS

SEQ ID NO: 5551 - protein, 7 aa, Artificial Sequence
  Description of Artificial Sequence: Synthetic peptide
LRAQNDA

SEQ ID NO: 5552 - protein, 7 aa, Artificial Sequence
  Description of Artificial Sequence: Synthetic peptide
LRATNSL

SEQ ID NO: 5553 - protein, 7 aa, Artificial Sequence
  Description of Artificial Sequence: Synthetic peptide
LRDGQRP

SEQ ID NO: 5554 - protein, 7 aa, Artificial Sequence
  Description of Artificial Sequence: Synthetic peptide
LRDGRAS

SEQ ID NO: 5555 - protein, 7 aa, Artificial Sequence
  Description of Artificial Sequence: Synthetic peptide
LRDHGGH

SEQ ID NO: 5556 - protein, 7 aa, Artificial Sequence
  Description of Artificial Sequence: Synthetic peptide
LRDRDFK

SEQ ID NO: 5557 - protein, 7 aa, Artificial Sequence
  Description of Artificial Sequence: Synthetic peptide
LRDRDVL

SEQ ID NO: 5558 - protein, 7 aa, Artificial Sequence
  Description of Artificial Sequence: Synthetic peptide
LRDSNKN

SEQ ID NO: 5559 - protein, 7 aa, Artificial Sequence
  Description of Artificial Sequence: Synthetic peptide
LRDSVQV

SEQ ID NO: 5560 - protein, 7 aa, Artificial Sequence
  Description of Artificial Sequence: Synthetic peptide
LREHGPV

SEQ ID NO: 5561 - protein, 7 aa, Artificial Sequence
  Description of Artificial Sequence: Synthetic peptide
LREMPLP

SEQ ID NO: 5562 - protein, 7 aa, Artificial Sequence
  Description of Artificial Sequence: Synthetic peptide
LRENMSN

SEQ ID NO: 5563 - protein, 7 aa, Artificial Sequence
  Description of Artificial Sequence: Synthetic peptide
LREPTGF

SEQ ID NO: 5564 - protein, 7 aa, Artificial Sequence
  Description of Artificial Sequence: Synthetic peptide
LREPVIQ

SEQ ID NO: 5565 - protein, 7 aa, Artificial Sequence
  Description of Artificial Sequence: Synthetic peptide
LRESQRI

SEQ ID NO: 5566 - protein, 7 aa, Artificial Sequence
  Description of Artificial Sequence: Synthetic peptide
LRFPGTP

SEQ ID NO: 5567 - protein, 7 aa, Artificial Sequence
  Description of Artificial Sequence: Synthetic peptide
LRFQSTP

SEQ ID NO: 5568 - protein, 7 aa, Artificial Sequence
  Description of Artificial Sequence: Synthetic peptide
LRGAIAP

SEQ ID NO: 5569 - protein, 7 aa, Artificial Sequence
  Description of Artificial Sequence: Synthetic peptide
LRGDASE

SEQ ID NO: 5570 - protein, 7 aa, Artificial Sequence
  Description of Artificial Sequence: Synthetic peptide
LRGESSP

SEQ ID NO: 5571 - protein, 7 aa, Artificial Sequence
  Description of Artificial Sequence: Synthetic peptide
LRGGMDP

SEQ ID NO: 5572 - protein, 7 aa, Artificial Sequence
  Description of Artificial Sequence: Synthetic peptide
LRGNVEA

SEQ ID NO: 5573 - protein, 7 aa, Artificial Sequence
  Description of Artificial Sequence: Synthetic peptide
LRGPTTV

SEQ ID NO: 5574 - protein, 7 aa, Artificial Sequence
  Description of Artificial Sequence: Synthetic peptide
LRGQLSN

SEQ ID NO: 5575 - protein, 7 aa, Artificial Sequence
  Description of Artificial Sequence: Synthetic peptide
LRGRSSE

SEQ ID NO: 5576 - protein, 7 aa, Artificial Sequence
  Description of Artificial Sequence: Synthetic peptide
LRGSLEH

SEQ ID NO: 5577 - protein, 7 aa, Artificial Sequence
  Description of Artificial Sequence: Synthetic peptide
LRGTMES

SEQ ID NO: 5578 - protein, 7 aa, Artificial Sequence
  Description of Artificial Sequence: Synthetic peptide
LRHDSNA

SEQ ID NO: 5579 - protein, 7 aa, Artificial Sequence
  Description of Artificial Sequence: Synthetic peptide
LRISTSD

SEQ ID NO: 5580 - protein, 7 aa, Artificial Sequence
  Description of Artificial Sequence: Synthetic peptide
LRKEYLG

SEQ ID NO: 5581 - protein, 7 aa, Artificial Sequence
  Description of Artificial Sequence: Synthetic peptide
LRLDDQA

SEQ ID NO: 5582 - protein, 7 aa, Artificial Sequence
  Description of Artificial Sequence: Synthetic peptide
LRLHQES

SEQ ID NO: 5583 - protein, 7 aa, Artificial Sequence
  Description of Artificial Sequence: Synthetic peptide
LRLKNDA

SEQ ID NO: 5584 - protein, 7 aa, Artificial Sequence
  Description of Artificial Sequence: Synthetic peptide
LRLPPAE

SEQ ID NO: 5585 - protein, 7 aa, Artificial Sequence
  Description of Artificial Sequence: Synthetic peptide
LRLSDNR

SEQ ID NO: 5586 - protein, 7 aa, Artificial Sequence
  Description of Artificial Sequence: Synthetic peptide
LRLTGRP

SEQ ID NO: 5587 - protein, 7 aa, Artificial Sequence
  Description of Artificial Sequence: Synthetic peptide
LRLVREP

SEQ ID NO: 5588 - protein, 7 aa, Artificial Sequence
  Description of Artificial Sequence: Synthetic peptide
LRNAASV

SEQ ID NO: 5589 - protein, 7 aa, Artificial Sequence
  Description of Artificial Sequence: Synthetic peptide
LRNADGA

SEQ ID NO: 5590 - protein, 7 aa, Artificial Sequence
  Description of Artificial Sequence: Synthetic peptide
LRNLNSY

SEQ ID NO: 5591 - protein, 7 aa, Artificial Sequence
  Description of Artificial Sequence: Synthetic peptide
LRNNPLA

SEQ ID NO: 5592 - protein, 7 aa, Artificial Sequence
  Description of Artificial Sequence: Synthetic peptide
LRNRPSE

SEQ ID NO: 5593 - protein, 7 aa, Artificial Sequence
  Description of Artificial Sequence: Synthetic peptide
LRNSSVV

SEQ ID NO: 5594 - protein, 7 aa, Artificial Sequence
  Description of Artificial Sequence: Synthetic peptide
LRNTPMS

SEQ ID NO: 5595 - protein, 7 aa, Artificial Sequence
  Description of Artificial Sequence: Synthetic peptide
LRNTVLG

SEQ ID NO: 5596 - protein, 7 aa, Artificial Sequence
  Description of Artificial Sequence: Synthetic peptide
LRNVAEH

SEQ ID NO: 5597 - protein, 7 aa, Artificial Sequence
  Description of Artificial Sequence: Synthetic peptide
LRPNGYT

SEQ ID NO: 5598 - protein, 7 aa, Artificial Sequence
  Description of Artificial Sequence: Synthetic peptide
LRPPAFP

SEQ ID NO: 5599 - protein, 7 aa, Artificial Sequence
  Description of Artificial Sequence: Synthetic peptide
LRPPAGL

SEQ ID NO: 5600 - protein, 7 aa, Artificial Sequence
  Description of Artificial Sequence: Synthetic peptide
LRPPQNN

SEQ ID NO: 5601 - protein, 7 aa, Artificial Sequence
  Description of Artificial Sequence: Synthetic peptide
LRPRPSD

SEQ ID NO: 5602 - protein, 7 aa, Artificial Sequence
  Description of Artificial Sequence: Synthetic peptide
LRPSFSP

SEQ ID NO: 5603 - protein, 7 aa, Artificial Sequence
  Description of Artificial Sequence: Synthetic peptide
LRPSSIS

SEQ ID NO: 5604 - protein, 7 aa, Artificial Sequence
  Description of Artificial Sequence: Synthetic peptide
LRPSSQT

SEQ ID NO: 5605 - protein, 7 aa, Artificial Sequence
  Description of Artificial Sequence: Synthetic peptide
LRPSVRE

SEQ ID NO: 5606 - protein, 7 aa, Artificial Sequence
  Description of Artificial Sequence: Synthetic peptide
LRPTTMP

SEQ ID NO: 5607 - protein, 7 aa, Artificial Sequence
  Description of Artificial Sequence: Synthetic peptide
LRQGYSQ

SEQ ID NO: 5608 - protein, 7 aa, Artificial Sequence
  Description of Artificial Sequence: Synthetic peptide
LRQSTPP

SEQ ID NO: 5609 - protein, 7 aa, Artificial Sequence
  Description of Artificial Sequence: Synthetic peptide
LRRPEEL

SEQ ID NO: 5610 - protein, 7 aa, Artificial Sequence
  Description of Artificial Sequence: Synthetic peptide
LRSDTKY

SEQ ID NO: 5611 - protein, 7 aa, Artificial Sequence
  Description of Artificial Sequence: Synthetic peptide
LRSDVQF

SEQ ID NO: 5612 - protein, 7 aa, Artificial Sequence
  Description of Artificial Sequence: Synthetic peptide
LRSDWVE

SEQ ID NO: 5613 - protein, 7 aa, Artificial Sequence
  Description of Artificial Sequence: Synthetic peptide
LRSESCA

SEQ ID NO: 5614 - protein, 7 aa, Artificial Sequence
  Description of Artificial Sequence: Synthetic peptide
LRSGAIQ

SEQ ID NO: 5615 - protein, 7 aa, Artificial Sequence
  Description of Artificial Sequence: Synthetic peptide
LRSGTLA

SEQ ID NO: 5616 - protein, 7 aa, Artificial Sequence
  Description of Artificial Sequence: Synthetic peptide
LRSLTDA

SEQ ID NO: 5617 - protein, 7 aa, Artificial Sequence
  Description of Artificial Sequence: Synthetic peptide
LRSMQTP

SEQ ID NO: 5618 - protein, 7 aa, Artificial Sequence
  Description of Artificial Sequence: Synthetic peptide
LRSPHFD

SEQ ID NO: 5619 - protein, 7 aa, Artificial Sequence
  Description of Artificial Sequence: Synthetic peptide
LRSPLSP

SEQ ID NO: 5620 - protein, 7 aa, Artificial Sequence
  Description of Artificial Sequence: Synthetic peptide
LRSPPTA

SEQ ID NO: 5621 - protein, 7 aa, Artificial Sequence
  Description of Artificial Sequence: Synthetic peptide
LRSQERH

SEQ ID NO: 5622 - protein, 7 aa, Artificial Sequence
  Description of Artificial Sequence: Synthetic peptide
LRSQGPL

SEQ ID NO: 5623 - protein, 7 aa, Artificial Sequence
  Description of Artificial Sequence: Synthetic peptide
LRSSLDW

SEQ ID NO: 5624 - protein, 7 aa, Artificial Sequence
  Description of Artificial Sequence: Synthetic peptide
LRSSSPG

SEQ ID NO: 5625 - protein, 7 aa, Artificial Sequence
  Description of Artificial Sequence: Synthetic peptide
LRSSTTP

SEQ ID NO: 5626 - protein, 7 aa, Artificial Sequence
  Description of Artificial Sequence: Synthetic peptide
LRSTSAY

SEQ ID NO: 5627 - protein, 7 aa, Artificial Sequence
  Description of Artificial Sequence: Synthetic peptide
LRSVNDS

SEQ ID NO: 5628 - protein, 7 aa, Artificial Sequence
  Description of Artificial Sequence: Synthetic peptide
LRTADVA

SEQ ID NO: 5629 - protein, 7 aa, Artificial Sequence
  Description of Artificial Sequence: Synthetic peptide
LRTASPP

SEQ ID NO: 5630 - protein, 7 aa, Artificial Sequence
  Description of Artificial Sequence: Synthetic peptide
LRTASST

SEQ ID NO: 5631 - protein, 7 aa, Artificial Sequence
  Description of Artificial Sequence: Synthetic peptide
LRTDILS

SEQ ID NO: 5632 - protein, 7 aa, Artificial Sequence
  Description of Artificial Sequence: Synthetic peptide
LRTGYLD

SEQ ID NO: 5633 - protein, 7 aa, Artificial Sequence
  Description of Artificial Sequence: Synthetic peptide
LRTLNAA

SEQ ID NO: 5634 - protein, 7 aa, Artificial Sequence
  Description of Artificial Sequence: Synthetic peptide
LRTNDSQ

SEQ ID NO: 5635 - protein, 7 aa, Artificial Sequence
  Description of Artificial Sequence: Synthetic peptide
LRTPERL

SEQ ID NO: 5636 - protein, 7 aa, Artificial Sequence
  Description of Artificial Sequence: Synthetic peptide
LRTPNGP

SEQ ID NO: 5637 - protein, 7 aa, Artificial Sequence
  Description of Artificial Sequence: Synthetic peptide
LRTREAG

SEQ ID NO: 5638 - protein, 7 aa, Artificial Sequence
  Description of Artificial Sequence: Synthetic peptide
LRTSQDR

SEQ ID NO: 5639 - protein, 7 aa, Artificial Sequence
  Description of Artificial Sequence: Synthetic peptide
LRTTLPL

SEQ ID NO: 5640 - protein, 7 aa, Artificial Sequence
  Description of Artificial Sequence: Synthetic peptide
LRTVNSA

SEQ ID NO: 5641 - protein, 7 aa, Artificial Sequence
  Description of Artificial Sequence: Synthetic peptide
LRVDLLQ

SEQ ID NO: 5642 - protein, 7 aa, Artificial Sequence
  Description of Artificial Sequence: Synthetic peptide
LRVDSPV

SEQ ID NO: 5643 - protein, 7 aa, Artificial Sequence
  Description of Artificial Sequence: Synthetic peptide
LRVDVAT

SEQ ID NO: 5644 - protein, 7 aa, Artificial Sequence
  Description of Artificial Sequence: Synthetic peptide
LRVGGSY

SEQ ID NO: 5645 - protein, 7 aa, Artificial Sequence
  Description of Artificial Sequence: Synthetic peptide
LRVGTEQ

SEQ ID NO: 5646 - protein, 7 aa, Artificial Sequence
  Description of Artificial Sequence: Synthetic peptide
LRVLDAS

SEQ ID NO: 5647 - protein, 7 aa, Artificial Sequence
  Description of Artificial Sequence: Synthetic peptide
LRVNPMV

SEQ ID NO: 5648 - protein, 7 aa, Artificial Sequence
  Description of Artificial Sequence: Synthetic peptide
LRVNVEV

SEQ ID NO: 5649 - protein, 7 aa, Artificial Sequence
  Description of Artificial Sequence: Synthetic peptide
LRVPPMS

SEQ ID NO: 5650 - protein, 7 aa, Artificial Sequence
  Description of Artificial Sequence: Synthetic peptide
LRVPPNN

SEQ ID NO: 5651 - protein, 7 aa, Artificial Sequence
  Description of Artificial Sequence: Synthetic peptide
LRVTSHP

SEQ ID NO: 5652 - protein, 7 aa, Artificial Sequence
  Description of Artificial Sequence: Synthetic peptide
LSAAPSN

SEQ ID NO: 5653 - protein, 7 aa, Artificial Sequence
  Description of Artificial Sequence: Synthetic peptide
LSAATTK

SEQ ID NO: 5654 - protein, 7 aa, Artificial Sequence
  Description of Artificial Sequence: Synthetic peptide
LSAFVKE

SEQ ID NO: 5655 - protein, 7 aa, Artificial Sequence
  Description of Artificial Sequence: Synthetic peptide
LSAGARA

SEQ ID NO: 5656 - protein, 7 aa, Artificial Sequence
  Description of Artificial Sequence: Synthetic peptide
LSALNVK

SEQ ID NO: 5657 - protein, 7 aa, Artificial Sequence
  Description of Artificial Sequence: Synthetic peptide
LSAQRGA

SEQ ID NO: 5658 - protein, 7 aa, Artificial Sequence
  Description of Artificial Sequence: Synthetic peptide
LSARHMP

SEQ ID NO: 5659 - protein, 7 aa, Artificial Sequence
  Description of Artificial Sequence: Synthetic peptide
LSARPDL

SEQ ID NO: 5660 - protein, 7 aa, Artificial Sequence
  Description of Artificial Sequence: Synthetic peptide
LSARPHL

SEQ ID NO: 5661 - protein, 7 aa, Artificial Sequence
  Description of Artificial Sequence: Synthetic peptide
LSASANS

SEQ ID NO: 5662 - protein, 7 aa, Artificial Sequence
  Description of Artificial Sequence: Synthetic peptide
LSASHVV

SEQ ID NO: 5663 - protein, 7 aa, Artificial Sequence
  Description of Artificial Sequence: Synthetic peptide
LSASWTS

SEQ ID NO: 5664 - protein, 7 aa, Artificial Sequence
  Description of Artificial Sequence: Synthetic peptide
LSAYAQG

SEQ ID NO: 5665 - protein, 7 aa, Artificial Sequence
  Description of Artificial Sequence: Synthetic peptide
LSCGSME

SEQ ID NO: 5666 - protein, 7 aa, Artificial Sequence
  Description of Artificial Sequence: Synthetic peptide
LSDAHSW

SEQ ID NO: 5667 - protein, 7 aa, Artificial Sequence
  Description of Artificial Sequence: Synthetic peptide
LSDAVAE

SEQ ID NO: 5668 - protein, 7 aa, Artificial Sequence
  Description of Artificial Sequence: Synthetic peptide
LSDERTH

SEQ ID NO: 5669 - protein, 7 aa, Artificial Sequence
  Description of Artificial Sequence: Synthetic peptide
LSDFQNP

SEQ ID NO: 5670 - protein, 7 aa, Artificial Sequence
  Description of Artificial Sequence: Synthetic peptide
LSDHHGL

SEQ ID NO: 5671 - protein, 7 aa, Artificial Sequence
  Description of Artificial Sequence: Synthetic peptide
LSDKGHP

SEQ ID NO: 5672 - protein, 7 aa, Artificial Sequence
  Description of Artificial Sequence: Synthetic peptide
LSDLQGN

SEQ ID NO: 5673 - protein, 7 aa, Artificial Sequence
  Description of Artificial Sequence: Synthetic peptide
LSDLTSW

SEQ ID NO: 5674 - protein, 7 aa, Artificial Sequence
  Description of Artificial Sequence: Synthetic peptide
LSDPTEI

SEQ ID NO: 5675 - protein, 7 aa, Artificial Sequence
  Description of Artificial Sequence: Synthetic peptide
LSDRSVL

SEQ ID NO: 5676 - protein, 7 aa, Artificial Sequence
  Description of Artificial Sequence: Synthetic peptide
LSEAPVH

SEQ ID NO: 5677 - protein, 7 aa, Artificial Sequence
  Description of Artificial Sequence: Synthetic peptide
LSEFSRA

SEQ ID NO: 5678 - protein, 7 aa, Artificial Sequence
  Description of Artificial Sequence: Synthetic peptide
LSEGCIL

SEQ ID NO: 5679 - protein, 7 aa, Artificial Sequence
  Description of Artificial Sequence: Synthetic peptide
LSEGLQK

SEQ ID NO: 5680 - protein, 7 aa, Artificial Sequence
  Description of Artificial Sequence: Synthetic peptide
LSEPMPF

SEQ ID NO: 5681 - protein, 7 aa, Artificial Sequence
  Description of Artificial Sequence: Synthetic peptide
LSEQTRY

SEQ ID NO: 5682 - protein, 7 aa, Artificial Sequence
  Description of Artificial Sequence: Synthetic peptide
LSERGDM

SEQ ID NO: 5683 - protein, 7 aa, Artificial Sequence
  Description of Artificial Sequence: Synthetic peptide
LSERPVL

SEQ ID NO: 5684 - protein, 7 aa, Artificial Sequence
  Description of Artificial Sequence: Synthetic peptide
LSESNQV

SEQ ID NO: 5685 - protein, 7 aa, Artificial Sequence
  Description of Artificial Sequence: Synthetic peptide
LSESYVV

SEQ ID NO: 5686 - protein, 7 aa, Artificial Sequence
  Description of Artificial Sequence: Synthetic peptide
LSFGTTT

SEQ ID NO: 5687 - protein, 7 aa, Artificial Sequence
  Description of Artificial Sequence: Synthetic peptide
LSFKTQL

SEQ ID NO: 5688 - protein, 7 aa, Artificial Sequence
  Description of Artificial Sequence: Synthetic peptide
LSFSAES

SEQ ID NO: 5689 - protein, 7 aa, Artificial Sequence
  Description of Artificial Sequence: Synthetic peptide
LSFSTSG

SEQ ID NO: 5690 - protein, 7 aa, Artificial Sequence
  Description of Artificial Sequence: Synthetic peptide
LSGAAGL

SEQ ID NO: 5691 - protein, 7 aa, Artificial Sequence
  Description of Artificial Sequence: Synthetic peptide
LSGAIPP

SEQ ID NO: 5692 - protein, 7 aa, Artificial Sequence
  Description of Artificial Sequence: Synthetic peptide
LSGANSG

SEQ ID NO: 5693 - protein, 7 aa, Artificial Sequence
  Description of Artificial Sequence: Synthetic peptide
LSGEQAL

SEQ ID NO: 5694 - protein, 7 aa, Artificial Sequence
  Description of Artificial Sequence: Synthetic peptide
LSGGEPP

SEQ ID NO: 5695 - protein, 7 aa, Artificial Sequence
  Description of Artificial Sequence: Synthetic peptide
LSGGQIS

SEQ ID NO: 5696 - protein, 7 aa, Artificial Sequence
  Description of Artificial Sequence: Synthetic peptide
LSGHHIV

SEQ ID NO: 5697 - protein, 7 aa, Artificial Sequence
  Description of Artificial Sequence: Synthetic peptide
LSGIAGI

SEQ ID NO: 5698 - protein, 7 aa, Artificial Sequence
  Description of Artificial Sequence: Synthetic peptide
LSGPSSL

SEQ ID NO: 5699 - protein, 7 aa, Artificial Sequence
  Description of Artificial Sequence: Synthetic peptide
LSGTPGI

SEQ ID NO: 5700 - protein, 7 aa, Artificial Sequence
  Description of Artificial Sequence: Synthetic peptide
LSGVAIQ

SEQ ID NO: 5701 - protein, 7 aa, Artificial Sequence
  Description of Artificial Sequence: Synthetic peptide
LSHDVLT

SEQ ID NO: 5702 - protein, 7 aa, Artificial Sequence
  Description of Artificial Sequence: Synthetic peptide
LSHGMLG

SEQ ID NO: 5703 - protein, 7 aa, Artificial Sequence
  Description of Artificial Sequence: Synthetic peptide
LSHKLTE

SEQ ID NO: 5704 - protein, 7 aa, Artificial Sequence
  Description of Artificial Sequence: Synthetic peptide
LSHLGFP

SEQ ID NO: 5705 - protein, 7 aa, Artificial Sequence
  Description of Artificial Sequence: Synthetic peptide
LSHPMGY

SEQ ID NO: 5706 - protein, 7 aa, Artificial Sequence
  Description of Artificial Sequence: Synthetic peptide
LSHSIPR

SEQ ID NO: 5707 - protein, 7 aa, Artificial Sequence
  Description of Artificial Sequence: Synthetic peptide
LSHTTNG

SEQ ID NO: 5708 - protein, 7 aa, Artificial Sequence
  Description of Artificial Sequence: Synthetic peptide
LSHVTTA

SEQ ID NO: 5709 - protein, 7 aa, Artificial Sequence
  Description of Artificial Sequence: Synthetic peptide
LSILSGI

SEQ ID NO: 5710 - protein, 7 aa, Artificial Sequence
  Description of Artificial Sequence: Synthetic peptide
LSIPSGP

SEQ ID NO: 5711 - protein, 7 aa, Artificial Sequence
  Description of Artificial Sequence: Synthetic peptide
LSKEPFM

SEQ ID NO: 5712 - protein, 7 aa, Artificial Sequence
  Description of Artificial Sequence: Synthetic peptide
LSKGFMG

SEQ ID NO: 5713 - protein, 7 aa, Artificial Sequence
  Description of Artificial Sequence: Synthetic peptide
LSKGNAA

SEQ ID NO: 5714 - protein, 7 aa, Artificial Sequence
  Description of Artificial Sequence: Synthetic peptide
LSKTLEE

SEQ ID NO: 5715 - protein, 7 aa, Artificial Sequence
  Description of Artificial Sequence: Synthetic peptide
LSLGASA

SEQ ID NO: 5716 - protein, 7 aa, Artificial Sequence
  Description of Artificial Sequence: Synthetic peptide
LSLGPHS

SEQ ID NO: 5717 - protein, 7 aa, Artificial Sequence
  Description of Artificial Sequence: Synthetic peptide
LSLGVDS

SEQ ID NO: 5718 - protein, 7 aa, Artificial Sequence
  Description of Artificial Sequence: Synthetic peptide
LSLHPAP

SEQ ID NO: 5719 - protein, 7 aa, Artificial Sequence
  Description of Artificial Sequence: Synthetic peptide
LSLKHLK

SEQ ID NO: 5720 - protein, 7 aa, Artificial Sequence
  Description of Artificial Sequence: Synthetic peptide
LSLPQSM

SEQ ID NO: 5721 - protein, 7 aa, Artificial Sequence
  Description of Artificial Sequence: Synthetic peptide
LSLPRSD

SEQ ID NO: 5722 - protein, 7 aa, Artificial Sequence
  Description of Artificial Sequence: Synthetic peptide
LSLPYNR

SEQ ID NO: 5723 - protein, 7 aa, Artificial Sequence
  Description of Artificial Sequence: Synthetic peptide
LSLQTVP

SEQ ID NO: 5724 - protein, 7 aa, Artificial Sequence
  Description of Artificial Sequence: Synthetic peptide
LSLSKGS

SEQ ID NO: 5725 - protein, 7 aa, Artificial Sequence
  Description of Artificial Sequence: Synthetic peptide
LSLSPVV

SEQ ID NO: 5726 - protein, 7 aa, Artificial Sequence
  Description of Artificial Sequence: Synthetic peptide
LSLVKHD

SEQ ID NO: 5727 - protein, 7 aa, Artificial Sequence
  Description of Artificial Sequence: Synthetic peptide
LSMARTP

SEQ ID NO: 5728 - protein, 7 aa, Artificial Sequence
  Description of Artificial Sequence: Synthetic peptide
LSMNPNG

SEQ ID NO: 5729 - protein, 7 aa, Artificial Sequence
  Description of Artificial Sequence: Synthetic peptide
LSMNVQY

SEQ ID NO: 5730 - protein, 7 aa, Artificial Sequence
  Description of Artificial Sequence: Synthetic peptide
LSMQRTV

SEQ ID NO: 5731 - protein, 7 aa, Artificial Sequence
  Description of Artificial Sequence: Synthetic peptide
LSMRSET

SEQ ID NO: 5732 - protein, 7 aa, Artificial Sequence
  Description of Artificial Sequence: Synthetic peptide
LSMSKTP

SEQ ID NO: 5733 - protein, 7 aa, Artificial Sequence
  Description of Artificial Sequence: Synthetic peptide
LSNEGSY

SEQ ID NO: 5734 - protein, 7 aa, Artificial Sequence
  Description of Artificial Sequence: Synthetic peptide
LSNGRYS

SEQ ID NO: 5735 - protein, 7 aa, Artificial Sequence
  Description of Artificial Sequence: Synthetic peptide
LSNHPFS

SEQ ID NO: 5736 - protein, 7 aa, Artificial Sequence
  Description of Artificial Sequence: Synthetic peptide
LSNHVIT

SEQ ID NO: 5737 - protein, 7 aa, Artificial Sequence
  Description of Artificial Sequence: Synthetic peptide
LSNMQQK

SEQ ID NO: 5738 - protein, 7 aa, Artificial Sequence
  Description of Artificial Sequence: Synthetic peptide
LSNPAKT

SEQ ID NO: 5739 - protein, 7 aa, Artificial Sequence
  Description of Artificial Sequence: Synthetic peptide
LSNPTRS

SEQ ID NO: 5740 - protein, 7 aa, Artificial Sequence
  Description of Artificial Sequence: Synthetic peptide
LSNRKGE

SEQ ID NO: 5741 - protein, 7 aa, Artificial Sequence
  Description of Artificial Sequence: Synthetic peptide
LSNRQIT

SEQ ID NO: 5742 - protein, 7 aa, Artificial Sequence
  Description of Artificial Sequence: Synthetic peptide
LSNSAIL

SEQ ID NO: 5743 - protein, 7 aa, Artificial Sequence
  Description of Artificial Sequence: Synthetic peptide
LSNSKGP

SEQ ID NO: 5744 - protein, 7 aa, Artificial Sequence
  Description of Artificial Sequence: Synthetic peptide
LSNSRHD

SEQ ID NO: 5745 - protein, 7 aa, Artificial Sequence
  Description of Artificial Sequence: Synthetic peptide
LSNSSRM

SEQ ID NO: 5746 - protein, 7 aa, Artificial Sequence
  Description of Artificial Sequence: Synthetic peptide
LSPAVTR

SEQ ID NO: 5747 - protein, 7 aa, Artificial Sequence
  Description of Artificial Sequence: Synthetic peptide
LSPCPSN

SEQ ID NO: 5748 - protein, 7 aa, Artificial Sequence
  Description of Artificial Sequence: Synthetic peptide
LSPFSVV

SEQ ID NO: 5749 - protein, 7 aa, Artificial Sequence
  Description of Artificial Sequence: Synthetic peptide
LSPGIAQ

SEQ ID NO: 5750 - protein, 7 aa, Artificial Sequence
  Description of Artificial Sequence: Synthetic peptide
LSPHRTS

SEQ ID NO: 5751 - protein, 7 aa, Artificial Sequence
  Description of Artificial Sequence: Synthetic peptide
LSPKFVL

SEQ ID NO: 5752 - protein, 7 aa, Artificial Sequence
  Description of Artificial Sequence: Synthetic peptide
LSPNGPN

SEQ ID NO: 5753 - protein, 7 aa, Artificial Sequence
  Description of Artificial Sequence: Synthetic peptide
LSPPDRL

SEQ ID NO: 5754 - protein, 7 aa, Artificial Sequence
  Description of Artificial Sequence: Synthetic peptide
LSPPPVD

SEQ ID NO: 5755 - protein, 7 aa, Artificial Sequence
  Description of Artificial Sequence: Synthetic peptide
LSPPTPH

SEQ ID NO: 5756 - protein, 7 aa, Artificial Sequence
  Description of Artificial Sequence: Synthetic peptide
LSPRTVH

SEQ ID NO: 5757 - protein, 7 aa, Artificial Sequence
  Description of Artificial Sequence: Synthetic peptide
LSPSFTS

SEQ ID NO: 5758 - protein, 7 aa, Artificial Sequence
  Description of Artificial Sequence: Synthetic peptide
LSPSSLF

SEQ ID NO: 5759 - protein, 7 aa, Artificial Sequence
  Description of Artificial Sequence: Synthetic peptide
LSPSSLG

SEQ ID NO: 5760 - protein, 7 aa, Artificial Sequence
  Description of Artificial Sequence: Synthetic peptide
LSPSSRG

SEQ ID NO: 5761 - protein, 7 aa, Artificial Sequence
  Description of Artificial Sequence: Synthetic peptide
LSPSTDF

SEQ ID NO: 5762 - protein, 7 aa, Artificial Sequence
  Description of Artificial Sequence: Synthetic peptide
LSPSVTK

SEQ ID NO: 5763 - protein, 7 aa, Artificial Sequence
  Description of Artificial Sequence: Synthetic peptide
LSPTRTQ

SEQ ID NO: 5764 - protein, 7 aa, Artificial Sequence
  Description of Artificial Sequence: Synthetic peptide
LSPTVAY

SEQ ID NO: 5765 - protein, 7 aa, Artificial Sequence
  Description of Artificial Sequence: Synthetic peptide
LSPVPVA

SEQ ID NO: 5766 - protein, 7 aa, Artificial Sequence
  Description of Artificial Sequence: Synthetic peptide
LSPVQAA

SEQ ID NO: 5767 - protein, 7 aa, Artificial Sequence
  Description of Artificial Sequence: Synthetic peptide
LSQAIQS

SEQ ID NO: 5768 - protein, 7 aa, Artificial Sequence
  Description of Artificial Sequence: Synthetic peptide
LSQAKNV

SEQ ID NO: 5769 - protein, 7 aa, Artificial Sequence
  Description of Artificial Sequence: Synthetic peptide
LSQALLD

SEQ ID NO: 5770 - protein, 7 aa, Artificial Sequence
  Description of Artificial Sequence: Synthetic peptide
LSQANER

SEQ ID NO: 5771 - protein, 7 aa, Artificial Sequence
  Description of Artificial Sequence: Synthetic peptide
LSQDLTV

SEQ ID NO: 5772 - protein, 7 aa, Artificial Sequence
  Description of Artificial Sequence: Synthetic peptide
LSQGSAP

SEQ ID NO: 5773 - protein, 7 aa, Artificial Sequence
  Description of Artificial Sequence: Synthetic peptide
LSQHAST

SEQ ID NO: 5774 - protein, 7 aa, Artificial Sequence
  Description of Artificial Sequence: Synthetic peptide
LSQHMRP

SEQ ID NO: 5775 - protein, 7 aa, Artificial Sequence
  Description of Artificial Sequence: Synthetic peptide
LSQKTGI

SEQ ID NO: 5776 - protein, 7 aa, Artificial Sequence
  Description of Artificial Sequence: Synthetic peptide
LSQLIQG

SEQ ID NO: 5777 - protein, 7 aa, Artificial Sequence
  Description of Artificial Sequence: Synthetic peptide
LSQLTPS

SEQ ID NO: 5778 - protein, 7 aa, Artificial Sequence
  Description of Artificial Sequence: Synthetic peptide
LSQLTSQ

SEQ ID NO: 5779 - protein, 7 aa, Artificial Sequence
  Description of Artificial Sequence: Synthetic peptide
LSQLVSS

SEQ ID NO: 5780 - protein, 7 aa, Artificial Sequence
  Description of Artificial Sequence: Synthetic peptide
LSQPLNM

SEQ ID NO: 5781 - protein, 7 aa, Artificial Sequence
  Description of Artificial Sequence: Synthetic peptide
LSQSFAS

SEQ ID NO: 5782 - protein, 7 aa, Artificial Sequence
  Description of Artificial Sequence: Synthetic peptide
LSQTARA

SEQ ID NO: 5783 - protein, 7 aa, Artificial Sequence
  Description of Artificial Sequence: Synthetic peptide
LSQVHKF

SEQ ID NO: 5784 - protein, 7 aa, Artificial Sequence
  Description of Artificial Sequence: Synthetic peptide
LSQVQAG

SEQ ID NO: 5785 - protein, 7 aa, Artificial Sequence
  Description of Artificial Sequence: Synthetic peptide
LSRDLEL

SEQ ID NO: 5786 - protein, 7 aa, Artificial Sequence
  Description of Artificial Sequence: Synthetic peptide
LSRGPTP

SEQ ID NO: 5787 - protein, 7 aa, Artificial Sequence
  Description of Artificial Sequence: Synthetic peptide
LSRGQVP

SEQ ID NO: 5788 - protein, 7 aa, Artificial Sequence
  Description of Artificial Sequence: Synthetic peptide
LSRLGPS

SEQ ID NO: 5789 - protein, 7 aa, Artificial Sequence
  Description of Artificial Sequence: Synthetic peptide
LSRLPSS

SEQ ID NO: 5790 - protein, 7 aa, Artificial Sequence
  Description of Artificial Sequence: Synthetic peptide
LSRLSTD

SEQ ID NO: 5791 - protein, 7 aa, Artificial Sequence
  Description of Artificial Sequence: Synthetic peptide
LSRNVTE

SEQ ID NO: 5792 - protein, 7 aa, Artificial Sequence
  Description of Artificial Sequence: Synthetic peptide
LSRQTGY

SEQ ID NO: 5793 - protein, 7 aa, Artificial Sequence
  Description of Artificial Sequence: Synthetic peptide
LSRSSAA

SEQ ID NO: 5794 - protein, 7 aa, Artificial Sequence
  Description of Artificial Sequence: Synthetic peptide
LSRSVST

SEQ ID NO: 5795 - protein, 7 aa, Artificial Sequence
  Description of Artificial Sequence: Synthetic peptide
LSRTTAD

SEQ ID NO: 5796 - protein, 7 aa, Artificial Sequence
  Description of Artificial Sequence: Synthetic peptide
LSRVAVL

SEQ ID NO: 5797 - protein, 7 aa, Artificial Sequence
  Description of Artificial Sequence: Synthetic peptide
LSSANST

SEQ ID NO: 5798 - protein, 7 aa, Artificial Sequence
  Description of Artificial Sequence: Synthetic peptide
LSSAQRA

SEQ ID NO: 5799 - protein, 7 aa, Artificial Sequence
  Description of Artificial Sequence: Synthetic peptide
LSSDSPV

SEQ ID NO: 5800 - protein, 7 aa, Artificial Sequence
  Description of Artificial Sequence: Synthetic peptide
LSSECAP

SEQ ID NO: 5801 - protein, 7 aa, Artificial Sequence
  Description of Artificial Sequence: Synthetic peptide
LSSGMSR

SEQ ID NO: 5802 - protein, 7 aa, Artificial Sequence
  Description of Artificial Sequence: Synthetic peptide
LSSGRPP

SEQ ID NO: 5803 - protein, 7 aa, Artificial Sequence
  Description of Artificial Sequence: Synthetic peptide
LSSHSTS

SEQ ID NO: 5804 - protein, 7 aa, Artificial Sequence
  Description of Artificial Sequence: Synthetic peptide
LSSIQTY

SEQ ID NO: 5805 - protein, 7 aa, Artificial Sequence
  Description of Artificial Sequence: Synthetic peptide
LSSISHN

SEQ ID NO: 5806 - protein, 7 aa, Artificial Sequence
  Description of Artificial Sequence: Synthetic peptide
LSSKPYA

SEQ ID NO: 5807 - protein, 7 aa, Artificial Sequence
  Description of Artificial Sequence: Synthetic peptide
LSSLAMV

SEQ ID NO: 5808 - protein, 7 aa, Artificial Sequence
  Description of Artificial Sequence: Synthetic peptide
LSSLKGN

SEQ ID NO: 5809 - protein, 7 aa, Artificial Sequence
  Description of Artificial Sequence: Synthetic peptide
LSSLKLA

SEQ ID NO: 5810 - protein, 7 aa, Artificial Sequence
  Description of Artificial Sequence: Synthetic peptide
LSSLMHS

SEQ ID NO: 5811 - protein, 7 aa, Artificial Sequence
  Description of Artificial Sequence: Synthetic peptide
LSSLNPS

SEQ ID NO: 5812 - protein, 7 aa, Artificial Sequence
  Description of Artificial Sequence: Synthetic peptide
LSSLPKI

SEQ ID NO: 5813 - protein, 7 aa, Artificial Sequence
  Description of Artificial Sequence: Synthetic peptide
LSSMRST

SEQ ID NO: 5814 - protein, 7 aa, Artificial Sequence
  Description of Artificial Sequence: Synthetic peptide
LSSMTND

SEQ ID NO: 5815 - protein, 7 aa, Artificial Sequence
  Description of Artificial Sequence: Synthetic peptide
LSSNSLD

SEQ ID NO: 5816 - protein, 7 aa, Artificial Sequence
  Description of Artificial Sequence: Synthetic peptide
LSSPAGS

SEQ ID NO: 5817 - protein, 7 aa, Artificial Sequence
  Description of Artificial Sequence: Synthetic peptide
LSSPGSM

SEQ ID NO: 5818 - protein, 7 aa, Artificial Sequence
  Description of Artificial Sequence: Synthetic peptide
LSSPMDS

SEQ ID NO: 5819 - protein, 7 aa, Artificial Sequence
  Description of Artificial Sequence: Synthetic peptide
LSSQCIN

SEQ ID NO: 5820 - protein, 7 aa, Artificial Sequence
  Description of Artificial Sequence: Synthetic peptide
LSSQHTS

SEQ ID NO: 5821 - protein, 7 aa, Artificial Sequence
  Description of Artificial Sequence: Synthetic peptide
LSSQPKF

SEQ ID NO: 5822 - protein, 7 aa, Artificial Sequence
  Description of Artificial Sequence: Synthetic peptide
LSSRSTT

SEQ ID NO: 5823 - protein, 7 aa, Artificial Sequence
  Description of Artificial Sequence: Synthetic peptide
LSSSCER

SEQ ID NO: 5824 - protein, 7 aa, Artificial Sequence
  Description of Artificial Sequence: Synthetic peptide
LSSSLEY

SEQ ID NO: 5825 - protein, 7 aa, Artificial Sequence
  Description of Artificial Sequence: Synthetic peptide
LSSSRPS

SEQ ID NO: 5826 - protein, 7 aa, Artificial Sequence
  Description of Artificial Sequence: Synthetic peptide
LSSSVVF

SEQ ID NO: 5827 - protein, 7 aa, Artificial Sequence
  Description of Artificial Sequence: Synthetic peptide
LSSTSKA

SEQ ID NO: 5828 - protein, 7 aa, Artificial Sequence
  Description of Artificial Sequence: Synthetic peptide
LSSVATP

SEQ ID NO: 5829 - protein, 7 aa, Artificial Sequence
  Description of Artificial Sequence: Synthetic peptide
LSSVFRT

SEQ ID NO: 5830 - protein, 7 aa, Artificial Sequence
  Description of Artificial Sequence: Synthetic peptide
LSSVHAV

SEQ ID NO: 5831 - protein, 7 aa, Artificial Sequence
  Description of Artificial Sequence: Synthetic peptide
LSSVRLS

SEQ ID NO: 5832 - protein, 7 aa, Artificial Sequence
  Description of Artificial Sequence: Synthetic peptide
LSTAVTR

SEQ ID NO: 5833 - protein, 7 aa, Artificial Sequence
  Description of Artificial Sequence: Synthetic peptide
LSTEDLL

SEQ ID NO: 5834 - protein, 7 aa, Artificial Sequence
  Description of Artificial Sequence: Synthetic peptide
LSTFPVA

SEQ ID NO: 5835 - protein, 7 aa, Artificial Sequence
  Description of Artificial Sequence: Synthetic peptide
LSTFQGG

SEQ ID NO: 5836 - protein, 7 aa, Artificial Sequence
  Description of Artificial Sequence: Synthetic peptide
LSTGSRQ

SEQ ID NO: 5837 - protein, 7 aa, Artificial Sequence
  Description of Artificial Sequence: Synthetic peptide
LSTGTMD

SEQ ID NO: 5838 - protein, 7 aa, Artificial Sequence
  Description of Artificial Sequence: Synthetic peptide
LSTIHPS

SEQ ID NO: 5839 - protein, 7 aa, Artificial Sequence
  Description of Artificial Sequence: Synthetic peptide
LSTKGTM

SEQ ID NO: 5840 - protein, 7 aa, Artificial Sequence
  Description of Artificial Sequence: Synthetic peptide
LSTLENE

SEQ ID NO: 5841 - protein, 7 aa, Artificial Sequence
  Description of Artificial Sequence: Synthetic peptide
LSTLLTA

SEQ ID NO: 5842 - protein, 7 aa, Artificial Sequence
  Description of Artificial Sequence: Synthetic peptide
LSTLPKD

SEQ ID NO: 5843 - protein, 7 aa, Artificial Sequence
  Description of Artificial Sequence: Synthetic peptide
LSTMSSL

SEQ ID NO: 5844 - protein, 7 aa, Artificial Sequence
  Description of Artificial Sequence: Synthetic peptide
LSTMTAY

SEQ ID NO: 5845 - protein, 7 aa, Artificial Sequence
  Description of Artificial Sequence: Synthetic peptide
LSTNMPP

SEQ ID NO: 5846 - protein, 7 aa, Artificial Sequence
  Description of Artificial Sequence: Synthetic peptide
LSTPHLT

SEQ ID NO: 5847 - protein, 7 aa, Artificial Sequence
  Description of Artificial Sequence: Synthetic peptide
LSTPHMA

SEQ ID NO: 5848 - protein, 7 aa, Artificial Sequence
  Description of Artificial Sequence: Synthetic peptide
LSTPSQP

SEQ ID NO: 5849 - protein, 7 aa, Artificial Sequence
  Description of Artificial Sequence: Synthetic peptide
LSTRSLP

SEQ ID NO: 5850 - protein, 7 aa, Artificial Sequence
  Description of Artificial Sequence: Synthetic peptide
LSTRSPL

SEQ ID NO: 5851 - protein, 7 aa, Artificial Sequence
  Description of Artificial Sequence: Synthetic peptide
LSTSHSV

SEQ ID NO: 5852 - protein, 7 aa, Artificial Sequence
  Description of Artificial Sequence: Synthetic peptide
LSTVRMV

SEQ ID NO: 5853 - protein, 7 aa, Artificial Sequence
  Description of Artificial Sequence: Synthetic peptide
LSVDEMV

SEQ ID NO: 5854 - protein, 7 aa, Artificial Sequence
  Description of Artificial Sequence: Synthetic peptide
LSVGRTE

SEQ ID NO: 5855 - protein, 7 aa, Artificial Sequence
  Description of Artificial Sequence: Synthetic peptide
LSVHGLK

SEQ ID NO: 5856 - protein, 7 aa, Artificial Sequence
  Description of Artificial Sequence: Synthetic peptide
LSVNSSL

SEQ ID NO: 5857 - protein, 7 aa, Artificial Sequence
  Description of Artificial Sequence: Synthetic peptide
LSVPMPD

SEQ ID NO: 5858 - protein, 7 aa, Artificial Sequence
  Description of Artificial Sequence: Synthetic peptide
LSVPRAP

SEQ ID NO: 5859 - protein, 7 aa, Artificial Sequence
  Description of Artificial Sequence: Synthetic peptide
LSVRGHI

SEQ ID NO: 5860 - protein, 7 aa, Artificial Sequence
  Description of Artificial Sequence: Synthetic peptide
LSVRSIG

SEQ ID NO: 5861 - protein, 7 aa, Artificial Sequence
  Description of Artificial Sequence: Synthetic peptide
LSVSLTA

SEQ ID NO: 5862 - protein, 7 aa, Artificial Sequence
  Description of Artificial Sequence: Synthetic peptide
LSVSPLS

SEQ ID NO: 5863 - protein, 7 aa, Artificial Sequence
  Description of Artificial Sequence: Synthetic peptide
LSVYTAD

SEQ ID NO: 5864 - protein, 7 aa, Artificial Sequence
  Description of Artificial Sequence: Synthetic peptide
LSYGRPV

SEQ ID NO: 5865 - protein, 7 aa, Artificial Sequence
  Description of Artificial Sequence: Synthetic peptide
LSYPRND

SEQ ID NO: 5866 - protein, 7 aa, Artificial Sequence
  Description of Artificial Sequence: Synthetic peptide
LTAPRQA

SEQ ID NO: 5867 - protein, 7 aa, Artificial Sequence
  Description of Artificial Sequence: Synthetic peptide
LTAPTSQ

SEQ ID NO: 5868 - protein, 7 aa, Artificial Sequence
  Description of Artificial Sequence: Synthetic peptide
LTASIGN

SEQ ID NO: 5869 - protein, 7 aa, Artificial Sequence
  Description of Artificial Sequence: Synthetic peptide
LTASIKA

SEQ ID NO: 5870 - protein, 7 aa, Artificial Sequence
  Description of Artificial Sequence: Synthetic peptide
LTAVPLS

SEQ ID NO: 5871 - protein, 7 aa, Artificial Sequence
  Description of Artificial Sequence: Synthetic peptide
LTDENVC

SEQ ID NO: 5872 - protein, 7 aa, Artificial Sequence
  Description of Artificial Sequence: Synthetic peptide
LTDITNR

SEQ ID NO: 5873 - protein, 7 aa, Artificial Sequence
  Description of Artificial Sequence: Synthetic peptide
LTDLDQM

SEQ ID NO: 5874 - protein, 7 aa, Artificial Sequence
  Description of Artificial Sequence: Synthetic peptide
LTDLRLV

SEQ ID NO: 5875 - protein, 7 aa, Artificial Sequence
  Description of Artificial Sequence: Synthetic peptide
LTDLSAS

SEQ ID NO: 5876 - protein, 7 aa, Artificial Sequence
  Description of Artificial Sequence: Synthetic peptide
LTDSLRT

SEQ ID NO: 5877 - protein, 7 aa, Artificial Sequence
  Description of Artificial Sequence: Synthetic peptide
LTDTRVT

SEQ ID NO: 5878 - protein, 7 aa, Artificial Sequence
  Description of Artificial Sequence: Synthetic peptide
LTEMRPG

SEQ ID NO: 5879 - protein, 7 aa, Artificial Sequence
  Description of Artificial Sequence: Synthetic peptide
LTETRAG

SEQ ID NO: 5880 - protein, 7 aa, Artificial Sequence
  Description of Artificial Sequence: Synthetic peptide
LTEVRTY

SEQ ID NO: 5881 - protein, 7 aa, Artificial Sequence
  Description of Artificial Sequence: Synthetic peptide
LTEWSKE

SEQ ID NO: 5882 - protein, 7 aa, Artificial Sequence
  Description of Artificial Sequence: Synthetic peptide
LTFGATS

SEQ ID NO: 5883 - protein, 7 aa, Artificial Sequence
  Description of Artificial Sequence: Synthetic peptide
LTFSAGL

SEQ ID NO: 5884 - protein, 7 aa, Artificial Sequence
  Description of Artificial Sequence: Synthetic peptide
LTGAFKS

SEQ ID NO: 5885 - protein, 7 aa, Artificial Sequence
  Description of Artificial Sequence: Synthetic peptide
LTGEFRD

SEQ ID NO: 5886 - protein, 7 aa, Artificial Sequence
  Description of Artificial Sequence: Synthetic peptide
LTGFSNQ

SEQ ID NO: 5887 - protein, 7 aa, Artificial Sequence
  Description of Artificial Sequence: Synthetic peptide
LTGGLYG

SEQ ID NO: 5888 - protein, 7 aa, Artificial Sequence
  Description of Artificial Sequence: Synthetic peptide
LTGGQVA

SEQ ID NO: 5889 - protein, 7 aa, Artificial Sequence
  Description of Artificial Sequence: Synthetic peptide
LTGMIKY

SEQ ID NO: 5890 - protein, 7 aa, Artificial Sequence
  Description of Artificial Sequence: Synthetic peptide
LTGNRPA

SEQ ID NO: 5891 - protein, 7 aa, Artificial Sequence
  Description of Artificial Sequence: Synthetic peptide
LTGPCTS

SEQ ID NO: 5892 - protein, 7 aa, Artificial Sequence
  Description of Artificial Sequence: Synthetic peptide
LTGQIRV

SEQ ID NO: 5893 - protein, 7 aa, Artificial Sequence
  Description of Artificial Sequence: Synthetic peptide
LTGRGGS

SEQ ID NO: 5894 - protein, 7 aa, Artificial Sequence
  Description of Artificial Sequence: Synthetic peptide
LTGSSHV

SEQ ID NO: 5895 - protein, 7 aa, Artificial Sequence
  Description of Artificial Sequence: Synthetic peptide
LTGTLRM

SEQ ID NO: 5896 - protein, 7 aa, Artificial Sequence
  Description of Artificial Sequence: Synthetic peptide
LTHAVPT

SEQ ID NO: 5897 - protein, 7 aa, Artificial Sequence
  Description of Artificial Sequence: Synthetic peptide
LTHKLDA

SEQ ID NO: 5898 - protein, 7 aa, Artificial Sequence
  Description of Artificial Sequence: Synthetic peptide
LTHPAVH

SEQ ID NO: 5899 - protein, 7 aa, Artificial Sequence
  Description of Artificial Sequence: Synthetic peptide
LTHVPTA

SEQ ID NO: 5900 - protein, 7 aa, Artificial Sequence
  Description of Artificial Sequence: Synthetic peptide
LTIGHVP

SEQ ID NO: 5901 - protein, 7 aa, Artificial Sequence
  Description of Artificial Sequence: Synthetic peptide
LTIPSAQ

SEQ ID NO: 5902 - protein, 7 aa, Artificial Sequence
  Description of Artificial Sequence: Synthetic peptide
LTKGSVQ

SEQ ID NO: 5903 - protein, 7 aa, Artificial Sequence
  Description of Artificial Sequence: Synthetic peptide
LTKSSHA

SEQ ID NO: 5904 - protein, 7 aa, Artificial Sequence
  Description of Artificial Sequence: Synthetic peptide
LTKTVGS

SEQ ID NO: 5905 - protein, 7 aa, Artificial Sequence
  Description of Artificial Sequence: Synthetic peptide
LTLAIGA

SEQ ID NO: 5906 - protein, 7 aa, Artificial Sequence
  Description of Artificial Sequence: Synthetic peptide
LTLGPRS

SEQ ID NO: 5907 - protein, 7 aa, Artificial Sequence
  Description of Artificial Sequence: Synthetic peptide
LTLQKGT

SEQ ID NO: 5908 - protein, 7 aa, Artificial Sequence
  Description of Artificial Sequence: Synthetic peptide
LTLQPIA

SEQ ID NO: 5909 - protein, 7 aa, Artificial Sequence
  Description of Artificial Sequence: Synthetic peptide
LTLTGSS

SEQ ID NO: 5910 - protein, 7 aa, Artificial Sequence
  Description of Artificial Sequence: Synthetic peptide
LTLTSAH

SEQ ID NO: 5911 - protein, 7 aa, Artificial Sequence
  Description of Artificial Sequence: Synthetic peptide
LTLVHAE

SEQ ID NO: 5912 - protein, 7 aa, Artificial Sequence
  Description of Artificial Sequence: Synthetic peptide
LTMGSAS

SEQ ID NO: 5913 - protein, 7 aa, Artificial Sequence
  Description of Artificial Sequence: Synthetic peptide
LTMIQRD

SEQ ID NO: 5914 - protein, 7 aa, Artificial Sequence
  Description of Artificial Sequence: Synthetic peptide
LTMRPPS

SEQ ID NO: 5915 - protein, 7 aa, Artificial Sequence
  Description of Artificial Sequence: Synthetic peptide
LTMSRAL

SEQ ID NO: 5916 - protein, 7 aa, Artificial Sequence
  Description of Artificial Sequence: Synthetic peptide
LTNAHHL

SEQ ID NO: 5917 - protein, 7 aa, Artificial Sequence
  Description of Artificial Sequence: Synthetic peptide
LTNARPA

SEQ ID NO: 5918 - protein, 7 aa, Artificial Sequence
  Description of Artificial Sequence: Synthetic peptide
LTNEAHR

SEQ ID NO: 5919 - protein, 7 aa, Artificial Sequence
  Description of Artificial Sequence: Synthetic peptide
LTNKPIC

SEQ ID NO: 5920 - protein, 7 aa, Artificial Sequence
  Description of Artificial Sequence: Synthetic peptide
LTNMRTT

SEQ ID NO: 5921 - protein, 7 aa, Artificial Sequence
  Description of Artificial Sequence: Synthetic peptide
LTNNEQV

SEQ ID NO: 5922 - protein, 7 aa, Artificial Sequence
  Description of Artificial Sequence: Synthetic peptide
LTNRQNQ

SEQ ID NO: 5923 - protein, 7 aa, Artificial Sequence
  Description of Artificial Sequence: Synthetic peptide
LTPALGP

SEQ ID NO: 5924 - protein, 7 aa, Artificial Sequence
  Description of Artificial Sequence: Synthetic peptide
LTPARTY

SEQ ID NO: 5925 - protein, 7 aa, Artificial Sequence
  Description of Artificial Sequence: Synthetic peptide
LTPGRGV

SEQ ID NO: 5926 - protein, 7 aa, Artificial Sequence
  Description of Artificial Sequence: Synthetic peptide
LTPHVMD

SEQ ID NO: 5927 - protein, 7 aa, Artificial Sequence
  Description of Artificial Sequence: Synthetic peptide
LTPINSA

SEQ ID NO: 5928 - protein, 7 aa, Artificial Sequence
  Description of Artificial Sequence: Synthetic peptide
LTPKSIS

SEQ ID NO: 5929 - protein, 7 aa, Artificial Sequence
  Description of Artificial Sequence: Synthetic peptide
LTPLLGS

SEQ ID NO: 5930 - protein, 7 aa, Artificial Sequence
  Description of Artificial Sequence: Synthetic peptide
LTPLMSD

SEQ ID NO: 5931 - protein, 7 aa, Artificial Sequence
  Description of Artificial Sequence: Synthetic peptide
LTPRLPA

SEQ ID NO: 5932 - protein, 7 aa, Artificial Sequence
  Description of Artificial Sequence: Synthetic peptide
LTPSGHW

SEQ ID NO: 5933 - protein, 7 aa, Artificial Sequence
  Description of Artificial Sequence: Synthetic peptide
LTPSGYN

SEQ ID NO: 5934 - protein, 7 aa, Artificial Sequence
  Description of Artificial Sequence: Synthetic peptide
LTPSQPY

SEQ ID NO: 5935 - protein, 7 aa, Artificial Sequence
  Description of Artificial Sequence: Synthetic peptide
LTPSVKG

SEQ ID NO: 5936 - protein, 7 aa, Artificial Sequence
  Description of Artificial Sequence: Synthetic peptide
LTPSVPH

SEQ ID NO: 5937 - protein, 7 aa, Artificial Sequence
  Description of Artificial Sequence: Synthetic peptide
LTPTKME

SEQ ID NO: 5938 - protein, 7 aa, Artificial Sequence
  Description of Artificial Sequence: Synthetic peptide
LTPVSPD

SEQ ID NO: 5939 - protein, 7 aa, Artificial Sequence
  Description of Artificial Sequence: Synthetic peptide
LTQKTPY

SEQ ID NO: 5940 - protein, 7 aa, Artificial Sequence
  Description of Artificial Sequence: Synthetic peptide
LTQLRVT

SEQ ID NO: 5941 - protein, 7 aa, Artificial Sequence
  Description of Artificial Sequence: Synthetic peptide
LTQSHPA

SEQ ID NO: 5942 - protein, 7 aa, Artificial Sequence
  Description of Artificial Sequence: Synthetic peptide
LTRKETD

SEQ ID NO: 5943 - protein, 7 aa, Artificial Sequence
  Description of Artificial Sequence: Synthetic peptide
LTRPDDT

SEQ ID NO: 5944 - protein, 7 aa, Artificial Sequence
  Description of Artificial Sequence: Synthetic peptide
LTRQHSD

SEQ ID NO: 5945 - protein, 7 aa, Artificial Sequence
  Description of Artificial Sequence: Synthetic peptide
LTRSPPA

SEQ ID NO: 5946 - protein, 7 aa, Artificial Sequence
  Description of Artificial Sequence: Synthetic peptide
LTSAPGR

SEQ ID NO: 5947 - protein, 7 aa, Artificial Sequence
  Description of Artificial Sequence: Synthetic peptide
LTSGKSQ

SEQ ID NO: 5948 - protein, 7 aa, Artificial Sequence
  Description of Artificial Sequence: Synthetic peptide
LTSGPLR

SEQ ID NO: 5949 - protein, 7 aa, Artificial Sequence
  Description of Artificial Sequence: Synthetic peptide
LTSHAQY

SEQ ID NO: 5950 - protein, 7 aa, Artificial Sequence
  Description of Artificial Sequence: Synthetic peptide
LTSKHLP

SEQ ID NO: 5951 - protein, 7 aa, Artificial Sequence
  Description of Artificial Sequence: Synthetic peptide
LTSKQGS

SEQ ID NO: 5952 - protein, 7 aa, Artificial Sequence
  Description of Artificial Sequence: Synthetic peptide
LTSLKSA

SEQ ID NO: 5953 - protein, 7 aa, Artificial Sequence
  Description of Artificial Sequence: Synthetic peptide
LTSLRTE

SEQ ID NO: 5954 - protein, 7 aa, Artificial Sequence
  Description of Artificial Sequence: Synthetic peptide
LTSLYGV

SEQ ID NO: 5955 - protein, 7 aa, Artificial Sequence
  Description of Artificial Sequence: Synthetic peptide
LTSNEMS

SEQ ID NO: 5956 - protein, 7 aa, Artificial Sequence
  Description of Artificial Sequence: Synthetic peptide
LTSNRAL

SEQ ID NO: 5957 - protein, 7 aa, Artificial Sequence
  Description of Artificial Sequence: Synthetic peptide
LTSRTVP

SEQ ID NO: 5958 - protein, 7 aa, Artificial Sequence
  Description of Artificial Sequence: Synthetic peptide
LTSTAQS

SEQ ID NO: 5959 - protein, 7 aa, Artificial Sequence
  Description of Artificial Sequence: Synthetic peptide
LTSTNGM

SEQ ID NO: 5960 - protein, 7 aa, Artificial Sequence
  Description of Artificial Sequence: Synthetic peptide
LTSTRLS

SEQ ID NO: 5961 - protein, 7 aa, Artificial Sequence
  Description of Artificial Sequence: Synthetic peptide
LTTARPL

SEQ ID NO: 5962 - protein, 7 aa, Artificial Sequence
  Description of Artificial Sequence: Synthetic peptide
LTTGAYG

SEQ ID NO: 5963 - protein, 7 aa, Artificial Sequence
  Description of Artificial Sequence: Synthetic peptide
LTTIRDV

SEQ ID NO: 5964 - protein, 7 aa, Artificial Sequence
  Description of Artificial Sequence: Synthetic peptide
LTTKAAN

SEQ ID NO: 5965 - protein, 7 aa, Artificial Sequence
  Description of Artificial Sequence: Synthetic peptide
LTTKNMA

SEQ ID NO: 5966 - protein, 7 aa, Artificial Sequence
  Description of Artificial Sequence: Synthetic peptide
LTTKRLD

SEQ ID NO: 5967 - protein, 7 aa, Artificial Sequence
  Description of Artificial Sequence: Synthetic peptide
LTTKSQD

SEQ ID NO: 5968 - protein, 7 aa, Artificial Sequence
  Description of Artificial Sequence: Synthetic peptide
LTTLHSK

SEQ ID NO: 5969 - protein, 7 aa, Artificial Sequence
  Description of Artificial Sequence: Synthetic peptide
LTTMNAF

SEQ ID NO: 5970 - protein, 7 aa, Artificial Sequence
  Description of Artificial Sequence: Synthetic peptide
LTTMRSN

SEQ ID NO: 5971 - protein, 7 aa, Artificial Sequence
  Description of Artificial Sequence: Synthetic peptide
LTTMSKA

SEQ ID NO: 5972 - protein, 7 aa, Artificial Sequence
  Description of Artificial Sequence: Synthetic peptide
LTTPLPH

SEQ ID NO: 5973 - protein, 7 aa, Artificial Sequence
  Description of Artificial Sequence: Synthetic peptide
LTTQEHW

SEQ ID NO: 5974 - protein, 7 aa, Artificial Sequence
  Description of Artificial Sequence: Synthetic peptide
LTTRPAF

SEQ ID NO: 5975 - protein, 7 aa, Artificial Sequence
  Description of Artificial Sequence: Synthetic peptide
LTTRSSP

SEQ ID NO: 5976 - protein, 7 aa, Artificial Sequence
  Description of Artificial Sequence: Synthetic peptide
LTTSLKP

SEQ ID NO: 5977 - protein, 7 aa, Artificial Sequence
  Description of Artificial Sequence: Synthetic peptide
LTTSSFT

SEQ ID NO: 5978 - protein, 7 aa, Artificial Sequence
  Description of Artificial Sequence: Synthetic peptide
LTTTINN

SEQ ID NO: 5979 - protein, 7 aa, Artificial Sequence
  Description of Artificial Sequence: Synthetic peptide
LTTTPAK

SEQ ID NO: 5980 - protein, 7 aa, Artificial Sequence
  Description of Artificial Sequence: Synthetic peptide
LTVGATI

SEQ ID NO: 5981 - protein, 7 aa, Artificial Sequence
  Description of Artificial Sequence: Synthetic peptide
LTVQETQ

SEQ ID NO: 5982 - protein, 7 aa, Artificial Sequence
  Description of Artificial Sequence: Synthetic peptide
LTVSAVK

SEQ ID NO: 5983 - protein, 7 aa, Artificial Sequence
  Description of Artificial Sequence: Synthetic peptide
LTVSNLP

SEQ ID NO: 5984 - protein, 7 aa, Artificial Sequence
  Description of Artificial Sequence: Synthetic peptide
LTVTWAE

SEQ ID NO: 5985 - protein, 7 aa, Artificial Sequence
  Description of Artificial Sequence: Synthetic peptide
LTVVPSG

SEQ ID NO: 5986 - protein, 7 aa, Artificial Sequence
  Description of Artificial Sequence: Synthetic peptide
LTYFVEE

SEQ ID NO: 5987 - protein, 7 aa, Artificial Sequence
  Description of Artificial Sequence: Synthetic peptide
LTYPGSQ

SEQ ID NO: 5988 - protein, 7 aa, Artificial Sequence
  Description of Artificial Sequence: Synthetic peptide
LTYRGGE

SEQ ID NO: 5989 - protein, 7 aa, Artificial Sequence
  Description of Artificial Sequence: Synthetic peptide
LTYSPQT

SEQ ID NO: 5990 - protein, 7 aa, Artificial Sequence
  Description of Artificial Sequence: Synthetic peptide
LTYSRSD

SEQ ID NO: 5991 - protein, 7 aa, Artificial Sequence
  Description of Artificial Sequence: Synthetic peptide
LVAKMTP

SEQ ID NO: 5992 - protein, 7 aa, Artificial Sequence
  Description of Artificial Sequence: Synthetic peptide
LVARGGA

SEQ ID NO: 5993 - protein, 7 aa, Artificial Sequence
  Description of Artificial Sequence: Synthetic peptide
LVATQAP

SEQ ID NO: 5994 - protein, 7 aa, Artificial Sequence
  Description of Artificial Sequence: Synthetic peptide
LVAVSTT

SEQ ID NO: 5995 - protein, 7 aa, Artificial Sequence
  Description of Artificial Sequence: Synthetic peptide
LVDSRTM

SEQ ID NO: 5996 - protein, 7 aa, Artificial Sequence
  Description of Artificial Sequence: Synthetic peptide
LVEGLID

SEQ ID NO: 5997 - protein, 7 aa, Artificial Sequence
  Description of Artificial Sequence: Synthetic peptide
LVENRRE

SEQ ID NO: 5998 - protein, 7 aa, Artificial Sequence
  Description of Artificial Sequence: Synthetic peptide
LVEPMKH

SEQ ID NO: 5999 - protein, 7 aa, Artificial Sequence
  Description of Artificial Sequence: Synthetic peptide
LVETKGS

SEQ ID NO: 6000 - protein, 7 aa, Artificial Sequence
  Description of Artificial Sequence: Synthetic peptide
LVETLTH

SEQ ID NO: 6001 - protein, 7 aa, Artificial Sequence
  Description of Artificial Sequence: Synthetic peptide
LVGESHI

SEQ ID NO: 6002 - protein, 7 aa, Artificial Sequence
  Description of Artificial Sequence: Synthetic peptide
LVGHPTP

SEQ ID NO: 6003 - protein, 7 aa, Artificial Sequence
  Description of Artificial Sequence: Synthetic peptide
LVGHTGS

SEQ ID NO: 6004 - protein, 7 aa, Artificial Sequence
  Description of Artificial Sequence: Synthetic peptide
LVGQVAV

SEQ ID NO: 6005 - protein, 7 aa, Artificial Sequence
  Description of Artificial Sequence: Synthetic peptide
LVGRACC

SEQ ID NO: 6006 - protein, 7 aa, Artificial Sequence
  Description of Artificial Sequence: Synthetic peptide
LVGRLST

SEQ ID NO: 6007 - protein, 7 aa, Artificial Sequence
  Description of Artificial Sequence: Synthetic peptide
LVGSPPS

SEQ ID NO: 6008 - protein, 7 aa, Artificial Sequence
  Description of Artificial Sequence: Synthetic peptide
LVHLMTD

SEQ ID NO: 6009 - protein, 7 aa, Artificial Sequence
  Description of Artificial Sequence: Synthetic peptide
LVHNRTS

SEQ ID NO: 6010 - protein, 7 aa, Artificial Sequence
  Description of Artificial Sequence: Synthetic peptide
LVHYSPD

SEQ ID NO: 6011 - protein, 7 aa, Artificial Sequence
  Description of Artificial Sequence: Synthetic peptide
LVIPGPG

SEQ ID NO: 6012 - protein, 7 aa, Artificial Sequence
  Description of Artificial Sequence: Synthetic peptide
LVKESPT

SEQ ID NO: 6013 - protein, 7 aa, Artificial Sequence
  Description of Artificial Sequence: Synthetic peptide
LVKGGPN

SEQ ID NO: 6014 - protein, 7 aa, Artificial Sequence
  Description of Artificial Sequence: Synthetic peptide
LVKQTTL

SEQ ID NO: 6015 - protein, 7 aa, Artificial Sequence
  Description of Artificial Sequence: Synthetic peptide
LVKSVDQ

SEQ ID NO: 6016 - protein, 7 aa, Artificial Sequence
  Description of Artificial Sequence: Synthetic peptide
LVLGPPA

SEQ ID NO: 6017 - protein, 7 aa, Artificial Sequence
  Description of Artificial Sequence: Synthetic peptide
LVLGSKS

SEQ ID NO: 6018 - protein, 7 aa, Artificial Sequence
  Description of Artificial Sequence: Synthetic peptide
LVLNNDG

SEQ ID NO: 6019 - protein, 7 aa, Artificial Sequence
  Description of Artificial Sequence: Synthetic peptide
LVLPARQ

SEQ ID NO: 6020 - protein, 7 aa, Artificial Sequence
  Description of Artificial Sequence: Synthetic peptide
LVLPQKS

SEQ ID NO: 6021 - protein, 7 aa, Artificial Sequence
  Description of Artificial Sequence: Synthetic peptide
LVLSNAS

SEQ ID NO: 6022 - protein, 7 aa, Artificial Sequence
  Description of Artificial Sequence: Synthetic peptide
LVMSPAP

SEQ ID NO: 6023 - protein, 7 aa, Artificial Sequence
  Description of Artificial Sequence: Synthetic peptide
LVMSTRA

SEQ ID NO: 6024 - protein, 7 aa, Artificial Sequence
  Description of Artificial Sequence: Synthetic peptide
LVMTSGS

SEQ ID NO: 6025 - protein, 7 aa, Artificial Sequence
  Description of Artificial Sequence: Synthetic peptide
LVNDCCT

SEQ ID NO: 6026 - protein, 7 aa, Artificial Sequence
  Description of Artificial Sequence: Synthetic peptide
LVNETTR

SEQ ID NO: 6027 - protein, 7 aa, Artificial Sequence
  Description of Artificial Sequence: Synthetic peptide
LVNKLGP

SEQ ID NO: 6028 - protein, 7 aa, Artificial Sequence
  Description of Artificial Sequence: Synthetic peptide
LVNKSYN

SEQ ID NO: 6029 - protein, 7 aa, Artificial Sequence
  Description of Artificial Sequence: Synthetic peptide
LVNPGTR

SEQ ID NO: 6030 - protein, 7 aa, Artificial Sequence
  Description of Artificial Sequence: Synthetic peptide
LVNSKDS

SEQ ID NO: 6031 - protein, 7 aa, Artificial Sequence
  Description of Artificial Sequence: Synthetic peptide
LVNTPTE

SEQ ID NO: 6032 - protein, 7 aa, Artificial Sequence
  Description of Artificial Sequence: Synthetic peptide
LVPARSG

SEQ ID NO: 6033 - protein, 7 aa, Artificial Sequence
  Description of Artificial Sequence: Synthetic peptide
LVPGLTG

SEQ ID NO: 6034 - protein, 7 aa, Artificial Sequence
  Description of Artificial Sequence: Synthetic peptide
LVPGMIT

SEQ ID NO: 6035 - protein, 7 aa, Artificial Sequence
  Description of Artificial Sequence: Synthetic peptide
LVPGVHS

SEQ ID NO: 6036 - protein, 7 aa, Artificial Sequence
  Description of Artificial Sequence: Synthetic peptide
LVPHSNF

SEQ ID NO: 6037 - protein, 7 aa, Artificial Sequence
  Description of Artificial Sequence: Synthetic peptide
LVPKHMN

SEQ ID NO: 6038 - protein, 7 aa, Artificial Sequence
  Description of Artificial Sequence: Synthetic peptide
LVPLLPA

SEQ ID NO: 6039 - protein, 7 aa, Artificial Sequence
  Description of Artificial Sequence: Synthetic peptide
LVPLPHS

SEQ ID NO: 6040 - protein, 7 aa, Artificial Sequence
  Description of Artificial Sequence: Synthetic peptide
LVPLYTE

SEQ ID NO: 6041 - protein, 7 aa, Artificial Sequence
  Description of Artificial Sequence: Synthetic peptide
LVPNFQP

SEQ ID NO: 6042 - protein, 7 aa, Artificial Sequence
  Description of Artificial Sequence: Synthetic peptide
LVPNSAE

SEQ ID NO: 6043 - protein, 7 aa, Artificial Sequence
  Description of Artificial Sequence: Synthetic peptide
LVPRAAD

SEQ ID NO: 6044 - protein, 7 aa, Artificial Sequence
  Description of Artificial Sequence: Synthetic peptide
LVPRNSL

SEQ ID NO: 6045 - protein, 7 aa, Artificial Sequence
  Description of Artificial Sequence: Synthetic peptide
LVPSIQT

SEQ ID NO: 6046 - protein, 7 aa, Artificial Sequence
  Description of Artificial Sequence: Synthetic peptide
LVPSLEQ

SEQ ID NO: 6047 - protein, 7 aa, Artificial Sequence
  Description of Artificial Sequence: Synthetic peptide
LVPVSLS

SEQ ID NO: 6048 - protein, 7 aa, Artificial Sequence
  Description of Artificial Sequence: Synthetic peptide
LVQLDVA

SEQ ID NO: 6049 - protein, 7 aa, Artificial Sequence
  Description of Artificial Sequence: Synthetic peptide
LVQSLGM

SEQ ID NO: 6050 - protein, 7 aa, Artificial Sequence
  Description of Artificial Sequence: Synthetic peptide
LVRAMDT

SEQ ID NO: 6051 - protein, 7 aa, Artificial Sequence
  Description of Artificial Sequence: Synthetic peptide
LVRGASH

SEQ ID NO: 6052 - protein, 7 aa, Artificial Sequence
  Description of Artificial Sequence: Synthetic peptide
LVRHDNL

SEQ ID NO: 6053 - protein, 7 aa, Artificial Sequence
  Description of Artificial Sequence: Synthetic peptide
LVRNGLS

SEQ ID NO: 6054 - protein, 7 aa, Artificial Sequence
  Description of Artificial Sequence: Synthetic peptide
LVRPSPA

SEQ ID NO: 6055 - protein, 7 aa, Artificial Sequence
  Description of Artificial Sequence: Synthetic peptide
LVSGHHM

SEQ ID NO: 6056 - protein, 7 aa, Artificial Sequence
  Description of Artificial Sequence: Synthetic peptide
LVSGNRV

SEQ ID NO: 6057 - protein, 7 aa, Artificial Sequence
  Description of Artificial Sequence: Synthetic peptide
LVSGTDR

SEQ ID NO: 6058 - protein, 7 aa, Artificial Sequence
  Description of Artificial Sequence: Synthetic peptide
LVSHPRP

SEQ ID NO: 6059 - protein, 7 aa, Artificial Sequence
  Description of Artificial Sequence: Synthetic peptide
LVSHRSA

SEQ ID NO: 6060 - protein, 7 aa, Artificial Sequence
  Description of Artificial Sequence: Synthetic peptide
LVSKDES

SEQ ID NO: 6061 - protein, 7 aa, Artificial Sequence
  Description of Artificial Sequence: Synthetic peptide
LVSPARP

SEQ ID NO: 6062 - protein, 7 aa, Artificial Sequence
  Description of Artificial Sequence: Synthetic peptide
LVSPEEG

SEQ ID NO: 6063 - protein, 7 aa, Artificial Sequence
  Description of Artificial Sequence: Synthetic peptide
LVSPSLT

SEQ ID NO: 6064 - protein, 7 aa, Artificial Sequence
  Description of Artificial Sequence: Synthetic peptide
LVSSKHP

SEQ ID NO: 6065 - protein, 7 aa, Artificial Sequence
  Description of Artificial Sequence: Synthetic peptide
LVSSPRT

SEQ ID NO: 6066 - protein, 7 aa, Artificial Sequence
  Description of Artificial Sequence: Synthetic peptide
LVSTMTE

SEQ ID NO: 6067 - protein, 7 aa, Artificial Sequence
  Description of Artificial Sequence: Synthetic peptide
LVTAGPL

SEQ ID NO: 6068 - protein, 7 aa, Artificial Sequence
  Description of Artificial Sequence: Synthetic peptide
LVTAPTP

SEQ ID NO: 6069 - protein, 7 aa, Artificial Sequence
  Description of Artificial Sequence: Synthetic peptide
LVTAQHP

SEQ ID NO: 6070 - protein, 7 aa, Artificial Sequence
  Description of Artificial Sequence: Synthetic peptide
LVTGDAS

SEQ ID NO: 6071 - protein, 7 aa, Artificial Sequence
  Description of Artificial Sequence: Synthetic peptide
LVTHNYA

SEQ ID NO: 6072 - protein, 7 aa, Artificial Sequence
  Description of Artificial Sequence: Synthetic peptide
LVTMRPV

SEQ ID NO: 6073 - protein, 7 aa, Artificial Sequence
  Description of Artificial Sequence: Synthetic peptide
LVTNAHS

SEQ ID NO: 6074 - protein, 7 aa, Artificial Sequence
  Description of Artificial Sequence: Synthetic peptide
LVTPGDR

SEQ ID NO: 6075 - protein, 7 aa, Artificial Sequence
  Description of Artificial Sequence: Synthetic peptide
LVTQSNE

SEQ ID NO: 6076 - protein, 7 aa, Artificial Sequence
  Description of Artificial Sequence: Synthetic peptide
LVTYTPM

SEQ ID NO: 6077 - protein, 7 aa, Artificial Sequence
  Description of Artificial Sequence: Synthetic peptide
LVVAAHL

SEQ ID NO: 6078 - protein, 7 aa, Artificial Sequence
  Description of Artificial Sequence: Synthetic peptide
LVVAERI

SEQ ID NO: 6079 - protein, 7 aa, Artificial Sequence
  Description of Artificial Sequence: Synthetic peptide
LVVDEMT

SEQ ID NO: 6080 - protein, 7 aa, Artificial Sequence
  Description of Artificial Sequence: Synthetic peptide
LVVNRMD

SEQ ID NO: 6081 - protein, 7 aa, Artificial Sequence
  Description of Artificial Sequence: Synthetic peptide
LVVPGNG

SEQ ID NO: 6082 - protein, 7 aa, Artificial Sequence
  Description of Artificial Sequence: Synthetic peptide
LVYGHDH

SEQ ID NO: 6083 - protein, 7 aa, Artificial Sequence
  Description of Artificial Sequence: Synthetic peptide
LVYTSTS

SEQ ID NO: 6084 - protein, 7 aa, Artificial Sequence
  Description of Artificial Sequence: Synthetic peptide
LWDLGNP

SEQ ID NO: 6085 - protein, 7 aa, Artificial Sequence
  Description of Artificial Sequence: Synthetic peptide
LWETSTD

SEQ ID NO: 6086 - protein, 7 aa, Artificial Sequence
  Description of Artificial Sequence: Synthetic peptide
LWGDGTL

SEQ ID NO: 6087 - protein, 7 aa, Artificial Sequence
  Description of Artificial Sequence: Synthetic peptide
LWNKPDD

SEQ ID NO: 6088 - protein, 7 aa, Artificial Sequence
  Description of Artificial Sequence: Synthetic peptide
LWNSNTA

SEQ ID NO: 6089 - protein, 7 aa, Artificial Sequence
  Description of Artificial Sequence: Synthetic peptide
LWQSEVD

SEQ ID NO: 6090 - protein, 7 aa, Artificial Sequence
  Description of Artificial Sequence: Synthetic peptide
LWRADDA

SEQ ID NO: 6091 - protein, 7 aa, Artificial Sequence
  Description of Artificial Sequence: Synthetic peptide
LWRSSTT

SEQ ID NO: 6092 - protein, 7 aa, Artificial Sequence
  Description of Artificial Sequence: Synthetic peptide
LWTAERD

SEQ ID NO: 6093 - protein, 7 aa, Artificial Sequence
  Description of Artificial Sequence: Synthetic peptide
LWTGSGP

SEQ ID NO: 6094 - protein, 7 aa, Artificial Sequence
  Description of Artificial Sequence: Synthetic peptide
LWTNQPS

SEQ ID NO: 6095 - protein, 7 aa, Artificial Sequence
  Description of Artificial Sequence: Synthetic peptide
LYANSKP

SEQ ID NO: 6096 - protein, 7 aa, Artificial Sequence
  Description of Artificial Sequence: Synthetic peptide
LYDLRGA

SEQ ID NO: 6097 - protein, 7 aa, Artificial Sequence
  Description of Artificial Sequence: Synthetic peptide
LYDSQDT

SEQ ID NO: 6098 - protein, 7 aa, Artificial Sequence
  Description of Artificial Sequence: Synthetic peptide
LYDTSLL

SEQ ID NO: 6099 - protein, 7 aa, Artificial Sequence
  Description of Artificial Sequence: Synthetic peptide
LYEHSSP

SEQ ID NO: 6100 - protein, 7 aa, Artificial Sequence
  Description of Artificial Sequence: Synthetic peptide
LYEYPSG

SEQ ID NO: 6101 - protein, 7 aa, Artificial Sequence
  Description of Artificial Sequence: Synthetic peptide
LYGSLVP

SEQ ID NO: 6102 - protein, 7 aa, Artificial Sequence
  Description of Artificial Sequence: Synthetic peptide
LYGTSAI

SEQ ID NO: 6103 - protein, 7 aa, Artificial Sequence
  Description of Artificial Sequence: Synthetic peptide
LYKSPET

SEQ ID NO: 6104 - protein, 7 aa, Artificial Sequence
  Description of Artificial Sequence: Synthetic peptide
LYLGSKD

SEQ ID NO: 6105 - protein, 7 aa, Artificial Sequence
  Description of Artificial Sequence: Synthetic peptide
LYLQNDK

SEQ ID NO: 6106 - protein, 7 aa, Artificial Sequence
  Description of Artificial Sequence: Synthetic peptide
LYLTSLD

SEQ ID NO: 6107 - protein, 7 aa, Artificial Sequence
  Description of Artificial Sequence: Synthetic peptide
LYNDFSF

SEQ ID NO: 6108 - protein, 7 aa, Artificial Sequence
  Description of Artificial Sequence: Synthetic peptide
LYNSSDS

SEQ ID NO: 6109 - protein, 7 aa, Artificial Sequence
  Description of Artificial Sequence: Synthetic peptide
LYPHAPS

SEQ ID NO: 6110 - protein, 7 aa, Artificial Sequence
  Description of Artificial Sequence: Synthetic peptide
LYPLQTA

SEQ ID NO: 6111 - protein, 7 aa, Artificial Sequence
  Description of Artificial Sequence: Synthetic peptide
LYQGSNS

SEQ ID NO: 6112 - protein, 7 aa, Artificial Sequence
  Description of Artificial Sequence: Synthetic peptide
LYQGYSA

SEQ ID NO: 6113 - protein, 7 aa, Artificial Sequence
  Description of Artificial Sequence: Synthetic peptide
LYSAASK

SEQ ID NO: 6114 - protein, 7 aa, Artificial Sequence
  Description of Artificial Sequence: Synthetic peptide
LYSEVGL

SEQ ID NO: 6115 - protein, 7 aa, Artificial Sequence
  Description of Artificial Sequence: Synthetic peptide
LYSGTIP

SEQ ID NO: 6116 - protein, 7 aa, Artificial Sequence
  Description of Artificial Sequence: Synthetic peptide
LYSNPNV

SEQ ID NO: 6117 - protein, 7 aa, Artificial Sequence
  Description of Artificial Sequence: Synthetic peptide
LYSPLSN

SEQ ID NO: 6118 - protein, 7 aa, Artificial Sequence
  Description of Artificial Sequence: Synthetic peptide
LYTATAK

SEQ ID NO: 6119 - protein, 7 aa, Artificial Sequence
  Description of Artificial Sequence: Synthetic peptide
LYTDSAF

SEQ ID NO: 6120 - protein, 7 aa, Artificial Sequence
  Description of Artificial Sequence: Synthetic peptide
LYTGLGT

SEQ ID NO: 6121 - protein, 7 aa, Artificial Sequence
  Description of Artificial Sequence: Synthetic peptide
LYTKNEG

SEQ ID NO: 6122 - protein, 7 aa, Artificial Sequence
  Description of Artificial Sequence: Synthetic peptide
LYTKSVP

SEQ ID NO: 6123 - protein, 7 aa, Artificial Sequence
  Description of Artificial Sequence: Synthetic peptide
LYTPNGA

SEQ ID NO: 6124 - protein, 7 aa, Artificial Sequence
  Description of Artificial Sequence: Synthetic peptide
LYTSLPQ

SEQ ID NO: 6125 - protein, 7 aa, Artificial Sequence
  Description of Artificial Sequence: Synthetic peptide
LYTSSGS

SEQ ID NO: 6126 - protein, 7 aa, Artificial Sequence
  Description of Artificial Sequence: Synthetic peptide
LYTVTSG

SEQ ID NO: 6127 - protein, 7 aa, Artificial Sequence
  Description of Artificial Sequence: Synthetic peptide
LYVSEKP

SEQ ID NO: 6128 - protein, 7 aa, Artificial Sequence
  Description of Artificial Sequence: Synthetic peptide
LYYPSTE

SEQ ID NO: 6129 - protein, 7 aa, Artificial Sequence
  Description of Artificial Sequence: Synthetic peptide
MAALNDF

SEQ ID NO: 6130 - protein, 7 aa, Artificial Sequence
  Description of Artificial Sequence: Synthetic peptide
MAAQDYA

SEQ ID NO: 6131 - protein, 7 aa, Artificial Sequence
  Description of Artificial Sequence: Synthetic peptide
MAARTSN

SEQ ID NO: 6132 - protein, 7 aa, Artificial Sequence
  Description of Artificial Sequence: Synthetic peptide
MAASKTF

SEQ ID NO: 6133 - protein, 7 aa, Artificial Sequence
  Description of Artificial Sequence: Synthetic peptide
MAEFVHR

SEQ ID NO: 6134 - protein, 7 aa, Artificial Sequence
  Description of Artificial Sequence: Synthetic peptide
MAGKASH

SEQ ID NO: 6135 - protein, 7 aa, Artificial Sequence
  Description of Artificial Sequence: Synthetic peptide
MAGNLVT

SEQ ID NO: 6136 - protein, 7 aa, Artificial Sequence
  Description of Artificial Sequence: Synthetic peptide
MAKLTVS

SEQ ID NO: 6137 - protein, 7 aa, Artificial Sequence
  Description of Artificial Sequence: Synthetic peptide
MALQGSL

SEQ ID NO: 6138 - protein, 7 aa, Artificial Sequence
  Description of Artificial Sequence: Synthetic peptide
MALRLVN

SEQ ID NO: 6139 - protein, 7 aa, Artificial Sequence
  Description of Artificial Sequence: Synthetic peptide
MANMSSP

SEQ ID NO: 6140 - protein, 7 aa, Artificial Sequence
  Description of Artificial Sequence: Synthetic peptide
MAPVRVP

SEQ ID NO: 6141 - protein, 7 aa, Artificial Sequence
  Description of Artificial Sequence: Synthetic peptide
MARALPP

SEQ ID NO: 6142 - protein, 7 aa, Artificial Sequence
  Description of Artificial Sequence: Synthetic peptide
MARDVDR

SEQ ID NO: 6143 - protein, 7 aa, Artificial Sequence
  Description of Artificial Sequence: Synthetic peptide
MARETTY

SEQ ID NO: 6144 - protein, 7 aa, Artificial Sequence
  Description of Artificial Sequence: Synthetic peptide
MASATPV

SEQ ID NO: 6145 - protein, 7 aa, Artificial Sequence
  Description of Artificial Sequence: Synthetic peptide
MASGQSL

SEQ ID NO: 6146 - protein, 7 aa, Artificial Sequence
  Description of Artificial Sequence: Synthetic peptide
MASHVPV

SEQ ID NO: 6147 - protein, 7 aa, Artificial Sequence
  Description of Artificial Sequence: Synthetic peptide
MASPYSS

SEQ ID NO: 6148 - protein, 7 aa, Artificial Sequence
  Description of Artificial Sequence: Synthetic peptide
MASQIRP

SEQ ID NO: 6149 - protein, 7 aa, Artificial Sequence
  Description of Artificial Sequence: Synthetic peptide
MASSYND

SEQ ID NO: 6150 - protein, 7 aa, Artificial Sequence
  Description of Artificial Sequence: Synthetic peptide
MASTESR

SEQ ID NO: 6151 - protein, 7 aa, Artificial Sequence
  Description of Artificial Sequence: Synthetic peptide
MATAPLH

SEQ ID NO: 6152 - protein, 7 aa, Artificial Sequence
  Description of Artificial Sequence: Synthetic peptide
MATDRRY

SEQ ID NO: 6153 - protein, 7 aa, Artificial Sequence
  Description of Artificial Sequence: Synthetic peptide
MATHVMG

SEQ ID NO: 6154 - protein, 7 aa, Artificial Sequence
  Description of Artificial Sequence: Synthetic peptide
MAVKVGE

SEQ ID NO: 6155 - protein, 7 aa, Artificial Sequence
  Description of Artificial Sequence: Synthetic peptide
MAYQPTL

SEQ ID NO: 6156 - protein, 7 aa, Artificial Sequence
  Description of Artificial Sequence: Synthetic peptide
MAYQQIP

SEQ ID NO: 6157 - protein, 7 aa, Artificial Sequence
  Description of Artificial Sequence: Synthetic peptide
MCDSDRP

SEQ ID NO: 6158 - protein, 7 aa, Artificial Sequence
  Description of Artificial Sequence: Synthetic peptide
MDDRAGF

SEQ ID NO: 6159 - protein, 7 aa, Artificial Sequence
  Description of Artificial Sequence: Synthetic peptide
MDEPEPS

SEQ ID NO: 6160 - protein, 7 aa, Artificial Sequence
  Description of Artificial Sequence: Synthetic peptide
MDKILTS

SEQ ID NO: 6161 - protein, 7 aa, Artificial Sequence
  Description of Artificial Sequence: Synthetic peptide
MDLTGPV

SEQ ID NO: 6162 - protein, 7 aa, Artificial Sequence
  Description of Artificial Sequence: Synthetic peptide
MDMGGSP

SEQ ID NO: 6163 - protein, 7 aa, Artificial Sequence
  Description of Artificial Sequence: Synthetic peptide
MDNLRQS

SEQ ID NO: 6164 - protein, 7 aa, Artificial Sequence
  Description of Artificial Sequence: Synthetic peptide
MDRALHG

SEQ ID NO: 6165 - protein, 7 aa, Artificial Sequence
  Description of Artificial Sequence: Synthetic peptide
MDRMTLM

SEQ ID NO: 6166 - protein, 7 aa, Artificial Sequence
  Description of Artificial Sequence: Synthetic peptide
MDRNFVM

SEQ ID NO: 6167 - protein, 7 aa, Artificial Sequence
  Description of Artificial Sequence: Synthetic peptide
MDRPSTS

SEQ ID NO: 6168 - protein, 7 aa, Artificial Sequence
  Description of Artificial Sequence: Synthetic peptide
MDSADYE

SEQ ID NO: 6169 - protein, 7 aa, Artificial Sequence
  Description of Artificial Sequence: Synthetic peptide
MDSLPPP

SEQ ID NO: 6170 - protein, 7 aa, Artificial Sequence
  Description of Artificial Sequence: Synthetic peptide
MDSRTLL

SEQ ID NO: 6171 - protein, 7 aa, Artificial Sequence
  Description of Artificial Sequence: Synthetic peptide
MDSTSPP

SEQ ID NO: 6172 - protein, 7 aa, Artificial Sequence
  Description of Artificial Sequence: Synthetic peptide
MDVSHGS

SEQ ID NO: 6173 - protein, 7 aa, Artificial Sequence
  Description of Artificial Sequence: Synthetic peptide
MEFGTTP

SEQ ID NO: 6174 - protein, 7 aa, Artificial Sequence
  Description of Artificial Sequence: Synthetic peptide
MEFVSTF

SEQ ID NO: 6175 - protein, 7 aa, Artificial Sequence
  Description of Artificial Sequence: Synthetic peptide
MEGSGRN

SEQ ID NO: 6176 - protein, 7 aa, Artificial Sequence
  Description of Artificial Sequence: Synthetic peptide
MEIESLN

SEQ ID NO: 6177 - protein, 7 aa, Artificial Sequence
  Description of Artificial Sequence: Synthetic peptide
MEITRAP

SEQ ID NO: 6178 - protein, 7 aa, Artificial Sequence
  Description of Artificial Sequence: Synthetic peptide
MEKATPS

SEQ ID NO: 6179 - protein, 7 aa, Artificial Sequence
  Description of Artificial Sequence: Synthetic peptide
MEKLKQN

SEQ ID NO: 6180 - protein, 7 aa, Artificial Sequence
  Description of Artificial Sequence: Synthetic peptide
MELIEGP

SEQ ID NO: 6181 - protein, 7 aa, Artificial Sequence
  Description of Artificial Sequence: Synthetic peptide
MENTTRS

SEQ ID NO: 6182 - protein, 7 aa, Artificial Sequence
  Description of Artificial Sequence: Synthetic peptide
MEPKRSY

SEQ ID NO: 6183 - protein, 7 aa, Artificial Sequence
  Description of Artificial Sequence: Synthetic peptide
MEPPINP

SEQ ID NO: 6184 - protein, 7 aa, Artificial Sequence
  Description of Artificial Sequence: Synthetic peptide
MERTLCN

SEQ ID NO: 6185 - protein, 7 aa, Artificial Sequence
  Description of Artificial Sequence: Synthetic peptide
MESLGLA

SEQ ID NO: 6186 - protein, 7 aa, Artificial Sequence
  Description of Artificial Sequence: Synthetic peptide
MESNHSR

SEQ ID NO: 6187 - protein, 7 aa, Artificial Sequence
  Description of Artificial Sequence: Synthetic peptide
MESRPSY

SEQ ID NO: 6188 - protein, 7 aa, Artificial Sequence
  Description of Artificial Sequence: Synthetic peptide
METKSIS

SEQ ID NO: 6189 - protein, 7 aa, Artificial Sequence
  Description of Artificial Sequence: Synthetic peptide
METNWPA

SEQ ID NO: 6190 - protein, 7 aa, Artificial Sequence
  Description of Artificial Sequence: Synthetic peptide
METSHRM

SEQ ID NO: 6191 - protein, 7 aa, Artificial Sequence
  Description of Artificial Sequence: Synthetic peptide
MFGNAEY

SEQ ID NO: 6192 - protein, 7 aa, Artificial Sequence
  Description of Artificial Sequence: Synthetic peptide
MFGTSQD

SEQ ID NO: 6193 - protein, 7 aa, Artificial Sequence
  Description of Artificial Sequence: Synthetic peptide
MFLKVSP

SEQ ID NO: 6194 - protein, 7 aa, Artificial Sequence
  Description of Artificial Sequence: Synthetic peptide
MFRVVSD

SEQ ID NO: 6195 - protein, 7 aa, Artificial Sequence
  Description of Artificial Sequence: Synthetic peptide
MFSSTKP

SEQ ID NO: 6196 - protein, 7 aa, Artificial Sequence
  Description of Artificial Sequence: Synthetic peptide
MFTDSRS

SEQ ID NO: 6197 - protein, 7 aa, Artificial Sequence
  Description of Artificial Sequence: Synthetic peptide
MFVNELK

SEQ ID NO: 6198 - protein, 7 aa, Artificial Sequence
  Description of Artificial Sequence: Synthetic peptide
MGATHPR

SEQ ID NO: 6199 - protein, 7 aa, Artificial Sequence
  Description of Artificial Sequence: Synthetic peptide
MGDRSRN

SEQ ID NO: 6200 - protein, 7 aa, Artificial Sequence
  Description of Artificial Sequence: Synthetic peptide
MGDYTTK

SEQ ID NO: 6201 - protein, 7 aa, Artificial Sequence
  Description of Artificial Sequence: Synthetic peptide
MGERLFS

SEQ ID NO: 6202 - protein, 7 aa, Artificial Sequence
  Description of Artificial Sequence: Synthetic peptide
MGGHGRT

SEQ ID NO: 6203 - protein, 7 aa, Artificial Sequence
  Description of Artificial Sequence: Synthetic peptide
MGGNSPF

SEQ ID NO: 6204 - protein, 7 aa, Artificial Sequence
  Description of Artificial Sequence: Synthetic peptide
MGGTRGT

SEQ ID NO: 6205 - protein, 7 aa, Artificial Sequence
  Description of Artificial Sequence: Synthetic peptide
MGGTYCR

SEQ ID NO: 6206 - protein, 7 aa, Artificial Sequence
  Description of Artificial Sequence: Synthetic peptide
MGHSDTP

SEQ ID NO: 6207 - protein, 7 aa, Artificial Sequence
  Description of Artificial Sequence: Synthetic peptide
MGHTPRE

SEQ ID NO: 6208 - protein, 7 aa, Artificial Sequence
  Description of Artificial Sequence: Synthetic peptide
MGKTAER

SEQ ID NO: 6209 - protein, 7 aa, Artificial Sequence
  Description of Artificial Sequence: Synthetic peptide
MGLGSSN

SEQ ID NO: 6210 - protein, 7 aa, Artificial Sequence
  Description of Artificial Sequence: Synthetic peptide
MGLRPEG

SEQ ID NO: 6211 - protein, 7 aa, Artificial Sequence
  Description of Artificial Sequence: Synthetic peptide
MGMHGTS

SEQ ID NO: 6212 - protein, 7 aa, Artificial Sequence
  Description of Artificial Sequence: Synthetic peptide
MGNHAGS

SEQ ID NO: 6213 - protein, 7 aa, Artificial Sequence
  Description of Artificial Sequence: Synthetic peptide
MGNSLKQ

SEQ ID NO: 6214 - protein, 7 aa, Artificial Sequence
  Description of Artificial Sequence: Synthetic peptide
MGPDGSI

SEQ ID NO: 6215 - protein, 7 aa, Artificial Sequence
  Description of Artificial Sequence: Synthetic peptide
MGPITPQ

SEQ ID NO: 6216 - protein, 7 aa, Artificial Sequence
  Description of Artificial Sequence: Synthetic peptide
MGQNMAL

SEQ ID NO: 6217 - protein, 7 aa, Artificial Sequence
  Description of Artificial Sequence: Synthetic peptide
MGRDEPG

SEQ ID NO: 6218 - protein, 7 aa, Artificial Sequence
  Description of Artificial Sequence: Synthetic peptide
MGSGYTM

SEQ ID NO: 6219 - protein, 7 aa, Artificial Sequence
  Description of Artificial Sequence: Synthetic peptide
MGSTIAL

SEQ ID NO: 6220 - protein, 7 aa, Artificial Sequence
  Description of Artificial Sequence: Synthetic peptide
MGSVHNL

SEQ ID NO: 6221 - protein, 7 aa, Artificial Sequence
  Description of Artificial Sequence: Synthetic peptide
MGSVIGT

SEQ ID NO: 6222 - protein, 7 aa, Artificial Sequence
  Description of Artificial Sequence: Synthetic peptide
MGTTHTS

SEQ ID NO: 6223 - protein, 7 aa, Artificial Sequence
  Description of Artificial Sequence: Synthetic peptide
MGTTPTL

SEQ ID NO: 6224 - protein, 7 aa, Artificial Sequence
  Description of Artificial Sequence: Synthetic peptide
MGVRNAA

SEQ ID NO: 6225 - protein, 7 aa, Artificial Sequence
  Description of Artificial Sequence: Synthetic peptide
MGYLTGE

SEQ ID NO: 6226 - protein, 7 aa, Artificial Sequence
  Description of Artificial Sequence: Synthetic peptide
MHDADKP

SEQ ID NO: 6227 - protein, 7 aa, Artificial Sequence
  Description of Artificial Sequence: Synthetic peptide
MHDFPEL

SEQ ID NO: 6228 - protein, 7 aa, Artificial Sequence
  Description of Artificial Sequence: Synthetic peptide
MHDSPQA

SEQ ID NO: 6229 - protein, 7 aa, Artificial Sequence
  Description of Artificial Sequence: Synthetic peptide
MHESLYP

SEQ ID NO: 6230 - protein, 7 aa, Artificial Sequence
  Description of Artificial Sequence: Synthetic peptide
MHFSAEP

SEQ ID NO: 6231 - protein, 7 aa, Artificial Sequence
  Description of Artificial Sequence: Synthetic peptide
MHHATAP

SEQ ID NO: 6232 - protein, 7 aa, Artificial Sequence
  Description of Artificial Sequence: Synthetic peptide
MHPAPLR

SEQ ID NO: 6233 - protein, 7 aa, Artificial Sequence
  Description of Artificial Sequence: Synthetic peptide
MHPGGGS

SEQ ID NO: 6234 - protein, 7 aa, Artificial Sequence
  Description of Artificial Sequence: Synthetic peptide
MHQRDGA

SEQ ID NO: 6235 - protein, 7 aa, Artificial Sequence
  Description of Artificial Sequence: Synthetic peptide
MHQTSMG

SEQ ID NO: 6236 - protein, 7 aa, Artificial Sequence
  Description of Artificial Sequence: Synthetic peptide
MHSKGAN

SEQ ID NO: 6237 - protein, 7 aa, Artificial Sequence
  Description of Artificial Sequence: Synthetic peptide
MHSPQTH

SEQ ID NO: 6238 - protein, 7 aa, Artificial Sequence
  Description of Artificial Sequence: Synthetic peptide
MHSSPLD

SEQ ID NO: 6239 - protein, 7 aa, Artificial Sequence
  Description of Artificial Sequence: Synthetic peptide
MHSTVPA

SEQ ID NO: 6240 - protein, 7 aa, Artificial Sequence
  Description of Artificial Sequence: Synthetic peptide
MIDRVRT

SEQ ID NO: 6241 - protein, 7 aa, Artificial Sequence
  Description of Artificial Sequence: Synthetic peptide
MIEIKEL

SEQ ID NO: 6242 - protein, 7 aa, Artificial Sequence
  Description of Artificial Sequence: Synthetic peptide
MIEVLPS

SEQ ID NO: 6243 - protein, 7 aa, Artificial Sequence
  Description of Artificial Sequence: Synthetic peptide
MIGDAPA

SEQ ID NO: 6244 - protein, 7 aa, Artificial Sequence
  Description of Artificial Sequence: Synthetic peptide
MIGKSTD

SEQ ID NO: 6245 - protein, 7 aa, Artificial Sequence
  Description of Artificial Sequence: Synthetic peptide
MIKKDYA

SEQ ID NO: 6246 - protein, 7 aa, Artificial Sequence
  Description of Artificial Sequence: Synthetic peptide
MIKTNSV

SEQ ID NO: 6247 - protein, 7 aa, Artificial Sequence
  Description of Artificial Sequence: Synthetic peptide
MINANTN

SEQ ID NO: 6248 - protein, 7 aa, Artificial Sequence
  Description of Artificial Sequence: Synthetic peptide
MIPVRPD

SEQ ID NO: 6249 - protein, 7 aa, Artificial Sequence
  Description of Artificial Sequence: Synthetic peptide
MISEPLT

SEQ ID NO: 6250 - protein, 7 aa, Artificial Sequence
  Description of Artificial Sequence: Synthetic peptide
MISGRTT

SEQ ID NO: 6251 - protein, 7 aa, Artificial Sequence
  Description of Artificial Sequence: Synthetic peptide
MISHQPP

SEQ ID NO: 6252 - protein, 7 aa, Artificial Sequence
  Description of Artificial Sequence: Synthetic peptide
MISIQQT

SEQ ID NO: 6253 - protein, 7 aa, Artificial Sequence
  Description of Artificial Sequence: Synthetic peptide
MISSMLG

SEQ ID NO: 6254 - protein, 7 aa, Artificial Sequence
  Description of Artificial Sequence: Synthetic peptide
MIVTTPE

SEQ ID NO: 6255 - protein, 7 aa, Artificial Sequence
  Description of Artificial Sequence: Synthetic peptide
MKAAVRE

SEQ ID NO: 6256 - protein, 7 aa, Artificial Sequence
  Description of Artificial Sequence: Synthetic peptide
MKADPEW

SEQ ID NO: 6257 - protein, 7 aa, Artificial Sequence
  Description of Artificial Sequence: Synthetic peptide
MKDNNVT

SEQ ID NO: 6258 - protein, 7 aa, Artificial Sequence
  Description of Artificial Sequence: Synthetic peptide
MKHAAQL

SEQ ID NO: 6259 - protein, 7 aa, Artificial Sequence
  Description of Artificial Sequence: Synthetic peptide
MKHPQYN

SEQ ID NO: 6260 - protein, 7 aa, Artificial Sequence
  Description of Artificial Sequence: Synthetic peptide
MKMNRNE

SEQ ID NO: 6261 - protein, 7 aa, Artificial Sequence
  Description of Artificial Sequence: Synthetic peptide
MKPGLPM

SEQ ID NO: 6262 - protein, 7 aa, Artificial Sequence
  Description of Artificial Sequence: Synthetic peptide
MKPLAAS

SEQ ID NO: 6263 - protein, 7 aa, Artificial Sequence
  Description of Artificial Sequence: Synthetic peptide
MKPTSQV

SEQ ID NO: 6264 - protein, 7 aa, Artificial Sequence
  Description of Artificial Sequence: Synthetic peptide
MKSGLTM

SEQ ID NO: 6265 - protein, 7 aa, Artificial Sequence
  Description of Artificial Sequence: Synthetic peptide
MKSIIPS

SEQ ID NO: 6266 - protein, 7 aa, Artificial Sequence
  Description of Artificial Sequence: Synthetic peptide
MKSPYGL

SEQ ID NO: 6267 - protein, 7 aa, Artificial Sequence
  Description of Artificial Sequence: Synthetic peptide
MKSQSDP

SEQ ID NO: 6268 - protein, 7 aa, Artificial Sequence
  Description of Artificial Sequence: Synthetic peptide
MKSSESR

SEQ ID NO: 6269 - protein, 7 aa, Artificial Sequence
  Description of Artificial Sequence: Synthetic peptide
MKTELPA

SEQ ID NO: 6270 - protein, 7 aa, Artificial Sequence
  Description of Artificial Sequence: Synthetic peptide
MKTPPQS

SEQ ID NO: 6271 - protein, 7 aa, Artificial Sequence
  Description of Artificial Sequence: Synthetic peptide
MKWDGKA

SEQ ID NO: 6272 - protein, 7 aa, Artificial Sequence
  Description of Artificial Sequence: Synthetic peptide
MKYSDIG

SEQ ID NO: 6273 - protein, 7 aa, Artificial Sequence
  Description of Artificial Sequence: Synthetic peptide
MLDDINE

SEQ ID NO: 6274 - protein, 7 aa, Artificial Sequence
  Description of Artificial Sequence: Synthetic peptide
MLDTTKR

SEQ ID NO: 6275 - protein, 7 aa, Artificial Sequence
  Description of Artificial Sequence: Synthetic peptide
MLEMNQT

SEQ ID NO: 6276 - protein, 7 aa, Artificial Sequence
  Description of Artificial Sequence: Synthetic peptide
MLGHLTA

SEQ ID NO: 6277 - protein, 7 aa, Artificial Sequence
  Description of Artificial Sequence: Synthetic peptide
MLGLSHT

SEQ ID NO: 6278 - protein, 7 aa, Artificial Sequence
  Description of Artificial Sequence: Synthetic peptide
MLHPTAT

SEQ ID NO: 6279 - protein, 7 aa, Artificial Sequence
  Description of Artificial Sequence: Synthetic peptide
MLHSSGA

SEQ ID NO: 6280 - protein, 7 aa, Artificial Sequence
  Description of Artificial Sequence: Synthetic peptide
MLKYTEH

SEQ ID NO: 6281 - protein, 7 aa, Artificial Sequence
  Description of Artificial Sequence: Synthetic peptide
MLLPTTK

SEQ ID NO: 6282 - protein, 7 aa, Artificial Sequence
  Description of Artificial Sequence: Synthetic peptide
MLPDSNA

SEQ ID NO: 6283 - protein, 7 aa, Artificial Sequence
  Description of Artificial Sequence: Synthetic peptide
MLPFDTD

SEQ ID NO: 6284 - protein, 7 aa, Artificial Sequence
  Description of Artificial Sequence: Synthetic peptide
MLPGDSA

SEQ ID NO: 6285 - protein, 7 aa, Artificial Sequence
  Description of Artificial Sequence: Synthetic peptide
MLPGTPH

SEQ ID NO: 6286 - protein, 7 aa, Artificial Sequence
  Description of Artificial Sequence: Synthetic peptide
MLQGQLS

SEQ ID NO: 6287 - protein, 7 aa, Artificial Sequence
  Description of Artificial Sequence: Synthetic peptide
MLQNGQR

SEQ ID NO: 6288 - protein, 7 aa, Artificial Sequence
  Description of Artificial Sequence: Synthetic peptide
MLRIAGD

SEQ ID NO: 6289 - protein, 7 aa, Artificial Sequence
  Description of Artificial Sequence: Synthetic peptide
MLRQGLQ

SEQ ID NO: 6290 - protein, 7 aa, Artificial Sequence
  Description of Artificial Sequence: Synthetic peptide
MLRTSQD

SEQ ID NO: 6291 - protein, 7 aa, Artificial Sequence
  Description of Artificial Sequence: Synthetic peptide
MLSGEMH

SEQ ID NO: 6292 - protein, 7 aa, Artificial Sequence
  Description of Artificial Sequence: Synthetic peptide
MLSNEVI

SEQ ID NO: 6293 - protein, 7 aa, Artificial Sequence
  Description of Artificial Sequence: Synthetic peptide
MLSRDDQ

SEQ ID NO: 6294 - protein, 7 aa, Artificial Sequence
  Description of Artificial Sequence: Synthetic peptide
MLSRLAQ

SEQ ID NO: 6295 - protein, 7 aa, Artificial Sequence
  Description of Artificial Sequence: Synthetic peptide
MMDRIEG

SEQ ID NO: 6296 - protein, 7 aa, Artificial Sequence
  Description of Artificial Sequence: Synthetic peptide
MMELQLP

SEQ ID NO: 6297 - protein, 7 aa, Artificial Sequence
  Description of Artificial Sequence: Synthetic peptide
MMGNSKG

SEQ ID NO: 6298 - protein, 7 aa, Artificial Sequence
  Description of Artificial Sequence: Synthetic peptide
MMHAGAQ

SEQ ID NO: 6299 - protein, 7 aa, Artificial Sequence
  Description of Artificial Sequence: Synthetic peptide
MMHQEDS

SEQ ID NO: 6300 - protein, 7 aa, Artificial Sequence
  Description of Artificial Sequence: Synthetic peptide
MMNMRGG

SEQ ID NO: 6301 - protein, 7 aa, Artificial Sequence
  Description of Artificial Sequence: Synthetic peptide
MMPQEIV

SEQ ID NO: 6302 - protein, 7 aa, Artificial Sequence
  Description of Artificial Sequence: Synthetic peptide
MMSDNAK

SEQ ID NO: 6303 - protein, 7 aa, Artificial Sequence
  Description of Artificial Sequence: Synthetic peptide
MMTDSQR

SEQ ID NO: 6304 - protein, 7 aa, Artificial Sequence
  Description of Artificial Sequence: Synthetic peptide
MMTGASD

SEQ ID NO: 6305 - protein, 7 aa, Artificial Sequence
  Description of Artificial Sequence: Synthetic peptide
MMTKTGT

SEQ ID NO: 6306 - protein, 7 aa, Artificial Sequence
  Description of Artificial Sequence: Synthetic peptide
MMTSAGP

SEQ ID NO: 6307 - protein, 7 aa, Artificial Sequence
  Description of Artificial Sequence: Synthetic peptide
MNAFKQE

SEQ ID NO: 6308 - protein, 7 aa, Artificial Sequence
  Description of Artificial Sequence: Synthetic peptide
MNAKCCS

SEQ ID NO: 6309 - protein, 7 aa, Artificial Sequence
  Description of Artificial Sequence: Synthetic peptide
MNARLID

SEQ ID NO: 6310 - protein, 7 aa, Artificial Sequence
  Description of Artificial Sequence: Synthetic peptide
MNASANS

SEQ ID NO: 6311 - protein, 7 aa, Artificial Sequence
  Description of Artificial Sequence: Synthetic peptide
MNASTMI

SEQ ID NO: 6312 - protein, 7 aa, Artificial Sequence
  Description of Artificial Sequence: Synthetic peptide
MNGSLPM

SEQ ID NO: 6313 - protein, 7 aa, Artificial Sequence
  Description of Artificial Sequence: Synthetic peptide
MNGSRQM

SEQ ID NO: 6314 - protein, 7 aa, Artificial Sequence
  Description of Artificial Sequence: Synthetic peptide
MNHGANY

SEQ ID NO: 6315 - protein, 7 aa, Artificial Sequence
  Description of Artificial Sequence: Synthetic peptide
MNKASFA

SEQ ID NO: 6316 - protein, 7 aa, Artificial Sequence
  Description of Artificial Sequence: Synthetic peptide
MNKGTVA

SEQ ID NO: 6317 - protein, 7 aa, Artificial Sequence
  Description of Artificial Sequence: Synthetic peptide
MNKLKVE

SEQ ID NO: 6318 - protein, 7 aa, Artificial Sequence
  Description of Artificial Sequence: Synthetic peptide
MNLHNPA

SEQ ID NO: 6319 - protein, 7 aa, Artificial Sequence
  Description of Artificial Sequence: Synthetic peptide
MNLKLSP

SEQ ID NO: 6320 - protein, 7 aa, Artificial Sequence
  Description of Artificial Sequence: Synthetic peptide
MNLRMAP

SEQ ID NO: 6321 - protein, 7 aa, Artificial Sequence
  Description of Artificial Sequence: Synthetic peptide
MNLSTKP

SEQ ID NO: 6322 - protein, 7 aa, Artificial Sequence
  Description of Artificial Sequence: Synthetic peptide
MNNLSGR

SEQ ID NO: 6323 - protein, 7 aa, Artificial Sequence
  Description of Artificial Sequence: Synthetic peptide
MNPISKC

SEQ ID NO: 6324 - protein, 7 aa, Artificial Sequence
  Description of Artificial Sequence: Synthetic peptide
MNPLPYP

SEQ ID NO: 6325 - protein, 7 aa, Artificial Sequence
  Description of Artificial Sequence: Synthetic peptide
MNPSVEL

SEQ ID NO: 6326 - protein, 7 aa, Artificial Sequence
  Description of Artificial Sequence: Synthetic peptide
MNQTKPY

SEQ ID NO: 6327 - protein, 7 aa, Artificial Sequence
  Description of Artificial Sequence: Synthetic peptide
MNQVRSL

SEQ ID NO: 6328 - protein, 7 aa, Artificial Sequence
  Description of Artificial Sequence: Synthetic peptide
MNRIVMS

SEQ ID NO: 6329 - protein, 7 aa, Artificial Sequence
  Description of Artificial Sequence: Synthetic peptide
MNSGCED

SEQ ID NO: 6330 - protein, 7 aa, Artificial Sequence
  Description of Artificial Sequence: Synthetic peptide
MNSGMPF

SEQ ID NO: 6331 - protein, 7 aa, Artificial Sequence
  Description of Artificial Sequence: Synthetic peptide
MNSKGEP

SEQ ID NO: 6332 - protein, 7 aa, Artificial Sequence
  Description of Artificial Sequence: Synthetic peptide
MNSKMYP

SEQ ID NO: 6333 - protein, 7 aa, Artificial Sequence
  Description of Artificial Sequence: Synthetic peptide
MNSLPRS

SEQ ID NO: 6334 - protein, 7 aa, Artificial Sequence
  Description of Artificial Sequence: Synthetic peptide
MNSRNGY

SEQ ID NO: 6335 - protein, 7 aa, Artificial Sequence
  Description of Artificial Sequence: Synthetic peptide
MNSTLAA

SEQ ID NO: 6336 - protein, 7 aa, Artificial Sequence
  Description of Artificial Sequence: Synthetic peptide
MNSTTTP

SEQ ID NO: 6337 - protein, 7 aa, Artificial Sequence
  Description of Artificial Sequence: Synthetic peptide
MNTKTFP

SEQ ID NO: 6338 - protein, 7 aa, Artificial Sequence
  Description of Artificial Sequence: Synthetic peptide
MNTSVVY

SEQ ID NO: 6339 - protein, 7 aa, Artificial Sequence
  Description of Artificial Sequence: Synthetic peptide
MNVVGQS

SEQ ID NO: 6340 - protein, 7 aa, Artificial Sequence
  Description of Artificial Sequence: Synthetic peptide
MPAHVLP

SEQ ID NO: 6341 - protein, 7 aa, Artificial Sequence
  Description of Artificial Sequence: Synthetic peptide
MPASSVS

SEQ ID NO: 6342 - protein, 7 aa, Artificial Sequence
  Description of Artificial Sequence: Synthetic peptide
MPATFTD

SEQ ID NO: 6343 - protein, 7 aa, Artificial Sequence
  Description of Artificial Sequence: Synthetic peptide
MPDAKIS

SEQ ID NO: 6344 - protein, 7 aa, Artificial Sequence
  Description of Artificial Sequence: Synthetic peptide
MPDHPLR

SEQ ID NO: 6345 - protein, 7 aa, Artificial Sequence
  Description of Artificial Sequence: Synthetic peptide
MPESMNT

SEQ ID NO: 6346 - protein, 7 aa, Artificial Sequence
  Description of Artificial Sequence: Synthetic peptide
MPFNDNV

SEQ ID NO: 6347 - protein, 7 aa, Artificial Sequence
  Description of Artificial Sequence: Synthetic peptide
MPHGSFA

SEQ ID NO: 6348 - protein, 7 aa, Artificial Sequence
  Description of Artificial Sequence: Synthetic peptide
MPHLEMN

SEQ ID NO: 6349 - protein, 7 aa, Artificial Sequence
  Description of Artificial Sequence: Synthetic peptide
MPHLITS

SEQ ID NO: 6350 - protein, 7 aa, Artificial Sequence
  Description of Artificial Sequence: Synthetic peptide
MPHMGLT

SEQ ID NO: 6351 - protein, 7 aa, Artificial Sequence
  Description of Artificial Sequence: Synthetic peptide
MPISPLA

SEQ ID NO: 6352 - protein, 7 aa, Artificial Sequence
  Description of Artificial Sequence: Synthetic peptide
MPIVRIS

SEQ ID NO: 6353 - protein, 7 aa, Artificial Sequence
  Description of Artificial Sequence: Synthetic peptide
MPKQELI

SEQ ID NO: 6354 - protein, 7 aa, Artificial Sequence
  Description of Artificial Sequence: Synthetic peptide
MPLDSVA

SEQ ID NO: 6355 - protein, 7 aa, Artificial Sequence
  Description of Artificial Sequence: Synthetic peptide
MPLGGAY

SEQ ID NO: 6356 - protein, 7 aa, Artificial Sequence
  Description of Artificial Sequence: Synthetic peptide
MPLRNTM

SEQ ID NO: 6357 - protein, 7 aa, Artificial Sequence
  Description of Artificial Sequence: Synthetic peptide
MPLSNSS

SEQ ID NO: 6358 - protein, 7 aa, Artificial Sequence
  Description of Artificial Sequence: Synthetic peptide
MPMGDPI

SEQ ID NO: 6359 - protein, 7 aa, Artificial Sequence
  Description of Artificial Sequence: Synthetic peptide
MPMMLRL

SEQ ID NO: 6360 - protein, 7 aa, Artificial Sequence
  Description of Artificial Sequence: Synthetic peptide
MPMNRTP

SEQ ID NO: 6361 - protein, 7 aa, Artificial Sequence
  Description of Artificial Sequence: Synthetic peptide
MPMRANG

SEQ ID NO: 6362 - protein, 7 aa, Artificial Sequence
  Description of Artificial Sequence: Synthetic peptide
MPNVPPT

SEQ ID NO: 6363 - protein, 7 aa, Artificial Sequence
  Description of Artificial Sequence: Synthetic peptide
MPPALLT

SEQ ID NO: 6364 - protein, 7 aa, Artificial Sequence
  Description of Artificial Sequence: Synthetic peptide
MPPEVPV

SEQ ID NO: 6365 - protein, 7 aa, Artificial Sequence
  Description of Artificial Sequence: Synthetic peptide
MPPPNLN

SEQ ID NO: 6366 - protein, 7 aa, Artificial Sequence
  Description of Artificial Sequence: Synthetic peptide
MPPQNAM

SEQ ID NO: 6367 - protein, 7 aa, Artificial Sequence
  Description of Artificial Sequence: Synthetic peptide
MPPSNRP

SEQ ID NO: 6368 - protein, 7 aa, Artificial Sequence
  Description of Artificial Sequence: Synthetic peptide
MPPSTYA

SEQ ID NO: 6369 - protein, 7 aa, Artificial Sequence
  Description of Artificial Sequence: Synthetic peptide
MPQLHET

SEQ ID NO: 6370 - protein, 7 aa, Artificial Sequence
  Description of Artificial Sequence: Synthetic peptide
MPQSRDE

SEQ ID NO: 6371 - protein, 7 aa, Artificial Sequence
  Description of Artificial Sequence: Synthetic peptide
MPRDAYG

SEQ ID NO: 6372 - protein, 7 aa, Artificial Sequence
  Description of Artificial Sequence: Synthetic peptide
MPRGEIP

SEQ ID NO: 6373 - protein, 7 aa, Artificial Sequence
  Description of Artificial Sequence: Synthetic peptide
MPRNGPP

SEQ ID NO: 6374 - protein, 7 aa, Artificial Sequence
  Description of Artificial Sequence: Synthetic peptide
MPRVASN

SEQ ID NO: 6375 - protein, 7 aa, Artificial Sequence
  Description of Artificial Sequence: Synthetic peptide
MPSASEV

SEQ ID NO: 6376 - protein, 7 aa, Artificial Sequence
  Description of Artificial Sequence: Synthetic peptide
MPSGRVH

SEQ ID NO: 6377 - protein, 7 aa, Artificial Sequence
  Description of Artificial Sequence: Synthetic peptide
MPSGRVP

SEQ ID NO: 6378 - protein, 7 aa, Artificial Sequence
  Description of Artificial Sequence: Synthetic peptide
MPSISLP

SEQ ID NO: 6379 - protein, 7 aa, Artificial Sequence
  Description of Artificial Sequence: Synthetic peptide
MPSNSIS

SEQ ID NO: 6380 - protein, 7 aa, Artificial Sequence
  Description of Artificial Sequence: Synthetic peptide
MPSPEVY

SEQ ID NO: 6381 - protein, 7 aa, Artificial Sequence
  Description of Artificial Sequence: Synthetic peptide
MPTDPKM

SEQ ID NO: 6382 - protein, 7 aa, Artificial Sequence
  Description of Artificial Sequence: Synthetic peptide
MPTGTDL

SEQ ID NO: 6383 - protein, 7 aa, Artificial Sequence
  Description of Artificial Sequence: Synthetic peptide
MPTPRTG

SEQ ID NO: 6384 - protein, 7 aa, Artificial Sequence
  Description of Artificial Sequence: Synthetic peptide
MPTSGPP

SEQ ID NO: 6385 - protein, 7 aa, Artificial Sequence
  Description of Artificial Sequence: Synthetic peptide
MPTYDKR

SEQ ID NO: 6386 - protein, 7 aa, Artificial Sequence
  Description of Artificial Sequence: Synthetic peptide
MPVPERP

SEQ ID NO: 6387 - protein, 7 aa, Artificial Sequence
  Description of Artificial Sequence: Synthetic peptide
MPVSGHV

SEQ ID NO: 6388 - protein, 7 aa, Artificial Sequence
  Description of Artificial Sequence: Synthetic peptide
MPVSRLE

SEQ ID NO: 6389 - protein, 7 aa, Artificial Sequence
  Description of Artificial Sequence: Synthetic peptide
MPVSSTR

SEQ ID NO: 6390 - protein, 7 aa, Artificial Sequence
  Description of Artificial Sequence: Synthetic peptide
MPWKDAA

SEQ ID NO: 6391 - protein, 7 aa, Artificial Sequence
  Description of Artificial Sequence: Synthetic peptide
MQAASSP

SEQ ID NO: 6392 - protein, 7 aa, Artificial Sequence
  Description of Artificial Sequence: Synthetic peptide
MQAGSMR

SEQ ID NO: 6393 - protein, 7 aa, Artificial Sequence
  Description of Artificial Sequence: Synthetic peptide
MQASHSP

SEQ ID NO: 6394 - protein, 7 aa, Artificial Sequence
  Description of Artificial Sequence: Synthetic peptide
MQDGYTN

SEQ ID NO: 6395 - protein, 7 aa, Artificial Sequence
  Description of Artificial Sequence: Synthetic peptide
MQGKLLA

SEQ ID NO: 6396 - protein, 7 aa, Artificial Sequence
  Description of Artificial Sequence: Synthetic peptide
MQHGAHP

SEQ ID NO: 6397 - protein, 7 aa, Artificial Sequence
  Description of Artificial Sequence: Synthetic peptide
MQLEHSP

SEQ ID NO: 6398 - protein, 7 aa, Artificial Sequence
  Description of Artificial Sequence: Synthetic peptide
MQLGNVS

SEQ ID NO: 6399 - protein, 7 aa, Artificial Sequence
  Description of Artificial Sequence: Synthetic peptide
MQLGPVM

SEQ ID NO: 6400 - protein, 7 aa, Artificial Sequence
  Description of Artificial Sequence: Synthetic peptide
MQNMPPP

SEQ ID NO: 6401 - protein, 7 aa, Artificial Sequence
  Description of Artificial Sequence: Synthetic peptide
MQPNTSF

SEQ ID NO: 6402 - protein, 7 aa, Artificial Sequence
  Description of Artificial Sequence: Synthetic peptide
MQRRLDI

SEQ ID NO: 6403 - protein, 7 aa, Artificial Sequence
  Description of Artificial Sequence: Synthetic peptide
MQRTTHV

SEQ ID NO: 6404 - protein, 7 aa, Artificial Sequence
  Description of Artificial Sequence: Synthetic peptide
MQSRVPL

SEQ ID NO: 6405 - protein, 7 aa, Artificial Sequence
  Description of Artificial Sequence: Synthetic peptide
MQSSPDG

SEQ ID NO: 6406 - protein, 7 aa, Artificial Sequence
  Description of Artificial Sequence: Synthetic peptide
MQTATQG

SEQ ID NO: 6407 - protein, 7 aa, Artificial Sequence
  Description of Artificial Sequence: Synthetic peptide
MQTQSLP

SEQ ID NO: 6408 - protein, 7 aa, Artificial Sequence
  Description of Artificial Sequence: Synthetic peptide
MQVSERP

SEQ ID NO: 6409 - protein, 7 aa, Artificial Sequence
  Description of Artificial Sequence: Synthetic peptide
MQVSGPP

SEQ ID NO: 6410 - protein, 7 aa, Artificial Sequence
  Description of Artificial Sequence: Synthetic peptide
MQVTEGL

SEQ ID NO: 6411 - protein, 7 aa, Artificial Sequence
  Description of Artificial Sequence: Synthetic peptide
MRAGAAG

SEQ ID NO: 6412 - protein, 7 aa, Artificial Sequence
  Description of Artificial Sequence: Synthetic peptide
MRASAGM

SEQ ID NO: 6413 - protein, 7 aa, Artificial Sequence
  Description of Artificial Sequence: Synthetic peptide
MRDDAAV

SEQ ID NO: 6414 - protein, 7 aa, Artificial Sequence
  Description of Artificial Sequence: Synthetic peptide
MRDGPPN

SEQ ID NO: 6415 - protein, 7 aa, Artificial Sequence
  Description of Artificial Sequence: Synthetic peptide
MRERSSA

SEQ ID NO: 6416 - protein, 7 aa, Artificial Sequence
  Description of Artificial Sequence: Synthetic peptide
MRGDSAP

SEQ ID NO: 6417 - protein, 7 aa, Artificial Sequence
  Description of Artificial Sequence: Synthetic peptide
MRGFDEL

SEQ ID NO: 6418 - protein, 7 aa, Artificial Sequence
  Description of Artificial Sequence: Synthetic peptide
MRGTPVG

SEQ ID NO: 6419 - protein, 7 aa, Artificial Sequence
  Description of Artificial Sequence: Synthetic peptide
MRHGNPA

SEQ ID NO: 6420 - protein, 7 aa, Artificial Sequence
  Description of Artificial Sequence: Synthetic peptide
MRHVNTP

SEQ ID NO: 6421 - protein, 7 aa, Artificial Sequence
  Description of Artificial Sequence: Synthetic peptide
MRIGDRH

SEQ ID NO: 6422 - protein, 7 aa, Artificial Sequence
  Description of Artificial Sequence: Synthetic peptide
MRLSTPE

SEQ ID NO: 6423 - protein, 7 aa, Artificial Sequence
  Description of Artificial Sequence: Synthetic peptide
MRLVSAE

SEQ ID NO: 6424 - protein, 7 aa, Artificial Sequence
  Description of Artificial Sequence: Synthetic peptide
MRMAVSA

SEQ ID NO: 6425 - protein, 7 aa, Artificial Sequence
  Description of Artificial Sequence: Synthetic peptide
MRMGGVP

SEQ ID NO: 6426 - protein, 7 aa, Artificial Sequence
  Description of Artificial Sequence: Synthetic peptide
MRNAAKR

SEQ ID NO: 6427 - protein, 7 aa, Artificial Sequence
  Description of Artificial Sequence: Synthetic peptide
MRNSVYP

SEQ ID NO: 6428 - protein, 7 aa, Artificial Sequence
  Description of Artificial Sequence: Synthetic peptide
MRNTTFE

SEQ ID NO: 6429 - protein, 7 aa, Artificial Sequence
  Description of Artificial Sequence: Synthetic peptide
MRPANES

SEQ ID NO: 6430 - protein, 7 aa, Artificial Sequence
  Description of Artificial Sequence: Synthetic peptide
MRPAVGV

SEQ ID NO: 6431 - protein, 7 aa, Artificial Sequence
  Description of Artificial Sequence: Synthetic peptide
MRPGLEG

SEQ ID NO: 6432 - protein, 7 aa, Artificial Sequence
  Description of Artificial Sequence: Synthetic peptide
MRPTHAC

SEQ ID NO: 6433 - protein, 7 aa, Artificial Sequence
  Description of Artificial Sequence: Synthetic peptide
MRPTNAT

SEQ ID NO: 6434 - protein, 7 aa, Artificial Sequence
  Description of Artificial Sequence: Synthetic peptide
MRQIGYH

SEQ ID NO: 6435 - protein, 7 aa, Artificial Sequence
  Description of Artificial Sequence: Synthetic peptide
MRQVGRE

SEQ ID NO: 6436 - protein, 7 aa, Artificial Sequence
  Description of Artificial Sequence: Synthetic peptide
MRSFSYE

SEQ ID NO: 6437 - protein, 7 aa, Artificial Sequence
  Description of Artificial Sequence: Synthetic peptide
MRSNDVV

SEQ ID NO: 6438 - protein, 7 aa, Artificial Sequence
  Description of Artificial Sequence: Synthetic peptide
MRSPPLY

SEQ ID NO: 6439 - protein, 7 aa, Artificial Sequence
  Description of Artificial Sequence: Synthetic peptide
MRSQSFS

SEQ ID NO: 6440 - protein, 7 aa, Artificial Sequence
  Description of Artificial Sequence: Synthetic peptide
MRSRVDT

SEQ ID NO: 6441 - protein, 7 aa, Artificial Sequence
  Description of Artificial Sequence: Synthetic peptide
MRSVIAQ

SEQ ID NO: 6442 - protein, 7 aa, Artificial Sequence
  Description of Artificial Sequence: Synthetic peptide
MRTESTL

SEQ ID NO: 6443 - protein, 7 aa, Artificial Sequence
  Description of Artificial Sequence: Synthetic peptide
MRTNSST

SEQ ID NO: 6444 - protein, 7 aa, Artificial Sequence
  Description of Artificial Sequence: Synthetic peptide
MRTSNTA

SEQ ID NO: 6445 - protein, 7 aa, Artificial Sequence
  Description of Artificial Sequence: Synthetic peptide
MRVNTDP

SEQ ID NO: 6446 - protein, 7 aa, Artificial Sequence
  Description of Artificial Sequence: Synthetic peptide
MRVSTAA

SEQ ID NO: 6447 - protein, 7 aa, Artificial Sequence
  Description of Artificial Sequence: Synthetic peptide
MRYAPGT

SEQ ID NO: 6448 - protein, 7 aa, Artificial Sequence
  Description of Artificial Sequence: Synthetic peptide
MSADRFS

SEQ ID NO: 6449 - protein, 7 aa, Artificial Sequence
  Description of Artificial Sequence: Synthetic peptide
MSAKTYL

SEQ ID NO: 6450 - protein, 7 aa, Artificial Sequence
  Description of Artificial Sequence: Synthetic peptide
MSASIGS

SEQ ID NO: 6451 - protein, 7 aa, Artificial Sequence
  Description of Artificial Sequence: Synthetic peptide
MSAVLPH

SEQ ID NO: 6452 - protein, 7 aa, Artificial Sequence
  Description of Artificial Sequence: Synthetic peptide
MSDQLRF

SEQ ID NO: 6453 - protein, 7 aa, Artificial Sequence
  Description of Artificial Sequence: Synthetic peptide
MSDSHSR

SEQ ID NO: 6454 - protein, 7 aa, Artificial Sequence
  Description of Artificial Sequence: Synthetic peptide
MSDWNGI

SEQ ID NO: 6455 - protein, 7 aa, Artificial Sequence
  Description of Artificial Sequence: Synthetic peptide
MSEMSTH

SEQ ID NO: 6456 - protein, 7 aa, Artificial Sequence
  Description of Artificial Sequence: Synthetic peptide
MSGGSSY

SEQ ID NO: 6457 - protein, 7 aa, Artificial Sequence
  Description of Artificial Sequence: Synthetic peptide
MSGNHAT

SEQ ID NO: 6458 - protein, 7 aa, Artificial Sequence
  Description of Artificial Sequence: Synthetic peptide
MSGPQLS

SEQ ID NO: 6459 - protein, 7 aa, Artificial Sequence
  Description of Artificial Sequence: Synthetic peptide
MSGRGQI

SEQ ID NO: 6460 - protein, 7 aa, Artificial Sequence
  Description of Artificial Sequence: Synthetic peptide
MSHHSTT

SEQ ID NO: 6461 - protein, 7 aa, Artificial Sequence
  Description of Artificial Sequence: Synthetic peptide
MSHPYKP

SEQ ID NO: 6462 - protein, 7 aa, Artificial Sequence
  Description of Artificial Sequence: Synthetic peptide
MSHYLKA

SEQ ID NO: 6463 - protein, 7 aa, Artificial Sequence
  Description of Artificial Sequence: Synthetic peptide
MSIDEAE

SEQ ID NO: 6464 - protein, 7 aa, Artificial Sequence
  Description of Artificial Sequence: Synthetic peptide
MSIGTSE

SEQ ID NO: 6465 - protein, 7 aa, Artificial Sequence
  Description of Artificial Sequence: Synthetic peptide
MSIIGGV

SEQ ID NO: 6466 - protein, 7 aa, Artificial Sequence
  Description of Artificial Sequence: Synthetic peptide
MSISHTT

SEQ ID NO: 6467 - protein, 7 aa, Artificial Sequence
  Description of Artificial Sequence: Synthetic peptide
MSITHHS

SEQ ID NO: 6468 - protein, 7 aa, Artificial Sequence
  Description of Artificial Sequence: Synthetic peptide
MSKIWPS

SEQ ID NO: 6469 - protein, 7 aa, Artificial Sequence
  Description of Artificial Sequence: Synthetic peptide
MSKNLSA

SEQ ID NO: 6470 - protein, 7 aa, Artificial Sequence
  Description of Artificial Sequence: Synthetic peptide
MSKRTDS

SEQ ID NO: 6471 - protein, 7 aa, Artificial Sequence
  Description of Artificial Sequence: Synthetic peptide
MSKTIAQ

SEQ ID NO: 6472 - protein, 7 aa, Artificial Sequence
  Description of Artificial Sequence: Synthetic peptide
MSKVPFN

SEQ ID NO: 6473 - protein, 7 aa, Artificial Sequence
  Description of Artificial Sequence: Synthetic peptide
MSLANKS

SEQ ID NO: 6474 - protein, 7 aa, Artificial Sequence
  Description of Artificial Sequence: Synthetic peptide
MSLKLSG

SEQ ID NO: 6475 - protein, 7 aa, Artificial Sequence
  Description of Artificial Sequence: Synthetic peptide
MSLPSTQ

SEQ ID NO: 6476 - protein, 7 aa, Artificial Sequence
  Description of Artificial Sequence: Synthetic peptide
MSLTVTA

SEQ ID NO: 6477 - protein, 7 aa, Artificial Sequence
  Description of Artificial Sequence: Synthetic peptide
MSMHGGS

SEQ ID NO: 6478 - protein, 7 aa, Artificial Sequence
  Description of Artificial Sequence: Synthetic peptide
MSNGWQD

SEQ ID NO: 6479 - protein, 7 aa, Artificial Sequence
  Description of Artificial Sequence: Synthetic peptide
MSNIGLG

SEQ ID NO: 6480 - protein, 7 aa, Artificial Sequence
  Description of Artificial Sequence: Synthetic peptide
MSNNHGL

SEQ ID NO: 6481 - protein, 7 aa, Artificial Sequence
  Description of Artificial Sequence: Synthetic peptide
MSNSEFG

SEQ ID NO: 6482 - protein, 7 aa, Artificial Sequence
  Description of Artificial Sequence: Synthetic peptide
MSPAMQT

SEQ ID NO: 6483 - protein, 7 aa, Artificial Sequence
  Description of Artificial Sequence: Synthetic peptide
MSPDQRY

SEQ ID NO: 6484 - protein, 7 aa, Artificial Sequence
  Description of Artificial Sequence: Synthetic peptide
MSPGVNA

SEQ ID NO: 6485 - protein, 7 aa, Artificial Sequence
  Description of Artificial Sequence: Synthetic peptide
MSPHFNT

SEQ ID NO: 6486 - protein, 7 aa, Artificial Sequence
  Description of Artificial Sequence: Synthetic peptide
MSPMVTA

SEQ ID NO: 6487 - protein, 7 aa, Artificial Sequence
  Description of Artificial Sequence: Synthetic peptide
MSPSDFG

SEQ ID NO: 6488 - protein, 7 aa, Artificial Sequence
  Description of Artificial Sequence: Synthetic peptide
MSPSSPM

SEQ ID NO: 6489 - protein, 7 aa, Artificial Sequence
  Description of Artificial Sequence: Synthetic peptide
MSQQSSG

SEQ ID NO: 6490 - protein, 7 aa, Artificial Sequence
  Description of Artificial Sequence: Synthetic peptide
MSQRRDP

SEQ ID NO: 6491 - protein, 7 aa, Artificial Sequence
  Description of Artificial Sequence: Synthetic peptide
MSRDVSH

SEQ ID NO: 6492 - protein, 7 aa, Artificial Sequence
  Description of Artificial Sequence: Synthetic peptide
MSRESGG

SEQ ID NO: 6493 - protein, 7 aa, Artificial Sequence
  Description of Artificial Sequence: Synthetic peptide
MSRLDSP

SEQ ID NO: 6494 - protein, 7 aa, Artificial Sequence
  Description of Artificial Sequence: Synthetic peptide
MSRLGAT

SEQ ID NO: 6495 - protein, 7 aa, Artificial Sequence
  Description of Artificial Sequence: Synthetic peptide
MSRNLCC

SEQ ID NO: 6496 - protein, 7 aa, Artificial Sequence
  Description of Artificial Sequence: Synthetic peptide
MSSASSP

SEQ ID NO: 6497 - protein, 7 aa, Artificial Sequence
  Description of Artificial Sequence: Synthetic peptide
MSSEPVK

SEQ ID NO: 6498 - protein, 7 aa, Artificial Sequence
  Description of Artificial Sequence: Synthetic peptide
MSSHGVA

SEQ ID NO: 6499 - protein, 7 aa, Artificial Sequence
  Description of Artificial Sequence: Synthetic peptide
MSSLNSL

SEQ ID NO: 6500 - protein, 7 aa, Artificial Sequence
  Description of Artificial Sequence: Synthetic peptide
MSSLNVH

SEQ ID NO: 6501 - protein, 7 aa, Artificial Sequence
  Description of Artificial Sequence: Synthetic peptide
MSSLRQA

SEQ ID NO: 6502 - protein, 7 aa, Artificial Sequence
  Description of Artificial Sequence: Synthetic peptide
MSSPQLS

SEQ ID NO: 6503 - protein, 7 aa, Artificial Sequence
  Description of Artificial Sequence: Synthetic peptide
MSSQTSK

SEQ ID NO: 6504 - protein, 7 aa, Artificial Sequence
  Description of Artificial Sequence: Synthetic peptide
MSSRWAA

SEQ ID NO: 6505 - protein, 7 aa, Artificial Sequence
  Description of Artificial Sequence: Synthetic peptide
MSSSVHT

SEQ ID NO: 6506 - protein, 7 aa, Artificial Sequence
  Description of Artificial Sequence: Synthetic peptide
MSSTRTD

SEQ ID NO: 6507 - protein, 7 aa, Artificial Sequence
  Description of Artificial Sequence: Synthetic peptide
MSSTSYS

SEQ ID NO: 6508 - protein, 7 aa, Artificial Sequence
  Description of Artificial Sequence: Synthetic peptide
MSTEDHA

SEQ ID NO: 6509 - protein, 7 aa, Artificial Sequence
  Description of Artificial Sequence: Synthetic peptide
MSTERNA

SEQ ID NO: 6510 - protein, 7 aa, Artificial Sequence
  Description of Artificial Sequence: Synthetic peptide
MSTFPPP

SEQ ID NO: 6511 - protein, 7 aa, Artificial Sequence
  Description of Artificial Sequence: Synthetic peptide
MSTGRLI

SEQ ID NO: 6512 - protein, 7 aa, Artificial Sequence
  Description of Artificial Sequence: Synthetic peptide
MSTHVVS

SEQ ID NO: 6513 - protein, 7 aa, Artificial Sequence
  Description of Artificial Sequence: Synthetic peptide
MSTLPHA

SEQ ID NO: 6514 - protein, 7 aa, Artificial Sequence
  Description of Artificial Sequence: Synthetic peptide
MSTMQRS

SEQ ID NO: 6515 - protein, 7 aa, Artificial Sequence
  Description of Artificial Sequence: Synthetic peptide
MSTNFKG

SEQ ID NO: 6516 - protein, 7 aa, Artificial Sequence
  Description of Artificial Sequence: Synthetic peptide
MSTNTHL

SEQ ID NO: 6517 - protein, 7 aa, Artificial Sequence
  Description of Artificial Sequence: Synthetic peptide
MSTRIAN

SEQ ID NO: 6518 - protein, 7 aa, Artificial Sequence
  Description of Artificial Sequence: Synthetic peptide
MSTRPMP

SEQ ID NO: 6519 - protein, 7 aa, Artificial Sequence
  Description of Artificial Sequence: Synthetic peptide
MSTRSPS

SEQ ID NO: 6520 - protein, 7 aa, Artificial Sequence
  Description of Artificial Sequence: Synthetic peptide
MSVPHGD

SEQ ID NO: 6521 - protein, 7 aa, Artificial Sequence
  Description of Artificial Sequence: Synthetic peptide
MSYPYQN

SEQ ID NO: 6522 - protein, 7 aa, Artificial Sequence
  Description of Artificial Sequence: Synthetic peptide
MSYQKPS

SEQ ID NO: 6523 - protein, 7 aa, Artificial Sequence
  Description of Artificial Sequence: Synthetic peptide
MSYTSDS

SEQ ID NO: 6524 - protein, 7 aa, Artificial Sequence
  Description of Artificial Sequence: Synthetic peptide
MTANTAL

SEQ ID NO: 6525 - protein, 7 aa, Artificial Sequence
  Description of Artificial Sequence: Synthetic peptide
MTDITGR

SEQ ID NO: 6526 - protein, 7 aa, Artificial Sequence
  Description of Artificial Sequence: Synthetic peptide
MTDSQPG

SEQ ID NO: 6527 - protein, 7 aa, Artificial Sequence
  Description of Artificial Sequence: Synthetic peptide
MTDTRRL

SEQ ID NO: 6528 - protein, 7 aa, Artificial Sequence
  Description of Artificial Sequence: Synthetic peptide
MTDVGVR

SEQ ID NO: 6529 - protein, 7 aa, Artificial Sequence
  Description of Artificial Sequence: Synthetic peptide
MTDYSKG

SEQ ID NO: 6530 - protein, 7 aa, Artificial Sequence
  Description of Artificial Sequence: Synthetic peptide
MTEPMVD

SEQ ID NO: 6531 - protein, 7 aa, Artificial Sequence
  Description of Artificial Sequence: Synthetic peptide
MTESLTA

SEQ ID NO: 6532 - protein, 7 aa, Artificial Sequence
  Description of Artificial Sequence: Synthetic peptide
MTEVTTF

SEQ ID NO: 6533 - protein, 7 aa, Artificial Sequence
  Description of Artificial Sequence: Synthetic peptide
MTFPKLN

SEQ ID NO: 6534 - protein, 7 aa, Artificial Sequence
  Description of Artificial Sequence: Synthetic peptide
MTGMTSA

SEQ ID NO: 6535 - protein, 7 aa, Artificial Sequence
  Description of Artificial Sequence: Synthetic peptide
MTGNHRI

SEQ ID NO: 6536 - protein, 7 aa, Artificial Sequence
  Description of Artificial Sequence: Synthetic peptide
MTGTSQP

SEQ ID NO: 6537 - protein, 7 aa, Artificial Sequence
  Description of Artificial Sequence: Synthetic peptide
MTHPPSD

SEQ ID NO: 6538 - protein, 7 aa, Artificial Sequence
  Description of Artificial Sequence: Synthetic peptide
MTHTGTL

SEQ ID NO: 6539 - protein, 7 aa, Artificial Sequence
  Description of Artificial Sequence: Synthetic peptide
MTKPHIV

SEQ ID NO: 6540 - protein, 7 aa, Artificial Sequence
  Description of Artificial Sequence: Synthetic peptide
MTLGSVV

SEQ ID NO: 6541 - protein, 7 aa, Artificial Sequence
  Description of Artificial Sequence: Synthetic peptide
MTLHQQF

SEQ ID NO: 6542 - protein, 7 aa, Artificial Sequence
  Description of Artificial Sequence: Synthetic peptide
MTLSTGA

SEQ ID NO: 6543 - protein, 7 aa, Artificial Sequence
  Description of Artificial Sequence: Synthetic peptide
MTLVASP

SEQ ID NO: 6544 - protein, 7 aa, Artificial Sequence
  Description of Artificial Sequence: Synthetic peptide
MTMEAAK

SEQ ID NO: 6545 - protein, 7 aa, Artificial Sequence
  Description of Artificial Sequence: Synthetic peptide
MTMGEFK

SEQ ID NO: 6546 - protein, 7 aa, Artificial Sequence
  Description of Artificial Sequence: Synthetic peptide
MTMTHRG

SEQ ID NO: 6547 - protein, 7 aa, Artificial Sequence
  Description of Artificial Sequence: Synthetic peptide
MTNAVVD

SEQ ID NO: 6548 - protein, 7 aa, Artificial Sequence
  Description of Artificial Sequence: Synthetic peptide
MTNGHGM

SEQ ID NO: 6549 - protein, 7 aa, Artificial Sequence
  Description of Artificial Sequence: Synthetic peptide
MTNLQSL

SEQ ID NO: 6550 - protein, 7 aa, Artificial Sequence
  Description of Artificial Sequence: Synthetic peptide
MTNRATA

SEQ ID NO: 6551 - protein, 7 aa, Artificial Sequence
  Description of Artificial Sequence: Synthetic peptide
MTPHNSR

SEQ ID NO: 6552 - protein, 7 aa, Artificial Sequence
  Description of Artificial Sequence: Synthetic peptide
MTPPHGA

SEQ ID NO: 6553 - protein, 7 aa, Artificial Sequence
  Description of Artificial Sequence: Synthetic peptide
MTPTSYN

SEQ ID NO: 6554 - protein, 7 aa, Artificial Sequence
  Description of Artificial Sequence: Synthetic peptide
MTQTDVT

SEQ ID NO: 6555 - protein, 7 aa, Artificial Sequence
  Description of Artificial Sequence: Synthetic peptide
MTRSEWS

SEQ ID NO: 6556 - protein, 7 aa, Artificial Sequence
  Description of Artificial Sequence: Synthetic peptide
MTSLAAL

SEQ ID NO: 6557 - protein, 7 aa, Artificial Sequence
  Description of Artificial Sequence: Synthetic peptide
MTSNTRM

SEQ ID NO: 6558 - protein, 7 aa, Artificial Sequence
  Description of Artificial Sequence: Synthetic peptide
MTSVRMS

SEQ ID NO: 6559 - protein, 7 aa, Artificial Sequence
  Description of Artificial Sequence: Synthetic peptide
MTTGIDS

SEQ ID NO: 6560 - protein, 7 aa, Artificial Sequence
  Description of Artificial Sequence: Synthetic peptide
MTTSPFA

SEQ ID NO: 6561 - protein, 7 aa, Artificial Sequence
  Description of Artificial Sequence: Synthetic peptide
MTTSSDL

SEQ ID NO: 6562 - protein, 7 aa, Artificial Sequence
  Description of Artificial Sequence: Synthetic peptide
MTVGDSA

SEQ ID NO: 6563 - protein, 7 aa, Artificial Sequence
  Description of Artificial Sequence: Synthetic peptide
MTVGIPA

SEQ ID NO: 6564 - protein, 7 aa, Artificial Sequence
  Description of Artificial Sequence: Synthetic peptide
MTVSNKY

SEQ ID NO: 6565 - protein, 7 aa, Artificial Sequence
  Description of Artificial Sequence: Synthetic peptide
MTVSPGT

SEQ ID NO: 6566 - protein, 7 aa, Artificial Sequence
  Description of Artificial Sequence: Synthetic peptide
MVASDNS

SEQ ID NO: 6567 - protein, 7 aa, Artificial Sequence
  Description of Artificial Sequence: Synthetic peptide
MVDRVLD

SEQ ID NO: 6568 - protein, 7 aa, Artificial Sequence
  Description of Artificial Sequence: Synthetic peptide
MVELTWE

SEQ ID NO: 6569 - protein, 7 aa, Artificial Sequence
  Description of Artificial Sequence: Synthetic peptide
MVGFGAA

SEQ ID NO: 6570 - protein, 7 aa, Artificial Sequence
  Description of Artificial Sequence: Synthetic peptide
MVGQVKN

SEQ ID NO: 6571 - protein, 7 aa, Artificial Sequence
  Description of Artificial Sequence: Synthetic peptide
MVGRPIV

SEQ ID NO: 6572 - protein, 7 aa, Artificial Sequence
  Description of Artificial Sequence: Synthetic peptide
MVGRTGG

SEQ ID NO: 6573 - protein, 7 aa, Artificial Sequence
  Description of Artificial Sequence: Synthetic peptide
MVGRVPS

SEQ ID NO: 6574 - protein, 7 aa, Artificial Sequence
  Description of Artificial Sequence: Synthetic peptide
MVHSSAH

SEQ ID NO: 6575 - protein, 7 aa, Artificial Sequence
  Description of Artificial Sequence: Synthetic peptide
MVHSSES

SEQ ID NO: 6576 - protein, 7 aa, Artificial Sequence
  Description of Artificial Sequence: Synthetic peptide
MVIHPDH

SEQ ID NO: 6577 - protein, 7 aa, Artificial Sequence
  Description of Artificial Sequence: Synthetic peptide
MVLKLAA

SEQ ID NO: 6578 - protein, 7 aa, Artificial Sequence
  Description of Artificial Sequence: Synthetic peptide
MVNVIMP

SEQ ID NO: 6579 - protein, 7 aa, Artificial Sequence
  Description of Artificial Sequence: Synthetic peptide
MVNYLDV

SEQ ID NO: 6580 - protein, 7 aa, Artificial Sequence
  Description of Artificial Sequence: Synthetic peptide
MVPGNSG

SEQ ID NO: 6581 - protein, 7 aa, Artificial Sequence
  Description of Artificial Sequence: Synthetic peptide
MVPRENL

SEQ ID NO: 6582 - protein, 7 aa, Artificial Sequence
  Description of Artificial Sequence: Synthetic peptide
MVPSQHS

SEQ ID NO: 6583 - protein, 7 aa, Artificial Sequence
  Description of Artificial Sequence: Synthetic peptide
MVPSSEM

SEQ ID NO: 6584 - protein, 7 aa, Artificial Sequence
  Description of Artificial Sequence: Synthetic peptide
MVQRTTT

SEQ ID NO: 6585 - protein, 7 aa, Artificial Sequence
  Description of Artificial Sequence: Synthetic peptide
MVRALPC

SEQ ID NO: 6586 - protein, 7 aa, Artificial Sequence
  Description of Artificial Sequence: Synthetic peptide
MVSNRQT

SEQ ID NO: 6587 - protein, 7 aa, Artificial Sequence
  Description of Artificial Sequence: Synthetic peptide
MVSPSPT

SEQ ID NO: 6588 - protein, 7 aa, Artificial Sequence
  Description of Artificial Sequence: Synthetic peptide
MVSVDRD

SEQ ID NO: 6589 - protein, 7 aa, Artificial Sequence
  Description of Artificial Sequence: Synthetic peptide
MVTLTPG

SEQ ID NO: 6590 - protein, 7 aa, Artificial Sequence
  Description of Artificial Sequence: Synthetic peptide
MVTNVTK

SEQ ID NO: 6591 - protein, 7 aa, Artificial Sequence
  Description of Artificial Sequence: Synthetic peptide
MVTRPES

SEQ ID NO: 6592 - protein, 7 aa, Artificial Sequence
  Description of Artificial Sequence: Synthetic peptide
MVTSSTS

SEQ ID NO: 6593 - protein, 7 aa, Artificial Sequence
  Description of Artificial Sequence: Synthetic peptide
MVTYGQQ

SEQ ID NO: 6594 - protein, 7 aa, Artificial Sequence
  Description of Artificial Sequence: Synthetic peptide
MVVHHNN

SEQ ID NO: 6595 - protein, 7 aa, Artificial Sequence
  Description of Artificial Sequence: Synthetic peptide
MVVKMVS

SEQ ID NO: 6596 - protein, 7 aa, Artificial Sequence
  Description of Artificial Sequence: Synthetic peptide
MWNKEHD

SEQ ID NO: 6597 - protein, 7 aa, Artificial Sequence
  Description of Artificial Sequence: Synthetic peptide
MYDNDVW

SEQ ID NO: 6598 - protein, 7 aa, Artificial Sequence
  Description of Artificial Sequence: Synthetic peptide
MYDRSGL

SEQ ID NO: 6599 - protein, 7 aa, Artificial Sequence
  Description of Artificial Sequence: Synthetic peptide
MYESRGV

SEQ ID NO: 6600 - protein, 7 aa, Artificial Sequence
  Description of Artificial Sequence: Synthetic peptide
MYPGMMM

SEQ ID NO: 6601 - protein, 7 aa, Artificial Sequence
  Description of Artificial Sequence: Synthetic peptide
MYPSGIV

SEQ ID NO: 6602 - protein, 7 aa, Artificial Sequence
  Description of Artificial Sequence: Synthetic peptide
MYPTHTG

SEQ ID NO: 6603 - protein, 7 aa, Artificial Sequence
  Description of Artificial Sequence: Synthetic peptide
MYPVRLD

SEQ ID NO: 6604 - protein, 7 aa, Artificial Sequence
  Description of Artificial Sequence: Synthetic peptide
MYQEHTE

SEQ ID NO: 6605 - protein, 7 aa, Artificial Sequence
  Description of Artificial Sequence: Synthetic peptide
MYQQAHS

SEQ ID NO: 6606 - protein, 7 aa, Artificial Sequence
  Description of Artificial Sequence: Synthetic peptide
MYRDELT

SEQ ID NO: 6607 - protein, 7 aa, Artificial Sequence
  Description of Artificial Sequence: Synthetic peptide
MYSMSNV

SEQ ID NO: 6608 - protein, 7 aa, Artificial Sequence
  Description of Artificial Sequence: Synthetic peptide
MYSTQSS

SEQ ID NO: 6609 - protein, 7 aa, Artificial Sequence
  Description of Artificial Sequence: Synthetic peptide
MYTSMAG

SEQ ID NO: 6610 - protein, 7 aa, Artificial Sequence
  Description of Artificial Sequence: Synthetic peptide
MYVAASP

SEQ ID NO: 6611 - protein, 7 aa, Artificial Sequence
  Description of Artificial Sequence: Synthetic peptide
NAAPSTI

SEQ ID NO: 6612 - protein, 7 aa, Artificial Sequence
  Description of Artificial Sequence: Synthetic peptide
NAARLTS

SEQ ID NO: 6613 - protein, 7 aa, Artificial Sequence
  Description of Artificial Sequence: Synthetic peptide
NAASPGF

SEQ ID NO: 6614 - protein, 7 aa, Artificial Sequence
  Description of Artificial Sequence: Synthetic peptide
NAASQSP

SEQ ID NO: 6615 - protein, 7 aa, Artificial Sequence
  Description of Artificial Sequence: Synthetic peptide
NADALGS

SEQ ID NO: 6616 - protein, 7 aa, Artificial Sequence
  Description of Artificial Sequence: Synthetic peptide
NADPRDR

SEQ ID NO: 6617 - protein, 7 aa, Artificial Sequence
  Description of Artificial Sequence: Synthetic peptide
NADRRSE

SEQ ID NO: 6618 - protein, 7 aa, Artificial Sequence
  Description of Artificial Sequence: Synthetic peptide
NAEAFLD

SEQ ID NO: 6619 - protein, 7 aa, Artificial Sequence
  Description of Artificial Sequence: Synthetic peptide
NAEDRTV

SEQ ID NO: 6620 - protein, 7 aa, Artificial Sequence
  Description of Artificial Sequence: Synthetic peptide
NAFSTST

SEQ ID NO: 6621 - protein, 7 aa, Artificial Sequence
  Description of Artificial Sequence: Synthetic peptide
NAGGTWD

SEQ ID NO: 6622 - protein, 7 aa, Artificial Sequence
  Description of Artificial Sequence: Synthetic peptide
NAGTRQA

SEQ ID NO: 6623 - protein, 7 aa, Artificial Sequence
  Description of Artificial Sequence: Synthetic peptide
NAHLSLN

SEQ ID NO: 6624 - protein, 7 aa, Artificial Sequence
  Description of Artificial Sequence: Synthetic peptide
NAHSTLV

SEQ ID NO: 6625 - protein, 7 aa, Artificial Sequence
  Description of Artificial Sequence: Synthetic peptide
NAHTDRQ

SEQ ID NO: 6626 - protein, 7 aa, Artificial Sequence
  Description of Artificial Sequence: Synthetic peptide
NAHTQIQ

SEQ ID NO: 6627 - protein, 7 aa, Artificial Sequence
  Description of Artificial Sequence: Synthetic peptide
NAKALAM

SEQ ID NO: 6628 - protein, 7 aa, Artificial Sequence
  Description of Artificial Sequence: Synthetic peptide
NAKSTIG

SEQ ID NO: 6629 - protein, 7 aa, Artificial Sequence
  Description of Artificial Sequence: Synthetic peptide
NALARSG

SEQ ID NO: 6630 - protein, 7 aa, Artificial Sequence
  Description of Artificial Sequence: Synthetic peptide
NALDDNV

SEQ ID NO: 6631 - protein, 7 aa, Artificial Sequence
  Description of Artificial Sequence: Synthetic peptide
NALDRSM

SEQ ID NO: 6632 - protein, 7 aa, Artificial Sequence
  Description of Artificial Sequence: Synthetic peptide
NALEASG

SEQ ID NO: 6633 - protein, 7 aa, Artificial Sequence
  Description of Artificial Sequence: Synthetic peptide
NALNPNF

SEQ ID NO: 6634 - protein, 7 aa, Artificial Sequence
  Description of Artificial Sequence: Synthetic peptide
NALRSYS

SEQ ID NO: 6635 - protein, 7 aa, Artificial Sequence
  Description of Artificial Sequence: Synthetic peptide
NALSHVT

SEQ ID NO: 6636 - protein, 7 aa, Artificial Sequence
  Description of Artificial Sequence: Synthetic peptide
NALVSES

SEQ ID NO: 6637 - protein, 7 aa, Artificial Sequence
  Description of Artificial Sequence: Synthetic peptide
NANGSRV

SEQ ID NO: 6638 - protein, 7 aa, Artificial Sequence
  Description of Artificial Sequence: Synthetic peptide
NANHQNV

SEQ ID NO: 6639 - protein, 7 aa, Artificial Sequence
  Description of Artificial Sequence: Synthetic peptide
NANLNSA

SEQ ID NO: 6640 - protein, 7 aa, Artificial Sequence
  Description of Artificial Sequence: Synthetic peptide
NANTGRL

SEQ ID NO: 6641 - protein, 7 aa, Artificial Sequence
  Description of Artificial Sequence: Synthetic peptide
NANVPNR

SEQ ID NO: 6642 - protein, 7 aa, Artificial Sequence
  Description of Artificial Sequence: Synthetic peptide
NAPRSAV

SEQ ID NO: 6643 - protein, 7 aa, Artificial Sequence
  Description of Artificial Sequence: Synthetic peptide
NAPSESR

SEQ ID NO: 6644 - protein, 7 aa, Artificial Sequence
  Description of Artificial Sequence: Synthetic peptide
NAQIRPM

SEQ ID NO: 6645 - protein, 7 aa, Artificial Sequence
  Description of Artificial Sequence: Synthetic peptide
NARLSTS

SEQ ID NO: 6646 - protein, 7 aa, Artificial Sequence
  Description of Artificial Sequence: Synthetic peptide
NARMLAS

SEQ ID NO: 6647 - protein, 7 aa, Artificial Sequence
  Description of Artificial Sequence: Synthetic peptide
NARPHDP

SEQ ID NO: 6648 - protein, 7 aa, Artificial Sequence
  Description of Artificial Sequence: Synthetic peptide
NARPSDM

SEQ ID NO: 6649 - protein, 7 aa, Artificial Sequence
  Description of Artificial Sequence: Synthetic peptide
NARSIDY

SEQ ID NO: 6650 - protein, 7 aa, Artificial Sequence
  Description of Artificial Sequence: Synthetic peptide
NARSSSY

SEQ ID NO: 6651 - protein, 7 aa, Artificial Sequence
  Description of Artificial Sequence: Synthetic peptide
NARVEAP

SEQ ID NO: 6652 - protein, 7 aa, Artificial Sequence
  Description of Artificial Sequence: Synthetic peptide
NARYTHS

SEQ ID NO: 6653 - protein, 7 aa, Artificial Sequence
  Description of Artificial Sequence: Synthetic peptide
NASGLPR

SEQ ID NO: 6654 - protein, 7 aa, Artificial Sequence
  Description of Artificial Sequence: Synthetic peptide
NASIHSH

SEQ ID NO: 6655 - protein, 7 aa, Artificial Sequence
  Description of Artificial Sequence: Synthetic peptide
NASLPLS

SEQ ID NO: 6656 - protein, 7 aa, Artificial Sequence
  Description of Artificial Sequence: Synthetic peptide
NASNSEK

SEQ ID NO: 6657 - protein, 7 aa, Artificial Sequence
  Description of Artificial Sequence: Synthetic peptide
NASPIRL

SEQ ID NO: 6658 - protein, 7 aa, Artificial Sequence
  Description of Artificial Sequence: Synthetic peptide
NASSRSL

SEQ ID NO: 6659 - protein, 7 aa, Artificial Sequence
  Description of Artificial Sequence: Synthetic peptide
NASTVPE

SEQ ID NO: 6660 - protein, 7 aa, Artificial Sequence
  Description of Artificial Sequence: Synthetic peptide
NATADGF

SEQ ID NO: 6661 - protein, 7 aa, Artificial Sequence
  Description of Artificial Sequence: Synthetic peptide
NATHPNF

SEQ ID NO: 6662 - protein, 7 aa, Artificial Sequence
  Description of Artificial Sequence: Synthetic peptide
NATHTST

SEQ ID NO: 6663 - protein, 7 aa, Artificial Sequence
  Description of Artificial Sequence: Synthetic peptide
NATPVAV

SEQ ID NO: 6664 - protein, 7 aa, Artificial Sequence
  Description of Artificial Sequence: Synthetic peptide
NATSGSH

SEQ ID NO: 6665 - protein, 7 aa, Artificial Sequence
  Description of Artificial Sequence: Synthetic peptide
NATSTLC

SEQ ID NO: 6666 - protein, 7 aa, Artificial Sequence
  Description of Artificial Sequence: Synthetic peptide
NATSYTM

SEQ ID NO: 6667 - protein, 7 aa, Artificial Sequence
  Description of Artificial Sequence: Synthetic peptide
NATVSPR

SEQ ID NO: 6668 - protein, 7 aa, Artificial Sequence
  Description of Artificial Sequence: Synthetic peptide
NAVPGRS

SEQ ID NO: 6669 - protein, 7 aa, Artificial Sequence
  Description of Artificial Sequence: Synthetic peptide
NAVPIPP

SEQ ID NO: 6670 - protein, 7 aa, Artificial Sequence
  Description of Artificial Sequence: Synthetic peptide
NAVQSLM

SEQ ID NO: 6671 - protein, 7 aa, Artificial Sequence
  Description of Artificial Sequence: Synthetic peptide
NAVSVNS

SEQ ID NO: 6672 - protein, 7 aa, Artificial Sequence
  Description of Artificial Sequence: Synthetic peptide
NAWKTPV

SEQ ID NO: 6673 - protein, 7 aa, Artificial Sequence
  Description of Artificial Sequence: Synthetic peptide
NAYTTGP

SEQ ID NO: 6674 - protein, 7 aa, Artificial Sequence
  Description of Artificial Sequence: Synthetic peptide
NCDAVAW

SEQ ID NO: 6675 - protein, 7 aa, Artificial Sequence
  Description of Artificial Sequence: Synthetic peptide
NDDIQRK

SEQ ID NO: 6676 - protein, 7 aa, Artificial Sequence
  Description of Artificial Sequence: Synthetic peptide
NDGHRNF

SEQ ID NO: 6677 - protein, 7 aa, Artificial Sequence
  Description of Artificial Sequence: Synthetic peptide
NDILLLS

SEQ ID NO: 6678 - protein, 7 aa, Artificial Sequence
  Description of Artificial Sequence: Synthetic peptide
NDITEVP

SEQ ID NO: 6679 - protein, 7 aa, Artificial Sequence
  Description of Artificial Sequence: Synthetic peptide
NDKFRLS

SEQ ID NO: 6680 - protein, 7 aa, Artificial Sequence
  Description of Artificial Sequence: Synthetic peptide
NDKMLQR

SEQ ID NO: 6681 - protein, 7 aa, Artificial Sequence
  Description of Artificial Sequence: Synthetic peptide
NDPKVPQ

SEQ ID NO: 6682 - protein, 7 aa, Artificial Sequence
  Description of Artificial Sequence: Synthetic peptide
NDPMTSQ

SEQ ID NO: 6683 - protein, 7 aa, Artificial Sequence
  Description of Artificial Sequence: Synthetic peptide
NDRMKNS

SEQ ID NO: 6684 - protein, 7 aa, Artificial Sequence
  Description of Artificial Sequence: Synthetic peptide
NDRSKYP

SEQ ID NO: 6685 - protein, 7 aa, Artificial Sequence
  Description of Artificial Sequence: Synthetic peptide
NDSSLGA

SEQ ID NO: 6686 - protein, 7 aa, Artificial Sequence
  Description of Artificial Sequence: Synthetic peptide
NDSSSTM

SEQ ID NO: 6687 - protein, 7 aa, Artificial Sequence
  Description of Artificial Sequence: Synthetic peptide
NDTFSSL

SEQ ID NO: 6688 - protein, 7 aa, Artificial Sequence
  Description of Artificial Sequence: Synthetic peptide
NDTGALM

SEQ ID NO: 6689 - protein, 7 aa, Artificial Sequence
  Description of Artificial Sequence: Synthetic peptide
NDTYRTS

SEQ ID NO: 6690 - protein, 7 aa, Artificial Sequence
  Description of Artificial Sequence: Synthetic peptide
NDVPNTP

SEQ ID NO: 6691 - protein, 7 aa, Artificial Sequence
  Description of Artificial Sequence: Synthetic peptide
NDVTTHK

SEQ ID NO: 6692 - protein, 7 aa, Artificial Sequence
  Description of Artificial Sequence: Synthetic peptide
NDWLIAG

SEQ ID NO: 6693 - protein, 7 aa, Artificial Sequence
  Description of Artificial Sequence: Synthetic peptide
NEALSQL

SEQ ID NO: 6694 - protein, 7 aa, Artificial Sequence
  Description of Artificial Sequence: Synthetic peptide
NEAVASM

SEQ ID NO: 6695 - protein, 7 aa, Artificial Sequence
  Description of Artificial Sequence: Synthetic peptide
NECDDLM

SEQ ID NO: 6696 - protein, 7 aa, Artificial Sequence
  Description of Artificial Sequence: Synthetic peptide
NEGFLLG

SEQ ID NO: 6697 - protein, 7 aa, Artificial Sequence
  Description of Artificial Sequence: Synthetic peptide
NEHHKTE

SEQ ID NO: 6698 - protein, 7 aa, Artificial Sequence
  Description of Artificial Sequence: Synthetic peptide
NEIFTPM

SEQ ID NO: 6699 - protein, 7 aa, Artificial Sequence
  Description of Artificial Sequence: Synthetic peptide
NELASRA

SEQ ID NO: 6700 - protein, 7 aa, Artificial Sequence
  Description of Artificial Sequence: Synthetic peptide
NELGGHH

SEQ ID NO: 6701 - protein, 7 aa, Artificial Sequence
  Description of Artificial Sequence: Synthetic peptide
NELVSKT

SEQ ID NO: 6702 - protein, 7 aa, Artificial Sequence
  Description of Artificial Sequence: Synthetic peptide
NEMSGQR

SEQ ID NO: 6703 - protein, 7 aa, Artificial Sequence
  Description of Artificial Sequence: Synthetic peptide
NEPLGMR

SEQ ID NO: 6704 - protein, 7 aa, Artificial Sequence
  Description of Artificial Sequence: Synthetic peptide
NEQHATH

SEQ ID NO: 6705 - protein, 7 aa, Artificial Sequence
  Description of Artificial Sequence: Synthetic peptide
NERGSSW

SEQ ID NO: 6706 - protein, 7 aa, Artificial Sequence
  Description of Artificial Sequence: Synthetic peptide
NERHHQV

SEQ ID NO: 6707 - protein, 7 aa, Artificial Sequence
  Description of Artificial Sequence: Synthetic peptide
NERNVQL

SEQ ID NO: 6708 - protein, 7 aa, Artificial Sequence
  Description of Artificial Sequence: Synthetic peptide
NERRVVL

SEQ ID NO: 6709 - protein, 7 aa, Artificial Sequence
  Description of Artificial Sequence: Synthetic peptide
NESHKNV

SEQ ID NO: 6710 - protein, 7 aa, Artificial Sequence
  Description of Artificial Sequence: Synthetic peptide
NESLRTA

SEQ ID NO: 6711 - protein, 7 aa, Artificial Sequence
  Description of Artificial Sequence: Synthetic peptide
NESLTSA

SEQ ID NO: 6712 - protein, 7 aa, Artificial Sequence
  Description of Artificial Sequence: Synthetic peptide
NESVRSY

SEQ ID NO: 6713 - protein, 7 aa, Artificial Sequence
  Description of Artificial Sequence: Synthetic peptide
NEYVLGL

SEQ ID NO: 6714 - protein, 7 aa, Artificial Sequence
  Description of Artificial Sequence: Synthetic peptide
NFAARSY

SEQ ID NO: 6715 - protein, 7 aa, Artificial Sequence
  Description of Artificial Sequence: Synthetic peptide
NFDRHGA

SEQ ID NO: 6716 - protein, 7 aa, Artificial Sequence
  Description of Artificial Sequence: Synthetic peptide
NFDRPRT

SEQ ID NO: 6717 - protein, 7 aa, Artificial Sequence
  Description of Artificial Sequence: Synthetic peptide
NFNTRVA

SEQ ID NO: 6718 - protein, 7 aa, Artificial Sequence
  Description of Artificial Sequence: Synthetic peptide
NFRVSSG

SEQ ID NO: 6719 - protein, 7 aa, Artificial Sequence
  Description of Artificial Sequence: Synthetic peptide
NFSPTSP

SEQ ID NO: 6720 - protein, 7 aa, Artificial Sequence
  Description of Artificial Sequence: Synthetic peptide
NFTKAGA

SEQ ID NO: 6721 - protein, 7 aa, Artificial Sequence
  Description of Artificial Sequence: Synthetic peptide
NFTKSAG

SEQ ID NO: 6722 - protein, 7 aa, Artificial Sequence
  Description of Artificial Sequence: Synthetic peptide
NFTLKPI

SEQ ID NO: 6723 - protein, 7 aa, Artificial Sequence
  Description of Artificial Sequence: Synthetic peptide
NFVGVPT

SEQ ID NO: 6724 - protein, 7 aa, Artificial Sequence
  Description of Artificial Sequence: Synthetic peptide
NFVVPSD

SEQ ID NO: 6725 - protein, 7 aa, Artificial Sequence
  Description of Artificial Sequence: Synthetic peptide
NGAAEVA

SEQ ID NO: 6726 - protein, 7 aa, Artificial Sequence
  Description of Artificial Sequence: Synthetic peptide
NGADRAS

SEQ ID NO: 6727 - protein, 7 aa, Artificial Sequence
  Description of Artificial Sequence: Synthetic peptide
NGAGLTI

SEQ ID NO: 6728 - protein, 7 aa, Artificial Sequence
  Description of Artificial Sequence: Synthetic peptide
NGALRLP

SEQ ID NO: 6729 - protein, 7 aa, Artificial Sequence
  Description of Artificial Sequence: Synthetic peptide
NGDACPS

SEQ ID NO: 6730 - protein, 7 aa, Artificial Sequence
  Description of Artificial Sequence: Synthetic peptide
NGEAQAR

SEQ ID NO: 6731 - protein, 7 aa, Artificial Sequence
  Description of Artificial Sequence: Synthetic peptide
NGEPFSI

SEQ ID NO: 6732 - protein, 7 aa, Artificial Sequence
  Description of Artificial Sequence: Synthetic peptide
NGGAYTL

SEQ ID NO: 6733 - protein, 7 aa, Artificial Sequence
  Description of Artificial Sequence: Synthetic peptide
NGGISRT

SEQ ID NO: 6734 - protein, 7 aa, Artificial Sequence
  Description of Artificial Sequence: Synthetic peptide
NGGNLLL

SEQ ID NO: 6735 - protein, 7 aa, Artificial Sequence
  Description of Artificial Sequence: Synthetic peptide
NGHFVDA

SEQ ID NO: 6736 - protein, 7 aa, Artificial Sequence
  Description of Artificial Sequence: Synthetic peptide
NGHNHML

SEQ ID NO: 6737 - protein, 7 aa, Artificial Sequence
  Description of Artificial Sequence: Synthetic peptide
NGHSVSE

SEQ ID NO: 6738 - protein, 7 aa, Artificial Sequence
  Description of Artificial Sequence: Synthetic peptide
NGKNGST

SEQ ID NO: 6739 - protein, 7 aa, Artificial Sequence
  Description of Artificial Sequence: Synthetic peptide
NGLQTGV

SEQ ID NO: 6740 - protein, 7 aa, Artificial Sequence
  Description of Artificial Sequence: Synthetic peptide
NGMGAVV

SEQ ID NO: 6741 - protein, 7 aa, Artificial Sequence
  Description of Artificial Sequence: Synthetic peptide
NGMQPLN

SEQ ID NO: 6742 - protein, 7 aa, Artificial Sequence
  Description of Artificial Sequence: Synthetic peptide
NGMYPYP

SEQ ID NO: 6743 - protein, 7 aa, Artificial Sequence
  Description of Artificial Sequence: Synthetic peptide
NGNEVLS

SEQ ID NO: 6744 - protein, 7 aa, Artificial Sequence
  Description of Artificial Sequence: Synthetic peptide
NGPHRMV

SEQ ID NO: 6745 - protein, 7 aa, Artificial Sequence
  Description of Artificial Sequence: Synthetic peptide
NGPPAVG

SEQ ID NO: 6746 - protein, 7 aa, Artificial Sequence
  Description of Artificial Sequence: Synthetic peptide
NGPPKGI

SEQ ID NO: 6747 - protein, 7 aa, Artificial Sequence
  Description of Artificial Sequence: Synthetic peptide
NGPSAQQ

SEQ ID NO: 6748 - protein, 7 aa, Artificial Sequence
  Description of Artificial Sequence: Synthetic peptide
NGQAEPA

SEQ ID NO: 6749 - protein, 7 aa, Artificial Sequence
  Description of Artificial Sequence: Synthetic peptide
NGSHIDR

SEQ ID NO: 6750 - protein, 7 aa, Artificial Sequence
  Description of Artificial Sequence: Synthetic peptide
NGSWVPA

SEQ ID NO: 6751 - protein, 7 aa, Artificial Sequence
  Description of Artificial Sequence: Synthetic peptide
NGSYQPP

SEQ ID NO: 6752 - protein, 7 aa, Artificial Sequence
  Description of Artificial Sequence: Synthetic peptide
NGTQLLS

SEQ ID NO: 6753 - protein, 7 aa, Artificial Sequence
  Description of Artificial Sequence: Synthetic peptide
NGTTALF

SEQ ID NO: 6754 - protein, 7 aa, Artificial Sequence
  Description of Artificial Sequence: Synthetic peptide
NGTYSVE

SEQ ID NO: 6755 - protein, 7 aa, Artificial Sequence
  Description of Artificial Sequence: Synthetic peptide
NGVLLHA

SEQ ID NO: 6756 - protein, 7 aa, Artificial Sequence
  Description of Artificial Sequence: Synthetic peptide
NGVPSLG

SEQ ID NO: 6757 - protein, 7 aa, Artificial Sequence
  Description of Artificial Sequence: Synthetic peptide
NGYAVSA

SEQ ID NO: 6758 - protein, 7 aa, Artificial Sequence
  Description of Artificial Sequence: Synthetic peptide
NGYTRDE

SEQ ID NO: 6759 - protein, 7 aa, Artificial Sequence
  Description of Artificial Sequence: Synthetic peptide
NHASNTT

SEQ ID NO: 6760 - protein, 7 aa, Artificial Sequence
  Description of Artificial Sequence: Synthetic peptide
NHHNAYS

SEQ ID NO: 6761 - protein, 7 aa, Artificial Sequence
  Description of Artificial Sequence: Synthetic peptide
NHITYEN

SEQ ID NO: 6762 - protein, 7 aa, Artificial Sequence
  Description of Artificial Sequence: Synthetic peptide
NHKCADE

SEQ ID NO: 6763 - protein, 7 aa, Artificial Sequence
  Description of Artificial Sequence: Synthetic peptide
NHKGLNL

SEQ ID NO: 6764 - protein, 7 aa, Artificial Sequence
  Description of Artificial Sequence: Synthetic peptide
NHMPSVY

SEQ ID NO: 6765 - protein, 7 aa, Artificial Sequence
  Description of Artificial Sequence: Synthetic peptide
NHNGLQM

SEQ ID NO: 6766 - protein, 7 aa, Artificial Sequence
  Description of Artificial Sequence: Synthetic peptide
NHNRPAN

SEQ ID NO: 6767 - protein, 7 aa, Artificial Sequence
  Description of Artificial Sequence: Synthetic peptide
NHPSAST

SEQ ID NO: 6768 - protein, 7 aa, Artificial Sequence
  Description of Artificial Sequence: Synthetic peptide
NHPVPSS

SEQ ID NO: 6769 - protein, 7 aa, Artificial Sequence
  Description of Artificial Sequence: Synthetic peptide
NHPYPKM

SEQ ID NO: 6770 - protein, 7 aa, Artificial Sequence
  Description of Artificial Sequence: Synthetic peptide
NHQLVSE

SEQ ID NO: 6771 - protein, 7 aa, Artificial Sequence
  Description of Artificial Sequence: Synthetic peptide
NHRASPY

SEQ ID NO: 6772 - protein, 7 aa, Artificial Sequence
  Description of Artificial Sequence: Synthetic peptide
NHRTGNA

SEQ ID NO: 6773 - protein, 7 aa, Artificial Sequence
  Description of Artificial Sequence: Synthetic peptide
NHRTSGS

SEQ ID NO: 6774 - protein, 7 aa, Artificial Sequence
  Description of Artificial Sequence: Synthetic peptide
NHSAEMS

SEQ ID NO: 6775 - protein, 7 aa, Artificial Sequence
  Description of Artificial Sequence: Synthetic peptide
NHSETLM

SEQ ID NO: 6776 - protein, 7 aa, Artificial Sequence
  Description of Artificial Sequence: Synthetic peptide
NHSGTIV

SEQ ID NO: 6777 - protein, 7 aa, Artificial Sequence
  Description of Artificial Sequence: Synthetic peptide
NHSPVPL

SEQ ID NO: 6778 - protein, 7 aa, Artificial Sequence
  Description of Artificial Sequence: Synthetic peptide
NHSSDGA

SEQ ID NO: 6779 - protein, 7 aa, Artificial Sequence
  Description of Artificial Sequence: Synthetic peptide
NHTGSTL

SEQ ID NO: 6780 - protein, 7 aa, Artificial Sequence
  Description of Artificial Sequence: Synthetic peptide
NHTPSIP

SEQ ID NO: 6781 - protein, 7 aa, Artificial Sequence
  Description of Artificial Sequence: Synthetic peptide
NHVAKSW

SEQ ID NO: 6782 - protein, 7 aa, Artificial Sequence
  Description of Artificial Sequence: Synthetic peptide
NHYNVNE

SEQ ID NO: 6783 - protein, 7 aa, Artificial Sequence
  Description of Artificial Sequence: Synthetic peptide
NIANALN

SEQ ID NO: 6784 - protein, 7 aa, Artificial Sequence
  Description of Artificial Sequence: Synthetic peptide
NIFDDAD

SEQ ID NO: 6785 - protein, 7 aa, Artificial Sequence
  Description of Artificial Sequence: Synthetic peptide
NIGATPS

SEQ ID NO: 6786 - protein, 7 aa, Artificial Sequence
  Description of Artificial Sequence: Synthetic peptide
NIGGMMS

SEQ ID NO: 6787 - protein, 7 aa, Artificial Sequence
  Description of Artificial Sequence: Synthetic peptide
NIGMTTG

SEQ ID NO: 6788 - protein, 7 aa, Artificial Sequence
  Description of Artificial Sequence: Synthetic peptide
NIKHGPH

SEQ ID NO: 6789 - protein, 7 aa, Artificial Sequence
  Description of Artificial Sequence: Synthetic peptide
NIKLGHD

SEQ ID NO: 6790 - protein, 7 aa, Artificial Sequence
  Description of Artificial Sequence: Synthetic peptide
NILQYTS

SEQ ID NO: 6791 - protein, 7 aa, Artificial Sequence
  Description of Artificial Sequence: Synthetic peptide
NILRTDE

SEQ ID NO: 6792 - protein, 7 aa, Artificial Sequence
  Description of Artificial Sequence: Synthetic peptide
NIPDRFI

SEQ ID NO: 6793 - protein, 7 aa, Artificial Sequence
  Description of Artificial Sequence: Synthetic peptide
NIPLGAA

SEQ ID NO: 6794 - protein, 7 aa, Artificial Sequence
  Description of Artificial Sequence: Synthetic peptide
NIPPRPL

SEQ ID NO: 6795 - protein, 7 aa, Artificial Sequence
  Description of Artificial Sequence: Synthetic peptide
NIQVRSG

SEQ ID NO: 6796 - protein, 7 aa, Artificial Sequence
  Description of Artificial Sequence: Synthetic peptide
NIRDLVH

SEQ ID NO: 6797 - protein, 7 aa, Artificial Sequence
  Description of Artificial Sequence: Synthetic peptide
NIRTNNI

SEQ ID NO: 6798 - protein, 7 aa, Artificial Sequence
  Description of Artificial Sequence: Synthetic peptide
NISLPLL

SEQ ID NO: 6799 - protein, 7 aa, Artificial Sequence
  Description of Artificial Sequence: Synthetic peptide
NISYTIE

SEQ ID NO: 6800 - protein, 7 aa, Artificial Sequence
  Description of Artificial Sequence: Synthetic peptide
NITLAHL

SEQ ID NO: 6801 - protein, 7 aa, Artificial Sequence
  Description of Artificial Sequence: Synthetic peptide
NITSNES

SEQ ID NO: 6802 - protein, 7 aa, Artificial Sequence
  Description of Artificial Sequence: Synthetic peptide
NITTRGT

SEQ ID NO: 6803 - protein, 7 aa, Artificial Sequence
  Description of Artificial Sequence: Synthetic peptide
NIVERSR

SEQ ID NO: 6804 - protein, 7 aa, Artificial Sequence
  Description of Artificial Sequence: Synthetic peptide
NKALTHM

SEQ ID NO: 6805 - protein, 7 aa, Artificial Sequence
  Description of Artificial Sequence: Synthetic peptide
NKEHVQG

SEQ ID NO: 6806 - protein, 7 aa, Artificial Sequence
  Description of Artificial Sequence: Synthetic peptide
NKEPTDS

SEQ ID NO: 6807 - protein, 7 aa, Artificial Sequence
  Description of Artificial Sequence: Synthetic peptide
NKEVHNS

SEQ ID NO: 6808 - protein, 7 aa, Artificial Sequence
  Description of Artificial Sequence: Synthetic peptide
NKGVYSG

SEQ ID NO: 6809 - protein, 7 aa, Artificial Sequence
  Description of Artificial Sequence: Synthetic peptide
NKHFQAH

SEQ ID NO: 6810 - protein, 7 aa, Artificial Sequence
  Description of Artificial Sequence: Synthetic peptide
NKIDPYT

SEQ ID NO: 6811 - protein, 7 aa, Artificial Sequence
  Description of Artificial Sequence: Synthetic peptide
NKMTTYA

SEQ ID NO: 6812 - protein, 7 aa, Artificial Sequence
  Description of Artificial Sequence: Synthetic peptide
NKQFTPE

SEQ ID NO: 6813 - protein, 7 aa, Artificial Sequence
  Description of Artificial Sequence: Synthetic peptide
NKSINTD

SEQ ID NO: 6814 - protein, 7 aa, Artificial Sequence
  Description of Artificial Sequence: Synthetic peptide
NKSLTTG

SEQ ID NO: 6815 - protein, 7 aa, Artificial Sequence
  Description of Artificial Sequence: Synthetic peptide
NKSMNVP

SEQ ID NO: 6816 - protein, 7 aa, Artificial Sequence
  Description of Artificial Sequence: Synthetic peptide
NKTDNVS

SEQ ID NO: 6817 - protein, 7 aa, Artificial Sequence
  Description of Artificial Sequence: Synthetic peptide
NKTQSRH

SEQ ID NO: 6818 - protein, 7 aa, Artificial Sequence
  Description of Artificial Sequence: Synthetic peptide
NKVLHAP

SEQ ID NO: 6819 - protein, 7 aa, Artificial Sequence
  Description of Artificial Sequence: Synthetic peptide
NKVSGPM

SEQ ID NO: 6820 - protein, 7 aa, Artificial Sequence
  Description of Artificial Sequence: Synthetic peptide
NKYQDLR

SEQ ID NO: 6821 - protein, 7 aa, Artificial Sequence
  Description of Artificial Sequence: Synthetic peptide
NLAHTKF

SEQ ID NO: 6822 - protein, 7 aa, Artificial Sequence
  Description of Artificial Sequence: Synthetic peptide
NLALDAR

SEQ ID NO: 6823 - protein, 7 aa, Artificial Sequence
  Description of Artificial Sequence: Synthetic peptide
NLAPIQR

SEQ ID NO: 6824 - protein, 7 aa, Artificial Sequence
  Description of Artificial Sequence: Synthetic peptide
NLDRPVT

SEQ ID NO: 6825 - protein, 7 aa, Artificial Sequence
  Description of Artificial Sequence: Synthetic peptide
NLETIPR

SEQ ID NO: 6826 - protein, 7 aa, Artificial Sequence
  Description of Artificial Sequence: Synthetic peptide
NLGGSVE

SEQ ID NO: 6827 - protein, 7 aa, Artificial Sequence
  Description of Artificial Sequence: Synthetic peptide
NLGKKEL

SEQ ID NO: 6828 - protein, 7 aa, Artificial Sequence
  Description of Artificial Sequence: Synthetic peptide
NLGPTLP

SEQ ID NO: 6829 - protein, 7 aa, Artificial Sequence
  Description of Artificial Sequence: Synthetic peptide
NLGPYPL

SEQ ID NO: 6830 - protein, 7 aa, Artificial Sequence
  Description of Artificial Sequence: Synthetic peptide
NLHLISA

SEQ ID NO: 6831 - protein, 7 aa, Artificial Sequence
  Description of Artificial Sequence: Synthetic peptide
NLHLPSS

SEQ ID NO: 6832 - protein, 7 aa, Artificial Sequence
  Description of Artificial Sequence: Synthetic peptide
NLHRTPD

SEQ ID NO: 6833 - protein, 7 aa, Artificial Sequence
  Description of Artificial Sequence: Synthetic peptide
NLHSTTA

SEQ ID NO: 6834 - protein, 7 aa, Artificial Sequence
  Description of Artificial Sequence: Synthetic peptide
NLIAMGS

SEQ ID NO: 6835 - protein, 7 aa, Artificial Sequence
  Description of Artificial Sequence: Synthetic peptide
NLIPTKA

SEQ ID NO: 6836 - protein, 7 aa, Artificial Sequence
  Description of Artificial Sequence: Synthetic peptide
NLKLMSG

SEQ ID NO: 6837 - protein, 7 aa, Artificial Sequence
  Description of Artificial Sequence: Synthetic peptide
NLKVLVT

SEQ ID NO: 6838 - protein, 7 aa, Artificial Sequence
  Description of Artificial Sequence: Synthetic peptide
NLKVTRD

SEQ ID NO: 6839 - protein, 7 aa, Artificial Sequence
  Description of Artificial Sequence: Synthetic peptide
NLLDVHL

SEQ ID NO: 6840 - protein, 7 aa, Artificial Sequence
  Description of Artificial Sequence: Synthetic peptide
NLLGHAV

SEQ ID NO: 6841 - protein, 7 aa, Artificial Sequence
  Description of Artificial Sequence: Synthetic peptide
NLLTNAV

SEQ ID NO: 6842 - protein, 7 aa, Artificial Sequence
  Description of Artificial Sequence: Synthetic peptide
NLNATSV

SEQ ID NO: 6843 - protein, 7 aa, Artificial Sequence
  Description of Artificial Sequence: Synthetic peptide
NLPPSSP

SEQ ID NO: 6844 - protein, 7 aa, Artificial Sequence
  Description of Artificial Sequence: Synthetic peptide
NLPRPSL

SEQ ID NO: 6845 - protein, 7 aa, Artificial Sequence
  Description of Artificial Sequence: Synthetic peptide
NLPRRTD

SEQ ID NO: 6846 - protein, 7 aa, Artificial Sequence
  Description of Artificial Sequence: Synthetic peptide
NLPYSLV

SEQ ID NO: 6847 - protein, 7 aa, Artificial Sequence
  Description of Artificial Sequence: Synthetic peptide
NLPYTQA

SEQ ID NO: 6848 - protein, 7 aa, Artificial Sequence
  Description of Artificial Sequence: Synthetic peptide
NLQLTNG

SEQ ID NO: 6849 - protein, 7 aa, Artificial Sequence
  Description of Artificial Sequence: Synthetic peptide
NLRDGGT

SEQ ID NO: 6850 - protein, 7 aa, Artificial Sequence
  Description of Artificial Sequence: Synthetic peptide
NLRGNPA

SEQ ID NO: 6851 - protein, 7 aa, Artificial Sequence
  Description of Artificial Sequence: Synthetic peptide
NLRMQIP

SEQ ID NO: 6852 - protein, 7 aa, Artificial Sequence
  Description of Artificial Sequence: Synthetic peptide
NLRPMSS

SEQ ID NO: 6853 - protein, 7 aa, Artificial Sequence
  Description of Artificial Sequence: Synthetic peptide
NLSDDRE

SEQ ID NO: 6854 - protein, 7 aa, Artificial Sequence
  Description of Artificial Sequence: Synthetic peptide
NLSDSRS

SEQ ID NO: 6855 - protein, 7 aa, Artificial Sequence
  Description of Artificial Sequence: Synthetic peptide
NLSHGVL

SEQ ID NO: 6856 - protein, 7 aa, Artificial Sequence
  Description of Artificial Sequence: Synthetic peptide
NLSHRPM

SEQ ID NO: 6857 - protein, 7 aa, Artificial Sequence
  Description of Artificial Sequence: Synthetic peptide
NLSMGSP

SEQ ID NO: 6858 - protein, 7 aa, Artificial Sequence
  Description of Artificial Sequence: Synthetic peptide
NLSNSVK

SEQ ID NO: 6859 - protein, 7 aa, Artificial Sequence
  Description of Artificial Sequence: Synthetic peptide
NLSPYPM

SEQ ID NO: 6860 - protein, 7 aa, Artificial Sequence
  Description of Artificial Sequence: Synthetic peptide
NLSPYTM

SEQ ID NO: 6861 - protein, 7 aa, Artificial Sequence
  Description of Artificial Sequence: Synthetic peptide
NLSRDST

SEQ ID NO: 6862 - protein, 7 aa, Artificial Sequence
  Description of Artificial Sequence: Synthetic peptide
NLSSGQV

SEQ ID NO: 6863 - protein, 7 aa, Artificial Sequence
  Description of Artificial Sequence: Synthetic peptide
NLSYTQQ

SEQ ID NO: 6864 - protein, 7 aa, Artificial Sequence
  Description of Artificial Sequence: Synthetic peptide
NLTAGPP

SEQ ID NO: 6865 - protein, 7 aa, Artificial Sequence
  Description of Artificial Sequence: Synthetic peptide
NLTGGSS

SEQ ID NO: 6866 - protein, 7 aa, Artificial Sequence
  Description of Artificial Sequence: Synthetic peptide
NLTHTVM

SEQ ID NO: 6867 - protein, 7 aa, Artificial Sequence
  Description of Artificial Sequence: Synthetic peptide
NLTNSSM

SEQ ID NO: 6868 - protein, 7 aa, Artificial Sequence
  Description of Artificial Sequence: Synthetic peptide
NLTRMIH

SEQ ID NO: 6869 - protein, 7 aa, Artificial Sequence
  Description of Artificial Sequence: Synthetic peptide
NLTVKVQ

SEQ ID NO: 6870 - protein, 7 aa, Artificial Sequence
  Description of Artificial Sequence: Synthetic peptide
NLVQFVH

SEQ ID NO: 6871 - protein, 7 aa, Artificial Sequence
  Description of Artificial Sequence: Synthetic peptide
NLVQNKP

SEQ ID NO: 6872 - protein, 7 aa, Artificial Sequence
  Description of Artificial Sequence: Synthetic peptide
NLYAYDP

SEQ ID NO: 6873 - protein, 7 aa, Artificial Sequence
  Description of Artificial Sequence: Synthetic peptide
NLYTPYP

SEQ ID NO: 6874 - protein, 7 aa, Artificial Sequence
  Description of Artificial Sequence: Synthetic peptide
NMAHSPP

SEQ ID NO: 6875 - protein, 7 aa, Artificial Sequence
  Description of Artificial Sequence: Synthetic peptide
NMAHVQY

SEQ ID NO: 6876 - protein, 7 aa, Artificial Sequence
  Description of Artificial Sequence: Synthetic peptide
NMAIVEQ

SEQ ID NO: 6877 - protein, 7 aa, Artificial Sequence
  Description of Artificial Sequence: Synthetic peptide
NMATIRV

SEQ ID NO: 6878 - protein, 7 aa, Artificial Sequence
  Description of Artificial Sequence: Synthetic peptide
NMHIRST

SEQ ID NO: 6879 - protein, 7 aa, Artificial Sequence
  Description of Artificial Sequence: Synthetic peptide
NMHTRTS

SEQ ID NO: 6880 - protein, 7 aa, Artificial Sequence
  Description of Artificial Sequence: Synthetic peptide
NMIALQT

SEQ ID NO: 6881 - protein, 7 aa, Artificial Sequence
  Description of Artificial Sequence: Synthetic peptide
NMKASSV

SEQ ID NO: 6882 - protein, 7 aa, Artificial Sequence
  Description of Artificial Sequence: Synthetic peptide
NMLTDRV

SEQ ID NO: 6883 - protein, 7 aa, Artificial Sequence
  Description of Artificial Sequence: Synthetic peptide
NMPNTSH

SEQ ID NO: 6884 - protein, 7 aa, Artificial Sequence
  Description of Artificial Sequence: Synthetic peptide
NMPRHGL

SEQ ID NO: 6885 - protein, 7 aa, Artificial Sequence
  Description of Artificial Sequence: Synthetic peptide
NMPVGST

SEQ ID NO: 6886 - protein, 7 aa, Artificial Sequence
  Description of Artificial Sequence: Synthetic peptide
NMQGTNP

SEQ ID NO: 6887 - protein, 7 aa, Artificial Sequence
  Description of Artificial Sequence: Synthetic peptide
NMRDTAS

SEQ ID NO: 6888 - protein, 7 aa, Artificial Sequence
  Description of Artificial Sequence: Synthetic peptide
NMRLDQG

SEQ ID NO: 6889 - protein, 7 aa, Artificial Sequence
  Description of Artificial Sequence: Synthetic peptide
NMRPHTG

SEQ ID NO: 6890 - protein, 7 aa, Artificial Sequence
  Description of Artificial Sequence: Synthetic peptide
NMRVTPQ

SEQ ID NO: 6891 - protein, 7 aa, Artificial Sequence
  Description of Artificial Sequence: Synthetic peptide
NMSANIN

SEQ ID NO: 6892 - protein, 7 aa, Artificial Sequence
  Description of Artificial Sequence: Synthetic peptide
NMSKSPG

SEQ ID NO: 6893 - protein, 7 aa, Artificial Sequence
  Description of Artificial Sequence: Synthetic peptide
NMSNVHT

SEQ ID NO: 6894 - protein, 7 aa, Artificial Sequence
  Description of Artificial Sequence: Synthetic peptide
NMSRGAM

SEQ ID NO: 6895 - protein, 7 aa, Artificial Sequence
  Description of Artificial Sequence: Synthetic peptide
NMYPVPP

SEQ ID NO: 6896 - protein, 7 aa, Artificial Sequence
  Description of Artificial Sequence: Synthetic peptide
NNAKAMT

SEQ ID NO: 6897 - protein, 7 aa, Artificial Sequence
  Description of Artificial Sequence: Synthetic peptide
NNASSSD

SEQ ID NO: 6898 - protein, 7 aa, Artificial Sequence
  Description of Artificial Sequence: Synthetic peptide
NNDRLVH

SEQ ID NO: 6899 - protein, 7 aa, Artificial Sequence
  Description of Artificial Sequence: Synthetic peptide
NNELRSS

SEQ ID NO: 6900 - protein, 7 aa, Artificial Sequence
  Description of Artificial Sequence: Synthetic peptide
NNFGNTY

SEQ ID NO: 6901 - protein, 7 aa, Artificial Sequence
  Description of Artificial Sequence: Synthetic peptide
NNGKGPV

SEQ ID NO: 6902 - protein, 7 aa, Artificial Sequence
  Description of Artificial Sequence: Synthetic peptide
NNGLPSR

SEQ ID NO: 6903 - protein, 7 aa, Artificial Sequence
  Description of Artificial Sequence: Synthetic peptide
NNGRAQL

SEQ ID NO: 6904 - protein, 7 aa, Artificial Sequence
  Description of Artificial Sequence: Synthetic peptide
NNGRLPN

SEQ ID NO: 6905 - protein, 7 aa, Artificial Sequence
  Description of Artificial Sequence: Synthetic peptide
NNHKIQS

SEQ ID NO: 6906 - protein, 7 aa, Artificial Sequence
  Description of Artificial Sequence: Synthetic peptide
NNLRLNL

SEQ ID NO: 6907 - protein, 7 aa, Artificial Sequence
  Description of Artificial Sequence: Synthetic peptide
NNLRTSL

SEQ ID NO: 6908 - protein, 7 aa, Artificial Sequence
  Description of Artificial Sequence: Synthetic peptide
NNMNTMP

SEQ ID NO: 6909 - protein, 7 aa, Artificial Sequence
  Description of Artificial Sequence: Synthetic peptide
NNNEHYV

SEQ ID NO: 6910 - protein, 7 aa, Artificial Sequence
  Description of Artificial Sequence: Synthetic peptide
NNNLETM

SEQ ID NO: 6911 - protein, 7 aa, Artificial Sequence
  Description of Artificial Sequence: Synthetic peptide
NNNPKYG

SEQ ID NO: 6912 - protein, 7 aa, Artificial Sequence
  Description of Artificial Sequence: Synthetic peptide
NNNTTPL

SEQ ID NO: 6913 - protein, 7 aa, Artificial Sequence
  Description of Artificial Sequence: Synthetic peptide
NNPAPPS

SEQ ID NO: 6914 - protein, 7 aa, Artificial Sequence
  Description of Artificial Sequence: Synthetic peptide
NNPDAYS

SEQ ID NO: 6915 - protein, 7 aa, Artificial Sequence
  Description of Artificial Sequence: Synthetic peptide
NNRPARE

SEQ ID NO: 6916 - protein, 7 aa, Artificial Sequence
  Description of Artificial Sequence: Synthetic peptide
NNSMALM

SEQ ID NO: 6917 - protein, 7 aa, Artificial Sequence
  Description of Artificial Sequence: Synthetic peptide
NNSRISS

SEQ ID NO: 6918 - protein, 7 aa, Artificial Sequence
  Description of Artificial Sequence: Synthetic peptide
NNSRVGT

SEQ ID NO: 6919 - protein, 7 aa, Artificial Sequence
  Description of Artificial Sequence: Synthetic peptide
NNSSYSE

SEQ ID NO: 6920 - protein, 7 aa, Artificial Sequence
  Description of Artificial Sequence: Synthetic peptide
NNVNPIA

SEQ ID NO: 6921 - protein, 7 aa, Artificial Sequence
  Description of Artificial Sequence: Synthetic peptide
NNVSTII

SEQ ID NO: 6922 - protein, 7 aa, Artificial Sequence
  Description of Artificial Sequence: Synthetic peptide
NNWHNTP

SEQ ID NO: 6923 - protein, 7 aa, Artificial Sequence
  Description of Artificial Sequence: Synthetic peptide
NNYNPPT

SEQ ID NO: 6924 - protein, 7 aa, Artificial Sequence
  Description of Artificial Sequence: Synthetic peptide
NPAASTH

SEQ ID NO: 6925 - protein, 7 aa, Artificial Sequence
  Description of Artificial Sequence: Synthetic peptide
NPALPGH

SEQ ID NO: 6926 - protein, 7 aa, Artificial Sequence
  Description of Artificial Sequence: Synthetic peptide
NPEGWGL

SEQ ID NO: 6927 - protein, 7 aa, Artificial Sequence
  Description of Artificial Sequence: Synthetic peptide
NPETLIR

SEQ ID NO: 6928 - protein, 7 aa, Artificial Sequence
  Description of Artificial Sequence: Synthetic peptide
NPEVSPS

SEQ ID NO: 6929 - protein, 7 aa, Artificial Sequence
  Description of Artificial Sequence: Synthetic peptide
NPGANMS

SEQ ID NO: 6930 - protein, 7 aa, Artificial Sequence
  Description of Artificial Sequence: Synthetic peptide
NPGSQMV

SEQ ID NO: 6931 - protein, 7 aa, Artificial Sequence
  Description of Artificial Sequence: Synthetic peptide
NPGTTTT

SEQ ID NO: 6932 - protein, 7 aa, Artificial Sequence
  Description of Artificial Sequence: Synthetic peptide
NPGVKSA

SEQ ID NO: 6933 - protein, 7 aa, Artificial Sequence
  Description of Artificial Sequence: Synthetic peptide
NPGVTHL

SEQ ID NO: 6934 - protein, 7 aa, Artificial Sequence
  Description of Artificial Sequence: Synthetic peptide
NPHISVS

SEQ ID NO: 6935 - protein, 7 aa, Artificial Sequence
  Description of Artificial Sequence: Synthetic peptide
NPHMQNI

SEQ ID NO: 6936 - protein, 7 aa, Artificial Sequence
  Description of Artificial Sequence: Synthetic peptide
NPHNDTG

SEQ ID NO: 6937 - protein, 7 aa, Artificial Sequence
  Description of Artificial Sequence: Synthetic peptide
NPILKTQ

SEQ ID NO: 6938 - protein, 7 aa, Artificial Sequence
  Description of Artificial Sequence: Synthetic peptide
NPISSGP

SEQ ID NO: 6939 - protein, 7 aa, Artificial Sequence
  Description of Artificial Sequence: Synthetic peptide
NPKLMKE

SEQ ID NO: 6940 - protein, 7 aa, Artificial Sequence
  Description of Artificial Sequence: Synthetic peptide
NPLSNDG

SEQ ID NO: 6941 - protein, 7 aa, Artificial Sequence
  Description of Artificial Sequence: Synthetic peptide
NPLTTHD

SEQ ID NO: 6942 - protein, 7 aa, Artificial Sequence
  Description of Artificial Sequence: Synthetic peptide
NPMMHGS

SEQ ID NO: 6943 - protein, 7 aa, Artificial Sequence
  Description of Artificial Sequence: Synthetic peptide
NPMTPDP

SEQ ID NO: 6944 - protein, 7 aa, Artificial Sequence
  Description of Artificial Sequence: Synthetic peptide
NPNQVAE

SEQ ID NO: 6945 - protein, 7 aa, Artificial Sequence
  Description of Artificial Sequence: Synthetic peptide
NPNTRNC

SEQ ID NO: 6946 - protein, 7 aa, Artificial Sequence
  Description of Artificial Sequence: Synthetic peptide
NPPALLP

SEQ ID NO: 6947 - protein, 7 aa, Artificial Sequence
  Description of Artificial Sequence: Synthetic peptide
NPPPPSP

SEQ ID NO: 6948 - protein, 7 aa, Artificial Sequence
  Description of Artificial Sequence: Synthetic peptide
NPPRYGS

SEQ ID NO: 6949 - protein, 7 aa, Artificial Sequence
  Description of Artificial Sequence: Synthetic peptide
NPPSLSS

SEQ ID NO: 6950 - protein, 7 aa, Artificial Sequence
  Description of Artificial Sequence: Synthetic peptide
NPPSRGN

SEQ ID NO: 6951 - protein, 7 aa, Artificial Sequence
  Description of Artificial Sequence: Synthetic peptide
NPPYALA

SEQ ID NO: 6952 - protein, 7 aa, Artificial Sequence
  Description of Artificial Sequence: Synthetic peptide
NPQMPSP

SEQ ID NO: 6953 - protein, 7 aa, Artificial Sequence
  Description of Artificial Sequence: Synthetic peptide
NPQRLGQ

SEQ ID NO: 6954 - protein, 7 aa, Artificial Sequence
  Description of Artificial Sequence: Synthetic peptide
NPQSVTH

SEQ ID NO: 6955 - protein, 7 aa, Artificial Sequence
  Description of Artificial Sequence: Synthetic peptide
NPRAQMS

SEQ ID NO: 6956 - protein, 7 aa, Artificial Sequence
  Description of Artificial Sequence: Synthetic peptide
NPRASSW

SEQ ID NO: 6957 - protein, 7 aa, Artificial Sequence
  Description of Artificial Sequence: Synthetic peptide
NPRNPTL

SEQ ID NO: 6958 - protein, 7 aa, Artificial Sequence
  Description of Artificial Sequence: Synthetic peptide
NPRPGQV

SEQ ID NO: 6959 - protein, 7 aa, Artificial Sequence
  Description of Artificial Sequence: Synthetic peptide
NPSGKVA

SEQ ID NO: 6960 - protein, 7 aa, Artificial Sequence
  Description of Artificial Sequence: Synthetic peptide
NPSLQTT

SEQ ID NO: 6961 - protein, 7 aa, Artificial Sequence
  Description of Artificial Sequence: Synthetic peptide
NPSLRIG

SEQ ID NO: 6962 - protein, 7 aa, Artificial Sequence
  Description of Artificial Sequence: Synthetic peptide
NPSNHAL

SEQ ID NO: 6963 - protein, 7 aa, Artificial Sequence
  Description of Artificial Sequence: Synthetic peptide
NPSQFDF

SEQ ID NO: 6964 - protein, 7 aa, Artificial Sequence
  Description of Artificial Sequence: Synthetic peptide
NPSRLPQ

SEQ ID NO: 6965 - protein, 7 aa, Artificial Sequence
  Description of Artificial Sequence: Synthetic peptide
NPSRQAP

SEQ ID NO: 6966 - protein, 7 aa, Artificial Sequence
  Description of Artificial Sequence: Synthetic peptide
NPSSSGC

SEQ ID NO: 6967 - protein, 7 aa, Artificial Sequence
  Description of Artificial Sequence: Synthetic peptide
NPSVVTA

SEQ ID NO: 6968 - protein, 7 aa, Artificial Sequence
  Description of Artificial Sequence: Synthetic peptide
NPTASNA

SEQ ID NO: 6969 - protein, 7 aa, Artificial Sequence
  Description of Artificial Sequence: Synthetic peptide
NPTFHGS

SEQ ID NO: 6970 - protein, 7 aa, Artificial Sequence
  Description of Artificial Sequence: Synthetic peptide
NPTQPIK

SEQ ID NO: 6971 - protein, 7 aa, Artificial Sequence
  Description of Artificial Sequence: Synthetic peptide
NPTSLPS

SEQ ID NO: 6972 - protein, 7 aa, Artificial Sequence
  Description of Artificial Sequence: Synthetic peptide
NPTTRYM

SEQ ID NO: 6973 - protein, 7 aa, Artificial Sequence
  Description of Artificial Sequence: Synthetic peptide
NPTVTGS

SEQ ID NO: 6974 - protein, 7 aa, Artificial Sequence
  Description of Artificial Sequence: Synthetic peptide
NPYNTEA

SEQ ID NO: 6975 - protein, 7 aa, Artificial Sequence
  Description of Artificial Sequence: Synthetic peptide
NPYVLRA

SEQ ID NO: 6976 - protein, 7 aa, Artificial Sequence
  Description of Artificial Sequence: Synthetic peptide
NQDKATH

SEQ ID NO: 6977 - protein, 7 aa, Artificial Sequence
  Description of Artificial Sequence: Synthetic peptide
NQDPYMY

SEQ ID NO: 6978 - protein, 7 aa, Artificial Sequence
  Description of Artificial Sequence: Synthetic peptide
NQEGSPI

SEQ ID NO: 6979 - protein, 7 aa, Artificial Sequence
  Description of Artificial Sequence: Synthetic peptide
NQENKIG

SEQ ID NO: 6980 - protein, 7 aa, Artificial Sequence
  Description of Artificial Sequence: Synthetic peptide
NQGQNPV

SEQ ID NO: 6981 - protein, 7 aa, Artificial Sequence
  Description of Artificial Sequence: Synthetic peptide
NQIAVSR

SEQ ID NO: 6982 - protein, 7 aa, Artificial Sequence
  Description of Artificial Sequence: Synthetic peptide
NQLHPVR

SEQ ID NO: 6983 - protein, 7 aa, Artificial Sequence
  Description of Artificial Sequence: Synthetic peptide
NQLVAHA

SEQ ID NO: 6984 - protein, 7 aa, Artificial Sequence
  Description of Artificial Sequence: Synthetic peptide
NQNYQIV

SEQ ID NO: 6985 - protein, 7 aa, Artificial Sequence
  Description of Artificial Sequence: Synthetic peptide
NQQGSMA

SEQ ID NO: 6986 - protein, 7 aa, Artificial Sequence
  Description of Artificial Sequence: Synthetic peptide
NQRDTMT

SEQ ID NO: 6987 - protein, 7 aa, Artificial Sequence
  Description of Artificial Sequence: Synthetic peptide
NQRPVNF

SEQ ID NO: 6988 - protein, 7 aa, Artificial Sequence
  Description of Artificial Sequence: Synthetic peptide
NQRSTSM

SEQ ID NO: 6989 - protein, 7 aa, Artificial Sequence
  Description of Artificial Sequence: Synthetic peptide
NQSIHQT

SEQ ID NO: 6990 - protein, 7 aa, Artificial Sequence
  Description of Artificial Sequence: Synthetic peptide
NQTACEV

SEQ ID NO: 6991 - protein, 7 aa, Artificial Sequence
  Description of Artificial Sequence: Synthetic peptide
NQTLMAS

SEQ ID NO: 6992 - protein, 7 aa, Artificial Sequence
  Description of Artificial Sequence: Synthetic peptide
NQTNGRA

SEQ ID NO: 6993 - protein, 7 aa, Artificial Sequence
  Description of Artificial Sequence: Synthetic peptide
NQTRVVP

SEQ ID NO: 6994 - protein, 7 aa, Artificial Sequence
  Description of Artificial Sequence: Synthetic peptide
NQYPRDP

SEQ ID NO: 6995 - protein, 7 aa, Artificial Sequence
  Description of Artificial Sequence: Synthetic peptide
NRAESLL

SEQ ID NO: 6996 - protein, 7 aa, Artificial Sequence
  Description of Artificial Sequence: Synthetic peptide
NRAPPLS

SEQ ID NO: 6997 - protein, 7 aa, Artificial Sequence
  Description of Artificial Sequence: Synthetic peptide
NRDIAGR

SEQ ID NO: 6998 - protein, 7 aa, Artificial Sequence
  Description of Artificial Sequence: Synthetic peptide
NRDILSS

SEQ ID NO: 6999 - protein, 7 aa, Artificial Sequence
  Description of Artificial Sequence: Synthetic peptide
NRDVPES

SEQ ID NO: 7000 - protein, 7 aa, Artificial Sequence
  Description of Artificial Sequence: Synthetic peptide
NRDYSTA

SEQ ID NO: 7001 - protein, 7 aa, Artificial Sequence
  Description of Artificial Sequence: Synthetic peptide
NRDYSVD

SEQ ID NO: 7002 - protein, 7 aa, Artificial Sequence
  Description of Artificial Sequence: Synthetic peptide
NRDYTSP

SEQ ID NO: 7003 - protein, 7 aa, Artificial Sequence
  Description of Artificial Sequence: Synthetic peptide
NREPGLN

SEQ ID NO: 7004 - protein, 7 aa, Artificial Sequence
  Description of Artificial Sequence: Synthetic peptide
NRERAMT

SEQ ID NO: 7005 - protein, 7 aa, Artificial Sequence
  Description of Artificial Sequence: Synthetic peptide
NRESYSL

SEQ ID NO: 7006 - protein, 7 aa, Artificial Sequence
  Description of Artificial Sequence: Synthetic peptide
NRFPHVD

SEQ ID NO: 7007 - protein, 7 aa, Artificial Sequence
  Description of Artificial Sequence: Synthetic peptide
NRGHLDS

SEQ ID NO: 7008 - protein, 7 aa, Artificial Sequence
  Description of Artificial Sequence: Synthetic peptide
NRGLVAA

SEQ ID NO: 7009 - protein, 7 aa, Artificial Sequence
  Description of Artificial Sequence: Synthetic peptide
NRGNFDR

SEQ ID NO: 7010 - protein, 7 aa, Artificial Sequence
  Description of Artificial Sequence: Synthetic peptide
NRGPSNT

SEQ ID NO: 7011 - protein, 7 aa, Artificial Sequence
  Description of Artificial Sequence: Synthetic peptide
NRGQTAQ

SEQ ID NO: 7012 - protein, 7 aa, Artificial Sequence
  Description of Artificial Sequence: Synthetic peptide
NRGTLLS

SEQ ID NO: 7013 - protein, 7 aa, Artificial Sequence
  Description of Artificial Sequence: Synthetic peptide
NRIAAEA

SEQ ID NO: 7014 - protein, 7 aa, Artificial Sequence
  Description of Artificial Sequence: Synthetic peptide
NRIMPIS

SEQ ID NO: 7015 - protein, 7 aa, Artificial Sequence
  Description of Artificial Sequence: Synthetic peptide
NRISAQH

SEQ ID NO: 7016 - protein, 7 aa, Artificial Sequence
  Description of Artificial Sequence: Synthetic peptide
NRISSFP

SEQ ID NO: 7017 - protein, 7 aa, Artificial Sequence
  Description of Artificial Sequence: Synthetic peptide
NRKALSE

SEQ ID NO: 7018 - protein, 7 aa, Artificial Sequence
  Description of Artificial Sequence: Synthetic peptide
NRKPTMD

SEQ ID NO: 7019 - protein, 7 aa, Artificial Sequence
  Description of Artificial Sequence: Synthetic peptide
NRLLGYG

SEQ ID NO: 7020 - protein, 7 aa, Artificial Sequence
  Description of Artificial Sequence: Synthetic peptide
NRMPSAA

SEQ ID NO: 7021 - protein, 7 aa, Artificial Sequence
  Description of Artificial Sequence: Synthetic peptide
NRMSGSD

SEQ ID NO: 7022 - protein, 7 aa, Artificial Sequence
  Description of Artificial Sequence: Synthetic peptide
NRNLDNG

SEQ ID NO: 7023 - protein, 7 aa, Artificial Sequence
  Description of Artificial Sequence: Synthetic peptide
NRPMELL

SEQ ID NO: 7024 - protein, 7 aa, Artificial Sequence
  Description of Artificial Sequence: Synthetic peptide
NRPQHAV

SEQ ID NO: 7025 - protein, 7 aa, Artificial Sequence
  Description of Artificial Sequence: Synthetic peptide
NRQDVPS

SEQ ID NO: 7026 - protein, 7 aa, Artificial Sequence
  Description of Artificial Sequence: Synthetic peptide
NRQGNEL

SEQ ID NO: 7027 - protein, 7 aa, Artificial Sequence
  Description of Artificial Sequence: Synthetic peptide
NRQPLMT

SEQ ID NO: 7028 - protein, 7 aa, Artificial Sequence
  Description of Artificial Sequence: Synthetic peptide
NRQPPRE

SEQ ID NO: 7029 - protein, 7 aa, Artificial Sequence
  Description of Artificial Sequence: Synthetic peptide
NRQSLPL

SEQ ID NO: 7030 - protein, 7 aa, Artificial Sequence
  Description of Artificial Sequence: Synthetic peptide
NRQTIAL

SEQ ID NO: 7031 - protein, 7 aa, Artificial Sequence
  Description of Artificial Sequence: Synthetic peptide
NRRTNED

SEQ ID NO: 7032 - protein, 7 aa, Artificial Sequence
  Description of Artificial Sequence: Synthetic peptide
NRSAECW

SEQ ID NO: 7033 - protein, 7 aa, Artificial Sequence
  Description of Artificial Sequence: Synthetic peptide
NRSALTP

SEQ ID NO: 7034 - protein, 7 aa, Artificial Sequence
  Description of Artificial Sequence: Synthetic peptide
NRSARDP

SEQ ID NO: 7035 - protein, 7 aa, Artificial Sequence
  Description of Artificial Sequence: Synthetic peptide
NRSEMVE

SEQ ID NO: 7036 - protein, 7 aa, Artificial Sequence
  Description of Artificial Sequence: Synthetic peptide
NRSGLVS

SEQ ID NO: 7037 - protein, 7 aa, Artificial Sequence
  Description of Artificial Sequence: Synthetic peptide
NRSITHD

SEQ ID NO: 7038 - protein, 7 aa, Artificial Sequence
  Description of Artificial Sequence: Synthetic peptide
NRSLATV

SEQ ID NO: 7039 - protein, 7 aa, Artificial Sequence
  Description of Artificial Sequence: Synthetic peptide
NRSVLSD

SEQ ID NO: 7040 - protein, 7 aa, Artificial Sequence
  Description of Artificial Sequence: Synthetic peptide
NRSYDSP

SEQ ID NO: 7041 - protein, 7 aa, Artificial Sequence
  Description of Artificial Sequence: Synthetic peptide
NRTLDMS

SEQ ID NO: 7042 - protein, 7 aa, Artificial Sequence
  Description of Artificial Sequence: Synthetic peptide
NRTLPTS

SEQ ID NO: 7043 - protein, 7 aa, Artificial Sequence
  Description of Artificial Sequence: Synthetic peptide
NRTLYPA

SEQ ID NO: 7044 - protein, 7 aa, Artificial Sequence
  Description of Artificial Sequence: Synthetic peptide
NRTQQSS

SEQ ID NO: 7045 - protein, 7 aa, Artificial Sequence
  Description of Artificial Sequence: Synthetic peptide
NRTQSIS

SEQ ID NO: 7046 - protein, 7 aa, Artificial Sequence
  Description of Artificial Sequence: Synthetic peptide
NRTTLMS

SEQ ID NO: 7047 - protein, 7 aa, Artificial Sequence
  Description of Artificial Sequence: Synthetic peptide
NRVGETR

SEQ ID NO: 7048 - protein, 7 aa, Artificial Sequence
  Description of Artificial Sequence: Synthetic peptide
NRVGIAP

SEQ ID NO: 7049 - protein, 7 aa, Artificial Sequence
  Description of Artificial Sequence: Synthetic peptide
NRVVFEG

SEQ ID NO: 7050 - protein, 7 aa, Artificial Sequence
  Description of Artificial Sequence: Synthetic peptide
NRYDASD

SEQ ID NO: 7051 - protein, 7 aa, Artificial Sequence
  Description of Artificial Sequence: Synthetic peptide
NSAARIH

SEQ ID NO: 7052 - protein, 7 aa, Artificial Sequence
  Description of Artificial Sequence: Synthetic peptide
NSADSSP

SEQ ID NO: 7053 - protein, 7 aa, Artificial Sequence
  Description of Artificial Sequence: Synthetic peptide
NSAMHGT

SEQ ID NO: 7054 - protein, 7 aa, Artificial Sequence
  Description of Artificial Sequence: Synthetic peptide
NSASEFV

SEQ ID NO: 7055 - protein, 7 aa, Artificial Sequence
  Description of Artificial Sequence: Synthetic peptide
NSASEMT

SEQ ID NO: 7056 - protein, 7 aa, Artificial Sequence
  Description of Artificial Sequence: Synthetic peptide
NSASTFQ

SEQ ID NO: 7057 - protein, 7 aa, Artificial Sequence
  Description of Artificial Sequence: Synthetic peptide
NSASTFT

SEQ ID NO: 7058 - protein, 7 aa, Artificial Sequence
  Description of Artificial Sequence: Synthetic peptide
NSAVMTR

SEQ ID NO: 7059 - protein, 7 aa, Artificial Sequence
  Description of Artificial Sequence: Synthetic peptide
NSAYPVH

SEQ ID NO: 7060 - protein, 7 aa, Artificial Sequence
  Description of Artificial Sequence: Synthetic peptide
NSDFSLA

SEQ ID NO: 7061 - protein, 7 aa, Artificial Sequence
  Description of Artificial Sequence: Synthetic peptide
NSDLHKP

SEQ ID NO: 7062 - protein, 7 aa, Artificial Sequence
  Description of Artificial Sequence: Synthetic peptide
NSDSRTP

SEQ ID NO: 7063 - protein, 7 aa, Artificial Sequence
  Description of Artificial Sequence: Synthetic peptide
NSDSSIR

SEQ ID NO: 7064 - protein, 7 aa, Artificial Sequence
  Description of Artificial Sequence: Synthetic peptide
NSGLELL

SEQ ID NO: 7065 - protein, 7 aa, Artificial Sequence
  Description of Artificial Sequence: Synthetic peptide
NSGNSTP

SEQ ID NO: 7066 - protein, 7 aa, Artificial Sequence
  Description of Artificial Sequence: Synthetic peptide
NSGRAHI

SEQ ID NO: 7067 - protein, 7 aa, Artificial Sequence
  Description of Artificial Sequence: Synthetic peptide
NSHAHHD

SEQ ID NO: 7068 - protein, 7 aa, Artificial Sequence
  Description of Artificial Sequence: Synthetic peptide
NSHNLTL

SEQ ID NO: 7069 - protein, 7 aa, Artificial Sequence
  Description of Artificial Sequence: Synthetic peptide
NSHPQTR

SEQ ID NO: 7070 - protein, 7 aa, Artificial Sequence
  Description of Artificial Sequence: Synthetic peptide
NSHSSPA

SEQ ID NO: 7071 - protein, 7 aa, Artificial Sequence
  Description of Artificial Sequence: Synthetic peptide
NSHSVST

SEQ ID NO: 7072 - protein, 7 aa, Artificial Sequence
  Description of Artificial Sequence: Synthetic peptide
NSIPERF

SEQ ID NO: 7073 - protein, 7 aa, Artificial Sequence
  Description of Artificial Sequence: Synthetic peptide
NSIRLSG

SEQ ID NO: 7074 - protein, 7 aa, Artificial Sequence
  Description of Artificial Sequence: Synthetic peptide
NSKMPRA

SEQ ID NO: 7075 - protein, 7 aa, Artificial Sequence
  Description of Artificial Sequence: Synthetic peptide
NSKYTPM

SEQ ID NO: 7076 - protein, 7 aa, Artificial Sequence
  Description of Artificial Sequence: Synthetic peptide
NSLAARN

SEQ ID NO: 7077 - protein, 7 aa, Artificial Sequence
  Description of Artificial Sequence: Synthetic peptide
NSLARKE

SEQ ID NO: 7078 - protein, 7 aa, Artificial Sequence
  Description of Artificial Sequence: Synthetic peptide
NSLNDRA

SEQ ID NO: 7079 - protein, 7 aa, Artificial Sequence
  Description of Artificial Sequence: Synthetic peptide
NSLNPGL

SEQ ID NO: 7080 - protein, 7 aa, Artificial Sequence
  Description of Artificial Sequence: Synthetic peptide
NSLPDSV

SEQ ID NO: 7081 - protein, 7 aa, Artificial Sequence
  Description of Artificial Sequence: Synthetic peptide
NSLPMAS

SEQ ID NO: 7082 - protein, 7 aa, Artificial Sequence
  Description of Artificial Sequence: Synthetic peptide
NSMQYSA

SEQ ID NO: 7083 - protein, 7 aa, Artificial Sequence
  Description of Artificial Sequence: Synthetic peptide
NSNAASG

SEQ ID NO: 7084 - protein, 7 aa, Artificial Sequence
  Description of Artificial Sequence: Synthetic peptide
NSNHERY

SEQ ID NO: 7085 - protein, 7 aa, Artificial Sequence
  Description of Artificial Sequence: Synthetic peptide
NSNTPGM

SEQ ID NO: 7086 - protein, 7 aa, Artificial Sequence
  Description of Artificial Sequence: Synthetic peptide
NSNVSPG

SEQ ID NO: 7087 - protein, 7 aa, Artificial Sequence
  Description of Artificial Sequence: Synthetic peptide
NSPIFVG

SEQ ID NO: 7088 - protein, 7 aa, Artificial Sequence
  Description of Artificial Sequence: Synthetic peptide
NSPNERT

SEQ ID NO: 7089 - protein, 7 aa, Artificial Sequence
  Description of Artificial Sequence: Synthetic peptide
NSPNQLG

SEQ ID NO: 7090 - protein, 7 aa, Artificial Sequence
  Description of Artificial Sequence: Synthetic peptide
NSPRHVA

SEQ ID NO: 7091 - protein, 7 aa, Artificial Sequence
  Description of Artificial Sequence: Synthetic peptide
NSPSHSP

SEQ ID NO: 7092 - protein, 7 aa, Artificial Sequence
  Description of Artificial Sequence: Synthetic peptide
NSPTVQL

SEQ ID NO: 7093 - protein, 7 aa, Artificial Sequence
  Description of Artificial Sequence: Synthetic peptide
NSPVVSR

SEQ ID NO: 7094 - protein, 7 aa, Artificial Sequence
  Description of Artificial Sequence: Synthetic peptide
NSQHSTT

SEQ ID NO: 7095 - protein, 7 aa, Artificial Sequence
  Description of Artificial Sequence: Synthetic peptide
NSQLQSS

SEQ ID NO: 7096 - protein, 7 aa, Artificial Sequence
  Description of Artificial Sequence: Synthetic peptide
NSQRYLS

SEQ ID NO: 7097 - protein, 7 aa, Artificial Sequence
  Description of Artificial Sequence: Synthetic peptide
NSQSATP

SEQ ID NO: 7098 - protein, 7 aa, Artificial Sequence
  Description of Artificial Sequence: Synthetic peptide
NSRAVLV

SEQ ID NO: 7099 - protein, 7 aa, Artificial Sequence
  Description of Artificial Sequence: Synthetic peptide
NSRDLLT

SEQ ID NO: 7100 - protein, 7 aa, Artificial Sequence
  Description of Artificial Sequence: Synthetic peptide
NSRGASL

SEQ ID NO: 7101 - protein, 7 aa, Artificial Sequence
  Description of Artificial Sequence: Synthetic peptide
NSRGLGH

SEQ ID NO: 7102 - protein, 7 aa, Artificial Sequence
  Description of Artificial Sequence: Synthetic peptide
NSRGMPD

SEQ ID NO: 7103 - protein, 7 aa, Artificial Sequence
  Description of Artificial Sequence: Synthetic peptide
NSRGPVA

SEQ ID NO: 7104 - protein, 7 aa, Artificial Sequence
  Description of Artificial Sequence: Synthetic peptide
NSRLVTS

SEQ ID NO: 7105 - protein, 7 aa, Artificial Sequence
  Description of Artificial Sequence: Synthetic peptide
NSRSNES

SEQ ID NO: 7106 - protein, 7 aa, Artificial Sequence
  Description of Artificial Sequence: Synthetic peptide
NSRSTPN

SEQ ID NO: 7107 - protein, 7 aa, Artificial Sequence
  Description of Artificial Sequence: Synthetic peptide
NSRTAHE

SEQ ID NO: 7108 - protein, 7 aa, Artificial Sequence
  Description of Artificial Sequence: Synthetic peptide
NSRTVQI

SEQ ID NO: 7109 - protein, 7 aa, Artificial Sequence
  Description of Artificial Sequence: Synthetic peptide
NSRVVGF

SEQ ID NO: 7110 - protein, 7 aa, Artificial Sequence
  Description of Artificial Sequence: Synthetic peptide
NSSEWPD

SEQ ID NO: 7111 - protein, 7 aa, Artificial Sequence
  Description of Artificial Sequence: Synthetic peptide
NSSGKTP

SEQ ID NO: 7112 - protein, 7 aa, Artificial Sequence
  Description of Artificial Sequence: Synthetic peptide
NSSIRNA

SEQ ID NO: 7113 - protein, 7 aa, Artificial Sequence
  Description of Artificial Sequence: Synthetic peptide
NSSLKLN

SEQ ID NO: 7114 - protein, 7 aa, Artificial Sequence
  Description of Artificial Sequence: Synthetic peptide
NSSMRIN

SEQ ID NO: 7115 - protein, 7 aa, Artificial Sequence
  Description of Artificial Sequence: Synthetic peptide
NSSMSSG

SEQ ID NO: 7116 - protein, 7 aa, Artificial Sequence
  Description of Artificial Sequence: Synthetic peptide
NSSPSLA

SEQ ID NO: 7117 - protein, 7 aa, Artificial Sequence
  Description of Artificial Sequence: Synthetic peptide
NSSQVHL

SEQ ID NO: 7118 - protein, 7 aa, Artificial Sequence
  Description of Artificial Sequence: Synthetic peptide
NSSSTPI

SEQ ID NO: 7119 - protein, 7 aa, Artificial Sequence
  Description of Artificial Sequence: Synthetic peptide
NSTKLLD

SEQ ID NO: 7120 - protein, 7 aa, Artificial Sequence
  Description of Artificial Sequence: Synthetic peptide
NSTLEGR

SEQ ID NO: 7121 - protein, 7 aa, Artificial Sequence
  Description of Artificial Sequence: Synthetic peptide
NSTLTVH

SEQ ID NO: 7122 - protein, 7 aa, Artificial Sequence
  Description of Artificial Sequence: Synthetic peptide
NSTNFRT

SEQ ID NO: 7123 - protein, 7 aa, Artificial Sequence
  Description of Artificial Sequence: Synthetic peptide
NSTPQPQ

SEQ ID NO: 7124 - protein, 7 aa, Artificial Sequence
  Description of Artificial Sequence: Synthetic peptide
NSTSTYG

SEQ ID NO: 7125 - protein, 7 aa, Artificial Sequence
  Description of Artificial Sequence: Synthetic peptide
NSVKGVV

SEQ ID NO: 7126 - protein, 7 aa, Artificial Sequence
  Description of Artificial Sequence: Synthetic peptide
NSVRHNS

SEQ ID NO: 7127 - protein, 7 aa, Artificial Sequence
  Description of Artificial Sequence: Synthetic peptide
NSVSGVT

SEQ ID NO: 7128 - protein, 7 aa, Artificial Sequence
  Description of Artificial Sequence: Synthetic peptide
NSVSQMY

SEQ ID NO: 7129 - protein, 7 aa, Artificial Sequence
  Description of Artificial Sequence: Synthetic peptide
NSVYDRS

SEQ ID NO: 7130 - protein, 7 aa, Artificial Sequence
  Description of Artificial Sequence: Synthetic peptide
NSYQVSR

SEQ ID NO: 7131 - protein, 7 aa, Artificial Sequence
  Description of Artificial Sequence: Synthetic peptide
NTAGKPS

SEQ ID NO: 7132 - protein, 7 aa, Artificial Sequence
  Description of Artificial Sequence: Synthetic peptide
NTARERS

SEQ ID NO: 7133 - protein, 7 aa, Artificial Sequence
  Description of Artificial Sequence: Synthetic peptide
NTARTSL

SEQ ID NO: 7134 - protein, 7 aa, Artificial Sequence
  Description of Artificial Sequence: Synthetic peptide
NTDGDRL

SEQ ID NO: 7135 - protein, 7 aa, Artificial Sequence
  Description of Artificial Sequence: Synthetic peptide
NTEDVHM

SEQ ID NO: 7136 - protein, 7 aa, Artificial Sequence
  Description of Artificial Sequence: Synthetic peptide
NTEHNRS

SEQ ID NO: 7137 - protein, 7 aa, Artificial Sequence
  Description of Artificial Sequence: Synthetic peptide
NTETPLA

SEQ ID NO: 7138 - protein, 7 aa, Artificial Sequence
  Description of Artificial Sequence: Synthetic peptide
NTFSNSS

SEQ ID NO: 7139 - protein, 7 aa, Artificial Sequence
  Description of Artificial Sequence: Synthetic peptide
NTGPGMA

SEQ ID NO: 7140 - protein, 7 aa, Artificial Sequence
  Description of Artificial Sequence: Synthetic peptide
NTHGAAQ

SEQ ID NO: 7141 - protein, 7 aa, Artificial Sequence
  Description of Artificial Sequence: Synthetic peptide
NTHPTPF

SEQ ID NO: 7142 - protein, 7 aa, Artificial Sequence
  Description of Artificial Sequence: Synthetic peptide
NTHTKMS

SEQ ID NO: 7143 - protein, 7 aa, Artificial Sequence
  Description of Artificial Sequence: Synthetic peptide
NTHVEDW

SEQ ID NO: 7144 - protein, 7 aa, Artificial Sequence
  Description of Artificial Sequence: Synthetic peptide
NTIPNVK

SEQ ID NO: 7145 - protein, 7 aa, Artificial Sequence
  Description of Artificial Sequence: Synthetic peptide
NTIRDSI

SEQ ID NO: 7146 - protein, 7 aa, Artificial Sequence
  Description of Artificial Sequence: Synthetic peptide
NTISGSR

SEQ ID NO: 7147 - protein, 7 aa, Artificial Sequence
  Description of Artificial Sequence: Synthetic peptide
NTKLTNN

SEQ ID NO: 7148 - protein, 7 aa, Artificial Sequence
  Description of Artificial Sequence: Synthetic peptide
NTKNNNL

SEQ ID NO: 7149 - protein, 7 aa, Artificial Sequence
  Description of Artificial Sequence: Synthetic peptide
NTKSDPA

SEQ ID NO: 7150 - protein, 7 aa, Artificial Sequence
  Description of Artificial Sequence: Synthetic peptide
NTKSPFS

SEQ ID NO: 7151 - protein, 7 aa, Artificial Sequence
  Description of Artificial Sequence: Synthetic peptide
NTLGETL

SEQ ID NO: 7152 - protein, 7 aa, Artificial Sequence
  Description of Artificial Sequence: Synthetic peptide
NTLKLSQ

SEQ ID NO: 7153 - protein, 7 aa, Artificial Sequence
  Description of Artificial Sequence: Synthetic peptide
NTLQSYP

SEQ ID NO: 7154 - protein, 7 aa, Artificial Sequence
  Description of Artificial Sequence: Synthetic peptide
NTNIPRS

SEQ ID NO: 7155 - protein, 7 aa, Artificial Sequence
  Description of Artificial Sequence: Synthetic peptide
NTNVESR

SEQ ID NO: 7156 - protein, 7 aa, Artificial Sequence
  Description of Artificial Sequence: Synthetic peptide
NTNVSVS

SEQ ID NO: 7157 - protein, 7 aa, Artificial Sequence
  Description of Artificial Sequence: Synthetic peptide
NTPRVLS

SEQ ID NO: 7158 - protein, 7 aa, Artificial Sequence
  Description of Artificial Sequence: Synthetic peptide
NTPSTRQ

SEQ ID NO: 7159 - protein, 7 aa, Artificial Sequence
  Description of Artificial Sequence: Synthetic peptide
NTRGGSS

SEQ ID NO: 7160 - protein, 7 aa, Artificial Sequence
  Description of Artificial Sequence: Synthetic peptide
NTRHDVS

SEQ ID NO: 7161 - protein, 7 aa, Artificial Sequence
  Description of Artificial Sequence: Synthetic peptide
NTRNDPP

SEQ ID NO: 7162 - protein, 7 aa, Artificial Sequence
  Description of Artificial Sequence: Synthetic peptide
NTRQLVS

SEQ ID NO: 7163 - protein, 7 aa, Artificial Sequence
  Description of Artificial Sequence: Synthetic peptide
NTRRTDG

SEQ ID NO: 7164 - protein, 7 aa, Artificial Sequence
  Description of Artificial Sequence: Synthetic peptide
NTRTLSN

SEQ ID NO: 7165 - protein, 7 aa, Artificial Sequence
  Description of Artificial Sequence: Synthetic peptide
NTRTYSS

SEQ ID NO: 7166 - protein, 7 aa, Artificial Sequence
  Description of Artificial Sequence: Synthetic peptide
NTSDNAR

SEQ ID NO: 7167 - protein, 7 aa, Artificial Sequence
  Description of Artificial Sequence: Synthetic peptide
NTSFSSS

SEQ ID NO: 7168 - protein, 7 aa, Artificial Sequence
  Description of Artificial Sequence: Synthetic peptide
NTSKDLP

SEQ ID NO: 7169 - protein, 7 aa, Artificial Sequence
  Description of Artificial Sequence: Synthetic peptide
NTSQFAS

SEQ ID NO: 7170 - protein, 7 aa, Artificial Sequence
  Description of Artificial Sequence: Synthetic peptide
NTSSSDK

SEQ ID NO: 7171 - protein, 7 aa, Artificial Sequence
  Description of Artificial Sequence: Synthetic peptide
NTSVMMV

SEQ ID NO: 7172 - protein, 7 aa, Artificial Sequence
  Description of Artificial Sequence: Synthetic peptide
NTSVRVV

SEQ ID NO: 7173 - protein, 7 aa, Artificial Sequence
  Description of Artificial Sequence: Synthetic peptide
NTSWNGS

SEQ ID NO: 7174 - protein, 7 aa, Artificial Sequence
  Description of Artificial Sequence: Synthetic peptide
NTTNSQL

SEQ ID NO: 7175 - protein, 7 aa, Artificial Sequence
  Description of Artificial Sequence: Synthetic peptide
NTTPITN

SEQ ID NO: 7176 - protein, 7 aa, Artificial Sequence
  Description of Artificial Sequence: Synthetic peptide
NTTVLPK

SEQ ID NO: 7177 - protein, 7 aa, Artificial Sequence
  Description of Artificial Sequence: Synthetic peptide
NTVPIKA

SEQ ID NO: 7178 - protein, 7 aa, Artificial Sequence
  Description of Artificial Sequence: Synthetic peptide
NTYRRDG

SEQ ID NO: 7179 - protein, 7 aa, Artificial Sequence
  Description of Artificial Sequence: Synthetic peptide
NVAARAH

SEQ ID NO: 7180 - protein, 7 aa, Artificial Sequence
  Description of Artificial Sequence: Synthetic peptide
NVAINFS

SEQ ID NO: 7181 - protein, 7 aa, Artificial Sequence
  Description of Artificial Sequence: Synthetic peptide
NVARNFV

SEQ ID NO: 7182 - protein, 7 aa, Artificial Sequence
  Description of Artificial Sequence: Synthetic peptide
NVAVGYQ

SEQ ID NO: 7183 - protein, 7 aa, Artificial Sequence
  Description of Artificial Sequence: Synthetic peptide
NVAVVLS

SEQ ID NO: 7184 - protein, 7 aa, Artificial Sequence
  Description of Artificial Sequence: Synthetic peptide
NVAWVTE

SEQ ID NO: 7185 - protein, 7 aa, Artificial Sequence
  Description of Artificial Sequence: Synthetic peptide
NVDANVL

SEQ ID NO: 7186 - protein, 7 aa, Artificial Sequence
  Description of Artificial Sequence: Synthetic peptide
NVDTSTD

SEQ ID NO: 7187 - protein, 7 aa, Artificial Sequence
  Description of Artificial Sequence: Synthetic peptide
NVEQPSC

SEQ ID NO: 7188 - protein, 7 aa, Artificial Sequence
  Description of Artificial Sequence: Synthetic peptide
NVESNPL

SEQ ID NO: 7189 - protein, 7 aa, Artificial Sequence
  Description of Artificial Sequence: Synthetic peptide
NVFAVCE

SEQ ID NO: 7190 - protein, 7 aa, Artificial Sequence
  Description of Artificial Sequence: Synthetic peptide
NVFSATP

SEQ ID NO: 7191 - protein, 7 aa, Artificial Sequence
  Description of Artificial Sequence: Synthetic peptide
NVFVAVN

SEQ ID NO: 7192 - protein, 7 aa, Artificial Sequence
  Description of Artificial Sequence: Synthetic peptide
NVGATEV

SEQ ID NO: 7193 - protein, 7 aa, Artificial Sequence
  Description of Artificial Sequence: Synthetic peptide
NVHALES

SEQ ID NO: 7194 - protein, 7 aa, Artificial Sequence
  Description of Artificial Sequence: Synthetic peptide
NVHTPSQ

SEQ ID NO: 7195 - protein, 7 aa, Artificial Sequence
  Description of Artificial Sequence: Synthetic peptide
NVINTPQ

SEQ ID NO: 7196 - protein, 7 aa, Artificial Sequence
  Description of Artificial Sequence: Synthetic peptide
NVKLNSF

SEQ ID NO: 7197 - protein, 7 aa, Artificial Sequence
  Description of Artificial Sequence: Synthetic peptide
NVLGAQQ

SEQ ID NO: 7198 - protein, 7 aa, Artificial Sequence
  Description of Artificial Sequence: Synthetic peptide
NVLIKYS

SEQ ID NO: 7199 - protein, 7 aa, Artificial Sequence
  Description of Artificial Sequence: Synthetic peptide
NVLRPQV

SEQ ID NO: 7200 - protein, 7 aa, Artificial Sequence
  Description of Artificial Sequence: Synthetic peptide
NVMMARM

SEQ ID NO: 7201 - protein, 7 aa, Artificial Sequence
  Description of Artificial Sequence: Synthetic peptide
NVMVRLP

SEQ ID NO: 7202 - protein, 7 aa, Artificial Sequence
  Description of Artificial Sequence: Synthetic peptide
NVMVRMG

SEQ ID NO: 7203 - protein, 7 aa, Artificial Sequence
  Description of Artificial Sequence: Synthetic peptide
NVNQPDT

SEQ ID NO: 7204 - protein, 7 aa, Artificial Sequence
  Description of Artificial Sequence: Synthetic peptide
NVNQYSG

SEQ ID NO: 7205 - protein, 7 aa, Artificial Sequence
  Description of Artificial Sequence: Synthetic peptide
NVPAASY

SEQ ID NO: 7206 - protein, 7 aa, Artificial Sequence
  Description of Artificial Sequence: Synthetic peptide
NVPAATF

SEQ ID NO: 7207 - protein, 7 aa, Artificial Sequence
  Description of Artificial Sequence: Synthetic peptide
NVPESSD

SEQ ID NO: 7208 - protein, 7 aa, Artificial Sequence
  Description of Artificial Sequence: Synthetic peptide
NVPSTKE

SEQ ID NO: 7209 - protein, 7 aa, Artificial Sequence
  Description of Artificial Sequence: Synthetic peptide
NVQATGY

SEQ ID NO: 7210 - protein, 7 aa, Artificial Sequence
  Description of Artificial Sequence: Synthetic peptide
NVQFSSG

SEQ ID NO: 7211 - protein, 7 aa, Artificial Sequence
  Description of Artificial Sequence: Synthetic peptide
NVRLQAI

SEQ ID NO: 7212 - protein, 7 aa, Artificial Sequence
  Description of Artificial Sequence: Synthetic peptide
NVRLSID

SEQ ID NO: 7213 - protein, 7 aa, Artificial Sequence
  Description of Artificial Sequence: Synthetic peptide
NVRPQST

SEQ ID NO: 7214 - protein, 7 aa, Artificial Sequence
  Description of Artificial Sequence: Synthetic peptide
NVRPVLS

SEQ ID NO: 7215 - protein, 7 aa, Artificial Sequence
  Description of Artificial Sequence: Synthetic peptide
NVRQQSA

SEQ ID NO: 7216 - protein, 7 aa, Artificial Sequence
  Description of Artificial Sequence: Synthetic peptide
NVRSVTN

SEQ ID NO: 7217 - protein, 7 aa, Artificial Sequence
  Description of Artificial Sequence: Synthetic peptide
NVRSYAA

SEQ ID NO: 7218 - protein, 7 aa, Artificial Sequence
  Description of Artificial Sequence: Synthetic peptide
NVRTVAE

SEQ ID NO: 7219 - protein, 7 aa, Artificial Sequence
  Description of Artificial Sequence: Synthetic peptide
NVSFPSL

SEQ ID NO: 7220 - protein, 7 aa, Artificial Sequence
  Description of Artificial Sequence: Synthetic peptide
NVSNVPS

SEQ ID NO: 7221 - protein, 7 aa, Artificial Sequence
  Description of Artificial Sequence: Synthetic peptide
NVSPLFL

SEQ ID NO: 7222 - protein, 7 aa, Artificial Sequence
  Description of Artificial Sequence: Synthetic peptide
NVSRTTL

SEQ ID NO: 7223 - protein, 7 aa, Artificial Sequence
  Description of Artificial Sequence: Synthetic peptide
NVSRTVS

SEQ ID NO: 7224 - protein, 7 aa, Artificial Sequence
  Description of Artificial Sequence: Synthetic peptide
NVSSAPK

SEQ ID NO: 7225 - protein, 7 aa, Artificial Sequence
  Description of Artificial Sequence: Synthetic peptide
NVSTALS

SEQ ID NO: 7226 - protein, 7 aa, Artificial Sequence
  Description of Artificial Sequence: Synthetic peptide
NVTAIGL

SEQ ID NO: 7227 - protein, 7 aa, Artificial Sequence
  Description of Artificial Sequence: Synthetic peptide
NVTPPDN

SEQ ID NO: 7228 - protein, 7 aa, Artificial Sequence
  Description of Artificial Sequence: Synthetic peptide
NVTTSEA

SEQ ID NO: 7229 - protein, 7 aa, Artificial Sequence
  Description of Artificial Sequence: Synthetic peptide
NVVPPLT

SEQ ID NO: 7230 - protein, 7 aa, Artificial Sequence
  Description of Artificial Sequence: Synthetic peptide
NVVSRSP

SEQ ID NO: 7231 - protein, 7 aa, Artificial Sequence
  Description of Artificial Sequence: Synthetic peptide
NVVTKPM

SEQ ID NO: 7232 - protein, 7 aa, Artificial Sequence
  Description of Artificial Sequence: Synthetic peptide
NVVVPVG

SEQ ID NO: 7233 - protein, 7 aa, Artificial Sequence
  Description of Artificial Sequence: Synthetic peptide
NWASDHV

SEQ ID NO: 7234 - protein, 7 aa, Artificial Sequence
  Description of Artificial Sequence: Synthetic peptide
NWGQEKL

SEQ ID NO: 7235 - protein, 7 aa, Artificial Sequence
  Description of Artificial Sequence: Synthetic peptide
NWPDPES

SEQ ID NO: 7236 - protein, 7 aa, Artificial Sequence
  Description of Artificial Sequence: Synthetic peptide
NWTAATP

SEQ ID NO: 7237 - protein, 7 aa, Artificial Sequence
  Description of Artificial Sequence: Synthetic peptide
NYAGSDG

SEQ ID NO: 7238 - protein, 7 aa, Artificial Sequence
  Description of Artificial Sequence: Synthetic peptide
NYAKVHT

SEQ ID NO: 7239 - protein, 7 aa, Artificial Sequence
  Description of Artificial Sequence: Synthetic peptide
NYASQIV

SEQ ID NO: 7240 - protein, 7 aa, Artificial Sequence
  Description of Artificial Sequence: Synthetic peptide
NYDREQM

SEQ ID NO: 7241 - protein, 7 aa, Artificial Sequence
  Description of Artificial Sequence: Synthetic peptide
NYEPTSD

SEQ ID NO: 7242 - protein, 7 aa, Artificial Sequence
  Description of Artificial Sequence: Synthetic peptide
NYGNSIP

SEQ ID NO: 7243 - protein, 7 aa, Artificial Sequence
  Description of Artificial Sequence: Synthetic peptide
NYHTSLV

SEQ ID NO: 7244 - protein, 7 aa, Artificial Sequence
  Description of Artificial Sequence: Synthetic peptide
NYNTPNP

SEQ ID NO: 7245 - protein, 7 aa, Artificial Sequence
  Description of Artificial Sequence: Synthetic peptide
NYPDTPN

SEQ ID NO: 7246 - protein, 7 aa, Artificial Sequence
  Description of Artificial Sequence: Synthetic peptide
NYPDVRS

SEQ ID NO: 7247 - protein, 7 aa, Artificial Sequence
  Description of Artificial Sequence: Synthetic peptide
NYPPSRL

SEQ ID NO: 7248 - protein, 7 aa, Artificial Sequence
  Description of Artificial Sequence: Synthetic peptide
NYRQTLS

SEQ ID NO: 7249 - protein, 7 aa, Artificial Sequence
  Description of Artificial Sequence: Synthetic peptide
PAADRNL

SEQ ID NO: 7250 - protein, 7 aa, Artificial Sequence
  Description of Artificial Sequence: Synthetic peptide
PAAEFAS

SEQ ID NO: 7251 - protein, 7 aa, Artificial Sequence
  Description of Artificial Sequence: Synthetic peptide
PAARERL

SEQ ID NO: 7252 - protein, 7 aa, Artificial Sequence
  Description of Artificial Sequence: Synthetic peptide
PADLGSM

SEQ ID NO: 7253 - protein, 7 aa, Artificial Sequence
  Description of Artificial Sequence: Synthetic peptide
PADNGPW

SEQ ID NO: 7254 - protein, 7 aa, Artificial Sequence
  Description of Artificial Sequence: Synthetic peptide
PADPPSV

SEQ ID NO: 7255 - protein, 7 aa, Artificial Sequence
  Description of Artificial Sequence: Synthetic peptide
PADRSPT

SEQ ID NO: 7256 - protein, 7 aa, Artificial Sequence
  Description of Artificial Sequence: Synthetic peptide
PADYQKD

SEQ ID NO: 7257 - protein, 7 aa, Artificial Sequence
  Description of Artificial Sequence: Synthetic peptide
PAEKVRT

SEQ ID NO: 7258 - protein, 7 aa, Artificial Sequence
  Description of Artificial Sequence: Synthetic peptide
PAFSGRD

SEQ ID NO: 7259 - protein, 7 aa, Artificial Sequence
  Description of Artificial Sequence: Synthetic peptide
PAFSMSI

SEQ ID NO: 7260 - protein, 7 aa, Artificial Sequence
  Description of Artificial Sequence: Synthetic peptide
PAGLPDR

SEQ ID NO: 7261 - protein, 7 aa, Artificial Sequence
  Description of Artificial Sequence: Synthetic peptide
PAGSQPP

SEQ ID NO: 7262 - protein, 7 aa, Artificial Sequence
  Description of Artificial Sequence: Synthetic peptide
PAGSTMP

SEQ ID NO: 7263 - protein, 7 aa, Artificial Sequence
  Description of Artificial Sequence: Synthetic peptide
PAHALTM

SEQ ID NO: 7264 - protein, 7 aa, Artificial Sequence
  Description of Artificial Sequence: Synthetic peptide
PAHFTTG

SEQ ID NO: 7265 - protein, 7 aa, Artificial Sequence
  Description of Artificial Sequence: Synthetic peptide
PAIGVHR

SEQ ID NO: 7266 - protein, 7 aa, Artificial Sequence
  Description of Artificial Sequence: Synthetic peptide
PAIKSQL

SEQ ID NO: 7267 - protein, 7 aa, Artificial Sequence
  Description of Artificial Sequence: Synthetic peptide
PAILRTS

SEQ ID NO: 7268 - protein, 7 aa, Artificial Sequence
  Description of Artificial Sequence: Synthetic peptide
PAISGTI

SEQ ID NO: 7269 - protein, 7 aa, Artificial Sequence
  Description of Artificial Sequence: Synthetic peptide
PAKPIDF

SEQ ID NO: 7270 - protein, 7 aa, Artificial Sequence
  Description of Artificial Sequence: Synthetic peptide
PALAPIY

SEQ ID NO: 7271 - protein, 7 aa, Artificial Sequence
  Description of Artificial Sequence: Synthetic peptide
PALMAPA

SEQ ID NO: 7272 - protein, 7 aa, Artificial Sequence
  Description of Artificial Sequence: Synthetic peptide
PAMGQSD

SEQ ID NO: 7273 - protein, 7 aa, Artificial Sequence
  Description of Artificial Sequence: Synthetic peptide
PAMSDRS

SEQ ID NO: 7274 - protein, 7 aa, Artificial Sequence
  Description of Artificial Sequence: Synthetic peptide
PAMSNTI

SEQ ID NO: 7275 - protein, 7 aa, Artificial Sequence
  Description of Artificial Sequence: Synthetic peptide
PANDADR

SEQ ID NO: 7276 - protein, 7 aa, Artificial Sequence
  Description of Artificial Sequence: Synthetic peptide
PANLTSP

SEQ ID NO: 7277 - protein, 7 aa, Artificial Sequence
  Description of Artificial Sequence: Synthetic peptide
PANPPDS

SEQ ID NO: 7278 - protein, 7 aa, Artificial Sequence
  Description of Artificial Sequence: Synthetic peptide
PANPPKS

SEQ ID NO: 7279 - protein, 7 aa, Artificial Sequence
  Description of Artificial Sequence: Synthetic peptide
PANRVGT

SEQ ID NO: 7280 - protein, 7 aa, Artificial Sequence
  Description of Artificial Sequence: Synthetic peptide
PANYLSV

SEQ ID NO: 7281 - protein, 7 aa, Artificial Sequence
  Description of Artificial Sequence: Synthetic peptide
PAPMNFQ

SEQ ID NO: 7282 - protein, 7 aa, Artificial Sequence
  Description of Artificial Sequence: Synthetic peptide
PAPSHQS

SEQ ID NO: 7283 - protein, 7 aa, Artificial Sequence
  Description of Artificial Sequence: Synthetic peptide
PAPTSIA

SEQ ID NO: 7284 - protein, 7 aa, Artificial Sequence
  Description of Artificial Sequence: Synthetic peptide
PAQRTMA

SEQ ID NO: 7285 - protein, 7 aa, Artificial Sequence
  Description of Artificial Sequence: Synthetic peptide
PAQSTGP

SEQ ID NO: 7286 - protein, 7 aa, Artificial Sequence
  Description of Artificial Sequence: Synthetic peptide
PARADPA

SEQ ID NO: 7287 - protein, 7 aa, Artificial Sequence
  Description of Artificial Sequence: Synthetic peptide
PARAFDA

SEQ ID NO: 7288 - protein, 7 aa, Artificial Sequence
  Description of Artificial Sequence: Synthetic peptide
PARITGM

SEQ ID NO: 7289 - protein, 7 aa, Artificial Sequence
  Description of Artificial Sequence: Synthetic peptide
PARLATN

SEQ ID NO: 7290 - protein, 7 aa, Artificial Sequence
  Description of Artificial Sequence: Synthetic peptide
PARRPDD

SEQ ID NO: 7291 - protein, 7 aa, Artificial Sequence
  Description of Artificial Sequence: Synthetic peptide
PARTLIH

SEQ ID NO: 7292 - protein, 7 aa, Artificial Sequence
  Description of Artificial Sequence: Synthetic peptide
PARTNPT

SEQ ID NO: 7293 - protein, 7 aa, Artificial Sequence
  Description of Artificial Sequence: Synthetic peptide
PARTQVD

SEQ ID NO: 7294 - protein, 7 aa, Artificial Sequence
  Description of Artificial Sequence: Synthetic peptide
PASERSL

SEQ ID NO: 7295 - protein, 7 aa, Artificial Sequence
  Description of Artificial Sequence: Synthetic peptide
PASFGIN

SEQ ID NO: 7296 - protein, 7 aa, Artificial Sequence
  Description of Artificial Sequence: Synthetic peptide
PASHMNP

SEQ ID NO: 7297 - protein, 7 aa, Artificial Sequence
  Description of Artificial Sequence: Synthetic peptide
PASPLHS

SEQ ID NO: 7298 - protein, 7 aa, Artificial Sequence
  Description of Artificial Sequence: Synthetic peptide
PASPVTS

SEQ ID NO: 7299 - protein, 7 aa, Artificial Sequence
  Description of Artificial Sequence: Synthetic peptide
PASVMAG

SEQ ID NO: 7300 - protein, 7 aa, Artificial Sequence
  Description of Artificial Sequence: Synthetic peptide
PATALSR

SEQ ID NO: 7301 - protein, 7 aa, Artificial Sequence
  Description of Artificial Sequence: Synthetic peptide
PATGLPY

SEQ ID NO: 7302 - protein, 7 aa, Artificial Sequence
  Description of Artificial Sequence: Synthetic peptide
PATMIRH

SEQ ID NO: 7303 - protein, 7 aa, Artificial Sequence
  Description of Artificial Sequence: Synthetic peptide
PATNVRG

SEQ ID NO: 7304 - protein, 7 aa, Artificial Sequence
  Description of Artificial Sequence: Synthetic peptide
PATPSVV

SEQ ID NO: 7305 - protein, 7 aa, Artificial Sequence
  Description of Artificial Sequence: Synthetic peptide
PATSSVS

SEQ ID NO: 7306 - protein, 7 aa, Artificial Sequence
  Description of Artificial Sequence: Synthetic peptide
PAVEADG

SEQ ID NO: 7307 - protein, 7 aa, Artificial Sequence
  Description of Artificial Sequence: Synthetic peptide
PAVKPSF

SEQ ID NO: 7308 - protein, 7 aa, Artificial Sequence
  Description of Artificial Sequence: Synthetic peptide
PAYPHAP

SEQ ID NO: 7309 - protein, 7 aa, Artificial Sequence
  Description of Artificial Sequence: Synthetic peptide
PDAEIRR

SEQ ID NO: 7310 - protein, 7 aa, Artificial Sequence
  Description of Artificial Sequence: Synthetic peptide
PDDFRHH

SEQ ID NO: 7311 - protein, 7 aa, Artificial Sequence
  Description of Artificial Sequence: Synthetic peptide
PDELKVR

SEQ ID NO: 7312 - protein, 7 aa, Artificial Sequence
  Description of Artificial Sequence: Synthetic peptide
PDGDTAL

SEQ ID NO: 7313 - protein, 7 aa, Artificial Sequence
  Description of Artificial Sequence: Synthetic peptide
PDGSSRH

SEQ ID NO: 7314 - protein, 7 aa, Artificial Sequence
  Description of Artificial Sequence: Synthetic peptide
PDHASIS

SEQ ID NO: 7315 - protein, 7 aa, Artificial Sequence
  Description of Artificial Sequence: Synthetic peptide
PDHGGIA

SEQ ID NO: 7316 - protein, 7 aa, Artificial Sequence
  Description of Artificial Sequence: Synthetic peptide
PDHRSPN

SEQ ID NO: 7317 - protein, 7 aa, Artificial Sequence
  Description of Artificial Sequence: Synthetic peptide
PDHSNDQ

SEQ ID NO: 7318 - protein, 7 aa, Artificial Sequence
  Description of Artificial Sequence: Synthetic peptide
PDIAFAE

SEQ ID NO: 7319 - protein, 7 aa, Artificial Sequence
  Description of Artificial Sequence: Synthetic peptide
PDLEVVK

SEQ ID NO: 7320 - protein, 7 aa, Artificial Sequence
  Description of Artificial Sequence: Synthetic peptide
PDLISDA

SEQ ID NO: 7321 - protein, 7 aa, Artificial Sequence
  Description of Artificial Sequence: Synthetic peptide
PDLPGIR

SEQ ID NO: 7322 - protein, 7 aa, Artificial Sequence
  Description of Artificial Sequence: Synthetic peptide
PDNLQVS

SEQ ID NO: 7323 - protein, 7 aa, Artificial Sequence
  Description of Artificial Sequence: Synthetic peptide
PDNVRTF

SEQ ID NO: 7324 - protein, 7 aa, Artificial Sequence
  Description of Artificial Sequence: Synthetic peptide
PDNVYND

SEQ ID NO: 7325 - protein, 7 aa, Artificial Sequence
  Description of Artificial Sequence: Synthetic peptide
PDPAYLH

SEQ ID NO: 7326 - protein, 7 aa, Artificial Sequence
  Description of Artificial Sequence: Synthetic peptide
PDPIDRP

SEQ ID NO: 7327 - protein, 7 aa, Artificial Sequence
  Description of Artificial Sequence: Synthetic peptide
PDPPTSP

SEQ ID NO: 7328 - protein, 7 aa, Artificial Sequence
  Description of Artificial Sequence: Synthetic peptide
PDQASGR

SEQ ID NO: 7329 - protein, 7 aa, Artificial Sequence
  Description of Artificial Sequence: Synthetic peptide
PDQMVRI

SEQ ID NO: 7330 - protein, 7 aa, Artificial Sequence
  Description of Artificial Sequence: Synthetic peptide
PDQRGNH

SEQ ID NO: 7331 - protein, 7 aa, Artificial Sequence
  Description of Artificial Sequence: Synthetic peptide
PDQSLTG

SEQ ID NO: 7332 - protein, 7 aa, Artificial Sequence
  Description of Artificial Sequence: Synthetic peptide
PDRLLDR

SEQ ID NO: 7333 - protein, 7 aa, Artificial Sequence
  Description of Artificial Sequence: Synthetic peptide
PDRLSEF

SEQ ID NO: 7334 - protein, 7 aa, Artificial Sequence
  Description of Artificial Sequence: Synthetic peptide
PDRMQNR

SEQ ID NO: 7335 - protein, 7 aa, Artificial Sequence
  Description of Artificial Sequence: Synthetic peptide
PDRQQQL

SEQ ID NO: 7336 - protein, 7 aa, Artificial Sequence
  Description of Artificial Sequence: Synthetic peptide
PDRVPTV

SEQ ID NO: 7337 - protein, 7 aa, Artificial Sequence
  Description of Artificial Sequence: Synthetic peptide
PDSAPLP

SEQ ID NO: 7338 - protein, 7 aa, Artificial Sequence
  Description of Artificial Sequence: Synthetic peptide
PDSDPPH

SEQ ID NO: 7339 - protein, 7 aa, Artificial Sequence
  Description of Artificial Sequence: Synthetic peptide
PDSMYRS

SEQ ID NO: 7340 - protein, 7 aa, Artificial Sequence
  Description of Artificial Sequence: Synthetic peptide
PDSTLQF

SEQ ID NO: 7341 - protein, 7 aa, Artificial Sequence
  Description of Artificial Sequence: Synthetic peptide
PDTDPPL

SEQ ID NO: 7342 - protein, 7 aa, Artificial Sequence
  Description of Artificial Sequence: Synthetic peptide
PDTKWCH

SEQ ID NO: 7343 - protein, 7 aa, Artificial Sequence
  Description of Artificial Sequence: Synthetic peptide
PDTSHDL

SEQ ID NO: 7344 - protein, 7 aa, Artificial Sequence
  Description of Artificial Sequence: Synthetic peptide
PDVKAGR

SEQ ID NO: 7345 - protein, 7 aa, Artificial Sequence
  Description of Artificial Sequence: Synthetic peptide
PDYAKLS

SEQ ID NO: 7346 - protein, 7 aa, Artificial Sequence
  Description of Artificial Sequence: Synthetic peptide
PDYEKKQ

SEQ ID NO: 7347 - protein, 7 aa, Artificial Sequence
  Description of Artificial Sequence: Synthetic peptide
PDYSAVL

SEQ ID NO: 7348 - protein, 7 aa, Artificial Sequence
  Description of Artificial Sequence: Synthetic peptide
PEAEDDI

SEQ ID NO: 7349 - protein, 7 aa, Artificial Sequence
  Description of Artificial Sequence: Synthetic peptide
PEALRTG

SEQ ID NO: 7350 - protein, 7 aa, Artificial Sequence
  Description of Artificial Sequence: Synthetic peptide
PEEPRLS

SEQ ID NO: 7351 - protein, 7 aa, Artificial Sequence
  Description of Artificial Sequence: Synthetic peptide
PEEVCRI

SEQ ID NO: 7352 - protein, 7 aa, Artificial Sequence
  Description of Artificial Sequence: Synthetic peptide
PEFAIDA

SEQ ID NO: 7353 - protein, 7 aa, Artificial Sequence
  Description of Artificial Sequence: Synthetic peptide
PEFKTRN

SEQ ID NO: 7354 - protein, 7 aa, Artificial Sequence
  Description of Artificial Sequence: Synthetic peptide
PEGRLHA

SEQ ID NO: 7355 - protein, 7 aa, Artificial Sequence
  Description of Artificial Sequence: Synthetic peptide
PEKDTHR

SEQ ID NO: 7356 - protein, 7 aa, Artificial Sequence
  Description of Artificial Sequence: Synthetic peptide
PEKYSQN

SEQ ID NO: 7357 - protein, 7 aa, Artificial Sequence
  Description of Artificial Sequence: Synthetic peptide
PEMGRLG

SEQ ID NO: 7358 - protein, 7 aa, Artificial Sequence
  Description of Artificial Sequence: Synthetic peptide
PEMKPGQ

SEQ ID NO: 7359 - protein, 7 aa, Artificial Sequence
  Description of Artificial Sequence: Synthetic peptide
PENSKVD

SEQ ID NO: 7360 - protein, 7 aa, Artificial Sequence
  Description of Artificial Sequence: Synthetic peptide
PENSQRG

SEQ ID NO: 7361 - protein, 7 aa, Artificial Sequence
  Description of Artificial Sequence: Synthetic peptide
PENTTYA

SEQ ID NO: 7362 - protein, 7 aa, Artificial Sequence
  Description of Artificial Sequence: Synthetic peptide
PEPSNTR

SEQ ID NO: 7363 - protein, 7 aa, Artificial Sequence
  Description of Artificial Sequence: Synthetic peptide
PEPTLNL

SEQ ID NO: 7364 - protein, 7 aa, Artificial Sequence
  Description of Artificial Sequence: Synthetic peptide
PERGLHV

SEQ ID NO: 7365 - protein, 7 aa, Artificial Sequence
  Description of Artificial Sequence: Synthetic peptide
PERKAHT

SEQ ID NO: 7366 - protein, 7 aa, Artificial Sequence
  Description of Artificial Sequence: Synthetic peptide
PERPALS

SEQ ID NO: 7367 - protein, 7 aa, Artificial Sequence
  Description of Artificial Sequence: Synthetic peptide
PERSQAG

SEQ ID NO: 7368 - protein, 7 aa, Artificial Sequence
  Description of Artificial Sequence: Synthetic peptide
PERSTWV

SEQ ID NO: 7369 - protein, 7 aa, Artificial Sequence
  Description of Artificial Sequence: Synthetic peptide
PESKDAH

SEQ ID NO: 7370 - protein, 7 aa, Artificial Sequence
  Description of Artificial Sequence: Synthetic peptide
PESPRTL

SEQ ID NO: 7371 - protein, 7 aa, Artificial Sequence
  Description of Artificial Sequence: Synthetic peptide
PESVLRR

SEQ ID NO: 7372 - protein, 7 aa, Artificial Sequence
  Description of Artificial Sequence: Synthetic peptide
PESWPSP

SEQ ID NO: 7373 - protein, 7 aa, Artificial Sequence
  Description of Artificial Sequence: Synthetic peptide
PETSPRP

SEQ ID NO: 7374 - protein, 7 aa, Artificial Sequence
  Description of Artificial Sequence: Synthetic peptide
PFAEAGI

SEQ ID NO: 7375 - protein, 7 aa, Artificial Sequence
  Description of Artificial Sequence: Synthetic peptide
PFAGHAL

SEQ ID NO: 7376 - protein, 7 aa, Artificial Sequence
  Description of Artificial Sequence: Synthetic peptide
PFAQTLT

SEQ ID NO: 7377 - protein, 7 aa, Artificial Sequence
  Description of Artificial Sequence: Synthetic peptide
PFASSTS

SEQ ID NO: 7378 - protein, 7 aa, Artificial Sequence
  Description of Artificial Sequence: Synthetic peptide
PFDHLTD

SEQ ID NO: 7379 - protein, 7 aa, Artificial Sequence
  Description of Artificial Sequence: Synthetic peptide
PFGVSVD

SEQ ID NO: 7380 - protein, 7 aa, Artificial Sequence
  Description of Artificial Sequence: Synthetic peptide
PFPHDRP

SEQ ID NO: 7381 - protein, 7 aa, Artificial Sequence
  Description of Artificial Sequence: Synthetic peptide
PFQTGSG

SEQ ID NO: 7382 - protein, 7 aa, Artificial Sequence
  Description of Artificial Sequence: Synthetic peptide
PFRIQTD

SEQ ID NO: 7383 - protein, 7 aa, Artificial Sequence
  Description of Artificial Sequence: Synthetic peptide
PFRPVVD

SEQ ID NO: 7384 - protein, 7 aa, Artificial Sequence
  Description of Artificial Sequence: Synthetic peptide
PFSDLRM

SEQ ID NO: 7385 - protein, 7 aa, Artificial Sequence
  Description of Artificial Sequence: Synthetic peptide
PFSGLTG

SEQ ID NO: 7386 - protein, 7 aa, Artificial Sequence
  Description of Artificial Sequence: Synthetic peptide
PFSNIQM

SEQ ID NO: 7387 - protein, 7 aa, Artificial Sequence
  Description of Artificial Sequence: Synthetic peptide
PFSSAVI

SEQ ID NO: 7388 - protein, 7 aa, Artificial Sequence
  Description of Artificial Sequence: Synthetic peptide
PFSSPSP

SEQ ID NO: 7389 - protein, 7 aa, Artificial Sequence
  Description of Artificial Sequence: Synthetic peptide
PFSTPDM

SEQ ID NO: 7390 - protein, 7 aa, Artificial Sequence
  Description of Artificial Sequence: Synthetic peptide
PFTAGFS

SEQ ID NO: 7391 - protein, 7 aa, Artificial Sequence
  Description of Artificial Sequence: Synthetic peptide
PFTATDR

SEQ ID NO: 7392 - protein, 7 aa, Artificial Sequence
  Description of Artificial Sequence: Synthetic peptide
PFTDELM

SEQ ID NO: 7393 - protein, 7 aa, Artificial Sequence
  Description of Artificial Sequence: Synthetic peptide
PFTGAPQ

SEQ ID NO: 7394 - protein, 7 aa, Artificial Sequence
  Description of Artificial Sequence: Synthetic peptide
PGARREL

SEQ ID NO: 7395 - protein, 7 aa, Artificial Sequence
  Description of Artificial Sequence: Synthetic peptide
PGAVPPS

SEQ ID NO: 7396 - protein, 7 aa, Artificial Sequence
  Description of Artificial Sequence: Synthetic peptide
PGCSSVV

SEQ ID NO: 7397 - protein, 7 aa, Artificial Sequence
  Description of Artificial Sequence: Synthetic peptide
PGDAKPR

SEQ ID NO: 7398 - protein, 7 aa, Artificial Sequence
  Description of Artificial Sequence: Synthetic peptide
PGDPTHD

SEQ ID NO: 7399 - protein, 7 aa, Artificial Sequence
  Description of Artificial Sequence: Synthetic peptide
PGEATKL

SEQ ID NO: 7400 - protein, 7 aa, Artificial Sequence
  Description of Artificial Sequence: Synthetic peptide
PGEKLWC

SEQ ID NO: 7401 - protein, 7 aa, Artificial Sequence
  Description of Artificial Sequence: Synthetic peptide
PGETQEV

SEQ ID NO: 7402 - protein, 7 aa, Artificial Sequence
  Description of Artificial Sequence: Synthetic peptide
PGFDPSG

SEQ ID NO: 7403 - protein, 7 aa, Artificial Sequence
  Description of Artificial Sequence: Synthetic peptide
PGGSDHS

SEQ ID NO: 7404 - protein, 7 aa, Artificial Sequence
  Description of Artificial Sequence: Synthetic peptide
PGGSLGE

SEQ ID NO: 7405 - protein, 7 aa, Artificial Sequence
  Description of Artificial Sequence: Synthetic peptide
PGHDVAR

SEQ ID NO: 7406 - protein, 7 aa, Artificial Sequence
  Description of Artificial Sequence: Synthetic peptide
PGHMPAS

SEQ ID NO: 7407 - protein, 7 aa, Artificial Sequence
  Description of Artificial Sequence: Synthetic peptide
PGIDARI

SEQ ID NO: 7408 - protein, 7 aa, Artificial Sequence
  Description of Artificial Sequence: Synthetic peptide
PGIDRKS

SEQ ID NO: 7409 - protein, 7 aa, Artificial Sequence
  Description of Artificial Sequence: Synthetic peptide
PGIQAPI

SEQ ID NO: 7410 - protein, 7 aa, Artificial Sequence
  Description of Artificial Sequence: Synthetic peptide
PGKIHAA

SEQ ID NO: 7411 - protein, 7 aa, Artificial Sequence
  Description of Artificial Sequence: Synthetic peptide
PGKLLNP

SEQ ID NO: 7412 - protein, 7 aa, Artificial Sequence
  Description of Artificial Sequence: Synthetic peptide
PGKSLEA

SEQ ID NO: 7413 - protein, 7 aa, Artificial Sequence
  Description of Artificial Sequence: Synthetic peptide
PGKYSPS

SEQ ID NO: 7414 - protein, 7 aa, Artificial Sequence
  Description of Artificial Sequence: Synthetic peptide
PGLADYG

SEQ ID NO: 7415 - protein, 7 aa, Artificial Sequence
  Description of Artificial Sequence: Synthetic peptide
PGLLDHV

SEQ ID NO: 7416 - protein, 7 aa, Artificial Sequence
  Description of Artificial Sequence: Synthetic peptide
PGLQSMK

SEQ ID NO: 7417 - protein, 7 aa, Artificial Sequence
  Description of Artificial Sequence: Synthetic peptide
PGLRSDS

SEQ ID NO: 7418 - protein, 7 aa, Artificial Sequence
  Description of Artificial Sequence: Synthetic peptide
PGLTANP

SEQ ID NO: 7419 - protein, 7 aa, Artificial Sequence
  Description of Artificial Sequence: Synthetic peptide
PGLTKAI

SEQ ID NO: 7420 - protein, 7 aa, Artificial Sequence
  Description of Artificial Sequence: Synthetic peptide
PGMRMGQ

SEQ ID NO: 7421 - protein, 7 aa, Artificial Sequence
  Description of Artificial Sequence: Synthetic peptide
PGNHVTR

SEQ ID NO: 7422 - protein, 7 aa, Artificial Sequence
  Description of Artificial Sequence: Synthetic peptide
PGNYEYR

SEQ ID NO: 7423 - protein, 7 aa, Artificial Sequence
  Description of Artificial Sequence: Synthetic peptide
PGPGQPR

SEQ ID NO: 7424 - protein, 7 aa, Artificial Sequence
  Description of Artificial Sequence: Synthetic peptide
PGPMNSS

SEQ ID NO: 7425 - protein, 7 aa, Artificial Sequence
  Description of Artificial Sequence: Synthetic peptide
PGPRRDI

SEQ ID NO: 7426 - protein, 7 aa, Artificial Sequence
  Description of Artificial Sequence: Synthetic peptide
PGPTGAY

SEQ ID NO: 7427 - protein, 7 aa, Artificial Sequence
  Description of Artificial Sequence: Synthetic peptide
PGQETSY

SEQ ID NO: 7428 - protein, 7 aa, Artificial Sequence
  Description of Artificial Sequence: Synthetic peptide
PGQQKNM

SEQ ID NO: 7429 - protein, 7 aa, Artificial Sequence
  Description of Artificial Sequence: Synthetic peptide
PGQRGTP

SEQ ID NO: 7430 - protein, 7 aa, Artificial Sequence
  Description of Artificial Sequence: Synthetic peptide
PGQTQHN

SEQ ID NO: 7431 - protein, 7 aa, Artificial Sequence
  Description of Artificial Sequence: Synthetic peptide
PGRDAEG

SEQ ID NO: 7432 - protein, 7 aa, Artificial Sequence
  Description of Artificial Sequence: Synthetic peptide
PGREGVT

SEQ ID NO: 7433 - protein, 7 aa, Artificial Sequence
  Description of Artificial Sequence: Synthetic peptide
PGRPQPS

SEQ ID NO: 7434 - protein, 7 aa, Artificial Sequence
  Description of Artificial Sequence: Synthetic peptide
PGRVGPL

SEQ ID NO: 7435 - protein, 7 aa, Artificial Sequence
  Description of Artificial Sequence: Synthetic peptide
PGSFPRG

SEQ ID NO: 7436 - protein, 7 aa, Artificial Sequence
  Description of Artificial Sequence: Synthetic peptide
PGSNSGH

SEQ ID NO: 7437 - protein, 7 aa, Artificial Sequence
  Description of Artificial Sequence: Synthetic peptide
PGSQAVH

SEQ ID NO: 7438 - protein, 7 aa, Artificial Sequence
  Description of Artificial Sequence: Synthetic peptide
PGSQRNS

SEQ ID NO: 7439 - protein, 7 aa, Artificial Sequence
  Description of Artificial Sequence: Synthetic peptide
PGSRAPG

SEQ ID NO: 7440 - protein, 7 aa, Artificial Sequence
  Description of Artificial Sequence: Synthetic peptide
PGTARTN

SEQ ID NO: 7441 - protein, 7 aa, Artificial Sequence
  Description of Artificial Sequence: Synthetic peptide
PGTGRYV

SEQ ID NO: 7442 - protein, 7 aa, Artificial Sequence
  Description of Artificial Sequence: Synthetic peptide
PGTPLQS

SEQ ID NO: 7443 - protein, 7 aa, Artificial Sequence
  Description of Artificial Sequence: Synthetic peptide
PGTSSTG

SEQ ID NO: 7444 - protein, 7 aa, Artificial Sequence
  Description of Artificial Sequence: Synthetic peptide
PGVNPAI

SEQ ID NO: 7445 - protein, 7 aa, Artificial Sequence
  Description of Artificial Sequence: Synthetic peptide
PGVRGSP

SEQ ID NO: 7446 - protein, 7 aa, Artificial Sequence
  Description of Artificial Sequence: Synthetic peptide
PGVTDRG

SEQ ID NO: 7447 - protein, 7 aa, Artificial Sequence
  Description of Artificial Sequence: Synthetic peptide
PGYPAVT

SEQ ID NO: 7448 - protein, 7 aa, Artificial Sequence
  Description of Artificial Sequence: Synthetic peptide
PHANSSL

SEQ ID NO: 7449 - protein, 7 aa, Artificial Sequence
  Description of Artificial Sequence: Synthetic peptide
PHDSPTP

SEQ ID NO: 7450 - protein, 7 aa, Artificial Sequence
  Description of Artificial Sequence: Synthetic peptide
PHGVGDA

SEQ ID NO: 7451 - protein, 7 aa, Artificial Sequence
  Description of Artificial Sequence: Synthetic peptide
PHHDDEN

SEQ ID NO: 7452 - protein, 7 aa, Artificial Sequence
  Description of Artificial Sequence: Synthetic peptide
PHLECGM

SEQ ID NO: 7453 - protein, 7 aa, Artificial Sequence
  Description of Artificial Sequence: Synthetic peptide
PHLGVST

SEQ ID NO: 7454 - protein, 7 aa, Artificial Sequence
  Description of Artificial Sequence: Synthetic peptide
PHLHNGL

SEQ ID NO: 7455 - protein, 7 aa, Artificial Sequence
  Description of Artificial Sequence: Synthetic peptide
PHLKIAA

SEQ ID NO: 7456 - protein, 7 aa, Artificial Sequence
  Description of Artificial Sequence: Synthetic peptide
PHLPDHA

SEQ ID NO: 7457 - protein, 7 aa, Artificial Sequence
  Description of Artificial Sequence: Synthetic peptide
PHLPPAN

SEQ ID NO: 7458 - protein, 7 aa, Artificial Sequence
  Description of Artificial Sequence: Synthetic peptide
PHLPQNM

SEQ ID NO: 7459 - protein, 7 aa, Artificial Sequence
  Description of Artificial Sequence: Synthetic peptide
PHLSANA

SEQ ID NO: 7460 - protein, 7 aa, Artificial Sequence
  Description of Artificial Sequence: Synthetic peptide
PHMGRAD

SEQ ID NO: 7461 - protein, 7 aa, Artificial Sequence
  Description of Artificial Sequence: Synthetic peptide
PHNSTDT

SEQ ID NO: 7462 - protein, 7 aa, Artificial Sequence
  Description of Artificial Sequence: Synthetic peptide
PHPNSSP

SEQ ID NO: 7463 - protein, 7 aa, Artificial Sequence
  Description of Artificial Sequence: Synthetic peptide
PHPPEQS

SEQ ID NO: 7464 - protein, 7 aa, Artificial Sequence
  Description of Artificial Sequence: Synthetic peptide
PHPPSNR

SEQ ID NO: 7465 - protein, 7 aa, Artificial Sequence
  Description of Artificial Sequence: Synthetic peptide
PHPSAQG

SEQ ID NO: 7466 - protein, 7 aa, Artificial Sequence
  Description of Artificial Sequence: Synthetic peptide
PHPSSIP

SEQ ID NO: 7467 - protein, 7 aa, Artificial Sequence
  Description of Artificial Sequence: Synthetic peptide
PHQSIPP

SEQ ID NO: 7468 - protein, 7 aa, Artificial Sequence
  Description of Artificial Sequence: Synthetic peptide
PHREYVV

SEQ ID NO: 7469 - protein, 7 aa, Artificial Sequence
  Description of Artificial Sequence: Synthetic peptide
PHRPSNS

SEQ ID NO: 7470 - protein, 7 aa, Artificial Sequence
  Description of Artificial Sequence: Synthetic peptide
PHRPTVV

SEQ ID NO: 7471 - protein, 7 aa, Artificial Sequence
  Description of Artificial Sequence: Synthetic peptide
PHRVSVS

SEQ ID NO: 7472 - protein, 7 aa, Artificial Sequence
  Description of Artificial Sequence: Synthetic peptide
PHSNMNS

SEQ ID NO: 7473 - protein, 7 aa, Artificial Sequence
  Description of Artificial Sequence: Synthetic peptide
PHSSKEM

SEQ ID NO: 7474 - protein, 7 aa, Artificial Sequence
  Description of Artificial Sequence: Synthetic peptide
PHSSMLL

SEQ ID NO: 7475 - protein, 7 aa, Artificial Sequence
  Description of Artificial Sequence: Synthetic peptide
PHTGYTD

SEQ ID NO: 7476 - protein, 7 aa, Artificial Sequence
  Description of Artificial Sequence: Synthetic peptide
PHTLVTR

SEQ ID NO: 7477 - protein, 7 aa, Artificial Sequence
  Description of Artificial Sequence: Synthetic peptide
PHTSPPS

SEQ ID NO: 7478 - protein, 7 aa, Artificial Sequence
  Description of Artificial Sequence: Synthetic peptide
PIAREYG

SEQ ID NO: 7479 - protein, 7 aa, Artificial Sequence
  Description of Artificial Sequence: Synthetic peptide
PIARGDF

SEQ ID NO: 7480 - protein, 7 aa, Artificial Sequence
  Description of Artificial Sequence: Synthetic peptide
PIDREYA

SEQ ID NO: 7481 - protein, 7 aa, Artificial Sequence
  Description of Artificial Sequence: Synthetic peptide
PIDTGRE

SEQ ID NO: 7482 - protein, 7 aa, Artificial Sequence
  Description of Artificial Sequence: Synthetic peptide
PIDYGVE

SEQ ID NO: 7483 - protein, 7 aa, Artificial Sequence
  Description of Artificial Sequence: Synthetic peptide
PIEGRRV

SEQ ID NO: 7484 - protein, 7 aa, Artificial Sequence
  Description of Artificial Sequence: Synthetic peptide
PIERTLP

SEQ ID NO: 7485 - protein, 7 aa, Artificial Sequence
  Description of Artificial Sequence: Synthetic peptide
PIGPPNS

SEQ ID NO: 7486 - protein, 7 aa, Artificial Sequence
  Description of Artificial Sequence: Synthetic peptide
PIGSMLS

SEQ ID NO: 7487 - protein, 7 aa, Artificial Sequence
  Description of Artificial Sequence: Synthetic peptide
PIGSNGK

SEQ ID NO: 7488 - protein, 7 aa, Artificial Sequence
  Description of Artificial Sequence: Synthetic peptide
PIGVQEK

SEQ ID NO: 7489 - protein, 7 aa, Artificial Sequence
  Description of Artificial Sequence: Synthetic peptide
PIHISSV

SEQ ID NO: 7490 - protein, 7 aa, Artificial Sequence
  Description of Artificial Sequence: Synthetic peptide
PIHYSQD

SEQ ID NO: 7491 - protein, 7 aa, Artificial Sequence
  Description of Artificial Sequence: Synthetic peptide
PIMGQKS

SEQ ID NO: 7492 - protein, 7 aa, Artificial Sequence
  Description of Artificial Sequence: Synthetic peptide
PINDSSS

SEQ ID NO: 7493 - protein, 7 aa, Artificial Sequence
  Description of Artificial Sequence: Synthetic peptide
PINMRGP

SEQ ID NO: 7494 - protein, 7 aa, Artificial Sequence
  Description of Artificial Sequence: Synthetic peptide
PIPDKSS

SEQ ID NO: 7495 - protein, 7 aa, Artificial Sequence
  Description of Artificial Sequence: Synthetic peptide
PIPGPGK

SEQ ID NO: 7496 - protein, 7 aa, Artificial Sequence
  Description of Artificial Sequence: Synthetic peptide
PIPNKGG

SEQ ID NO: 7497 - protein, 7 aa, Artificial Sequence
  Description of Artificial Sequence: Synthetic peptide
PIQTRTY

SEQ ID NO: 7498 - protein, 7 aa, Artificial Sequence
  Description of Artificial Sequence: Synthetic peptide
PIRAAAS

SEQ ID NO: 7499 - protein, 7 aa, Artificial Sequence
  Description of Artificial Sequence: Synthetic peptide
PIRAEAV

SEQ ID NO: 7500 - protein, 7 aa, Artificial Sequence
  Description of Artificial Sequence: Synthetic peptide
PISEFNA

SEQ ID NO: 7501 - protein, 7 aa, Artificial Sequence
  Description of Artificial Sequence: Synthetic peptide
PISLSMP

SEQ ID NO: 7502 - protein, 7 aa, Artificial Sequence
  Description of Artificial Sequence: Synthetic peptide
PISPLSY

SEQ ID NO: 7503 - protein, 7 aa, Artificial Sequence
  Description of Artificial Sequence: Synthetic peptide
PISQGRL

SEQ ID NO: 7504 - protein, 7 aa, Artificial Sequence
  Description of Artificial Sequence: Synthetic peptide
PISSKSS

SEQ ID NO: 7505 - protein, 7 aa, Artificial Sequence
  Description of Artificial Sequence: Synthetic peptide
PISTLLA

SEQ ID NO: 7506 - protein, 7 aa, Artificial Sequence
  Description of Artificial Sequence: Synthetic peptide
PITNPRI

SEQ ID NO: 7507 - protein, 7 aa, Artificial Sequence
  Description of Artificial Sequence: Synthetic peptide
PITNSNI

SEQ ID NO: 7508 - protein, 7 aa, Artificial Sequence
  Description of Artificial Sequence: Synthetic peptide
PITNYSS

SEQ ID NO: 7509 - protein, 7 aa, Artificial Sequence
  Description of Artificial Sequence: Synthetic peptide
PITPGNE

SEQ ID NO: 7510 - protein, 7 aa, Artificial Sequence
  Description of Artificial Sequence: Synthetic peptide
PITTVPA

SEQ ID NO: 7511 - protein, 7 aa, Artificial Sequence
  Description of Artificial Sequence: Synthetic peptide
PIVGSHE

SEQ ID NO: 7512 - protein, 7 aa, Artificial Sequence
  Description of Artificial Sequence: Synthetic peptide
PIVPVSA

SEQ ID NO: 7513 - protein, 7 aa, Artificial Sequence
  Description of Artificial Sequence: Synthetic peptide
PIVTHAL

SEQ ID NO: 7514 - protein, 7 aa, Artificial Sequence
  Description of Artificial Sequence: Synthetic peptide
PIYKGTG

SEQ ID NO: 7515 - protein, 7 aa, Artificial Sequence
  Description of Artificial Sequence: Synthetic peptide
PKAAPNF

SEQ ID NO: 7516 - protein, 7 aa, Artificial Sequence
  Description of Artificial Sequence: Synthetic peptide
PKAILPS

SEQ ID NO: 7517 - protein, 7 aa, Artificial Sequence
  Description of Artificial Sequence: Synthetic peptide
PKASDWH

SEQ ID NO: 7518 - protein, 7 aa, Artificial Sequence
  Description of Artificial Sequence: Synthetic peptide
PKDDGQN

SEQ ID NO: 7519 - protein, 7 aa, Artificial Sequence
  Description of Artificial Sequence: Synthetic peptide
PKDIREF

SEQ ID NO: 7520 - protein, 7 aa, Artificial Sequence
  Description of Artificial Sequence: Synthetic peptide
PKDRNPV

SEQ ID NO: 7521 - protein, 7 aa, Artificial Sequence
  Description of Artificial Sequence: Synthetic peptide
PKDSSRT

SEQ ID NO: 7522 - protein, 7 aa, Artificial Sequence
  Description of Artificial Sequence: Synthetic peptide
PKERTHL

SEQ ID NO: 7523 - protein, 7 aa, Artificial Sequence
  Description of Artificial Sequence: Synthetic peptide
PKFGGVS

SEQ ID NO: 7524 - protein, 7 aa, Artificial Sequence
  Description of Artificial Sequence: Synthetic peptide
PKGAATM

SEQ ID NO: 7525 - protein, 7 aa, Artificial Sequence
  Description of Artificial Sequence: Synthetic peptide
PKGETGR

SEQ ID NO: 7526 - protein, 7 aa, Artificial Sequence
  Description of Artificial Sequence: Synthetic peptide
PKGTHFG

SEQ ID NO: 7527 - protein, 7 aa, Artificial Sequence
  Description of Artificial Sequence: Synthetic peptide
PKGYGAS

SEQ ID NO: 7528 - protein, 7 aa, Artificial Sequence
  Description of Artificial Sequence: Synthetic peptide
PKISTLG

SEQ ID NO: 7529 - protein, 7 aa, Artificial Sequence
  Description of Artificial Sequence: Synthetic peptide
PKKDPVP

SEQ ID NO: 7530 - protein, 7 aa, Artificial Sequence
  Description of Artificial Sequence: Synthetic peptide
PKLKDVT

SEQ ID NO: 7531 - protein, 7 aa, Artificial Sequence
  Description of Artificial Sequence: Synthetic peptide
PKLSSST

SEQ ID NO: 7532 - protein, 7 aa, Artificial Sequence
  Description of Artificial Sequence: Synthetic peptide
PKLYDMM

SEQ ID NO: 7533 - protein, 7 aa, Artificial Sequence
  Description of Artificial Sequence: Synthetic peptide
PKMDDKN

SEQ ID NO: 7534 - protein, 7 aa, Artificial Sequence
  Description of Artificial Sequence: Synthetic peptide
PKMLVTG

SEQ ID NO: 7535 - protein, 7 aa, Artificial Sequence
  Description of Artificial Sequence: Synthetic peptide
PKMTGAR

SEQ ID NO: 7536 - protein, 7 aa, Artificial Sequence
  Description of Artificial Sequence: Synthetic peptide
PKNMVPP

SEQ ID NO: 7537 - protein, 7 aa, Artificial Sequence
  Description of Artificial Sequence: Synthetic peptide
PKPEFAS

SEQ ID NO: 7538 - protein, 7 aa, Artificial Sequence
  Description of Artificial Sequence: Synthetic peptide
PKPEFLA

SEQ ID NO: 7539 - protein, 7 aa, Artificial Sequence
  Description of Artificial Sequence: Synthetic peptide
PKPEPHA

SEQ ID NO: 7540 - protein, 7 aa, Artificial Sequence
  Description of Artificial Sequence: Synthetic peptide
PKPITVT

SEQ ID NO: 7541 - protein, 7 aa, Artificial Sequence
  Description of Artificial Sequence: Synthetic peptide
PKPPNLL

SEQ ID NO: 7542 - protein, 7 aa, Artificial Sequence
  Description of Artificial Sequence: Synthetic peptide
PKPPSLG

SEQ ID NO: 7543 - protein, 7 aa, Artificial Sequence
  Description of Artificial Sequence: Synthetic peptide
PKQESYA

SEQ ID NO: 7544 - protein, 7 aa, Artificial Sequence
  Description of Artificial Sequence: Synthetic peptide
PKSMDGY

SEQ ID NO: 7545 - protein, 7 aa, Artificial Sequence
  Description of Artificial Sequence: Synthetic peptide
PKSNYYP

SEQ ID NO: 7546 - protein, 7 aa, Artificial Sequence
  Description of Artificial Sequence: Synthetic peptide
PKTHVLS

SEQ ID NO: 7547 - protein, 7 aa, Artificial Sequence
  Description of Artificial Sequence: Synthetic peptide
PKTYETV

SEQ ID NO: 7548 - protein, 7 aa, Artificial Sequence
  Description of Artificial Sequence: Synthetic peptide
PLAAGSV

SEQ ID NO: 7549 - protein, 7 aa, Artificial Sequence
  Description of Artificial Sequence: Synthetic peptide
PLAGPLT

SEQ ID NO: 7550 - protein, 7 aa, Artificial Sequence
  Description of Artificial Sequence: Synthetic peptide
PLAHTTS

SEQ ID NO: 7551 - protein, 7 aa, Artificial Sequence
  Description of Artificial Sequence: Synthetic peptide
PLAREEL

SEQ ID NO: 7552 - protein, 7 aa, Artificial Sequence
  Description of Artificial Sequence: Synthetic peptide
PLASPIP

SEQ ID NO: 7553 - protein, 7 aa, Artificial Sequence
  Description of Artificial Sequence: Synthetic peptide
PLASTYP

SEQ ID NO: 7554 - protein, 7 aa, Artificial Sequence
  Description of Artificial Sequence: Synthetic peptide
PLDAKMY

SEQ ID NO: 7555 - protein, 7 aa, Artificial Sequence
  Description of Artificial Sequence: Synthetic peptide
PLDDKPF

SEQ ID NO: 7556 - protein, 7 aa, Artificial Sequence
  Description of Artificial Sequence: Synthetic peptide
PLDPGIL

SEQ ID NO: 7557 - protein, 7 aa, Artificial Sequence
  Description of Artificial Sequence: Synthetic peptide
PLDSNVV

SEQ ID NO: 7558 - protein, 7 aa, Artificial Sequence
  Description of Artificial Sequence: Synthetic peptide
PLDTRFS

SEQ ID NO: 7559 - protein, 7 aa, Artificial Sequence
  Description of Artificial Sequence: Synthetic peptide
PLDYRKG

SEQ ID NO: 7560 - protein, 7 aa, Artificial Sequence
  Description of Artificial Sequence: Synthetic peptide
PLEKSSF

SEQ ID NO: 7561 - protein, 7 aa, Artificial Sequence
  Description of Artificial Sequence: Synthetic peptide
PLESVDI

SEQ ID NO: 7562 - protein, 7 aa, Artificial Sequence
  Description of Artificial Sequence: Synthetic peptide
PLFNGSA

SEQ ID NO: 7563 - protein, 7 aa, Artificial Sequence
  Description of Artificial Sequence: Synthetic peptide
PLGAGKS

SEQ ID NO: 7564 - protein, 7 aa, Artificial Sequence
  Description of Artificial Sequence: Synthetic peptide
PLGAQHL

SEQ ID NO: 7565 - protein, 7 aa, Artificial Sequence
  Description of Artificial Sequence: Synthetic peptide
PLGDAWG

SEQ ID NO: 7566 - protein, 7 aa, Artificial Sequence
  Description of Artificial Sequence: Synthetic peptide
PLGMVHT

SEQ ID NO: 7567 - protein, 7 aa, Artificial Sequence
  Description of Artificial Sequence: Synthetic peptide
PLHMTTM

SEQ ID NO: 7568 - protein, 7 aa, Artificial Sequence
  Description of Artificial Sequence: Synthetic peptide
PLHNRVP

SEQ ID NO: 7569 - protein, 7 aa, Artificial Sequence
  Description of Artificial Sequence: Synthetic peptide
PLHRANT

SEQ ID NO: 7570 - protein, 7 aa, Artificial Sequence
  Description of Artificial Sequence: Synthetic peptide
PLHRTLD

SEQ ID NO: 7571 - protein, 7 aa, Artificial Sequence
  Description of Artificial Sequence: Synthetic peptide
PLIAVPT

SEQ ID NO: 7572 - protein, 7 aa, Artificial Sequence
  Description of Artificial Sequence: Synthetic peptide
PLIGKPN

SEQ ID NO: 7573 - protein, 7 aa, Artificial Sequence
  Description of Artificial Sequence: Synthetic peptide
PLITPDL

SEQ ID NO: 7574 - protein, 7 aa, Artificial Sequence
  Description of Artificial Sequence: Synthetic peptide
PLKAHMM

SEQ ID NO: 7575 - protein, 7 aa, Artificial Sequence
  Description of Artificial Sequence: Synthetic peptide
PLKASGM

SEQ ID NO: 7576 - protein, 7 aa, Artificial Sequence
  Description of Artificial Sequence: Synthetic peptide
PLKLSYG

SEQ ID NO: 7577 - protein, 7 aa, Artificial Sequence
  Description of Artificial Sequence: Synthetic peptide
PLKVSAS

SEQ ID NO: 7578 - protein, 7 aa, Artificial Sequence
  Description of Artificial Sequence: Synthetic peptide
PLLDSHS

SEQ ID NO: 7579 - protein, 7 aa, Artificial Sequence
  Description of Artificial Sequence: Synthetic peptide
PLLEHRG

SEQ ID NO: 7580 - protein, 7 aa, Artificial Sequence
  Description of Artificial Sequence: Synthetic peptide
PLLHDKI

SEQ ID NO: 7581 - protein, 7 aa, Artificial Sequence
  Description of Artificial Sequence: Synthetic peptide
PLNAAPF

SEQ ID NO: 7582 - protein, 7 aa, Artificial Sequence
  Description of Artificial Sequence: Synthetic peptide
PLNGDAP

SEQ ID NO: 7583 - protein, 7 aa, Artificial Sequence
  Description of Artificial Sequence: Synthetic peptide
PLNPSTG

SEQ ID NO: 7584 - protein, 7 aa, Artificial Sequence
  Description of Artificial Sequence: Synthetic peptide
PLNVRTV

SEQ ID NO: 7585 - protein, 7 aa, Artificial Sequence
  Description of Artificial Sequence: Synthetic peptide
PLPDYLV

SEQ ID NO: 7586 - protein, 7 aa, Artificial Sequence
  Description of Artificial Sequence: Synthetic peptide
PLPGNVG

SEQ ID NO: 7587 - protein, 7 aa, Artificial Sequence
  Description of Artificial Sequence: Synthetic peptide
PLPLRTG

SEQ ID NO: 7588 - protein, 7 aa, Artificial Sequence
  Description of Artificial Sequence: Synthetic peptide
PLPPPEA

SEQ ID NO: 7589 - protein, 7 aa, Artificial Sequence
  Description of Artificial Sequence: Synthetic peptide
PLPRLAS

SEQ ID NO: 7590 - protein, 7 aa, Artificial Sequence
  Description of Artificial Sequence: Synthetic peptide
PLPSDGH

SEQ ID NO: 7591 - protein, 7 aa, Artificial Sequence
  Description of Artificial Sequence: Synthetic peptide
PLPVSRS

SEQ ID NO: 7592 - protein, 7 aa, Artificial Sequence
  Description of Artificial Sequence: Synthetic peptide
PLQSQTV

SEQ ID NO: 7593 - protein, 7 aa, Artificial Sequence
  Description of Artificial Sequence: Synthetic peptide
PLQSSQF

SEQ ID NO: 7594 - protein, 7 aa, Artificial Sequence
  Description of Artificial Sequence: Synthetic peptide
PLQTMTL

SEQ ID NO: 7595 - protein, 7 aa, Artificial Sequence
  Description of Artificial Sequence: Synthetic peptide
PLQVRLS

SEQ ID NO: 7596 - protein, 7 aa, Artificial Sequence
  Description of Artificial Sequence: Synthetic peptide
PLRDGLV

SEQ ID NO: 7597 - protein, 7 aa, Artificial Sequence
  Description of Artificial Sequence: Synthetic peptide
PLRLTSD

SEQ ID NO: 7598 - protein, 7 aa, Artificial Sequence
  Description of Artificial Sequence: Synthetic peptide
PLRPGQL

SEQ ID NO: 7599 - protein, 7 aa, Artificial Sequence
  Description of Artificial Sequence: Synthetic peptide
PLRVSTP

SEQ ID NO: 7600 - protein, 7 aa, Artificial Sequence
  Description of Artificial Sequence: Synthetic peptide
PLSAINS

SEQ ID NO: 7601 - protein, 7 aa, Artificial Sequence
  Description of Artificial Sequence: Synthetic peptide
PLSDAMS

SEQ ID NO: 7602 - protein, 7 aa, Artificial Sequence
  Description of Artificial Sequence: Synthetic peptide
PLSDPNI

SEQ ID NO: 7603 - protein, 7 aa, Artificial Sequence
  Description of Artificial Sequence: Synthetic peptide
PLSEDKR

SEQ ID NO: 7604 - protein, 7 aa, Artificial Sequence
  Description of Artificial Sequence: Synthetic peptide
PLSFTVA

SEQ ID NO: 7605 - protein, 7 aa, Artificial Sequence
  Description of Artificial Sequence: Synthetic peptide
PLSMMEP

SEQ ID NO: 7606 - protein, 7 aa, Artificial Sequence
  Description of Artificial Sequence: Synthetic peptide
PLSMRPD

SEQ ID NO: 7607 - protein, 7 aa, Artificial Sequence
  Description of Artificial Sequence: Synthetic peptide
PLSNLQP

SEQ ID NO: 7608 - protein, 7 aa, Artificial Sequence
  Description of Artificial Sequence: Synthetic peptide
PLSPAGA

SEQ ID NO: 7609 - protein, 7 aa, Artificial Sequence
  Description of Artificial Sequence: Synthetic peptide
PLSPIRN

SEQ ID NO: 7610 - protein, 7 aa, Artificial Sequence
  Description of Artificial Sequence: Synthetic peptide
PLSPTWK

SEQ ID NO: 7611 - protein, 7 aa, Artificial Sequence
  Description of Artificial Sequence: Synthetic peptide
PLSRNQI

SEQ ID NO: 7612 - protein, 7 aa, Artificial Sequence
  Description of Artificial Sequence: Synthetic peptide
PLSSAAG

SEQ ID NO: 7613 - protein, 7 aa, Artificial Sequence
  Description of Artificial Sequence: Synthetic peptide
PLSSGGM

SEQ ID NO: 7614 - protein, 7 aa, Artificial Sequence
  Description of Artificial Sequence: Synthetic peptide
PLSSPAR

SEQ ID NO: 7615 - protein, 7 aa, Artificial Sequence
  Description of Artificial Sequence: Synthetic peptide
PLSSPNG

SEQ ID NO: 7616 - protein, 7 aa, Artificial Sequence
  Description of Artificial Sequence: Synthetic peptide
PLSSTLG

SEQ ID NO: 7617 - protein, 7 aa, Artificial Sequence
  Description of Artificial Sequence: Synthetic peptide
PLSTNST

SEQ ID NO: 7618 - protein, 7 aa, Artificial Sequence
  Description of Artificial Sequence: Synthetic peptide
PLSYQKN

SEQ ID NO: 7619 - protein, 7 aa, Artificial Sequence
  Description of Artificial Sequence: Synthetic peptide
PLTAGLA

SEQ ID NO: 7620 - protein, 7 aa, Artificial Sequence
  Description of Artificial Sequence: Synthetic peptide
PLTAHVS

SEQ ID NO: 7621 - protein, 7 aa, Artificial Sequence
  Description of Artificial Sequence: Synthetic peptide
PLTQAVP

SEQ ID NO: 7622 - protein, 7 aa, Artificial Sequence
  Description of Artificial Sequence: Synthetic peptide
PLTSLKL

SEQ ID NO: 7623 - protein, 7 aa, Artificial Sequence
  Description of Artificial Sequence: Synthetic peptide
PLTSVAP

SEQ ID NO: 7624 - protein, 7 aa, Artificial Sequence
  Description of Artificial Sequence: Synthetic peptide
PLTTRNQ

SEQ ID NO: 7625 - protein, 7 aa, Artificial Sequence
  Description of Artificial Sequence: Synthetic peptide
PLVAIST

SEQ ID NO: 7626 - protein, 7 aa, Artificial Sequence
  Description of Artificial Sequence: Synthetic peptide
PLVLSSH

SEQ ID NO: 7627 - protein, 7 aa, Artificial Sequence
  Description of Artificial Sequence: Synthetic peptide
PLVRGDS

SEQ ID NO: 7628 - protein, 7 aa, Artificial Sequence
  Description of Artificial Sequence: Synthetic peptide
PLVSTGI

SEQ ID NO: 7629 - protein, 7 aa, Artificial Sequence
  Description of Artificial Sequence: Synthetic peptide
PLVTMAS

SEQ ID NO: 7630 - protein, 7 aa, Artificial Sequence
  Description of Artificial Sequence: Synthetic peptide
PMAPPVQ

SEQ ID NO: 7631 - protein, 7 aa, Artificial Sequence
  Description of Artificial Sequence: Synthetic peptide
PMAQVAP

SEQ ID NO: 7632 - protein, 7 aa, Artificial Sequence
  Description of Artificial Sequence: Synthetic peptide
PMERTHM

SEQ ID NO: 7633 - protein, 7 aa, Artificial Sequence
  Description of Artificial Sequence: Synthetic peptide
PMGHQSA

SEQ ID NO: 7634 - protein, 7 aa, Artificial Sequence
  Description of Artificial Sequence: Synthetic peptide
PMINSSM

SEQ ID NO: 7635 - protein, 7 aa, Artificial Sequence
  Description of Artificial Sequence: Synthetic peptide
PMKASSP

SEQ ID NO: 7636 - protein, 7 aa, Artificial Sequence
  Description of Artificial Sequence: Synthetic peptide
PMKGSVY

SEQ ID NO: 7637 - protein, 7 aa, Artificial Sequence
  Description of Artificial Sequence: Synthetic peptide
PMKMGPG

SEQ ID NO: 7638 - protein, 7 aa, Artificial Sequence
  Description of Artificial Sequence: Synthetic peptide
PMMQTPK

SEQ ID NO: 7639 - protein, 7 aa, Artificial Sequence
  Description of Artificial Sequence: Synthetic peptide
PMNRGKE

SEQ ID NO: 7640 - protein, 7 aa, Artificial Sequence
  Description of Artificial Sequence: Synthetic peptide
PMNTNVS

SEQ ID NO: 7641 - protein, 7 aa, Artificial Sequence
  Description of Artificial Sequence: Synthetic peptide
PMPASDF

SEQ ID NO: 7642 - protein, 7 aa, Artificial Sequence
  Description of Artificial Sequence: Synthetic peptide
PMPEFNG

SEQ ID NO: 7643 - protein, 7 aa, Artificial Sequence
  Description of Artificial Sequence: Synthetic peptide
PMPEMAG

SEQ ID NO: 7644 - protein, 7 aa, Artificial Sequence
  Description of Artificial Sequence: Synthetic peptide
PMPVRAV

SEQ ID NO: 7645 - protein, 7 aa, Artificial Sequence
  Description of Artificial Sequence: Synthetic peptide
PMRGSTL

SEQ ID NO: 7646 - protein, 7 aa, Artificial Sequence
  Description of Artificial Sequence: Synthetic peptide
PMRNQVD

SEQ ID NO: 7647 - protein, 7 aa, Artificial Sequence
  Description of Artificial Sequence: Synthetic peptide
PMRQIND

SEQ ID NO: 7648 - protein, 7 aa, Artificial Sequence
  Description of Artificial Sequence: Synthetic peptide
PMSELTP

SEQ ID NO: 7649 - protein, 7 aa, Artificial Sequence
  Description of Artificial Sequence: Synthetic peptide
PMSGPSM

SEQ ID NO: 7650 - protein, 7 aa, Artificial Sequence
  Description of Artificial Sequence: Synthetic peptide
PMSGSNA

SEQ ID NO: 7651 - protein, 7 aa, Artificial Sequence
  Description of Artificial Sequence: Synthetic peptide
PMSHMAP

SEQ ID NO: 7652 - protein, 7 aa, Artificial Sequence
  Description of Artificial Sequence: Synthetic peptide
PMSLPLS

SEQ ID NO: 7653 - protein, 7 aa, Artificial Sequence
  Description of Artificial Sequence: Synthetic peptide
PMSMKEP

SEQ ID NO: 7654 - protein, 7 aa, Artificial Sequence
  Description of Artificial Sequence: Synthetic peptide
PMSQTPG

SEQ ID NO: 7655 - protein, 7 aa, Artificial Sequence
  Description of Artificial Sequence: Synthetic peptide
PMSQTTS

SEQ ID NO: 7656 - protein, 7 aa, Artificial Sequence
  Description of Artificial Sequence: Synthetic peptide
PMSSPLK

SEQ ID NO: 7657 - protein, 7 aa, Artificial Sequence
  Description of Artificial Sequence: Synthetic peptide
PMSSRVV

SEQ ID NO: 7658 - protein, 7 aa, Artificial Sequence
  Description of Artificial Sequence: Synthetic peptide
PMSTSTP

SEQ ID NO: 7659 - protein, 7 aa, Artificial Sequence
  Description of Artificial Sequence: Synthetic peptide
PMVKGTS

SEQ ID NO: 7660 - protein, 7 aa, Artificial Sequence
  Description of Artificial Sequence: Synthetic peptide
PMVTVRT

SEQ ID NO: 7661 - protein, 7 aa, Artificial Sequence
  Description of Artificial Sequence: Synthetic peptide
PNAKTIP

SEQ ID NO: 7662 - protein, 7 aa, Artificial Sequence
  Description of Artificial Sequence: Synthetic peptide
PNAQTVY

SEQ ID NO: 7663 - protein, 7 aa, Artificial Sequence
  Description of Artificial Sequence: Synthetic peptide
PNARMLV

SEQ ID NO: 7664 - protein, 7 aa, Artificial Sequence
  Description of Artificial Sequence: Synthetic peptide
PNDGALP

SEQ ID NO: 7665 - protein, 7 aa, Artificial Sequence
  Description of Artificial Sequence: Synthetic peptide
PNDRAVV

SEQ ID NO: 7666 - protein, 7 aa, Artificial Sequence
  Description of Artificial Sequence: Synthetic peptide
PNDRTRI

SEQ ID NO: 7667 - protein, 7 aa, Artificial Sequence
  Description of Artificial Sequence: Synthetic peptide
PNEQALG

SEQ ID NO: 7668 - protein, 7 aa, Artificial Sequence
  Description of Artificial Sequence: Synthetic peptide
PNESLVT

SEQ ID NO: 7669 - protein, 7 aa, Artificial Sequence
  Description of Artificial Sequence: Synthetic peptide
PNFHRAE

SEQ ID NO: 7670 - protein, 7 aa, Artificial Sequence
  Description of Artificial Sequence: Synthetic peptide
PNGPYNA

SEQ ID NO: 7671 - protein, 7 aa, Artificial Sequence
  Description of Artificial Sequence: Synthetic peptide
PNGSAKS

SEQ ID NO: 7672 - protein, 7 aa, Artificial Sequence
  Description of Artificial Sequence: Synthetic peptide
PNHDVPP

SEQ ID NO: 7673 - protein, 7 aa, Artificial Sequence
  Description of Artificial Sequence: Synthetic peptide
PNHKGFG

SEQ ID NO: 7674 - protein, 7 aa, Artificial Sequence
  Description of Artificial Sequence: Synthetic peptide
PNHNSDK

SEQ ID NO: 7675 - protein, 7 aa, Artificial Sequence
  Description of Artificial Sequence: Synthetic peptide
PNHSQLL

SEQ ID NO: 7676 - protein, 7 aa, Artificial Sequence
  Description of Artificial Sequence: Synthetic peptide
PNIKNPS

SEQ ID NO: 7677 - protein, 7 aa, Artificial Sequence
  Description of Artificial Sequence: Synthetic peptide
PNIPMRG

SEQ ID NO: 7678 - protein, 7 aa, Artificial Sequence
  Description of Artificial Sequence: Synthetic peptide
PNITSTL

SEQ ID NO: 7679 - protein, 7 aa, Artificial Sequence
  Description of Artificial Sequence: Synthetic peptide
PNLILGP

SEQ ID NO: 7680 - protein, 7 aa, Artificial Sequence
  Description of Artificial Sequence: Synthetic peptide
PNLQRSP

SEQ ID NO: 7681 - protein, 7 aa, Artificial Sequence
  Description of Artificial Sequence: Synthetic peptide
PNLSDES

SEQ ID NO: 7682 - protein, 7 aa, Artificial Sequence
  Description of Artificial Sequence: Synthetic peptide
PNLTMAS

SEQ ID NO: 7683 - protein, 7 aa, Artificial Sequence
  Description of Artificial Sequence: Synthetic peptide
PNLVTAA

SEQ ID NO: 7684 - protein, 7 aa, Artificial Sequence
  Description of Artificial Sequence: Synthetic peptide
PNNNVPS

SEQ ID NO: 7685 - protein, 7 aa, Artificial Sequence
  Description of Artificial Sequence: Synthetic peptide
PNNRDST

SEQ ID NO: 7686 - protein, 7 aa, Artificial Sequence
  Description of Artificial Sequence: Synthetic peptide
PNNVISE

SEQ ID NO: 7687 - protein, 7 aa, Artificial Sequence
  Description of Artificial Sequence: Synthetic peptide
PNNVPLA

SEQ ID NO: 7688 - protein, 7 aa, Artificial Sequence
  Description of Artificial Sequence: Synthetic peptide
PNPAAAA

SEQ ID NO: 7689 - protein, 7 aa, Artificial Sequence
  Description of Artificial Sequence: Synthetic peptide
PNPARLT

SEQ ID NO: 7690 - protein, 7 aa, Artificial Sequence
  Description of Artificial Sequence: Synthetic peptide
PNPIFSS

SEQ ID NO: 7691 - protein, 7 aa, Artificial Sequence
  Description of Artificial Sequence: Synthetic peptide
PNPTWSS

SEQ ID NO: 7692 - protein, 7 aa, Artificial Sequence
  Description of Artificial Sequence: Synthetic peptide
PNPVTRG

SEQ ID NO: 7693 - protein, 7 aa, Artificial Sequence
  Description of Artificial Sequence: Synthetic peptide
PNQDTLD

SEQ ID NO: 7694 - protein, 7 aa, Artificial Sequence
  Description of Artificial Sequence: Synthetic peptide
PNQSVKP

SEQ ID NO: 7695 - protein, 7 aa, Artificial Sequence
  Description of Artificial Sequence: Synthetic peptide
PNRGHPS

SEQ ID NO: 7696 - protein, 7 aa, Artificial Sequence
  Description of Artificial Sequence: Synthetic peptide
PNRIAPI

SEQ ID NO: 7697 - protein, 7 aa, Artificial Sequence
  Description of Artificial Sequence: Synthetic peptide
PNSGVVT

SEQ ID NO: 7698 - protein, 7 aa, Artificial Sequence
  Description of Artificial Sequence: Synthetic peptide
PNSLNAA

SEQ ID NO: 7699 - protein, 7 aa, Artificial Sequence
  Description of Artificial Sequence: Synthetic peptide
PNSRTPY

SEQ ID NO: 7700 - protein, 7 aa, Artificial Sequence
  Description of Artificial Sequence: Synthetic peptide
PNSSPRL

SEQ ID NO: 7701 - protein, 7 aa, Artificial Sequence
  Description of Artificial Sequence: Synthetic peptide
PNSTRVV

SEQ ID NO: 7702 - protein, 7 aa, Artificial Sequence
  Description of Artificial Sequence: Synthetic peptide
PNTMTRL

SEQ ID NO: 7703 - protein, 7 aa, Artificial Sequence
  Description of Artificial Sequence: Synthetic peptide
PNVHPNI

SEQ ID NO: 7704 - protein, 7 aa, Artificial Sequence
  Description of Artificial Sequence: Synthetic peptide
PNVNVST

SEQ ID NO: 7705 - protein, 7 aa, Artificial Sequence
  Description of Artificial Sequence: Synthetic peptide
PNVVDMS

SEQ ID NO: 7706 - protein, 7 aa, Artificial Sequence
  Description of Artificial Sequence: Synthetic peptide
PPADLRT

SEQ ID NO: 7707 - protein, 7 aa, Artificial Sequence
  Description of Artificial Sequence: Synthetic peptide
PPALSPV

SEQ ID NO: 7708 - protein, 7 aa, Artificial Sequence
  Description of Artificial Sequence: Synthetic peptide
PPANSSS

SEQ ID NO: 7709 - protein, 7 aa, Artificial Sequence
  Description of Artificial Sequence: Synthetic peptide
PPDARSS

SEQ ID NO: 7710 - protein, 7 aa, Artificial Sequence
  Description of Artificial Sequence: Synthetic peptide
PPDGASR

SEQ ID NO: 7711 - protein, 7 aa, Artificial Sequence
  Description of Artificial Sequence: Synthetic peptide
PPDKMHS

SEQ ID NO: 7712 - protein, 7 aa, Artificial Sequence
  Description of Artificial Sequence: Synthetic peptide
PPDNLHK

SEQ ID NO: 7713 - protein, 7 aa, Artificial Sequence
  Description of Artificial Sequence: Synthetic peptide
PPEMILG

SEQ ID NO: 7714 - protein, 7 aa, Artificial Sequence
  Description of Artificial Sequence: Synthetic peptide
PPFNKSD

SEQ ID NO: 7715 - protein, 7 aa, Artificial Sequence
  Description of Artificial Sequence: Synthetic peptide
PPFPERL

SEQ ID NO: 7716 - protein, 7 aa, Artificial Sequence
  Description of Artificial Sequence: Synthetic peptide
PPGHDAS

SEQ ID NO: 7717 - protein, 7 aa, Artificial Sequence
  Description of Artificial Sequence: Synthetic peptide
PPGITTS

SEQ ID NO: 7718 - protein, 7 aa, Artificial Sequence
  Description of Artificial Sequence: Synthetic peptide
PPGQSLT

SEQ ID NO: 7719 - protein, 7 aa, Artificial Sequence
  Description of Artificial Sequence: Synthetic peptide
PPGRVVA

SEQ ID NO: 7720 - protein, 7 aa, Artificial Sequence
  Description of Artificial Sequence: Synthetic peptide
PPGSHSS

SEQ ID NO: 7721 - protein, 7 aa, Artificial Sequence
  Description of Artificial Sequence: Synthetic peptide
PPGSSSR

SEQ ID NO: 7722 - protein, 7 aa, Artificial Sequence
  Description of Artificial Sequence: Synthetic peptide
PPGYRAS

SEQ ID NO: 7723 - protein, 7 aa, Artificial Sequence
  Description of Artificial Sequence: Synthetic peptide
PPHQHLL

SEQ ID NO: 7724 - protein, 7 aa, Artificial Sequence
  Description of Artificial Sequence: Synthetic peptide
PPHRTFP

SEQ ID NO: 7725 - protein, 7 aa, Artificial Sequence
  Description of Artificial Sequence: Synthetic peptide
PPHTTFL

SEQ ID NO: 7726 - protein, 7 aa, Artificial Sequence
  Description of Artificial Sequence: Synthetic peptide
PPIDNRT

SEQ ID NO: 7727 - protein, 7 aa, Artificial Sequence
  Description of Artificial Sequence: Synthetic peptide
PPKAMPT

SEQ ID NO: 7728 - protein, 7 aa, Artificial Sequence
  Description of Artificial Sequence: Synthetic peptide
PPLEVKQ

SEQ ID NO: 7729 - protein, 7 aa, Artificial Sequence
  Description of Artificial Sequence: Synthetic peptide
PPLHTGE

SEQ ID NO: 7730 - protein, 7 aa, Artificial Sequence
  Description of Artificial Sequence: Synthetic peptide
PPLKSPP

SEQ ID NO: 7731 - protein, 7 aa, Artificial Sequence
  Description of Artificial Sequence: Synthetic peptide
PPLPSNA

SEQ ID NO: 7732 - protein, 7 aa, Artificial Sequence
  Description of Artificial Sequence: Synthetic peptide
PPMHGTR

SEQ ID NO: 7733 - protein, 7 aa, Artificial Sequence
  Description of Artificial Sequence: Synthetic peptide
PPMSPHV

SEQ ID NO: 7734 - protein, 7 aa, Artificial Sequence
  Description of Artificial Sequence: Synthetic peptide
PPMVTNN

SEQ ID NO: 7735 - protein, 7 aa, Artificial Sequence
  Description of Artificial Sequence: Synthetic peptide
PPNNHAG

SEQ ID NO: 7736 - protein, 7 aa, Artificial Sequence
  Description of Artificial Sequence: Synthetic peptide
PPNYLNA

SEQ ID NO: 7737 - protein, 7 aa, Artificial Sequence
  Description of Artificial Sequence: Synthetic peptide
PPPAALS

SEQ ID NO: 7738 - protein, 7 aa, Artificial Sequence
  Description of Artificial Sequence: Synthetic peptide
PPPKSQS

SEQ ID NO: 7739 - protein, 7 aa, Artificial Sequence
  Description of Artificial Sequence: Synthetic peptide
PPPNNNL

SEQ ID NO: 7740 - protein, 7 aa, Artificial Sequence
  Description of Artificial Sequence: Synthetic peptide
PPPREVH

SEQ ID NO: 7741 - protein, 7 aa, Artificial Sequence
  Description of Artificial Sequence: Synthetic peptide
PPPSCMV

SEQ ID NO: 7742 - protein, 7 aa, Artificial Sequence
  Description of Artificial Sequence: Synthetic peptide
PPPSRMG

SEQ ID NO: 7743 - protein, 7 aa, Artificial Sequence
  Description of Artificial Sequence: Synthetic peptide
PPQEMRY

SEQ ID NO: 7744 - protein, 7 aa, Artificial Sequence
  Description of Artificial Sequence: Synthetic peptide
PPQSAAV

SEQ ID NO: 7745 - protein, 7 aa, Artificial Sequence
  Description of Artificial Sequence: Synthetic peptide
PPQSNRN

SEQ ID NO: 7746 - protein, 7 aa, Artificial Sequence
  Description of Artificial Sequence: Synthetic peptide
PPRISDA

SEQ ID NO: 7747 - protein, 7 aa, Artificial Sequence
  Description of Artificial Sequence: Synthetic peptide
PPRLPSC

SEQ ID NO: 7748 - protein, 7 aa, Artificial Sequence
  Description of Artificial Sequence: Synthetic peptide
PPRLVST

SEQ ID NO: 7749 - protein, 7 aa, Artificial Sequence
  Description of Artificial Sequence: Synthetic peptide
PPRPNGI

SEQ ID NO: 7750 - protein, 7 aa, Artificial Sequence
  Description of Artificial Sequence: Synthetic peptide
PPRRPME

SEQ ID NO: 7751 - protein, 7 aa, Artificial Sequence
  Description of Artificial Sequence: Synthetic peptide
PPRSNVE

SEQ ID NO: 7752 - protein, 7 aa, Artificial Sequence
  Description of Artificial Sequence: Synthetic peptide
PPRTPSS

SEQ ID NO: 7753 - protein, 7 aa, Artificial Sequence
  Description of Artificial Sequence: Synthetic peptide
PPRVSAV

SEQ ID NO: 7754 - protein, 7 aa, Artificial Sequence
  Description of Artificial Sequence: Synthetic peptide
PPSPSVT

SEQ ID NO: 7755 - protein, 7 aa, Artificial Sequence
  Description of Artificial Sequence: Synthetic peptide
PPSPTYM

SEQ ID NO: 7756 - protein, 7 aa, Artificial Sequence
  Description of Artificial Sequence: Synthetic peptide
PPSTEIS

SEQ ID NO: 7757 - protein, 7 aa, Artificial Sequence
  Description of Artificial Sequence: Synthetic peptide
PPSTKLV

SEQ ID NO: 7758 - protein, 7 aa, Artificial Sequence
  Description of Artificial Sequence: Synthetic peptide
PPSTNPK

SEQ ID NO: 7759 - protein, 7 aa, Artificial Sequence
  Description of Artificial Sequence: Synthetic peptide
PPSVPRE

SEQ ID NO: 7760 - protein, 7 aa, Artificial Sequence
  Description of Artificial Sequence: Synthetic peptide
PPTEPRA

SEQ ID NO: 7761 - protein, 7 aa, Artificial Sequence
  Description of Artificial Sequence: Synthetic peptide
PPTGASF

SEQ ID NO: 7762 - protein, 7 aa, Artificial Sequence
  Description of Artificial Sequence: Synthetic peptide
PPTITSS

SEQ ID NO: 7763 - protein, 7 aa, Artificial Sequence
  Description of Artificial Sequence: Synthetic peptide
PPTKVDM

SEQ ID NO: 7764 - protein, 7 aa, Artificial Sequence
  Description of Artificial Sequence: Synthetic peptide
PPTLQSD

SEQ ID NO: 7765 - protein, 7 aa, Artificial Sequence
  Description of Artificial Sequence: Synthetic peptide
PPTNPTV

SEQ ID NO: 7766 - protein, 7 aa, Artificial Sequence
  Description of Artificial Sequence: Synthetic peptide
PPTPAAH

SEQ ID NO: 7767 - protein, 7 aa, Artificial Sequence
  Description of Artificial Sequence: Synthetic peptide
PPTPVSW

SEQ ID NO: 7768 - protein, 7 aa, Artificial Sequence
  Description of Artificial Sequence: Synthetic peptide
PPTRESP

SEQ ID NO: 7769 - protein, 7 aa, Artificial Sequence
  Description of Artificial Sequence: Synthetic peptide
PPTTNLN

SEQ ID NO: 7770 - protein, 7 aa, Artificial Sequence
  Description of Artificial Sequence: Synthetic peptide
PPVGTVL

SEQ ID NO: 7771 - protein, 7 aa, Artificial Sequence
  Description of Artificial Sequence: Synthetic peptide
PPYGAVT

SEQ ID NO: 7772 - protein, 7 aa, Artificial Sequence
  Description of Artificial Sequence: Synthetic peptide
PPYTVSP

SEQ ID NO: 7773 - protein, 7 aa, Artificial Sequence
  Description of Artificial Sequence: Synthetic peptide
PQARQPF

SEQ ID NO: 7774 - protein, 7 aa, Artificial Sequence
  Description of Artificial Sequence: Synthetic peptide
PQEPGFD

SEQ ID NO: 7775 - protein, 7 aa, Artificial Sequence
  Description of Artificial Sequence: Synthetic peptide
PQERARS

SEQ ID NO: 7776 - protein, 7 aa, Artificial Sequence
  Description of Artificial Sequence: Synthetic peptide
PQHPSRN

SEQ ID NO: 7777 - protein, 7 aa, Artificial Sequence
  Description of Artificial Sequence: Synthetic peptide
PQIHIMA

SEQ ID NO: 7778 - protein, 7 aa, Artificial Sequence
  Description of Artificial Sequence: Synthetic peptide
PQILPSA

SEQ ID NO: 7779 - protein, 7 aa, Artificial Sequence
  Description of Artificial Sequence: Synthetic peptide
PQLSQNV

SEQ ID NO: 7780 - protein, 7 aa, Artificial Sequence
  Description of Artificial Sequence: Synthetic peptide
PQNASYR

SEQ ID NO: 7781 - protein, 7 aa, Artificial Sequence
  Description of Artificial Sequence: Synthetic peptide
PQNNPPG

SEQ ID NO: 7782 - protein, 7 aa, Artificial Sequence
  Description of Artificial Sequence: Synthetic peptide
PQNRPPV

SEQ ID NO: 7783 - protein, 7 aa, Artificial Sequence
  Description of Artificial Sequence: Synthetic peptide
PQPRNVI

SEQ ID NO: 7784 - protein, 7 aa, Artificial Sequence
  Description of Artificial Sequence: Synthetic peptide
PQPTETP

SEQ ID NO: 7785 - protein, 7 aa, Artificial Sequence
  Description of Artificial Sequence: Synthetic peptide
PQPTYTL

SEQ ID NO: 7786 - protein, 7 aa, Artificial Sequence
  Description of Artificial Sequence: Synthetic peptide
PQRNAGA

SEQ ID NO: 7787 - protein, 7 aa, Artificial Sequence
  Description of Artificial Sequence: Synthetic peptide
PQRQGLL

SEQ ID NO: 7788 - protein, 7 aa, Artificial Sequence
  Description of Artificial Sequence: Synthetic peptide
PQRSAMP

SEQ ID NO: 7789 - protein, 7 aa, Artificial Sequence
  Description of Artificial Sequence: Synthetic peptide
PQRTQQE

SEQ ID NO: 7790 - protein, 7 aa, Artificial Sequence
  Description of Artificial Sequence: Synthetic peptide
PQRVHAA

SEQ ID NO: 7791 - protein, 7 aa, Artificial Sequence
  Description of Artificial Sequence: Synthetic peptide
PQSLHVR

SEQ ID NO: 7792 - protein, 7 aa, Artificial Sequence
  Description of Artificial Sequence: Synthetic peptide
PQSPNHS

SEQ ID NO: 7793 - protein, 7 aa, Artificial Sequence
  Description of Artificial Sequence: Synthetic peptide
PQSRDTY

SEQ ID NO: 7794 - protein, 7 aa, Artificial Sequence
  Description of Artificial Sequence: Synthetic peptide
PQSRNTN

SEQ ID NO: 7795 - protein, 7 aa, Artificial Sequence
  Description of Artificial Sequence: Synthetic peptide
PQTLTSV

SEQ ID NO: 7796 - protein, 7 aa, Artificial Sequence
  Description of Artificial Sequence: Synthetic peptide
PQTRSPS

SEQ ID NO: 7797 - protein, 7 aa, Artificial Sequence
  Description of Artificial Sequence: Synthetic peptide
PQTVTKV

SEQ ID NO: 7798 - protein, 7 aa, Artificial Sequence
  Description of Artificial Sequence: Synthetic peptide
PQVRASQ

SEQ ID NO: 7799 - protein, 7 aa, Artificial Sequence
  Description of Artificial Sequence: Synthetic peptide
PQVRQGP

SEQ ID NO: 7800 - protein, 7 aa, Artificial Sequence
  Description of Artificial Sequence: Synthetic peptide
PQVTTSA

SEQ ID NO: 7801 - protein, 7 aa, Artificial Sequence
  Description of Artificial Sequence: Synthetic peptide
PRANSGM

SEQ ID NO: 7802 - protein, 7 aa, Artificial Sequence
  Description of Artificial Sequence: Synthetic peptide
PRANTFS

SEQ ID NO: 7803 - protein, 7 aa, Artificial Sequence
  Description of Artificial Sequence: Synthetic peptide
PRAPAVS

SEQ ID NO: 7804 - protein, 7 aa, Artificial Sequence
  Description of Artificial Sequence: Synthetic peptide
PRASGPY

SEQ ID NO: 7805 - protein, 7 aa, Artificial Sequence
  Description of Artificial Sequence: Synthetic peptide
PRATTYS

SEQ ID NO: 7806 - protein, 7 aa, Artificial Sequence
  Description of Artificial Sequence: Synthetic peptide
PRDATRL

SEQ ID NO: 7807 - protein, 7 aa, Artificial Sequence
  Description of Artificial Sequence: Synthetic peptide
PRDKNPA

SEQ ID NO: 7808 - protein, 7 aa, Artificial Sequence
  Description of Artificial Sequence: Synthetic peptide
PRDRLVI

SEQ ID NO: 7809 - protein, 7 aa, Artificial Sequence
  Description of Artificial Sequence: Synthetic peptide
PRDYQTS

SEQ ID NO: 7810 - protein, 7 aa, Artificial Sequence
  Description of Artificial Sequence: Synthetic peptide
PREKAAT

SEQ ID NO: 7811 - protein, 7 aa, Artificial Sequence
  Description of Artificial Sequence: Synthetic peptide
PREPYAE

SEQ ID NO: 7812 - protein, 7 aa, Artificial Sequence
  Description of Artificial Sequence: Synthetic peptide
PRGEGTN

SEQ ID NO: 7813 - protein, 7 aa, Artificial Sequence
  Description of Artificial Sequence: Synthetic peptide
PRGFETA

SEQ ID NO: 7814 - protein, 7 aa, Artificial Sequence
  Description of Artificial Sequence: Synthetic peptide
PRGLSSA

SEQ ID NO: 7815 - protein, 7 aa, Artificial Sequence
  Description of Artificial Sequence: Synthetic peptide
PRGQIAS

SEQ ID NO: 7816 - protein, 7 aa, Artificial Sequence
  Description of Artificial Sequence: Synthetic peptide
PRGSGSS

SEQ ID NO: 7817 - protein, 7 aa, Artificial Sequence
  Description of Artificial Sequence: Synthetic peptide
PRGSSDY

SEQ ID NO: 7818 - protein, 7 aa, Artificial Sequence
  Description of Artificial Sequence: Synthetic peptide
PRHTVYA

SEQ ID NO: 7819 - protein, 7 aa, Artificial Sequence
  Description of Artificial Sequence: Synthetic peptide
PRIEARN

SEQ ID NO: 7820 - protein, 7 aa, Artificial Sequence
  Description of Artificial Sequence: Synthetic peptide
PRIINTI

SEQ ID NO: 7821 - protein, 7 aa, Artificial Sequence
  Description of Artificial Sequence: Synthetic peptide
PRIPQTH

SEQ ID NO: 7822 - protein, 7 aa, Artificial Sequence
  Description of Artificial Sequence: Synthetic peptide
PRKLPGD

SEQ ID NO: 7823 - protein, 7 aa, Artificial Sequence
  Description of Artificial Sequence: Synthetic peptide
PRKVGLS

SEQ ID NO: 7824 - protein, 7 aa, Artificial Sequence
  Description of Artificial Sequence: Synthetic peptide
PRLAGGI

SEQ ID NO: 7825 - protein, 7 aa, Artificial Sequence
  Description of Artificial Sequence: Synthetic peptide
PRLGGVV

SEQ ID NO: 7826 - protein, 7 aa, Artificial Sequence
  Description of Artificial Sequence: Synthetic peptide
PRLGLDN

SEQ ID NO: 7827 - protein, 7 aa, Artificial Sequence
  Description of Artificial Sequence: Synthetic peptide
PRLNEMP

SEQ ID NO: 7828 - protein, 7 aa, Artificial Sequence
  Description of Artificial Sequence: Synthetic peptide
PRLTASI

SEQ ID NO: 7829 - protein, 7 aa, Artificial Sequence
  Description of Artificial Sequence: Synthetic peptide
PRMSASV

SEQ ID NO: 7830 - protein, 7 aa, Artificial Sequence
  Description of Artificial Sequence: Synthetic peptide
PRNASTP

SEQ ID NO: 7831 - protein, 7 aa, Artificial Sequence
  Description of Artificial Sequence: Synthetic peptide
PRNPEFG

SEQ ID NO: 7832 - protein, 7 aa, Artificial Sequence
  Description of Artificial Sequence: Synthetic peptide
PRNQYAA

SEQ ID NO: 7833 - protein, 7 aa, Artificial Sequence
  Description of Artificial Sequence: Synthetic peptide
PRNRLSD

SEQ ID NO: 7834 - protein, 7 aa, Artificial Sequence
  Description of Artificial Sequence: Synthetic peptide
PRPAPVH

SEQ ID NO: 7835 - protein, 7 aa, Artificial Sequence
  Description of Artificial Sequence: Synthetic peptide
PRPAVPA

SEQ ID NO: 7836 - protein, 7 aa, Artificial Sequence
  Description of Artificial Sequence: Synthetic peptide
PRPGMDK

SEQ ID NO: 7837 - protein, 7 aa, Artificial Sequence
  Description of Artificial Sequence: Synthetic peptide
PRPQANS

SEQ ID NO: 7838 - protein, 7 aa, Artificial Sequence
  Description of Artificial Sequence: Synthetic peptide
PRPQSLT

SEQ ID NO: 7839 - protein, 7 aa, Artificial Sequence
  Description of Artificial Sequence: Synthetic peptide
PRPSLDL

SEQ ID NO: 7840 - protein, 7 aa, Artificial Sequence
  Description of Artificial Sequence: Synthetic peptide
PRPTHAV

SEQ ID NO: 7841 - protein, 7 aa, Artificial Sequence
  Description of Artificial Sequence: Synthetic peptide
PRQTEGM

SEQ ID NO: 7842 - protein, 7 aa, Artificial Sequence
  Description of Artificial Sequence: Synthetic peptide
PRQTTNG

SEQ ID NO: 7843 - protein, 7 aa, Artificial Sequence
  Description of Artificial Sequence: Synthetic peptide
PRRDQET

SEQ ID NO: 7844 - protein, 7 aa, Artificial Sequence
  Description of Artificial Sequence: Synthetic peptide
PRRIEFP

SEQ ID NO: 7845 - protein, 7 aa, Artificial Sequence
  Description of Artificial Sequence: Synthetic peptide
PRSADLE

SEQ ID NO: 7846 - protein, 7 aa, Artificial Sequence
  Description of Artificial Sequence: Synthetic peptide
PRSGTAS

SEQ ID NO: 7847 - protein, 7 aa, Artificial Sequence
  Description of Artificial Sequence: Synthetic peptide
PRSHPTS

SEQ ID NO: 7848 - protein, 7 aa, Artificial Sequence
  Description of Artificial Sequence: Synthetic peptide
PRSIPGL

SEQ ID NO: 7849 - protein, 7 aa, Artificial Sequence
  Description of Artificial Sequence: Synthetic peptide
PRSLPLT

SEQ ID NO: 7850 - protein, 7 aa, Artificial Sequence
  Description of Artificial Sequence: Synthetic peptide
PRSMNQT

SEQ ID NO: 7851 - protein, 7 aa, Artificial Sequence
  Description of Artificial Sequence: Synthetic peptide
PRSNSDT

SEQ ID NO: 7852 - protein, 7 aa, Artificial Sequence
  Description of Artificial Sequence: Synthetic peptide
PRSPNPP

SEQ ID NO: 7853 - protein, 7 aa, Artificial Sequence
  Description of Artificial Sequence: Synthetic peptide
PRSPSDK

SEQ ID NO: 7854 - protein, 7 aa, Artificial Sequence
  Description of Artificial Sequence: Synthetic peptide
PRSSFTE

SEQ ID NO: 7855 - protein, 7 aa, Artificial Sequence
  Description of Artificial Sequence: Synthetic peptide
PRSSSSL

SEQ ID NO: 7856 - protein, 7 aa, Artificial Sequence
  Description of Artificial Sequence: Synthetic peptide
PRTEPFL

SEQ ID NO: 7857 - protein, 7 aa, Artificial Sequence
  Description of Artificial Sequence: Synthetic peptide
PRTHTDA

SEQ ID NO: 7858 - protein, 7 aa, Artificial Sequence
  Description of Artificial Sequence: Synthetic peptide
PRTSGTM

SEQ ID NO: 7859 - protein, 7 aa, Artificial Sequence
  Description of Artificial Sequence: Synthetic peptide
PRTSSTH

SEQ ID NO: 7860 - protein, 7 aa, Artificial Sequence
  Description of Artificial Sequence: Synthetic peptide
PRTTMTE

SEQ ID NO: 7861 - protein, 7 aa, Artificial Sequence
  Description of Artificial Sequence: Synthetic peptide
PRTTYSD

SEQ ID NO: 7862 - protein, 7 aa, Artificial Sequence
  Description of Artificial Sequence: Synthetic peptide
PRVGSPQ

SEQ ID NO: 7863 - protein, 7 aa, Artificial Sequence
  Description of Artificial Sequence: Synthetic peptide
PRVLSSG

SEQ ID NO: 7864 - protein, 7 aa, Artificial Sequence
  Description of Artificial Sequence: Synthetic peptide
PRVPTHD

SEQ ID NO: 7865 - protein, 7 aa, Artificial Sequence
  Description of Artificial Sequence: Synthetic peptide
PRVSIAN

SEQ ID NO: 7866 - protein, 7 aa, Artificial Sequence
  Description of Artificial Sequence: Synthetic peptide
PRVSVAP

SEQ ID NO: 7867 - protein, 7 aa, Artificial Sequence
  Description of Artificial Sequence: Synthetic peptide
PRYDAAG

SEQ ID NO: 7868 - protein, 7 aa, Artificial Sequence
  Description of Artificial Sequence: Synthetic peptide
PSAAHPP

SEQ ID NO: 7869 - protein, 7 aa, Artificial Sequence
  Description of Artificial Sequence: Synthetic peptide
PSANMRS

SEQ ID NO: 7870 - protein, 7 aa, Artificial Sequence
  Description of Artificial Sequence: Synthetic peptide
PSANRLS

SEQ ID NO: 7871 - protein, 7 aa, Artificial Sequence
  Description of Artificial Sequence: Synthetic peptide
PSAQSHS

SEQ ID NO: 7872 - protein, 7 aa, Artificial Sequence
  Description of Artificial Sequence: Synthetic peptide
PSASNSM

SEQ ID NO: 7873 - protein, 7 aa, Artificial Sequence
  Description of Artificial Sequence: Synthetic peptide
PSATGVK

SEQ ID NO: 7874 - protein, 7 aa, Artificial Sequence
  Description of Artificial Sequence: Synthetic peptide
PSCDNNT

SEQ ID NO: 7875 - protein, 7 aa, Artificial Sequence
  Description of Artificial Sequence: Synthetic peptide
PSDDAGG

SEQ ID NO: 7876 - protein, 7 aa, Artificial Sequence
  Description of Artificial Sequence: Synthetic peptide
PSDKNTG

SEQ ID NO: 7877 - protein, 7 aa, Artificial Sequence
  Description of Artificial Sequence: Synthetic peptide
PSDKSFR

SEQ ID NO: 7878 - protein, 7 aa, Artificial Sequence
  Description of Artificial Sequence: Synthetic peptide
PSDMPSS

SEQ ID NO: 7879 - protein, 7 aa, Artificial Sequence
  Description of Artificial Sequence: Synthetic peptide
PSDPSAG

SEQ ID NO: 7880 - protein, 7 aa, Artificial Sequence
  Description of Artificial Sequence: Synthetic peptide
PSDPVTR

SEQ ID NO: 7881 - protein, 7 aa, Artificial Sequence
  Description of Artificial Sequence: Synthetic peptide
PSDRVHT

SEQ ID NO: 7882 - protein, 7 aa, Artificial Sequence
  Description of Artificial Sequence: Synthetic peptide
PSDSAYP

SEQ ID NO: 7883 - protein, 7 aa, Artificial Sequence
  Description of Artificial Sequence: Synthetic peptide
PSDSVHS

SEQ ID NO: 7884 - protein, 7 aa, Artificial Sequence
  Description of Artificial Sequence: Synthetic peptide
PSDTHRS

SEQ ID NO: 7885 - protein, 7 aa, Artificial Sequence
  Description of Artificial Sequence: Synthetic peptide
PSDTPTR

SEQ ID NO: 7886 - protein, 7 aa, Artificial Sequence
  Description of Artificial Sequence: Synthetic peptide
PSELNSR

SEQ ID NO: 7887 - protein, 7 aa, Artificial Sequence
  Description of Artificial Sequence: Synthetic peptide
PSEQPVR

SEQ ID NO: 7888 - protein, 7 aa, Artificial Sequence
  Description of Artificial Sequence: Synthetic peptide
PSESTIV

SEQ ID NO: 7889 - protein, 7 aa, Artificial Sequence
  Description of Artificial Sequence: Synthetic peptide
PSEYTLD

SEQ ID NO: 7890 - protein, 7 aa, Artificial Sequence
  Description of Artificial Sequence: Synthetic peptide
PSFLEGI

SEQ ID NO: 7891 - protein, 7 aa, Artificial Sequence
  Description of Artificial Sequence: Synthetic peptide
PSFNPMT

SEQ ID NO: 7892 - protein, 7 aa, Artificial Sequence
  Description of Artificial Sequence: Synthetic peptide
PSFPSMT

SEQ ID NO: 7893 - protein, 7 aa, Artificial Sequence
  Description of Artificial Sequence: Synthetic peptide
PSGKSPY

SEQ ID NO: 7894 - protein, 7 aa, Artificial Sequence
  Description of Artificial Sequence: Synthetic peptide
PSGMKPT

SEQ ID NO: 7895 - protein, 7 aa, Artificial Sequence
  Description of Artificial Sequence: Synthetic peptide
PSGMPSS

SEQ ID NO: 7896 - protein, 7 aa, Artificial Sequence
  Description of Artificial Sequence: Synthetic peptide
PSGQVTG

SEQ ID NO: 7897 - protein, 7 aa, Artificial Sequence
  Description of Artificial Sequence: Synthetic peptide
PSGSDNL

SEQ ID NO: 7898 - protein, 7 aa, Artificial Sequence
  Description of Artificial Sequence: Synthetic peptide
PSGTLTM

SEQ ID NO: 7899 - protein, 7 aa, Artificial Sequence
  Description of Artificial Sequence: Synthetic peptide
PSHDSFL

SEQ ID NO: 7900 - protein, 7 aa, Artificial Sequence
  Description of Artificial Sequence: Synthetic peptide
PSHGLDK

SEQ ID NO: 7901 - protein, 7 aa, Artificial Sequence
  Description of Artificial Sequence: Synthetic peptide
PSHKAVF

SEQ ID NO: 7902 - protein, 7 aa, Artificial Sequence
  Description of Artificial Sequence: Synthetic peptide
PSHPHER

SEQ ID NO: 7903 - protein, 7 aa, Artificial Sequence
  Description of Artificial Sequence: Synthetic peptide
PSHRTSL

SEQ ID NO: 7904 - protein, 7 aa, Artificial Sequence
  Description of Artificial Sequence: Synthetic peptide
PSHSGTT

SEQ ID NO: 7905 - protein, 7 aa, Artificial Sequence
  Description of Artificial Sequence: Synthetic peptide
PSHTRPV

SEQ ID NO: 7906 - protein, 7 aa, Artificial Sequence
  Description of Artificial Sequence: Synthetic peptide
PSIAQPP

SEQ ID NO: 7907 - protein, 7 aa, Artificial Sequence
  Description of Artificial Sequence: Synthetic peptide
PSIKLSE

SEQ ID NO: 7908 - protein, 7 aa, Artificial Sequence
  Description of Artificial Sequence: Synthetic peptide
PSISKPM

SEQ ID NO: 7909 - protein, 7 aa, Artificial Sequence
  Description of Artificial Sequence: Synthetic peptide
PSKASTE

SEQ ID NO: 7910 - protein, 7 aa, Artificial Sequence
  Description of Artificial Sequence: Synthetic peptide
PSKSPST

SEQ ID NO: 7911 - protein, 7 aa, Artificial Sequence
  Description of Artificial Sequence: Synthetic peptide
PSKSSAA

SEQ ID NO: 7912 - protein, 7 aa, Artificial Sequence
  Description of Artificial Sequence: Synthetic peptide
PSKVGRE

SEQ ID NO: 7913 - protein, 7 aa, Artificial Sequence
  Description of Artificial Sequence: Synthetic peptide
PSLEGAP

SEQ ID NO: 7914 - protein, 7 aa, Artificial Sequence
  Description of Artificial Sequence: Synthetic peptide
PSLRAAL

SEQ ID NO: 7915 - protein, 7 aa, Artificial Sequence
  Description of Artificial Sequence: Synthetic peptide
PSLSNKV

SEQ ID NO: 7916 - protein, 7 aa, Artificial Sequence
  Description of Artificial Sequence: Synthetic peptide
PSLSSSP

SEQ ID NO: 7917 - protein, 7 aa, Artificial Sequence
  Description of Artificial Sequence: Synthetic peptide
PSMSPHT

SEQ ID NO: 7918 - protein, 7 aa, Artificial Sequence
  Description of Artificial Sequence: Synthetic peptide
PSMTAQE

SEQ ID NO: 7919 - protein, 7 aa, Artificial Sequence
  Description of Artificial Sequence: Synthetic peptide
PSNAGRF

SEQ ID NO: 7920 - protein, 7 aa, Artificial Sequence
  Description of Artificial Sequence: Synthetic peptide
PSNGKSI

SEQ ID NO: 7921 - protein, 7 aa, Artificial Sequence
  Description of Artificial Sequence: Synthetic peptide
PSNHLKS

SEQ ID NO: 7922 - protein, 7 aa, Artificial Sequence
  Description of Artificial Sequence: Synthetic peptide
PSNNTEG

SEQ ID NO: 7923 - protein, 7 aa, Artificial Sequence
  Description of Artificial Sequence: Synthetic peptide
PSNPSFR

SEQ ID NO: 7924 - protein, 7 aa, Artificial Sequence
  Description of Artificial Sequence: Synthetic peptide
PSNQLVR

SEQ ID NO: 7925 - protein, 7 aa, Artificial Sequence
  Description of Artificial Sequence: Synthetic peptide
PSPAVKS

SEQ ID NO: 7926 - protein, 7 aa, Artificial Sequence
  Description of Artificial Sequence: Synthetic peptide
PSPDVRG

SEQ ID NO: 7927 - protein, 7 aa, Artificial Sequence
  Description of Artificial Sequence: Synthetic peptide
PSPKTCP

SEQ ID NO: 7928 - protein, 7 aa, Artificial Sequence
  Description of Artificial Sequence: Synthetic peptide
PSPLRLG

SEQ ID NO: 7929 - protein, 7 aa, Artificial Sequence
  Description of Artificial Sequence: Synthetic peptide
PSPVKGG

SEQ ID NO: 7930 - protein, 7 aa, Artificial Sequence
  Description of Artificial Sequence: Synthetic peptide
PSQDPHL

SEQ ID NO: 7931 - protein, 7 aa, Artificial Sequence
  Description of Artificial Sequence: Synthetic peptide
PSQDRQA

SEQ ID NO: 7932 - protein, 7 aa, Artificial Sequence
  Description of Artificial Sequence: Synthetic peptide
PSQFKEN

SEQ ID NO: 7933 - protein, 7 aa, Artificial Sequence
  Description of Artificial Sequence: Synthetic peptide
PSQGHSM

SEQ ID NO: 7934 - protein, 7 aa, Artificial Sequence
  Description of Artificial Sequence: Synthetic peptide
PSQGPWT

SEQ ID NO: 7935 - protein, 7 aa, Artificial Sequence
  Description of Artificial Sequence: Synthetic peptide
PSQLASN

SEQ ID NO: 7936 - protein, 7 aa, Artificial Sequence
  Description of Artificial Sequence: Synthetic peptide
PSQLVVA

SEQ ID NO: 7937 - protein, 7 aa, Artificial Sequence
  Description of Artificial Sequence: Synthetic peptide
PSQPGAI

SEQ ID NO: 7938 - protein, 7 aa, Artificial Sequence
  Description of Artificial Sequence: Synthetic peptide
PSQREMK

SEQ ID NO: 7939 - protein, 7 aa, Artificial Sequence
  Description of Artificial Sequence: Synthetic peptide
PSQSNLR

SEQ ID NO: 7940 - protein, 7 aa, Artificial Sequence
  Description of Artificial Sequence: Synthetic peptide
PSQSSKL

SEQ ID NO: 7941 - protein, 7 aa, Artificial Sequence
  Description of Artificial Sequence: Synthetic peptide
PSQTATP

SEQ ID NO: 7942 - protein, 7 aa, Artificial Sequence
  Description of Artificial Sequence: Synthetic peptide
PSQTHSP

SEQ ID NO: 7943 - protein, 7 aa, Artificial Sequence
  Description of Artificial Sequence: Synthetic peptide
PSREISL

SEQ ID NO: 7944 - protein, 7 aa, Artificial Sequence
  Description of Artificial Sequence: Synthetic peptide
PSRERSN

SEQ ID NO: 7945 - protein, 7 aa, Artificial Sequence
  Description of Artificial Sequence: Synthetic peptide
PSRFSTP

SEQ ID NO: 7946 - protein, 7 aa, Artificial Sequence
  Description of Artificial Sequence: Synthetic peptide
PSRGDIG

SEQ ID NO: 7947 - protein, 7 aa, Artificial Sequence
  Description of Artificial Sequence: Synthetic peptide
PSRGVLP

SEQ ID NO: 7948 - protein, 7 aa, Artificial Sequence
  Description of Artificial Sequence: Synthetic peptide
PSRLGSA

SEQ ID NO: 7949 - protein, 7 aa, Artificial Sequence
  Description of Artificial Sequence: Synthetic peptide
PSRLTND

SEQ ID NO: 7950 - protein, 7 aa, Artificial Sequence
  Description of Artificial Sequence: Synthetic peptide
PSRLVSE

SEQ ID NO: 7951 - protein, 7 aa, Artificial Sequence
  Description of Artificial Sequence: Synthetic peptide
PSRPMMS

SEQ ID NO: 7952 - protein, 7 aa, Artificial Sequence
  Description of Artificial Sequence: Synthetic peptide
PSRSMSE

SEQ ID NO: 7953 - protein, 7 aa, Artificial Sequence
  Description of Artificial Sequence: Synthetic peptide
PSRTEPP

SEQ ID NO: 7954 - protein, 7 aa, Artificial Sequence
  Description of Artificial Sequence: Synthetic peptide
PSRTHLH

SEQ ID NO: 7955 - protein, 7 aa, Artificial Sequence
  Description of Artificial Sequence: Synthetic peptide
PSRVVEA

SEQ ID NO: 7956 - protein, 7 aa, Artificial Sequence
  Description of Artificial Sequence: Synthetic peptide
PSSESDF

SEQ ID NO: 7957 - protein, 7 aa, Artificial Sequence
  Description of Artificial Sequence: Synthetic peptide
PSSGGLV

SEQ ID NO: 7958 - protein, 7 aa, Artificial Sequence
  Description of Artificial Sequence: Synthetic peptide
PSSGLHL

SEQ ID NO: 7959 - protein, 7 aa, Artificial Sequence
  Description of Artificial Sequence: Synthetic peptide
PSSKGLL

SEQ ID NO: 7960 - protein, 7 aa, Artificial Sequence
  Description of Artificial Sequence: Synthetic peptide
PSSKVGD

SEQ ID NO: 7961 - protein, 7 aa, Artificial Sequence
  Description of Artificial Sequence: Synthetic peptide
PSSLDDG

SEQ ID NO: 7962 - protein, 7 aa, Artificial Sequence
  Description of Artificial Sequence: Synthetic peptide
PSSLNRL

SEQ ID NO: 7963 - protein, 7 aa, Artificial Sequence
  Description of Artificial Sequence: Synthetic peptide
PSSLSAG

SEQ ID NO: 7964 - protein, 7 aa, Artificial Sequence
  Description of Artificial Sequence: Synthetic peptide
PSSMAHP

SEQ ID NO: 7965 - protein, 7 aa, Artificial Sequence
  Description of Artificial Sequence: Synthetic peptide
PSSMIAE

SEQ ID NO: 7966 - protein, 7 aa, Artificial Sequence
  Description of Artificial Sequence: Synthetic peptide
PSSPAVR

SEQ ID NO: 7967 - protein, 7 aa, Artificial Sequence
  Description of Artificial Sequence: Synthetic peptide
PSSPLMT

SEQ ID NO: 7968 - protein, 7 aa, Artificial Sequence
  Description of Artificial Sequence: Synthetic peptide
PSSPPFF

SEQ ID NO: 7969 - protein, 7 aa, Artificial Sequence
  Description of Artificial Sequence: Synthetic peptide
PSSPVFI

SEQ ID NO: 7970 - protein, 7 aa, Artificial Sequence
  Description of Artificial Sequence: Synthetic peptide
PSSRGAL

SEQ ID NO: 7971 - protein, 7 aa, Artificial Sequence
  Description of Artificial Sequence: Synthetic peptide
PSSSINR

SEQ ID NO: 7972 - protein, 7 aa, Artificial Sequence
  Description of Artificial Sequence: Synthetic peptide
PSSSSGN

SEQ ID NO: 7973 - protein, 7 aa, Artificial Sequence
  Description of Artificial Sequence: Synthetic peptide
PSSSYPL

SEQ ID NO: 7974 - protein, 7 aa, Artificial Sequence
  Description of Artificial Sequence: Synthetic peptide
PSSTPGQ

SEQ ID NO: 7975 - protein, 7 aa, Artificial Sequence
  Description of Artificial Sequence: Synthetic peptide
PSTAGSK

SEQ ID NO: 7976 - protein, 7 aa, Artificial Sequence
  Description of Artificial Sequence: Synthetic peptide
PSTAHST

SEQ ID NO: 7977 - protein, 7 aa, Artificial Sequence
  Description of Artificial Sequence: Synthetic peptide
PSTAIKT

SEQ ID NO: 7978 - protein, 7 aa, Artificial Sequence
  Description of Artificial Sequence: Synthetic peptide
PSTARTS

SEQ ID NO: 7979 - protein, 7 aa, Artificial Sequence
  Description of Artificial Sequence: Synthetic peptide
PSTGPFH

SEQ ID NO: 7980 - protein, 7 aa, Artificial Sequence
  Description of Artificial Sequence: Synthetic peptide
PSTGRPL

SEQ ID NO: 7981 - protein, 7 aa, Artificial Sequence
  Description of Artificial Sequence: Synthetic peptide
PSTKEFI

SEQ ID NO: 7982 - protein, 7 aa, Artificial Sequence
  Description of Artificial Sequence: Synthetic peptide
PSTNAYA

SEQ ID NO: 7983 - protein, 7 aa, Artificial Sequence
  Description of Artificial Sequence: Synthetic peptide
PSTNGSH

SEQ ID NO: 7984 - protein, 7 aa, Artificial Sequence
  Description of Artificial Sequence: Synthetic peptide
PSTPAAN

SEQ ID NO: 7985 - protein, 7 aa, Artificial Sequence
  Description of Artificial Sequence: Synthetic peptide
PSTPAAS

SEQ ID NO: 7986 - protein, 7 aa, Artificial Sequence
  Description of Artificial Sequence: Synthetic peptide
PSTSLSE

SEQ ID NO: 7987 - protein, 7 aa, Artificial Sequence
  Description of Artificial Sequence: Synthetic peptide
PSVDSWS

SEQ ID NO: 7988 - protein, 7 aa, Artificial Sequence
  Description of Artificial Sequence: Synthetic peptide
PSVDSYL

SEQ ID NO: 7989 - protein, 7 aa, Artificial Sequence
  Description of Artificial Sequence: Synthetic peptide
PSVEHVP

SEQ ID NO: 7990 - protein, 7 aa, Artificial Sequence
  Description of Artificial Sequence: Synthetic peptide
PSVESWS

SEQ ID NO: 7991 - protein, 7 aa, Artificial Sequence
  Description of Artificial Sequence: Synthetic peptide
PSVLHPS

SEQ ID NO: 7992 - protein, 7 aa, Artificial Sequence
  Description of Artificial Sequence: Synthetic peptide
PSVPLMT

SEQ ID NO: 7993 - protein, 7 aa, Artificial Sequence
  Description of Artificial Sequence: Synthetic peptide
PSVPRGP

SEQ ID NO: 7994 - protein, 7 aa, Artificial Sequence
  Description of Artificial Sequence: Synthetic peptide
PSVQHFP

SEQ ID NO: 7995 - protein, 7 aa, Artificial Sequence
  Description of Artificial Sequence: Synthetic peptide
PSVRDPA

SEQ ID NO: 7996 - protein, 7 aa, Artificial Sequence
  Description of Artificial Sequence: Synthetic peptide
PSVTGTM

SEQ ID NO: 7997 - protein, 7 aa, Artificial Sequence
  Description of Artificial Sequence: Synthetic peptide
PSYDKLK

SEQ ID NO: 7998 - protein, 7 aa, Artificial Sequence
  Description of Artificial Sequence: Synthetic peptide
PSYPGLD

SEQ ID NO: 7999 - protein, 7 aa, Artificial Sequence
  Description of Artificial Sequence: Synthetic peptide
PSYSHME

SEQ ID NO: 8000 - protein, 7 aa, Artificial Sequence
  Description of Artificial Sequence: Synthetic peptide
PSYSVTE

SEQ ID NO: 8001 - protein, 7 aa, Artificial Sequence
  Description of Artificial Sequence: Synthetic peptide
PTAARPP

SEQ ID NO: 8002 - protein, 7 aa, Artificial Sequence
  Description of Artificial Sequence: Synthetic peptide
PTALASF

SEQ ID NO: 8003 - protein, 7 aa, Artificial Sequence
  Description of Artificial Sequence: Synthetic peptide
PTALGKS

SEQ ID NO: 8004 - protein, 7 aa, Artificial Sequence
  Description of Artificial Sequence: Synthetic peptide
PTAPTIP

SEQ ID NO: 8005 - protein, 7 aa, Artificial Sequence
  Description of Artificial Sequence: Synthetic peptide
PTASPNT

SEQ ID NO: 8006 - protein, 7 aa, Artificial Sequence
  Description of Artificial Sequence: Synthetic peptide
PTDNTSP

SEQ ID NO: 8007 - protein, 7 aa, Artificial Sequence
  Description of Artificial Sequence: Synthetic peptide
PTDPRAP

SEQ ID NO: 8008 - protein, 7 aa, Artificial Sequence
  Description of Artificial Sequence: Synthetic peptide
PTDRHSI

SEQ ID NO: 8009 - protein, 7 aa, Artificial Sequence
  Description of Artificial Sequence: Synthetic peptide
PTDRREM

SEQ ID NO: 8010 - protein, 7 aa, Artificial Sequence
  Description of Artificial Sequence: Synthetic peptide
PTDTVPP

SEQ ID NO: 8011 - protein, 7 aa, Artificial Sequence
  Description of Artificial Sequence: Synthetic peptide
PTDVNRG

SEQ ID NO: 8012 - protein, 7 aa, Artificial Sequence
  Description of Artificial Sequence: Synthetic peptide
PTDYARG

SEQ ID NO: 8013 - protein, 7 aa, Artificial Sequence
  Description of Artificial Sequence: Synthetic peptide
PTEAAGV

SEQ ID NO: 8014 - protein, 7 aa, Artificial Sequence
  Description of Artificial Sequence: Synthetic peptide
PTETNGY

SEQ ID NO: 8015 - protein, 7 aa, Artificial Sequence
  Description of Artificial Sequence: Synthetic peptide
PTFLTTN

SEQ ID NO: 8016 - protein, 7 aa, Artificial Sequence
  Description of Artificial Sequence: Synthetic peptide
PTFTRST

SEQ ID NO: 8017 - protein, 7 aa, Artificial Sequence
  Description of Artificial Sequence: Synthetic peptide
PTGATSS

SEQ ID NO: 8018 - protein, 7 aa, Artificial Sequence
  Description of Artificial Sequence: Synthetic peptide
PTGGAHT

SEQ ID NO: 8019 - protein, 7 aa, Artificial Sequence
  Description of Artificial Sequence: Synthetic peptide
PTGPGSP

SEQ ID NO: 8020 - protein, 7 aa, Artificial Sequence
  Description of Artificial Sequence: Synthetic peptide
PTGPHDL

SEQ ID NO: 8021 - protein, 7 aa, Artificial Sequence
  Description of Artificial Sequence: Synthetic peptide
PTGQPRP

SEQ ID NO: 8022 - protein, 7 aa, Artificial Sequence
  Description of Artificial Sequence: Synthetic peptide
PTGRALA

SEQ ID NO: 8023 - protein, 7 aa, Artificial Sequence
  Description of Artificial Sequence: Synthetic peptide
PTGSIQI

SEQ ID NO: 8024 - protein, 7 aa, Artificial Sequence
  Description of Artificial Sequence: Synthetic peptide
PTGTPEI

SEQ ID NO: 8025 - protein, 7 aa, Artificial Sequence
  Description of Artificial Sequence: Synthetic peptide
PTGTSPL

SEQ ID NO: 8026 - protein, 7 aa, Artificial Sequence
  Description of Artificial Sequence: Synthetic peptide
PTGVGSL

SEQ ID NO: 8027 - protein, 7 aa, Artificial Sequence
  Description of Artificial Sequence: Synthetic peptide
PTHPNSF

SEQ ID NO: 8028 - protein, 7 aa, Artificial Sequence
  Description of Artificial Sequence: Synthetic peptide
PTHSGIT

SEQ ID NO: 8029 - protein, 7 aa, Artificial Sequence
  Description of Artificial Sequence: Synthetic peptide
PTHSLIS

SEQ ID NO: 8030 - protein, 7 aa, Artificial Sequence
  Description of Artificial Sequence: Synthetic peptide
PTHSTNK

SEQ ID NO: 8031 - protein, 7 aa, Artificial Sequence
  Description of Artificial Sequence: Synthetic peptide
PTIPKKD

SEQ ID NO: 8032 - protein, 7 aa, Artificial Sequence
  Description of Artificial Sequence: Synthetic peptide
PTIPLDR

SEQ ID NO: 8033 - protein, 7 aa, Artificial Sequence
  Description of Artificial Sequence: Synthetic peptide
PTKPLGD

SEQ ID NO: 8034 - protein, 7 aa, Artificial Sequence
  Description of Artificial Sequence: Synthetic peptide
PTLDDPK

SEQ ID NO: 8035 - protein, 7 aa, Artificial Sequence
  Description of Artificial Sequence: Synthetic peptide
PTLDGKP

SEQ ID NO: 8036 - protein, 7 aa, Artificial Sequence
  Description of Artificial Sequence: Synthetic peptide
PTLKSDM

SEQ ID NO: 8037 - protein, 7 aa, Artificial Sequence
  Description of Artificial Sequence: Synthetic peptide
PTLPSTV

SEQ ID NO: 8038 - protein, 7 aa, Artificial Sequence
  Description of Artificial Sequence: Synthetic peptide
PTLSMAH

SEQ ID NO: 8039 - protein, 7 aa, Artificial Sequence
  Description of Artificial Sequence: Synthetic peptide
PTLSRTH

SEQ ID NO: 8040 - protein, 7 aa, Artificial Sequence
  Description of Artificial Sequence: Synthetic peptide
PTLSTLL

SEQ ID NO: 8041 - protein, 7 aa, Artificial Sequence
  Description of Artificial Sequence: Synthetic peptide
PTMHMLS

SEQ ID NO: 8042 - protein, 7 aa, Artificial Sequence
  Description of Artificial Sequence: Synthetic peptide
PTMNRNE

SEQ ID NO: 8043 - protein, 7 aa, Artificial Sequence
  Description of Artificial Sequence: Synthetic peptide
PTMSDSR

SEQ ID NO: 8044 - protein, 7 aa, Artificial Sequence
  Description of Artificial Sequence: Synthetic peptide
PTNALHL

SEQ ID NO: 8045 - protein, 7 aa, Artificial Sequence
  Description of Artificial Sequence: Synthetic peptide
PTNAVDN

SEQ ID NO: 8046 - protein, 7 aa, Artificial Sequence
  Description of Artificial Sequence: Synthetic peptide
PTNLGRA

SEQ ID NO: 8047 - protein, 7 aa, Artificial Sequence
  Description of Artificial Sequence: Synthetic peptide
PTNPRLM

SEQ ID NO: 8048 - protein, 7 aa, Artificial Sequence
  Description of Artificial Sequence: Synthetic peptide
PTNRPSS

SEQ ID NO: 8049 - protein, 7 aa, Artificial Sequence
  Description of Artificial Sequence: Synthetic peptide
PTPAAHG

SEQ ID NO: 8050 - protein, 7 aa, Artificial Sequence
  Description of Artificial Sequence: Synthetic peptide
PTPPTVT

SEQ ID NO: 8051 - protein, 7 aa, Artificial Sequence
  Description of Artificial Sequence: Synthetic peptide
PTPQGSA

SEQ ID NO: 8052 - protein, 7 aa, Artificial Sequence
  Description of Artificial Sequence: Synthetic peptide
PTPRPSP

SEQ ID NO: 8053 - protein, 7 aa, Artificial Sequence
  Description of Artificial Sequence: Synthetic peptide
PTPRSVP

SEQ ID NO: 8054 - protein, 7 aa, Artificial Sequence
  Description of Artificial Sequence: Synthetic peptide
PTQSGVS

SEQ ID NO: 8055 - protein, 7 aa, Artificial Sequence
  Description of Artificial Sequence: Synthetic peptide
PTRAEFY

SEQ ID NO: 8056 - protein, 7 aa, Artificial Sequence
  Description of Artificial Sequence: Synthetic peptide
PTRQPVL

SEQ ID NO: 8057 - protein, 7 aa, Artificial Sequence
  Description of Artificial Sequence: Synthetic peptide
PTRTINA

SEQ ID NO: 8058 - protein, 7 aa, Artificial Sequence
  Description of Artificial Sequence: Synthetic peptide
PTRTPAS

SEQ ID NO: 8059 - protein, 7 aa, Artificial Sequence
  Description of Artificial Sequence: Synthetic peptide
PTSDFKC

SEQ ID NO: 8060 - protein, 7 aa, Artificial Sequence
  Description of Artificial Sequence: Synthetic peptide
PTSEALR

SEQ ID NO: 8061 - protein, 7 aa, Artificial Sequence
  Description of Artificial Sequence: Synthetic peptide
PTSIHRN

SEQ ID NO: 8062 - protein, 7 aa, Artificial Sequence
  Description of Artificial Sequence: Synthetic peptide
PTSIVRS

SEQ ID NO: 8063 - protein, 7 aa, Artificial Sequence
  Description of Artificial Sequence: Synthetic peptide
PTSKGPL

SEQ ID NO: 8064 - protein, 7 aa, Artificial Sequence
  Description of Artificial Sequence: Synthetic peptide
PTSPTDM

SEQ ID NO: 8065 - protein, 7 aa, Artificial Sequence
  Description of Artificial Sequence: Synthetic peptide
PTSPTTC

SEQ ID NO: 8066 - protein, 7 aa, Artificial Sequence
  Description of Artificial Sequence: Synthetic peptide
PTSRPSL

SEQ ID NO: 8067 - protein, 7 aa, Artificial Sequence
  Description of Artificial Sequence: Synthetic peptide
PTSSIGG

SEQ ID NO: 8068 - protein, 7 aa, Artificial Sequence
  Description of Artificial Sequence: Synthetic peptide
PTSTNPL

SEQ ID NO: 8069 - protein, 7 aa, Artificial Sequence
  Description of Artificial Sequence: Synthetic peptide
PTSVGTG

SEQ ID NO: 8070 - protein, 7 aa, Artificial Sequence
  Description of Artificial Sequence: Synthetic peptide
PTSVPKT

SEQ ID NO: 8071 - protein, 7 aa, Artificial Sequence
  Description of Artificial Sequence: Synthetic peptide
PTTHLSD

SEQ ID NO: 8072 - protein, 7 aa, Artificial Sequence
  Description of Artificial Sequence: Synthetic peptide
PTTHSAR

SEQ ID NO: 8073 - protein, 7 aa, Artificial Sequence
  Description of Artificial Sequence: Synthetic peptide
PTTLAVA

SEQ ID NO: 8074 - protein, 7 aa, Artificial Sequence
  Description of Artificial Sequence: Synthetic peptide
PTTNGST

SEQ ID NO: 8075 - protein, 7 aa, Artificial Sequence
  Description of Artificial Sequence: Synthetic peptide
PTTPVAI

SEQ ID NO: 8076 - protein, 7 aa, Artificial Sequence
  Description of Artificial Sequence: Synthetic peptide
PTTRGPP

SEQ ID NO: 8077 - protein, 7 aa, Artificial Sequence
  Description of Artificial Sequence: Synthetic peptide
PTVKLLG

SEQ ID NO: 8078 - protein, 7 aa, Artificial Sequence
  Description of Artificial Sequence: Synthetic peptide
PTVPDLN

SEQ ID NO: 8079 - protein, 7 aa, Artificial Sequence
  Description of Artificial Sequence: Synthetic peptide
PTVPRPG

SEQ ID NO: 8080 - protein, 7 aa, Artificial Sequence
  Description of Artificial Sequence: Synthetic peptide
PTVPVGL

SEQ ID NO: 8081 - protein, 7 aa, Artificial Sequence
  Description of Artificial Sequence: Synthetic peptide
PTVRGQY

SEQ ID NO: 8082 - protein, 7 aa, Artificial Sequence
  Description of Artificial Sequence: Synthetic peptide
PTYPKAT

SEQ ID NO: 8083 - protein, 7 aa, Artificial Sequence
  Description of Artificial Sequence: Synthetic peptide
PTYRDTA

SEQ ID NO: 8084 - protein, 7 aa, Artificial Sequence
  Description of Artificial Sequence: Synthetic peptide
PVARSMS

SEQ ID NO: 8085 - protein, 7 aa, Artificial Sequence
  Description of Artificial Sequence: Synthetic peptide
PVATCRV

SEQ ID NO: 8086 - protein, 7 aa, Artificial Sequence
  Description of Artificial Sequence: Synthetic peptide
PVATSYD

SEQ ID NO: 8087 - protein, 7 aa, Artificial Sequence
  Description of Artificial Sequence: Synthetic peptide
PVDALPR

SEQ ID NO: 8088 - protein, 7 aa, Artificial Sequence
  Description of Artificial Sequence: Synthetic peptide
PVDHARS

SEQ ID NO: 8089 - protein, 7 aa, Artificial Sequence
  Description of Artificial Sequence: Synthetic peptide
PVDLGRG

SEQ ID NO: 8090 - protein, 7 aa, Artificial Sequence
  Description of Artificial Sequence: Synthetic peptide
PVEATVL

SEQ ID NO: 8091 - protein, 7 aa, Artificial Sequence
  Description of Artificial Sequence: Synthetic peptide
PVEKYDK

SEQ ID NO: 8092 - protein, 7 aa, Artificial Sequence
  Description of Artificial Sequence: Synthetic peptide
PVEPGMS

SEQ ID NO: 8093 - protein, 7 aa, Artificial Sequence
  Description of Artificial Sequence: Synthetic peptide
PVESHRL

SEQ ID NO: 8094 - protein, 7 aa, Artificial Sequence
  Description of Artificial Sequence: Synthetic peptide
PVFHEAS

SEQ ID NO: 8095 - protein, 7 aa, Artificial Sequence
  Description of Artificial Sequence: Synthetic peptide
PVFPQSS

SEQ ID NO: 8096 - protein, 7 aa, Artificial Sequence
  Description of Artificial Sequence: Synthetic peptide
PVGFTEN

SEQ ID NO: 8097 - protein, 7 aa, Artificial Sequence
  Description of Artificial Sequence: Synthetic peptide
PVGSNSA

SEQ ID NO: 8098 - protein, 7 aa, Artificial Sequence
  Description of Artificial Sequence: Synthetic peptide
PVHIHTS

SEQ ID NO: 8099 - protein, 7 aa, Artificial Sequence
  Description of Artificial Sequence: Synthetic peptide
PVHSGRP

SEQ ID NO: 8100 - protein, 7 aa, Artificial Sequence
  Description of Artificial Sequence: Synthetic peptide
PVISTIA

SEQ ID NO: 8101 - protein, 7 aa, Artificial Sequence
  Description of Artificial Sequence: Synthetic peptide
PVKEVGD

SEQ ID NO: 8102 - protein, 7 aa, Artificial Sequence
  Description of Artificial Sequence: Synthetic peptide
PVKSAAP

SEQ ID NO: 8103 - protein, 7 aa, Artificial Sequence
  Description of Artificial Sequence: Synthetic peptide
PVLPSDH

SEQ ID NO: 8104 - protein, 7 aa, Artificial Sequence
  Description of Artificial Sequence: Synthetic peptide
PVMGTSV

SEQ ID NO: 8105 - protein, 7 aa, Artificial Sequence
  Description of Artificial Sequence: Synthetic peptide
PVMSGAS

SEQ ID NO: 8106 - protein, 7 aa, Artificial Sequence
  Description of Artificial Sequence: Synthetic peptide
PVNSERM

SEQ ID NO: 8107 - protein, 7 aa, Artificial Sequence
  Description of Artificial Sequence: Synthetic peptide
PVPGKLA

SEQ ID NO: 8108 - protein, 7 aa, Artificial Sequence
  Description of Artificial Sequence: Synthetic peptide
PVPPPLR

SEQ ID NO: 8109 - protein, 7 aa, Artificial Sequence
  Description of Artificial Sequence: Synthetic peptide
PVPRSVN

SEQ ID NO: 8110 - protein, 7 aa, Artificial Sequence
  Description of Artificial Sequence: Synthetic peptide
PVQMTAS

SEQ ID NO: 8111 - protein, 7 aa, Artificial Sequence
  Description of Artificial Sequence: Synthetic peptide
PVQVSLG

SEQ ID NO: 8112 - protein, 7 aa, Artificial Sequence
  Description of Artificial Sequence: Synthetic peptide
PVRAIEH

SEQ ID NO: 8113 - protein, 7 aa, Artificial Sequence
  Description of Artificial Sequence: Synthetic peptide
PVRAMDG

SEQ ID NO: 8114 - protein, 7 aa, Artificial Sequence
  Description of Artificial Sequence: Synthetic peptide
PVSGNFT

SEQ ID NO: 8115 - protein, 7 aa, Artificial Sequence
  Description of Artificial Sequence: Synthetic peptide
PVSKDRP

SEQ ID NO: 8116 - protein, 7 aa, Artificial Sequence
  Description of Artificial Sequence: Synthetic peptide
PVSMAAR

SEQ ID NO: 8117 - protein, 7 aa, Artificial Sequence
  Description of Artificial Sequence: Synthetic peptide
PVSMPRE

SEQ ID NO: 8118 - protein, 7 aa, Artificial Sequence
  Description of Artificial Sequence: Synthetic peptide
PVSPAIP

SEQ ID NO: 8119 - protein, 7 aa, Artificial Sequence
  Description of Artificial Sequence: Synthetic peptide
PVSPVPA

SEQ ID NO: 8120 - protein, 7 aa, Artificial Sequence
  Description of Artificial Sequence: Synthetic peptide
PVSQHSK

SEQ ID NO: 8121 - protein, 7 aa, Artificial Sequence
  Description of Artificial Sequence: Synthetic peptide
PVSSPTM

SEQ ID NO: 8122 - protein, 7 aa, Artificial Sequence
  Description of Artificial Sequence: Synthetic peptide
PVSTSAD

SEQ ID NO: 8123 - protein, 7 aa, Artificial Sequence
  Description of Artificial Sequence: Synthetic peptide
PVTAGER

SEQ ID NO: 8124 - protein, 7 aa, Artificial Sequence
  Description of Artificial Sequence: Synthetic peptide
PVTGPGQ

SEQ ID NO: 8125 - protein, 7 aa, Artificial Sequence
  Description of Artificial Sequence: Synthetic peptide
PVTKSLL

SEQ ID NO: 8126 - protein, 7 aa, Artificial Sequence
  Description of Artificial Sequence: Synthetic peptide
PVTKSVL

SEQ ID NO: 8127 - protein, 7 aa, Artificial Sequence
  Description of Artificial Sequence: Synthetic peptide
PVTNDRH

SEQ ID NO: 8128 - protein, 7 aa, Artificial Sequence
  Description of Artificial Sequence: Synthetic peptide
PVTTNAG

SEQ ID NO: 8129 - protein, 7 aa, Artificial Sequence
  Description of Artificial Sequence: Synthetic peptide
PVVNVWS

SEQ ID NO: 8130 - protein, 7 aa, Artificial Sequence
  Description of Artificial Sequence: Synthetic peptide
PVVSDTL

SEQ ID NO: 8131 - protein, 7 aa, Artificial Sequence
  Description of Artificial Sequence: Synthetic peptide
PVVTTTL

SEQ ID NO: 8132 - protein, 7 aa, Artificial Sequence
  Description of Artificial Sequence: Synthetic peptide
PVYVGEI

SEQ ID NO: 8133 - protein, 7 aa, Artificial Sequence
  Description of Artificial Sequence: Synthetic peptide
PWATMQG

SEQ ID NO: 8134 - protein, 7 aa, Artificial Sequence
  Description of Artificial Sequence: Synthetic peptide
PWKDNRG

SEQ ID NO: 8135 - protein, 7 aa, Artificial Sequence
  Description of Artificial Sequence: Synthetic peptide
PWSEDGM

SEQ ID NO: 8136 - protein, 7 aa, Artificial Sequence
  Description of Artificial Sequence: Synthetic peptide
PYATALT

SEQ ID NO: 8137 - protein, 7 aa, Artificial Sequence
  Description of Artificial Sequence: Synthetic peptide
PYDRPSA

SEQ ID NO: 8138 - protein, 7 aa, Artificial Sequence
  Description of Artificial Sequence: Synthetic peptide
PYEARAL

SEQ ID NO: 8139 - protein, 7 aa, Artificial Sequence
  Description of Artificial Sequence: Synthetic peptide
PYEMVAM

SEQ ID NO: 8140 - protein, 7 aa, Artificial Sequence
  Description of Artificial Sequence: Synthetic peptide
PYGTRET

SEQ ID NO: 8141 - protein, 7 aa, Artificial Sequence
  Description of Artificial Sequence: Synthetic peptide
PYHNHSA

SEQ ID NO: 8142 - protein, 7 aa, Artificial Sequence
  Description of Artificial Sequence: Synthetic peptide
PYIGGMS

SEQ ID NO: 8143 - protein, 7 aa, Artificial Sequence
  Description of Artificial Sequence: Synthetic peptide
PYLDPLR

SEQ ID NO: 8144 - protein, 7 aa, Artificial Sequence
  Description of Artificial Sequence: Synthetic peptide
PYLSNRP

SEQ ID NO: 8145 - protein, 7 aa, Artificial Sequence
  Description of Artificial Sequence: Synthetic peptide
PYLYPEE

SEQ ID NO: 8146 - protein, 7 aa, Artificial Sequence
  Description of Artificial Sequence: Synthetic peptide
PYPDPSK

SEQ ID NO: 8147 - protein, 7 aa, Artificial Sequence
  Description of Artificial Sequence: Synthetic peptide
PYPETSH

SEQ ID NO: 8148 - protein, 7 aa, Artificial Sequence
  Description of Artificial Sequence: Synthetic peptide
PYPSDKF

SEQ ID NO: 8149 - protein, 7 aa, Artificial Sequence
  Description of Artificial Sequence: Synthetic peptide
PYPTSNE

SEQ ID NO: 8150 - protein, 7 aa, Artificial Sequence
  Description of Artificial Sequence: Synthetic peptide
PYQRNSV

SEQ ID NO: 8151 - protein, 7 aa, Artificial Sequence
  Description of Artificial Sequence: Synthetic peptide
PYREHTV

SEQ ID NO: 8152 - protein, 7 aa, Artificial Sequence
  Description of Artificial Sequence: Synthetic peptide
PYRESSP

SEQ ID NO: 8153 - protein, 7 aa, Artificial Sequence
  Description of Artificial Sequence: Synthetic peptide
PYRSEPA

SEQ ID NO: 8154 - protein, 7 aa, Artificial Sequence
  Description of Artificial Sequence: Synthetic peptide
PYSAGYH

SEQ ID NO: 8155 - protein, 7 aa, Artificial Sequence
  Description of Artificial Sequence: Synthetic peptide
PYSGMTL

SEQ ID NO: 8156 - protein, 7 aa, Artificial Sequence
  Description of Artificial Sequence: Synthetic peptide
PYSVAVS

SEQ ID NO: 8157 - protein, 7 aa, Artificial Sequence
  Description of Artificial Sequence: Synthetic peptide
PYTSALL

SEQ ID NO: 8158 - protein, 7 aa, Artificial Sequence
  Description of Artificial Sequence: Synthetic peptide
PYVTDRV

SEQ ID NO: 8159 - protein, 7 aa, Artificial Sequence
  Description of Artificial Sequence: Synthetic peptide
PYVTEVY

SEQ ID NO: 8160 - protein, 7 aa, Artificial Sequence
  Description of Artificial Sequence: Synthetic peptide
QAASLLA

SEQ ID NO: 8161 - protein, 7 aa, Artificial Sequence
  Description of Artificial Sequence: Synthetic peptide
QAELPYG

SEQ ID NO: 8162 - protein, 7 aa, Artificial Sequence
  Description of Artificial Sequence: Synthetic peptide
QAFDVEM

SEQ ID NO: 8163 - protein, 7 aa, Artificial Sequence
  Description of Artificial Sequence: Synthetic peptide
QAGMQGA

SEQ ID NO: 8164 - protein, 7 aa, Artificial Sequence
  Description of Artificial Sequence: Synthetic peptide
QAGNLRD

SEQ ID NO: 8165 - protein, 7 aa, Artificial Sequence
  Description of Artificial Sequence: Synthetic peptide
QAGNNGA

SEQ ID NO: 8166 - protein, 7 aa, Artificial Sequence
  Description of Artificial Sequence: Synthetic peptide
QAGVTNS

SEQ ID NO: 8167 - protein, 7 aa, Artificial Sequence
  Description of Artificial Sequence: Synthetic peptide
QAHGGAL

SEQ ID NO: 8168 - protein, 7 aa, Artificial Sequence
  Description of Artificial Sequence: Synthetic peptide
QAIQQRQ

SEQ ID NO: 8169 - protein, 7 aa, Artificial Sequence
  Description of Artificial Sequence: Synthetic peptide
QAIRNEP

SEQ ID NO: 8170 - protein, 7 aa, Artificial Sequence
  Description of Artificial Sequence: Synthetic peptide
QAKAYAT

SEQ ID NO: 8171 - protein, 7 aa, Artificial Sequence
  Description of Artificial Sequence: Synthetic peptide
QAKSPSL

SEQ ID NO: 8172 - protein, 7 aa, Artificial Sequence
  Description of Artificial Sequence: Synthetic peptide
QALAPTN

SEQ ID NO: 8173 - protein, 7 aa, Artificial Sequence
  Description of Artificial Sequence: Synthetic peptide
QALPTMH

SEQ ID NO: 8174 - protein, 7 aa, Artificial Sequence
  Description of Artificial Sequence: Synthetic peptide
QANGSVG

SEQ ID NO: 8175 - protein, 7 aa, Artificial Sequence
  Description of Artificial Sequence: Synthetic peptide
QANVSQP

SEQ ID NO: 8176 - protein, 7 aa, Artificial Sequence
  Description of Artificial Sequence: Synthetic peptide
QAPGHRE

SEQ ID NO: 8177 - protein, 7 aa, Artificial Sequence
  Description of Artificial Sequence: Synthetic peptide
QAPGILL

SEQ ID NO: 8178 - protein, 7 aa, Artificial Sequence
  Description of Artificial Sequence: Synthetic peptide
QAPGLLV

SEQ ID NO: 8179 - protein, 7 aa, Artificial Sequence
  Description of Artificial Sequence: Synthetic peptide
QAPLASL

SEQ ID NO: 8180 - protein, 7 aa, Artificial Sequence
  Description of Artificial Sequence: Synthetic peptide
QAPRSDV

SEQ ID NO: 8181 - protein, 7 aa, Artificial Sequence
  Description of Artificial Sequence: Synthetic peptide
QAQLQGR

SEQ ID NO: 8182 - protein, 7 aa, Artificial Sequence
  Description of Artificial Sequence: Synthetic peptide
QAQRALS

SEQ ID NO: 8183 - protein, 7 aa, Artificial Sequence
  Description of Artificial Sequence: Synthetic peptide
QAQYPAM

SEQ ID NO: 8184 - protein, 7 aa, Artificial Sequence
  Description of Artificial Sequence: Synthetic peptide
QARAVTS

SEQ ID NO: 8185 - protein, 7 aa, Artificial Sequence
  Description of Artificial Sequence: Synthetic peptide
QARDPSL

SEQ ID NO: 8186 - protein, 7 aa, Artificial Sequence
  Description of Artificial Sequence: Synthetic peptide
QAREVSP

SEQ ID NO: 8187 - protein, 7 aa, Artificial Sequence
  Description of Artificial Sequence: Synthetic peptide
QARGNVS

SEQ ID NO: 8188 - protein, 7 aa, Artificial Sequence
  Description of Artificial Sequence: Synthetic peptide
QARNTSL

SEQ ID NO: 8189 - protein, 7 aa, Artificial Sequence
  Description of Artificial Sequence: Synthetic peptide
QARPGIL

SEQ ID NO: 8190 - protein, 7 aa, Artificial Sequence
  Description of Artificial Sequence: Synthetic peptide
QARVFDS

SEQ ID NO: 8191 - protein, 7 aa, Artificial Sequence
  Description of Artificial Sequence: Synthetic peptide
QASANRA

SEQ ID NO: 8192 - protein, 7 aa, Artificial Sequence
  Description of Artificial Sequence: Synthetic peptide
QASIIRA

SEQ ID NO: 8193 - protein, 7 aa, Artificial Sequence
  Description of Artificial Sequence: Synthetic peptide
QASKLPS

SEQ ID NO: 8194 - protein, 7 aa, Artificial Sequence
  Description of Artificial Sequence: Synthetic peptide
QASPAYG

SEQ ID NO: 8195 - protein, 7 aa, Artificial Sequence
  Description of Artificial Sequence: Synthetic peptide
QASQSLS

SEQ ID NO: 8196 - protein, 7 aa, Artificial Sequence
  Description of Artificial Sequence: Synthetic peptide
QATANSL

SEQ ID NO: 8197 - protein, 7 aa, Artificial Sequence
  Description of Artificial Sequence: Synthetic peptide
QATFGDD

SEQ ID NO: 8198 - protein, 7 aa, Artificial Sequence
  Description of Artificial Sequence: Synthetic peptide
QATNQSL

SEQ ID NO: 8199 - protein, 7 aa, Artificial Sequence
  Description of Artificial Sequence: Synthetic peptide
QATPLTT

SEQ ID NO: 8200 - protein, 7 aa, Artificial Sequence
  Description of Artificial Sequence: Synthetic peptide
QATQLGH

SEQ ID NO: 8201 - protein, 7 aa, Artificial Sequence
  Description of Artificial Sequence: Synthetic peptide
QAVRDKD

SEQ ID NO: 8202 - protein, 7 aa, Artificial Sequence
  Description of Artificial Sequence: Synthetic peptide
QAVRPDS

SEQ ID NO: 8203 - protein, 7 aa, Artificial Sequence
  Description of Artificial Sequence: Synthetic peptide
QAYHNSL

SEQ ID NO: 8204 - protein, 7 aa, Artificial Sequence
  Description of Artificial Sequence: Synthetic peptide
QAYVNSL

SEQ ID NO: 8205 - protein, 7 aa, Artificial Sequence
  Description of Artificial Sequence: Synthetic peptide
QCSDRRA

SEQ ID NO: 8206 - protein, 7 aa, Artificial Sequence
  Description of Artificial Sequence: Synthetic peptide
QDADPAH

SEQ ID NO: 8207 - protein, 7 aa, Artificial Sequence
  Description of Artificial Sequence: Synthetic peptide
QDDFRSK

SEQ ID NO: 8208 - protein, 7 aa, Artificial Sequence
  Description of Artificial Sequence: Synthetic peptide
QDDVQKL

SEQ ID NO: 8209 - protein, 7 aa, Artificial Sequence
  Description of Artificial Sequence: Synthetic peptide
QDFDDVH

SEQ ID NO: 8210 - protein, 7 aa, Artificial Sequence
  Description of Artificial Sequence: Synthetic peptide
QDGIRIM

SEQ ID NO: 8211 - protein, 7 aa, Artificial Sequence
  Description of Artificial Sequence: Synthetic peptide
QDIRAFA

SEQ ID NO: 8212 - protein, 7 aa, Artificial Sequence
  Description of Artificial Sequence: Synthetic peptide
QDRALQP

SEQ ID NO: 8213 - protein, 7 aa, Artificial Sequence
  Description of Artificial Sequence: Synthetic peptide
QDRLADT

SEQ ID NO: 8214 - protein, 7 aa, Artificial Sequence
  Description of Artificial Sequence: Synthetic peptide
QDRMSLR

SEQ ID NO: 8215 - protein, 7 aa, Artificial Sequence
  Description of Artificial Sequence: Synthetic peptide
QDRSTNF

SEQ ID NO: 8216 - protein, 7 aa, Artificial Sequence
  Description of Artificial Sequence: Synthetic peptide
QDSCLLP

SEQ ID NO: 8217 - protein, 7 aa, Artificial Sequence
  Description of Artificial Sequence: Synthetic peptide
QDSYLGY

SEQ ID NO: 8218 - protein, 7 aa, Artificial Sequence
  Description of Artificial Sequence: Synthetic peptide
QDTLTRF

SEQ ID NO: 8219 - protein, 7 aa, Artificial Sequence
  Description of Artificial Sequence: Synthetic peptide
QDTTSLD

SEQ ID NO: 8220 - protein, 7 aa, Artificial Sequence
  Description of Artificial Sequence: Synthetic peptide
QDTYTHK

SEQ ID NO: 8221 - protein, 7 aa, Artificial Sequence
  Description of Artificial Sequence: Synthetic peptide
QDVGLTV

SEQ ID NO: 8222 - protein, 7 aa, Artificial Sequence
  Description of Artificial Sequence: Synthetic peptide
QDVPSCG

SEQ ID NO: 8223 - protein, 7 aa, Artificial Sequence
  Description of Artificial Sequence: Synthetic peptide
QDYKKPS

SEQ ID NO: 8224 - protein, 7 aa, Artificial Sequence
  Description of Artificial Sequence: Synthetic peptide
QDYRLPE

SEQ ID NO: 8225 - protein, 7 aa, Artificial Sequence
  Description of Artificial Sequence: Synthetic peptide
QEAARVE

SEQ ID NO: 8226 - protein, 7 aa, Artificial Sequence
  Description of Artificial Sequence: Synthetic peptide
QEDTWSG

SEQ ID NO: 8227 - protein, 7 aa, Artificial Sequence
  Description of Artificial Sequence: Synthetic peptide
QEGAVMN

SEQ ID NO: 8228 - protein, 7 aa, Artificial Sequence
  Description of Artificial Sequence: Synthetic peptide
QELLKGY

SEQ ID NO: 8229 - protein, 7 aa, Artificial Sequence
  Description of Artificial Sequence: Synthetic peptide
QELVLTR

SEQ ID NO: 8230 - protein, 7 aa, Artificial Sequence
  Description of Artificial Sequence: Synthetic peptide
QEPAVSI

SEQ ID NO: 8231 - protein, 7 aa, Artificial Sequence
  Description of Artificial Sequence: Synthetic peptide
QEPMSGA

SEQ ID NO: 8232 - protein, 7 aa, Artificial Sequence
  Description of Artificial Sequence: Synthetic peptide
QEPRGMH

SEQ ID NO: 8233 - protein, 7 aa, Artificial Sequence
  Description of Artificial Sequence: Synthetic peptide
QERRMGP

SEQ ID NO: 8234 - protein, 7 aa, Artificial Sequence
  Description of Artificial Sequence: Synthetic peptide
QESSHGP

SEQ ID NO: 8235 - protein, 7 aa, Artificial Sequence
  Description of Artificial Sequence: Synthetic peptide
QESTGVW

SEQ ID NO: 8236 - protein, 7 aa, Artificial Sequence
  Description of Artificial Sequence: Synthetic peptide
QEVANNP

SEQ ID NO: 8237 - protein, 7 aa, Artificial Sequence
  Description of Artificial Sequence: Synthetic peptide
QEVHITG

SEQ ID NO: 8238 - protein, 7 aa, Artificial Sequence
  Description of Artificial Sequence: Synthetic peptide
QEVPGRI

SEQ ID NO: 8239 - protein, 7 aa, Artificial Sequence
  Description of Artificial Sequence: Synthetic peptide
QEWNATA

SEQ ID NO: 8240 - protein, 7 aa, Artificial Sequence
  Description of Artificial Sequence: Synthetic peptide
QEYVSKS

SEQ ID NO: 8241 - protein, 7 aa, Artificial Sequence
  Description of Artificial Sequence: Synthetic peptide
QFDKMMP

SEQ ID NO: 8242 - protein, 7 aa, Artificial Sequence
  Description of Artificial Sequence: Synthetic peptide
QFDLSPA

SEQ ID NO: 8243 - protein, 7 aa, Artificial Sequence
  Description of Artificial Sequence: Synthetic peptide
QFENACV

SEQ ID NO: 8244 - protein, 7 aa, Artificial Sequence
  Description of Artificial Sequence: Synthetic peptide
QFGMPRD

SEQ ID NO: 8245 - protein, 7 aa, Artificial Sequence
  Description of Artificial Sequence: Synthetic peptide
QFLKHEE

SEQ ID NO: 8246 - protein, 7 aa, Artificial Sequence
  Description of Artificial Sequence: Synthetic peptide
QFMGGVN

SEQ ID NO: 8247 - protein, 7 aa, Artificial Sequence
  Description of Artificial Sequence: Synthetic peptide
QFNETLT

SEQ ID NO: 8248 - protein, 7 aa, Artificial Sequence
  Description of Artificial Sequence: Synthetic peptide
QFNPSIR

SEQ ID NO: 8249 - protein, 7 aa, Artificial Sequence
  Description of Artificial Sequence: Synthetic peptide
QFNSPMP

SEQ ID NO: 8250 - protein, 7 aa, Artificial Sequence
  Description of Artificial Sequence: Synthetic peptide
QFPGSMP

SEQ ID NO: 8251 - protein, 7 aa, Artificial Sequence
  Description of Artificial Sequence: Synthetic peptide
QFPPANS

SEQ ID NO: 8252 - protein, 7 aa, Artificial Sequence
  Description of Artificial Sequence: Synthetic peptide
QFQSSQA

SEQ ID NO: 8253 - protein, 7 aa, Artificial Sequence
  Description of Artificial Sequence: Synthetic peptide
QFRAEIT

SEQ ID NO: 8254 - protein, 7 aa, Artificial Sequence
  Description of Artificial Sequence: Synthetic peptide
QFSLNAE

SEQ ID NO: 8255 - protein, 7 aa, Artificial Sequence
  Description of Artificial Sequence: Synthetic peptide
QFSPTSR

SEQ ID NO: 8256 - protein, 7 aa, Artificial Sequence
  Description of Artificial Sequence: Synthetic peptide
QFSSGSP

SEQ ID NO: 8257 - protein, 7 aa, Artificial Sequence
  Description of Artificial Sequence: Synthetic peptide
QGADSRL

SEQ ID NO: 8258 - protein, 7 aa, Artificial Sequence
  Description of Artificial Sequence: Synthetic peptide
QGEHFAV

SEQ ID NO: 8259 - protein, 7 aa, Artificial Sequence
  Description of Artificial Sequence: Synthetic peptide
QGEKPDA

SEQ ID NO: 8260 - protein, 7 aa, Artificial Sequence
  Description of Artificial Sequence: Synthetic peptide
QGGSGPY

SEQ ID NO: 8261 - protein, 7 aa, Artificial Sequence
  Description of Artificial Sequence: Synthetic peptide
QGHDDDI

SEQ ID NO: 8262 - protein, 7 aa, Artificial Sequence
  Description of Artificial Sequence: Synthetic peptide
QGIEHRP

SEQ ID NO: 8263 - protein, 7 aa, Artificial Sequence
  Description of Artificial Sequence: Synthetic peptide
QGITCSP

SEQ ID NO: 8264 - protein, 7 aa, Artificial Sequence
  Description of Artificial Sequence: Synthetic peptide
QGKQLTA

SEQ ID NO: 8265 - protein, 7 aa, Artificial Sequence
  Description of Artificial Sequence: Synthetic peptide
QGKVDQR

SEQ ID NO: 8266 - protein, 7 aa, Artificial Sequence
  Description of Artificial Sequence: Synthetic peptide
QGLVANF

SEQ ID NO: 8267 - protein, 7 aa, Artificial Sequence
  Description of Artificial Sequence: Synthetic peptide
QGMSFGP

SEQ ID NO: 8268 - protein, 7 aa, Artificial Sequence
  Description of Artificial Sequence: Synthetic peptide
QGNRSPH

SEQ ID NO: 8269 - protein, 7 aa, Artificial Sequence
  Description of Artificial Sequence: Synthetic peptide
QGPANVV

SEQ ID NO: 8270 - protein, 7 aa, Artificial Sequence
  Description of Artificial Sequence: Synthetic peptide
QGPPVTN

SEQ ID NO: 8271 - protein, 7 aa, Artificial Sequence
  Description of Artificial Sequence: Synthetic peptide
QGPRAAP

SEQ ID NO: 8272 - protein, 7 aa, Artificial Sequence
  Description of Artificial Sequence: Synthetic peptide
QGPSMLT

SEQ ID NO: 8273 - protein, 7 aa, Artificial Sequence
  Description of Artificial Sequence: Synthetic peptide
QGQHPMT

SEQ ID NO: 8274 - protein, 7 aa, Artificial Sequence
  Description of Artificial Sequence: Synthetic peptide
QGQPIDR

SEQ ID NO: 8275 - protein, 7 aa, Artificial Sequence
  Description of Artificial Sequence: Synthetic peptide
QGREWVQ

SEQ ID NO: 8276 - protein, 7 aa, Artificial Sequence
  Description of Artificial Sequence: Synthetic peptide
QGRSLPA

SEQ ID NO: 8277 - protein, 7 aa, Artificial Sequence
  Description of Artificial Sequence: Synthetic peptide
QGRTPQA

SEQ ID NO: 8278 - protein, 7 aa, Artificial Sequence
  Description of Artificial Sequence: Synthetic peptide
QGSHSST

SEQ ID NO: 8279 - protein, 7 aa, Artificial Sequence
  Description of Artificial Sequence: Synthetic peptide
QGSRTNP

SEQ ID NO: 8280 - protein, 7 aa, Artificial Sequence
  Description of Artificial Sequence: Synthetic peptide
QGSTAVT

SEQ ID NO: 8281 - protein, 7 aa, Artificial Sequence
  Description of Artificial Sequence: Synthetic peptide
QGSTWSP

SEQ ID NO: 8282 - protein, 7 aa, Artificial Sequence
  Description of Artificial Sequence: Synthetic peptide
QGTLKNI

SEQ ID NO: 8283 - protein, 7 aa, Artificial Sequence
  Description of Artificial Sequence: Synthetic peptide
QGVAGHA

SEQ ID NO: 8284 - protein, 7 aa, Artificial Sequence
  Description of Artificial Sequence: Synthetic peptide
QGVLLVT

SEQ ID NO: 8285 - protein, 7 aa, Artificial Sequence
  Description of Artificial Sequence: Synthetic peptide
QGVRQAV

SEQ ID NO: 8286 - protein, 7 aa, Artificial Sequence
  Description of Artificial Sequence: Synthetic peptide
QGVRTTS

SEQ ID NO: 8287 - protein, 7 aa, Artificial Sequence
  Description of Artificial Sequence: Synthetic peptide
QHERMPS

SEQ ID NO: 8288 - protein, 7 aa, Artificial Sequence
  Description of Artificial Sequence: Synthetic peptide
QHFNQAE

SEQ ID NO: 8289 - protein, 7 aa, Artificial Sequence
  Description of Artificial Sequence: Synthetic peptide
QHGAPTW

SEQ ID NO: 8290 - protein, 7 aa, Artificial Sequence
  Description of Artificial Sequence: Synthetic peptide
QHLHTLK

SEQ ID NO: 8291 - protein, 7 aa, Artificial Sequence
  Description of Artificial Sequence: Synthetic peptide
QHLNSYV

SEQ ID NO: 8292 - protein, 7 aa, Artificial Sequence
  Description of Artificial Sequence: Synthetic peptide
QHLPRTT

SEQ ID NO: 8293 - protein, 7 aa, Artificial Sequence
  Description of Artificial Sequence: Synthetic peptide
QHLVHDA

SEQ ID NO: 8294 - protein, 7 aa, Artificial Sequence
  Description of Artificial Sequence: Synthetic peptide
QHSLAVT

SEQ ID NO: 8295 - protein, 7 aa, Artificial Sequence
  Description of Artificial Sequence: Synthetic peptide
QHSSLGI

SEQ ID NO: 8296 - protein, 7 aa, Artificial Sequence
  Description of Artificial Sequence: Synthetic peptide
QHSSMAR

SEQ ID NO: 8297 - protein, 7 aa, Artificial Sequence
  Description of Artificial Sequence: Synthetic peptide
QHTAAAL

SEQ ID NO: 8298 - protein, 7 aa, Artificial Sequence
  Description of Artificial Sequence: Synthetic peptide
QHTLTIS

SEQ ID NO: 8299 - protein, 7 aa, Artificial Sequence
  Description of Artificial Sequence: Synthetic peptide
QHTRVVF

SEQ ID NO: 8300 - protein, 7 aa, Artificial Sequence
  Description of Artificial Sequence: Synthetic peptide
QHTTKQS

SEQ ID NO: 8301 - protein, 7 aa, Artificial Sequence
  Description of Artificial Sequence: Synthetic peptide
QHVSSTG

SEQ ID NO: 8302 - protein, 7 aa, Artificial Sequence
  Description of Artificial Sequence: Synthetic peptide
QIARSSI

SEQ ID NO: 8303 - protein, 7 aa, Artificial Sequence
  Description of Artificial Sequence: Synthetic peptide
QIDYRAP

SEQ ID NO: 8304 - protein, 7 aa, Artificial Sequence
  Description of Artificial Sequence: Synthetic peptide
QIETLAH

SEQ ID NO: 8305 - protein, 7 aa, Artificial Sequence
  Description of Artificial Sequence: Synthetic peptide
QIFGRTP

SEQ ID NO: 8306 - protein, 7 aa, Artificial Sequence
  Description of Artificial Sequence: Synthetic peptide
QIGFGTS

SEQ ID NO: 8307 - protein, 7 aa, Artificial Sequence
  Description of Artificial Sequence: Synthetic peptide
QIGTYLA

SEQ ID NO: 8308 - protein, 7 aa, Artificial Sequence
  Description of Artificial Sequence: Synthetic peptide
QIHESGE

SEQ ID NO: 8309 - protein, 7 aa, Artificial Sequence
  Description of Artificial Sequence: Synthetic peptide
QIMADTR

SEQ ID NO: 8310 - protein, 7 aa, Artificial Sequence
  Description of Artificial Sequence: Synthetic peptide
QINFPMD

SEQ ID NO: 8311 - protein, 7 aa, Artificial Sequence
  Description of Artificial Sequence: Synthetic peptide
QINSNKT

SEQ ID NO: 8312 - protein, 7 aa, Artificial Sequence
  Description of Artificial Sequence: Synthetic peptide
QINSTTG

SEQ ID NO: 8313 - protein, 7 aa, Artificial Sequence
  Description of Artificial Sequence: Synthetic peptide
QIPIIES

SEQ ID NO: 8314 - protein, 7 aa, Artificial Sequence
  Description of Artificial Sequence: Synthetic peptide
QIPKAPG

SEQ ID NO: 8315 - protein, 7 aa, Artificial Sequence
  Description of Artificial Sequence: Synthetic peptide
QIPNSFS

SEQ ID NO: 8316 - protein, 7 aa, Artificial Sequence
  Description of Artificial Sequence: Synthetic peptide
QIPTTLA

SEQ ID NO: 8317 - protein, 7 aa, Artificial Sequence
  Description of Artificial Sequence: Synthetic peptide
QIRNSTE

SEQ ID NO: 8318 - protein, 7 aa, Artificial Sequence
  Description of Artificial Sequence: Synthetic peptide
QISQPKI

SEQ ID NO: 8319 - protein, 7 aa, Artificial Sequence
  Description of Artificial Sequence: Synthetic peptide
QISTLTF

SEQ ID NO: 8320 - protein, 7 aa, Artificial Sequence
  Description of Artificial Sequence: Synthetic peptide
QIVPQGP

SEQ ID NO: 8321 - protein, 7 aa, Artificial Sequence
  Description of Artificial Sequence: Synthetic peptide
QIVTGLS

SEQ ID NO: 8322 - protein, 7 aa, Artificial Sequence
  Description of Artificial Sequence: Synthetic peptide
QIYGSES

SEQ ID NO: 8323 - protein, 7 aa, Artificial Sequence
  Description of Artificial Sequence: Synthetic peptide
QKAASAD

SEQ ID NO: 8324 - protein, 7 aa, Artificial Sequence
  Description of Artificial Sequence: Synthetic peptide
QKAIDSL

SEQ ID NO: 8325 - protein, 7 aa, Artificial Sequence
  Description of Artificial Sequence: Synthetic peptide
QKELIVD

SEQ ID NO: 8326 - protein, 7 aa, Artificial Sequence
  Description of Artificial Sequence: Synthetic peptide
QKEPGPS

SEQ ID NO: 8327 - protein, 7 aa, Artificial Sequence
  Description of Artificial Sequence: Synthetic peptide
QKFADKG

SEQ ID NO: 8328 - protein, 7 aa, Artificial Sequence
  Description of Artificial Sequence: Synthetic peptide
QKHDIRS

SEQ ID NO: 8329 - protein, 7 aa, Artificial Sequence
  Description of Artificial Sequence: Synthetic peptide
QKHNCPV

SEQ ID NO: 8330 - protein, 7 aa, Artificial Sequence
  Description of Artificial Sequence: Synthetic peptide
QKKDPIP

SEQ ID NO: 8331 - protein, 7 aa, Artificial Sequence
  Description of Artificial Sequence: Synthetic peptide
QKMQHYD

SEQ ID NO: 8332 - protein, 7 aa, Artificial Sequence
  Description of Artificial Sequence: Synthetic peptide
QKPATRD

SEQ ID NO: 8333 - protein, 7 aa, Artificial Sequence
  Description of Artificial Sequence: Synthetic peptide
QKSNNAL

SEQ ID NO: 8334 - protein, 7 aa, Artificial Sequence
  Description of Artificial Sequence: Synthetic peptide
QKVIAEV

SEQ ID NO: 8335 - protein, 7 aa, Artificial Sequence
  Description of Artificial Sequence: Synthetic peptide
QKVMQPG

SEQ ID NO: 8336 - protein, 7 aa, Artificial Sequence
  Description of Artificial Sequence: Synthetic peptide
QLANHVG

SEQ ID NO: 8337 - protein, 7 aa, Artificial Sequence
  Description of Artificial Sequence: Synthetic peptide
QLAPPKT

SEQ ID NO: 8338 - protein, 7 aa, Artificial Sequence
  Description of Artificial Sequence: Synthetic peptide
QLASNAF

SEQ ID NO: 8339 - protein, 7 aa, Artificial Sequence
  Description of Artificial Sequence: Synthetic peptide
QLASVRI

SEQ ID NO: 8340 - protein, 7 aa, Artificial Sequence
  Description of Artificial Sequence: Synthetic peptide
QLDFDLV

SEQ ID NO: 8341 - protein, 7 aa, Artificial Sequence
  Description of Artificial Sequence: Synthetic peptide
QLDSLSV

SEQ ID NO: 8342 - protein, 7 aa, Artificial Sequence
  Description of Artificial Sequence: Synthetic peptide
QLGPSVP

SEQ ID NO: 8343 - protein, 7 aa, Artificial Sequence
  Description of Artificial Sequence: Synthetic peptide
QLGSLDG

SEQ ID NO: 8344 - protein, 7 aa, Artificial Sequence
  Description of Artificial Sequence: Synthetic peptide
QLGVRSQ

SEQ ID NO: 8345 - protein, 7 aa, Artificial Sequence
  Description of Artificial Sequence: Synthetic peptide
QLHYANE

SEQ ID NO: 8346 - protein, 7 aa, Artificial Sequence
  Description of Artificial Sequence: Synthetic peptide
QLIKTPG

SEQ ID NO: 8347 - protein, 7 aa, Artificial Sequence
  Description of Artificial Sequence: Synthetic peptide
QLKAVEF

SEQ ID NO: 8348 - protein, 7 aa, Artificial Sequence
  Description of Artificial Sequence: Synthetic peptide
QLKPLYF

SEQ ID NO: 8349 - protein, 7 aa, Artificial Sequence
  Description of Artificial Sequence: Synthetic peptide
QLKTEML

SEQ ID NO: 8350 - protein, 7 aa, Artificial Sequence
  Description of Artificial Sequence: Synthetic peptide
QLKTSLS

SEQ ID NO: 8351 - protein, 7 aa, Artificial Sequence
  Description of Artificial Sequence: Synthetic peptide
QLLRTGD

SEQ ID NO: 8352 - protein, 7 aa, Artificial Sequence
  Description of Artificial Sequence: Synthetic peptide
QLLRVTG

SEQ ID NO: 8353 - protein, 7 aa, Artificial Sequence
  Description of Artificial Sequence: Synthetic peptide
QLMRLGV

SEQ ID NO: 8354 - protein, 7 aa, Artificial Sequence
  Description of Artificial Sequence: Synthetic peptide
QLNDLAR

SEQ ID NO: 8355 - protein, 7 aa, Artificial Sequence
  Description of Artificial Sequence: Synthetic peptide
QLNRPPS

SEQ ID NO: 8356 - protein, 7 aa, Artificial Sequence
  Description of Artificial Sequence: Synthetic peptide
QLPADNA

SEQ ID NO: 8357 - protein, 7 aa, Artificial Sequence
  Description of Artificial Sequence: Synthetic peptide
QLPHDSA

SEQ ID NO: 8358 - protein, 7 aa, Artificial Sequence
  Description of Artificial Sequence: Synthetic peptide
QLPHVKV

SEQ ID NO: 8359 - protein, 7 aa, Artificial Sequence
  Description of Artificial Sequence: Synthetic peptide
QLPHVSM

SEQ ID NO: 8360 - protein, 7 aa, Artificial Sequence
  Description of Artificial Sequence: Synthetic peptide
QLPLTPH

SEQ ID NO: 8361 - protein, 7 aa, Artificial Sequence
  Description of Artificial Sequence: Synthetic peptide
QLPSTRS

SEQ ID NO: 8362 - protein, 7 aa, Artificial Sequence
  Description of Artificial Sequence: Synthetic peptide
QLPTKLD

SEQ ID NO: 8363 - protein, 7 aa, Artificial Sequence
  Description of Artificial Sequence: Synthetic peptide
QLPVNSS

SEQ ID NO: 8364 - protein, 7 aa, Artificial Sequence
  Description of Artificial Sequence: Synthetic peptide
QLQITTG

SEQ ID NO: 8365 - protein, 7 aa, Artificial Sequence
  Description of Artificial Sequence: Synthetic peptide
QLQLKTA

SEQ ID NO: 8366 - protein, 7 aa, Artificial Sequence
  Description of Artificial Sequence: Synthetic peptide
QLQTDKT

SEQ ID NO: 8367 - protein, 7 aa, Artificial Sequence
  Description of Artificial Sequence: Synthetic peptide
QLRGSYP

SEQ ID NO: 8368 - protein, 7 aa, Artificial Sequence
  Description of Artificial Sequence: Synthetic peptide
QLRHTDF

SEQ ID NO: 8369 - protein, 7 aa, Artificial Sequence
  Description of Artificial Sequence: Synthetic peptide
QLRPANS

SEQ ID NO: 8370 - protein, 7 aa, Artificial Sequence
  Description of Artificial Sequence: Synthetic peptide
QLRPEGL

SEQ ID NO: 8371 - protein, 7 aa, Artificial Sequence
  Description of Artificial Sequence: Synthetic peptide
QLSAPAA

SEQ ID NO: 8372 - protein, 7 aa, Artificial Sequence
  Description of Artificial Sequence: Synthetic peptide
QLSASTR

SEQ ID NO: 8373 - protein, 7 aa, Artificial Sequence
  Description of Artificial Sequence: Synthetic peptide
QLSKDVS

SEQ ID NO: 8374 - protein, 7 aa, Artificial Sequence
  Description of Artificial Sequence: Synthetic peptide
QLSLEPF

SEQ ID NO: 8375 - protein, 7 aa, Artificial Sequence
  Description of Artificial Sequence: Synthetic peptide
QLSREEP

SEQ ID NO: 8376 - protein, 7 aa, Artificial Sequence
  Description of Artificial Sequence: Synthetic peptide
QLSRPVP

SEQ ID NO: 8377 - protein, 7 aa, Artificial Sequence
  Description of Artificial Sequence: Synthetic peptide
QLSSAPT

SEQ ID NO: 8378 - protein, 7 aa, Artificial Sequence
  Description of Artificial Sequence: Synthetic peptide
QLSTTQG

SEQ ID NO: 8379 - protein, 7 aa, Artificial Sequence
  Description of Artificial Sequence: Synthetic peptide
QLTAGVP

SEQ ID NO: 8380 - protein, 7 aa, Artificial Sequence
  Description of Artificial Sequence: Synthetic peptide
QLTPVHH

SEQ ID NO: 8381 - protein, 7 aa, Artificial Sequence
  Description of Artificial Sequence: Synthetic peptide
QLTRGNY

SEQ ID NO: 8382 - protein, 7 aa, Artificial Sequence
  Description of Artificial Sequence: Synthetic peptide
QLTVHTL

SEQ ID NO: 8383 - protein, 7 aa, Artificial Sequence
  Description of Artificial Sequence: Synthetic peptide
QLVQQHL

SEQ ID NO: 8384 - protein, 7 aa, Artificial Sequence
  Description of Artificial Sequence: Synthetic peptide
QMAETSR

SEQ ID NO: 8385 - protein, 7 aa, Artificial Sequence
  Description of Artificial Sequence: Synthetic peptide
QMARTMS

SEQ ID NO: 8386 - protein, 7 aa, Artificial Sequence
  Description of Artificial Sequence: Synthetic peptide
QMASIPS

SEQ ID NO: 8387 - protein, 7 aa, Artificial Sequence
  Description of Artificial Sequence: Synthetic peptide
QMDDAPS

SEQ ID NO: 8388 - protein, 7 aa, Artificial Sequence
  Description of Artificial Sequence: Synthetic peptide
QMDNRNP

SEQ ID NO: 8389 - protein, 7 aa, Artificial Sequence
  Description of Artificial Sequence: Synthetic peptide
QMDRSRV

SEQ ID NO: 8390 - protein, 7 aa, Artificial Sequence
  Description of Artificial Sequence: Synthetic peptide
QMEAALY

SEQ ID NO: 8391 - protein, 7 aa, Artificial Sequence
  Description of Artificial Sequence: Synthetic peptide
QMHSSLH

SEQ ID NO: 8392 - protein, 7 aa, Artificial Sequence
  Description of Artificial Sequence: Synthetic peptide
QMKNQAT

SEQ ID NO: 8393 - protein, 7 aa, Artificial Sequence
  Description of Artificial Sequence: Synthetic peptide
QMLDKNH

SEQ ID NO: 8394 - protein, 7 aa, Artificial Sequence
  Description of Artificial Sequence: Synthetic peptide
QMNALPM

SEQ ID NO: 8395 - protein, 7 aa, Artificial Sequence
  Description of Artificial Sequence: Synthetic peptide
QMNMPND

SEQ ID NO: 8396 - protein, 7 aa, Artificial Sequence
  Description of Artificial Sequence: Synthetic peptide
QMPATAK

SEQ ID NO: 8397 - protein, 7 aa, Artificial Sequence
  Description of Artificial Sequence: Synthetic peptide
QMPEGTS

SEQ ID NO: 8398 - protein, 7 aa, Artificial Sequence
  Description of Artificial Sequence: Synthetic peptide
QMPPNSN

SEQ ID NO: 8399 - protein, 7 aa, Artificial Sequence
  Description of Artificial Sequence: Synthetic peptide
QMPSFGE

SEQ ID NO: 8400 - protein, 7 aa, Artificial Sequence
  Description of Artificial Sequence: Synthetic peptide
QMPSMSG

SEQ ID NO: 8401 - protein, 7 aa, Artificial Sequence
  Description of Artificial Sequence: Synthetic peptide
QMPSSRS

SEQ ID NO: 8402 - protein, 7 aa, Artificial Sequence
  Description of Artificial Sequence: Synthetic peptide
QMPTRTT

SEQ ID NO: 8403 - protein, 7 aa, Artificial Sequence
  Description of Artificial Sequence: Synthetic peptide
QMQRPLI

SEQ ID NO: 8404 - protein, 7 aa, Artificial Sequence
  Description of Artificial Sequence: Synthetic peptide
QMSIVVP

SEQ ID NO: 8405 - protein, 7 aa, Artificial Sequence
  Description of Artificial Sequence: Synthetic peptide
QMTILKQ

SEQ ID NO: 8406 - protein, 7 aa, Artificial Sequence
  Description of Artificial Sequence: Synthetic peptide
QNEALVG

SEQ ID NO: 8407 - protein, 7 aa, Artificial Sequence
  Description of Artificial Sequence: Synthetic peptide
QNELFRA

SEQ ID NO: 8408 - protein, 7 aa, Artificial Sequence
  Description of Artificial Sequence: Synthetic peptide
QNGLPQT

SEQ ID NO: 8409 - protein, 7 aa, Artificial Sequence
  Description of Artificial Sequence: Synthetic peptide
QNHPVTK

SEQ ID NO: 8410 - protein, 7 aa, Artificial Sequence
  Description of Artificial Sequence: Synthetic peptide
QNILAHW

SEQ ID NO: 8411 - protein, 7 aa, Artificial Sequence
  Description of Artificial Sequence: Synthetic peptide
QNKSNSY

SEQ ID NO: 8412 - protein, 7 aa, Artificial Sequence
  Description of Artificial Sequence: Synthetic peptide
QNLPSAY

SEQ ID NO: 8413 - protein, 7 aa, Artificial Sequence
  Description of Artificial Sequence: Synthetic peptide
QNLTFGM

SEQ ID NO: 8414 - protein, 7 aa, Artificial Sequence
  Description of Artificial Sequence: Synthetic peptide
QNLTGKS

SEQ ID NO: 8415 - protein, 7 aa, Artificial Sequence
  Description of Artificial Sequence: Synthetic peptide
QNMVCVA

SEQ ID NO: 8416 - protein, 7 aa, Artificial Sequence
  Description of Artificial Sequence: Synthetic peptide
QNPNISG

SEQ ID NO: 8417 - protein, 7 aa, Artificial Sequence
  Description of Artificial Sequence: Synthetic peptide
QNPPHIQ

SEQ ID NO: 8418 - protein, 7 aa, Artificial Sequence
  Description of Artificial Sequence: Synthetic peptide
QNPRLPL

SEQ ID NO: 8419 - protein, 7 aa, Artificial Sequence
  Description of Artificial Sequence: Synthetic peptide
QNPRTGQ

SEQ ID NO: 8420 - protein, 7 aa, Artificial Sequence
  Description of Artificial Sequence: Synthetic peptide
QNPTYKL

SEQ ID NO: 8421 - protein, 7 aa, Artificial Sequence
  Description of Artificial Sequence: Synthetic peptide
QNRIVEP

SEQ ID NO: 8422 - protein, 7 aa, Artificial Sequence
  Description of Artificial Sequence: Synthetic peptide
QNSAPAI

SEQ ID NO: 8423 - protein, 7 aa, Artificial Sequence
  Description of Artificial Sequence: Synthetic peptide
QNTSSGL

SEQ ID NO: 8424 - protein, 7 aa, Artificial Sequence
  Description of Artificial Sequence: Synthetic peptide
QNVMHMS

SEQ ID NO: 8425 - protein, 7 aa, Artificial Sequence
  Description of Artificial Sequence: Synthetic peptide
QNVQRYP

SEQ ID NO: 8426 - protein, 7 aa, Artificial Sequence
  Description of Artificial Sequence: Synthetic peptide
QNVRSQT

SEQ ID NO: 8427 - protein, 7 aa, Artificial Sequence
  Description of Artificial Sequence: Synthetic peptide
QNYLKTE

SEQ ID NO: 8428 - protein, 7 aa, Artificial Sequence
  Description of Artificial Sequence: Synthetic peptide
QPAAGHF

SEQ ID NO: 8429 - protein, 7 aa, Artificial Sequence
  Description of Artificial Sequence: Synthetic peptide
QPAHCSD

SEQ ID NO: 8430 - protein, 7 aa, Artificial Sequence
  Description of Artificial Sequence: Synthetic peptide
QPAKGYP

SEQ ID NO: 8431 - protein, 7 aa, Artificial Sequence
  Description of Artificial Sequence: Synthetic peptide
QPAPTLR

SEQ ID NO: 8432 - protein, 7 aa, Artificial Sequence
  Description of Artificial Sequence: Synthetic peptide
QPATEVL

SEQ ID NO: 8433 - protein, 7 aa, Artificial Sequence
  Description of Artificial Sequence: Synthetic peptide
QPAVMES

SEQ ID NO: 8434 - protein, 7 aa, Artificial Sequence
  Description of Artificial Sequence: Synthetic peptide
QPDPSPP

SEQ ID NO: 8435 - protein, 7 aa, Artificial Sequence
  Description of Artificial Sequence: Synthetic peptide
QPFYSDE

SEQ ID NO: 8436 - protein, 7 aa, Artificial Sequence
  Description of Artificial Sequence: Synthetic peptide
QPGVSHT

SEQ ID NO: 8437 - protein, 7 aa, Artificial Sequence
  Description of Artificial Sequence: Synthetic peptide
QPHGDPM

SEQ ID NO: 8438 - protein, 7 aa, Artificial Sequence
  Description of Artificial Sequence: Synthetic peptide
QPIAHTD

SEQ ID NO: 8439 - protein, 7 aa, Artificial Sequence
  Description of Artificial Sequence: Synthetic peptide
QPIQTRA

SEQ ID NO: 8440 - protein, 7 aa, Artificial Sequence
  Description of Artificial Sequence: Synthetic peptide
QPISATL

SEQ ID NO: 8441 - protein, 7 aa, Artificial Sequence
  Description of Artificial Sequence: Synthetic peptide
QPKFCGA

SEQ ID NO: 8442 - protein, 7 aa, Artificial Sequence
  Description of Artificial Sequence: Synthetic peptide
QPKLSAS

SEQ ID NO: 8443 - protein, 7 aa, Artificial Sequence
  Description of Artificial Sequence: Synthetic peptide
QPKSSGV

SEQ ID NO: 8444 - protein, 7 aa, Artificial Sequence
  Description of Artificial Sequence: Synthetic peptide
QPLARAS

SEQ ID NO: 8445 - protein, 7 aa, Artificial Sequence
  Description of Artificial Sequence: Synthetic peptide
QPLASKT

SEQ ID NO: 8446 - protein, 7 aa, Artificial Sequence
  Description of Artificial Sequence: Synthetic peptide
QPLLSAS

SEQ ID NO: 8447 - protein, 7 aa, Artificial Sequence
  Description of Artificial Sequence: Synthetic peptide
QPLTMRS

SEQ ID NO: 8448 - protein, 7 aa, Artificial Sequence
  Description of Artificial Sequence: Synthetic peptide
QPLTSDT

SEQ ID NO: 8449 - protein, 7 aa, Artificial Sequence
  Description of Artificial Sequence: Synthetic peptide
QPMLVVS

SEQ ID NO: 8450 - protein, 7 aa, Artificial Sequence
  Description of Artificial Sequence: Synthetic peptide
QPNPVAH

SEQ ID NO: 8451 - protein, 7 aa, Artificial Sequence
  Description of Artificial Sequence: Synthetic peptide
QPNYPCA

SEQ ID NO: 8452 - protein, 7 aa, Artificial Sequence
  Description of Artificial Sequence: Synthetic peptide
QPPGMSS

SEQ ID NO: 8453 - protein, 7 aa, Artificial Sequence
  Description of Artificial Sequence: Synthetic peptide
QPPNTED

SEQ ID NO: 8454 - protein, 7 aa, Artificial Sequence
  Description of Artificial Sequence: Synthetic peptide
QPPRSQL

SEQ ID NO: 8455 - protein, 7 aa, Artificial Sequence
  Description of Artificial Sequence: Synthetic peptide
QPPSPIS

SEQ ID NO: 8456 - protein, 7 aa, Artificial Sequence
  Description of Artificial Sequence: Synthetic peptide
QPPYLSG

SEQ ID NO: 8457 - protein, 7 aa, Artificial Sequence
  Description of Artificial Sequence: Synthetic peptide
QPQGREP

SEQ ID NO: 8458 - protein, 7 aa, Artificial Sequence
  Description of Artificial Sequence: Synthetic peptide
QPRAEVP

SEQ ID NO: 8459 - protein, 7 aa, Artificial Sequence
  Description of Artificial Sequence: Synthetic peptide
QPRDAGS

SEQ ID NO: 8460 - protein, 7 aa, Artificial Sequence
  Description of Artificial Sequence: Synthetic peptide
QPRLLDN

SEQ ID NO: 8461 - protein, 7 aa, Artificial Sequence
  Description of Artificial Sequence: Synthetic peptide
QPRTLST

SEQ ID NO: 8462 - protein, 7 aa, Artificial Sequence
  Description of Artificial Sequence: Synthetic peptide
QPSAAAR

SEQ ID NO: 8463 - protein, 7 aa, Artificial Sequence
  Description of Artificial Sequence: Synthetic peptide
QPSHGTP

SEQ ID NO: 8464 - protein, 7 aa, Artificial Sequence
  Description of Artificial Sequence: Synthetic peptide
QPSLVTL

SEQ ID NO: 8465 - protein, 7 aa, Artificial Sequence
  Description of Artificial Sequence: Synthetic peptide
QPSMEPQ

SEQ ID NO: 8466 - protein, 7 aa, Artificial Sequence
  Description of Artificial Sequence: Synthetic peptide
QPSMQSE

SEQ ID NO: 8467 - protein, 7 aa, Artificial Sequence
  Description of Artificial Sequence: Synthetic peptide
QPSNMGH

SEQ ID NO: 8468 - protein, 7 aa, Artificial Sequence
  Description of Artificial Sequence: Synthetic peptide
QPSPGFH

SEQ ID NO: 8469 - protein, 7 aa, Artificial Sequence
  Description of Artificial Sequence: Synthetic peptide
QPSSHPV

SEQ ID NO: 8470 - protein, 7 aa, Artificial Sequence
  Description of Artificial Sequence: Synthetic peptide
QPTDTLS

SEQ ID NO: 8471 - protein, 7 aa, Artificial Sequence
  Description of Artificial Sequence: Synthetic peptide
QPTPTPH

SEQ ID NO: 8472 - protein, 7 aa, Artificial Sequence
  Description of Artificial Sequence: Synthetic peptide
QPVNPMH

SEQ ID NO: 8473 - protein, 7 aa, Artificial Sequence
  Description of Artificial Sequence: Synthetic peptide
QPVNPRV

SEQ ID NO: 8474 - protein, 7 aa, Artificial Sequence
  Description of Artificial Sequence: Synthetic peptide
QPVVTPK

SEQ ID NO: 8475 - protein, 7 aa, Artificial Sequence
  Description of Artificial Sequence: Synthetic peptide
QPYSSSL

SEQ ID NO: 8476 - protein, 7 aa, Artificial Sequence
  Description of Artificial Sequence: Synthetic peptide
QQADATI

SEQ ID NO: 8477 - protein, 7 aa, Artificial Sequence
  Description of Artificial Sequence: Synthetic peptide
QQALSMA

SEQ ID NO: 8478 - protein, 7 aa, Artificial Sequence
  Description of Artificial Sequence: Synthetic peptide
QQAPYRP

SEQ ID NO: 8479 - protein, 7 aa, Artificial Sequence
  Description of Artificial Sequence: Synthetic peptide
QQEVARL

SEQ ID NO: 8480 - protein, 7 aa, Artificial Sequence
  Description of Artificial Sequence: Synthetic peptide
QQGRCPD

SEQ ID NO: 8481 - protein, 7 aa, Artificial Sequence
  Description of Artificial Sequence: Synthetic peptide
QQIIESL

SEQ ID NO: 8482 - protein, 7 aa, Artificial Sequence
  Description of Artificial Sequence: Synthetic peptide
QQKMSYD

SEQ ID NO: 8483 - protein, 7 aa, Artificial Sequence
  Description of Artificial Sequence: Synthetic peptide
QQRLMGE

SEQ ID NO: 8484 - protein, 7 aa, Artificial Sequence
  Description of Artificial Sequence: Synthetic peptide
QQRLQMM

SEQ ID NO: 8485 - protein, 7 aa, Artificial Sequence
  Description of Artificial Sequence: Synthetic peptide
QQRSSLL

SEQ ID NO: 8486 - protein, 7 aa, Artificial Sequence
  Description of Artificial Sequence: Synthetic peptide
QQRVNPE

SEQ ID NO: 8487 - protein, 7 aa, Artificial Sequence
  Description of Artificial Sequence: Synthetic peptide
QQSNQTK

SEQ ID NO: 8488 - protein, 7 aa, Artificial Sequence
  Description of Artificial Sequence: Synthetic peptide
QQTAGSD

SEQ ID NO: 8489 - protein, 7 aa, Artificial Sequence
  Description of Artificial Sequence: Synthetic peptide
QQTGYLP

SEQ ID NO: 8490 - protein, 7 aa, Artificial Sequence
  Description of Artificial Sequence: Synthetic peptide
QQTHMGS

SEQ ID NO: 8491 - protein, 7 aa, Artificial Sequence
  Description of Artificial Sequence: Synthetic peptide
QQTKQLQ

SEQ ID NO: 8492 - protein, 7 aa, Artificial Sequence
  Description of Artificial Sequence: Synthetic peptide
QQTKSTA

SEQ ID NO: 8493 - protein, 7 aa, Artificial Sequence
  Description of Artificial Sequence: Synthetic peptide
QQTNDRN

SEQ ID NO: 8494 - protein, 7 aa, Artificial Sequence
  Description of Artificial Sequence: Synthetic peptide
QQTRTSL

SEQ ID NO: 8495 - protein, 7 aa, Artificial Sequence
  Description of Artificial Sequence: Synthetic peptide
QQTSARE

SEQ ID NO: 8496 - protein, 7 aa, Artificial Sequence
  Description of Artificial Sequence: Synthetic peptide
QQVKSGD

SEQ ID NO: 8497 - protein, 7 aa, Artificial Sequence
  Description of Artificial Sequence: Synthetic peptide
QRAPDGW

SEQ ID NO: 8498 - protein, 7 aa, Artificial Sequence
  Description of Artificial Sequence: Synthetic peptide
QRAPESM

SEQ ID NO: 8499 - protein, 7 aa, Artificial Sequence
  Description of Artificial Sequence: Synthetic peptide
QRAQLNS

SEQ ID NO: 8500 - protein, 7 aa, Artificial Sequence
  Description of Artificial Sequence: Synthetic peptide
QRAVAPT

SEQ ID NO: 8501 - protein, 7 aa, Artificial Sequence
  Description of Artificial Sequence: Synthetic peptide
QRAVQVY

SEQ ID NO: 8502 - protein, 7 aa, Artificial Sequence
  Description of Artificial Sequence: Synthetic peptide
QRDARLD

SEQ ID NO: 8503 - protein, 7 aa, Artificial Sequence
  Description of Artificial Sequence: Synthetic peptide
QRGKEAH

SEQ ID NO: 8504 - protein, 7 aa, Artificial Sequence
  Description of Artificial Sequence: Synthetic peptide
QRGPGNQ

SEQ ID NO: 8505 - protein, 7 aa, Artificial Sequence
  Description of Artificial Sequence: Synthetic peptide
QRGPMEL

SEQ ID NO: 8506 - protein, 7 aa, Artificial Sequence
  Description of Artificial Sequence: Synthetic peptide
QRIGPAL

SEQ ID NO: 8507 - protein, 7 aa, Artificial Sequence
  Description of Artificial Sequence: Synthetic peptide
QRIPVDV

SEQ ID NO: 8508 - protein, 7 aa, Artificial Sequence
  Description of Artificial Sequence: Synthetic peptide
QRLASPS

SEQ ID NO: 8509 - protein, 7 aa, Artificial Sequence
  Description of Artificial Sequence: Synthetic peptide
QRLTAQE

SEQ ID NO: 8510 - protein, 7 aa, Artificial Sequence
  Description of Artificial Sequence: Synthetic peptide
QRMANMS

SEQ ID NO: 8511 - protein, 7 aa, Artificial Sequence
  Description of Artificial Sequence: Synthetic peptide
QRMTQDM

SEQ ID NO: 8512 - protein, 7 aa, Artificial Sequence
  Description of Artificial Sequence: Synthetic peptide
QRNSNTF

SEQ ID NO: 8513 - protein, 7 aa, Artificial Sequence
  Description of Artificial Sequence: Synthetic peptide
QRPGLHM

SEQ ID NO: 8514 - protein, 7 aa, Artificial Sequence
  Description of Artificial Sequence: Synthetic peptide
QRPLGGL

SEQ ID NO: 8515 - protein, 7 aa, Artificial Sequence
  Description of Artificial Sequence: Synthetic peptide
QRPPSVD

SEQ ID NO: 8516 - protein, 7 aa, Artificial Sequence
  Description of Artificial Sequence: Synthetic peptide
QRPTDRT

SEQ ID NO: 8517 - protein, 7 aa, Artificial Sequence
  Description of Artificial Sequence: Synthetic peptide
QRQPVLD

SEQ ID NO: 8518 - protein, 7 aa, Artificial Sequence
  Description of Artificial Sequence: Synthetic peptide
QRQRDLP

SEQ ID NO: 8519 - protein, 7 aa, Artificial Sequence
  Description of Artificial Sequence: Synthetic peptide
QRSANVA

SEQ ID NO: 8520 - protein, 7 aa, Artificial Sequence
  Description of Artificial Sequence: Synthetic peptide
QRSHMNP

SEQ ID NO: 8521 - protein, 7 aa, Artificial Sequence
  Description of Artificial Sequence: Synthetic peptide
QRSSGTP

SEQ ID NO: 8522 - protein, 7 aa, Artificial Sequence
  Description of Artificial Sequence: Synthetic peptide
QRSTNLN

SEQ ID NO: 8523 - protein, 7 aa, Artificial Sequence
  Description of Artificial Sequence: Synthetic peptide
QRTVHQG

SEQ ID NO: 8524 - protein, 7 aa, Artificial Sequence
  Description of Artificial Sequence: Synthetic peptide
QRTVRGE

SEQ ID NO: 8525 - protein, 7 aa, Artificial Sequence
  Description of Artificial Sequence: Synthetic peptide
QRVNSSG

SEQ ID NO: 8526 - protein, 7 aa, Artificial Sequence
  Description of Artificial Sequence: Synthetic peptide
QSADLDY

SEQ ID NO: 8527 - protein, 7 aa, Artificial Sequence
  Description of Artificial Sequence: Synthetic peptide
QSAEAEA

SEQ ID NO: 8528 - protein, 7 aa, Artificial Sequence
  Description of Artificial Sequence: Synthetic peptide
QSAHPAT

SEQ ID NO: 8529 - protein, 7 aa, Artificial Sequence
  Description of Artificial Sequence: Synthetic peptide
QSAPVRV

SEQ ID NO: 8530 - protein, 7 aa, Artificial Sequence
  Description of Artificial Sequence: Synthetic peptide
QSASALQ

SEQ ID NO: 8531 - protein, 7 aa, Artificial Sequence
  Description of Artificial Sequence: Synthetic peptide
QSASVMN

SEQ ID NO: 8532 - protein, 7 aa, Artificial Sequence
  Description of Artificial Sequence: Synthetic peptide
QSAVLEY

SEQ ID NO: 8533 - protein, 7 aa, Artificial Sequence
  Description of Artificial Sequence: Synthetic peptide
QSDDWPV

SEQ ID NO: 8534 - protein, 7 aa, Artificial Sequence
  Description of Artificial Sequence: Synthetic peptide
QSDIRNP

SEQ ID NO: 8535 - protein, 7 aa, Artificial Sequence
  Description of Artificial Sequence: Synthetic peptide
QSDWVPV

SEQ ID NO: 8536 - protein, 7 aa, Artificial Sequence
  Description of Artificial Sequence: Synthetic peptide
QSEKGTY

SEQ ID NO: 8537 - protein, 7 aa, Artificial Sequence
  Description of Artificial Sequence: Synthetic peptide
QSEMMDA

SEQ ID NO: 8538 - protein, 7 aa, Artificial Sequence
  Description of Artificial Sequence: Synthetic peptide
QSERATV

SEQ ID NO: 8539 - protein, 7 aa, Artificial Sequence
  Description of Artificial Sequence: Synthetic peptide
QSFHHER

SEQ ID NO: 8540 - protein, 7 aa, Artificial Sequence
  Description of Artificial Sequence: Synthetic peptide
QSFPLQA

SEQ ID NO: 8541 - protein, 7 aa, Artificial Sequence
  Description of Artificial Sequence: Synthetic peptide
QSGQGMY

SEQ ID NO: 8542 - protein, 7 aa, Artificial Sequence
  Description of Artificial Sequence: Synthetic peptide
QSGRWHW

SEQ ID NO: 8543 - protein, 7 aa, Artificial Sequence
  Description of Artificial Sequence: Synthetic peptide
QSGSSAR

SEQ ID NO: 8544 - protein, 7 aa, Artificial Sequence
  Description of Artificial Sequence: Synthetic peptide
QSHPFND

SEQ ID NO: 8545 - protein, 7 aa, Artificial Sequence
  Description of Artificial Sequence: Synthetic peptide
QSHTQGS

SEQ ID NO: 8546 - protein, 7 aa, Artificial Sequence
  Description of Artificial Sequence: Synthetic peptide
QSIAVTI

SEQ ID NO: 8547 - protein, 7 aa, Artificial Sequence
  Description of Artificial Sequence: Synthetic peptide
QSIVIAH

SEQ ID NO: 8548 - protein, 7 aa, Artificial Sequence
  Description of Artificial Sequence: Synthetic peptide
QSKLASL

SEQ ID NO: 8549 - protein, 7 aa, Artificial Sequence
  Description of Artificial Sequence: Synthetic peptide
QSKLYLE

SEQ ID NO: 8550 - protein, 7 aa, Artificial Sequence
  Description of Artificial Sequence: Synthetic peptide
QSKMPNW

SEQ ID NO: 8551 - protein, 7 aa, Artificial Sequence
  Description of Artificial Sequence: Synthetic peptide
QSLNDLK

SEQ ID NO: 8552 - protein, 7 aa, Artificial Sequence
  Description of Artificial Sequence: Synthetic peptide
QSMSSTL

SEQ ID NO: 8553 - protein, 7 aa, Artificial Sequence
  Description of Artificial Sequence: Synthetic peptide
QSNQDRQ

SEQ ID NO: 8554 - protein, 7 aa, Artificial Sequence
  Description of Artificial Sequence: Synthetic peptide
QSNSSNT

SEQ ID NO: 8555 - protein, 7 aa, Artificial Sequence
  Description of Artificial Sequence: Synthetic peptide
QSPGHPS

SEQ ID NO: 8556 - protein, 7 aa, Artificial Sequence
  Description of Artificial Sequence: Synthetic peptide
QSPKECY

SEQ ID NO: 8557 - protein, 7 aa, Artificial Sequence
  Description of Artificial Sequence: Synthetic peptide
QSPLYAS

SEQ ID NO: 8558 - protein, 7 aa, Artificial Sequence
  Description of Artificial Sequence: Synthetic peptide
QSPNLPL

SEQ ID NO: 8559 - protein, 7 aa, Artificial Sequence
  Description of Artificial Sequence: Synthetic peptide
QSPPSTD

SEQ ID NO: 8560 - protein, 7 aa, Artificial Sequence
  Description of Artificial Sequence: Synthetic peptide
QSPRNYV

SEQ ID NO: 8561 - protein, 7 aa, Artificial Sequence
  Description of Artificial Sequence: Synthetic peptide
QSPTNDM

SEQ ID NO: 8562 - protein, 7 aa, Artificial Sequence
  Description of Artificial Sequence: Synthetic peptide
QSQAPHG

SEQ ID NO: 8563 - protein, 7 aa, Artificial Sequence
  Description of Artificial Sequence: Synthetic peptide
QSRDIPT

SEQ ID NO: 8564 - protein, 7 aa, Artificial Sequence
  Description of Artificial Sequence: Synthetic peptide
QSRGALP

SEQ ID NO: 8565 - protein, 7 aa, Artificial Sequence
  Description of Artificial Sequence: Synthetic peptide
QSRLGSF

SEQ ID NO: 8566 - protein, 7 aa, Artificial Sequence
  Description of Artificial Sequence: Synthetic peptide
QSRTMTP

SEQ ID NO: 8567 - protein, 7 aa, Artificial Sequence
  Description of Artificial Sequence: Synthetic peptide
QSRTPSP

SEQ ID NO: 8568 - protein, 7 aa, Artificial Sequence
  Description of Artificial Sequence: Synthetic peptide
QSSAISY

SEQ ID NO: 8569 - protein, 7 aa, Artificial Sequence
  Description of Artificial Sequence: Synthetic peptide
QSSARGM

SEQ ID NO: 8570 - protein, 7 aa, Artificial Sequence
  Description of Artificial Sequence: Synthetic peptide
QSSATRN

SEQ ID NO: 8571 - protein, 7 aa, Artificial Sequence
  Description of Artificial Sequence: Synthetic peptide
QSSAVLT

SEQ ID NO: 8572 - protein, 7 aa, Artificial Sequence
  Description of Artificial Sequence: Synthetic peptide
QSSDTGE

SEQ ID NO: 8573 - protein, 7 aa, Artificial Sequence
  Description of Artificial Sequence: Synthetic peptide
QSSGQTV

SEQ ID NO: 8574 - protein, 7 aa, Artificial Sequence
  Description of Artificial Sequence: Synthetic peptide
QSSKIVY

SEQ ID NO: 8575 - protein, 7 aa, Artificial Sequence
  Description of Artificial Sequence: Synthetic peptide
QSSLSLS

SEQ ID NO: 8576 - protein, 7 aa, Artificial Sequence
  Description of Artificial Sequence: Synthetic peptide
QSSMPQT

SEQ ID NO: 8577 - protein, 7 aa, Artificial Sequence
  Description of Artificial Sequence: Synthetic peptide
QSSNFQS

SEQ ID NO: 8578 - protein, 7 aa, Artificial Sequence
  Description of Artificial Sequence: Synthetic peptide
QSSRAMG

SEQ ID NO: 8579 - protein, 7 aa, Artificial Sequence
  Description of Artificial Sequence: Synthetic peptide
QSSRPSP

SEQ ID NO: 8580 - protein, 7 aa, Artificial Sequence
  Description of Artificial Sequence: Synthetic peptide
QSSTLQS

SEQ ID NO: 8581 - protein, 7 aa, Artificial Sequence
  Description of Artificial Sequence: Synthetic peptide
QSTDQKD

SEQ ID NO: 8582 - protein, 7 aa, Artificial Sequence
  Description of Artificial Sequence: Synthetic peptide
QSTGALR

SEQ ID NO: 8583 - protein, 7 aa, Artificial Sequence
  Description of Artificial Sequence: Synthetic peptide
QSTNESS

SEQ ID NO: 8584 - protein, 7 aa, Artificial Sequence
  Description of Artificial Sequence: Synthetic peptide
QSTQLDH

SEQ ID NO: 8585 - protein, 7 aa, Artificial Sequence
  Description of Artificial Sequence: Synthetic peptide
QSTQSDK

SEQ ID NO: 8586 - protein, 7 aa, Artificial Sequence
  Description of Artificial Sequence: Synthetic peptide
QSTTRHP

SEQ ID NO: 8587 - protein, 7 aa, Artificial Sequence
  Description of Artificial Sequence: Synthetic peptide
QSTVTVR

SEQ ID NO: 8588 - protein, 7 aa, Artificial Sequence
  Description of Artificial Sequence: Synthetic peptide
QSVHSPL

SEQ ID NO: 8589 - protein, 7 aa, Artificial Sequence
  Description of Artificial Sequence: Synthetic peptide
QSVKYDR

SEQ ID NO: 8590 - protein, 7 aa, Artificial Sequence
  Description of Artificial Sequence: Synthetic peptide
QSVMTAP

SEQ ID NO: 8591 - protein, 7 aa, Artificial Sequence
  Description of Artificial Sequence: Synthetic peptide
QSVNAEL

SEQ ID NO: 8592 - protein, 7 aa, Artificial Sequence
  Description of Artificial Sequence: Synthetic peptide
QSVPLAS

SEQ ID NO: 8593 - protein, 7 aa, Artificial Sequence
  Description of Artificial Sequence: Synthetic peptide
QSYEARG

SEQ ID NO: 8594 - protein, 7 aa, Artificial Sequence
  Description of Artificial Sequence: Synthetic peptide
QSYNGLG

SEQ ID NO: 8595 - protein, 7 aa, Artificial Sequence
  Description of Artificial Sequence: Synthetic peptide
QTAGRLA

SEQ ID NO: 8596 - protein, 7 aa, Artificial Sequence
  Description of Artificial Sequence: Synthetic peptide
QTANKPV

SEQ ID NO: 8597 - protein, 7 aa, Artificial Sequence
  Description of Artificial Sequence: Synthetic peptide
QTDGAKD

SEQ ID NO: 8598 - protein, 7 aa, Artificial Sequence
  Description of Artificial Sequence: Synthetic peptide
QTDRAYV

SEQ ID NO: 8599 - protein, 7 aa, Artificial Sequence
  Description of Artificial Sequence: Synthetic peptide
QTDVDDM

SEQ ID NO: 8600 - protein, 7 aa, Artificial Sequence
  Description of Artificial Sequence: Synthetic peptide
QTFGGPG

SEQ ID NO: 8601 - protein, 7 aa, Artificial Sequence
  Description of Artificial Sequence: Synthetic peptide
QTGGRSP

SEQ ID NO: 8602 - protein, 7 aa, Artificial Sequence
  Description of Artificial Sequence: Synthetic peptide
QTGLNQD

SEQ ID NO: 8603 - protein, 7 aa, Artificial Sequence
  Description of Artificial Sequence: Synthetic peptide
QTGPTRD

SEQ ID NO: 8604 - protein, 7 aa, Artificial Sequence
  Description of Artificial Sequence: Synthetic peptide
QTGREPM

SEQ ID NO: 8605 - protein, 7 aa, Artificial Sequence
  Description of Artificial Sequence: Synthetic peptide
QTGSSYS

SEQ ID NO: 8606 - protein, 7 aa, Artificial Sequence
  Description of Artificial Sequence: Synthetic peptide
QTIRTED

SEQ ID NO: 8607 - protein, 7 aa, Artificial Sequence
  Description of Artificial Sequence: Synthetic peptide
QTISKDP

SEQ ID NO: 8608 - protein, 7 aa, Artificial Sequence
  Description of Artificial Sequence: Synthetic peptide
QTKHGES

SEQ ID NO: 8609 - protein, 7 aa, Artificial Sequence
  Description of Artificial Sequence: Synthetic peptide
QTKNTHP

SEQ ID NO: 8610 - protein, 7 aa, Artificial Sequence
  Description of Artificial Sequence: Synthetic peptide
QTKSLIP

SEQ ID NO: 8611 - protein, 7 aa, Artificial Sequence
  Description of Artificial Sequence: Synthetic peptide
QTLQHAT

SEQ ID NO: 8612 - protein, 7 aa, Artificial Sequence
  Description of Artificial Sequence: Synthetic peptide
QTLSGMR

SEQ ID NO: 8613 - protein, 7 aa, Artificial Sequence
  Description of Artificial Sequence: Synthetic peptide
QTMMPVP

SEQ ID NO: 8614 - protein, 7 aa, Artificial Sequence
  Description of Artificial Sequence: Synthetic peptide
QTMRSAG

SEQ ID NO: 8615 - protein, 7 aa, Artificial Sequence
  Description of Artificial Sequence: Synthetic peptide
QTNMQSP

SEQ ID NO: 8616 - protein, 7 aa, Artificial Sequence
  Description of Artificial Sequence: Synthetic peptide
QTNPNMV

SEQ ID NO: 8617 - protein, 7 aa, Artificial Sequence
  Description of Artificial Sequence: Synthetic peptide
QTNTATK

SEQ ID NO: 8618 - protein, 7 aa, Artificial Sequence
  Description of Artificial Sequence: Synthetic peptide
QTPPSAA

SEQ ID NO: 8619 - protein, 7 aa, Artificial Sequence
  Description of Artificial Sequence: Synthetic peptide
QTPPTNR

SEQ ID NO: 8620 - protein, 7 aa, Artificial Sequence
  Description of Artificial Sequence: Synthetic peptide
QTPRVIQ

SEQ ID NO: 8621 - protein, 7 aa, Artificial Sequence
  Description of Artificial Sequence: Synthetic peptide
QTPSMTR

SEQ ID NO: 8622 - protein, 7 aa, Artificial Sequence
  Description of Artificial Sequence: Synthetic peptide
QTPSYLG

SEQ ID NO: 8623 - protein, 7 aa, Artificial Sequence
  Description of Artificial Sequence: Synthetic peptide
QTQIRVG

SEQ ID NO: 8624 - protein, 7 aa, Artificial Sequence
  Description of Artificial Sequence: Synthetic peptide
QTQPQSS

SEQ ID NO: 8625 - protein, 7 aa, Artificial Sequence
  Description of Artificial Sequence: Synthetic peptide
QTQSLYP

SEQ ID NO: 8626 - protein, 7 aa, Artificial Sequence
  Description of Artificial Sequence: Synthetic peptide
QTQSPVP

SEQ ID NO: 8627 - protein, 7 aa, Artificial Sequence
  Description of Artificial Sequence: Synthetic peptide
QTQVSYG

SEQ ID NO: 8628 - protein, 7 aa, Artificial Sequence
  Description of Artificial Sequence: Synthetic peptide
QTRHDLL

SEQ ID NO: 8629 - protein, 7 aa, Artificial Sequence
  Description of Artificial Sequence: Synthetic peptide
QTRLAQH

SEQ ID NO: 8630 - protein, 7 aa, Artificial Sequence
  Description of Artificial Sequence: Synthetic peptide
QTRLPAS

SEQ ID NO: 8631 - protein, 7 aa, Artificial Sequence
  Description of Artificial Sequence: Synthetic peptide
QTSAARV

SEQ ID NO: 8632 - protein, 7 aa, Artificial Sequence
  Description of Artificial Sequence: Synthetic peptide
QTSPGVM

SEQ ID NO: 8633 - protein, 7 aa, Artificial Sequence
  Description of Artificial Sequence: Synthetic peptide
QTSTDNA

SEQ ID NO: 8634 - protein, 7 aa, Artificial Sequence
  Description of Artificial Sequence: Synthetic peptide
QTSVHLK

SEQ ID NO: 8635 - protein, 7 aa, Artificial Sequence
  Description of Artificial Sequence: Synthetic peptide
QTTARAQ

SEQ ID NO: 8636 - protein, 7 aa, Artificial Sequence
  Description of Artificial Sequence: Synthetic peptide
QTVHAFG

SEQ ID NO: 8637 - protein, 7 aa, Artificial Sequence
  Description of Artificial Sequence: Synthetic peptide
QTVRLTS

SEQ ID NO: 8638 - protein, 7 aa, Artificial Sequence
  Description of Artificial Sequence: Synthetic peptide
QTVSALG

SEQ ID NO: 8639 - protein, 7 aa, Artificial Sequence
  Description of Artificial Sequence: Synthetic peptide
QTYDPAS

SEQ ID NO: 8640 - protein, 7 aa, Artificial Sequence
  Description of Artificial Sequence: Synthetic peptide
QTYHTLE

SEQ ID NO: 8641 - protein, 7 aa, Artificial Sequence
  Description of Artificial Sequence: Synthetic peptide
QTYPTME

SEQ ID NO: 8642 - protein, 7 aa, Artificial Sequence
  Description of Artificial Sequence: Synthetic peptide
QVAGMKF

SEQ ID NO: 8643 - protein, 7 aa, Artificial Sequence
  Description of Artificial Sequence: Synthetic peptide
QVASPYR

SEQ ID NO: 8644 - protein, 7 aa, Artificial Sequence
  Description of Artificial Sequence: Synthetic peptide
QVDRSPH

SEQ ID NO: 8645 - protein, 7 aa, Artificial Sequence
  Description of Artificial Sequence: Synthetic peptide
QVEHGQT

SEQ ID NO: 8646 - protein, 7 aa, Artificial Sequence
  Description of Artificial Sequence: Synthetic peptide
QVEREAW

SEQ ID NO: 8647 - protein, 7 aa, Artificial Sequence
  Description of Artificial Sequence: Synthetic peptide
QVGGRAF

SEQ ID NO: 8648 - protein, 7 aa, Artificial Sequence
  Description of Artificial Sequence: Synthetic peptide
QVGKVTL

SEQ ID NO: 8649 - protein, 7 aa, Artificial Sequence
  Description of Artificial Sequence: Synthetic peptide
QVGVKNG

SEQ ID NO: 8650 - protein, 7 aa, Artificial Sequence
  Description of Artificial Sequence: Synthetic peptide
QVLNGRE

SEQ ID NO: 8651 - protein, 7 aa, Artificial Sequence
  Description of Artificial Sequence: Synthetic peptide
QVMPNVS

SEQ ID NO: 8652 - protein, 7 aa, Artificial Sequence
  Description of Artificial Sequence: Synthetic peptide
QVPFPAD

SEQ ID NO: 8653 - protein, 7 aa, Artificial Sequence
  Description of Artificial Sequence: Synthetic peptide
QVPLSLE

SEQ ID NO: 8654 - protein, 7 aa, Artificial Sequence
  Description of Artificial Sequence: Synthetic peptide
QVPYAPA

SEQ ID NO: 8655 - protein, 7 aa, Artificial Sequence
  Description of Artificial Sequence: Synthetic peptide
QVQPVHI

SEQ ID NO: 8656 - protein, 7 aa, Artificial Sequence
  Description of Artificial Sequence: Synthetic peptide
QVRAAVT

SEQ ID NO: 8657 - protein, 7 aa, Artificial Sequence
  Description of Artificial Sequence: Synthetic peptide
QVRDSYS

SEQ ID NO: 8658 - protein, 7 aa, Artificial Sequence
  Description of Artificial Sequence: Synthetic peptide
QVREPAI

SEQ ID NO: 8659 - protein, 7 aa, Artificial Sequence
  Description of Artificial Sequence: Synthetic peptide
QVRESSS

SEQ ID NO: 8660 - protein, 7 aa, Artificial Sequence
  Description of Artificial Sequence: Synthetic peptide
QVRLEPS

SEQ ID NO: 8661 - protein, 7 aa, Artificial Sequence
  Description of Artificial Sequence: Synthetic peptide
QVRPGLL

SEQ ID NO: 8662 - protein, 7 aa, Artificial Sequence
  Description of Artificial Sequence: Synthetic peptide
QVSHRDS

SEQ ID NO: 8663 - protein, 7 aa, Artificial Sequence
  Description of Artificial Sequence: Synthetic peptide
QVSLGSV

SEQ ID NO: 8664 - protein, 7 aa, Artificial Sequence
  Description of Artificial Sequence: Synthetic peptide
QVSPSLN

SEQ ID NO: 8665 - protein, 7 aa, Artificial Sequence
  Description of Artificial Sequence: Synthetic peptide
QVSSPVP

SEQ ID NO: 8666 - protein, 7 aa, Artificial Sequence
  Description of Artificial Sequence: Synthetic peptide
QVTKSHT

SEQ ID NO: 8667 - protein, 7 aa, Artificial Sequence
  Description of Artificial Sequence: Synthetic peptide
QVVASLG

SEQ ID NO: 8668 - protein, 7 aa, Artificial Sequence
  Description of Artificial Sequence: Synthetic peptide
QVVPHQE

SEQ ID NO: 8669 - protein, 7 aa, Artificial Sequence
  Description of Artificial Sequence: Synthetic peptide
QVVRSSS

SEQ ID NO: 8670 - protein, 7 aa, Artificial Sequence
  Description of Artificial Sequence: Synthetic peptide
QVYTNQY

SEQ ID NO: 8671 - protein, 7 aa, Artificial Sequence
  Description of Artificial Sequence: Synthetic peptide
QWANTGE

SEQ ID NO: 8672 - protein, 7 aa, Artificial Sequence
  Description of Artificial Sequence: Synthetic peptide
QWEDHST

SEQ ID NO: 8673 - protein, 7 aa, Artificial Sequence
  Description of Artificial Sequence: Synthetic peptide
QYGDGPK

SEQ ID NO: 8674 - protein, 7 aa, Artificial Sequence
  Description of Artificial Sequence: Synthetic peptide
QYGQQHS

SEQ ID NO: 8675 - protein, 7 aa, Artificial Sequence
  Description of Artificial Sequence: Synthetic peptide
QYGSVHG

SEQ ID NO: 8676 - protein, 7 aa, Artificial Sequence
  Description of Artificial Sequence: Synthetic peptide
QYHASGK

SEQ ID NO: 8677 - protein, 7 aa, Artificial Sequence
  Description of Artificial Sequence: Synthetic peptide
QYKRAEL

SEQ ID NO: 8678 - protein, 7 aa, Artificial Sequence
  Description of Artificial Sequence: Synthetic peptide
QYKTDMT

SEQ ID NO: 8679 - protein, 7 aa, Artificial Sequence
  Description of Artificial Sequence: Synthetic peptide
QYKTGAQ

SEQ ID NO: 8680 - protein, 7 aa, Artificial Sequence
  Description of Artificial Sequence: Synthetic peptide
QYLATHG

SEQ ID NO: 8681 - protein, 7 aa, Artificial Sequence
  Description of Artificial Sequence: Synthetic peptide
QYPNSDT

SEQ ID NO: 8682 - protein, 7 aa, Artificial Sequence
  Description of Artificial Sequence: Synthetic peptide
QYPVSPS

SEQ ID NO: 8683 - protein, 7 aa, Artificial Sequence
  Description of Artificial Sequence: Synthetic peptide
QYTASNS

SEQ ID NO: 8684 - protein, 7 aa, Artificial Sequence
  Description of Artificial Sequence: Synthetic peptide
QYTGTQK

SEQ ID NO: 8685 - protein, 7 aa, Artificial Sequence
  Description of Artificial Sequence: Synthetic peptide
QYTVLTE

SEQ ID NO: 8686 - protein, 7 aa, Artificial Sequence
  Description of Artificial Sequence: Synthetic peptide
QYVGIGT

SEQ ID NO: 8687 - protein, 7 aa, Artificial Sequence
  Description of Artificial Sequence: Synthetic peptide
RAAAYGA

SEQ ID NO: 8688 - protein, 7 aa, Artificial Sequence
  Description of Artificial Sequence: Synthetic peptide
RAAMMNP

SEQ ID NO: 8689 - protein, 7 aa, Artificial Sequence
  Description of Artificial Sequence: Synthetic peptide
RAAMVAV

SEQ ID NO: 8690 - protein, 7 aa, Artificial Sequence
  Description of Artificial Sequence: Synthetic peptide
RAANDFP

SEQ ID NO: 8691 - protein, 7 aa, Artificial Sequence
  Description of Artificial Sequence: Synthetic peptide
RAAPTSS

SEQ ID NO: 8692 - protein, 7 aa, Artificial Sequence
  Description of Artificial Sequence: Synthetic peptide
RAATVPN

SEQ ID NO: 8693 - protein, 7 aa, Artificial Sequence
  Description of Artificial Sequence: Synthetic peptide
RADKGPS

SEQ ID NO: 8694 - protein, 7 aa, Artificial Sequence
  Description of Artificial Sequence: Synthetic peptide
RADPRPG

SEQ ID NO: 8695 - protein, 7 aa, Artificial Sequence
  Description of Artificial Sequence: Synthetic peptide
RADRATY

SEQ ID NO: 8696 - protein, 7 aa, Artificial Sequence
  Description of Artificial Sequence: Synthetic peptide
RADVPPV

SEQ ID NO: 8697 - protein, 7 aa, Artificial Sequence
  Description of Artificial Sequence: Synthetic peptide
RADYHHN

SEQ ID NO: 8698 - protein, 7 aa, Artificial Sequence
  Description of Artificial Sequence: Synthetic peptide
RAEAVWD

SEQ ID NO: 8699 - protein, 7 aa, Artificial Sequence
  Description of Artificial Sequence: Synthetic peptide
RAENISR

SEQ ID NO: 8700 - protein, 7 aa, Artificial Sequence
  Description of Artificial Sequence: Synthetic peptide
RAESLLG

SEQ ID NO: 8701 - protein, 7 aa, Artificial Sequence
  Description of Artificial Sequence: Synthetic peptide
RAEVLYT

SEQ ID NO: 8702 - protein, 7 aa, Artificial Sequence
  Description of Artificial Sequence: Synthetic peptide
RAEYQSP

SEQ ID NO: 8703 - protein, 7 aa, Artificial Sequence
  Description of Artificial Sequence: Synthetic peptide
RAFGQSP

SEQ ID NO: 8704 - protein, 7 aa, Artificial Sequence
  Description of Artificial Sequence: Synthetic peptide
RAFPNDS

SEQ ID NO: 8705 - protein, 7 aa, Artificial Sequence
  Description of Artificial Sequence: Synthetic peptide
RAFSQAE

SEQ ID NO: 8706 - protein, 7 aa, Artificial Sequence
  Description of Artificial Sequence: Synthetic peptide
RAGLSPN

SEQ ID NO: 8707 - protein, 7 aa, Artificial Sequence
  Description of Artificial Sequence: Synthetic peptide
RAGPVST

SEQ ID NO: 8708 - protein, 7 aa, Artificial Sequence
  Description of Artificial Sequence: Synthetic peptide
RAGSYES

SEQ ID NO: 8709 - protein, 7 aa, Artificial Sequence
  Description of Artificial Sequence: Synthetic peptide
RAGVQCI

SEQ ID NO: 8710 - protein, 7 aa, Artificial Sequence
  Description of Artificial Sequence: Synthetic peptide
RAHGSGA

SEQ ID NO: 8711 - protein, 7 aa, Artificial Sequence
  Description of Artificial Sequence: Synthetic peptide
RAIAQAV

SEQ ID NO: 8712 - protein, 7 aa, Artificial Sequence
  Description of Artificial Sequence: Synthetic peptide
RAIDLPK

SEQ ID NO: 8713 - protein, 7 aa, Artificial Sequence
  Description of Artificial Sequence: Synthetic peptide
RAIDSVP

SEQ ID NO: 8714 - protein, 7 aa, Artificial Sequence
  Description of Artificial Sequence: Synthetic peptide
RAIKSDP

SEQ ID NO: 8715 - protein, 7 aa, Artificial Sequence
  Description of Artificial Sequence: Synthetic peptide
RAIPTPG

SEQ ID NO: 8716 - protein, 7 aa, Artificial Sequence
  Description of Artificial Sequence: Synthetic peptide
RALDVNA

SEQ ID NO: 8717 - protein, 7 aa, Artificial Sequence
  Description of Artificial Sequence: Synthetic peptide
RALLNLQ

SEQ ID NO: 8718 - protein, 7 aa, Artificial Sequence
  Description of Artificial Sequence: Synthetic peptide
RALQTTS

SEQ ID NO: 8719 - protein, 7 aa, Artificial Sequence
  Description of Artificial Sequence: Synthetic peptide
RALSANV

SEQ ID NO: 8720 - protein, 7 aa, Artificial Sequence
  Description of Artificial Sequence: Synthetic peptide
RALSSLP

SEQ ID NO: 8721 - protein, 7 aa, Artificial Sequence
  Description of Artificial Sequence: Synthetic peptide
RALTDLV

SEQ ID NO: 8722 - protein, 7 aa, Artificial Sequence
  Description of Artificial Sequence: Synthetic peptide
RAMGNVL

SEQ ID NO: 8723 - protein, 7 aa, Artificial Sequence
  Description of Artificial Sequence: Synthetic peptide
RAMLDRA

SEQ ID NO: 8724 - protein, 7 aa, Artificial Sequence
  Description of Artificial Sequence: Synthetic peptide
RAMPGEV

SEQ ID NO: 8725 - protein, 7 aa, Artificial Sequence
  Description of Artificial Sequence: Synthetic peptide
RAMPPSS

SEQ ID NO: 8726 - protein, 7 aa, Artificial Sequence
  Description of Artificial Sequence: Synthetic peptide
RANDPPP

SEQ ID NO: 8727 - protein, 7 aa, Artificial Sequence
  Description of Artificial Sequence: Synthetic peptide
RANLNIP

SEQ ID NO: 8728 - protein, 7 aa, Artificial Sequence
  Description of Artificial Sequence: Synthetic peptide
RAPETEL

SEQ ID NO: 8729 - protein, 7 aa, Artificial Sequence
  Description of Artificial Sequence: Synthetic peptide
RAPPSPK

SEQ ID NO: 8730 - protein, 7 aa, Artificial Sequence
  Description of Artificial Sequence: Synthetic peptide
RAPQGST

SEQ ID NO: 8731 - protein, 7 aa, Artificial Sequence
  Description of Artificial Sequence: Synthetic peptide
RAPQGYG

SEQ ID NO: 8732 - protein, 7 aa, Artificial Sequence
  Description of Artificial Sequence: Synthetic peptide
RAPRPIE

SEQ ID NO: 8733 - protein, 7 aa, Artificial Sequence
  Description of Artificial Sequence: Synthetic peptide
RAPVSPM

SEQ ID NO: 8734 - protein, 7 aa, Artificial Sequence
  Description of Artificial Sequence: Synthetic peptide
RAQPSLH

SEQ ID NO: 8735 - protein, 7 aa, Artificial Sequence
  Description of Artificial Sequence: Synthetic peptide
RAQSPLS

SEQ ID NO: 8736 - protein, 7 aa, Artificial Sequence
  Description of Artificial Sequence: Synthetic peptide
RAQTTLS

SEQ ID NO: 8737 - protein, 7 aa, Artificial Sequence
  Description of Artificial Sequence: Synthetic peptide
RAQYSQD

SEQ ID NO: 8738 - protein, 7 aa, Artificial Sequence
  Description of Artificial Sequence: Synthetic peptide
RAQYTGN

SEQ ID NO: 8739 - protein, 7 aa, Artificial Sequence
  Description of Artificial Sequence: Synthetic peptide
RASFPPD

SEQ ID NO: 8740 - protein, 7 aa, Artificial Sequence
  Description of Artificial Sequence: Synthetic peptide
RASHDTN

SEQ ID NO: 8741 - protein, 7 aa, Artificial Sequence
  Description of Artificial Sequence: Synthetic peptide
RASLRVE

SEQ ID NO: 8742 - protein, 7 aa, Artificial Sequence
  Description of Artificial Sequence: Synthetic peptide
RASNRPD

SEQ ID NO: 8743 - protein, 7 aa, Artificial Sequence
  Description of Artificial Sequence: Synthetic peptide
RASPTTS

SEQ ID NO: 8744 - protein, 7 aa, Artificial Sequence
  Description of Artificial Sequence: Synthetic peptide
RASSELP

SEQ ID NO: 8745 - protein, 7 aa, Artificial Sequence
  Description of Artificial Sequence: Synthetic peptide
RASSSED

SEQ ID NO: 8746 - protein, 7 aa, Artificial Sequence
  Description of Artificial Sequence: Synthetic peptide
RASSVDM

SEQ ID NO: 8747 - protein, 7 aa, Artificial Sequence
  Description of Artificial Sequence: Synthetic peptide
RASTGMA

SEQ ID NO: 8748 - protein, 7 aa, Artificial Sequence
  Description of Artificial Sequence: Synthetic peptide
RASTHTL

SEQ ID NO: 8749 - protein, 7 aa, Artificial Sequence
  Description of Artificial Sequence: Synthetic peptide
RATEHSF

SEQ ID NO: 8750 - protein, 7 aa, Artificial Sequence
  Description of Artificial Sequence: Synthetic peptide
RATEPAF

SEQ ID NO: 8751 - protein, 7 aa, Artificial Sequence
  Description of Artificial Sequence: Synthetic peptide
RATLPKT

SEQ ID NO: 8752 - protein, 7 aa, Artificial Sequence
  Description of Artificial Sequence: Synthetic peptide
RATNDRA

SEQ ID NO: 8753 - protein, 7 aa, Artificial Sequence
  Description of Artificial Sequence: Synthetic peptide
RATNDST

SEQ ID NO: 8754 - protein, 7 aa, Artificial Sequence
  Description of Artificial Sequence: Synthetic peptide
RATNTIL

SEQ ID NO: 8755 - protein, 7 aa, Artificial Sequence
  Description of Artificial Sequence: Synthetic peptide
RATTSTF

SEQ ID NO: 8756 - protein, 7 aa, Artificial Sequence
  Description of Artificial Sequence: Synthetic peptide
RAVEDRH

SEQ ID NO: 8757 - protein, 7 aa, Artificial Sequence
  Description of Artificial Sequence: Synthetic peptide
RAVLNIG

SEQ ID NO: 8758 - protein, 7 aa, Artificial Sequence
  Description of Artificial Sequence: Synthetic peptide
RAVQPML

SEQ ID NO: 8759 - protein, 7 aa, Artificial Sequence
  Description of Artificial Sequence: Synthetic peptide
RAVSLQA

SEQ ID NO: 8760 - protein, 7 aa, Artificial Sequence
  Description of Artificial Sequence: Synthetic peptide
RAVYQTQ

SEQ ID NO: 8761 - protein, 7 aa, Artificial Sequence
  Description of Artificial Sequence: Synthetic peptide
RAYGPTN

SEQ ID NO: 8762 - protein, 7 aa, Artificial Sequence
  Description of Artificial Sequence: Synthetic peptide
RAYMTDP

SEQ ID NO: 8763 - protein, 7 aa, Artificial Sequence
  Description of Artificial Sequence: Synthetic peptide
RAYNAVV

SEQ ID NO: 8764 - protein, 7 aa, Artificial Sequence
  Description of Artificial Sequence: Synthetic peptide
RAYPVDD

SEQ ID NO: 8765 - protein, 7 aa, Artificial Sequence
  Description of Artificial Sequence: Synthetic peptide
RDAASSC

SEQ ID NO: 8766 - protein, 7 aa, Artificial Sequence
  Description of Artificial Sequence: Synthetic peptide
RDDSSLL

SEQ ID NO: 8767 - protein, 7 aa, Artificial Sequence
  Description of Artificial Sequence: Synthetic peptide
RDDVRTY

SEQ ID NO: 8768 - protein, 7 aa, Artificial Sequence
  Description of Artificial Sequence: Synthetic peptide
RDGEMDP

SEQ ID NO: 8769 - protein, 7 aa, Artificial Sequence
  Description of Artificial Sequence: Synthetic peptide
RDGKWVA

SEQ ID NO: 8770 - protein, 7 aa, Artificial Sequence
  Description of Artificial Sequence: Synthetic peptide
RDGQHTS

SEQ ID NO: 8771 - protein, 7 aa, Artificial Sequence
  Description of Artificial Sequence: Synthetic peptide
RDHLTVA

SEQ ID NO: 8772 - protein, 7 aa, Artificial Sequence
  Description of Artificial Sequence: Synthetic peptide
RDIAAKT

SEQ ID NO: 8773 - protein, 7 aa, Artificial Sequence
  Description of Artificial Sequence: Synthetic peptide
RDKSDHA

SEQ ID NO: 8774 - protein, 7 aa, Artificial Sequence
  Description of Artificial Sequence: Synthetic peptide
RDLKTQS

SEQ ID NO: 8775 - protein, 7 aa, Artificial Sequence
  Description of Artificial Sequence: Synthetic peptide
RDLQHLS

SEQ ID NO: 8776 - protein, 7 aa, Artificial Sequence
  Description of Artificial Sequence: Synthetic peptide
RDLSSES

SEQ ID NO: 8777 - protein, 7 aa, Artificial Sequence
  Description of Artificial Sequence: Synthetic peptide
RDNKANI

SEQ ID NO: 8778 - protein, 7 aa, Artificial Sequence
  Description of Artificial Sequence: Synthetic peptide
RDNSSVV

SEQ ID NO: 8779 - protein, 7 aa, Artificial Sequence
  Description of Artificial Sequence: Synthetic peptide
RDPNINP

SEQ ID NO: 8780 - protein, 7 aa, Artificial Sequence
  Description of Artificial Sequence: Synthetic peptide
RDPRAGF

SEQ ID NO: 8781 - protein, 7 aa, Artificial Sequence
  Description of Artificial Sequence: Synthetic peptide
RDPRAHL

SEQ ID NO: 8782 - protein, 7 aa, Artificial Sequence
  Description of Artificial Sequence: Synthetic peptide
RDPRGQG

SEQ ID NO: 8783 - protein, 7 aa, Artificial Sequence
  Description of Artificial Sequence: Synthetic peptide
RDQASKN

SEQ ID NO: 8784 - protein, 7 aa, Artificial Sequence
  Description of Artificial Sequence: Synthetic peptide
RDQGLES

SEQ ID NO: 8785 - protein, 7 aa, Artificial Sequence
  Description of Artificial Sequence: Synthetic peptide
RDQVATP

SEQ ID NO: 8786 - protein, 7 aa, Artificial Sequence
  Description of Artificial Sequence: Synthetic peptide
RDRDPTS

SEQ ID NO: 8787 - protein, 7 aa, Artificial Sequence
  Description of Artificial Sequence: Synthetic peptide
RDREPAL

SEQ ID NO: 8788 - protein, 7 aa, Artificial Sequence
  Description of Artificial Sequence: Synthetic peptide
RDREVSW

SEQ ID NO: 8789 - protein, 7 aa, Artificial Sequence
  Description of Artificial Sequence: Synthetic peptide
RDSAFAV

SEQ ID NO: 8790 - protein, 7 aa, Artificial Sequence
  Description of Artificial Sequence: Synthetic peptide
RDSKSNS

SEQ ID NO: 8791 - protein, 7 aa, Artificial Sequence
  Description of Artificial Sequence: Synthetic peptide
RDSKVSH

SEQ ID NO: 8792 - protein, 7 aa, Artificial Sequence
  Description of Artificial Sequence: Synthetic peptide
RDSLETQ

SEQ ID NO: 8793 - protein, 7 aa, Artificial Sequence
  Description of Artificial Sequence: Synthetic peptide
RDSMLVA

SEQ ID NO: 8794 - protein, 7 aa, Artificial Sequence
  Description of Artificial Sequence: Synthetic peptide
RDSMPAA

SEQ ID NO: 8795 - protein, 7 aa, Artificial Sequence
  Description of Artificial Sequence: Synthetic peptide
RDSRMLS

SEQ ID NO: 8796 - protein, 7 aa, Artificial Sequence
  Description of Artificial Sequence: Synthetic peptide
RDSSHFP

SEQ ID NO: 8797 - protein, 7 aa, Artificial Sequence
  Description of Artificial Sequence: Synthetic peptide
RDSSLYL

SEQ ID NO: 8798 - protein, 7 aa, Artificial Sequence
  Description of Artificial Sequence: Synthetic peptide
RDSSYTD

SEQ ID NO: 8799 - protein, 7 aa, Artificial Sequence
  Description of Artificial Sequence: Synthetic peptide
RDTIISA

SEQ ID NO: 8800 - protein, 7 aa, Artificial Sequence
  Description of Artificial Sequence: Synthetic peptide
RDTSLPV

SEQ ID NO: 8801 - protein, 7 aa, Artificial Sequence
  Description of Artificial Sequence: Synthetic peptide
RDTSSIG

SEQ ID NO: 8802 - protein, 7 aa, Artificial Sequence
  Description of Artificial Sequence: Synthetic peptide
RDVAARS

SEQ ID NO: 8803 - protein, 7 aa, Artificial Sequence
  Description of Artificial Sequence: Synthetic peptide
RDVAMQD

SEQ ID NO: 8804 - protein, 7 aa, Artificial Sequence
  Description of Artificial Sequence: Synthetic peptide
RDVPQAV

SEQ ID NO: 8805 - protein, 7 aa, Artificial Sequence
  Description of Artificial Sequence: Synthetic peptide
RDVSGPV

SEQ ID NO: 8806 - protein, 7 aa, Artificial Sequence
  Description of Artificial Sequence: Synthetic peptide
RDVSIPS

SEQ ID NO: 8807 - protein, 7 aa, Artificial Sequence
  Description of Artificial Sequence: Synthetic peptide
RDVSRLP

SEQ ID NO: 8808 - protein, 7 aa, Artificial Sequence
  Description of Artificial Sequence: Synthetic peptide
RDVTRLP

SEQ ID NO: 8809 - protein, 7 aa, Artificial Sequence
  Description of Artificial Sequence: Synthetic peptide
REAAFAD

SEQ ID NO: 8810 - protein, 7 aa, Artificial Sequence
  Description of Artificial Sequence: Synthetic peptide
REAGGAS

SEQ ID NO: 8811 - protein, 7 aa, Artificial Sequence
  Description of Artificial Sequence: Synthetic peptide
REAGGLA

SEQ ID NO: 8812 - protein, 7 aa, Artificial Sequence
  Description of Artificial Sequence: Synthetic peptide
REAKPAW

SEQ ID NO: 8813 - protein, 7 aa, Artificial Sequence
  Description of Artificial Sequence: Synthetic peptide
REAVTKA

SEQ ID NO: 8814 - protein, 7 aa, Artificial Sequence
  Description of Artificial Sequence: Synthetic peptide
REAYETP

SEQ ID NO: 8815 - protein, 7 aa, Artificial Sequence
  Description of Artificial Sequence: Synthetic peptide
REDNSND

SEQ ID NO: 8816 - protein, 7 aa, Artificial Sequence
  Description of Artificial Sequence: Synthetic peptide
REGGQSR

SEQ ID NO: 8817 - protein, 7 aa, Artificial Sequence
  Description of Artificial Sequence: Synthetic peptide
REGLYSH

SEQ ID NO: 8818 - protein, 7 aa, Artificial Sequence
  Description of Artificial Sequence: Synthetic peptide
REIGCTG

SEQ ID NO: 8819 - protein, 7 aa, Artificial Sequence
  Description of Artificial Sequence: Synthetic peptide
REKTDRF

SEQ ID NO: 8820 - protein, 7 aa, Artificial Sequence
  Description of Artificial Sequence: Synthetic peptide
RELEGFT

SEQ ID NO: 8821 - protein, 7 aa, Artificial Sequence
  Description of Artificial Sequence: Synthetic peptide
RELSPMY

SEQ ID NO: 8822 - protein, 7 aa, Artificial Sequence
  Description of Artificial Sequence: Synthetic peptide
RELSYAS

SEQ ID NO: 8823 - protein, 7 aa, Artificial Sequence
  Description of Artificial Sequence: Synthetic peptide
REMLPSS

SEQ ID NO: 8824 - protein, 7 aa, Artificial Sequence
  Description of Artificial Sequence: Synthetic peptide
RENGLSL

SEQ ID NO: 8825 - protein, 7 aa, Artificial Sequence
  Description of Artificial Sequence: Synthetic peptide
RENLAAG

SEQ ID NO: 8826 - protein, 7 aa, Artificial Sequence
  Description of Artificial Sequence: Synthetic peptide
RENNTVK

SEQ ID NO: 8827 - protein, 7 aa, Artificial Sequence
  Description of Artificial Sequence: Synthetic peptide
REPHTSN

SEQ ID NO: 8828 - protein, 7 aa, Artificial Sequence
  Description of Artificial Sequence: Synthetic peptide
REPPTLS

SEQ ID NO: 8829 - protein, 7 aa, Artificial Sequence
  Description of Artificial Sequence: Synthetic peptide
REQFRNL

SEQ ID NO: 8830 - protein, 7 aa, Artificial Sequence
  Description of Artificial Sequence: Synthetic peptide
RERSALT

SEQ ID NO: 8831 - protein, 7 aa, Artificial Sequence
  Description of Artificial Sequence: Synthetic peptide
RERSPMP

SEQ ID NO: 8832 - protein, 7 aa, Artificial Sequence
  Description of Artificial Sequence: Synthetic peptide
RESCPDA

SEQ ID NO: 8833 - protein, 7 aa, Artificial Sequence
  Description of Artificial Sequence: Synthetic peptide
RESHKGP

SEQ ID NO: 8834 - protein, 7 aa, Artificial Sequence
  Description of Artificial Sequence: Synthetic peptide
RESLNNM

SEQ ID NO: 8835 - protein, 7 aa, Artificial Sequence
  Description of Artificial Sequence: Synthetic peptide
RESTTHG

SEQ ID NO: 8836 - protein, 7 aa, Artificial Sequence
  Description of Artificial Sequence: Synthetic peptide
RESVSIN

SEQ ID NO: 8837 - protein, 7 aa, Artificial Sequence
  Description of Artificial Sequence: Synthetic peptide
RESYESG

SEQ ID NO: 8838 - protein, 7 aa, Artificial Sequence
  Description of Artificial Sequence: Synthetic peptide
RETLGSP

SEQ ID NO: 8839 - protein, 7 aa, Artificial Sequence
  Description of Artificial Sequence: Synthetic peptide
RETMAST

SEQ ID NO: 8840 - protein, 7 aa, Artificial Sequence
  Description of Artificial Sequence: Synthetic peptide
RETPNIP

SEQ ID NO: 8841 - protein, 7 aa, Artificial Sequence
  Description of Artificial Sequence: Synthetic peptide
RETSSSQ

SEQ ID NO: 8842 - protein, 7 aa, Artificial Sequence
  Description of Artificial Sequence: Synthetic peptide
RETVRNV

SEQ ID NO: 8843 - protein, 7 aa, Artificial Sequence
  Description of Artificial Sequence: Synthetic peptide
REVLSTC

SEQ ID NO: 8844 - protein, 7 aa, Artificial Sequence
  Description of Artificial Sequence: Synthetic peptide
REVSASP

SEQ ID NO: 8845 - protein, 7 aa, Artificial Sequence
  Description of Artificial Sequence: Synthetic peptide
REVSFDW

SEQ ID NO: 8846 - protein, 7 aa, Artificial Sequence
  Description of Artificial Sequence: Synthetic peptide
REYPSGS

SEQ ID NO: 8847 - protein, 7 aa, Artificial Sequence
  Description of Artificial Sequence: Synthetic peptide
RFAETRP

SEQ ID NO: 8848 - protein, 7 aa, Artificial Sequence
  Description of Artificial Sequence: Synthetic peptide
RFAGAGV

SEQ ID NO: 8849 - protein, 7 aa, Artificial Sequence
  Description of Artificial Sequence: Synthetic peptide
RFAGSLI

SEQ ID NO: 8850 - protein, 7 aa, Artificial Sequence
  Description of Artificial Sequence: Synthetic peptide
RFANSGV

SEQ ID NO: 8851 - protein, 7 aa, Artificial Sequence
  Description of Artificial Sequence: Synthetic peptide
RFELAHN

SEQ ID NO: 8852 - protein, 7 aa, Artificial Sequence
  Description of Artificial Sequence: Synthetic peptide
RFESSVP

SEQ ID NO: 8853 - protein, 7 aa, Artificial Sequence
  Description of Artificial Sequence: Synthetic peptide
RFHAATS

SEQ ID NO: 8854 - protein, 7 aa, Artificial Sequence
  Description of Artificial Sequence: Synthetic peptide
RFKEMPM

SEQ ID NO: 8855 - protein, 7 aa, Artificial Sequence
  Description of Artificial Sequence: Synthetic peptide
RFKTTGE

SEQ ID NO: 8856 - protein, 7 aa, Artificial Sequence
  Description of Artificial Sequence: Synthetic peptide
RFPQPDP

SEQ ID NO: 8857 - protein, 7 aa, Artificial Sequence
  Description of Artificial Sequence: Synthetic peptide
RFPVDGV

SEQ ID NO: 8858 - protein, 7 aa, Artificial Sequence
  Description of Artificial Sequence: Synthetic peptide
RFSDSRM

SEQ ID NO: 8859 - protein, 7 aa, Artificial Sequence
  Description of Artificial Sequence: Synthetic peptide
RFSGMVE

SEQ ID NO: 8860 - protein, 7 aa, Artificial Sequence
  Description of Artificial Sequence: Synthetic peptide
RFSQSPA

SEQ ID NO: 8861 - protein, 7 aa, Artificial Sequence
  Description of Artificial Sequence: Synthetic peptide
RFSTGPS

SEQ ID NO: 8862 - protein, 7 aa, Artificial Sequence
  Description of Artificial Sequence: Synthetic peptide
RFSTQQS

SEQ ID NO: 8863 - protein, 7 aa, Artificial Sequence
  Description of Artificial Sequence: Synthetic peptide
RFVPDRP

SEQ ID NO: 8864 - protein, 7 aa, Artificial Sequence
  Description of Artificial Sequence: Synthetic peptide
RGAAPVT

SEQ ID NO: 8865 - protein, 7 aa, Artificial Sequence
  Description of Artificial Sequence: Synthetic peptide
RGAELGG

SEQ ID NO: 8866 - protein, 7 aa, Artificial Sequence
  Description of Artificial Sequence: Synthetic peptide
RGAGDAH

SEQ ID NO: 8867 - protein, 7 aa, Artificial Sequence
  Description of Artificial Sequence: Synthetic peptide
RGAGPST

SEQ ID NO: 8868 - protein, 7 aa, Artificial Sequence
  Description of Artificial Sequence: Synthetic peptide
RGAIATS

SEQ ID NO: 8869 - protein, 7 aa, Artificial Sequence
  Description of Artificial Sequence: Synthetic peptide
RGAIGNG

SEQ ID NO: 8870 - protein, 7 aa, Artificial Sequence
  Description of Artificial Sequence: Synthetic peptide
RGAIPLP

SEQ ID NO: 8871 - protein, 7 aa, Artificial Sequence
  Description of Artificial Sequence: Synthetic peptide
RGATVAP

SEQ ID NO: 8872 - protein, 7 aa, Artificial Sequence
  Description of Artificial Sequence: Synthetic peptide
RGDGVSL

SEQ ID NO: 8873 - protein, 7 aa, Artificial Sequence
  Description of Artificial Sequence: Synthetic peptide
RGDPGLG

SEQ ID NO: 8874 - protein, 7 aa, Artificial Sequence
  Description of Artificial Sequence: Synthetic peptide
RGENSNP

SEQ ID NO: 8875 - protein, 7 aa, Artificial Sequence
  Description of Artificial Sequence: Synthetic peptide
RGERSVF

SEQ ID NO: 8876 - protein, 7 aa, Artificial Sequence
  Description of Artificial Sequence: Synthetic peptide
RGESAST

SEQ ID NO: 8877 - protein, 7 aa, Artificial Sequence
  Description of Artificial Sequence: Synthetic peptide
RGGGLSM

SEQ ID NO: 8878 - protein, 7 aa, Artificial Sequence
  Description of Artificial Sequence: Synthetic peptide
RGGTMTI

SEQ ID NO: 8879 - protein, 7 aa, Artificial Sequence
  Description of Artificial Sequence: Synthetic peptide
RGGTNVE

SEQ ID NO: 8880 - protein, 7 aa, Artificial Sequence
  Description of Artificial Sequence: Synthetic peptide
RGHHDNE

SEQ ID NO: 8881 - protein, 7 aa, Artificial Sequence
  Description of Artificial Sequence: Synthetic peptide
RGHLSDP

SEQ ID NO: 8882 - protein, 7 aa, Artificial Sequence
  Description of Artificial Sequence: Synthetic peptide
RGIELRG

SEQ ID NO: 8883 - protein, 7 aa, Artificial Sequence
  Description of Artificial Sequence: Synthetic peptide
RGIELTV

SEQ ID NO: 8884 - protein, 7 aa, Artificial Sequence
  Description of Artificial Sequence: Synthetic peptide
RGIPAIA

SEQ ID NO: 8885 - protein, 7 aa, Artificial Sequence
  Description of Artificial Sequence: Synthetic peptide
RGKEPFP

SEQ ID NO: 8886 - protein, 7 aa, Artificial Sequence
  Description of Artificial Sequence: Synthetic peptide
RGLGNGT

SEQ ID NO: 8887 - protein, 7 aa, Artificial Sequence
  Description of Artificial Sequence: Synthetic peptide
RGMAVPG

SEQ ID NO: 8888 - protein, 7 aa, Artificial Sequence
  Description of Artificial Sequence: Synthetic peptide
RGNEWSL

SEQ ID NO: 8889 - protein, 7 aa, Artificial Sequence
  Description of Artificial Sequence: Synthetic peptide
RGPATAS

SEQ ID NO: 8890 - protein, 7 aa, Artificial Sequence
  Description of Artificial Sequence: Synthetic peptide
RGPDTGA

SEQ ID NO: 8891 - protein, 7 aa, Artificial Sequence
  Description of Artificial Sequence: Synthetic peptide
RGPGEPN

SEQ ID NO: 8892 - protein, 7 aa, Artificial Sequence
  Description of Artificial Sequence: Synthetic peptide
RGPLTSE

SEQ ID NO: 8893 - protein, 7 aa, Artificial Sequence
  Description of Artificial Sequence: Synthetic peptide
RGPPPAT

SEQ ID NO: 8894 - protein, 7 aa, Artificial Sequence
  Description of Artificial Sequence: Synthetic peptide
RGPSTSD

SEQ ID NO: 8895 - protein, 7 aa, Artificial Sequence
  Description of Artificial Sequence: Synthetic peptide
RGPVTRD

SEQ ID NO: 8896 - protein, 7 aa, Artificial Sequence
  Description of Artificial Sequence: Synthetic peptide
RGQHNLS

SEQ ID NO: 8897 - protein, 7 aa, Artificial Sequence
  Description of Artificial Sequence: Synthetic peptide
RGQTIRE

SEQ ID NO: 8898 - protein, 7 aa, Artificial Sequence
  Description of Artificial Sequence: Synthetic peptide
RGSAGVA

SEQ ID NO: 8899 - protein, 7 aa, Artificial Sequence
  Description of Artificial Sequence: Synthetic peptide
RGSDASA

SEQ ID NO: 8900 - protein, 7 aa, Artificial Sequence
  Description of Artificial Sequence: Synthetic peptide
RGSGTLT

SEQ ID NO: 8901 - protein, 7 aa, Artificial Sequence
  Description of Artificial Sequence: Synthetic peptide
RGSMLGD

SEQ ID NO: 8902 - protein, 7 aa, Artificial Sequence
  Description of Artificial Sequence: Synthetic peptide
RGSNASG

SEQ ID NO: 8903 - protein, 7 aa, Artificial Sequence
  Description of Artificial Sequence: Synthetic peptide
RGSPAAT

SEQ ID NO: 8904 - protein, 7 aa, Artificial Sequence
  Description of Artificial Sequence: Synthetic peptide
RGSPQSS

SEQ ID NO: 8905 - protein, 7 aa, Artificial Sequence
  Description of Artificial Sequence: Synthetic peptide
RGSQTGN

SEQ ID NO: 8906 - protein, 7 aa, Artificial Sequence
  Description of Artificial Sequence: Synthetic peptide
RGSQTSF

SEQ ID NO: 8907 - protein, 7 aa, Artificial Sequence
  Description of Artificial Sequence: Synthetic peptide
RGSSTIE

SEQ ID NO: 8908 - protein, 7 aa, Artificial Sequence
  Description of Artificial Sequence: Synthetic peptide
RGSTANA

SEQ ID NO: 8909 - protein, 7 aa, Artificial Sequence
  Description of Artificial Sequence: Synthetic peptide
RGSTVMF

SEQ ID NO: 8910 - protein, 7 aa, Artificial Sequence
  Description of Artificial Sequence: Synthetic peptide
RGTAHLL

SEQ ID NO: 8911 - protein, 7 aa, Artificial Sequence
  Description of Artificial Sequence: Synthetic peptide
RGTESPS

SEQ ID NO: 8912 - protein, 7 aa, Artificial Sequence
  Description of Artificial Sequence: Synthetic peptide
RGTGNLN

SEQ ID NO: 8913 - protein, 7 aa, Artificial Sequence
  Description of Artificial Sequence: Synthetic peptide
RGTGTAW

SEQ ID NO: 8914 - protein, 7 aa, Artificial Sequence
  Description of Artificial Sequence: Synthetic peptide
RGTMMAA

SEQ ID NO: 8915 - protein, 7 aa, Artificial Sequence
  Description of Artificial Sequence: Synthetic peptide
RGTNTLQ

SEQ ID NO: 8916 - protein, 7 aa, Artificial Sequence
  Description of Artificial Sequence: Synthetic peptide
RGVAVPP

SEQ ID NO: 8917 - protein, 7 aa, Artificial Sequence
  Description of Artificial Sequence: Synthetic peptide
RGVHSPD

SEQ ID NO: 8918 - protein, 7 aa, Artificial Sequence
  Description of Artificial Sequence: Synthetic peptide
RGVMYGD

SEQ ID NO: 8919 - protein, 7 aa, Artificial Sequence
  Description of Artificial Sequence: Synthetic peptide
RHAGQDN

SEQ ID NO: 8920 - protein, 7 aa, Artificial Sequence
  Description of Artificial Sequence: Synthetic peptide
RHAPVAS

SEQ ID NO: 8921 - protein, 7 aa, Artificial Sequence
  Description of Artificial Sequence: Synthetic peptide
RHAVSNF

SEQ ID NO: 8922 - protein, 7 aa, Artificial Sequence
  Description of Artificial Sequence: Synthetic peptide
RHDRMDN

SEQ ID NO: 8923 - protein, 7 aa, Artificial Sequence
  Description of Artificial Sequence: Synthetic peptide
RHELHST

SEQ ID NO: 8924 - protein, 7 aa, Artificial Sequence
  Description of Artificial Sequence: Synthetic peptide
RHENIRD

SEQ ID NO: 8925 - protein, 7 aa, Artificial Sequence
  Description of Artificial Sequence: Synthetic peptide
RHERPMA

SEQ ID NO: 8926 - protein, 7 aa, Artificial Sequence
  Description of Artificial Sequence: Synthetic peptide
RHGSSMT

SEQ ID NO: 8927 - protein, 7 aa, Artificial Sequence
  Description of Artificial Sequence: Synthetic peptide
RHGTHPS

SEQ ID NO: 8928 - protein, 7 aa, Artificial Sequence
  Description of Artificial Sequence: Synthetic peptide
RHHSAPN

SEQ ID NO: 8929 - protein, 7 aa, Artificial Sequence
  Description of Artificial Sequence: Synthetic peptide
RHLGSLP

SEQ ID NO: 8930 - protein, 7 aa, Artificial Sequence
  Description of Artificial Sequence: Synthetic peptide
RHPAAHA

SEQ ID NO: 8931 - protein, 7 aa, Artificial Sequence
  Description of Artificial Sequence: Synthetic peptide
RHPATIS

SEQ ID NO: 8932 - protein, 7 aa, Artificial Sequence
  Description of Artificial Sequence: Synthetic peptide
RHPMLTG

SEQ ID NO: 8933 - protein, 7 aa, Artificial Sequence
  Description of Artificial Sequence: Synthetic peptide
RHPPNSF

SEQ ID NO: 8934 - protein, 7 aa, Artificial Sequence
  Description of Artificial Sequence: Synthetic peptide
RHPSTPN

SEQ ID NO: 8935 - protein, 7 aa, Artificial Sequence
  Description of Artificial Sequence: Synthetic peptide
RHPVTEP

SEQ ID NO: 8936 - protein, 7 aa, Artificial Sequence
  Description of Artificial Sequence: Synthetic peptide
RHQTIIA

SEQ ID NO: 8937 - protein, 7 aa, Artificial Sequence
  Description of Artificial Sequence: Synthetic peptide
RHRPAPE

SEQ ID NO: 8938 - protein, 7 aa, Artificial Sequence
  Description of Artificial Sequence: Synthetic peptide
RHSEVTF

SEQ ID NO: 8939 - protein, 7 aa, Artificial Sequence
  Description of Artificial Sequence: Synthetic peptide
RHSHTIS

SEQ ID NO: 8940 - protein, 7 aa, Artificial Sequence
  Description of Artificial Sequence: Synthetic peptide
RHSLSLD

SEQ ID NO: 8941 - protein, 7 aa, Artificial Sequence
  Description of Artificial Sequence: Synthetic peptide
RHSNQTL

SEQ ID NO: 8942 - protein, 7 aa, Artificial Sequence
  Description of Artificial Sequence: Synthetic peptide
RHSPLTG

SEQ ID NO: 8943 - protein, 7 aa, Artificial Sequence
  Description of Artificial Sequence: Synthetic peptide
RHSQGPF

SEQ ID NO: 8944 - protein, 7 aa, Artificial Sequence
  Description of Artificial Sequence: Synthetic peptide
RHTMETS

SEQ ID NO: 8945 - protein, 7 aa, Artificial Sequence
  Description of Artificial Sequence: Synthetic peptide
RHTPDQG

SEQ ID NO: 8946 - protein, 7 aa, Artificial Sequence
  Description of Artificial Sequence: Synthetic peptide
RIAPTGN

SEQ ID NO: 8947 - protein, 7 aa, Artificial Sequence
  Description of Artificial Sequence: Synthetic peptide
RIDAELE

SEQ ID NO: 8948 - protein, 7 aa, Artificial Sequence
  Description of Artificial Sequence: Synthetic peptide
RIDGILS

SEQ ID NO: 8949 - protein, 7 aa, Artificial Sequence
  Description of Artificial Sequence: Synthetic peptide
RIENEVV

SEQ ID NO: 8950 - protein, 7 aa, Artificial Sequence
  Description of Artificial Sequence: Synthetic peptide
RIGDHIR

SEQ ID NO: 8951 - protein, 7 aa, Artificial Sequence
  Description of Artificial Sequence: Synthetic peptide
RIGKNDS

SEQ ID NO: 8952 - protein, 7 aa, Artificial Sequence
  Description of Artificial Sequence: Synthetic peptide
RIGQNLA

SEQ ID NO: 8953 - protein, 7 aa, Artificial Sequence
  Description of Artificial Sequence: Synthetic peptide
RIGQTFA

SEQ ID NO: 8954 - protein, 7 aa, Artificial Sequence
  Description of Artificial Sequence: Synthetic peptide
RIGSGTG

SEQ ID NO: 8955 - protein, 7 aa, Artificial Sequence
  Description of Artificial Sequence: Synthetic peptide
RIGWTID

SEQ ID NO: 8956 - protein, 7 aa, Artificial Sequence
  Description of Artificial Sequence: Synthetic peptide
RIHYEGM

SEQ ID NO: 8957 - protein, 7 aa, Artificial Sequence
  Description of Artificial Sequence: Synthetic peptide
RINIAET

SEQ ID NO: 8958 - protein, 7 aa, Artificial Sequence
  Description of Artificial Sequence: Synthetic peptide
RIPALSG

SEQ ID NO: 8959 - protein, 7 aa, Artificial Sequence
  Description of Artificial Sequence: Synthetic peptide
RIPTSPP

SEQ ID NO: 8960 - protein, 7 aa, Artificial Sequence
  Description of Artificial Sequence: Synthetic peptide
RIPVRVD

SEQ ID NO: 8961 - protein, 7 aa, Artificial Sequence
  Description of Artificial Sequence: Synthetic peptide
RIRYPEG

SEQ ID NO: 8962 - protein, 7 aa, Artificial Sequence
  Description of Artificial Sequence: Synthetic peptide
RISALQP

SEQ ID NO: 8963 - protein, 7 aa, Artificial Sequence
  Description of Artificial Sequence: Synthetic peptide
RISDYPP

SEQ ID NO: 8964 - protein, 7 aa, Artificial Sequence
  Description of Artificial Sequence: Synthetic peptide
RISGHAS

SEQ ID NO: 8965 - protein, 7 aa, Artificial Sequence
  Description of Artificial Sequence: Synthetic peptide
RISPTPI

SEQ ID NO: 8966 - protein, 7 aa, Artificial Sequence
  Description of Artificial Sequence: Synthetic peptide
RISSGID

SEQ ID NO: 8967 - protein, 7 aa, Artificial Sequence
  Description of Artificial Sequence: Synthetic peptide
RISSSPD

SEQ ID NO: 8968 - protein, 7 aa, Artificial Sequence
  Description of Artificial Sequence: Synthetic peptide
RIYDQSI

SEQ ID NO: 8969 - protein, 7 aa, Artificial Sequence
  Description of Artificial Sequence: Synthetic peptide
RIYSPDG

SEQ ID NO: 8970 - protein, 7 aa, Artificial Sequence
  Description of Artificial Sequence: Synthetic peptide
RIYTTSP

SEQ ID NO: 8971 - protein, 7 aa, Artificial Sequence
  Description of Artificial Sequence: Synthetic peptide
RKDDTTW

SEQ ID NO: 8972 - protein, 7 aa, Artificial Sequence
  Description of Artificial Sequence: Synthetic peptide
RKDLSWD

SEQ ID NO: 8973 - protein, 7 aa, Artificial Sequence
  Description of Artificial Sequence: Synthetic peptide
RKDRSPE

SEQ ID NO: 8974 - protein, 7 aa, Artificial Sequence
  Description of Artificial Sequence: Synthetic peptide
RKDTPMH

SEQ ID NO: 8975 - protein, 7 aa, Artificial Sequence
  Description of Artificial Sequence: Synthetic peptide
RKDTVPN

SEQ ID NO: 8976 - protein, 7 aa, Artificial Sequence
  Description of Artificial Sequence: Synthetic peptide
RKGLDDA

SEQ ID NO: 8977 - protein, 7 aa, Artificial Sequence
  Description of Artificial Sequence: Synthetic peptide
RKLPLVD

SEQ ID NO: 8978 - protein, 7 aa, Artificial Sequence
  Description of Artificial Sequence: Synthetic peptide
RKMNQDQ

SEQ ID NO: 8979 - protein, 7 aa, Artificial Sequence
  Description of Artificial Sequence: Synthetic peptide
RKNYQLD

SEQ ID NO: 8980 - protein, 7 aa, Artificial Sequence
  Description of Artificial Sequence: Synthetic peptide
RKPLTAP

SEQ ID NO: 8981 - protein, 7 aa, Artificial Sequence
  Description of Artificial Sequence: Synthetic peptide
RKSPQEA

SEQ ID NO: 8982 - protein, 7 aa, Artificial Sequence
  Description of Artificial Sequence: Synthetic peptide
RKSTLDT

SEQ ID NO: 8983 - protein, 7 aa, Artificial Sequence
  Description of Artificial Sequence: Synthetic peptide
RKVESRR

SEQ ID NO: 8984 - protein, 7 aa, Artificial Sequence
  Description of Artificial Sequence: Synthetic peptide
RKVTPDT

SEQ ID NO: 8985 - protein, 7 aa, Artificial Sequence
  Description of Artificial Sequence: Synthetic peptide
RLAAETL

SEQ ID NO: 8986 - protein, 7 aa, Artificial Sequence
  Description of Artificial Sequence: Synthetic peptide
RLAANHL

SEQ ID NO: 8987 - protein, 7 aa, Artificial Sequence
  Description of Artificial Sequence: Synthetic peptide
RLAETSH

SEQ ID NO: 8988 - protein, 7 aa, Artificial Sequence
  Description of Artificial Sequence: Synthetic peptide
RLALESN

SEQ ID NO: 8989 - protein, 7 aa, Artificial Sequence
  Description of Artificial Sequence: Synthetic peptide
RLAMQAA

SEQ ID NO: 8990 - protein, 7 aa, Artificial Sequence
  Description of Artificial Sequence: Synthetic peptide
RLAQINS

SEQ ID NO: 8991 - protein, 7 aa, Artificial Sequence
  Description of Artificial Sequence: Synthetic peptide
RLATEDP

SEQ ID NO: 8992 - protein, 7 aa, Artificial Sequence
  Description of Artificial Sequence: Synthetic peptide
RLDANSR

SEQ ID NO: 8993 - protein, 7 aa, Artificial Sequence
  Description of Artificial Sequence: Synthetic peptide
RLDDVGL

SEQ ID NO: 8994 - protein, 7 aa, Artificial Sequence
  Description of Artificial Sequence: Synthetic peptide
RLDFDTP

SEQ ID NO: 8995 - protein, 7 aa, Artificial Sequence
  Description of Artificial Sequence: Synthetic peptide
RLDMRIE

SEQ ID NO: 8996 - protein, 7 aa, Artificial Sequence
  Description of Artificial Sequence: Synthetic peptide
RLDPGEP

SEQ ID NO: 8997 - protein, 7 aa, Artificial Sequence
  Description of Artificial Sequence: Synthetic peptide
RLDPHSS

SEQ ID NO: 8998 - protein, 7 aa, Artificial Sequence
  Description of Artificial Sequence: Synthetic peptide
RLDSLAL

SEQ ID NO: 8999 - protein, 7 aa, Artificial Sequence
  Description of Artificial Sequence: Synthetic peptide
RLDSMFS

SEQ ID NO: 9000 - protein, 7 aa, Artificial Sequence
  Description of Artificial Sequence: Synthetic peptide
RLDTTMQ

SEQ ID NO: 9001 - protein, 7 aa, Artificial Sequence
  Description of Artificial Sequence: Synthetic peptide
RLDTVSS

SEQ ID NO: 9002 - protein, 7 aa, Artificial Sequence
  Description of Artificial Sequence: Synthetic peptide
RLEAQVA

SEQ ID NO: 9003 - protein, 7 aa, Artificial Sequence
  Description of Artificial Sequence: Synthetic peptide
RLEPMQN

SEQ ID NO: 9004 - protein, 7 aa, Artificial Sequence
  Description of Artificial Sequence: Synthetic peptide
RLESSRP

SEQ ID NO: 9005 - protein, 7 aa, Artificial Sequence
  Description of Artificial Sequence: Synthetic peptide
RLFGDDY

SEQ ID NO: 9006 - protein, 7 aa, Artificial Sequence
  Description of Artificial Sequence: Synthetic peptide
RLGDGAD

SEQ ID NO: 9007 - protein, 7 aa, Artificial Sequence
  Description of Artificial Sequence: Synthetic peptide
RLGDVWA

SEQ ID NO: 9008 - protein, 7 aa, Artificial Sequence
  Description of Artificial Sequence: Synthetic peptide
RLGMVSE

SEQ ID NO: 9009 - protein, 7 aa, Artificial Sequence
  Description of Artificial Sequence: Synthetic peptide
RLGPGYP

SEQ ID NO: 9010 - protein, 7 aa, Artificial Sequence
  Description of Artificial Sequence: Synthetic peptide
RLGPVSG

SEQ ID NO: 9011 - protein, 7 aa, Artificial Sequence
  Description of Artificial Sequence: Synthetic peptide
RLGSQTS

SEQ ID NO: 9012 - protein, 7 aa, Artificial Sequence
  Description of Artificial Sequence: Synthetic peptide
RLGTHSE

SEQ ID NO: 9013 - protein, 7 aa, Artificial Sequence
  Description of Artificial Sequence: Synthetic peptide
RLGTWAE

SEQ ID NO: 9014 - protein, 7 aa, Artificial Sequence
  Description of Artificial Sequence: Synthetic peptide
RLGVCPS

SEQ ID NO: 9015 - protein, 7 aa, Artificial Sequence
  Description of Artificial Sequence: Synthetic peptide
RLHIGSG

SEQ ID NO: 9016 - protein, 7 aa, Artificial Sequence
  Description of Artificial Sequence: Synthetic peptide
RLHINSE

SEQ ID NO: 9017 - protein, 7 aa, Artificial Sequence
  Description of Artificial Sequence: Synthetic peptide
RLHTDLG

SEQ ID NO: 9018 - protein, 7 aa, Artificial Sequence
  Description of Artificial Sequence: Synthetic peptide
RLIHSGF

SEQ ID NO: 9019 - protein, 7 aa, Artificial Sequence
  Description of Artificial Sequence: Synthetic peptide
RLINNSA

SEQ ID NO: 9020 - protein, 7 aa, Artificial Sequence
  Description of Artificial Sequence: Synthetic peptide
RLLKTPS

SEQ ID NO: 9021 - protein, 7 aa, Artificial Sequence
  Description of Artificial Sequence: Synthetic peptide
RLLSATG

SEQ ID NO: 9022 - protein, 7 aa, Artificial Sequence
  Description of Artificial Sequence: Synthetic peptide
RLMDRAG

SEQ ID NO: 9023 - protein, 7 aa, Artificial Sequence
  Description of Artificial Sequence: Synthetic peptide
RLMNPKG

SEQ ID NO: 9024 - protein, 7 aa, Artificial Sequence
  Description of Artificial Sequence: Synthetic peptide
RLNDLTL

SEQ ID NO: 9025 - protein, 7 aa, Artificial Sequence
  Description of Artificial Sequence: Synthetic peptide
RLNLSTT

SEQ ID NO: 9026 - protein, 7 aa, Artificial Sequence
  Description of Artificial Sequence: Synthetic peptide
RLNNNTL

SEQ ID NO: 9027 - protein, 7 aa, Artificial Sequence
  Description of Artificial Sequence: Synthetic peptide
RLNQVPA

SEQ ID NO: 9028 - protein, 7 aa, Artificial Sequence
  Description of Artificial Sequence: Synthetic peptide
RLNTSMM

SEQ ID NO: 9029 - protein, 7 aa, Artificial Sequence
  Description of Artificial Sequence: Synthetic peptide
RLPDPSS

SEQ ID NO: 9030 - protein, 7 aa, Artificial Sequence
  Description of Artificial Sequence: Synthetic peptide
RLPGPER

SEQ ID NO: 9031 - protein, 7 aa, Artificial Sequence
  Description of Artificial Sequence: Synthetic peptide
RLPLENL

SEQ ID NO: 9032 - protein, 7 aa, Artificial Sequence
  Description of Artificial Sequence: Synthetic peptide
RLPLSAH

SEQ ID NO: 9033 - protein, 7 aa, Artificial Sequence
  Description of Artificial Sequence: Synthetic peptide
RLPPSGI

SEQ ID NO: 9034 - protein, 7 aa, Artificial Sequence
  Description of Artificial Sequence: Synthetic peptide
RLPPTDV

SEQ ID NO: 9035 - protein, 7 aa, Artificial Sequence
  Description of Artificial Sequence: Synthetic peptide
RLPQRDI

SEQ ID NO: 9036 - protein, 7 aa, Artificial Sequence
  Description of Artificial Sequence: Synthetic peptide
RLPSEKQ

SEQ ID NO: 9037 - protein, 7 aa, Artificial Sequence
  Description of Artificial Sequence: Synthetic peptide
RLPSLVD

SEQ ID NO: 9038 - protein, 7 aa, Artificial Sequence
  Description of Artificial Sequence: Synthetic peptide
RLPTRLD

SEQ ID NO: 9039 - protein, 7 aa, Artificial Sequence
  Description of Artificial Sequence: Synthetic peptide
RLPTSHF

SEQ ID NO: 9040 - protein, 7 aa, Artificial Sequence
  Description of Artificial Sequence: Synthetic peptide
RLPTVTG

SEQ ID NO: 9041 - protein, 7 aa, Artificial Sequence
  Description of Artificial Sequence: Synthetic peptide
RLPVQPS

SEQ ID NO: 9042 - protein, 7 aa, Artificial Sequence
  Description of Artificial Sequence: Synthetic peptide
RLQDNGS

SEQ ID NO: 9043 - protein, 7 aa, Artificial Sequence
  Description of Artificial Sequence: Synthetic peptide
RLQGFPN

SEQ ID NO: 9044 - protein, 7 aa, Artificial Sequence
  Description of Artificial Sequence: Synthetic peptide
RLQLQDH

SEQ ID NO: 9045 - protein, 7 aa, Artificial Sequence
  Description of Artificial Sequence: Synthetic peptide
RLQNTGT

SEQ ID NO: 9046 - protein, 7 aa, Artificial Sequence
  Description of Artificial Sequence: Synthetic peptide
RLQPAEE

SEQ ID NO: 9047 - protein, 7 aa, Artificial Sequence
  Description of Artificial Sequence: Synthetic peptide
RLQQVGV

SEQ ID NO: 9048 - protein, 7 aa, Artificial Sequence
  Description of Artificial Sequence: Synthetic peptide
RLQSSIE

SEQ ID NO: 9049 - protein, 7 aa, Artificial Sequence
  Description of Artificial Sequence: Synthetic peptide
RLRPGLD

SEQ ID NO: 9050 - protein, 7 aa, Artificial Sequence
  Description of Artificial Sequence: Synthetic peptide
RLSADTH

SEQ ID NO: 9051 - protein, 7 aa, Artificial Sequence
  Description of Artificial Sequence: Synthetic peptide
RLSHAGV

SEQ ID NO: 9052 - protein, 7 aa, Artificial Sequence
  Description of Artificial Sequence: Synthetic peptide
RLSIGSV

SEQ ID NO: 9053 - protein, 7 aa, Artificial Sequence
  Description of Artificial Sequence: Synthetic peptide
RLSLDRF

SEQ ID NO: 9054 - protein, 7 aa, Artificial Sequence
  Description of Artificial Sequence: Synthetic peptide
RLSLPST

SEQ ID NO: 9055 - protein, 7 aa, Artificial Sequence
  Description of Artificial Sequence: Synthetic peptide
RLSNSEP

SEQ ID NO: 9056 - protein, 7 aa, Artificial Sequence
  Description of Artificial Sequence: Synthetic peptide
RLSPPPS

SEQ ID NO: 9057 - protein, 7 aa, Artificial Sequence
  Description of Artificial Sequence: Synthetic peptide
RLSPQPA

SEQ ID NO: 9058 - protein, 7 aa, Artificial Sequence
  Description of Artificial Sequence: Synthetic peptide
RLSQSNN

SEQ ID NO: 9059 - protein, 7 aa, Artificial Sequence
  Description of Artificial Sequence: Synthetic peptide
RLSSGPI

SEQ ID NO: 9060 - protein, 7 aa, Artificial Sequence
  Description of Artificial Sequence: Synthetic peptide
RLSSNLE

SEQ ID NO: 9061 - protein, 7 aa, Artificial Sequence
  Description of Artificial Sequence: Synthetic peptide
RLTATSN

SEQ ID NO: 9062 - protein, 7 aa, Artificial Sequence
  Description of Artificial Sequence: Synthetic peptide
RLTDRST

SEQ ID NO: 9063 - protein, 7 aa, Artificial Sequence
  Description of Artificial Sequence: Synthetic peptide
RLTEPHR

SEQ ID NO: 9064 - protein, 7 aa, Artificial Sequence
  Description of Artificial Sequence: Synthetic peptide
RLTHESP

SEQ ID NO: 9065 - protein, 7 aa, Artificial Sequence
  Description of Artificial Sequence: Synthetic peptide
RLTHTGH

SEQ ID NO: 9066 - protein, 7 aa, Artificial Sequence
  Description of Artificial Sequence: Synthetic peptide
RLTMVRD

SEQ ID NO: 9067 - protein, 7 aa, Artificial Sequence
  Description of Artificial Sequence: Synthetic peptide
RLTPEGQ

SEQ ID NO: 9068 - protein, 7 aa, Artificial Sequence
  Description of Artificial Sequence: Synthetic peptide
RLVDNLP

SEQ ID NO: 9069 - protein, 7 aa, Artificial Sequence
  Description of Artificial Sequence: Synthetic peptide
RLVNQMS

SEQ ID NO: 9070 - protein, 7 aa, Artificial Sequence
  Description of Artificial Sequence: Synthetic peptide
RLVQAFA

SEQ ID NO: 9071 - protein, 7 aa, Artificial Sequence
  Description of Artificial Sequence: Synthetic peptide
RLYSGIE

SEQ ID NO: 9072 - protein, 7 aa, Artificial Sequence
  Description of Artificial Sequence: Synthetic peptide
RLYSNSP

SEQ ID NO: 9073 - protein, 7 aa, Artificial Sequence
  Description of Artificial Sequence: Synthetic peptide
RMAKETS

SEQ ID NO: 9074 - protein, 7 aa, Artificial Sequence
  Description of Artificial Sequence: Synthetic peptide
RMEPPIS

SEQ ID NO: 9075 - protein, 7 aa, Artificial Sequence
  Description of Artificial Sequence: Synthetic peptide
RMEPSAV

SEQ ID NO: 9076 - protein, 7 aa, Artificial Sequence
  Description of Artificial Sequence: Synthetic peptide
RMGAAVY

SEQ ID NO: 9077 - protein, 7 aa, Artificial Sequence
  Description of Artificial Sequence: Synthetic peptide
RMGVHPT

SEQ ID NO: 9078 - protein, 7 aa, Artificial Sequence
  Description of Artificial Sequence: Synthetic peptide
RMGYVEA

SEQ ID NO: 9079 - protein, 7 aa, Artificial Sequence
  Description of Artificial Sequence: Synthetic peptide
RMHVTEA

SEQ ID NO: 9080 - protein, 7 aa, Artificial Sequence
  Description of Artificial Sequence: Synthetic peptide
RMIQSGH

SEQ ID NO: 9081 - protein, 7 aa, Artificial Sequence
  Description of Artificial Sequence: Synthetic peptide
RMLAPSG

SEQ ID NO: 9082 - protein, 7 aa, Artificial Sequence
  Description of Artificial Sequence: Synthetic peptide
RMLDQLN

SEQ ID NO: 9083 - protein, 7 aa, Artificial Sequence
  Description of Artificial Sequence: Synthetic peptide
RMLPDVY

SEQ ID NO: 9084 - protein, 7 aa, Artificial Sequence
  Description of Artificial Sequence: Synthetic peptide
RMMPDLP

SEQ ID NO: 9085 - protein, 7 aa, Artificial Sequence
  Description of Artificial Sequence: Synthetic peptide
RMNEALG

SEQ ID NO: 9086 - protein, 7 aa, Artificial Sequence
  Description of Artificial Sequence: Synthetic peptide
RMNIQVG

SEQ ID NO: 9087 - protein, 7 aa, Artificial Sequence
  Description of Artificial Sequence: Synthetic peptide
RMNYGTE

SEQ ID NO: 9088 - protein, 7 aa, Artificial Sequence
  Description of Artificial Sequence: Synthetic peptide
RMPAMAV

SEQ ID NO: 9089 - protein, 7 aa, Artificial Sequence
  Description of Artificial Sequence: Synthetic peptide
RMPASNA

SEQ ID NO: 9090 - protein, 7 aa, Artificial Sequence
  Description of Artificial Sequence: Synthetic peptide
RMPREQS

SEQ ID NO: 9091 - protein, 7 aa, Artificial Sequence
  Description of Artificial Sequence: Synthetic peptide
RMQSAYV

SEQ ID NO: 9092 - protein, 7 aa, Artificial Sequence
  Description of Artificial Sequence: Synthetic peptide
RMQSQGF

SEQ ID NO: 9093 - protein, 7 aa, Artificial Sequence
  Description of Artificial Sequence: Synthetic peptide
RMSDSFV

SEQ ID NO: 9094 - protein, 7 aa, Artificial Sequence
  Description of Artificial Sequence: Synthetic peptide
RMSEVTI

SEQ ID NO: 9095 - protein, 7 aa, Artificial Sequence
  Description of Artificial Sequence: Synthetic peptide
RMSIPND

SEQ ID NO: 9096 - protein, 7 aa, Artificial Sequence
  Description of Artificial Sequence: Synthetic peptide
RMSLASE

SEQ ID NO: 9097 - protein, 7 aa, Artificial Sequence
  Description of Artificial Sequence: Synthetic peptide
RMSNSPQ

SEQ ID NO: 9098 - protein, 7 aa, Artificial Sequence
  Description of Artificial Sequence: Synthetic peptide
RMSSDLP

SEQ ID NO: 9099 - protein, 7 aa, Artificial Sequence
  Description of Artificial Sequence: Synthetic peptide
RMTAAIC

SEQ ID NO: 9100 - protein, 7 aa, Artificial Sequence
  Description of Artificial Sequence: Synthetic peptide
RMTHTAP

SEQ ID NO: 9101 - protein, 7 aa, Artificial Sequence
  Description of Artificial Sequence: Synthetic peptide
RMTIGTT

SEQ ID NO: 9102 - protein, 7 aa, Artificial Sequence
  Description of Artificial Sequence: Synthetic peptide
RMVGGGD

SEQ ID NO: 9103 - protein, 7 aa, Artificial Sequence
  Description of Artificial Sequence: Synthetic peptide
RMVNLGH

SEQ ID NO: 9104 - protein, 7 aa, Artificial Sequence
  Description of Artificial Sequence: Synthetic peptide
RMVSSSA

SEQ ID NO: 9105 - protein, 7 aa, Artificial Sequence
  Description of Artificial Sequence: Synthetic peptide
RMYGSSS

SEQ ID NO: 9106 - protein, 7 aa, Artificial Sequence
  Description of Artificial Sequence: Synthetic peptide
RNAAVDP

SEQ ID NO: 9107 - protein, 7 aa, Artificial Sequence
  Description of Artificial Sequence: Synthetic peptide
RNAGETH

SEQ ID NO: 9108 - protein, 7 aa, Artificial Sequence
  Description of Artificial Sequence: Synthetic peptide
RNAGTDR

SEQ ID NO: 9109 - protein, 7 aa, Artificial Sequence
  Description of Artificial Sequence: Synthetic peptide
RNANMPT

SEQ ID NO: 9110 - protein, 7 aa, Artificial Sequence
  Description of Artificial Sequence: Synthetic peptide
RNAPSAD

SEQ ID NO: 9111 - protein, 7 aa, Artificial Sequence
  Description of Artificial Sequence: Synthetic peptide
RNATAMV

SEQ ID NO: 9112 - protein, 7 aa, Artificial Sequence
  Description of Artificial Sequence: Synthetic peptide
RNDLTGV

SEQ ID NO: 9113 - protein, 7 aa, Artificial Sequence
  Description of Artificial Sequence: Synthetic peptide
RNDMVQS

SEQ ID NO: 9114 - protein, 7 aa, Artificial Sequence
  Description of Artificial Sequence: Synthetic peptide
RNDNRVT

SEQ ID NO: 9115 - protein, 7 aa, Artificial Sequence
  Description of Artificial Sequence: Synthetic peptide
RNDRSFA

SEQ ID NO: 9116 - protein, 7 aa, Artificial Sequence
  Description of Artificial Sequence: Synthetic peptide
RNDTSDL

SEQ ID NO: 9117 - protein, 7 aa, Artificial Sequence
  Description of Artificial Sequence: Synthetic peptide
RNDVSDI

SEQ ID NO: 9118 - protein, 7 aa, Artificial Sequence
  Description of Artificial Sequence: Synthetic peptide
RNEHHLP

SEQ ID NO: 9119 - protein, 7 aa, Artificial Sequence
  Description of Artificial Sequence: Synthetic peptide
RNEPNGG

SEQ ID NO: 9120 - protein, 7 aa, Artificial Sequence
  Description of Artificial Sequence: Synthetic peptide
RNFADSM

SEQ ID NO: 9121 - protein, 7 aa, Artificial Sequence
  Description of Artificial Sequence: Synthetic peptide
RNFTGPE

SEQ ID NO: 9122 - protein, 7 aa, Artificial Sequence
  Description of Artificial Sequence: Synthetic peptide
RNGAIQA

SEQ ID NO: 9123 - protein, 7 aa, Artificial Sequence
  Description of Artificial Sequence: Synthetic peptide
RNGRDAG

SEQ ID NO: 9124 - protein, 7 aa, Artificial Sequence
  Description of Artificial Sequence: Synthetic peptide
RNGVTAA

SEQ ID NO: 9125 - protein, 7 aa, Artificial Sequence
  Description of Artificial Sequence: Synthetic peptide
RNHGFAE

SEQ ID NO: 9126 - protein, 7 aa, Artificial Sequence
  Description of Artificial Sequence: Synthetic peptide
RNIDDAN

SEQ ID NO: 9127 - protein, 7 aa, Artificial Sequence
  Description of Artificial Sequence: Synthetic peptide
RNKENVG

SEQ ID NO: 9128 - protein, 7 aa, Artificial Sequence
  Description of Artificial Sequence: Synthetic peptide
RNLPPRD

SEQ ID NO: 9129 - protein, 7 aa, Artificial Sequence
  Description of Artificial Sequence: Synthetic peptide
RNLTIPE

SEQ ID NO: 9130 - protein, 7 aa, Artificial Sequence
  Description of Artificial Sequence: Synthetic peptide
RNMALTS

SEQ ID NO: 9131 - protein, 7 aa, Artificial Sequence
  Description of Artificial Sequence: Synthetic peptide
RNNALPD

SEQ ID NO: 9132 - protein, 7 aa, Artificial Sequence
  Description of Artificial Sequence: Synthetic peptide
RNNSHGF

SEQ ID NO: 9133 - protein, 7 aa, Artificial Sequence
  Description of Artificial Sequence: Synthetic peptide
RNPDMHH

SEQ ID NO: 9134 - protein, 7 aa, Artificial Sequence
  Description of Artificial Sequence: Synthetic peptide
RNPLSAQ

SEQ ID NO: 9135 - protein, 7 aa, Artificial Sequence
  Description of Artificial Sequence: Synthetic peptide
RNQGLLA

SEQ ID NO: 9136 - protein, 7 aa, Artificial Sequence
  Description of Artificial Sequence: Synthetic peptide
RNQTSTS

SEQ ID NO: 9137 - protein, 7 aa, Artificial Sequence
  Description of Artificial Sequence: Synthetic peptide
RNRDPQF

SEQ ID NO: 9138 - protein, 7 aa, Artificial Sequence
  Description of Artificial Sequence: Synthetic peptide
RNSAALQ

SEQ ID NO: 9139 - protein, 7 aa, Artificial Sequence
  Description of Artificial Sequence: Synthetic peptide
RNSDYSV

SEQ ID NO: 9140 - protein, 7 aa, Artificial Sequence
  Description of Artificial Sequence: Synthetic peptide
RNSLGFG

SEQ ID NO: 9141 - protein, 7 aa, Artificial Sequence
  Description of Artificial Sequence: Synthetic peptide
RNSQVPI

SEQ ID NO: 9142 - protein, 7 aa, Artificial Sequence
  Description of Artificial Sequence: Synthetic peptide
RNSSSLG

SEQ ID NO: 9143 - protein, 7 aa, Artificial Sequence
  Description of Artificial Sequence: Synthetic peptide
RNSTSMT

SEQ ID NO: 9144 - protein, 7 aa, Artificial Sequence
  Description of Artificial Sequence: Synthetic peptide
RNSVTTP

SEQ ID NO: 9145 - protein, 7 aa, Artificial Sequence
  Description of Artificial Sequence: Synthetic peptide
RNSYPSD

SEQ ID NO: 9146 - protein, 7 aa, Artificial Sequence
  Description of Artificial Sequence: Synthetic peptide
RNTDVDS

SEQ ID NO: 9147 - protein, 7 aa, Artificial Sequence
  Description of Artificial Sequence: Synthetic peptide
RNTLLMD

SEQ ID NO: 9148 - protein, 7 aa, Artificial Sequence
  Description of Artificial Sequence: Synthetic peptide
RNTLVIP

SEQ ID NO: 9149 - protein, 7 aa, Artificial Sequence
  Description of Artificial Sequence: Synthetic peptide
RNTPNRD

SEQ ID NO: 9150 - protein, 7 aa, Artificial Sequence
  Description of Artificial Sequence: Synthetic peptide
RNTSQLD

SEQ ID NO: 9151 - protein, 7 aa, Artificial Sequence
  Description of Artificial Sequence: Synthetic peptide
RNVETAG

SEQ ID NO: 9152 - protein, 7 aa, Artificial Sequence
  Description of Artificial Sequence: Synthetic peptide
RNVGHGD

SEQ ID NO: 9153 - protein, 7 aa, Artificial Sequence
  Description of Artificial Sequence: Synthetic peptide
RNVGPPT

SEQ ID NO: 9154 - protein, 7 aa, Artificial Sequence
  Description of Artificial Sequence: Synthetic peptide
RNVPEHR

SEQ ID NO: 9155 - protein, 7 aa, Artificial Sequence
  Description of Artificial Sequence: Synthetic peptide
RNVQFSP

SEQ ID NO: 9156 - protein, 7 aa, Artificial Sequence
  Description of Artificial Sequence: Synthetic peptide
RNVRDTP

SEQ ID NO: 9157 - protein, 7 aa, Artificial Sequence
  Description of Artificial Sequence: Synthetic peptide
RNVSDSS

SEQ ID NO: 9158 - protein, 7 aa, Artificial Sequence
  Description of Artificial Sequence: Synthetic peptide
RNYAGKD

SEQ ID NO: 9159 - protein, 7 aa, Artificial Sequence
  Description of Artificial Sequence: Synthetic peptide
RPAAVSN

SEQ ID NO: 9160 - protein, 7 aa, Artificial Sequence
  Description of Artificial Sequence: Synthetic peptide
RPADKCT

SEQ ID NO: 9161 - protein, 7 aa, Artificial Sequence
  Description of Artificial Sequence: Synthetic peptide
RPAKLEL

SEQ ID NO: 9162 - protein, 7 aa, Artificial Sequence
  Description of Artificial Sequence: Synthetic peptide
RPAMLAT

SEQ ID NO: 9163 - protein, 7 aa, Artificial Sequence
  Description of Artificial Sequence: Synthetic peptide
RPASGHV

SEQ ID NO: 9164 - protein, 7 aa, Artificial Sequence
  Description of Artificial Sequence: Synthetic peptide
RPATVGA

SEQ ID NO: 9165 - protein, 7 aa, Artificial Sequence
  Description of Artificial Sequence: Synthetic peptide
RPAVMKG

SEQ ID NO: 9166 - protein, 7 aa, Artificial Sequence
  Description of Artificial Sequence: Synthetic peptide
RPDASES

SEQ ID NO: 9167 - protein, 7 aa, Artificial Sequence
  Description of Artificial Sequence: Synthetic peptide
RPDDPAN

SEQ ID NO: 9168 - protein, 7 aa, Artificial Sequence
  Description of Artificial Sequence: Synthetic peptide
RPDGMAS

SEQ ID NO: 9169 - protein, 7 aa, Artificial Sequence
  Description of Artificial Sequence: Synthetic peptide
RPDHSNV

SEQ ID NO: 9170 - protein, 7 aa, Artificial Sequence
  Description of Artificial Sequence: Synthetic peptide
RPDNSKA

SEQ ID NO: 9171 - protein, 7 aa, Artificial Sequence
  Description of Artificial Sequence: Synthetic peptide
RPDSLKL

SEQ ID NO: 9172 - protein, 7 aa, Artificial Sequence
  Description of Artificial Sequence: Synthetic peptide
RPDSPFT

SEQ ID NO: 9173 - protein, 7 aa, Artificial Sequence
  Description of Artificial Sequence: Synthetic peptide
RPDTRAA

SEQ ID NO: 9174 - protein, 7 aa, Artificial Sequence
  Description of Artificial Sequence: Synthetic peptide
RPEEATS

SEQ ID NO: 9175 - protein, 7 aa, Artificial Sequence
  Description of Artificial Sequence: Synthetic peptide
RPEGSMG

SEQ ID NO: 9176 - protein, 7 aa, Artificial Sequence
  Description of Artificial Sequence: Synthetic peptide
RPELGLL

SEQ ID NO: 9177 - protein, 7 aa, Artificial Sequence
  Description of Artificial Sequence: Synthetic peptide
RPELKQS

SEQ ID NO: 9178 - protein, 7 aa, Artificial Sequence
  Description of Artificial Sequence: Synthetic peptide
RPELSSR

SEQ ID NO: 9179 - protein, 7 aa, Artificial Sequence
  Description of Artificial Sequence: Synthetic peptide
RPESVYG

SEQ ID NO: 9180 - protein, 7 aa, Artificial Sequence
  Description of Artificial Sequence: Synthetic peptide
RPFAPQE

SEQ ID NO: 9181 - protein, 7 aa, Artificial Sequence
  Description of Artificial Sequence: Synthetic peptide
RPFSPTP

SEQ ID NO: 9182 - protein, 7 aa, Artificial Sequence
  Description of Artificial Sequence: Synthetic peptide
RPGADAR

SEQ ID NO: 9183 - protein, 7 aa, Artificial Sequence
  Description of Artificial Sequence: Synthetic peptide
RPGGGTE

SEQ ID NO: 9184 - protein, 7 aa, Artificial Sequence
  Description of Artificial Sequence: Synthetic peptide
RPGLSTL

SEQ ID NO: 9185 - protein, 7 aa, Artificial Sequence
  Description of Artificial Sequence: Synthetic peptide
RPGNTLP

SEQ ID NO: 9186 - protein, 7 aa, Artificial Sequence
  Description of Artificial Sequence: Synthetic peptide
RPGREPL

SEQ ID NO: 9187 - protein, 7 aa, Artificial Sequence
  Description of Artificial Sequence: Synthetic peptide
RPGSSTE

SEQ ID NO: 9188 - protein, 7 aa, Artificial Sequence
  Description of Artificial Sequence: Synthetic peptide
RPGTSTV

SEQ ID NO: 9189 - protein, 7 aa, Artificial Sequence
  Description of Artificial Sequence: Synthetic peptide
RPHSDKF

SEQ ID NO: 9190 - protein, 7 aa, Artificial Sequence
  Description of Artificial Sequence: Synthetic peptide
RPIASTN

SEQ ID NO: 9191 - protein, 7 aa, Artificial Sequence
  Description of Artificial Sequence: Synthetic peptide
RPKESSV

SEQ ID NO: 9192 - protein, 7 aa, Artificial Sequence
  Description of Artificial Sequence: Synthetic peptide
RPLDAPD

SEQ ID NO: 9193 - protein, 7 aa, Artificial Sequence
  Description of Artificial Sequence: Synthetic peptide
RPLDQES

SEQ ID NO: 9194 - protein, 7 aa, Artificial Sequence
  Description of Artificial Sequence: Synthetic peptide
RPLESRD

SEQ ID NO: 9195 - protein, 7 aa, Artificial Sequence
  Description of Artificial Sequence: Synthetic peptide
RPLGPHI

SEQ ID NO: 9196 - protein, 7 aa, Artificial Sequence
  Description of Artificial Sequence: Synthetic peptide
RPLGPND

SEQ ID NO: 9197 - protein, 7 aa, Artificial Sequence
  Description of Artificial Sequence: Synthetic peptide
RPLGSDT

SEQ ID NO: 9198 - protein, 7 aa, Artificial Sequence
  Description of Artificial Sequence: Synthetic peptide
RPLIPNN

SEQ ID NO: 9199 - protein, 7 aa, Artificial Sequence
  Description of Artificial Sequence: Synthetic peptide
RPLKHDP

SEQ ID NO: 9200 - protein, 7 aa, Artificial Sequence
  Description of Artificial Sequence: Synthetic peptide
RPLTEYV

SEQ ID NO: 9201 - protein, 7 aa, Artificial Sequence
  Description of Artificial Sequence: Synthetic peptide
RPLVMGV

SEQ ID NO: 9202 - protein, 7 aa, Artificial Sequence
  Description of Artificial Sequence: Synthetic peptide
RPMATLS

SEQ ID NO: 9203 - protein, 7 aa, Artificial Sequence
  Description of Artificial Sequence: Synthetic peptide
RPMITSA

SEQ ID NO: 9204 - protein, 7 aa, Artificial Sequence
  Description of Artificial Sequence: Synthetic peptide
RPMNLKE

SEQ ID NO: 9205 - protein, 7 aa, Artificial Sequence
  Description of Artificial Sequence: Synthetic peptide
RPMPNSP

SEQ ID NO: 9206 - protein, 7 aa, Artificial Sequence
  Description of Artificial Sequence: Synthetic peptide
RPMSLES

SEQ ID NO: 9207 - protein, 7 aa, Artificial Sequence
  Description of Artificial Sequence: Synthetic peptide
RPMTPQL

SEQ ID NO: 9208 - protein, 7 aa, Artificial Sequence
  Description of Artificial Sequence: Synthetic peptide
RPNAVTV

SEQ ID NO: 9209 - protein, 7 aa, Artificial Sequence
  Description of Artificial Sequence: Synthetic peptide
RPPEIHF

SEQ ID NO: 9210 - protein, 7 aa, Artificial Sequence
  Description of Artificial Sequence: Synthetic peptide
RPPGPMS

SEQ ID NO: 9211 - protein, 7 aa, Artificial Sequence
  Description of Artificial Sequence: Synthetic peptide
RPPLGEG

SEQ ID NO: 9212 - protein, 7 aa, Artificial Sequence
  Description of Artificial Sequence: Synthetic peptide
RPPNATP

SEQ ID NO: 9213 - protein, 7 aa, Artificial Sequence
  Description of Artificial Sequence: Synthetic peptide
RPPNGDM

SEQ ID NO: 9214 - protein, 7 aa, Artificial Sequence
  Description of Artificial Sequence: Synthetic peptide
RPPSTVN

SEQ ID NO: 9215 - protein, 7 aa, Artificial Sequence
  Description of Artificial Sequence: Synthetic peptide
RPPSVQP

SEQ ID NO: 9216 - protein, 7 aa, Artificial Sequence
  Description of Artificial Sequence: Synthetic peptide
RPPVQTG

SEQ ID NO: 9217 - protein, 7 aa, Artificial Sequence
  Description of Artificial Sequence: Synthetic peptide
RPQHIMP

SEQ ID NO: 9218 - protein, 7 aa, Artificial Sequence
  Description of Artificial Sequence: Synthetic peptide
RPQKASE

SEQ ID NO: 9219 - protein, 7 aa, Artificial Sequence
  Description of Artificial Sequence: Synthetic peptide
RPQPTPC

SEQ ID NO: 9220 - protein, 7 aa, Artificial Sequence
  Description of Artificial Sequence: Synthetic peptide
RPREISP

SEQ ID NO: 9221 - protein, 7 aa, Artificial Sequence
  Description of Artificial Sequence: Synthetic peptide
RPRFASD

SEQ ID NO: 9222 - protein, 7 aa, Artificial Sequence
  Description of Artificial Sequence: Synthetic peptide
RPSAATP

SEQ ID NO: 9223 - protein, 7 aa, Artificial Sequence
  Description of Artificial Sequence: Synthetic peptide
RPSDLKN

SEQ ID NO: 9224 - protein, 7 aa, Artificial Sequence
  Description of Artificial Sequence: Synthetic peptide
RPSGMAH

SEQ ID NO: 9225 - protein, 7 aa, Artificial Sequence
  Description of Artificial Sequence: Synthetic peptide
RPSLAVG

SEQ ID NO: 9226 - protein, 7 aa, Artificial Sequence
  Description of Artificial Sequence: Synthetic peptide
RPSLPDF

SEQ ID NO: 9227 - protein, 7 aa, Artificial Sequence
  Description of Artificial Sequence: Synthetic peptide
RPSLSGT

SEQ ID NO: 9228 - protein, 7 aa, Artificial Sequence
  Description of Artificial Sequence: Synthetic peptide
RPSLSPT

SEQ ID NO: 9229 - protein, 7 aa, Artificial Sequence
  Description of Artificial Sequence: Synthetic peptide
RPSNAMA

SEQ ID NO: 9230 - protein, 7 aa, Artificial Sequence
  Description of Artificial Sequence: Synthetic peptide
RPSNQSS

SEQ ID NO: 9231 - protein, 7 aa, Artificial Sequence
  Description of Artificial Sequence: Synthetic peptide
RPSTDSY

SEQ ID NO: 9232 - protein, 7 aa, Artificial Sequence
  Description of Artificial Sequence: Synthetic peptide
RPSTYPS

SEQ ID NO: 9233 - protein, 7 aa, Artificial Sequence
  Description of Artificial Sequence: Synthetic peptide
RPSVNEH

SEQ ID NO: 9234 - protein, 7 aa, Artificial Sequence
  Description of Artificial Sequence: Synthetic peptide
RPTLPMA

SEQ ID NO: 9235 - protein, 7 aa, Artificial Sequence
  Description of Artificial Sequence: Synthetic peptide
RPTQILG

SEQ ID NO: 9236 - protein, 7 aa, Artificial Sequence
  Description of Artificial Sequence: Synthetic peptide
RPTSPPA

SEQ ID NO: 9237 - protein, 7 aa, Artificial Sequence
  Description of Artificial Sequence: Synthetic peptide
RPTSTTS

SEQ ID NO: 9238 - protein, 7 aa, Artificial Sequence
  Description of Artificial Sequence: Synthetic peptide
RPTTSNG

SEQ ID NO: 9239 - protein, 7 aa, Artificial Sequence
  Description of Artificial Sequence: Synthetic peptide
RPTTTQE

SEQ ID NO: 9240 - protein, 7 aa, Artificial Sequence
  Description of Artificial Sequence: Synthetic peptide
RPTTTSV

SEQ ID NO: 9241 - protein, 7 aa, Artificial Sequence
  Description of Artificial Sequence: Synthetic peptide
RPVCDGT

SEQ ID NO: 9242 - protein, 7 aa, Artificial Sequence
  Description of Artificial Sequence: Synthetic peptide
RPVDWDL

SEQ ID NO: 9243 - protein, 7 aa, Artificial Sequence
  Description of Artificial Sequence: Synthetic peptide
RPVKEYV

SEQ ID NO: 9244 - protein, 7 aa, Artificial Sequence
  Description of Artificial Sequence: Synthetic peptide
RPVLSTG

SEQ ID NO: 9245 - protein, 7 aa, Artificial Sequence
  Description of Artificial Sequence: Synthetic peptide
RPVPDQI

SEQ ID NO: 9246 - protein, 7 aa, Artificial Sequence
  Description of Artificial Sequence: Synthetic peptide
RPYPPPI

SEQ ID NO: 9247 - protein, 7 aa, Artificial Sequence
  Description of Artificial Sequence: Synthetic peptide
RQALISG

SEQ ID NO: 9248 - protein, 7 aa, Artificial Sequence
  Description of Artificial Sequence: Synthetic peptide
RQDAAIS

SEQ ID NO: 9249 - protein, 7 aa, Artificial Sequence
  Description of Artificial Sequence: Synthetic peptide
RQDDHKI

SEQ ID NO: 9250 - protein, 7 aa, Artificial Sequence
  Description of Artificial Sequence: Synthetic peptide
RQFTENA

SEQ ID NO: 9251 - protein, 7 aa, Artificial Sequence
  Description of Artificial Sequence: Synthetic peptide
RQGVTPT

SEQ ID NO: 9252 - protein, 7 aa, Artificial Sequence
  Description of Artificial Sequence: Synthetic peptide
RQHQLPH

SEQ ID NO: 9253 - protein, 7 aa, Artificial Sequence
  Description of Artificial Sequence: Synthetic peptide
RQIPHTE

SEQ ID NO: 9254 - protein, 7 aa, Artificial Sequence
  Description of Artificial Sequence: Synthetic peptide
RQKEHNL

SEQ ID NO: 9255 - protein, 7 aa, Artificial Sequence
  Description of Artificial Sequence: Synthetic peptide
RQLEADP

SEQ ID NO: 9256 - protein, 7 aa, Artificial Sequence
  Description of Artificial Sequence: Synthetic peptide
RQNDVCS

SEQ ID NO: 9257 - protein, 7 aa, Artificial Sequence
  Description of Artificial Sequence: Synthetic peptide
RQNHMPA

SEQ ID NO: 9258 - protein, 7 aa, Artificial Sequence
  Description of Artificial Sequence: Synthetic peptide
RQNRCID

SEQ ID NO: 9259 - protein, 7 aa, Artificial Sequence
  Description of Artificial Sequence: Synthetic peptide
RQPLYTD

SEQ ID NO: 9260 - protein, 7 aa, Artificial Sequence
  Description of Artificial Sequence: Synthetic peptide
RQPPKLA

SEQ ID NO: 9261 - protein, 7 aa, Artificial Sequence
  Description of Artificial Sequence: Synthetic peptide
RQQAHLV

SEQ ID NO: 9262 - protein, 7 aa, Artificial Sequence
  Description of Artificial Sequence: Synthetic peptide
RQSDLYS

SEQ ID NO: 9263 - protein, 7 aa, Artificial Sequence
  Description of Artificial Sequence: Synthetic peptide
RQSNFAT

SEQ ID NO: 9264 - protein, 7 aa, Artificial Sequence
  Description of Artificial Sequence: Synthetic peptide
RQSNTLN

SEQ ID NO: 9265 - protein, 7 aa, Artificial Sequence
  Description of Artificial Sequence: Synthetic peptide
RQSQCPM

SEQ ID NO: 9266 - protein, 7 aa, Artificial Sequence
  Description of Artificial Sequence: Synthetic peptide
RQSSYDV

SEQ ID NO: 9267 - protein, 7 aa, Artificial Sequence
  Description of Artificial Sequence: Synthetic peptide
RQSTQLL

SEQ ID NO: 9268 - protein, 7 aa, Artificial Sequence
  Description of Artificial Sequence: Synthetic peptide
RQSVPTS

SEQ ID NO: 9269 - protein, 7 aa, Artificial Sequence
  Description of Artificial Sequence: Synthetic peptide
RQSVSNL

SEQ ID NO: 9270 - protein, 7 aa, Artificial Sequence
  Description of Artificial Sequence: Synthetic peptide
RQTHTLQ

SEQ ID NO: 9271 - protein, 7 aa, Artificial Sequence
  Description of Artificial Sequence: Synthetic peptide
RQTQQMY

SEQ ID NO: 9272 - protein, 7 aa, Artificial Sequence
  Description of Artificial Sequence: Synthetic peptide
RQVETMS

SEQ ID NO: 9273 - protein, 7 aa, Artificial Sequence
  Description of Artificial Sequence: Synthetic peptide
RQVGMLS

SEQ ID NO: 9274 - protein, 7 aa, Artificial Sequence
  Description of Artificial Sequence: Synthetic peptide
RQVPSAE

SEQ ID NO: 9275 - protein, 7 aa, Artificial Sequence
  Description of Artificial Sequence: Synthetic peptide
RRDDGSS

SEQ ID NO: 9276 - protein, 7 aa, Artificial Sequence
  Description of Artificial Sequence: Synthetic peptide
RRDELTL

SEQ ID NO: 9277 - protein, 7 aa, Artificial Sequence
  Description of Artificial Sequence: Synthetic peptide
RRDGMLM

SEQ ID NO: 9278 - protein, 7 aa, Artificial Sequence
  Description of Artificial Sequence: Synthetic peptide
RRDHAPI

SEQ ID NO: 9279 - protein, 7 aa, Artificial Sequence
  Description of Artificial Sequence: Synthetic peptide
RRDPSTV

SEQ ID NO: 9280 - protein, 7 aa, Artificial Sequence
  Description of Artificial Sequence: Synthetic peptide
RRDQPVP

SEQ ID NO: 9281 - protein, 7 aa, Artificial Sequence
  Description of Artificial Sequence: Synthetic peptide
RRDVSGP

SEQ ID NO: 9282 - protein, 7 aa, Artificial Sequence
  Description of Artificial Sequence: Synthetic peptide
RRESGIG

SEQ ID NO: 9283 - protein, 7 aa, Artificial Sequence
  Description of Artificial Sequence: Synthetic peptide
RRGTSEP

SEQ ID NO: 9284 - protein, 7 aa, Artificial Sequence
  Description of Artificial Sequence: Synthetic peptide
RRLPGDV

SEQ ID NO: 9285 - protein, 7 aa, Artificial Sequence
  Description of Artificial Sequence: Synthetic peptide
RRNDALP

SEQ ID NO: 9286 - protein, 7 aa, Artificial Sequence
  Description of Artificial Sequence: Synthetic peptide
RRPEIER

SEQ ID NO: 9287 - protein, 7 aa, Artificial Sequence
  Description of Artificial Sequence: Synthetic peptide
RRPSLSD

SEQ ID NO: 9288 - protein, 7 aa, Artificial Sequence
  Description of Artificial Sequence: Synthetic peptide
RRPSPDV

SEQ ID NO: 9289 - protein, 7 aa, Artificial Sequence
  Description of Artificial Sequence: Synthetic peptide
RRSDLYV

SEQ ID NO: 9290 - protein, 7 aa, Artificial Sequence
  Description of Artificial Sequence: Synthetic peptide
RRTDTLY

SEQ ID NO: 9291 - protein, 7 aa, Artificial Sequence
  Description of Artificial Sequence: Synthetic peptide
RRVGTGD

SEQ ID NO: 9292 - protein, 7 aa, Artificial Sequence
  Description of Artificial Sequence: Synthetic peptide
RSAAAVY

SEQ ID NO: 9293 - protein, 7 aa, Artificial Sequence
  Description of Artificial Sequence: Synthetic peptide
RSAAMSE

SEQ ID NO: 9294 - protein, 7 aa, Artificial Sequence
  Description of Artificial Sequence: Synthetic peptide
RSAATST

SEQ ID NO: 9295 - protein, 7 aa, Artificial Sequence
  Description of Artificial Sequence: Synthetic peptide
RSAAVTY

SEQ ID NO: 9296 - protein, 7 aa, Artificial Sequence
  Description of Artificial Sequence: Synthetic peptide
RSAGPNE

SEQ ID NO: 9297 - protein, 7 aa, Artificial Sequence
  Description of Artificial Sequence: Synthetic peptide
RSALNTS

SEQ ID NO: 9298 - protein, 7 aa, Artificial Sequence
  Description of Artificial Sequence: Synthetic peptide
RSALPNL

SEQ ID NO: 9299 - protein, 7 aa, Artificial Sequence
  Description of Artificial Sequence: Synthetic peptide
RSAMAGP

SEQ ID NO: 9300 - protein, 7 aa, Artificial Sequence
  Description of Artificial Sequence: Synthetic peptide
RSANQSV

SEQ ID NO: 9301 - protein, 7 aa, Artificial Sequence
  Description of Artificial Sequence: Synthetic peptide
RSAPAVI

SEQ ID NO: 9302 - protein, 7 aa, Artificial Sequence
  Description of Artificial Sequence: Synthetic peptide
RSAPELT

SEQ ID NO: 9303 - protein, 7 aa, Artificial Sequence
  Description of Artificial Sequence: Synthetic peptide
RSAQLTA

SEQ ID NO: 9304 - protein, 7 aa, Artificial Sequence
  Description of Artificial Sequence: Synthetic peptide
RSAQNSL

SEQ ID NO: 9305 - protein, 7 aa, Artificial Sequence
  Description of Artificial Sequence: Synthetic peptide
RSASLQS

SEQ ID NO: 9306 - protein, 7 aa, Artificial Sequence
  Description of Artificial Sequence: Synthetic peptide
RSAVPDS

SEQ ID NO: 9307 - protein, 7 aa, Artificial Sequence
  Description of Artificial Sequence: Synthetic peptide
RSDELRT

SEQ ID NO: 9308 - protein, 7 aa, Artificial Sequence
  Description of Artificial Sequence: Synthetic peptide
RSDGRSI

SEQ ID NO: 9309 - protein, 7 aa, Artificial Sequence
  Description of Artificial Sequence: Synthetic peptide
RSDPART

SEQ ID NO: 9310 - protein, 7 aa, Artificial Sequence
  Description of Artificial Sequence: Synthetic peptide
RSDSRPL

SEQ ID NO: 9311 - protein, 7 aa, Artificial Sequence
  Description of Artificial Sequence: Synthetic peptide
RSDSVTH

SEQ ID NO: 9312 - protein, 7 aa, Artificial Sequence
  Description of Artificial Sequence: Synthetic peptide
RSDVRLA

SEQ ID NO: 9313 - protein, 7 aa, Artificial Sequence
  Description of Artificial Sequence: Synthetic peptide
RSEEIRD

SEQ ID NO: 9314 - protein, 7 aa, Artificial Sequence
  Description of Artificial Sequence: Synthetic peptide
RSEILVT

SEQ ID NO: 9315 - protein, 7 aa, Artificial Sequence
  Description of Artificial Sequence: Synthetic peptide
RSEKVAP

SEQ ID NO: 9316 - protein, 7 aa, Artificial Sequence
  Description of Artificial Sequence: Synthetic peptide
RSEPDEY

SEQ ID NO: 9317 - protein, 7 aa, Artificial Sequence
  Description of Artificial Sequence: Synthetic peptide
RSEYAPQ

SEQ ID NO: 9318 - protein, 7 aa, Artificial Sequence
  Description of Artificial Sequence: Synthetic peptide
RSGHSGY

SEQ ID NO: 9319 - protein, 7 aa, Artificial Sequence
  Description of Artificial Sequence: Synthetic peptide
RSGLASG

SEQ ID NO: 9320 - protein, 7 aa, Artificial Sequence
  Description of Artificial Sequence: Synthetic peptide
RSGLDKT

SEQ ID NO: 9321 - protein, 7 aa, Artificial Sequence
  Description of Artificial Sequence: Synthetic peptide
RSGLKEL

SEQ ID NO: 9322 - protein, 7 aa, Artificial Sequence
  Description of Artificial Sequence: Synthetic peptide
RSGMVSA

SEQ ID NO: 9323 - protein, 7 aa, Artificial Sequence
  Description of Artificial Sequence: Synthetic peptide
RSGQDAL

SEQ ID NO: 9324 - protein, 7 aa, Artificial Sequence
  Description of Artificial Sequence: Synthetic peptide
RSGSGLE

SEQ ID NO: 9325 - protein, 7 aa, Artificial Sequence
  Description of Artificial Sequence: Synthetic peptide
RSHNEEE

SEQ ID NO: 9326 - protein, 7 aa, Artificial Sequence
  Description of Artificial Sequence: Synthetic peptide
RSHSTDS

SEQ ID NO: 9327 - protein, 7 aa, Artificial Sequence
  Description of Artificial Sequence: Synthetic peptide
RSIAADA

SEQ ID NO: 9328 - protein, 7 aa, Artificial Sequence
  Description of Artificial Sequence: Synthetic peptide
RSIAWSE

SEQ ID NO: 9329 - protein, 7 aa, Artificial Sequence
  Description of Artificial Sequence: Synthetic peptide
RSIENAD

SEQ ID NO: 9330 - protein, 7 aa, Artificial Sequence
  Description of Artificial Sequence: Synthetic peptide
RSIPDPT

SEQ ID NO: 9331 - protein, 7 aa, Artificial Sequence
  Description of Artificial Sequence: Synthetic peptide
RSIQPTN

SEQ ID NO: 9332 - protein, 7 aa, Artificial Sequence
  Description of Artificial Sequence: Synthetic peptide
RSIQTNP

SEQ ID NO: 9333 - protein, 7 aa, Artificial Sequence
  Description of Artificial Sequence: Synthetic peptide
RSKEATS

SEQ ID NO: 9334 - protein, 7 aa, Artificial Sequence
  Description of Artificial Sequence: Synthetic peptide
RSKQASE

SEQ ID NO: 9335 - protein, 7 aa, Artificial Sequence
  Description of Artificial Sequence: Synthetic peptide
RSKSSDP

SEQ ID NO: 9336 - protein, 7 aa, Artificial Sequence
  Description of Artificial Sequence: Synthetic peptide
RSLDFPD

SEQ ID NO: 9337 - protein, 7 aa, Artificial Sequence
  Description of Artificial Sequence: Synthetic peptide
RSLEHSN

SEQ ID NO: 9338 - protein, 7 aa, Artificial Sequence
  Description of Artificial Sequence: Synthetic peptide
RSLHGSQ

SEQ ID NO: 9339 - protein, 7 aa, Artificial Sequence
  Description of Artificial Sequence: Synthetic peptide
RSLNALP

SEQ ID NO: 9340 - protein, 7 aa, Artificial Sequence
  Description of Artificial Sequence: Synthetic peptide
RSLNSTA

SEQ ID NO: 9341 - protein, 7 aa, Artificial Sequence
  Description of Artificial Sequence: Synthetic peptide
RSLPAET

SEQ ID NO: 9342 - protein, 7 aa, Artificial Sequence
  Description of Artificial Sequence: Synthetic peptide
RSLPSPH

SEQ ID NO: 9343 - protein, 7 aa, Artificial Sequence
  Description of Artificial Sequence: Synthetic peptide
RSLQLSD

SEQ ID NO: 9344 - protein, 7 aa, Artificial Sequence
  Description of Artificial Sequence: Synthetic peptide
RSLSFAA

SEQ ID NO: 9345 - protein, 7 aa, Artificial Sequence
  Description of Artificial Sequence: Synthetic peptide
RSLSLLG

SEQ ID NO: 9346 - protein, 7 aa, Artificial Sequence
  Description of Artificial Sequence: Synthetic peptide
RSLSLPP

SEQ ID NO: 9347 - protein, 7 aa, Artificial Sequence
  Description of Artificial Sequence: Synthetic peptide
RSLSPTR

SEQ ID NO: 9348 - protein, 7 aa, Artificial Sequence
  Description of Artificial Sequence: Synthetic peptide
RSLTVTA

SEQ ID NO: 9349 - protein, 7 aa, Artificial Sequence
  Description of Artificial Sequence: Synthetic peptide
RSMAESV

SEQ ID NO: 9350 - protein, 7 aa, Artificial Sequence
  Description of Artificial Sequence: Synthetic peptide
RSMHAGA

SEQ ID NO: 9351 - protein, 7 aa, Artificial Sequence
  Description of Artificial Sequence: Synthetic peptide
RSMMLSP

SEQ ID NO: 9352 - protein, 7 aa, Artificial Sequence
  Description of Artificial Sequence: Synthetic peptide
RSMPSGA

SEQ ID NO: 9353 - protein, 7 aa, Artificial Sequence
  Description of Artificial Sequence: Synthetic peptide
RSMPTTT

SEQ ID NO: 9354 - protein, 7 aa, Artificial Sequence
  Description of Artificial Sequence: Synthetic peptide
RSMTGAL

SEQ ID NO: 9355 - protein, 7 aa, Artificial Sequence
  Description of Artificial Sequence: Synthetic peptide
RSNKETS

SEQ ID NO: 9356 - protein, 7 aa, Artificial Sequence
  Description of Artificial Sequence: Synthetic peptide
RSNLEGL

SEQ ID NO: 9357 - protein, 7 aa, Artificial Sequence
  Description of Artificial Sequence: Synthetic peptide
RSNMPMG

SEQ ID NO: 9358 - protein, 7 aa, Artificial Sequence
  Description of Artificial Sequence: Synthetic peptide
RSNPAPF

SEQ ID NO: 9359 - protein, 7 aa, Artificial Sequence
  Description of Artificial Sequence: Synthetic peptide
RSNPVGT

SEQ ID NO: 9360 - protein, 7 aa, Artificial Sequence
  Description of Artificial Sequence: Synthetic peptide
RSNSDAV

SEQ ID NO: 9361 - protein, 7 aa, Artificial Sequence
  Description of Artificial Sequence: Synthetic peptide
RSNVESK

SEQ ID NO: 9362 - protein, 7 aa, Artificial Sequence
  Description of Artificial Sequence: Synthetic peptide
RSNVLAQ

SEQ ID NO: 9363 - protein, 7 aa, Artificial Sequence
  Description of Artificial Sequence: Synthetic peptide
RSPDTTG

SEQ ID NO: 9364 - protein, 7 aa, Artificial Sequence
  Description of Artificial Sequence: Synthetic peptide
RSPEKAL

SEQ ID NO: 9365 - protein, 7 aa, Artificial Sequence
  Description of Artificial Sequence: Synthetic peptide
RSPFGSA

SEQ ID NO: 9366 - protein, 7 aa, Artificial Sequence
  Description of Artificial Sequence: Synthetic peptide
RSPGNVG

SEQ ID NO: 9367 - protein, 7 aa, Artificial Sequence
  Description of Artificial Sequence: Synthetic peptide
RSPPQDM

SEQ ID NO: 9368 - protein, 7 aa, Artificial Sequence
  Description of Artificial Sequence: Synthetic peptide
RSPPTIA

SEQ ID NO: 9369 - protein, 7 aa, Artificial Sequence
  Description of Artificial Sequence: Synthetic peptide
RSPQLYA

SEQ ID NO: 9370 - protein, 7 aa, Artificial Sequence
  Description of Artificial Sequence: Synthetic peptide
RSPQVML

SEQ ID NO: 9371 - protein, 7 aa, Artificial Sequence
  Description of Artificial Sequence: Synthetic peptide
RSPSGTT

SEQ ID NO: 9372 - protein, 7 aa, Artificial Sequence
  Description of Artificial Sequence: Synthetic peptide
RSPSTSN

SEQ ID NO: 9373 - protein, 7 aa, Artificial Sequence
  Description of Artificial Sequence: Synthetic peptide
RSPSVLP

SEQ ID NO: 9374 - protein, 7 aa, Artificial Sequence
  Description of Artificial Sequence: Synthetic peptide
RSPTFAP

SEQ ID NO: 9375 - protein, 7 aa, Artificial Sequence
  Description of Artificial Sequence: Synthetic peptide
RSPTSVA

SEQ ID NO: 9376 - protein, 7 aa, Artificial Sequence
  Description of Artificial Sequence: Synthetic peptide
RSPVKGL

SEQ ID NO: 9377 - protein, 7 aa, Artificial Sequence
  Description of Artificial Sequence: Synthetic peptide
RSQAQVI

SEQ ID NO: 9378 - protein, 7 aa, Artificial Sequence
  Description of Artificial Sequence: Synthetic peptide
RSQISDS

SEQ ID NO: 9379 - protein, 7 aa, Artificial Sequence
  Description of Artificial Sequence: Synthetic peptide
RSQLMGA

SEQ ID NO: 9380 - protein, 7 aa, Artificial Sequence
  Description of Artificial Sequence: Synthetic peptide
RSQNQGL

SEQ ID NO: 9381 - protein, 7 aa, Artificial Sequence
  Description of Artificial Sequence: Synthetic peptide
RSQPLSL

SEQ ID NO: 9382 - protein, 7 aa, Artificial Sequence
  Description of Artificial Sequence: Synthetic peptide
RSQPSTG

SEQ ID NO: 9383 - protein, 7 aa, Artificial Sequence
  Description of Artificial Sequence: Synthetic peptide
RSQQPYE

SEQ ID NO: 9384 - protein, 7 aa, Artificial Sequence
  Description of Artificial Sequence: Synthetic peptide
RSQSATL

SEQ ID NO: 9385 - protein, 7 aa, Artificial Sequence
  Description of Artificial Sequence: Synthetic peptide
RSQTNMY

SEQ ID NO: 9386 - protein, 7 aa, Artificial Sequence
  Description of Artificial Sequence: Synthetic peptide
RSRDSEH

SEQ ID NO: 9387 - protein, 7 aa, Artificial Sequence
  Description of Artificial Sequence: Synthetic peptide
RSSAFGP

SEQ ID NO: 9388 - protein, 7 aa, Artificial Sequence
  Description of Artificial Sequence: Synthetic peptide
RSSEYGS

SEQ ID NO: 9389 - protein, 7 aa, Artificial Sequence
  Description of Artificial Sequence: Synthetic peptide
RSSFNKD

SEQ ID NO: 9390 - protein, 7 aa, Artificial Sequence
  Description of Artificial Sequence: Synthetic peptide
RSSHGGE

SEQ ID NO: 9391 - protein, 7 aa, Artificial Sequence
  Description of Artificial Sequence: Synthetic peptide
RSSLNLH

SEQ ID NO: 9392 - protein, 7 aa, Artificial Sequence
  Description of Artificial Sequence: Synthetic peptide
RSSNLNA

SEQ ID NO: 9393 - protein, 7 aa, Artificial Sequence
  Description of Artificial Sequence: Synthetic peptide
RSSPNFQ

SEQ ID NO: 9394 - protein, 7 aa, Artificial Sequence
  Description of Artificial Sequence: Synthetic peptide
RSSPNSP

SEQ ID NO: 9395 - protein, 7 aa, Artificial Sequence
  Description of Artificial Sequence: Synthetic peptide
RSSPSDK

SEQ ID NO: 9396 - protein, 7 aa, Artificial Sequence
  Description of Artificial Sequence: Synthetic peptide
RSSPYLE

SEQ ID NO: 9397 - protein, 7 aa, Artificial Sequence
  Description of Artificial Sequence: Synthetic peptide
RSSSAVV

SEQ ID NO: 9398 - protein, 7 aa, Artificial Sequence
  Description of Artificial Sequence: Synthetic peptide
RSSSLTP

SEQ ID NO: 9399 - protein, 7 aa, Artificial Sequence
  Description of Artificial Sequence: Synthetic peptide
RSSSNPL

SEQ ID NO: 9400 - protein, 7 aa, Artificial Sequence
  Description of Artificial Sequence: Synthetic peptide
RSSSPTT

SEQ ID NO: 9401 - protein, 7 aa, Artificial Sequence
  Description of Artificial Sequence: Synthetic peptide
RSSSTQS

SEQ ID NO: 9402 - protein, 7 aa, Artificial Sequence
  Description of Artificial Sequence: Synthetic peptide
RSSTHSG

SEQ ID NO: 9403 - protein, 7 aa, Artificial Sequence
  Description of Artificial Sequence: Synthetic peptide
RSSTQIP

SEQ ID NO: 9404 - protein, 7 aa, Artificial Sequence
  Description of Artificial Sequence: Synthetic peptide
RSSTTLP

SEQ ID NO: 9405 - protein, 7 aa, Artificial Sequence
  Description of Artificial Sequence: Synthetic peptide
RSSYTEH

SEQ ID NO: 9406 - protein, 7 aa, Artificial Sequence
  Description of Artificial Sequence: Synthetic peptide
RSTADRD

SEQ ID NO: 9407 - protein, 7 aa, Artificial Sequence
  Description of Artificial Sequence: Synthetic peptide
RSTAIDF

SEQ ID NO: 9408 - protein, 7 aa, Artificial Sequence
  Description of Artificial Sequence: Synthetic peptide
RSTALPD

SEQ ID NO: 9409 - protein, 7 aa, Artificial Sequence
  Description of Artificial Sequence: Synthetic peptide
RSTGPSV

SEQ ID NO: 9410 - protein, 7 aa, Artificial Sequence
  Description of Artificial Sequence: Synthetic peptide
RSTLNSP

SEQ ID NO: 9411 - protein, 7 aa, Artificial Sequence
  Description of Artificial Sequence: Synthetic peptide
RSTMSNS

SEQ ID NO: 9412 - protein, 7 aa, Artificial Sequence
  Description of Artificial Sequence: Synthetic peptide
RSTNNLT

SEQ ID NO: 9413 - protein, 7 aa, Artificial Sequence
  Description of Artificial Sequence: Synthetic peptide
RSTSPLP

SEQ ID NO: 9414 - protein, 7 aa, Artificial Sequence
  Description of Artificial Sequence: Synthetic peptide
RSTTSHP

SEQ ID NO: 9415 - protein, 7 aa, Artificial Sequence
  Description of Artificial Sequence: Synthetic peptide
RSVATGV

SEQ ID NO: 9416 - protein, 7 aa, Artificial Sequence
  Description of Artificial Sequence: Synthetic peptide
RSVEPLA

SEQ ID NO: 9417 - protein, 7 aa, Artificial Sequence
  Description of Artificial Sequence: Synthetic peptide
RSVKFPM

SEQ ID NO: 9418 - protein, 7 aa, Artificial Sequence
  Description of Artificial Sequence: Synthetic peptide
RSVPESR

SEQ ID NO: 9419 - protein, 7 aa, Artificial Sequence
  Description of Artificial Sequence: Synthetic peptide
RSVQTPS

SEQ ID NO: 9420 - protein, 7 aa, Artificial Sequence
  Description of Artificial Sequence: Synthetic peptide
RSVRQND

SEQ ID NO: 9421 - protein, 7 aa, Artificial Sequence
  Description of Artificial Sequence: Synthetic peptide
RSVTANN

SEQ ID NO: 9422 - protein, 7 aa, Artificial Sequence
  Description of Artificial Sequence: Synthetic peptide
RSVTPGI

SEQ ID NO: 9423 - protein, 7 aa, Artificial Sequence
  Description of Artificial Sequence: Synthetic peptide
RSVVAQT

SEQ ID NO: 9424 - protein, 7 aa, Artificial Sequence
  Description of Artificial Sequence: Synthetic peptide
RSYGLPE

SEQ ID NO: 9425 - protein, 7 aa, Artificial Sequence
  Description of Artificial Sequence: Synthetic peptide
RSYNPES

SEQ ID NO: 9426 - protein, 7 aa, Artificial Sequence
  Description of Artificial Sequence: Synthetic peptide
RSYSPPT

SEQ ID NO: 9427 - protein, 7 aa, Artificial Sequence
  Description of Artificial Sequence: Synthetic peptide
RTAATCA

SEQ ID NO: 9428 - protein, 7 aa, Artificial Sequence
  Description of Artificial Sequence: Synthetic peptide
RTADMSG

SEQ ID NO: 9429 - protein, 7 aa, Artificial Sequence
  Description of Artificial Sequence: Synthetic peptide
RTAIGNL

SEQ ID NO: 9430 - protein, 7 aa, Artificial Sequence
  Description of Artificial Sequence: Synthetic peptide
RTANPTP

SEQ ID NO: 9431 - protein, 7 aa, Artificial Sequence
  Description of Artificial Sequence: Synthetic peptide
RTASLVP

SEQ ID NO: 9432 - protein, 7 aa, Artificial Sequence
  Description of Artificial Sequence: Synthetic peptide
RTASVAA

SEQ ID NO: 9433 - protein, 7 aa, Artificial Sequence
  Description of Artificial Sequence: Synthetic peptide
RTAVTDT

SEQ ID NO: 9434 - protein, 7 aa, Artificial Sequence
  Description of Artificial Sequence: Synthetic peptide
RTDGDVK

SEQ ID NO: 9435 - protein, 7 aa, Artificial Sequence
  Description of Artificial Sequence: Synthetic peptide
RTEFNMP

SEQ ID NO: 9436 - protein, 7 aa, Artificial Sequence
  Description of Artificial Sequence: Synthetic peptide
RTEGCAA

SEQ ID NO: 9437 - protein, 7 aa, Artificial Sequence
  Description of Artificial Sequence: Synthetic peptide
RTEPGPS

SEQ ID NO: 9438 - protein, 7 aa, Artificial Sequence
  Description of Artificial Sequence: Synthetic peptide
RTESPPQ

SEQ ID NO: 9439 - protein, 7 aa, Artificial Sequence
  Description of Artificial Sequence: Synthetic peptide
RTETGKL

SEQ ID NO: 9440 - protein, 7 aa, Artificial Sequence
  Description of Artificial Sequence: Synthetic peptide
RTFSGAD

SEQ ID NO: 9441 - protein, 7 aa, Artificial Sequence
  Description of Artificial Sequence: Synthetic peptide
RTGALSE

SEQ ID NO: 9442 - protein, 7 aa, Artificial Sequence
  Description of Artificial Sequence: Synthetic peptide
RTGEVTF

SEQ ID NO: 9443 - protein, 7 aa, Artificial Sequence
  Description of Artificial Sequence: Synthetic peptide
RTGNAAS

SEQ ID NO: 9444 - protein, 7 aa, Artificial Sequence
  Description of Artificial Sequence: Synthetic peptide
RTGPGSE

SEQ ID NO: 9445 - protein, 7 aa, Artificial Sequence
  Description of Artificial Sequence: Synthetic peptide
RTGPTPS

SEQ ID NO: 9446 - protein, 7 aa, Artificial Sequence
  Description of Artificial Sequence: Synthetic peptide
RTGSYPQ

SEQ ID NO: 9447 - protein, 7 aa, Artificial Sequence
  Description of Artificial Sequence: Synthetic peptide
RTGVCGN

SEQ ID NO: 9448 - protein, 7 aa, Artificial Sequence
  Description of Artificial Sequence: Synthetic peptide
RTHSPAG

SEQ ID NO: 9449 - protein, 7 aa, Artificial Sequence
  Description of Artificial Sequence: Synthetic peptide
RTLGPVG

SEQ ID NO: 9450 - protein, 7 aa, Artificial Sequence
  Description of Artificial Sequence: Synthetic peptide
RTLMPHP

SEQ ID NO: 9451 - protein, 7 aa, Artificial Sequence
  Description of Artificial Sequence: Synthetic peptide
RTLNSVA

SEQ ID NO: 9452 - protein, 7 aa, Artificial Sequence
  Description of Artificial Sequence: Synthetic peptide
RTMDAPV

SEQ ID NO: 9453 - protein, 7 aa, Artificial Sequence
  Description of Artificial Sequence: Synthetic peptide
RTNGDVK

SEQ ID NO: 9454 - protein, 7 aa, Artificial Sequence
  Description of Artificial Sequence: Synthetic peptide
RTNGLSP

SEQ ID NO: 9455 - protein, 7 aa, Artificial Sequence
  Description of Artificial Sequence: Synthetic peptide
RTNNDVT

SEQ ID NO: 9456 - protein, 7 aa, Artificial Sequence
  Description of Artificial Sequence: Synthetic peptide
RTNSQLD

SEQ ID NO: 9457 - protein, 7 aa, Artificial Sequence
  Description of Artificial Sequence: Synthetic peptide
RTNSTSM

SEQ ID NO: 9458 - protein, 7 aa, Artificial Sequence
  Description of Artificial Sequence: Synthetic peptide
RTPALSN

SEQ ID NO: 9459 - protein, 7 aa, Artificial Sequence
  Description of Artificial Sequence: Synthetic peptide
RTPDSLG

SEQ ID NO: 9460 - protein, 7 aa, Artificial Sequence
  Description of Artificial Sequence: Synthetic peptide
RTPEAIS

SEQ ID NO: 9461 - protein, 7 aa, Artificial Sequence
  Description of Artificial Sequence: Synthetic peptide
RTPHSSF

SEQ ID NO: 9462 - protein, 7 aa, Artificial Sequence
  Description of Artificial Sequence: Synthetic peptide
RTPKLPM

SEQ ID NO: 9463 - protein, 7 aa, Artificial Sequence
  Description of Artificial Sequence: Synthetic peptide
RTPMLEP

SEQ ID NO: 9464 - protein, 7 aa, Artificial Sequence
  Description of Artificial Sequence: Synthetic peptide
RTPVSGE

SEQ ID NO: 9465 - protein, 7 aa, Artificial Sequence
  Description of Artificial Sequence: Synthetic peptide
RTQIGVN

SEQ ID NO: 9466 - protein, 7 aa, Artificial Sequence
  Description of Artificial Sequence: Synthetic peptide
RTSAVGL

SEQ ID NO: 9467 - protein, 7 aa, Artificial Sequence
  Description of Artificial Sequence: Synthetic peptide
RTSCSPG

SEQ ID NO: 9468 - protein, 7 aa, Artificial Sequence
  Description of Artificial Sequence: Synthetic peptide
RTSDASF

SEQ ID NO: 9469 - protein, 7 aa, Artificial Sequence
  Description of Artificial Sequence: Synthetic peptide
RTSDLSA

SEQ ID NO: 9470 - protein, 7 aa, Artificial Sequence
  Description of Artificial Sequence: Synthetic peptide
RTSGPTD

SEQ ID NO: 9471 - protein, 7 aa, Artificial Sequence
  Description of Artificial Sequence: Synthetic peptide
RTSMGQA

SEQ ID NO: 9472 - protein, 7 aa, Artificial Sequence
  Description of Artificial Sequence: Synthetic peptide
RTSMVSN

SEQ ID NO: 9473 - protein, 7 aa, Artificial Sequence
  Description of Artificial Sequence: Synthetic peptide
RTSPESR

SEQ ID NO: 9474 - protein, 7 aa, Artificial Sequence
  Description of Artificial Sequence: Synthetic peptide
RTSPLAV

SEQ ID NO: 9475 - protein, 7 aa, Artificial Sequence
  Description of Artificial Sequence: Synthetic peptide
RTSPQSS

SEQ ID NO: 9476 - protein, 7 aa, Artificial Sequence
  Description of Artificial Sequence: Synthetic peptide
RTSPSFH

SEQ ID NO: 9477 - protein, 7 aa, Artificial Sequence
  Description of Artificial Sequence: Synthetic peptide
RTSQTEP

SEQ ID NO: 9478 - protein, 7 aa, Artificial Sequence
  Description of Artificial Sequence: Synthetic peptide
RTSTEGS

SEQ ID NO: 9479 - protein, 7 aa, Artificial Sequence
  Description of Artificial Sequence: Synthetic peptide
RTSTYGG

SEQ ID NO: 9480 - protein, 7 aa, Artificial Sequence
  Description of Artificial Sequence: Synthetic peptide
RTSVAVA

SEQ ID NO: 9481 - protein, 7 aa, Artificial Sequence
  Description of Artificial Sequence: Synthetic peptide
RTTDKQG

SEQ ID NO: 9482 - protein, 7 aa, Artificial Sequence
  Description of Artificial Sequence: Synthetic peptide
RTTEHSM

SEQ ID NO: 9483 - protein, 7 aa, Artificial Sequence
  Description of Artificial Sequence: Synthetic peptide
RTTQSVM

SEQ ID NO: 9484 - protein, 7 aa, Artificial Sequence
  Description of Artificial Sequence: Synthetic peptide
RTTSDTF

SEQ ID NO: 9485 - protein, 7 aa, Artificial Sequence
  Description of Artificial Sequence: Synthetic peptide
RTTYQSS

SEQ ID NO: 9486 - protein, 7 aa, Artificial Sequence
  Description of Artificial Sequence: Synthetic peptide
RTVGSLN

SEQ ID NO: 9487 - protein, 7 aa, Artificial Sequence
  Description of Artificial Sequence: Synthetic peptide
RTVKAEA

SEQ ID NO: 9488 - protein, 7 aa, Artificial Sequence
  Description of Artificial Sequence: Synthetic peptide
RTYHVPD

SEQ ID NO: 9489 - protein, 7 aa, Artificial Sequence
  Description of Artificial Sequence: Synthetic peptide
RVAASSI

SEQ ID NO: 9490 - protein, 7 aa, Artificial Sequence
  Description of Artificial Sequence: Synthetic peptide
RVAGSNG

SEQ ID NO: 9491 - protein, 7 aa, Artificial Sequence
  Description of Artificial Sequence: Synthetic peptide
RVAMGED

SEQ ID NO: 9492 - protein, 7 aa, Artificial Sequence
  Description of Artificial Sequence: Synthetic peptide
RVASPTA

SEQ ID NO: 9493 - protein, 7 aa, Artificial Sequence
  Description of Artificial Sequence: Synthetic peptide
RVDASHR

SEQ ID NO: 9494 - protein, 7 aa, Artificial Sequence
  Description of Artificial Sequence: Synthetic peptide
RVDSVRS

SEQ ID NO: 9495 - protein, 7 aa, Artificial Sequence
  Description of Artificial Sequence: Synthetic peptide
RVDTRMQ

SEQ ID NO: 9496 - protein, 7 aa, Artificial Sequence
  Description of Artificial Sequence: Synthetic peptide
RVEECVI

SEQ ID NO: 9497 - protein, 7 aa, Artificial Sequence
  Description of Artificial Sequence: Synthetic peptide
RVGDGKH

SEQ ID NO: 9498 - protein, 7 aa, Artificial Sequence
  Description of Artificial Sequence: Synthetic peptide
RVGDKLQ

SEQ ID NO: 9499 - protein, 7 aa, Artificial Sequence
  Description of Artificial Sequence: Synthetic peptide
RVGDSAF

SEQ ID NO: 9500 - protein, 7 aa, Artificial Sequence
  Description of Artificial Sequence: Synthetic peptide
RVGGSSS

SEQ ID NO: 9501 - protein, 7 aa, Artificial Sequence
  Description of Artificial Sequence: Synthetic peptide
RVGHCLG

SEQ ID NO: 9502 - protein, 7 aa, Artificial Sequence
  Description of Artificial Sequence: Synthetic peptide
RVGLAST

SEQ ID NO: 9503 - protein, 7 aa, Artificial Sequence
  Description of Artificial Sequence: Synthetic peptide
RVGNVDT

SEQ ID NO: 9504 - protein, 7 aa, Artificial Sequence
  Description of Artificial Sequence: Synthetic peptide
RVGRPSE

SEQ ID NO: 9505 - protein, 7 aa, Artificial Sequence
  Description of Artificial Sequence: Synthetic peptide
RVIPACQ

SEQ ID NO: 9506 - protein, 7 aa, Artificial Sequence
  Description of Artificial Sequence: Synthetic peptide
RVLDLEN

SEQ ID NO: 9507 - protein, 7 aa, Artificial Sequence
  Description of Artificial Sequence: Synthetic peptide
RVLIEPV

SEQ ID NO: 9508 - protein, 7 aa, Artificial Sequence
  Description of Artificial Sequence: Synthetic peptide
RVLNHLG

SEQ ID NO: 9509 - protein, 7 aa, Artificial Sequence
  Description of Artificial Sequence: Synthetic peptide
RVMDRAA

SEQ ID NO: 9510 - protein, 7 aa, Artificial Sequence
  Description of Artificial Sequence: Synthetic peptide
RVNAPGV

SEQ ID NO: 9511 - protein, 7 aa, Artificial Sequence
  Description of Artificial Sequence: Synthetic peptide
RVNHDET

SEQ ID NO: 9512 - protein, 7 aa, Artificial Sequence
  Description of Artificial Sequence: Synthetic peptide
RVNILAE

SEQ ID NO: 9513 - protein, 7 aa, Artificial Sequence
  Description of Artificial Sequence: Synthetic peptide
RVNPDRY

SEQ ID NO: 9514 - protein, 7 aa, Artificial Sequence
  Description of Artificial Sequence: Synthetic peptide
RVNSIAS

SEQ ID NO: 9515 - protein, 7 aa, Artificial Sequence
  Description of Artificial Sequence: Synthetic peptide
RVPDIAR

SEQ ID NO: 9516 - protein, 7 aa, Artificial Sequence
  Description of Artificial Sequence: Synthetic peptide
RVPDSTR

SEQ ID NO: 9517 - protein, 7 aa, Artificial Sequence
  Description of Artificial Sequence: Synthetic peptide
RVPGILH

SEQ ID NO: 9518 - protein, 7 aa, Artificial Sequence
  Description of Artificial Sequence: Synthetic peptide
RVPNTLP

SEQ ID NO: 9519 - protein, 7 aa, Artificial Sequence
  Description of Artificial Sequence: Synthetic peptide
RVPNWPG

SEQ ID NO: 9520 - protein, 7 aa, Artificial Sequence
  Description of Artificial Sequence: Synthetic peptide
RVPSQSS

SEQ ID NO: 9521 - protein, 7 aa, Artificial Sequence
  Description of Artificial Sequence: Synthetic peptide
RVQNGLN

SEQ ID NO: 9522 - protein, 7 aa, Artificial Sequence
  Description of Artificial Sequence: Synthetic peptide
RVQQASL

SEQ ID NO: 9523 - protein, 7 aa, Artificial Sequence
  Description of Artificial Sequence: Synthetic peptide
RVQSNVP

SEQ ID NO: 9524 - protein, 7 aa, Artificial Sequence
  Description of Artificial Sequence: Synthetic peptide
RVQTIPS

SEQ ID NO: 9525 - protein, 7 aa, Artificial Sequence
  Description of Artificial Sequence: Synthetic peptide
RVSQPDM

SEQ ID NO: 9526 - protein, 7 aa, Artificial Sequence
  Description of Artificial Sequence: Synthetic peptide
RVSQVTM

SEQ ID NO: 9527 - protein, 7 aa, Artificial Sequence
  Description of Artificial Sequence: Synthetic peptide
RVSTIST

SEQ ID NO: 9528 - protein, 7 aa, Artificial Sequence
  Description of Artificial Sequence: Synthetic peptide
RVSTTSD

SEQ ID NO: 9529 - protein, 7 aa, Artificial Sequence
  Description of Artificial Sequence: Synthetic peptide
RVSYDTE

SEQ ID NO: 9530 - protein, 7 aa, Artificial Sequence
  Description of Artificial Sequence: Synthetic peptide
RVTIGTS

SEQ ID NO: 9531 - protein, 7 aa, Artificial Sequence
  Description of Artificial Sequence: Synthetic peptide
RVTPELF

SEQ ID NO: 9532 - protein, 7 aa, Artificial Sequence
  Description of Artificial Sequence: Synthetic peptide
RVTSTLS

SEQ ID NO: 9533 - protein, 7 aa, Artificial Sequence
  Description of Artificial Sequence: Synthetic peptide
RVTTAEL

SEQ ID NO: 9534 - protein, 7 aa, Artificial Sequence
  Description of Artificial Sequence: Synthetic peptide
RVTTELP

SEQ ID NO: 9535 - protein, 7 aa, Artificial Sequence
  Description of Artificial Sequence: Synthetic peptide
RVVGGST

SEQ ID NO: 9536 - protein, 7 aa, Artificial Sequence
  Description of Artificial Sequence: Synthetic peptide
RVVGPVN

SEQ ID NO: 9537 - protein, 7 aa, Artificial Sequence
  Description of Artificial Sequence: Synthetic peptide
RVVTVLE

SEQ ID NO: 9538 - protein, 7 aa, Artificial Sequence
  Description of Artificial Sequence: Synthetic peptide
RVYNMDG

SEQ ID NO: 9539 - protein, 7 aa, Artificial Sequence
  Description of Artificial Sequence: Synthetic peptide
RWADTVT

SEQ ID NO: 9540 - protein, 7 aa, Artificial Sequence
  Description of Artificial Sequence: Synthetic peptide
RWDDGAR

SEQ ID NO: 9541 - protein, 7 aa, Artificial Sequence
  Description of Artificial Sequence: Synthetic peptide
RWDVKAD

SEQ ID NO: 9542 - protein, 7 aa, Artificial Sequence
  Description of Artificial Sequence: Synthetic peptide
RWKAEPP

SEQ ID NO: 9543 - protein, 7 aa, Artificial Sequence
  Description of Artificial Sequence: Synthetic peptide
RWSEDGG

SEQ ID NO: 9544 - protein, 7 aa, Artificial Sequence
  Description of Artificial Sequence: Synthetic peptide
RWSPAVP

SEQ ID NO: 9545 - protein, 7 aa, Artificial Sequence
  Description of Artificial Sequence: Synthetic peptide
RYAEPYI

SEQ ID NO: 9546 - protein, 7 aa, Artificial Sequence
  Description of Artificial Sequence: Synthetic peptide
RYDLTAP

SEQ ID NO: 9547 - protein, 7 aa, Artificial Sequence
  Description of Artificial Sequence: Synthetic peptide
RYESNAH

SEQ ID NO: 9548 - protein, 7 aa, Artificial Sequence
  Description of Artificial Sequence: Synthetic peptide
RYGASNP

SEQ ID NO: 9549 - protein, 7 aa, Artificial Sequence
  Description of Artificial Sequence: Synthetic peptide
RYGGSIS

SEQ ID NO: 9550 - protein, 7 aa, Artificial Sequence
  Description of Artificial Sequence: Synthetic peptide
RYHDTGD

SEQ ID NO: 9551 - protein, 7 aa, Artificial Sequence
  Description of Artificial Sequence: Synthetic peptide
RYLDRTE

SEQ ID NO: 9552 - protein, 7 aa, Artificial Sequence
  Description of Artificial Sequence: Synthetic peptide
RYMEPSP

SEQ ID NO: 9553 - protein, 7 aa, Artificial Sequence
  Description of Artificial Sequence: Synthetic peptide
RYNEDEA

SEQ ID NO: 9554 - protein, 7 aa, Artificial Sequence
  Description of Artificial Sequence: Synthetic peptide
RYNETVS

SEQ ID NO: 9555 - protein, 7 aa, Artificial Sequence
  Description of Artificial Sequence: Synthetic peptide
RYNNQVP

SEQ ID NO: 9556 - protein, 7 aa, Artificial Sequence
  Description of Artificial Sequence: Synthetic peptide
RYNTAIS

SEQ ID NO: 9557 - protein, 7 aa, Artificial Sequence
  Description of Artificial Sequence: Synthetic peptide
RYPSQTS

SEQ ID NO: 9558 - protein, 7 aa, Artificial Sequence
  Description of Artificial Sequence: Synthetic peptide
RYSNNLP

SEQ ID NO: 9559 - protein, 7 aa, Artificial Sequence
  Description of Artificial Sequence: Synthetic peptide
RYSPGSP

SEQ ID NO: 9560 - protein, 7 aa, Artificial Sequence
  Description of Artificial Sequence: Synthetic peptide
RYTVADA

SEQ ID NO: 9561 - protein, 7 aa, Artificial Sequence
  Description of Artificial Sequence: Synthetic peptide
RYVDPLM

SEQ ID NO: 9562 - protein, 7 aa, Artificial Sequence
  Description of Artificial Sequence: Synthetic peptide
SAAHIDL

SEQ ID NO: 9563 - protein, 7 aa, Artificial Sequence
  Description of Artificial Sequence: Synthetic peptide
SAALLEP

SEQ ID NO: 9564 - protein, 7 aa, Artificial Sequence
  Description of Artificial Sequence: Synthetic peptide
SAALREG

SEQ ID NO: 9565 - protein, 7 aa, Artificial Sequence
  Description of Artificial Sequence: Synthetic peptide
SAARDTD

SEQ ID NO: 9566 - protein, 7 aa, Artificial Sequence
  Description of Artificial Sequence: Synthetic peptide
SAARMTA

SEQ ID NO: 9567 - protein, 7 aa, Artificial Sequence
  Description of Artificial Sequence: Synthetic peptide
SAASGHH

SEQ ID NO: 9568 - protein, 7 aa, Artificial Sequence
  Description of Artificial Sequence: Synthetic peptide
SAASKLL

SEQ ID NO: 9569 - protein, 7 aa, Artificial Sequence
  Description of Artificial Sequence: Synthetic peptide
SAASSMR

SEQ ID NO: 9570 - protein, 7 aa, Artificial Sequence
  Description of Artificial Sequence: Synthetic peptide
SAASTVF

SEQ ID NO: 9571 - protein, 7 aa, Artificial Sequence
  Description of Artificial Sequence: Synthetic peptide
SAAYDPK

SEQ ID NO: 9572 - protein, 7 aa, Artificial Sequence
  Description of Artificial Sequence: Synthetic peptide
SADFQRG

SEQ ID NO: 9573 - protein, 7 aa, Artificial Sequence
  Description of Artificial Sequence: Synthetic peptide
SADTMLI

SEQ ID NO: 9574 - protein, 7 aa, Artificial Sequence
  Description of Artificial Sequence: Synthetic peptide
SAEAHIT

SEQ ID NO: 9575 - protein, 7 aa, Artificial Sequence
  Description of Artificial Sequence: Synthetic peptide
SAEIEFL

SEQ ID NO: 9576 - protein, 7 aa, Artificial Sequence
  Description of Artificial Sequence: Synthetic peptide
SAESVPH

SEQ ID NO: 9577 - protein, 7 aa, Artificial Sequence
  Description of Artificial Sequence: Synthetic peptide
SAEYRSV

SEQ ID NO: 9578 - protein, 7 aa, Artificial Sequence
  Description of Artificial Sequence: Synthetic peptide
SAFGQHG

SEQ ID NO: 9579 - protein, 7 aa, Artificial Sequence
  Description of Artificial Sequence: Synthetic peptide
SAFLPHA

SEQ ID NO: 9580 - protein, 7 aa, Artificial Sequence
  Description of Artificial Sequence: Synthetic peptide
SAFLPTP

SEQ ID NO: 9581 - protein, 7 aa, Artificial Sequence
  Description of Artificial Sequence: Synthetic peptide
SAFSAGA

SEQ ID NO: 9582 - protein, 7 aa, Artificial Sequence
  Description of Artificial Sequence: Synthetic peptide
SAFTNYP

SEQ ID NO: 9583 - protein, 7 aa, Artificial Sequence
  Description of Artificial Sequence: Synthetic peptide
SAGERSL

SEQ ID NO: 9584 - protein, 7 aa, Artificial Sequence
  Description of Artificial Sequence: Synthetic peptide
SAGGERT

SEQ ID NO: 9585 - protein, 7 aa, Artificial Sequence
  Description of Artificial Sequence: Synthetic peptide
SAGGGMN

SEQ ID NO: 9586 - protein, 7 aa, Artificial Sequence
  Description of Artificial Sequence: Synthetic peptide
SAGKLPM

SEQ ID NO: 9587 - protein, 7 aa, Artificial Sequence
  Description of Artificial Sequence: Synthetic peptide
SAGLHAV

SEQ ID NO: 9588 - protein, 7 aa, Artificial Sequence
  Description of Artificial Sequence: Synthetic peptide
SAGPAPR

SEQ ID NO: 9589 - protein, 7 aa, Artificial Sequence
  Description of Artificial Sequence: Synthetic peptide
SAGQSQR

SEQ ID NO: 9590 - protein, 7 aa, Artificial Sequence
  Description of Artificial Sequence: Synthetic peptide
SAGRFET

SEQ ID NO: 9591 - protein, 7 aa, Artificial Sequence
  Description of Artificial Sequence: Synthetic peptide
SAGTAMI

SEQ ID NO: 9592 - protein, 7 aa, Artificial Sequence
  Description of Artificial Sequence: Synthetic peptide
SAGVHKS

SEQ ID NO: 9593 - protein, 7 aa, Artificial Sequence
  Description of Artificial Sequence: Synthetic peptide
SAHCPTP

SEQ ID NO: 9594 - protein, 7 aa, Artificial Sequence
  Description of Artificial Sequence: Synthetic peptide
SAHHSHM

SEQ ID NO: 9595 - protein, 7 aa, Artificial Sequence
  Description of Artificial Sequence: Synthetic peptide
SAHMSRA

SEQ ID NO: 9596 - protein, 7 aa, Artificial Sequence
  Description of Artificial Sequence: Synthetic peptide
SAHQLQT

SEQ ID NO: 9597 - protein, 7 aa, Artificial Sequence
  Description of Artificial Sequence: Synthetic peptide
SAHSPQM

SEQ ID NO: 9598 - protein, 7 aa, Artificial Sequence
  Description of Artificial Sequence: Synthetic peptide
SAHSTPH

SEQ ID NO: 9599 - protein, 7 aa, Artificial Sequence
  Description of Artificial Sequence: Synthetic peptide
SAICQSV

SEQ ID NO: 9600 - protein, 7 aa, Artificial Sequence
  Description of Artificial Sequence: Synthetic peptide
SAIMPSP

SEQ ID NO: 9601 - protein, 7 aa, Artificial Sequence
  Description of Artificial Sequence: Synthetic peptide
SAIMSRS

SEQ ID NO: 9602 - protein, 7 aa, Artificial Sequence
  Description of Artificial Sequence: Synthetic peptide
SAINRLP

SEQ ID NO: 9603 - protein, 7 aa, Artificial Sequence
  Description of Artificial Sequence: Synthetic peptide
SAISSMS

SEQ ID NO: 9604 - protein, 7 aa, Artificial Sequence
  Description of Artificial Sequence: Synthetic peptide
SAKCVQA

SEQ ID NO: 9605 - protein, 7 aa, Artificial Sequence
  Description of Artificial Sequence: Synthetic peptide
SAKHSAM

SEQ ID NO: 9606 - protein, 7 aa, Artificial Sequence
  Description of Artificial Sequence: Synthetic peptide
SAKSAFS

SEQ ID NO: 9607 - protein, 7 aa, Artificial Sequence
  Description of Artificial Sequence: Synthetic peptide
SAKSMVV

SEQ ID NO: 9608 - protein, 7 aa, Artificial Sequence
  Description of Artificial Sequence: Synthetic peptide
SAKTMIP

SEQ ID NO: 9609 - protein, 7 aa, Artificial Sequence
  Description of Artificial Sequence: Synthetic peptide
SAKTSES

SEQ ID NO: 9610 - protein, 7 aa, Artificial Sequence
  Description of Artificial Sequence: Synthetic peptide
SALAGLS

SEQ ID NO: 9611 - protein, 7 aa, Artificial Sequence
  Description of Artificial Sequence: Synthetic peptide
SALDLNH

SEQ ID NO: 9612 - protein, 7 aa, Artificial Sequence
  Description of Artificial Sequence: Synthetic peptide
SALDNIR

SEQ ID NO: 9613 - protein, 7 aa, Artificial Sequence
  Description of Artificial Sequence: Synthetic peptide
SALGLSV

SEQ ID NO: 9614 - protein, 7 aa, Artificial Sequence
  Description of Artificial Sequence: Synthetic peptide
SALGSRV

SEQ ID NO: 9615 - protein, 7 aa, Artificial Sequence
  Description of Artificial Sequence: Synthetic peptide
SALHLAA

SEQ ID NO: 9616 - protein, 7 aa, Artificial Sequence
  Description of Artificial Sequence: Synthetic peptide
SALKTDS

SEQ ID NO: 9617 - protein, 7 aa, Artificial Sequence
  Description of Artificial Sequence: Synthetic peptide
SALNKRI

SEQ ID NO: 9618 - protein, 7 aa, Artificial Sequence
  Description of Artificial Sequence: Synthetic peptide
SALPKPE

SEQ ID NO: 9619 - protein, 7 aa, Artificial Sequence
  Description of Artificial Sequence: Synthetic peptide
SALRLVS

SEQ ID NO: 9620 - protein, 7 aa, Artificial Sequence
  Description of Artificial Sequence: Synthetic peptide
SALRPDS

SEQ ID NO: 9621 - protein, 7 aa, Artificial Sequence
  Description of Artificial Sequence: Synthetic peptide
SALRSVT

SEQ ID NO: 9622 - protein, 7 aa, Artificial Sequence
  Description of Artificial Sequence: Synthetic peptide
SALRVPA

SEQ ID NO: 9623 - protein, 7 aa, Artificial Sequence
  Description of Artificial Sequence: Synthetic peptide
SALSTTG

SEQ ID NO: 9624 - protein, 7 aa, Artificial Sequence
  Description of Artificial Sequence: Synthetic peptide
SALTDKL

SEQ ID NO: 9625 - protein, 7 aa, Artificial Sequence
  Description of Artificial Sequence: Synthetic peptide
SALTHVS

SEQ ID NO: 9626 - protein, 7 aa, Artificial Sequence
  Description of Artificial Sequence: Synthetic peptide
SALTSSL

SEQ ID NO: 9627 - protein, 7 aa, Artificial Sequence
  Description of Artificial Sequence: Synthetic peptide
SAMHPML

SEQ ID NO: 9628 - protein, 7 aa, Artificial Sequence
  Description of Artificial Sequence: Synthetic peptide
SAMKHPS

SEQ ID NO: 9629 - protein, 7 aa, Artificial Sequence
  Description of Artificial Sequence: Synthetic peptide
SAMRPGS

SEQ ID NO: 9630 - protein, 7 aa, Artificial Sequence
  Description of Artificial Sequence: Synthetic peptide
SAMTKNL

SEQ ID NO: 9631 - protein, 7 aa, Artificial Sequence
  Description of Artificial Sequence: Synthetic peptide
SANGSSS

SEQ ID NO: 9632 - protein, 7 aa, Artificial Sequence
  Description of Artificial Sequence: Synthetic peptide
SANITVK

SEQ ID NO: 9633 - protein, 7 aa, Artificial Sequence
  Description of Artificial Sequence: Synthetic peptide
SANPHIT

SEQ ID NO: 9634 - protein, 7 aa, Artificial Sequence
  Description of Artificial Sequence: Synthetic peptide
SANSLPA

SEQ ID NO: 9635 - protein, 7 aa, Artificial Sequence
  Description of Artificial Sequence: Synthetic peptide
SANTARS

SEQ ID NO: 9636 - protein, 7 aa, Artificial Sequence
  Description of Artificial Sequence: Synthetic peptide
SAPEWMP

SEQ ID NO: 9637 - protein, 7 aa, Artificial Sequence
  Description of Artificial Sequence: Synthetic peptide
SAPFATE

SEQ ID NO: 9638 - protein, 7 aa, Artificial Sequence
  Description of Artificial Sequence: Synthetic peptide
SAPGASF

SEQ ID NO: 9639 - protein, 7 aa, Artificial Sequence
  Description of Artificial Sequence: Synthetic peptide
SAPHTHL

SEQ ID NO: 9640 - protein, 7 aa, Artificial Sequence
  Description of Artificial Sequence: Synthetic peptide
SAPHTIP

SEQ ID NO: 9641 - protein, 7 aa, Artificial Sequence
  Description of Artificial Sequence: Synthetic peptide
SAPLIGS

SEQ ID NO: 9642 - protein, 7 aa, Artificial Sequence
  Description of Artificial Sequence: Synthetic peptide
SAPMTCA

SEQ ID NO: 9643 - protein, 7 aa, Artificial Sequence
  Description of Artificial Sequence: Synthetic peptide
SAPNSSS

SEQ ID NO: 9644 - protein, 7 aa, Artificial Sequence
  Description of Artificial Sequence: Synthetic peptide
SAPVRSP

SEQ ID NO: 9645 - protein, 7 aa, Artificial Sequence
  Description of Artificial Sequence: Synthetic peptide
SAQGARP

SEQ ID NO: 9646 - protein, 7 aa, Artificial Sequence
  Description of Artificial Sequence: Synthetic peptide
SAQLSLP

SEQ ID NO: 9647 - protein, 7 aa, Artificial Sequence
  Description of Artificial Sequence: Synthetic peptide
SARDAHS

SEQ ID NO: 9648 - protein, 7 aa, Artificial Sequence
  Description of Artificial Sequence: Synthetic peptide
SARDHRP

SEQ ID NO: 9649 - protein, 7 aa, Artificial Sequence
  Description of Artificial Sequence: Synthetic peptide
SARGSDP

SEQ ID NO: 9650 - protein, 7 aa, Artificial Sequence
  Description of Artificial Sequence: Synthetic peptide
SARGVAT

SEQ ID NO: 9651 - protein, 7 aa, Artificial Sequence
  Description of Artificial Sequence: Synthetic peptide
SARIFKD

SEQ ID NO: 9652 - protein, 7 aa, Artificial Sequence
  Description of Artificial Sequence: Synthetic peptide
SARMALG

SEQ ID NO: 9653 - protein, 7 aa, Artificial Sequence
  Description of Artificial Sequence: Synthetic peptide
SARQVSG

SEQ ID NO: 9654 - protein, 7 aa, Artificial Sequence
  Description of Artificial Sequence: Synthetic peptide
SARSDPA

SEQ ID NO: 9655 - protein, 7 aa, Artificial Sequence
  Description of Artificial Sequence: Synthetic peptide
SARTAGP

SEQ ID NO: 9656 - protein, 7 aa, Artificial Sequence
  Description of Artificial Sequence: Synthetic peptide
SARTDRT

SEQ ID NO: 9657 - protein, 7 aa, Artificial Sequence
  Description of Artificial Sequence: Synthetic peptide
SARTVDM

SEQ ID NO: 9658 - protein, 7 aa, Artificial Sequence
  Description of Artificial Sequence: Synthetic peptide
SARVFPA

SEQ ID NO: 9659 - protein, 7 aa, Artificial Sequence
  Description of Artificial Sequence: Synthetic peptide
SARVNIG

SEQ ID NO: 9660 - protein, 7 aa, Artificial Sequence
  Description of Artificial Sequence: Synthetic peptide
SARVSNS

SEQ ID NO: 9661 - protein, 7 aa, Artificial Sequence
  Description of Artificial Sequence: Synthetic peptide
SASALVL

SEQ ID NO: 9662 - protein, 7 aa, Artificial Sequence
  Description of Artificial Sequence: Synthetic peptide
SASERFR

SEQ ID NO: 9663 - protein, 7 aa, Artificial Sequence
  Description of Artificial Sequence: Synthetic peptide
SASESSM

SEQ ID NO: 9664 - protein, 7 aa, Artificial Sequence
  Description of Artificial Sequence: Synthetic peptide
SASIQVM

SEQ ID NO: 9665 - protein, 7 aa, Artificial Sequence
  Description of Artificial Sequence: Synthetic peptide
SASKPTS

SEQ ID NO: 9666 - protein, 7 aa, Artificial Sequence
  Description of Artificial Sequence: Synthetic peptide
SASLRLP

SEQ ID NO: 9667 - protein, 7 aa, Artificial Sequence
  Description of Artificial Sequence: Synthetic peptide
SASMRAL

SEQ ID NO: 9668 - protein, 7 aa, Artificial Sequence
  Description of Artificial Sequence: Synthetic peptide
SASNSVG

SEQ ID NO: 9669 - protein, 7 aa, Artificial Sequence
  Description of Artificial Sequence: Synthetic peptide
SASPAGH

SEQ ID NO: 9670 - protein, 7 aa, Artificial Sequence
  Description of Artificial Sequence: Synthetic peptide
SASPQRT

SEQ ID NO: 9671 - protein, 7 aa, Artificial Sequence
  Description of Artificial Sequence: Synthetic peptide
SASRQIP

SEQ ID NO: 9672 - protein, 7 aa, Artificial Sequence
  Description of Artificial Sequence: Synthetic peptide
SASSAAQ

SEQ ID NO: 9673 - protein, 7 aa, Artificial Sequence
  Description of Artificial Sequence: Synthetic peptide
SASSKTG

SEQ ID NO: 9674 - protein, 7 aa, Artificial Sequence
  Description of Artificial Sequence: Synthetic peptide
SASTPKH

SEQ ID NO: 9675 - protein, 7 aa, Artificial Sequence
  Description of Artificial Sequence: Synthetic peptide
SASTQIS

SEQ ID NO: 9676 - protein, 7 aa, Artificial Sequence
  Description of Artificial Sequence: Synthetic peptide
SASVRGN

SEQ ID NO: 9677 - protein, 7 aa, Artificial Sequence
  Description of Artificial Sequence: Synthetic peptide
SASVTYS

SEQ ID NO: 9678 - protein, 7 aa, Artificial Sequence
  Description of Artificial Sequence: Synthetic peptide
SATFDTT

SEQ ID NO: 9679 - protein, 7 aa, Artificial Sequence
  Description of Artificial Sequence: Synthetic peptide
SATLSAL

SEQ ID NO: 9680 - protein, 7 aa, Artificial Sequence
  Description of Artificial Sequence: Synthetic peptide
SATPHRA

SEQ ID NO: 9681 - protein, 7 aa, Artificial Sequence
  Description of Artificial Sequence: Synthetic peptide
SATPISR

SEQ ID NO: 9682 - protein, 7 aa, Artificial Sequence
  Description of Artificial Sequence: Synthetic peptide
SATQHTG

SEQ ID NO: 9683 - protein, 7 aa, Artificial Sequence
  Description of Artificial Sequence: Synthetic peptide
SATQRIV

SEQ ID NO: 9684 - protein, 7 aa, Artificial Sequence
  Description of Artificial Sequence: Synthetic peptide
SATSPDR

SEQ ID NO: 9685 - protein, 7 aa, Artificial Sequence
  Description of Artificial Sequence: Synthetic peptide
SATVPRP

SEQ ID NO: 9686 - protein, 7 aa, Artificial Sequence
  Description of Artificial Sequence: Synthetic peptide
SAVAILT

SEQ ID NO: 9687 - protein, 7 aa, Artificial Sequence
  Description of Artificial Sequence: Synthetic peptide
SAVGAHS

SEQ ID NO: 9688 - protein, 7 aa, Artificial Sequence
  Description of Artificial Sequence: Synthetic peptide
SAVGNAR

SEQ ID NO: 9689 - protein, 7 aa, Artificial Sequence
  Description of Artificial Sequence: Synthetic peptide
SAVGRST

SEQ ID NO: 9690 - protein, 7 aa, Artificial Sequence
  Description of Artificial Sequence: Synthetic peptide
SAVGTSY

SEQ ID NO: 9691 - protein, 7 aa, Artificial Sequence
  Description of Artificial Sequence: Synthetic peptide
SAVHRMD

SEQ ID NO: 9692 - protein, 7 aa, Artificial Sequence
  Description of Artificial Sequence: Synthetic peptide
SAVIRAS

SEQ ID NO: 9693 - protein, 7 aa, Artificial Sequence
  Description of Artificial Sequence: Synthetic peptide
SAVLPQR

SEQ ID NO: 9694 - protein, 7 aa, Artificial Sequence
  Description of Artificial Sequence: Synthetic peptide
SAVNEAR

SEQ ID NO: 9695 - protein, 7 aa, Artificial Sequence
  Description of Artificial Sequence: Synthetic peptide
SAVNSRM

SEQ ID NO: 9696 - protein, 7 aa, Artificial Sequence
  Description of Artificial Sequence: Synthetic peptide
SAVRMAT

SEQ ID NO: 9697 - protein, 7 aa, Artificial Sequence
  Description of Artificial Sequence: Synthetic peptide
SAVRPLP

SEQ ID NO: 9698 - protein, 7 aa, Artificial Sequence
  Description of Artificial Sequence: Synthetic peptide
SAVTGAW

SEQ ID NO: 9699 - protein, 7 aa, Artificial Sequence
  Description of Artificial Sequence: Synthetic peptide
SAVTSHM

SEQ ID NO: 9700 - protein, 7 aa, Artificial Sequence
  Description of Artificial Sequence: Synthetic peptide
SAVYQGH

SEQ ID NO: 9701 - protein, 7 aa, Artificial Sequence
  Description of Artificial Sequence: Synthetic peptide
SAWSSTG

SEQ ID NO: 9702 - protein, 7 aa, Artificial Sequence
  Description of Artificial Sequence: Synthetic peptide
SAYASSS

SEQ ID NO: 9703 - protein, 7 aa, Artificial Sequence
  Description of Artificial Sequence: Synthetic peptide
SAYQNMA

SEQ ID NO: 9704 - protein, 7 aa, Artificial Sequence
  Description of Artificial Sequence: Synthetic peptide
SAYVDTR

SEQ ID NO: 9705 - protein, 7 aa, Artificial Sequence
  Description of Artificial Sequence: Synthetic peptide
SCELLPA

SEQ ID NO: 9706 - protein, 7 aa, Artificial Sequence
  Description of Artificial Sequence: Synthetic peptide
SCLNGVP

SEQ ID NO: 9707 - protein, 7 aa, Artificial Sequence
  Description of Artificial Sequence: Synthetic peptide
SDAMTIA

SEQ ID NO: 9708 - protein, 7 aa, Artificial Sequence
  Description of Artificial Sequence: Synthetic peptide
SDANGSS

SEQ ID NO: 9709 - protein, 7 aa, Artificial Sequence
  Description of Artificial Sequence: Synthetic peptide
SDANVGM

SEQ ID NO: 9710 - protein, 7 aa, Artificial Sequence
  Description of Artificial Sequence: Synthetic peptide
SDAPPYR

SEQ ID NO: 9711 - protein, 7 aa, Artificial Sequence
  Description of Artificial Sequence: Synthetic peptide
SDCITHS

SEQ ID NO: 9712 - protein, 7 aa, Artificial Sequence
  Description of Artificial Sequence: Synthetic peptide
SDDGPSA

SEQ ID NO: 9713 - protein, 7 aa, Artificial Sequence
  Description of Artificial Sequence: Synthetic peptide
SDDLVPK

SEQ ID NO: 9714 - protein, 7 aa, Artificial Sequence
  Description of Artificial Sequence: Synthetic peptide
SDDRENC

SEQ ID NO: 9715 - protein, 7 aa, Artificial Sequence
  Description of Artificial Sequence: Synthetic peptide
SDDSKNT

SEQ ID NO: 9716 - protein, 7 aa, Artificial Sequence
  Description of Artificial Sequence: Synthetic peptide
SDESGMP

SEQ ID NO: 9717 - protein, 7 aa, Artificial Sequence
  Description of Artificial Sequence: Synthetic peptide
SDGPRLS

SEQ ID NO: 9718 - protein, 7 aa, Artificial Sequence
  Description of Artificial Sequence: Synthetic peptide
SDGSSLA

SEQ ID NO: 9719 - protein, 7 aa, Artificial Sequence
  Description of Artificial Sequence: Synthetic peptide
SDHRYLI

SEQ ID NO: 9720 - protein, 7 aa, Artificial Sequence
  Description of Artificial Sequence: Synthetic peptide
SDHSSRT

SEQ ID NO: 9721 - protein, 7 aa, Artificial Sequence
  Description of Artificial Sequence: Synthetic peptide
SDIPRPS

SEQ ID NO: 9722 - protein, 7 aa, Artificial Sequence
  Description of Artificial Sequence: Synthetic peptide
SDIVASP

SEQ ID NO: 9723 - protein, 7 aa, Artificial Sequence
  Description of Artificial Sequence: Synthetic peptide
SDKFFPS

SEQ ID NO: 9724 - protein, 7 aa, Artificial Sequence
  Description of Artificial Sequence: Synthetic peptide
SDLNKLA

SEQ ID NO: 9725 - protein, 7 aa, Artificial Sequence
  Description of Artificial Sequence: Synthetic peptide
SDLPMLV

SEQ ID NO: 9726 - protein, 7 aa, Artificial Sequence
  Description of Artificial Sequence: Synthetic peptide
SDLRMVA

SEQ ID NO: 9727 - protein, 7 aa, Artificial Sequence
  Description of Artificial Sequence: Synthetic peptide
SDLSRPL

SEQ ID NO: 9728 - protein, 7 aa, Artificial Sequence
  Description of Artificial Sequence: Synthetic peptide
SDMATKL

SEQ ID NO: 9729 - protein, 7 aa, Artificial Sequence
  Description of Artificial Sequence: Synthetic peptide
SDMPVPR

SEQ ID NO: 9730 - protein, 7 aa, Artificial Sequence
  Description of Artificial Sequence: Synthetic peptide
SDMTARG

SEQ ID NO: 9731 - protein, 7 aa, Artificial Sequence
  Description of Artificial Sequence: Synthetic peptide
SDNYERT

SEQ ID NO: 9732 - protein, 7 aa, Artificial Sequence
  Description of Artificial Sequence: Synthetic peptide
SDPGRGA

SEQ ID NO: 9733 - protein, 7 aa, Artificial Sequence
  Description of Artificial Sequence: Synthetic peptide
SDPKYSV

SEQ ID NO: 9734 - protein, 7 aa, Artificial Sequence
  Description of Artificial Sequence: Synthetic peptide
SDPNTYI

SEQ ID NO: 9735 - protein, 7 aa, Artificial Sequence
  Description of Artificial Sequence: Synthetic peptide
SDPRRTS

SEQ ID NO: 9736 - protein, 7 aa, Artificial Sequence
  Description of Artificial Sequence: Synthetic peptide
SDPSLPV

SEQ ID NO: 9737 - protein, 7 aa, Artificial Sequence
  Description of Artificial Sequence: Synthetic peptide
SDPVLGA

SEQ ID NO: 9738 - protein, 7 aa, Artificial Sequence
  Description of Artificial Sequence: Synthetic peptide
SDQPTKA

SEQ ID NO: 9739 - protein, 7 aa, Artificial Sequence
  Description of Artificial Sequence: Synthetic peptide
SDQRILP

SEQ ID NO: 9740 - protein, 7 aa, Artificial Sequence
  Description of Artificial Sequence: Synthetic peptide
SDQSLTY

SEQ ID NO: 9741 - protein, 7 aa, Artificial Sequence
  Description of Artificial Sequence: Synthetic peptide
SDQVKSS

SEQ ID NO: 9742 - protein, 7 aa, Artificial Sequence
  Description of Artificial Sequence: Synthetic peptide
SDRESRI

SEQ ID NO: 9743 - protein, 7 aa, Artificial Sequence
  Description of Artificial Sequence: Synthetic peptide
SDREVDP

SEQ ID NO: 9744 - protein, 7 aa, Artificial Sequence
  Description of Artificial Sequence: Synthetic peptide
SDRGIRD

SEQ ID NO: 9745 - protein, 7 aa, Artificial Sequence
  Description of Artificial Sequence: Synthetic peptide
SDRGYPK

SEQ ID NO: 9746 - protein, 7 aa, Artificial Sequence
  Description of Artificial Sequence: Synthetic peptide
SDRLCDE

SEQ ID NO: 9747 - protein, 7 aa, Artificial Sequence
  Description of Artificial Sequence: Synthetic peptide
SDRLQTV

SEQ ID NO: 9748 - protein, 7 aa, Artificial Sequence
  Description of Artificial Sequence: Synthetic peptide
SDRMMTF

SEQ ID NO: 9749 - protein, 7 aa, Artificial Sequence
  Description of Artificial Sequence: Synthetic peptide
SDRMSSP

SEQ ID NO: 9750 - protein, 7 aa, Artificial Sequence
  Description of Artificial Sequence: Synthetic peptide
SDRPALL

SEQ ID NO: 9751 - protein, 7 aa, Artificial Sequence
  Description of Artificial Sequence: Synthetic peptide
SDRPGLY

SEQ ID NO: 9752 - protein, 7 aa, Artificial Sequence
  Description of Artificial Sequence: Synthetic peptide
SDRQPFT

SEQ ID NO: 9753 - protein, 7 aa, Artificial Sequence
  Description of Artificial Sequence: Synthetic peptide
SDRRAMS

SEQ ID NO: 9754 - protein, 7 aa, Artificial Sequence
  Description of Artificial Sequence: Synthetic peptide
SDRRNMA

SEQ ID NO: 9755 - protein, 7 aa, Artificial Sequence
  Description of Artificial Sequence: Synthetic peptide
SDRSATS

SEQ ID NO: 9756 - protein, 7 aa, Artificial Sequence
  Description of Artificial Sequence: Synthetic peptide
SDRSDKP

SEQ ID NO: 9757 - protein, 7 aa, Artificial Sequence
  Description of Artificial Sequence: Synthetic peptide
SDSAHAP

SEQ ID NO: 9758 - protein, 7 aa, Artificial Sequence
  Description of Artificial Sequence: Synthetic peptide
SDSGQSA

SEQ ID NO: 9759 - protein, 7 aa, Artificial Sequence
  Description of Artificial Sequence: Synthetic peptide
SDSKVGP

SEQ ID NO: 9760 - protein, 7 aa, Artificial Sequence
  Description of Artificial Sequence: Synthetic peptide
SDSRLGA

SEQ ID NO: 9761 - protein, 7 aa, Artificial Sequence
  Description of Artificial Sequence: Synthetic peptide
SDSRREY

SEQ ID NO: 9762 - protein, 7 aa, Artificial Sequence
  Description of Artificial Sequence: Synthetic peptide
SDSYGSR

SEQ ID NO: 9763 - protein, 7 aa, Artificial Sequence
  Description of Artificial Sequence: Synthetic peptide
SDSYPRI

SEQ ID NO: 9764 - protein, 7 aa, Artificial Sequence
  Description of Artificial Sequence: Synthetic peptide
SDTKLYP

SEQ ID NO: 9765 - protein, 7 aa, Artificial Sequence
  Description of Artificial Sequence: Synthetic peptide
SDTMRAE

SEQ ID NO: 9766 - protein, 7 aa, Artificial Sequence
  Description of Artificial Sequence: Synthetic peptide
SDTRLTR

SEQ ID NO: 9767 - protein, 7 aa, Artificial Sequence
  Description of Artificial Sequence: Synthetic peptide
SDTRNGA

SEQ ID NO: 9768 - protein, 7 aa, Artificial Sequence
  Description of Artificial Sequence: Synthetic peptide
SDTTLLD

SEQ ID NO: 9769 - protein, 7 aa, Artificial Sequence
  Description of Artificial Sequence: Synthetic peptide
SDTYMRL

SEQ ID NO: 9770 - protein, 7 aa, Artificial Sequence
  Description of Artificial Sequence: Synthetic peptide
SDVAARS

SEQ ID NO: 9771 - protein, 7 aa, Artificial Sequence
  Description of Artificial Sequence: Synthetic peptide
SDVAMRA

SEQ ID NO: 9772 - protein, 7 aa, Artificial Sequence
  Description of Artificial Sequence: Synthetic peptide
SDVNQGL

SEQ ID NO: 9773 - protein, 7 aa, Artificial Sequence
  Description of Artificial Sequence: Synthetic peptide
SEAFRPA

SEQ ID NO: 9774 - protein, 7 aa, Artificial Sequence
  Description of Artificial Sequence: Synthetic peptide
SEAPNDR

SEQ ID NO: 9775 - protein, 7 aa, Artificial Sequence
  Description of Artificial Sequence: Synthetic peptide
SEASASR

SEQ ID NO: 9776 - protein, 7 aa, Artificial Sequence
  Description of Artificial Sequence: Synthetic peptide
SEAWLAS

SEQ ID NO: 9777 - protein, 7 aa, Artificial Sequence
  Description of Artificial Sequence: Synthetic peptide
SEDGDIK

SEQ ID NO: 9778 - protein, 7 aa, Artificial Sequence
  Description of Artificial Sequence: Synthetic peptide
SEDRSRT

SEQ ID NO: 9779 - protein, 7 aa, Artificial Sequence
  Description of Artificial Sequence: Synthetic peptide
SEESWGY

SEQ ID NO: 9780 - protein, 7 aa, Artificial Sequence
  Description of Artificial Sequence: Synthetic peptide
SEFVRMP

SEQ ID NO: 9781 - protein, 7 aa, Artificial Sequence
  Description of Artificial Sequence: Synthetic peptide
SEGDHAL

SEQ ID NO: 9782 - protein, 7 aa, Artificial Sequence
  Description of Artificial Sequence: Synthetic peptide
SEGFNAM

SEQ ID NO: 9783 - protein, 7 aa, Artificial Sequence
  Description of Artificial Sequence: Synthetic peptide
SEGHRGP

SEQ ID NO: 9784 - protein, 7 aa, Artificial Sequence
  Description of Artificial Sequence: Synthetic peptide
SEGTVRE

SEQ ID NO: 9785 - protein, 7 aa, Artificial Sequence
  Description of Artificial Sequence: Synthetic peptide
SEIHRLP

SEQ ID NO: 9786 - protein, 7 aa, Artificial Sequence
  Description of Artificial Sequence: Synthetic peptide
SEINRPE

SEQ ID NO: 9787 - protein, 7 aa, Artificial Sequence
  Description of Artificial Sequence: Synthetic peptide
SEITLPL

SEQ ID NO: 9788 - protein, 7 aa, Artificial Sequence
  Description of Artificial Sequence: Synthetic peptide
SEKSNES

SEQ ID NO: 9789 - protein, 7 aa, Artificial Sequence
  Description of Artificial Sequence: Synthetic peptide
SEKYAAM

SEQ ID NO: 9790 - protein, 7 aa, Artificial Sequence
  Description of Artificial Sequence: Synthetic peptide
SELEART

SEQ ID NO: 9791 - protein, 7 aa, Artificial Sequence
  Description of Artificial Sequence: Synthetic peptide
SELHGLL

SEQ ID NO: 9792 - protein, 7 aa, Artificial Sequence
  Description of Artificial Sequence: Synthetic peptide
SELKTRP

SEQ ID NO: 9793 - protein, 7 aa, Artificial Sequence
  Description of Artificial Sequence: Synthetic peptide
SELRSVG

SEQ ID NO: 9794 - protein, 7 aa, Artificial Sequence
  Description of Artificial Sequence: Synthetic peptide
SEMDLRS

SEQ ID NO: 9795 - protein, 7 aa, Artificial Sequence
  Description of Artificial Sequence: Synthetic peptide
SENQMRS

SEQ ID NO: 9796 - protein, 7 aa, Artificial Sequence
  Description of Artificial Sequence: Synthetic peptide
SENTSDH

SEQ ID NO: 9797 - protein, 7 aa, Artificial Sequence
  Description of Artificial Sequence: Synthetic peptide
SEPIRTV

SEQ ID NO: 9798 - protein, 7 aa, Artificial Sequence
  Description of Artificial Sequence: Synthetic peptide
SEPRRTP

SEQ ID NO: 9799 - protein, 7 aa, Artificial Sequence
  Description of Artificial Sequence: Synthetic peptide
SEPRSHP

SEQ ID NO: 9800 - protein, 7 aa, Artificial Sequence
  Description of Artificial Sequence: Synthetic peptide
SEPSDYV

SEQ ID NO: 9801 - protein, 7 aa, Artificial Sequence
  Description of Artificial Sequence: Synthetic peptide
SEPSLSS

SEQ ID NO: 9802 - protein, 7 aa, Artificial Sequence
  Description of Artificial Sequence: Synthetic peptide
SEPTARN

SEQ ID NO: 9803 - protein, 7 aa, Artificial Sequence
  Description of Artificial Sequence: Synthetic peptide
SEPTMIV

SEQ ID NO: 9804 - protein, 7 aa, Artificial Sequence
  Description of Artificial Sequence: Synthetic peptide
SEPYGRL

SEQ ID NO: 9805 - protein, 7 aa, Artificial Sequence
  Description of Artificial Sequence: Synthetic peptide
SEPYHAA

SEQ ID NO: 9806 - protein, 7 aa, Artificial Sequence
  Description of Artificial Sequence: Synthetic peptide
SEQSRLL

SEQ ID NO: 9807 - protein, 7 aa, Artificial Sequence
  Description of Artificial Sequence: Synthetic peptide
SERFFNG

SEQ ID NO: 9808 - protein, 7 aa, Artificial Sequence
  Description of Artificial Sequence: Synthetic peptide
SERHACS

SEQ ID NO: 9809 - protein, 7 aa, Artificial Sequence
  Description of Artificial Sequence: Synthetic peptide
SERPAAA

SEQ ID NO: 9810 - protein, 7 aa, Artificial Sequence
  Description of Artificial Sequence: Synthetic peptide
SERPMPK

SEQ ID NO: 9811 - protein, 7 aa, Artificial Sequence
  Description of Artificial Sequence: Synthetic peptide
SERTLIM

SEQ ID NO: 9812 - protein, 7 aa, Artificial Sequence
  Description of Artificial Sequence: Synthetic peptide
SERVAAH

SEQ ID NO: 9813 - protein, 7 aa, Artificial Sequence
  Description of Artificial Sequence: Synthetic peptide
SERVEKH

SEQ ID NO: 9814 - protein, 7 aa, Artificial Sequence
  Description of Artificial Sequence: Synthetic peptide
SESSSQN

SEQ ID NO: 9815 - protein, 7 aa, Artificial Sequence
  Description of Artificial Sequence: Synthetic peptide
SETTSRH

SEQ ID NO: 9816 - protein, 7 aa, Artificial Sequence
  Description of Artificial Sequence: Synthetic peptide
SEVGSAT

SEQ ID NO: 9817 - protein, 7 aa, Artificial Sequence
  Description of Artificial Sequence: Synthetic peptide
SEVNLPS

SEQ ID NO: 9818 - protein, 7 aa, Artificial Sequence
  Description of Artificial Sequence: Synthetic peptide
SEVRATA

SEQ ID NO: 9819 - protein, 7 aa, Artificial Sequence
  Description of Artificial Sequence: Synthetic peptide
SEVSPRG

SEQ ID NO: 9820 - protein, 7 aa, Artificial Sequence
  Description of Artificial Sequence: Synthetic peptide
SEWKVEH

SEQ ID NO: 9821 - protein, 7 aa, Artificial Sequence
  Description of Artificial Sequence: Synthetic peptide
SEYYHSA

SEQ ID NO: 9822 - protein, 7 aa, Artificial Sequence
  Description of Artificial Sequence: Synthetic peptide
SFAPAHD

SEQ ID NO: 9823 - protein, 7 aa, Artificial Sequence
  Description of Artificial Sequence: Synthetic peptide
SFASFPG

SEQ ID NO: 9824 - protein, 7 aa, Artificial Sequence
  Description of Artificial Sequence: Synthetic peptide
SFDDGGP

SEQ ID NO: 9825 - protein, 7 aa, Artificial Sequence
  Description of Artificial Sequence: Synthetic peptide
SFDGVPF

SEQ ID NO: 9826 - protein, 7 aa, Artificial Sequence
  Description of Artificial Sequence: Synthetic peptide
SFDHTLG

SEQ ID NO: 9827 - protein, 7 aa, Artificial Sequence
  Description of Artificial Sequence: Synthetic peptide
SFDKFAE

SEQ ID NO: 9828 - protein, 7 aa, Artificial Sequence
  Description of Artificial Sequence: Synthetic peptide
SFDMALK

SEQ ID NO: 9829 - protein, 7 aa, Artificial Sequence
  Description of Artificial Sequence: Synthetic peptide
SFDSNRT

SEQ ID NO: 9830 - protein, 7 aa, Artificial Sequence
  Description of Artificial Sequence: Synthetic peptide
SFESKMH

SEQ ID NO: 9831 - protein, 7 aa, Artificial Sequence
  Description of Artificial Sequence: Synthetic peptide
SFETIGR

SEQ ID NO: 9832 - protein, 7 aa, Artificial Sequence
  Description of Artificial Sequence: Synthetic peptide
SFETWAP

SEQ ID NO: 9833 - protein, 7 aa, Artificial Sequence
  Description of Artificial Sequence: Synthetic peptide
SFGMKPS

SEQ ID NO: 9834 - protein, 7 aa, Artificial Sequence
  Description of Artificial Sequence: Synthetic peptide
SFGNGTV

SEQ ID NO: 9835 - protein, 7 aa, Artificial Sequence
  Description of Artificial Sequence: Synthetic peptide
SFGSGPS

SEQ ID NO: 9836 - protein, 7 aa, Artificial Sequence
  Description of Artificial Sequence: Synthetic peptide
SFHEATN

SEQ ID NO: 9837 - protein, 7 aa, Artificial Sequence
  Description of Artificial Sequence: Synthetic peptide
SFITDAP

SEQ ID NO: 9838 - protein, 7 aa, Artificial Sequence
  Description of Artificial Sequence: Synthetic peptide
SFKDHYA

SEQ ID NO: 9839 - protein, 7 aa, Artificial Sequence
  Description of Artificial Sequence: Synthetic peptide
SFKSTNL

SEQ ID NO: 9840 - protein, 7 aa, Artificial Sequence
  Description of Artificial Sequence: Synthetic peptide
SFKTGSA

SEQ ID NO: 9841 - protein, 7 aa, Artificial Sequence
  Description of Artificial Sequence: Synthetic peptide
SFMPQLE

SEQ ID NO: 9842 - protein, 7 aa, Artificial Sequence
  Description of Artificial Sequence: Synthetic peptide
SFNAGAS

SEQ ID NO: 9843 - protein, 7 aa, Artificial Sequence
  Description of Artificial Sequence: Synthetic peptide
SFPDRPL

SEQ ID NO: 9844 - protein, 7 aa, Artificial Sequence
  Description of Artificial Sequence: Synthetic peptide
SFPGERV

SEQ ID NO: 9845 - protein, 7 aa, Artificial Sequence
  Description of Artificial Sequence: Synthetic peptide
SFQGART

SEQ ID NO: 9846 - protein, 7 aa, Artificial Sequence
  Description of Artificial Sequence: Synthetic peptide
SFQSHGD

SEQ ID NO: 9847 - protein, 7 aa, Artificial Sequence
  Description of Artificial Sequence: Synthetic peptide
SFRGGIS

SEQ ID NO: 9848 - protein, 7 aa, Artificial Sequence
  Description of Artificial Sequence: Synthetic peptide
SFRQASC

SEQ ID NO: 9849 - protein, 7 aa, Artificial Sequence
  Description of Artificial Sequence: Synthetic peptide
SFRQPQS

SEQ ID NO: 9850 - protein, 7 aa, Artificial Sequence
  Description of Artificial Sequence: Synthetic peptide
SFSDPQN

SEQ ID NO: 9851 - protein, 7 aa, Artificial Sequence
  Description of Artificial Sequence: Synthetic peptide
SFSGPKS

SEQ ID NO: 9852 - protein, 7 aa, Artificial Sequence
  Description of Artificial Sequence: Synthetic peptide
SFSNPSQ

SEQ ID NO: 9853 - protein, 7 aa, Artificial Sequence
  Description of Artificial Sequence: Synthetic peptide
SFSRATS

SEQ ID NO: 9854 - protein, 7 aa, Artificial Sequence
  Description of Artificial Sequence: Synthetic peptide
SFSSTAS

SEQ ID NO: 9855 - protein, 7 aa, Artificial Sequence
  Description of Artificial Sequence: Synthetic peptide
SFTGSVA

SEQ ID NO: 9856 - protein, 7 aa, Artificial Sequence
  Description of Artificial Sequence: Synthetic peptide
SFTGSVP

SEQ ID NO: 9857 - protein, 7 aa, Artificial Sequence
  Description of Artificial Sequence: Synthetic peptide
SFTQALE

SEQ ID NO: 9858 - protein, 7 aa, Artificial Sequence
  Description of Artificial Sequence: Synthetic peptide
SFTRQEA

SEQ ID NO: 9859 - protein, 7 aa, Artificial Sequence
  Description of Artificial Sequence: Synthetic peptide
SFTTGGV

SEQ ID NO: 9860 - protein, 7 aa, Artificial Sequence
  Description of Artificial Sequence: Synthetic peptide
SFTTQAT

SEQ ID NO: 9861 - protein, 7 aa, Artificial Sequence
  Description of Artificial Sequence: Synthetic peptide
SFVDRAG

SEQ ID NO: 9862 - protein, 7 aa, Artificial Sequence
  Description of Artificial Sequence: Synthetic peptide
SFVQTTP

SEQ ID NO: 9863 - protein, 7 aa, Artificial Sequence
  Description of Artificial Sequence: Synthetic peptide
SFVRTST

SEQ ID NO: 9864 - protein, 7 aa, Artificial Sequence
  Description of Artificial Sequence: Synthetic peptide
SGAAPTY

SEQ ID NO: 9865 - protein, 7 aa, Artificial Sequence
  Description of Artificial Sequence: Synthetic peptide
SGAFHLS

SEQ ID NO: 9866 - protein, 7 aa, Artificial Sequence
  Description of Artificial Sequence: Synthetic peptide
SGAQPMF

SEQ ID NO: 9867 - protein, 7 aa, Artificial Sequence
  Description of Artificial Sequence: Synthetic peptide
SGAQVPS

SEQ ID NO: 9868 - protein, 7 aa, Artificial Sequence
  Description of Artificial Sequence: Synthetic peptide
SGASVIA

SEQ ID NO: 9869 - protein, 7 aa, Artificial Sequence
  Description of Artificial Sequence: Synthetic peptide
SGATHPY

SEQ ID NO: 9870 - protein, 7 aa, Artificial Sequence
  Description of Artificial Sequence: Synthetic peptide
SGAVSGL

SEQ ID NO: 9871 - protein, 7 aa, Artificial Sequence
  Description of Artificial Sequence: Synthetic peptide
SGAYSSS

SEQ ID NO: 9872 - protein, 7 aa, Artificial Sequence
  Description of Artificial Sequence: Synthetic peptide
SGCSELP

SEQ ID NO: 9873 - protein, 7 aa, Artificial Sequence
  Description of Artificial Sequence: Synthetic peptide
SGDPKDI

SEQ ID NO: 9874 - protein, 7 aa, Artificial Sequence
  Description of Artificial Sequence: Synthetic peptide
SGDQGSR

SEQ ID NO: 9875 - protein, 7 aa, Artificial Sequence
  Description of Artificial Sequence: Synthetic peptide
SGEAKSG

SEQ ID NO: 9876 - protein, 7 aa, Artificial Sequence
  Description of Artificial Sequence: Synthetic peptide
SGELGGL

SEQ ID NO: 9877 - protein, 7 aa, Artificial Sequence
  Description of Artificial Sequence: Synthetic peptide
SGELNPP

SEQ ID NO: 9878 - protein, 7 aa, Artificial Sequence
  Description of Artificial Sequence: Synthetic peptide
SGELRYI

SEQ ID NO: 9879 - protein, 7 aa, Artificial Sequence
  Description of Artificial Sequence: Synthetic peptide
SGERTSG

SEQ ID NO: 9880 - protein, 7 aa, Artificial Sequence
  Description of Artificial Sequence: Synthetic peptide
SGFGAKQ

SEQ ID NO: 9881 - protein, 7 aa, Artificial Sequence
  Description of Artificial Sequence: Synthetic peptide
SGFGPLT

SEQ ID NO: 9882 - protein, 7 aa, Artificial Sequence
  Description of Artificial Sequence: Synthetic peptide
SGGALGY

SEQ ID NO: 9883 - protein, 7 aa, Artificial Sequence
  Description of Artificial Sequence: Synthetic peptide
SGGASTT

SEQ ID NO: 9884 - protein, 7 aa, Artificial Sequence
  Description of Artificial Sequence: Synthetic peptide
SGGGTSL

SEQ ID NO: 9885 - protein, 7 aa, Artificial Sequence
  Description of Artificial Sequence: Synthetic peptide
SGGHLTI

SEQ ID NO: 9886 - protein, 7 aa, Artificial Sequence
  Description of Artificial Sequence: Synthetic peptide
SGGLRAA

SEQ ID NO: 9887 - protein, 7 aa, Artificial Sequence
  Description of Artificial Sequence: Synthetic peptide
SGGQEWT

SEQ ID NO: 9888 - protein, 7 aa, Artificial Sequence
  Description of Artificial Sequence: Synthetic peptide
SGGSFTT

SEQ ID NO: 9889 - protein, 7 aa, Artificial Sequence
  Description of Artificial Sequence: Synthetic peptide
SGIGSRQ

SEQ ID NO: 9890 - protein, 7 aa, Artificial Sequence
  Description of Artificial Sequence: Synthetic peptide
SGILQSS

SEQ ID NO: 9891 - protein, 7 aa, Artificial Sequence
  Description of Artificial Sequence: Synthetic peptide
SGISLRP

SEQ ID NO: 9892 - protein, 7 aa, Artificial Sequence
  Description of Artificial Sequence: Synthetic peptide
SGISRID

SEQ ID NO: 9893 - protein, 7 aa, Artificial Sequence
  Description of Artificial Sequence: Synthetic peptide
SGKASPG

SEQ ID NO: 9894 - protein, 7 aa, Artificial Sequence
  Description of Artificial Sequence: Synthetic peptide
SGKHTMN

SEQ ID NO: 9895 - protein, 7 aa, Artificial Sequence
  Description of Artificial Sequence: Synthetic peptide
SGKLVVS

SEQ ID NO: 9896 - protein, 7 aa, Artificial Sequence
  Description of Artificial Sequence: Synthetic peptide
SGKMGVY

SEQ ID NO: 9897 - protein, 7 aa, Artificial Sequence
  Description of Artificial Sequence: Synthetic peptide
SGKNPGY

SEQ ID NO: 9898 - protein, 7 aa, Artificial Sequence
  Description of Artificial Sequence: Synthetic peptide
SGKPMGT

SEQ ID NO: 9899 - protein, 7 aa, Artificial Sequence
  Description of Artificial Sequence: Synthetic peptide
SGKSGFE

SEQ ID NO: 9900 - protein, 7 aa, Artificial Sequence
  Description of Artificial Sequence: Synthetic peptide
SGLAVHP

SEQ ID NO: 9901 - protein, 7 aa, Artificial Sequence
  Description of Artificial Sequence: Synthetic peptide
SGLEDVV

SEQ ID NO: 9902 - protein, 7 aa, Artificial Sequence
  Description of Artificial Sequence: Synthetic peptide
SGLGIST

SEQ ID NO: 9903 - protein, 7 aa, Artificial Sequence
  Description of Artificial Sequence: Synthetic peptide
SGLHALT

SEQ ID NO: 9904 - protein, 7 aa, Artificial Sequence
  Description of Artificial Sequence: Synthetic peptide
SGLIATG

SEQ ID NO: 9905 - protein, 7 aa, Artificial Sequence
  Description of Artificial Sequence: Synthetic peptide
SGLNPKS

SEQ ID NO: 9906 - protein, 7 aa, Artificial Sequence
  Description of Artificial Sequence: Synthetic peptide
SGLNRTV

SEQ ID NO: 9907 - protein, 7 aa, Artificial Sequence
  Description of Artificial Sequence: Synthetic peptide
SGLSAYL

SEQ ID NO: 9908 - protein, 7 aa, Artificial Sequence
  Description of Artificial Sequence: Synthetic peptide
SGMGHVA

SEQ ID NO: 9909 - protein, 7 aa, Artificial Sequence
  Description of Artificial Sequence: Synthetic peptide
SGMLMRG

SEQ ID NO: 9910 - protein, 7 aa, Artificial Sequence
  Description of Artificial Sequence: Synthetic peptide
SGMTDSP

SEQ ID NO: 9911 - protein, 7 aa, Artificial Sequence
  Description of Artificial Sequence: Synthetic peptide
SGNGVLL

SEQ ID NO: 9912 - protein, 7 aa, Artificial Sequence
  Description of Artificial Sequence: Synthetic peptide
SGNLGYA

SEQ ID NO: 9913 - protein, 7 aa, Artificial Sequence
  Description of Artificial Sequence: Synthetic peptide
SGNMSAG

SEQ ID NO: 9914 - protein, 7 aa, Artificial Sequence
  Description of Artificial Sequence: Synthetic peptide
SGNPSQA

SEQ ID NO: 9915 - protein, 7 aa, Artificial Sequence
  Description of Artificial Sequence: Synthetic peptide
SGNTYSR

SEQ ID NO: 9916 - protein, 7 aa, Artificial Sequence
  Description of Artificial Sequence: Synthetic peptide
SGPDIFL

SEQ ID NO: 9917 - protein, 7 aa, Artificial Sequence
  Description of Artificial Sequence: Synthetic peptide
SGPHGGQ

SEQ ID NO: 9918 - protein, 7 aa, Artificial Sequence
  Description of Artificial Sequence: Synthetic peptide
SGPLNSP

SEQ ID NO: 9919 - protein, 7 aa, Artificial Sequence
  Description of Artificial Sequence: Synthetic peptide
SGPRLGP

SEQ ID NO: 9920 - protein, 7 aa, Artificial Sequence
  Description of Artificial Sequence: Synthetic peptide
SGPSVLR

SEQ ID NO: 9921 - protein, 7 aa, Artificial Sequence
  Description of Artificial Sequence: Synthetic peptide
SGPTHAM

SEQ ID NO: 9922 - protein, 7 aa, Artificial Sequence
  Description of Artificial Sequence: Synthetic peptide
SGPVGRT

SEQ ID NO: 9923 - protein, 7 aa, Artificial Sequence
  Description of Artificial Sequence: Synthetic peptide
SGPYKLE

SEQ ID NO: 9924 - protein, 7 aa, Artificial Sequence
  Description of Artificial Sequence: Synthetic peptide
SGPYPIK

SEQ ID NO: 9925 - protein, 7 aa, Artificial Sequence
  Description of Artificial Sequence: Synthetic peptide
SGQASLT

SEQ ID NO: 9926 - protein, 7 aa, Artificial Sequence
  Description of Artificial Sequence: Synthetic peptide
SGQSISP

SEQ ID NO: 9927 - protein, 7 aa, Artificial Sequence
  Description of Artificial Sequence: Synthetic peptide
SGQVPSA

SEQ ID NO: 9928 - protein, 7 aa, Artificial Sequence
  Description of Artificial Sequence: Synthetic peptide
SGQYPSI

SEQ ID NO: 9929 - protein, 7 aa, Artificial Sequence
  Description of Artificial Sequence: Synthetic peptide
SGRGPPP

SEQ ID NO: 9930 - protein, 7 aa, Artificial Sequence
  Description of Artificial Sequence: Synthetic peptide
SGRHSDD

SEQ ID NO: 9931 - protein, 7 aa, Artificial Sequence
  Description of Artificial Sequence: Synthetic peptide
SGRPSPA

SEQ ID NO: 9932 - protein, 7 aa, Artificial Sequence
  Description of Artificial Sequence: Synthetic peptide
SGRQPTV

SEQ ID NO: 9933 - protein, 7 aa, Artificial Sequence
  Description of Artificial Sequence: Synthetic peptide
SGRTIIT

SEQ ID NO: 9934 - protein, 7 aa, Artificial Sequence
  Description of Artificial Sequence: Synthetic peptide
SGRVTNS

SEQ ID NO: 9935 - protein, 7 aa, Artificial Sequence
  Description of Artificial Sequence: Synthetic peptide
SGSDPRT

SEQ ID NO: 9936 - protein, 7 aa, Artificial Sequence
  Description of Artificial Sequence: Synthetic peptide
SGSGVPQ

SEQ ID NO: 9937 - protein, 7 aa, Artificial Sequence
  Description of Artificial Sequence: Synthetic peptide
SGSKDSH

SEQ ID NO: 9938 - protein, 7 aa, Artificial Sequence
  Description of Artificial Sequence: Synthetic peptide
SGSKGAF

SEQ ID NO: 9939 - protein, 7 aa, Artificial Sequence
  Description of Artificial Sequence: Synthetic peptide
SGSMSQV

SEQ ID NO: 9940 - protein, 7 aa, Artificial Sequence
  Description of Artificial Sequence: Synthetic peptide
SGSNMLK

SEQ ID NO: 9941 - protein, 7 aa, Artificial Sequence
  Description of Artificial Sequence: Synthetic peptide
SGSPRIS

SEQ ID NO: 9942 - protein, 7 aa, Artificial Sequence
  Description of Artificial Sequence: Synthetic peptide
SGSQGTR

SEQ ID NO: 9943 - protein, 7 aa, Artificial Sequence
  Description of Artificial Sequence: Synthetic peptide
SGSRIME

SEQ ID NO: 9944 - protein, 7 aa, Artificial Sequence
  Description of Artificial Sequence: Synthetic peptide
SGSRNLG

SEQ ID NO: 9945 - protein, 7 aa, Artificial Sequence
  Description of Artificial Sequence: Synthetic peptide
SGSRNMV

SEQ ID NO: 9946 - protein, 7 aa, Artificial Sequence
  Description of Artificial Sequence: Synthetic peptide
SGSRSML

SEQ ID NO: 9947 - protein, 7 aa, Artificial Sequence
  Description of Artificial Sequence: Synthetic peptide
SGSRVAP

SEQ ID NO: 9948 - protein, 7 aa, Artificial Sequence
  Description of Artificial Sequence: Synthetic peptide
SGSSASR

SEQ ID NO: 9949 - protein, 7 aa, Artificial Sequence
  Description of Artificial Sequence: Synthetic peptide
SGSSGSA

SEQ ID NO: 9950 - protein, 7 aa, Artificial Sequence
  Description of Artificial Sequence: Synthetic peptide
SGSSKSM

SEQ ID NO: 9951 - protein, 7 aa, Artificial Sequence
  Description of Artificial Sequence: Synthetic peptide
SGSSTCI

SEQ ID NO: 9952 - protein, 7 aa, Artificial Sequence
  Description of Artificial Sequence: Synthetic peptide
SGSSTIN

SEQ ID NO: 9953 - protein, 7 aa, Artificial Sequence
  Description of Artificial Sequence: Synthetic peptide
SGSSTPQ

SEQ ID NO: 9954 - protein, 7 aa, Artificial Sequence
  Description of Artificial Sequence: Synthetic peptide
SGSVWPD

SEQ ID NO: 9955 - protein, 7 aa, Artificial Sequence
  Description of Artificial Sequence: Synthetic peptide
SGSYPRD

SEQ ID NO: 9956 - protein, 7 aa, Artificial Sequence
  Description of Artificial Sequence: Synthetic peptide
SGTALTL

SEQ ID NO: 9957 - protein, 7 aa, Artificial Sequence
  Description of Artificial Sequence: Synthetic peptide
SGTDHLL

SEQ ID NO: 9958 - protein, 7 aa, Artificial Sequence
  Description of Artificial Sequence: Synthetic peptide
SGTGQDG

SEQ ID NO: 9959 - protein, 7 aa, Artificial Sequence
  Description of Artificial Sequence: Synthetic peptide
SGTGRGT

SEQ ID NO: 9960 - protein, 7 aa, Artificial Sequence
  Description of Artificial Sequence: Synthetic peptide
SGTLTQK

SEQ ID NO: 9961 - protein, 7 aa, Artificial Sequence
  Description of Artificial Sequence: Synthetic peptide
SGTPMSR

SEQ ID NO: 9962 - protein, 7 aa, Artificial Sequence
  Description of Artificial Sequence: Synthetic peptide
SGTSVFA

SEQ ID NO: 9963 - protein, 7 aa, Artificial Sequence
  Description of Artificial Sequence: Synthetic peptide
SGTTAWA

SEQ ID NO: 9964 - protein, 7 aa, Artificial Sequence
  Description of Artificial Sequence: Synthetic peptide
SGTTGYR

SEQ ID NO: 9965 - protein, 7 aa, Artificial Sequence
  Description of Artificial Sequence: Synthetic peptide
SGTVYRV

SEQ ID NO: 9966 - protein, 7 aa, Artificial Sequence
  Description of Artificial Sequence: Synthetic peptide
SGVGMIS

SEQ ID NO: 9967 - protein, 7 aa, Artificial Sequence
  Description of Artificial Sequence: Synthetic peptide
SGVHPFP

SEQ ID NO: 9968 - protein, 7 aa, Artificial Sequence
  Description of Artificial Sequence: Synthetic peptide
SGVIKTS

SEQ ID NO: 9969 - protein, 7 aa, Artificial Sequence
  Description of Artificial Sequence: Synthetic peptide
SGVNLSS

SEQ ID NO: 9970 - protein, 7 aa, Artificial Sequence
  Description of Artificial Sequence: Synthetic peptide
SGVQSGP

SEQ ID NO: 9971 - protein, 7 aa, Artificial Sequence
  Description of Artificial Sequence: Synthetic peptide
SGVRQVA

SEQ ID NO: 9972 - protein, 7 aa, Artificial Sequence
  Description of Artificial Sequence: Synthetic peptide
SGVSMLP

SEQ ID NO: 9973 - protein, 7 aa, Artificial Sequence
  Description of Artificial Sequence: Synthetic peptide
SGVSRYA

SEQ ID NO: 9974 - protein, 7 aa, Artificial Sequence
  Description of Artificial Sequence: Synthetic peptide
SGVSYVE

SEQ ID NO: 9975 - protein, 7 aa, Artificial Sequence
  Description of Artificial Sequence: Synthetic peptide
SGYPNLD

SEQ ID NO: 9976 - protein, 7 aa, Artificial Sequence
  Description of Artificial Sequence: Synthetic peptide
SHAAQLP

SEQ ID NO: 9977 - protein, 7 aa, Artificial Sequence
  Description of Artificial Sequence: Synthetic peptide
SHANLHA

SEQ ID NO: 9978 - protein, 7 aa, Artificial Sequence
  Description of Artificial Sequence: Synthetic peptide
SHANTSS

SEQ ID NO: 9979 - protein, 7 aa, Artificial Sequence
  Description of Artificial Sequence: Synthetic peptide
SHASNYP

SEQ ID NO: 9980 - protein, 7 aa, Artificial Sequence
  Description of Artificial Sequence: Synthetic peptide
SHASVRS

SEQ ID NO: 9981 - protein, 7 aa, Artificial Sequence
  Description of Artificial Sequence: Synthetic peptide
SHATTPS

SEQ ID NO: 9982 - protein, 7 aa, Artificial Sequence
  Description of Artificial Sequence: Synthetic peptide
SHAVRMG

SEQ ID NO: 9983 - protein, 7 aa, Artificial Sequence
  Description of Artificial Sequence: Synthetic peptide
SHDNRGV

SEQ ID NO: 9984 - protein, 7 aa, Artificial Sequence
  Description of Artificial Sequence: Synthetic peptide
SHENGST

SEQ ID NO: 9985 - protein, 7 aa, Artificial Sequence
  Description of Artificial Sequence: Synthetic peptide
SHEPHTR

SEQ ID NO: 9986 - protein, 7 aa, Artificial Sequence
  Description of Artificial Sequence: Synthetic peptide
SHESLGM

SEQ ID NO: 9987 - protein, 7 aa, Artificial Sequence
  Description of Artificial Sequence: Synthetic peptide
SHFPMAP

SEQ ID NO: 9988 - protein, 7 aa, Artificial Sequence
  Description of Artificial Sequence: Synthetic peptide
SHFSAAE

SEQ ID NO: 9989 - protein, 7 aa, Artificial Sequence
  Description of Artificial Sequence: Synthetic peptide
SHGPPRS

SEQ ID NO: 9990 - protein, 7 aa, Artificial Sequence
  Description of Artificial Sequence: Synthetic peptide
SHGPYPY

SEQ ID NO: 9991 - protein, 7 aa, Artificial Sequence
  Description of Artificial Sequence: Synthetic peptide
SHGSAVN

SEQ ID NO: 9992 - protein, 7 aa, Artificial Sequence
  Description of Artificial Sequence: Synthetic peptide
SHGSFPS

SEQ ID NO: 9993 - protein, 7 aa, Artificial Sequence
  Description of Artificial Sequence: Synthetic peptide
SHGTKST

SEQ ID NO: 9994 - protein, 7 aa, Artificial Sequence
  Description of Artificial Sequence: Synthetic peptide
SHHGSII

SEQ ID NO: 9995 - protein, 7 aa, Artificial Sequence
  Description of Artificial Sequence: Synthetic peptide
SHIQLAP

SEQ ID NO: 9996 - protein, 7 aa, Artificial Sequence
  Description of Artificial Sequence: Synthetic peptide
SHKRMVD

SEQ ID NO: 9997 - protein, 7 aa, Artificial Sequence
  Description of Artificial Sequence: Synthetic peptide
SHKSPTP

SEQ ID NO: 9998 - protein, 7 aa, Artificial Sequence
  Description of Artificial Sequence: Synthetic peptide
SHLEIDM

SEQ ID NO: 9999 - protein, 7 aa, Artificial Sequence
  Description of Artificial Sequence: Synthetic peptide
SHLNLRP

SEQ ID NO: 10000 - protein, 7 aa, Artificial Sequence
  Description of Artificial Sequence: Synthetic peptide
SHLPVSM

SEQ ID NO: 10001 - protein, 7 aa, Artificial Sequence
  Description of Artificial Sequence: Synthetic peptide
SHLQNRI

SEQ ID NO: 10002 - protein, 7 aa, Artificial Sequence
  Description of Artificial Sequence: Synthetic peptide
SHMTGST

SEQ ID NO: 10003 - protein, 7 aa, Artificial Sequence
  Description of Artificial Sequence: Synthetic peptide
SHNAFPT

SEQ ID NO: 10004 - protein, 7 aa, Artificial Sequence
  Description of Artificial Sequence: Synthetic peptide
SHNALMD

SEQ ID NO: 10005 - protein, 7 aa, Artificial Sequence
  Description of Artificial Sequence: Synthetic peptide
SHNIPAG

SEQ ID NO: 10006 - protein, 7 aa, Artificial Sequence
  Description of Artificial Sequence: Synthetic peptide
SHNKLSS

SEQ ID NO: 10007 - protein, 7 aa, Artificial Sequence
  Description of Artificial Sequence: Synthetic peptide
SHPAISA

SEQ ID NO: 10008 - protein, 7 aa, Artificial Sequence
  Description of Artificial Sequence: Synthetic peptide
SHPALPP

SEQ ID NO: 10009 - protein, 7 aa, Artificial Sequence
  Description of Artificial Sequence: Synthetic peptide
SHPDLSP

SEQ ID NO: 10010 - protein, 7 aa, Artificial Sequence
  Description of Artificial Sequence: Synthetic peptide
SHPMLPT

SEQ ID NO: 10011 - protein, 7 aa, Artificial Sequence
  Description of Artificial Sequence: Synthetic peptide
SHPMMPA

SEQ ID NO: 10012 - protein, 7 aa, Artificial Sequence
  Description of Artificial Sequence: Synthetic peptide
SHPPLRL

SEQ ID NO: 10013 - protein, 7 aa, Artificial Sequence
  Description of Artificial Sequence: Synthetic peptide
SHPSSEP

SEQ ID NO: 10014 - protein, 7 aa, Artificial Sequence
  Description of Artificial Sequence: Synthetic peptide
SHQARAP

SEQ ID NO: 10015 - protein, 7 aa, Artificial Sequence
  Description of Artificial Sequence: Synthetic peptide
SHRGDEH

SEQ ID NO: 10016 - protein, 7 aa, Artificial Sequence
  Description of Artificial Sequence: Synthetic peptide
SHRPSTL

SEQ ID NO: 10017 - protein, 7 aa, Artificial Sequence
  Description of Artificial Sequence: Synthetic peptide
SHRPTSS

SEQ ID NO: 10018 - protein, 7 aa, Artificial Sequence
  Description of Artificial Sequence: Synthetic peptide
SHSALMG

SEQ ID NO: 10019 - protein, 7 aa, Artificial Sequence
  Description of Artificial Sequence: Synthetic peptide
SHSAMQH

SEQ ID NO: 10020 - protein, 7 aa, Artificial Sequence
  Description of Artificial Sequence: Synthetic peptide
SHSHSDA

SEQ ID NO: 10021 - protein, 7 aa, Artificial Sequence
  Description of Artificial Sequence: Synthetic peptide
SHSLGGN

SEQ ID NO: 10022 - protein, 7 aa, Artificial Sequence
  Description of Artificial Sequence: Synthetic peptide
SHSPDIK

SEQ ID NO: 10023 - protein, 7 aa, Artificial Sequence
  Description of Artificial Sequence: Synthetic peptide
SHSPLLP

SEQ ID NO: 10024 - protein, 7 aa, Artificial Sequence
  Description of Artificial Sequence: Synthetic peptide
SHSSIMV

SEQ ID NO: 10025 - protein, 7 aa, Artificial Sequence
  Description of Artificial Sequence: Synthetic peptide
SHSSRLM

SEQ ID NO: 10026 - protein, 7 aa, Artificial Sequence
  Description of Artificial Sequence: Synthetic peptide
SHTHGNP

SEQ ID NO: 10027 - protein, 7 aa, Artificial Sequence
  Description of Artificial Sequence: Synthetic peptide
SHTKVSH

SEQ ID NO: 10028 - protein, 7 aa, Artificial Sequence
  Description of Artificial Sequence: Synthetic peptide
SHTPRAS

SEQ ID NO: 10029 - protein, 7 aa, Artificial Sequence
  Description of Artificial Sequence: Synthetic peptide
SHTRPDA

SEQ ID NO: 10030 - protein, 7 aa, Artificial Sequence
  Description of Artificial Sequence: Synthetic peptide
SHTSLPR

SEQ ID NO: 10031 - protein, 7 aa, Artificial Sequence
  Description of Artificial Sequence: Synthetic peptide
SHTSLVI

SEQ ID NO: 10032 - protein, 7 aa, Artificial Sequence
  Description of Artificial Sequence: Synthetic peptide
SHVAGHA

SEQ ID NO: 10033 - protein, 7 aa, Artificial Sequence
  Description of Artificial Sequence: Synthetic peptide
SHVASKG

SEQ ID NO: 10034 - protein, 7 aa, Artificial Sequence
  Description of Artificial Sequence: Synthetic peptide
SHVVNSL

SEQ ID NO: 10035 - protein, 7 aa, Artificial Sequence
  Description of Artificial Sequence: Synthetic peptide
SHVYPGP

SEQ ID NO: 10036 - protein, 7 aa, Artificial Sequence
  Description of Artificial Sequence: Synthetic peptide
SIAAHQG

SEQ ID NO: 10037 - protein, 7 aa, Artificial Sequence
  Description of Artificial Sequence: Synthetic peptide
SIAQVGA

SEQ ID NO: 10038 - protein, 7 aa, Artificial Sequence
  Description of Artificial Sequence: Synthetic peptide
SIARAVT

SEQ ID NO: 10039 - protein, 7 aa, Artificial Sequence
  Description of Artificial Sequence: Synthetic peptide
SIDSIAV

SEQ ID NO: 10040 - protein, 7 aa, Artificial Sequence
  Description of Artificial Sequence: Synthetic peptide
SIDSSSL

SEQ ID NO: 10041 - protein, 7 aa, Artificial Sequence
  Description of Artificial Sequence: Synthetic peptide
SIDSTYM

SEQ ID NO: 10042 - protein, 7 aa, Artificial Sequence
  Description of Artificial Sequence: Synthetic peptide
SIERELR

SEQ ID NO: 10043 - protein, 7 aa, Artificial Sequence
  Description of Artificial Sequence: Synthetic peptide
SIGGVLY

SEQ ID NO: 10044 - protein, 7 aa, Artificial Sequence
  Description of Artificial Sequence: Synthetic peptide
SIGNFPD

SEQ ID NO: 10045 - protein, 7 aa, Artificial Sequence
  Description of Artificial Sequence: Synthetic peptide
SIGSAPA

SEQ ID NO: 10046 - protein, 7 aa, Artificial Sequence
  Description of Artificial Sequence: Synthetic peptide
SIGTVVG

SEQ ID NO: 10047 - protein, 7 aa, Artificial Sequence
  Description of Artificial Sequence: Synthetic peptide
SIGVHPG

SEQ ID NO: 10048 - protein, 7 aa, Artificial Sequence
  Description of Artificial Sequence: Synthetic peptide
SIHLVTS

SEQ ID NO: 10049 - protein, 7 aa, Artificial Sequence
  Description of Artificial Sequence: Synthetic peptide
SIHNGPQ

SEQ ID NO: 10050 - protein, 7 aa, Artificial Sequence
  Description of Artificial Sequence: Synthetic peptide
SIIESVA

SEQ ID NO: 10051 - protein, 7 aa, Artificial Sequence
  Description of Artificial Sequence: Synthetic peptide
SIIQAKP

SEQ ID NO: 10052 - protein, 7 aa, Artificial Sequence
  Description of Artificial Sequence: Synthetic peptide
SIISERR

SEQ ID NO: 10053 - protein, 7 aa, Artificial Sequence
  Description of Artificial Sequence: Synthetic peptide
SIKVNPP

SEQ ID NO: 10054 - protein, 7 aa, Artificial Sequence
  Description of Artificial Sequence: Synthetic peptide
SILGAIP

SEQ ID NO: 10055 - protein, 7 aa, Artificial Sequence
  Description of Artificial Sequence: Synthetic peptide
SILYGMP

SEQ ID NO: 10056 - protein, 7 aa, Artificial Sequence
  Description of Artificial Sequence: Synthetic peptide
SIMNTGP

SEQ ID NO: 10057 - protein, 7 aa, Artificial Sequence
  Description of Artificial Sequence: Synthetic peptide
SIMRTDC

SEQ ID NO: 10058 - protein, 7 aa, Artificial Sequence
  Description of Artificial Sequence: Synthetic peptide
SINEEPP

SEQ ID NO: 10059 - protein, 7 aa, Artificial Sequence
  Description of Artificial Sequence: Synthetic peptide
SINVTHG

SEQ ID NO: 10060 - protein, 7 aa, Artificial Sequence
  Description of Artificial Sequence: Synthetic peptide
SIPMSGR

SEQ ID NO: 10061 - protein, 7 aa, Artificial Sequence
  Description of Artificial Sequence: Synthetic peptide
SIPNLQA

SEQ ID NO: 10062 - protein, 7 aa, Artificial Sequence
  Description of Artificial Sequence: Synthetic peptide
SIPNLYD

SEQ ID NO: 10063 - protein, 7 aa, Artificial Sequence
  Description of Artificial Sequence: Synthetic peptide
SIPNSRQ

SEQ ID NO: 10064 - protein, 7 aa, Artificial Sequence
  Description of Artificial Sequence: Synthetic peptide
SIQKHLP

SEQ ID NO: 10065 - protein, 7 aa, Artificial Sequence
  Description of Artificial Sequence: Synthetic peptide
SIQWKDS

SEQ ID NO: 10066 - protein, 7 aa, Artificial Sequence
  Description of Artificial Sequence: Synthetic peptide
SISLPYP

SEQ ID NO: 10067 - protein, 7 aa, Artificial Sequence
  Description of Artificial Sequence: Synthetic peptide
SISPSPG

SEQ ID NO: 10068 - protein, 7 aa, Artificial Sequence
  Description of Artificial Sequence: Synthetic peptide
SISSQDL

SEQ ID NO: 10069 - protein, 7 aa, Artificial Sequence
  Description of Artificial Sequence: Synthetic peptide
SISSSSG

SEQ ID NO: 10070 - protein, 7 aa, Artificial Sequence
  Description of Artificial Sequence: Synthetic peptide
SISVMKQ

SEQ ID NO: 10071 - protein, 7 aa, Artificial Sequence
  Description of Artificial Sequence: Synthetic peptide
SITPFNE

SEQ ID NO: 10072 - protein, 7 aa, Artificial Sequence
  Description of Artificial Sequence: Synthetic peptide
SITSEKI

SEQ ID NO: 10073 - protein, 7 aa, Artificial Sequence
  Description of Artificial Sequence: Synthetic peptide
SITTGRG

SEQ ID NO: 10074 - protein, 7 aa, Artificial Sequence
  Description of Artificial Sequence: Synthetic peptide
SITTRTD

SEQ ID NO: 10075 - protein, 7 aa, Artificial Sequence
  Description of Artificial Sequence: Synthetic peptide
SIVHPDS

SEQ ID NO: 10076 - protein, 7 aa, Artificial Sequence
  Description of Artificial Sequence: Synthetic peptide
SIVLKGS

SEQ ID NO: 10077 - protein, 7 aa, Artificial Sequence
  Description of Artificial Sequence: Synthetic peptide
SIVSRVE

SEQ ID NO: 10078 - protein, 7 aa, Artificial Sequence
  Description of Artificial Sequence: Synthetic peptide
SIVTVSG

SEQ ID NO: 10079 - protein, 7 aa, Artificial Sequence
  Description of Artificial Sequence: Synthetic peptide
SKAHENP

SEQ ID NO: 10080 - protein, 7 aa, Artificial Sequence
  Description of Artificial Sequence: Synthetic peptide
SKAPYSA

SEQ ID NO: 10081 - protein, 7 aa, Artificial Sequence
  Description of Artificial Sequence: Synthetic peptide
SKASLNP

SEQ ID NO: 10082 - protein, 7 aa, Artificial Sequence
  Description of Artificial Sequence: Synthetic peptide
SKAYTPL

SEQ ID NO: 10083 - protein, 7 aa, Artificial Sequence
  Description of Artificial Sequence: Synthetic peptide
SKDGSLN

SEQ ID NO: 10084 - protein, 7 aa, Artificial Sequence
  Description of Artificial Sequence: Synthetic peptide
SKDHFPA

SEQ ID NO: 10085 - protein, 7 aa, Artificial Sequence
  Description of Artificial Sequence: Synthetic peptide
SKDILRS

SEQ ID NO: 10086 - protein, 7 aa, Artificial Sequence
  Description of Artificial Sequence: Synthetic peptide
SKDMLET

SEQ ID NO: 10087 - protein, 7 aa, Artificial Sequence
  Description of Artificial Sequence: Synthetic peptide
SKDTLRN

SEQ ID NO: 10088 - protein, 7 aa, Artificial Sequence
  Description of Artificial Sequence: Synthetic peptide
SKDTPLA

SEQ ID NO: 10089 - protein, 7 aa, Artificial Sequence
  Description of Artificial Sequence: Synthetic peptide
SKEIYTQ

SEQ ID NO: 10090 - protein, 7 aa, Artificial Sequence
  Description of Artificial Sequence: Synthetic peptide
SKENYPH

SEQ ID NO: 10091 - protein, 7 aa, Artificial Sequence
  Description of Artificial Sequence: Synthetic peptide
SKERFPY

SEQ ID NO: 10092 - protein, 7 aa, Artificial Sequence
  Description of Artificial Sequence: Synthetic peptide
SKEYPEY

SEQ ID NO: 10093 - protein, 7 aa, Artificial Sequence
  Description of Artificial Sequence: Synthetic peptide
SKFNGHL

SEQ ID NO: 10094 - protein, 7 aa, Artificial Sequence
  Description of Artificial Sequence: Synthetic peptide
SKHEVYL

SEQ ID NO: 10095 - protein, 7 aa, Artificial Sequence
  Description of Artificial Sequence: Synthetic peptide
SKHTAFV

SEQ ID NO: 10096 - protein, 7 aa, Artificial Sequence
  Description of Artificial Sequence: Synthetic peptide
SKIDLYT

SEQ ID NO: 10097 - protein, 7 aa, Artificial Sequence
  Description of Artificial Sequence: Synthetic peptide
SKIDRDD

SEQ ID NO: 10098 - protein, 7 aa, Artificial Sequence
  Description of Artificial Sequence: Synthetic peptide
SKIPHEV

SEQ ID NO: 10099 - protein, 7 aa, Artificial Sequence
  Description of Artificial Sequence: Synthetic peptide
SKLDDGR

SEQ ID NO: 10100 - protein, 7 aa, Artificial Sequence
  Description of Artificial Sequence: Synthetic peptide
SKLGSHL

SEQ ID NO: 10101 - protein, 7 aa, Artificial Sequence
  Description of Artificial Sequence: Synthetic peptide
SKLPPLH

SEQ ID NO: 10102 - protein, 7 aa, Artificial Sequence
  Description of Artificial Sequence: Synthetic peptide
SKLPVAL

SEQ ID NO: 10103 - protein, 7 aa, Artificial Sequence
  Description of Artificial Sequence: Synthetic peptide
SKLTTEP

SEQ ID NO: 10104 - protein, 7 aa, Artificial Sequence
  Description of Artificial Sequence: Synthetic peptide
SKMLEFV

SEQ ID NO: 10105 - protein, 7 aa, Artificial Sequence
  Description of Artificial Sequence: Synthetic peptide
SKMSRLE

SEQ ID NO: 10106 - protein, 7 aa, Artificial Sequence
  Description of Artificial Sequence: Synthetic peptide
SKNNPSL

SEQ ID NO: 10107 - protein, 7 aa, Artificial Sequence
  Description of Artificial Sequence: Synthetic peptide
SKNSQDY

SEQ ID NO: 10108 - protein, 7 aa, Artificial Sequence
  Description of Artificial Sequence: Synthetic peptide
SKNSVLN

SEQ ID NO: 10109 - protein, 7 aa, Artificial Sequence
  Description of Artificial Sequence: Synthetic peptide
SKNVCEP

SEQ ID NO: 10110 - protein, 7 aa, Artificial Sequence
  Description of Artificial Sequence: Synthetic peptide
SKPHREV

SEQ ID NO: 10111 - protein, 7 aa, Artificial Sequence
  Description of Artificial Sequence: Synthetic peptide
SKPLSGF

SEQ ID NO: 10112 - protein, 7 aa, Artificial Sequence
  Description of Artificial Sequence: Synthetic peptide
SKPSGPS

SEQ ID NO: 10113 - protein, 7 aa, Artificial Sequence
  Description of Artificial Sequence: Synthetic peptide
SKPTPTH

SEQ ID NO: 10114 - protein, 7 aa, Artificial Sequence
  Description of Artificial Sequence: Synthetic peptide
SKQAASV

SEQ ID NO: 10115 - protein, 7 aa, Artificial Sequence
  Description of Artificial Sequence: Synthetic peptide
SKQMPMH

SEQ ID NO: 10116 - protein, 7 aa, Artificial Sequence
  Description of Artificial Sequence: Synthetic peptide
SKRTTWD

SEQ ID NO: 10117 - protein, 7 aa, Artificial Sequence
  Description of Artificial Sequence: Synthetic peptide
SKSGTSE

SEQ ID NO: 10118 - protein, 7 aa, Artificial Sequence
  Description of Artificial Sequence: Synthetic peptide
SKSLKLS

SEQ ID NO: 10119 - protein, 7 aa, Artificial Sequence
  Description of Artificial Sequence: Synthetic peptide
SKSPNPY

SEQ ID NO: 10120 - protein, 7 aa, Artificial Sequence
  Description of Artificial Sequence: Synthetic peptide
SKSQFLA

SEQ ID NO: 10121 - protein, 7 aa, Artificial Sequence
  Description of Artificial Sequence: Synthetic peptide
SKSSMLI

SEQ ID NO: 10122 - protein, 7 aa, Artificial Sequence
  Description of Artificial Sequence: Synthetic peptide
SKTDRMN

SEQ ID NO: 10123 - protein, 7 aa, Artificial Sequence
  Description of Artificial Sequence: Synthetic peptide
SKTSDRT

SEQ ID NO: 10124 - protein, 7 aa, Artificial Sequence
  Description of Artificial Sequence: Synthetic peptide
SKTVEQN

SEQ ID NO: 10125 - protein, 7 aa, Artificial Sequence
  Description of Artificial Sequence: Synthetic peptide
SKVPSLA

SEQ ID NO: 10126 - protein, 7 aa, Artificial Sequence
  Description of Artificial Sequence: Synthetic peptide
SKVREPI

SEQ ID NO: 10127 - protein, 7 aa, Artificial Sequence
  Description of Artificial Sequence: Synthetic peptide
SKYATVV

SEQ ID NO: 10128 - protein, 7 aa, Artificial Sequence
  Description of Artificial Sequence: Synthetic peptide
SKYLRMD

SEQ ID NO: 10129 - protein, 7 aa, Artificial Sequence
  Description of Artificial Sequence: Synthetic peptide
SKYTLAY

SEQ ID NO: 10130 - protein, 7 aa, Artificial Sequence
  Description of Artificial Sequence: Synthetic peptide
SLADANA

SEQ ID NO: 10131 - protein, 7 aa, Artificial Sequence
  Description of Artificial Sequence: Synthetic peptide
SLAGNSS

SEQ ID NO: 10132 - protein, 7 aa, Artificial Sequence
  Description of Artificial Sequence: Synthetic peptide
SLAKMPG

SEQ ID NO: 10133 - protein, 7 aa, Artificial Sequence
  Description of Artificial Sequence: Synthetic peptide
SLALVGR

SEQ ID NO: 10134 - protein, 7 aa, Artificial Sequence
  Description of Artificial Sequence: Synthetic peptide
SLAPTVM

SEQ ID NO: 10135 - protein, 7 aa, Artificial Sequence
  Description of Artificial Sequence: Synthetic peptide
SLAQKQP

SEQ ID NO: 10136 - protein, 7 aa, Artificial Sequence
  Description of Artificial Sequence: Synthetic peptide
SLAQLHS

SEQ ID NO: 10137 - protein, 7 aa, Artificial Sequence
  Description of Artificial Sequence: Synthetic peptide
SLASSAM

SEQ ID NO: 10138 - protein, 7 aa, Artificial Sequence
  Description of Artificial Sequence: Synthetic peptide
SLASTGF

SEQ ID NO: 10139 - protein, 7 aa, Artificial Sequence
  Description of Artificial Sequence: Synthetic peptide
SLATRIS

SEQ ID NO: 10140 - protein, 7 aa, Artificial Sequence
  Description of Artificial Sequence: Synthetic peptide
SLATSPY

SEQ ID NO: 10141 - protein, 7 aa, Artificial Sequence
  Description of Artificial Sequence: Synthetic peptide
SLDATKD

SEQ ID NO: 10142 - protein, 7 aa, Artificial Sequence
  Description of Artificial Sequence: Synthetic peptide
SLDFPRP

SEQ ID NO: 10143 - protein, 7 aa, Artificial Sequence
  Description of Artificial Sequence: Synthetic peptide
SLDHHNR

SEQ ID NO: 10144 - protein, 7 aa, Artificial Sequence
  Description of Artificial Sequence: Synthetic peptide
SLDKALR

SEQ ID NO: 10145 - protein, 7 aa, Artificial Sequence
  Description of Artificial Sequence: Synthetic peptide
SLDMQKQ

SEQ ID NO: 10146 - protein, 7 aa, Artificial Sequence
  Description of Artificial Sequence: Synthetic peptide
SLDPKNS

SEQ ID NO: 10147 - protein, 7 aa, Artificial Sequence
  Description of Artificial Sequence: Synthetic peptide
SLEIPKI

SEQ ID NO: 10148 - protein, 7 aa, Artificial Sequence
  Description of Artificial Sequence: Synthetic peptide
SLEKRGE

SEQ ID NO: 10149 - protein, 7 aa, Artificial Sequence
  Description of Artificial Sequence: Synthetic peptide
SLERHVY

SEQ ID NO: 10150 - protein, 7 aa, Artificial Sequence
  Description of Artificial Sequence: Synthetic peptide
SLESEHR

SEQ ID NO: 10151 - protein, 7 aa, Artificial Sequence
  Description of Artificial Sequence: Synthetic peptide
SLESMIH

SEQ ID NO: 10152 - protein, 7 aa, Artificial Sequence
  Description of Artificial Sequence: Synthetic peptide
SLESRHY

SEQ ID NO: 10153 - protein, 7 aa, Artificial Sequence
  Description of Artificial Sequence: Synthetic peptide
SLEVVRK

SEQ ID NO: 10154 - protein, 7 aa, Artificial Sequence
  Description of Artificial Sequence: Synthetic peptide
SLFKDVS

SEQ ID NO: 10155 - protein, 7 aa, Artificial Sequence
  Description of Artificial Sequence: Synthetic peptide
SLFPAGG

SEQ ID NO: 10156 - protein, 7 aa, Artificial Sequence
  Description of Artificial Sequence: Synthetic peptide
SLFSARP

SEQ ID NO: 10157 - protein, 7 aa, Artificial Sequence
  Description of Artificial Sequence: Synthetic peptide
SLGFRAG

SEQ ID NO: 10158 - protein, 7 aa, Artificial Sequence
  Description of Artificial Sequence: Synthetic peptide
SLGISNF

SEQ ID NO: 10159 - protein, 7 aa, Artificial Sequence
  Description of Artificial Sequence: Synthetic peptide
SLGKTSP

SEQ ID NO: 10160 - protein, 7 aa, Artificial Sequence
  Description of Artificial Sequence: Synthetic peptide
SLGMKSA

SEQ ID NO: 10161 - protein, 7 aa, Artificial Sequence
  Description of Artificial Sequence: Synthetic peptide
SLGQSQY

SEQ ID NO: 10162 - protein, 7 aa, Artificial Sequence
  Description of Artificial Sequence: Synthetic peptide
SLGRGSI

SEQ ID NO: 10163 - protein, 7 aa, Artificial Sequence
  Description of Artificial Sequence: Synthetic peptide
SLGTGVG

SEQ ID NO: 10164 - protein, 7 aa, Artificial Sequence
  Description of Artificial Sequence: Synthetic peptide
SLHAIKN

SEQ ID NO: 10165 - protein, 7 aa, Artificial Sequence
  Description of Artificial Sequence: Synthetic peptide
SLHAVVS

SEQ ID NO: 10166 - protein, 7 aa, Artificial Sequence
  Description of Artificial Sequence: Synthetic peptide
SLHDMSG

SEQ ID NO: 10167 - protein, 7 aa, Artificial Sequence
  Description of Artificial Sequence: Synthetic peptide
SLHSSDS

SEQ ID NO: 10168 - protein, 7 aa, Artificial Sequence
  Description of Artificial Sequence: Synthetic peptide
SLIDPYE

SEQ ID NO: 10169 - protein, 7 aa, Artificial Sequence
  Description of Artificial Sequence: Synthetic peptide
SLIDRHP

SEQ ID NO: 10170 - protein, 7 aa, Artificial Sequence
  Description of Artificial Sequence: Synthetic peptide
SLIGGQQ

SEQ ID NO: 10171 - protein, 7 aa, Artificial Sequence
  Description of Artificial Sequence: Synthetic peptide
SLIRSST

SEQ ID NO: 10172 - protein, 7 aa, Artificial Sequence
  Description of Artificial Sequence: Synthetic peptide
SLISEKG

SEQ ID NO: 10173 - protein, 7 aa, Artificial Sequence
  Description of Artificial Sequence: Synthetic peptide
SLKASPP

SEQ ID NO: 10174 - protein, 7 aa, Artificial Sequence
  Description of Artificial Sequence: Synthetic peptide
SLKEAWL

SEQ ID NO: 10175 - protein, 7 aa, Artificial Sequence
  Description of Artificial Sequence: Synthetic peptide
SLKIPTA

SEQ ID NO: 10176 - protein, 7 aa, Artificial Sequence
  Description of Artificial Sequence: Synthetic peptide
SLKNELA

SEQ ID NO: 10177 - protein, 7 aa, Artificial Sequence
  Description of Artificial Sequence: Synthetic peptide
SLKPGGG

SEQ ID NO: 10178 - protein, 7 aa, Artificial Sequence
  Description of Artificial Sequence: Synthetic peptide
SLKPYQS

SEQ ID NO: 10179 - protein, 7 aa, Artificial Sequence
  Description of Artificial Sequence: Synthetic peptide
SLKQSHP

SEQ ID NO: 10180 - protein, 7 aa, Artificial Sequence
  Description of Artificial Sequence: Synthetic peptide
SLKSPQL

SEQ ID NO: 10181 - protein, 7 aa, Artificial Sequence
  Description of Artificial Sequence: Synthetic peptide
SLKTYPE

SEQ ID NO: 10182 - protein, 7 aa, Artificial Sequence
  Description of Artificial Sequence: Synthetic peptide
SLLAKVP

SEQ ID NO: 10183 - protein, 7 aa, Artificial Sequence
  Description of Artificial Sequence: Synthetic peptide
SLLDRPI

SEQ ID NO: 10184 - protein, 7 aa, Artificial Sequence
  Description of Artificial Sequence: Synthetic peptide
SLLGPTQ

SEQ ID NO: 10185 - protein, 7 aa, Artificial Sequence
  Description of Artificial Sequence: Synthetic peptide
SLLKPVQ

SEQ ID NO: 10186 - protein, 7 aa, Artificial Sequence
  Description of Artificial Sequence: Synthetic peptide
SLLLLCA

SEQ ID NO: 10187 - protein, 7 aa, Artificial Sequence
  Description of Artificial Sequence: Synthetic peptide
SLLLNRG

SEQ ID NO: 10188 - protein, 7 aa, Artificial Sequence
  Description of Artificial Sequence: Synthetic peptide
SLLLQNP

SEQ ID NO: 10189 - protein, 7 aa, Artificial Sequence
  Description of Artificial Sequence: Synthetic peptide
SLLNSDT

SEQ ID NO: 10190 - protein, 7 aa, Artificial Sequence
  Description of Artificial Sequence: Synthetic peptide
SLLRQVP

SEQ ID NO: 10191 - protein, 7 aa, Artificial Sequence
  Description of Artificial Sequence: Synthetic peptide
SLLSVSH

SEQ ID NO: 10192 - protein, 7 aa, Artificial Sequence
  Description of Artificial Sequence: Synthetic peptide
SLLTASV

SEQ ID NO: 10193 - protein, 7 aa, Artificial Sequence
  Description of Artificial Sequence: Synthetic peptide
SLLTSAP

SEQ ID NO: 10194 - protein, 7 aa, Artificial Sequence
  Description of Artificial Sequence: Synthetic peptide
SLLVNLS

SEQ ID NO: 10195 - protein, 7 aa, Artificial Sequence
  Description of Artificial Sequence: Synthetic peptide
SLLYPTP

SEQ ID NO: 10196 - protein, 7 aa, Artificial Sequence
  Description of Artificial Sequence: Synthetic peptide
SLMAAGL

SEQ ID NO: 10197 - protein, 7 aa, Artificial Sequence
  Description of Artificial Sequence: Synthetic peptide
SLMASIG

SEQ ID NO: 10198 - protein, 7 aa, Artificial Sequence
  Description of Artificial Sequence: Synthetic peptide
SLMHDVS

SEQ ID NO: 10199 - protein, 7 aa, Artificial Sequence
  Description of Artificial Sequence: Synthetic peptide
SLMSLDT

SEQ ID NO: 10200 - protein, 7 aa, Artificial Sequence
  Description of Artificial Sequence: Synthetic peptide
SLMSPSM

SEQ ID NO: 10201 - protein, 7 aa, Artificial Sequence
  Description of Artificial Sequence: Synthetic peptide
SLNLRGN

SEQ ID NO: 10202 - protein, 7 aa, Artificial Sequence
  Description of Artificial Sequence: Synthetic peptide
SLNNARN

SEQ ID NO: 10203 - protein, 7 aa, Artificial Sequence
  Description of Artificial Sequence: Synthetic peptide
SLNNGLT

SEQ ID NO: 10204 - protein, 7 aa, Artificial Sequence
  Description of Artificial Sequence: Synthetic peptide
SLNNRPS

SEQ ID NO: 10205 - protein, 7 aa, Artificial Sequence
  Description of Artificial Sequence: Synthetic peptide
SLNPKSP

SEQ ID NO: 10206 - protein, 7 aa, Artificial Sequence
  Description of Artificial Sequence: Synthetic peptide
SLNPSGM

SEQ ID NO: 10207 - protein, 7 aa, Artificial Sequence
  Description of Artificial Sequence: Synthetic peptide
SLNRQGN

SEQ ID NO: 10208 - protein, 7 aa, Artificial Sequence
  Description of Artificial Sequence: Synthetic peptide
SLNSYSP

SEQ ID NO: 10209 - protein, 7 aa, Artificial Sequence
  Description of Artificial Sequence: Synthetic peptide
SLNTGTI

SEQ ID NO: 10210 - protein, 7 aa, Artificial Sequence
  Description of Artificial Sequence: Synthetic peptide
SLNTLGT

SEQ ID NO: 10211 - protein, 7 aa, Artificial Sequence
  Description of Artificial Sequence: Synthetic peptide
SLNTMNA

SEQ ID NO: 10212 - protein, 7 aa, Artificial Sequence
  Description of Artificial Sequence: Synthetic peptide
SLNTTPE

SEQ ID NO: 10213 - protein, 7 aa, Artificial Sequence
  Description of Artificial Sequence: Synthetic peptide
SLNVADA

SEQ ID NO: 10214 - protein, 7 aa, Artificial Sequence
  Description of Artificial Sequence: Synthetic peptide
SLPAQQV

SEQ ID NO: 10215 - protein, 7 aa, Artificial Sequence
  Description of Artificial Sequence: Synthetic peptide
SLPASTL

SEQ ID NO: 10216 - protein, 7 aa, Artificial Sequence
  Description of Artificial Sequence: Synthetic peptide
SLPESNS

SEQ ID NO: 10217 - protein, 7 aa, Artificial Sequence
  Description of Artificial Sequence: Synthetic peptide
SLPGSVM

SEQ ID NO: 10218 - protein, 7 aa, Artificial Sequence
  Description of Artificial Sequence: Synthetic peptide
SLPGTVR

SEQ ID NO: 10219 - protein, 7 aa, Artificial Sequence
  Description of Artificial Sequence: Synthetic peptide
SLPHIRH

SEQ ID NO: 10220 - protein, 7 aa, Artificial Sequence
  Description of Artificial Sequence: Synthetic peptide
SLPHSCG

SEQ ID NO: 10221 - protein, 7 aa, Artificial Sequence
  Description of Artificial Sequence: Synthetic peptide
SLPIGGS

SEQ ID NO: 10222 - protein, 7 aa, Artificial Sequence
  Description of Artificial Sequence: Synthetic peptide
SLPKPSH

SEQ ID NO: 10223 - protein, 7 aa, Artificial Sequence
  Description of Artificial Sequence: Synthetic peptide
SLPLKVN

SEQ ID NO: 10224 - protein, 7 aa, Artificial Sequence
  Description of Artificial Sequence: Synthetic peptide
SLPLRDL

SEQ ID NO: 10225 - protein, 7 aa, Artificial Sequence
  Description of Artificial Sequence: Synthetic peptide
SLPNIGT

SEQ ID NO: 10226 - protein, 7 aa, Artificial Sequence
  Description of Artificial Sequence: Synthetic peptide
SLPQPPL

SEQ ID NO: 10227 - protein, 7 aa, Artificial Sequence
  Description of Artificial Sequence: Synthetic peptide
SLPQTLR

SEQ ID NO: 10228 - protein, 7 aa, Artificial Sequence
  Description of Artificial Sequence: Synthetic peptide
SLPRGSN

SEQ ID NO: 10229 - protein, 7 aa, Artificial Sequence
  Description of Artificial Sequence: Synthetic peptide
SLPSLLG

SEQ ID NO: 10230 - protein, 7 aa, Artificial Sequence
  Description of Artificial Sequence: Synthetic peptide
SLPSSPS

SEQ ID NO: 10231 - protein, 7 aa, Artificial Sequence
  Description of Artificial Sequence: Synthetic peptide
SLPSTHV

SEQ ID NO: 10232 - protein, 7 aa, Artificial Sequence
  Description of Artificial Sequence: Synthetic peptide
SLPTGPI

SEQ ID NO: 10233 - protein, 7 aa, Artificial Sequence
  Description of Artificial Sequence: Synthetic peptide
SLPTSTM

SEQ ID NO: 10234 - protein, 7 aa, Artificial Sequence
  Description of Artificial Sequence: Synthetic peptide
SLPVPSR

SEQ ID NO: 10235 - protein, 7 aa, Artificial Sequence
  Description of Artificial Sequence: Synthetic peptide
SLPVRGV

SEQ ID NO: 10236 - protein, 7 aa, Artificial Sequence
  Description of Artificial Sequence: Synthetic peptide
SLPVSPS

SEQ ID NO: 10237 - protein, 7 aa, Artificial Sequence
  Description of Artificial Sequence: Synthetic peptide
SLPVTGR

SEQ ID NO: 10238 - protein, 7 aa, Artificial Sequence
  Description of Artificial Sequence: Synthetic peptide
SLQFTSS

SEQ ID NO: 10239 - protein, 7 aa, Artificial Sequence
  Description of Artificial Sequence: Synthetic peptide
SLQRDLV

SEQ ID NO: 10240 - protein, 7 aa, Artificial Sequence
  Description of Artificial Sequence: Synthetic peptide
SLQRPTI

SEQ ID NO: 10241 - protein, 7 aa, Artificial Sequence
  Description of Artificial Sequence: Synthetic peptide
SLQSSRG

SEQ ID NO: 10242 - protein, 7 aa, Artificial Sequence
  Description of Artificial Sequence: Synthetic peptide
SLQTDNE

SEQ ID NO: 10243 - protein, 7 aa, Artificial Sequence
  Description of Artificial Sequence: Synthetic peptide
SLQTSRV

SEQ ID NO: 10244 - protein, 7 aa, Artificial Sequence
  Description of Artificial Sequence: Synthetic peptide
SLQWTSA

SEQ ID NO: 10245 - protein, 7 aa, Artificial Sequence
  Description of Artificial Sequence: Synthetic peptide
SLRANTY

SEQ ID NO: 10246 - protein, 7 aa, Artificial Sequence
  Description of Artificial Sequence: Synthetic peptide
SLRAVVP

SEQ ID NO: 10247 - protein, 7 aa, Artificial Sequence
  Description of Artificial Sequence: Synthetic peptide
SLRDSYH

SEQ ID NO: 10248 - protein, 7 aa, Artificial Sequence
  Description of Artificial Sequence: Synthetic peptide
SLREDAQ

SEQ ID NO: 10249 - protein, 7 aa, Artificial Sequence
  Description of Artificial Sequence: Synthetic peptide
SLRGSSS

SEQ ID NO: 10250 - protein, 7 aa, Artificial Sequence
  Description of Artificial Sequence: Synthetic peptide
SLRHSET

SEQ ID NO: 10251 - protein, 7 aa, Artificial Sequence
  Description of Artificial Sequence: Synthetic peptide
SLRISAT

SEQ ID NO: 10252 - protein, 7 aa, Artificial Sequence
  Description of Artificial Sequence: Synthetic peptide
SLRPDQH

SEQ ID NO: 10253 - protein, 7 aa, Artificial Sequence
  Description of Artificial Sequence: Synthetic peptide
SLRPNSS

SEQ ID NO: 10254 - protein, 7 aa, Artificial Sequence
  Description of Artificial Sequence: Synthetic peptide
SLRSLNS

SEQ ID NO: 10255 - protein, 7 aa, Artificial Sequence
  Description of Artificial Sequence: Synthetic peptide
SLRTGDY

SEQ ID NO: 10256 - protein, 7 aa, Artificial Sequence
  Description of Artificial Sequence: Synthetic peptide
SLRTIAA

SEQ ID NO: 10257 - protein, 7 aa, Artificial Sequence
  Description of Artificial Sequence: Synthetic peptide
SLRTNVV

SEQ ID NO: 10258 - protein, 7 aa, Artificial Sequence
  Description of Artificial Sequence: Synthetic peptide
SLRTSMV

SEQ ID NO: 10259 - protein, 7 aa, Artificial Sequence
  Description of Artificial Sequence: Synthetic peptide
SLRVAEL

SEQ ID NO: 10260 - protein, 7 aa, Artificial Sequence
  Description of Artificial Sequence: Synthetic peptide
SLRVPVA

SEQ ID NO: 10261 - protein, 7 aa, Artificial Sequence
  Description of Artificial Sequence: Synthetic peptide
SLSAHDR

SEQ ID NO: 10262 - protein, 7 aa, Artificial Sequence
  Description of Artificial Sequence: Synthetic peptide
SLSETFR

SEQ ID NO: 10263 - protein, 7 aa, Artificial Sequence
  Description of Artificial Sequence: Synthetic peptide
SLSGARA

SEQ ID NO: 10264 - protein, 7 aa, Artificial Sequence
  Description of Artificial Sequence: Synthetic peptide
SLSGNTD

SEQ ID NO: 10265 - protein, 7 aa, Artificial Sequence
  Description of Artificial Sequence: Synthetic peptide
SLSGRPS

SEQ ID NO: 10266 - protein, 7 aa, Artificial Sequence
  Description of Artificial Sequence: Synthetic peptide
SLSHFPA

SEQ ID NO: 10267 - protein, 7 aa, Artificial Sequence
  Description of Artificial Sequence: Synthetic peptide
SLSHSDG

SEQ ID NO: 10268 - protein, 7 aa, Artificial Sequence
  Description of Artificial Sequence: Synthetic peptide
SLSIDKA

SEQ ID NO: 10269 - protein, 7 aa, Artificial Sequence
  Description of Artificial Sequence: Synthetic peptide
SLSKMPS

SEQ ID NO: 10270 - protein, 7 aa, Artificial Sequence
  Description of Artificial Sequence: Synthetic peptide
SLSKPVG

SEQ ID NO: 10271 - protein, 7 aa, Artificial Sequence
  Description of Artificial Sequence: Synthetic peptide
SLSPRTF

SEQ ID NO: 10272 - protein, 7 aa, Artificial Sequence
  Description of Artificial Sequence: Synthetic peptide
SLSQGSN

SEQ ID NO: 10273 - protein, 7 aa, Artificial Sequence
  Description of Artificial Sequence: Synthetic peptide
SLSRAGP

SEQ ID NO: 10274 - protein, 7 aa, Artificial Sequence
  Description of Artificial Sequence: Synthetic peptide
SLSSAIG

SEQ ID NO: 10275 - protein, 7 aa, Artificial Sequence
  Description of Artificial Sequence: Synthetic peptide
SLSSRNI

SEQ ID NO: 10276 - protein, 7 aa, Artificial Sequence
  Description of Artificial Sequence: Synthetic peptide
SLSTTSK

SEQ ID NO: 10277 - protein, 7 aa, Artificial Sequence
  Description of Artificial Sequence: Synthetic peptide
SLSVEPT

SEQ ID NO: 10278 - protein, 7 aa, Artificial Sequence
  Description of Artificial Sequence: Synthetic peptide
SLSYANH

SEQ ID NO: 10279 - protein, 7 aa, Artificial Sequence
  Description of Artificial Sequence: Synthetic peptide
SLSYAQE

SEQ ID NO: 10280 - protein, 7 aa, Artificial Sequence
  Description of Artificial Sequence: Synthetic peptide
SLTAGGH

SEQ ID NO: 10281 - protein, 7 aa, Artificial Sequence
  Description of Artificial Sequence: Synthetic peptide
SLTFSTG

SEQ ID NO: 10282 - protein, 7 aa, Artificial Sequence
  Description of Artificial Sequence: Synthetic peptide
SLTGDGV

SEQ ID NO: 10283 - protein, 7 aa, Artificial Sequence
  Description of Artificial Sequence: Synthetic peptide
SLTHINH

SEQ ID NO: 10284 - protein, 7 aa, Artificial Sequence
  Description of Artificial Sequence: Synthetic peptide
SLTHIPM

SEQ ID NO: 10285 - protein, 7 aa, Artificial Sequence
  Description of Artificial Sequence: Synthetic peptide
SLTIAAV

SEQ ID NO: 10286 - protein, 7 aa, Artificial Sequence
  Description of Artificial Sequence: Synthetic peptide
SLTNEAK

SEQ ID NO: 10287 - protein, 7 aa, Artificial Sequence
  Description of Artificial Sequence: Synthetic peptide
SLTNIAQ

SEQ ID NO: 10288 - protein, 7 aa, Artificial Sequence
  Description of Artificial Sequence: Synthetic peptide
SLTPIMR

SEQ ID NO: 10289 - protein, 7 aa, Artificial Sequence
  Description of Artificial Sequence: Synthetic peptide
SLTPRST

SEQ ID NO: 10290 - protein, 7 aa, Artificial Sequence
  Description of Artificial Sequence: Synthetic peptide
SLTPSFA

SEQ ID NO: 10291 - protein, 7 aa, Artificial Sequence
  Description of Artificial Sequence: Synthetic peptide
SLTSATT

SEQ ID NO: 10292 - protein, 7 aa, Artificial Sequence
  Description of Artificial Sequence: Synthetic peptide
SLTSRPM

SEQ ID NO: 10293 - protein, 7 aa, Artificial Sequence
  Description of Artificial Sequence: Synthetic peptide
SLTSTMS

SEQ ID NO: 10294 - protein, 7 aa, Artificial Sequence
  Description of Artificial Sequence: Synthetic peptide
SLTVLRN

SEQ ID NO: 10295 - protein, 7 aa, Artificial Sequence
  Description of Artificial Sequence: Synthetic peptide
SLTYDNS

SEQ ID NO: 10296 - protein, 7 aa, Artificial Sequence
  Description of Artificial Sequence: Synthetic peptide
SLTYERD

SEQ ID NO: 10297 - protein, 7 aa, Artificial Sequence
  Description of Artificial Sequence: Synthetic peptide
SLTYGAL

SEQ ID NO: 10298 - protein, 7 aa, Artificial Sequence
  Description of Artificial Sequence: Synthetic peptide
SLVERTS

SEQ ID NO: 10299 - protein, 7 aa, Artificial Sequence
  Description of Artificial Sequence: Synthetic peptide
SLVGTVD

SEQ ID NO: 10300 - protein, 7 aa, Artificial Sequence
  Description of Artificial Sequence: Synthetic peptide
SLVHRST

SEQ ID NO: 10301 - protein, 7 aa, Artificial Sequence
  Description of Artificial Sequence: Synthetic peptide
SLVNETS

SEQ ID NO: 10302 - protein, 7 aa, Artificial Sequence
  Description of Artificial Sequence: Synthetic peptide
SLVQKLS

SEQ ID NO: 10303 - protein, 7 aa, Artificial Sequence
  Description of Artificial Sequence: Synthetic peptide
SLVRSGD

SEQ ID NO: 10304 - protein, 7 aa, Artificial Sequence
  Description of Artificial Sequence: Synthetic peptide
SLVRSQN

SEQ ID NO: 10305 - protein, 7 aa, Artificial Sequence
  Description of Artificial Sequence: Synthetic peptide
SLVSRIS

SEQ ID NO: 10306 - protein, 7 aa, Artificial Sequence
  Description of Artificial Sequence: Synthetic peptide
SLVTAGS

SEQ ID NO: 10307 - protein, 7 aa, Artificial Sequence
  Description of Artificial Sequence: Synthetic peptide
SLVVQSA

SEQ ID NO: 10308 - protein, 7 aa, Artificial Sequence
  Description of Artificial Sequence: Synthetic peptide
SLVYDPL

SEQ ID NO: 10309 - protein, 7 aa, Artificial Sequence
  Description of Artificial Sequence: Synthetic peptide
SLYSGNV

SEQ ID NO: 10310 - protein, 7 aa, Artificial Sequence
  Description of Artificial Sequence: Synthetic peptide
SLYVPKH

SEQ ID NO: 10311 - protein, 7 aa, Artificial Sequence
  Description of Artificial Sequence: Synthetic peptide
SLYYKEE

SEQ ID NO: 10312 - protein, 7 aa, Artificial Sequence
  Description of Artificial Sequence: Synthetic peptide
SMAATPA

SEQ ID NO: 10313 - protein, 7 aa, Artificial Sequence
  Description of Artificial Sequence: Synthetic peptide
SMALSGI

SEQ ID NO: 10314 - protein, 7 aa, Artificial Sequence
  Description of Artificial Sequence: Synthetic peptide
SMAVSVP

SEQ ID NO: 10315 - protein, 7 aa, Artificial Sequence
  Description of Artificial Sequence: Synthetic peptide
SMDCLSP

SEQ ID NO: 10316 - protein, 7 aa, Artificial Sequence
  Description of Artificial Sequence: Synthetic peptide
SMDPGAR

SEQ ID NO: 10317 - protein, 7 aa, Artificial Sequence
  Description of Artificial Sequence: Synthetic peptide
SMDRKTG

SEQ ID NO: 10318 - protein, 7 aa, Artificial Sequence
  Description of Artificial Sequence: Synthetic peptide
SMDVSDT

SEQ ID NO: 10319 - protein, 7 aa, Artificial Sequence
  Description of Artificial Sequence: Synthetic peptide
SMESRLL

SEQ ID NO: 10320 - protein, 7 aa, Artificial Sequence
  Description of Artificial Sequence: Synthetic peptide
SMGAGPT

SEQ ID NO: 10321 - protein, 7 aa, Artificial Sequence
  Description of Artificial Sequence: Synthetic peptide
SMGDNRR

SEQ ID NO: 10322 - protein, 7 aa, Artificial Sequence
  Description of Artificial Sequence: Synthetic peptide
SMGSSAL

SEQ ID NO: 10323 - protein, 7 aa, Artificial Sequence
  Description of Artificial Sequence: Synthetic peptide
SMHALSV

SEQ ID NO: 10324 - protein, 7 aa, Artificial Sequence
  Description of Artificial Sequence: Synthetic peptide
SMHQTVH

SEQ ID NO: 10325 - protein, 7 aa, Artificial Sequence
  Description of Artificial Sequence: Synthetic peptide
SMHRTSP

SEQ ID NO: 10326 - protein, 7 aa, Artificial Sequence
  Description of Artificial Sequence: Synthetic peptide
SMHTTTT

SEQ ID NO: 10327 - protein, 7 aa, Artificial Sequence
  Description of Artificial Sequence: Synthetic peptide
SMHVPGV

SEQ ID NO: 10328 - protein, 7 aa, Artificial Sequence
  Description of Artificial Sequence: Synthetic peptide
SMKAVLN

SEQ ID NO: 10329 - protein, 7 aa, Artificial Sequence
  Description of Artificial Sequence: Synthetic peptide
SMLDSLL

SEQ ID NO: 10330 - protein, 7 aa, Artificial Sequence
  Description of Artificial Sequence: Synthetic peptide
SMLNVTV

SEQ ID NO: 10331 - protein, 7 aa, Artificial Sequence
  Description of Artificial Sequence: Synthetic peptide
SMLSASL

SEQ ID NO: 10332 - protein, 7 aa, Artificial Sequence
  Description of Artificial Sequence: Synthetic peptide
SMMAVKP

SEQ ID NO: 10333 - protein, 7 aa, Artificial Sequence
  Description of Artificial Sequence: Synthetic peptide
SMMEPFK

SEQ ID NO: 10334 - protein, 7 aa, Artificial Sequence
  Description of Artificial Sequence: Synthetic peptide
SMMNTVG

SEQ ID NO: 10335 - protein, 7 aa, Artificial Sequence
  Description of Artificial Sequence: Synthetic peptide
SMMQKVP

SEQ ID NO: 10336 - protein, 7 aa, Artificial Sequence
  Description of Artificial Sequence: Synthetic peptide
SMMTGLA

SEQ ID NO: 10337 - protein, 7 aa, Artificial Sequence
  Description of Artificial Sequence: Synthetic peptide
SMMYIEP

SEQ ID NO: 10338 - protein, 7 aa, Artificial Sequence
  Description of Artificial Sequence: Synthetic peptide
SMNLGST

SEQ ID NO: 10339 - protein, 7 aa, Artificial Sequence
  Description of Artificial Sequence: Synthetic peptide
SMNPGSA

SEQ ID NO: 10340 - protein, 7 aa, Artificial Sequence
  Description of Artificial Sequence: Synthetic peptide
SMNPMTV

SEQ ID NO: 10341 - protein, 7 aa, Artificial Sequence
  Description of Artificial Sequence: Synthetic peptide
SMNVYDT

SEQ ID NO: 10342 - protein, 7 aa, Artificial Sequence
  Description of Artificial Sequence: Synthetic peptide
SMPFSVA

SEQ ID NO: 10343 - protein, 7 aa, Artificial Sequence
  Description of Artificial Sequence: Synthetic peptide
SMPGVAN

SEQ ID NO: 10344 - protein, 7 aa, Artificial Sequence
  Description of Artificial Sequence: Synthetic peptide
SMPHTLS

SEQ ID NO: 10345 - protein, 7 aa, Artificial Sequence
  Description of Artificial Sequence: Synthetic peptide
SMPMPSP

SEQ ID NO: 10346 - protein, 7 aa, Artificial Sequence
  Description of Artificial Sequence: Synthetic peptide
SMPNAPS

SEQ ID NO: 10347 - protein, 7 aa, Artificial Sequence
  Description of Artificial Sequence: Synthetic peptide
SMPNPYQ

SEQ ID NO: 10348 - protein, 7 aa, Artificial Sequence
  Description of Artificial Sequence: Synthetic peptide
SMPRDLI

SEQ ID NO: 10349 - protein, 7 aa, Artificial Sequence
  Description of Artificial Sequence: Synthetic peptide
SMPREPG

SEQ ID NO: 10350 - protein, 7 aa, Artificial Sequence
  Description of Artificial Sequence: Synthetic peptide
SMPSPRV

SEQ ID NO: 10351 - protein, 7 aa, Artificial Sequence
  Description of Artificial Sequence: Synthetic peptide
SMRAAAF

SEQ ID NO: 10352 - protein, 7 aa, Artificial Sequence
  Description of Artificial Sequence: Synthetic peptide
SMRDTDR

SEQ ID NO: 10353 - protein, 7 aa, Artificial Sequence
  Description of Artificial Sequence: Synthetic peptide
SMRPSDN

SEQ ID NO: 10354 - protein, 7 aa, Artificial Sequence
  Description of Artificial Sequence: Synthetic peptide
SMRSGEP

SEQ ID NO: 10355 - protein, 7 aa, Artificial Sequence
  Description of Artificial Sequence: Synthetic peptide
SMRSRDT

SEQ ID NO: 10356 - protein, 7 aa, Artificial Sequence
  Description of Artificial Sequence: Synthetic peptide
SMRSSPL

SEQ ID NO: 10357 - protein, 7 aa, Artificial Sequence
  Description of Artificial Sequence: Synthetic peptide
SMSGFDV

SEQ ID NO: 10358 - protein, 7 aa, Artificial Sequence
  Description of Artificial Sequence: Synthetic peptide
SMSGRIT

SEQ ID NO: 10359 - protein, 7 aa, Artificial Sequence
  Description of Artificial Sequence: Synthetic peptide
SMSLSGL

SEQ ID NO: 10360 - protein, 7 aa, Artificial Sequence
  Description of Artificial Sequence: Synthetic peptide
SMSPSHP

SEQ ID NO: 10361 - protein, 7 aa, Artificial Sequence
  Description of Artificial Sequence: Synthetic peptide
SMSQPTY

SEQ ID NO: 10362 - protein, 7 aa, Artificial Sequence
  Description of Artificial Sequence: Synthetic peptide
SMSRPQP

SEQ ID NO: 10363 - protein, 7 aa, Artificial Sequence
  Description of Artificial Sequence: Synthetic peptide
SMSSFPP

SEQ ID NO: 10364 - protein, 7 aa, Artificial Sequence
  Description of Artificial Sequence: Synthetic peptide
SMSVEPY

SEQ ID NO: 10365 - protein, 7 aa, Artificial Sequence
  Description of Artificial Sequence: Synthetic peptide
SMTADLI

SEQ ID NO: 10366 - protein, 7 aa, Artificial Sequence
  Description of Artificial Sequence: Synthetic peptide
SMTALTA

SEQ ID NO: 10367 - protein, 7 aa, Artificial Sequence
  Description of Artificial Sequence: Synthetic peptide
SMTGPEL

SEQ ID NO: 10368 - protein, 7 aa, Artificial Sequence
  Description of Artificial Sequence: Synthetic peptide
SMTLGTA

SEQ ID NO: 10369 - protein, 7 aa, Artificial Sequence
  Description of Artificial Sequence: Synthetic peptide
SMTPSVT

SEQ ID NO: 10370 - protein, 7 aa, Artificial Sequence
  Description of Artificial Sequence: Synthetic peptide
SMTTIGP

SEQ ID NO: 10371 - protein, 7 aa, Artificial Sequence
  Description of Artificial Sequence: Synthetic peptide
SMVQGRV

SEQ ID NO: 10372 - protein, 7 aa, Artificial Sequence
  Description of Artificial Sequence: Synthetic peptide
SMYAAGS

SEQ ID NO: 10373 - protein, 7 aa, Artificial Sequence
  Description of Artificial Sequence: Synthetic peptide
SMYDPRA

SEQ ID NO: 10374 - protein, 7 aa, Artificial Sequence
  Description of Artificial Sequence: Synthetic peptide
SNAAIPL

SEQ ID NO: 10375 - protein, 7 aa, Artificial Sequence
  Description of Artificial Sequence: Synthetic peptide
SNALNIG

SEQ ID NO: 10376 - protein, 7 aa, Artificial Sequence
  Description of Artificial Sequence: Synthetic peptide
SNARAPV

SEQ ID NO: 10377 - protein, 7 aa, Artificial Sequence
  Description of Artificial Sequence: Synthetic peptide
SNARPPS

SEQ ID NO: 10378 - protein, 7 aa, Artificial Sequence
  Description of Artificial Sequence: Synthetic peptide
SNASHSV

SEQ ID NO: 10379 - protein, 7 aa, Artificial Sequence
  Description of Artificial Sequence: Synthetic peptide
SNASMMH

SEQ ID NO: 10380 - protein, 7 aa, Artificial Sequence
  Description of Artificial Sequence: Synthetic peptide
SNATTPT

SEQ ID NO: 10381 - protein, 7 aa, Artificial Sequence
  Description of Artificial Sequence: Synthetic peptide
SNCPKDC

SEQ ID NO: 10382 - protein, 7 aa, Artificial Sequence
  Description of Artificial Sequence: Synthetic peptide
SNCSSLK

SEQ ID NO: 10383 - protein, 7 aa, Artificial Sequence
  Description of Artificial Sequence: Synthetic peptide
SNENRSS

SEQ ID NO: 10384 - protein, 7 aa, Artificial Sequence
  Description of Artificial Sequence: Synthetic peptide
SNERTTN

SEQ ID NO: 10385 - protein, 7 aa, Artificial Sequence
  Description of Artificial Sequence: Synthetic peptide
SNFTEAM

SEQ ID NO: 10386 - protein, 7 aa, Artificial Sequence
  Description of Artificial Sequence: Synthetic peptide
SNGHDAS

SEQ ID NO: 10387 - protein, 7 aa, Artificial Sequence
  Description of Artificial Sequence: Synthetic peptide
SNGHPPW

SEQ ID NO: 10388 - protein, 7 aa, Artificial Sequence
  Description of Artificial Sequence: Synthetic peptide
SNGIDSG

SEQ ID NO: 10389 - protein, 7 aa, Artificial Sequence
  Description of Artificial Sequence: Synthetic peptide
SNGLNRL

SEQ ID NO: 10390 - protein, 7 aa, Artificial Sequence
  Description of Artificial Sequence: Synthetic peptide
SNGNRDS

SEQ ID NO: 10391 - protein, 7 aa, Artificial Sequence
  Description of Artificial Sequence: Synthetic peptide
SNGQTSP

SEQ ID NO: 10392 - protein, 7 aa, Artificial Sequence
  Description of Artificial Sequence: Synthetic peptide
SNGSKVV

SEQ ID NO: 10393 - protein, 7 aa, Artificial Sequence
  Description of Artificial Sequence: Synthetic peptide
SNGSPKA

SEQ ID NO: 10394 - protein, 7 aa, Artificial Sequence
  Description of Artificial Sequence: Synthetic peptide
SNGSTYK

SEQ ID NO: 10395 - protein, 7 aa, Artificial Sequence
  Description of Artificial Sequence: Synthetic peptide
SNGTRSY

SEQ ID NO: 10396 - protein, 7 aa, Artificial Sequence
  Description of Artificial Sequence: Synthetic peptide
SNHAHSL

SEQ ID NO: 10397 - protein, 7 aa, Artificial Sequence
  Description of Artificial Sequence: Synthetic peptide
SNHEIDY

SEQ ID NO: 10398 - protein, 7 aa, Artificial Sequence
  Description of Artificial Sequence: Synthetic peptide
SNHGGVS

SEQ ID NO: 10399 - protein, 7 aa, Artificial Sequence
  Description of Artificial Sequence: Synthetic peptide
SNIGGGY

SEQ ID NO: 10400 - protein, 7 aa, Artificial Sequence
  Description of Artificial Sequence: Synthetic peptide
SNILQAT

SEQ ID NO: 10401 - protein, 7 aa, Artificial Sequence
  Description of Artificial Sequence: Synthetic peptide
SNKAAYA

SEQ ID NO: 10402 - protein, 7 aa, Artificial Sequence
  Description of Artificial Sequence: Synthetic peptide
SNKFVTA

SEQ ID NO: 10403 - protein, 7 aa, Artificial Sequence
  Description of Artificial Sequence: Synthetic peptide
SNKGLTG

SEQ ID NO: 10404 - protein, 7 aa, Artificial Sequence
  Description of Artificial Sequence: Synthetic peptide
SNKGPVT

SEQ ID NO: 10405 - protein, 7 aa, Artificial Sequence
  Description of Artificial Sequence: Synthetic peptide
SNKYNEV

SEQ ID NO: 10406 - protein, 7 aa, Artificial Sequence
  Description of Artificial Sequence: Synthetic peptide
SNLETSR

SEQ ID NO: 10407 - protein, 7 aa, Artificial Sequence
  Description of Artificial Sequence: Synthetic peptide
SNLGFPA

SEQ ID NO: 10408 - protein, 7 aa, Artificial Sequence
  Description of Artificial Sequence: Synthetic peptide
SNLGISA

SEQ ID NO: 10409 - protein, 7 aa, Artificial Sequence
  Description of Artificial Sequence: Synthetic peptide
SNLLHAS

SEQ ID NO: 10410 - protein, 7 aa, Artificial Sequence
  Description of Artificial Sequence: Synthetic peptide
SNLSPEQ

SEQ ID NO: 10411 - protein, 7 aa, Artificial Sequence
  Description of Artificial Sequence: Synthetic peptide
SNLTMSN

SEQ ID NO: 10412 - protein, 7 aa, Artificial Sequence
  Description of Artificial Sequence: Synthetic peptide
SNMDTSK

SEQ ID NO: 10413 - protein, 7 aa, Artificial Sequence
  Description of Artificial Sequence: Synthetic peptide
SNMMLSE

SEQ ID NO: 10414 - protein, 7 aa, Artificial Sequence
  Description of Artificial Sequence: Synthetic peptide
SNMSVSG

SEQ ID NO: 10415 - protein, 7 aa, Artificial Sequence
  Description of Artificial Sequence: Synthetic peptide
SNMVPMS

SEQ ID NO: 10416 - protein, 7 aa, Artificial Sequence
  Description of Artificial Sequence: Synthetic peptide
SNNGEHV

SEQ ID NO: 10417 - protein, 7 aa, Artificial Sequence
  Description of Artificial Sequence: Synthetic peptide
SNNQRVV

SEQ ID NO: 10418 - protein, 7 aa, Artificial Sequence
  Description of Artificial Sequence: Synthetic peptide
SNPALSR

SEQ ID NO: 10419 - protein, 7 aa, Artificial Sequence
  Description of Artificial Sequence: Synthetic peptide
SNPASYV

SEQ ID NO: 10420 - protein, 7 aa, Artificial Sequence
  Description of Artificial Sequence: Synthetic peptide
SNPLRTL

SEQ ID NO: 10421 - protein, 7 aa, Artificial Sequence
  Description of Artificial Sequence: Synthetic peptide
SNPMTLT

SEQ ID NO: 10422 - protein, 7 aa, Artificial Sequence
  Description of Artificial Sequence: Synthetic peptide
SNPPPLS

SEQ ID NO: 10423 - protein, 7 aa, Artificial Sequence
  Description of Artificial Sequence: Synthetic peptide
SNPPVQK

SEQ ID NO: 10424 - protein, 7 aa, Artificial Sequence
  Description of Artificial Sequence: Synthetic peptide
SNPSAAP

SEQ ID NO: 10425 - protein, 7 aa, Artificial Sequence
  Description of Artificial Sequence: Synthetic peptide
SNQQGMA

SEQ ID NO: 10426 - protein, 7 aa, Artificial Sequence
  Description of Artificial Sequence: Synthetic peptide
SNQSPPP

SEQ ID NO: 10427 - protein, 7 aa, Artificial Sequence
  Description of Artificial Sequence: Synthetic peptide
SNSGRAP

SEQ ID NO: 10428 - protein, 7 aa, Artificial Sequence
  Description of Artificial Sequence: Synthetic peptide
SNSHSPE

SEQ ID NO: 10429 - protein, 7 aa, Artificial Sequence
  Description of Artificial Sequence: Synthetic peptide
SNSISAA

SEQ ID NO: 10430 - protein, 7 aa, Artificial Sequence
  Description of Artificial Sequence: Synthetic peptide
SNSLPVM

SEQ ID NO: 10431 - protein, 7 aa, Artificial Sequence
  Description of Artificial Sequence: Synthetic peptide
SNSPRGY

SEQ ID NO: 10432 - protein, 7 aa, Artificial Sequence
  Description of Artificial Sequence: Synthetic peptide
SNSQPNV

SEQ ID NO: 10433 - protein, 7 aa, Artificial Sequence
  Description of Artificial Sequence: Synthetic peptide
SNSRVAG

SEQ ID NO: 10434 - protein, 7 aa, Artificial Sequence
  Description of Artificial Sequence: Synthetic peptide
SNSSAVH

SEQ ID NO: 10435 - protein, 7 aa, Artificial Sequence
  Description of Artificial Sequence: Synthetic peptide
SNSTIIY

SEQ ID NO: 10436 - protein, 7 aa, Artificial Sequence
  Description of Artificial Sequence: Synthetic peptide
SNSYMML

SEQ ID NO: 10437 - protein, 7 aa, Artificial Sequence
  Description of Artificial Sequence: Synthetic peptide
SNTLSQL

SEQ ID NO: 10438 - protein, 7 aa, Artificial Sequence
  Description of Artificial Sequence: Synthetic peptide
SNTNLSE

SEQ ID NO: 10439 - protein, 7 aa, Artificial Sequence
  Description of Artificial Sequence: Synthetic peptide
SNTTAAV

SEQ ID NO: 10440 - protein, 7 aa, Artificial Sequence
  Description of Artificial Sequence: Synthetic peptide
SNVAIVQ

SEQ ID NO: 10441 - protein, 7 aa, Artificial Sequence
  Description of Artificial Sequence: Synthetic peptide
SNVEIME

SEQ ID NO: 10442 - protein, 7 aa, Artificial Sequence
  Description of Artificial Sequence: Synthetic peptide
SNVGTHF

SEQ ID NO: 10443 - protein, 7 aa, Artificial Sequence
  Description of Artificial Sequence: Synthetic peptide
SNVHSLH

SEQ ID NO: 10444 - protein, 7 aa, Artificial Sequence
  Description of Artificial Sequence: Synthetic peptide
SNVNGAD

SEQ ID NO: 10445 - protein, 7 aa, Artificial Sequence
  Description of Artificial Sequence: Synthetic peptide
SNVREVA

SEQ ID NO: 10446 - protein, 7 aa, Artificial Sequence
  Description of Artificial Sequence: Synthetic peptide
SNVSPRP

SEQ ID NO: 10447 - protein, 7 aa, Artificial Sequence
  Description of Artificial Sequence: Synthetic peptide
SNVVVLH

SEQ ID NO: 10448 - protein, 7 aa, Artificial Sequence
  Description of Artificial Sequence: Synthetic peptide
SNYSLNH

SEQ ID NO: 10449 - protein, 7 aa, Artificial Sequence
  Description of Artificial Sequence: Synthetic peptide
SPAAEIK

SEQ ID NO: 10450 - protein, 7 aa, Artificial Sequence
  Description of Artificial Sequence: Synthetic peptide
SPALNRS

SEQ ID NO: 10451 - protein, 7 aa, Artificial Sequence
  Description of Artificial Sequence: Synthetic peptide
SPANQYD

SEQ ID NO: 10452 - protein, 7 aa, Artificial Sequence
  Description of Artificial Sequence: Synthetic peptide
SPAPYAL

SEQ ID NO: 10453 - protein, 7 aa, Artificial Sequence
  Description of Artificial Sequence: Synthetic peptide
SPAQSDD

SEQ ID NO: 10454 - protein, 7 aa, Artificial Sequence
  Description of Artificial Sequence: Synthetic peptide
SPARAGY

SEQ ID NO: 10455 - protein, 7 aa, Artificial Sequence
  Description of Artificial Sequence: Synthetic peptide
SPARNLI

SEQ ID NO: 10456 - protein, 7 aa, Artificial Sequence
  Description of Artificial Sequence: Synthetic peptide
SPASHHR

SEQ ID NO: 10457 - protein, 7 aa, Artificial Sequence
  Description of Artificial Sequence: Synthetic peptide
SPAVGCH

SEQ ID NO: 10458 - protein, 7 aa, Artificial Sequence
  Description of Artificial Sequence: Synthetic peptide
SPCPGDA

SEQ ID NO: 10459 - protein, 7 aa, Artificial Sequence
  Description of Artificial Sequence: Synthetic peptide
SPDLPGL

SEQ ID NO: 10460 - protein, 7 aa, Artificial Sequence
  Description of Artificial Sequence: Synthetic peptide
SPDLRTP

SEQ ID NO: 10461 - protein, 7 aa, Artificial Sequence
  Description of Artificial Sequence: Synthetic peptide
SPDRAQL

SEQ ID NO: 10462 - protein, 7 aa, Artificial Sequence
  Description of Artificial Sequence: Synthetic peptide
SPDSNGP

SEQ ID NO: 10463 - protein, 7 aa, Artificial Sequence
  Description of Artificial Sequence: Synthetic peptide
SPDVVVS

SEQ ID NO: 10464 - protein, 7 aa, Artificial Sequence
  Description of Artificial Sequence: Synthetic peptide
SPEFGTG

SEQ ID NO: 10465 - protein, 7 aa, Artificial Sequence
  Description of Artificial Sequence: Synthetic peptide
SPELPKA

SEQ ID NO: 10466 - protein, 7 aa, Artificial Sequence
  Description of Artificial Sequence: Synthetic peptide
SPESRMP

SEQ ID NO: 10467 - protein, 7 aa, Artificial Sequence
  Description of Artificial Sequence: Synthetic peptide
SPFDANV

SEQ ID NO: 10468 - protein, 7 aa, Artificial Sequence
  Description of Artificial Sequence: Synthetic peptide
SPFPPQL

SEQ ID NO: 10469 - protein, 7 aa, Artificial Sequence
  Description of Artificial Sequence: Synthetic peptide
SPFRDQE

SEQ ID NO: 10470 - protein, 7 aa, Artificial Sequence
  Description of Artificial Sequence: Synthetic peptide
SPFTMRP

SEQ ID NO: 10471 - protein, 7 aa, Artificial Sequence
  Description of Artificial Sequence: Synthetic peptide
SPGDPAE

SEQ ID NO: 10472 - protein, 7 aa, Artificial Sequence
  Description of Artificial Sequence: Synthetic peptide
SPGGHVS

SEQ ID NO: 10473 - protein, 7 aa, Artificial Sequence
  Description of Artificial Sequence: Synthetic peptide
SPGHPPS

SEQ ID NO: 10474 - protein, 7 aa, Artificial Sequence
  Description of Artificial Sequence: Synthetic peptide
SPGIRDF

SEQ ID NO: 10475 - protein, 7 aa, Artificial Sequence
  Description of Artificial Sequence: Synthetic peptide
SPGISRL

SEQ ID NO: 10476 - protein, 7 aa, Artificial Sequence
  Description of Artificial Sequence: Synthetic peptide
SPGPHKS

SEQ ID NO: 10477 - protein, 7 aa, Artificial Sequence
  Description of Artificial Sequence: Synthetic peptide
SPGSGKS

SEQ ID NO: 10478 - protein, 7 aa, Artificial Sequence
  Description of Artificial Sequence: Synthetic peptide
SPGSPMS

SEQ ID NO: 10479 - protein, 7 aa, Artificial Sequence
  Description of Artificial Sequence: Synthetic peptide
SPGTLPT

SEQ ID NO: 10480 - protein, 7 aa, Artificial Sequence
  Description of Artificial Sequence: Synthetic peptide
SPGVMPG

SEQ ID NO: 10481 - protein, 7 aa, Artificial Sequence
  Description of Artificial Sequence: Synthetic peptide
SPHDETS

SEQ ID NO: 10482 - protein, 7 aa, Artificial Sequence
  Description of Artificial Sequence: Synthetic peptide
SPHDSPL

SEQ ID NO: 10483 - protein, 7 aa, Artificial Sequence
  Description of Artificial Sequence: Synthetic peptide
SPHITHM

SEQ ID NO: 10484 - protein, 7 aa, Artificial Sequence
  Description of Artificial Sequence: Synthetic peptide
SPHKNAH

SEQ ID NO: 10485 - protein, 7 aa, Artificial Sequence
  Description of Artificial Sequence: Synthetic peptide
SPHLRGA

SEQ ID NO: 10486 - protein, 7 aa, Artificial Sequence
  Description of Artificial Sequence: Synthetic peptide
SPHPENH

SEQ ID NO: 10487 - protein, 7 aa, Artificial Sequence
  Description of Artificial Sequence: Synthetic peptide
SPIERRT

SEQ ID NO: 10488 - protein, 7 aa, Artificial Sequence
  Description of Artificial Sequence: Synthetic peptide
SPIQTNS

SEQ ID NO: 10489 - protein, 7 aa, Artificial Sequence
  Description of Artificial Sequence: Synthetic peptide
SPIQTQG

SEQ ID NO: 10490 - protein, 7 aa, Artificial Sequence
  Description of Artificial Sequence: Synthetic peptide
SPISIKN

SEQ ID NO: 10491 - protein, 7 aa, Artificial Sequence
  Description of Artificial Sequence: Synthetic peptide
SPITPGR

SEQ ID NO: 10492 - protein, 7 aa, Artificial Sequence
  Description of Artificial Sequence: Synthetic peptide
SPITYNT

SEQ ID NO: 10493 - protein, 7 aa, Artificial Sequence
  Description of Artificial Sequence: Synthetic peptide
SPKIPTH

SEQ ID NO: 10494 - protein, 7 aa, Artificial Sequence
  Description of Artificial Sequence: Synthetic peptide
SPKIPWT

SEQ ID NO: 10495 - protein, 7 aa, Artificial Sequence
  Description of Artificial Sequence: Synthetic peptide
SPKMLRS

SEQ ID NO: 10496 - protein, 7 aa, Artificial Sequence
  Description of Artificial Sequence: Synthetic peptide
SPKVAGV

SEQ ID NO: 10497 - protein, 7 aa, Artificial Sequence
  Description of Artificial Sequence: Synthetic peptide
SPLAEAR

SEQ ID NO: 10498 - protein, 7 aa, Artificial Sequence
  Description of Artificial Sequence: Synthetic peptide
SPLATRV

SEQ ID NO: 10499 - protein, 7 aa, Artificial Sequence
  Description of Artificial Sequence: Synthetic peptide
SPLIVNT

SEQ ID NO: 10500 - protein, 7 aa, Artificial Sequence
  Description of Artificial Sequence: Synthetic peptide
SPLLLAS

SEQ ID NO: 10501 - protein, 7 aa, Artificial Sequence
  Description of Artificial Sequence: Synthetic peptide
SPLPPSN

SEQ ID NO: 10502 - protein, 7 aa, Artificial Sequence
  Description of Artificial Sequence: Synthetic peptide
SPLRERV

SEQ ID NO: 10503 - protein, 7 aa, Artificial Sequence
  Description of Artificial Sequence: Synthetic peptide
SPLRSDV

SEQ ID NO: 10504 - protein, 7 aa, Artificial Sequence
  Description of Artificial Sequence: Synthetic peptide
SPLTDLS

SEQ ID NO: 10505 - protein, 7 aa, Artificial Sequence
  Description of Artificial Sequence: Synthetic peptide
SPLTDSY

SEQ ID NO: 10506 - protein, 7 aa, Artificial Sequence
  Description of Artificial Sequence: Synthetic peptide
SPLTTVP

SEQ ID NO: 10507 - protein, 7 aa, Artificial Sequence
  Description of Artificial Sequence: Synthetic peptide
SPLVSTA

SEQ ID NO: 10508 - protein, 7 aa, Artificial Sequence
  Description of Artificial Sequence: Synthetic peptide
SPMKAGT

SEQ ID NO: 10509 - protein, 7 aa, Artificial Sequence
  Description of Artificial Sequence: Synthetic peptide
SPMRIEP

SEQ ID NO: 10510 - protein, 7 aa, Artificial Sequence
  Description of Artificial Sequence: Synthetic peptide
SPMRPQE

SEQ ID NO: 10511 - protein, 7 aa, Artificial Sequence
  Description of Artificial Sequence: Synthetic peptide
SPNALLD

SEQ ID NO: 10512 - protein, 7 aa, Artificial Sequence
  Description of Artificial Sequence: Synthetic peptide
SPNATTD

SEQ ID NO: 10513 - protein, 7 aa, Artificial Sequence
  Description of Artificial Sequence: Synthetic peptide
SPNMDRL

SEQ ID NO: 10514 - protein, 7 aa, Artificial Sequence
  Description of Artificial Sequence: Synthetic peptide
SPNMGQF

SEQ ID NO: 10515 - protein, 7 aa, Artificial Sequence
  Description of Artificial Sequence: Synthetic peptide
SPNRESM

SEQ ID NO: 10516 - protein, 7 aa, Artificial Sequence
  Description of Artificial Sequence: Synthetic peptide
SPNTPTF

SEQ ID NO: 10517 - protein, 7 aa, Artificial Sequence
  Description of Artificial Sequence: Synthetic peptide
SPNTRTA

SEQ ID NO: 10518 - protein, 7 aa, Artificial Sequence
  Description of Artificial Sequence: Synthetic peptide
SPPNFPE

SEQ ID NO: 10519 - protein, 7 aa, Artificial Sequence
  Description of Artificial Sequence: Synthetic peptide
SPPQANA

SEQ ID NO: 10520 - protein, 7 aa, Artificial Sequence
  Description of Artificial Sequence: Synthetic peptide
SPPQVTK

SEQ ID NO: 10521 - protein, 7 aa, Artificial Sequence
  Description of Artificial Sequence: Synthetic peptide
SPPRNME

SEQ ID NO: 10522 - protein, 7 aa, Artificial Sequence
  Description of Artificial Sequence: Synthetic peptide
SPPRVGL

SEQ ID NO: 10523 - protein, 7 aa, Artificial Sequence
  Description of Artificial Sequence: Synthetic peptide
SPPTARD

SEQ ID NO: 10524 - protein, 7 aa, Artificial Sequence
  Description of Artificial Sequence: Synthetic peptide
SPPVSFE

SEQ ID NO: 10525 - protein, 7 aa, Artificial Sequence
  Description of Artificial Sequence: Synthetic peptide
SPQGNGA

SEQ ID NO: 10526 - protein, 7 aa, Artificial Sequence
  Description of Artificial Sequence: Synthetic peptide
SPQGTYV

SEQ ID NO: 10527 - protein, 7 aa, Artificial Sequence
  Description of Artificial Sequence: Synthetic peptide
SPQITRP

SEQ ID NO: 10528 - protein, 7 aa, Artificial Sequence
  Description of Artificial Sequence: Synthetic peptide
SPQRIED

SEQ ID NO: 10529 - protein, 7 aa, Artificial Sequence
  Description of Artificial Sequence: Synthetic peptide
SPQRPMN

SEQ ID NO: 10530 - protein, 7 aa, Artificial Sequence
  Description of Artificial Sequence: Synthetic peptide
SPRARID

SEQ ID NO: 10531 - protein, 7 aa, Artificial Sequence
  Description of Artificial Sequence: Synthetic peptide
SPRDPEI

SEQ ID NO: 10532 - protein, 7 aa, Artificial Sequence
  Description of Artificial Sequence: Synthetic peptide
SPRECGL

SEQ ID NO: 10533 - protein, 7 aa, Artificial Sequence
  Description of Artificial Sequence: Synthetic peptide
SPRGMGL

SEQ ID NO: 10534 - protein, 7 aa, Artificial Sequence
  Description of Artificial Sequence: Synthetic peptide
SPRGMPL

SEQ ID NO: 10535 - protein, 7 aa, Artificial Sequence
  Description of Artificial Sequence: Synthetic peptide
SPRHNLG

SEQ ID NO: 10536 - protein, 7 aa, Artificial Sequence
  Description of Artificial Sequence: Synthetic peptide
SPRIRDD

SEQ ID NO: 10537 - protein, 7 aa, Artificial Sequence
  Description of Artificial Sequence: Synthetic peptide
SPRPSYA

SEQ ID NO: 10538 - protein, 7 aa, Artificial Sequence
  Description of Artificial Sequence: Synthetic peptide
SPRQLSV

SEQ ID NO: 10539 - protein, 7 aa, Artificial Sequence
  Description of Artificial Sequence: Synthetic peptide
SPRQNIP

SEQ ID NO: 10540 - protein, 7 aa, Artificial Sequence
  Description of Artificial Sequence: Synthetic peptide
SPRQSIS

SEQ ID NO: 10541 - protein, 7 aa, Artificial Sequence
  Description of Artificial Sequence: Synthetic peptide
SPRTALP

SEQ ID NO: 10542 - protein, 7 aa, Artificial Sequence
  Description of Artificial Sequence: Synthetic peptide
SPRTGLG

SEQ ID NO: 10543 - protein, 7 aa, Artificial Sequence
  Description of Artificial Sequence: Synthetic peptide
SPRWHED

SEQ ID NO: 10544 - protein, 7 aa, Artificial Sequence
  Description of Artificial Sequence: Synthetic peptide
SPSALLH

SEQ ID NO: 10545 - protein, 7 aa, Artificial Sequence
  Description of Artificial Sequence: Synthetic peptide
SPSAMGI

SEQ ID NO: 10546 - protein, 7 aa, Artificial Sequence
  Description of Artificial Sequence: Synthetic peptide
SPSGNNG

SEQ ID NO: 10547 - protein, 7 aa, Artificial Sequence
  Description of Artificial Sequence: Synthetic peptide
SPSGPVR

SEQ ID NO: 10548 - protein, 7 aa, Artificial Sequence
  Description of Artificial Sequence: Synthetic peptide
SPSGSLA

SEQ ID NO: 10549 - protein, 7 aa, Artificial Sequence
  Description of Artificial Sequence: Synthetic peptide
SPSGVAG

SEQ ID NO: 10550 - protein, 7 aa, Artificial Sequence
  Description of Artificial Sequence: Synthetic peptide
SPSLSRS

SEQ ID NO: 10551 - protein, 7 aa, Artificial Sequence
  Description of Artificial Sequence: Synthetic peptide
SPSLTAG

SEQ ID NO: 10552 - protein, 7 aa, Artificial Sequence
  Description of Artificial Sequence: Synthetic peptide
SPSLTSD

SEQ ID NO: 10553 - protein, 7 aa, Artificial Sequence
  Description of Artificial Sequence: Synthetic peptide
SPSMPAR

SEQ ID NO: 10554 - protein, 7 aa, Artificial Sequence
  Description of Artificial Sequence: Synthetic peptide
SPSRHEI

SEQ ID NO: 10555 - protein, 7 aa, Artificial Sequence
  Description of Artificial Sequence: Synthetic peptide
SPSRMNS

SEQ ID NO: 10556 - protein, 7 aa, Artificial Sequence
  Description of Artificial Sequence: Synthetic peptide
SPSRPST

SEQ ID NO: 10557 - protein, 7 aa, Artificial Sequence
  Description of Artificial Sequence: Synthetic peptide
SPSRTSL

SEQ ID NO: 10558 - protein, 7 aa, Artificial Sequence
  Description of Artificial Sequence: Synthetic peptide
SPSSLKE

SEQ ID NO: 10559 - protein, 7 aa, Artificial Sequence
  Description of Artificial Sequence: Synthetic peptide
SPSTGKL

SEQ ID NO: 10560 - protein, 7 aa, Artificial Sequence
  Description of Artificial Sequence: Synthetic peptide
SPSTLPP

SEQ ID NO: 10561 - protein, 7 aa, Artificial Sequence
  Description of Artificial Sequence: Synthetic peptide
SPSTNNT

SEQ ID NO: 10562 - protein, 7 aa, Artificial Sequence
  Description of Artificial Sequence: Synthetic peptide
SPSTRMG

SEQ ID NO: 10563 - protein, 7 aa, Artificial Sequence
  Description of Artificial Sequence: Synthetic peptide
SPSVAYH

SEQ ID NO: 10564 - protein, 7 aa, Artificial Sequence
  Description of Artificial Sequence: Synthetic peptide
SPSVELF

SEQ ID NO: 10565 - protein, 7 aa, Artificial Sequence
  Description of Artificial Sequence: Synthetic peptide
SPTAKMW

SEQ ID NO: 10566 - protein, 7 aa, Artificial Sequence
  Description of Artificial Sequence: Synthetic peptide
SPTCVAC

SEQ ID NO: 10567 - protein, 7 aa, Artificial Sequence
  Description of Artificial Sequence: Synthetic peptide
SPTDFMN

SEQ ID NO: 10568 - protein, 7 aa, Artificial Sequence
  Description of Artificial Sequence: Synthetic peptide
SPTFVGT

SEQ ID NO: 10569 - protein, 7 aa, Artificial Sequence
  Description of Artificial Sequence: Synthetic peptide
SPTGVQP

SEQ ID NO: 10570 - protein, 7 aa, Artificial Sequence
  Description of Artificial Sequence: Synthetic peptide
SPTITAR

SEQ ID NO: 10571 - protein, 7 aa, Artificial Sequence
  Description of Artificial Sequence: Synthetic peptide
SPTLSPG

SEQ ID NO: 10572 - protein, 7 aa, Artificial Sequence
  Description of Artificial Sequence: Synthetic peptide
SPTRNIV

SEQ ID NO: 10573 - protein, 7 aa, Artificial Sequence
  Description of Artificial Sequence: Synthetic peptide
SPTSSVT

SEQ ID NO: 10574 - protein, 7 aa, Artificial Sequence
  Description of Artificial Sequence: Synthetic peptide
SPTTQRT

SEQ ID NO: 10575 - protein, 7 aa, Artificial Sequence
  Description of Artificial Sequence: Synthetic peptide
SPTVNPI

SEQ ID NO: 10576 - protein, 7 aa, Artificial Sequence
  Description of Artificial Sequence: Synthetic peptide
SPTVVLA

SEQ ID NO: 10577 - protein, 7 aa, Artificial Sequence
  Description of Artificial Sequence: Synthetic peptide
SPTYTID

SEQ ID NO: 10578 - protein, 7 aa, Artificial Sequence
  Description of Artificial Sequence: Synthetic peptide
SPVARNN

SEQ ID NO: 10579 - protein, 7 aa, Artificial Sequence
  Description of Artificial Sequence: Synthetic peptide
SPVGGKD

SEQ ID NO: 10580 - protein, 7 aa, Artificial Sequence
  Description of Artificial Sequence: Synthetic peptide
SPVGSSG

SEQ ID NO: 10581 - protein, 7 aa, Artificial Sequence
  Description of Artificial Sequence: Synthetic peptide
SPVMLQS

SEQ ID NO: 10582 - protein, 7 aa, Artificial Sequence
  Description of Artificial Sequence: Synthetic peptide
SPVRHPS

SEQ ID NO: 10583 - protein, 7 aa, Artificial Sequence
  Description of Artificial Sequence: Synthetic peptide
SPVSDNP

SEQ ID NO: 10584 - protein, 7 aa, Artificial Sequence
  Description of Artificial Sequence: Synthetic peptide
SPVVAQP

SEQ ID NO: 10585 - protein, 7 aa, Artificial Sequence
  Description of Artificial Sequence: Synthetic peptide
SPVVPRA

SEQ ID NO: 10586 - protein, 7 aa, Artificial Sequence
  Description of Artificial Sequence: Synthetic peptide
SPYGHQN

SEQ ID NO: 10587 - protein, 7 aa, Artificial Sequence
  Description of Artificial Sequence: Synthetic peptide
SPYKQNS

SEQ ID NO: 10588 - protein, 7 aa, Artificial Sequence
  Description of Artificial Sequence: Synthetic peptide
SPYNITS

SEQ ID NO: 10589 - protein, 7 aa, Artificial Sequence
  Description of Artificial Sequence: Synthetic peptide
SPYPALL

SEQ ID NO: 10590 - protein, 7 aa, Artificial Sequence
  Description of Artificial Sequence: Synthetic peptide
SQAGAIP

SEQ ID NO: 10591 - protein, 7 aa, Artificial Sequence
  Description of Artificial Sequence: Synthetic peptide
SQAMQTL

SEQ ID NO: 10592 - protein, 7 aa, Artificial Sequence
  Description of Artificial Sequence: Synthetic peptide
SQAPRDP

SEQ ID NO: 10593 - protein, 7 aa, Artificial Sequence
  Description of Artificial Sequence: Synthetic peptide
SQATGRS

SEQ ID NO: 10594 - protein, 7 aa, Artificial Sequence
  Description of Artificial Sequence: Synthetic peptide
SQATQHN

SEQ ID NO: 10595 - protein, 7 aa, Artificial Sequence
  Description of Artificial Sequence: Synthetic peptide
SQAVPPS

SEQ ID NO: 10596 - protein, 7 aa, Artificial Sequence
  Description of Artificial Sequence: Synthetic peptide
SQDMYRG

SEQ ID NO: 10597 - protein, 7 aa, Artificial Sequence
  Description of Artificial Sequence: Synthetic peptide
SQDNVQE

SEQ ID NO: 10598 - protein, 7 aa, Artificial Sequence
  Description of Artificial Sequence: Synthetic peptide
SQDWNLT

SEQ ID NO: 10599 - protein, 7 aa, Artificial Sequence
  Description of Artificial Sequence: Synthetic peptide
SQELPGS

SEQ ID NO: 10600 - protein, 7 aa, Artificial Sequence
  Description of Artificial Sequence: Synthetic peptide
SQESYMD

SEQ ID NO: 10601 - protein, 7 aa, Artificial Sequence
  Description of Artificial Sequence: Synthetic peptide
SQFEARP

SEQ ID NO: 10602 - protein, 7 aa, Artificial Sequence
  Description of Artificial Sequence: Synthetic peptide
SQFKPTF

SEQ ID NO: 10603 - protein, 7 aa, Artificial Sequence
  Description of Artificial Sequence: Synthetic peptide
SQFLADI

SEQ ID NO: 10604 - protein, 7 aa, Artificial Sequence
  Description of Artificial Sequence: Synthetic peptide
SQGARND

SEQ ID NO: 10605 - protein, 7 aa, Artificial Sequence
  Description of Artificial Sequence: Synthetic peptide
SQGFNSS

SEQ ID NO: 10606 - protein, 7 aa, Artificial Sequence
  Description of Artificial Sequence: Synthetic peptide
SQGHALP

SEQ ID NO: 10607 - protein, 7 aa, Artificial Sequence
  Description of Artificial Sequence: Synthetic peptide
SQGSVQG

SEQ ID NO: 10608 - protein, 7 aa, Artificial Sequence
  Description of Artificial Sequence: Synthetic peptide
SQGVRVG

SEQ ID NO: 10609 - protein, 7 aa, Artificial Sequence
  Description of Artificial Sequence: Synthetic peptide
SQHLSVN

SEQ ID NO: 10610 - protein, 7 aa, Artificial Sequence
  Description of Artificial Sequence: Synthetic peptide
SQHPIRE

SEQ ID NO: 10611 - protein, 7 aa, Artificial Sequence
  Description of Artificial Sequence: Synthetic peptide
SQHPPGD

SEQ ID NO: 10612 - protein, 7 aa, Artificial Sequence
  Description of Artificial Sequence: Synthetic peptide
SQHRDHP

SEQ ID NO: 10613 - protein, 7 aa, Artificial Sequence
  Description of Artificial Sequence: Synthetic peptide
SQHVASP

SEQ ID NO: 10614 - protein, 7 aa, Artificial Sequence
  Description of Artificial Sequence: Synthetic peptide
SQISCGL

SEQ ID NO: 10615 - protein, 7 aa, Artificial Sequence
  Description of Artificial Sequence: Synthetic peptide
SQKPMVA

SEQ ID NO: 10616 - protein, 7 aa, Artificial Sequence
  Description of Artificial Sequence: Synthetic peptide
SQKSHGN

SEQ ID NO: 10617 - protein, 7 aa, Artificial Sequence
  Description of Artificial Sequence: Synthetic peptide
SQLDING

SEQ ID NO: 10618 - protein, 7 aa, Artificial Sequence
  Description of Artificial Sequence: Synthetic peptide
SQMDDTL

SEQ ID NO: 10619 - protein, 7 aa, Artificial Sequence
  Description of Artificial Sequence: Synthetic peptide
SQMLPAP

SEQ ID NO: 10620 - protein, 7 aa, Artificial Sequence
  Description of Artificial Sequence: Synthetic peptide
SQMLTGP

SEQ ID NO: 10621 - protein, 7 aa, Artificial Sequence
  Description of Artificial Sequence: Synthetic peptide
SQMREPV

SEQ ID NO: 10622 - protein, 7 aa, Artificial Sequence
  Description of Artificial Sequence: Synthetic peptide
SQNLVIS

SEQ ID NO: 10623 - protein, 7 aa, Artificial Sequence
  Description of Artificial Sequence: Synthetic peptide
SQNSLSE

SEQ ID NO: 10624 - protein, 7 aa, Artificial Sequence
  Description of Artificial Sequence: Synthetic peptide
SQNTGQN

SEQ ID NO: 10625 - protein, 7 aa, Artificial Sequence
  Description of Artificial Sequence: Synthetic peptide
SQPHFAS

SEQ ID NO: 10626 - protein, 7 aa, Artificial Sequence
  Description of Artificial Sequence: Synthetic peptide
SQPMARM

SEQ ID NO: 10627 - protein, 7 aa, Artificial Sequence
  Description of Artificial Sequence: Synthetic peptide
SQPMPPA

SEQ ID NO: 10628 - protein, 7 aa, Artificial Sequence
  Description of Artificial Sequence: Synthetic peptide
SQPNPAV

SEQ ID NO: 10629 - protein, 7 aa, Artificial Sequence
  Description of Artificial Sequence: Synthetic peptide
SQPTTAR

SEQ ID NO: 10630 - protein, 7 aa, Artificial Sequence
  Description of Artificial Sequence: Synthetic peptide
SQPVTAG

SEQ ID NO: 10631 - protein, 7 aa, Artificial Sequence
  Description of Artificial Sequence: Synthetic peptide
SQQDPIL

SEQ ID NO: 10632 - protein, 7 aa, Artificial Sequence
  Description of Artificial Sequence: Synthetic peptide
SQRAPIP

SEQ ID NO: 10633 - protein, 7 aa, Artificial Sequence
  Description of Artificial Sequence: Synthetic peptide
SQRATAL

SEQ ID NO: 10634 - protein, 7 aa, Artificial Sequence
  Description of Artificial Sequence: Synthetic peptide
SQRILDT

SEQ ID NO: 10635 - protein, 7 aa, Artificial Sequence
  Description of Artificial Sequence: Synthetic peptide
SQRSGRE

SEQ ID NO: 10636 - protein, 7 aa, Artificial Sequence
  Description of Artificial Sequence: Synthetic peptide
SQRSTLT

SEQ ID NO: 10637 - protein, 7 aa, Artificial Sequence
  Description of Artificial Sequence: Synthetic peptide
SQRVASE

SEQ ID NO: 10638 - protein, 7 aa, Artificial Sequence
  Description of Artificial Sequence: Synthetic peptide
SQRVSQS

SEQ ID NO: 10639 - protein, 7 aa, Artificial Sequence
  Description of Artificial Sequence: Synthetic peptide
SQSFSVD

SEQ ID NO: 10640 - protein, 7 aa, Artificial Sequence
  Description of Artificial Sequence: Synthetic peptide
SQSGSSN

SEQ ID NO: 10641 - protein, 7 aa, Artificial Sequence
  Description of Artificial Sequence: Synthetic peptide
SQSMRSS

SEQ ID NO: 10642 - protein, 7 aa, Artificial Sequence
  Description of Artificial Sequence: Synthetic peptide
SQSPVLK

SEQ ID NO: 10643 - protein, 7 aa, Artificial Sequence
  Description of Artificial Sequence: Synthetic peptide
SQSQMLP

SEQ ID NO: 10644 - protein, 7 aa, Artificial Sequence
  Description of Artificial Sequence: Synthetic peptide
SQSRFSA

SEQ ID NO: 10645 - protein, 7 aa, Artificial Sequence
  Description of Artificial Sequence: Synthetic peptide
SQSRMQP

SEQ ID NO: 10646 - protein, 7 aa, Artificial Sequence
  Description of Artificial Sequence: Synthetic peptide
SQSSIRL

SEQ ID NO: 10647 - protein, 7 aa, Artificial Sequence
  Description of Artificial Sequence: Synthetic peptide
SQSSNYP

SEQ ID NO: 10648 - protein, 7 aa, Artificial Sequence
  Description of Artificial Sequence: Synthetic peptide
SQSTYNI

SEQ ID NO: 10649 - protein, 7 aa, Artificial Sequence
  Description of Artificial Sequence: Synthetic peptide
SQTGLLT

SEQ ID NO: 10650 - protein, 7 aa, Artificial Sequence
  Description of Artificial Sequence: Synthetic peptide
SQTIPDS

SEQ ID NO: 10651 - protein, 7 aa, Artificial Sequence
  Description of Artificial Sequence: Synthetic peptide
SQTKSQH

SEQ ID NO: 10652 - protein, 7 aa, Artificial Sequence
  Description of Artificial Sequence: Synthetic peptide
SQTPRST

SEQ ID NO: 10653 - protein, 7 aa, Artificial Sequence
  Description of Artificial Sequence: Synthetic peptide
SQTQHRI

SEQ ID NO: 10654 - protein, 7 aa, Artificial Sequence
  Description of Artificial Sequence: Synthetic peptide
SQTVGVS

SEQ ID NO: 10655 - protein, 7 aa, Artificial Sequence
  Description of Artificial Sequence: Synthetic peptide
SQVGAPT

SEQ ID NO: 10656 - protein, 7 aa, Artificial Sequence
  Description of Artificial Sequence: Synthetic peptide
SQVGMYR

SEQ ID NO: 10657 - protein, 7 aa, Artificial Sequence
  Description of Artificial Sequence: Synthetic peptide
SQWVPTN

SEQ ID NO: 10658 - protein, 7 aa, Artificial Sequence
  Description of Artificial Sequence: Synthetic peptide
SQYASLD

SEQ ID NO: 10659 - protein, 7 aa, Artificial Sequence
  Description of Artificial Sequence: Synthetic peptide
SQYTKFQ

SEQ ID NO: 10660 - protein, 7 aa, Artificial Sequence
  Description of Artificial Sequence: Synthetic peptide
SQYVPSS

SEQ ID NO: 10661 - protein, 7 aa, Artificial Sequence
  Description of Artificial Sequence: Synthetic peptide
SRAAMDG

SEQ ID NO: 10662 - protein, 7 aa, Artificial Sequence
  Description of Artificial Sequence: Synthetic peptide
SRADIFL

SEQ ID NO: 10663 - protein, 7 aa, Artificial Sequence
  Description of Artificial Sequence: Synthetic peptide
SRAGRSE

SEQ ID NO: 10664 - protein, 7 aa, Artificial Sequence
  Description of Artificial Sequence: Synthetic peptide
SRAGTTT

SEQ ID NO: 10665 - protein, 7 aa, Artificial Sequence
  Description of Artificial Sequence: Synthetic peptide
SRAILAD

SEQ ID NO: 10666 - protein, 7 aa, Artificial Sequence
  Description of Artificial Sequence: Synthetic peptide
SRALTGP

SEQ ID NO: 10667 - protein, 7 aa, Artificial Sequence
  Description of Artificial Sequence: Synthetic peptide
SRALVSA

SEQ ID NO: 10668 - protein, 7 aa, Artificial Sequence
  Description of Artificial Sequence: Synthetic peptide
SRANLHS

SEQ ID NO: 10669 - protein, 7 aa, Artificial Sequence
  Description of Artificial Sequence: Synthetic peptide
SRAPSLP

SEQ ID NO: 10670 - protein, 7 aa, Artificial Sequence
  Description of Artificial Sequence: Synthetic peptide
SRASMAV

SEQ ID NO: 10671 - protein, 7 aa, Artificial Sequence
  Description of Artificial Sequence: Synthetic peptide
SRAVSDA

SEQ ID NO: 10672 - protein, 7 aa, Artificial Sequence
  Description of Artificial Sequence: Synthetic peptide
SRDAIHD

SEQ ID NO: 10673 - protein, 7 aa, Artificial Sequence
  Description of Artificial Sequence: Synthetic peptide
SRDAKQS

SEQ ID NO: 10674 - protein, 7 aa, Artificial Sequence
  Description of Artificial Sequence: Synthetic peptide
SRDLLSP

SEQ ID NO: 10675 - protein, 7 aa, Artificial Sequence
  Description of Artificial Sequence: Synthetic peptide
SRDMTNF

SEQ ID NO: 10676 - protein, 7 aa, Artificial Sequence
  Description of Artificial Sequence: Synthetic peptide
SRDNQTV

SEQ ID NO: 10677 - protein, 7 aa, Artificial Sequence
  Description of Artificial Sequence: Synthetic peptide
SRDRTLN

SEQ ID NO: 10678 - protein, 7 aa, Artificial Sequence
  Description of Artificial Sequence: Synthetic peptide
SRDSGTS

SEQ ID NO: 10679 - protein, 7 aa, Artificial Sequence
  Description of Artificial Sequence: Synthetic peptide
SRDSQRE

SEQ ID NO: 10680 - protein, 7 aa, Artificial Sequence
  Description of Artificial Sequence: Synthetic peptide
SRDTGHT

SEQ ID NO: 10681 - protein, 7 aa, Artificial Sequence
  Description of Artificial Sequence: Synthetic peptide
SRDTSHH

SEQ ID NO: 10682 - protein, 7 aa, Artificial Sequence
  Description of Artificial Sequence: Synthetic peptide
SRDVPQN

SEQ ID NO: 10683 - protein, 7 aa, Artificial Sequence
  Description of Artificial Sequence: Synthetic peptide
SRDYQLN

SEQ ID NO: 10684 - protein, 7 aa, Artificial Sequence
  Description of Artificial Sequence: Synthetic peptide
SREKVSA

SEQ ID NO: 10685 - protein, 7 aa, Artificial Sequence
  Description of Artificial Sequence: Synthetic peptide
SRELSRL

SEQ ID NO: 10686 - protein, 7 aa, Artificial Sequence
  Description of Artificial Sequence: Synthetic peptide
SREMAPS

SEQ ID NO: 10687 - protein, 7 aa, Artificial Sequence
  Description of Artificial Sequence: Synthetic peptide
SREPANI

SEQ ID NO: 10688 - protein, 7 aa, Artificial Sequence
  Description of Artificial Sequence: Synthetic peptide
SREQLSG

SEQ ID NO: 10689 - protein, 7 aa, Artificial Sequence
  Description of Artificial Sequence: Synthetic peptide
SRESRFD

SEQ ID NO: 10690 - protein, 7 aa, Artificial Sequence
  Description of Artificial Sequence: Synthetic peptide
SRESYQQ

SEQ ID NO: 10691 - protein, 7 aa, Artificial Sequence
  Description of Artificial Sequence: Synthetic peptide
SRETRAV

SEQ ID NO: 10692 - protein, 7 aa, Artificial Sequence
  Description of Artificial Sequence: Synthetic peptide
SREVDKT

SEQ ID NO: 10693 - protein, 7 aa, Artificial Sequence
  Description of Artificial Sequence: Synthetic peptide
SREVVAS

SEQ ID NO: 10694 - protein, 7 aa, Artificial Sequence
  Description of Artificial Sequence: Synthetic peptide
SRFEANT

SEQ ID NO: 10695 - protein, 7 aa, Artificial Sequence
  Description of Artificial Sequence: Synthetic peptide
SRFEQLG

SEQ ID NO: 10696 - protein, 7 aa, Artificial Sequence
  Description of Artificial Sequence: Synthetic peptide
SRFHPTE

SEQ ID NO: 10697 - protein, 7 aa, Artificial Sequence
  Description of Artificial Sequence: Synthetic peptide
SRFQGSG

SEQ ID NO: 10698 - protein, 7 aa, Artificial Sequence
  Description of Artificial Sequence: Synthetic peptide
SRFTTQV

SEQ ID NO: 10699 - protein, 7 aa, Artificial Sequence
  Description of Artificial Sequence: Synthetic peptide
SRGDPLF

SEQ ID NO: 10700 - protein, 7 aa, Artificial Sequence
  Description of Artificial Sequence: Synthetic peptide
SRGDRPM

SEQ ID NO: 10701 - protein, 7 aa, Artificial Sequence
  Description of Artificial Sequence: Synthetic peptide
SRGDTMV

SEQ ID NO: 10702 - protein, 7 aa, Artificial Sequence
  Description of Artificial Sequence: Synthetic peptide
SRGEHYV

SEQ ID NO: 10703 - protein, 7 aa, Artificial Sequence
  Description of Artificial Sequence: Synthetic peptide
SRGHETS

SEQ ID NO: 10704 - protein, 7 aa, Artificial Sequence
  Description of Artificial Sequence: Synthetic peptide
SRGKEVI

SEQ ID NO: 10705 - protein, 7 aa, Artificial Sequence
  Description of Artificial Sequence: Synthetic peptide
SRGSESI

SEQ ID NO: 10706 - protein, 7 aa, Artificial Sequence
  Description of Artificial Sequence: Synthetic peptide
SRGVDNL

SEQ ID NO: 10707 - protein, 7 aa, Artificial Sequence
  Description of Artificial Sequence: Synthetic peptide
SRGVSSP

SEQ ID NO: 10708 - protein, 7 aa, Artificial Sequence
  Description of Artificial Sequence: Synthetic peptide
SRHPVPH

SEQ ID NO: 10709 - protein, 7 aa, Artificial Sequence
  Description of Artificial Sequence: Synthetic peptide
SRHQATS

SEQ ID NO: 10710 - protein, 7 aa, Artificial Sequence
  Description of Artificial Sequence: Synthetic peptide
SRHTSLS

SEQ ID NO: 10711 - protein, 7 aa, Artificial Sequence
  Description of Artificial Sequence: Synthetic peptide
SRHYTTE

SEQ ID NO: 10712 - protein, 7 aa, Artificial Sequence
  Description of Artificial Sequence: Synthetic peptide
SRIAEPK

SEQ ID NO: 10713 - protein, 7 aa, Artificial Sequence
  Description of Artificial Sequence: Synthetic peptide
SRIGISA

SEQ ID NO: 10714 - protein, 7 aa, Artificial Sequence
  Description of Artificial Sequence: Synthetic peptide
SRILRLD

SEQ ID NO: 10715 - protein, 7 aa, Artificial Sequence
  Description of Artificial Sequence: Synthetic peptide
SRLGGHS

SEQ ID NO: 10716 - protein, 7 aa, Artificial Sequence
  Description of Artificial Sequence: Synthetic peptide
SRLPTQD

SEQ ID NO: 10717 - protein, 7 aa, Artificial Sequence
  Description of Artificial Sequence: Synthetic peptide
SRLPYPN

SEQ ID NO: 10718 - protein, 7 aa, Artificial Sequence
  Description of Artificial Sequence: Synthetic peptide
SRLSGAE

SEQ ID NO: 10719 - protein, 7 aa, Artificial Sequence
  Description of Artificial Sequence: Synthetic peptide
SRLSHEL

SEQ ID NO: 10720 - protein, 7 aa, Artificial Sequence
  Description of Artificial Sequence: Synthetic peptide
SRLTPPS

SEQ ID NO: 10721 - protein, 7 aa, Artificial Sequence
  Description of Artificial Sequence: Synthetic peptide
SRLTPYP

SEQ ID NO: 10722 - protein, 7 aa, Artificial Sequence
  Description of Artificial Sequence: Synthetic peptide
SRLVPVA

SEQ ID NO: 10723 - protein, 7 aa, Artificial Sequence
  Description of Artificial Sequence: Synthetic peptide
SRMAISD

SEQ ID NO: 10724 - protein, 7 aa, Artificial Sequence
  Description of Artificial Sequence: Synthetic peptide
SRMGQTS

SEQ ID NO: 10725 - protein, 7 aa, Artificial Sequence
  Description of Artificial Sequence: Synthetic peptide
SRMSFAP

SEQ ID NO: 10726 - protein, 7 aa, Artificial Sequence
  Description of Artificial Sequence: Synthetic peptide
SRMSQGF

SEQ ID NO: 10727 - protein, 7 aa, Artificial Sequence
  Description of Artificial Sequence: Synthetic peptide
SRNSLAL

SEQ ID NO: 10728 - protein, 7 aa, Artificial Sequence
  Description of Artificial Sequence: Synthetic peptide
SRNSLLD

SEQ ID NO: 10729 - protein, 7 aa, Artificial Sequence
  Description of Artificial Sequence: Synthetic peptide
SRNTNTD

SEQ ID NO: 10730 - protein, 7 aa, Artificial Sequence
  Description of Artificial Sequence: Synthetic peptide
SRNTPVD

SEQ ID NO: 10731 - protein, 7 aa, Artificial Sequence
  Description of Artificial Sequence: Synthetic peptide
SRPAIGS

SEQ ID NO: 10732 - protein, 7 aa, Artificial Sequence
  Description of Artificial Sequence: Synthetic peptide
SRPAPVL

SEQ ID NO: 10733 - protein, 7 aa, Artificial Sequence
  Description of Artificial Sequence: Synthetic peptide
SRPATNP

SEQ ID NO: 10734 - protein, 7 aa, Artificial Sequence
  Description of Artificial Sequence: Synthetic peptide
SRPEPPY

SEQ ID NO: 10735 - protein, 7 aa, Artificial Sequence
  Description of Artificial Sequence: Synthetic peptide
SRPGFQN

SEQ ID NO: 10736 - protein, 7 aa, Artificial Sequence
  Description of Artificial Sequence: Synthetic peptide
SRPGLTF

SEQ ID NO: 10737 - protein, 7 aa, Artificial Sequence
  Description of Artificial Sequence: Synthetic peptide
SRPITPL

SEQ ID NO: 10738 - protein, 7 aa, Artificial Sequence
  Description of Artificial Sequence: Synthetic peptide
SRPMSLE

SEQ ID NO: 10739 - protein, 7 aa, Artificial Sequence
  Description of Artificial Sequence: Synthetic peptide
SRPRDTD

SEQ ID NO: 10740 - protein, 7 aa, Artificial Sequence
  Description of Artificial Sequence: Synthetic peptide
SRPSAYQ

SEQ ID NO: 10741 - protein, 7 aa, Artificial Sequence
  Description of Artificial Sequence: Synthetic peptide
SRPSDVW

SEQ ID NO: 10742 - protein, 7 aa, Artificial Sequence
  Description of Artificial Sequence: Synthetic peptide
SRPSNDA

SEQ ID NO: 10743 - protein, 7 aa, Artificial Sequence
  Description of Artificial Sequence: Synthetic peptide
SRPSSES

SEQ ID NO: 10744 - protein, 7 aa, Artificial Sequence
  Description of Artificial Sequence: Synthetic peptide
SRPTAQE

SEQ ID NO: 10745 - protein, 7 aa, Artificial Sequence
  Description of Artificial Sequence: Synthetic peptide
SRPTSAS

SEQ ID NO: 10746 - protein, 7 aa, Artificial Sequence
  Description of Artificial Sequence: Synthetic peptide
SRPVVSS

SEQ ID NO: 10747 - protein, 7 aa, Artificial Sequence
  Description of Artificial Sequence: Synthetic peptide
SRQALSD

SEQ ID NO: 10748 - protein, 7 aa, Artificial Sequence
  Description of Artificial Sequence: Synthetic peptide
SRQDHWP

SEQ ID NO: 10749 - protein, 7 aa, Artificial Sequence
  Description of Artificial Sequence: Synthetic peptide
SRQDPVI

SEQ ID NO: 10750 - protein, 7 aa, Artificial Sequence
  Description of Artificial Sequence: Synthetic peptide
SRQLAPS

SEQ ID NO: 10751 - protein, 7 aa, Artificial Sequence
  Description of Artificial Sequence: Synthetic peptide
SRQMEHV

SEQ ID NO: 10752 - protein, 7 aa, Artificial Sequence
  Description of Artificial Sequence: Synthetic peptide
SRQQERG

SEQ ID NO: 10753 - protein, 7 aa, Artificial Sequence
  Description of Artificial Sequence: Synthetic peptide
SRQQTPD

SEQ ID NO: 10754 - protein, 7 aa, Artificial Sequence
  Description of Artificial Sequence: Synthetic peptide
SRQSPSL

SEQ ID NO: 10755 - protein, 7 aa, Artificial Sequence
  Description of Artificial Sequence: Synthetic peptide
SRQSVHG

SEQ ID NO: 10756 - protein, 7 aa, Artificial Sequence
  Description of Artificial Sequence: Synthetic peptide
SRRPSDI

SEQ ID NO: 10757 - protein, 7 aa, Artificial Sequence
  Description of Artificial Sequence: Synthetic peptide
SRSALTD

SEQ ID NO: 10758 - protein, 7 aa, Artificial Sequence
  Description of Artificial Sequence: Synthetic peptide
SRSERMP

SEQ ID NO: 10759 - protein, 7 aa, Artificial Sequence
  Description of Artificial Sequence: Synthetic peptide
SRSGQGD

SEQ ID NO: 10760 - protein, 7 aa, Artificial Sequence
  Description of Artificial Sequence: Synthetic peptide
SRSGSLP

SEQ ID NO: 10761 - protein, 7 aa, Artificial Sequence
  Description of Artificial Sequence: Synthetic peptide
SRSGTPF

SEQ ID NO: 10762 - protein, 7 aa, Artificial Sequence
  Description of Artificial Sequence: Synthetic peptide
SRSHPSQ

SEQ ID NO: 10763 - protein, 7 aa, Artificial Sequence
  Description of Artificial Sequence: Synthetic peptide
SRSIMQG

SEQ ID NO: 10764 - protein, 7 aa, Artificial Sequence
  Description of Artificial Sequence: Synthetic peptide
SRSISTD

SEQ ID NO: 10765 - protein, 7 aa, Artificial Sequence
  Description of Artificial Sequence: Synthetic peptide
SRSLEST

SEQ ID NO: 10766 - protein, 7 aa, Artificial Sequence
  Description of Artificial Sequence: Synthetic peptide
SRSLGTN

SEQ ID NO: 10767 - protein, 7 aa, Artificial Sequence
  Description of Artificial Sequence: Synthetic peptide
SRSLHLV

SEQ ID NO: 10768 - protein, 7 aa, Artificial Sequence
  Description of Artificial Sequence: Synthetic peptide
SRSLRPD

SEQ ID NO: 10769 - protein, 7 aa, Artificial Sequence
  Description of Artificial Sequence: Synthetic peptide
SRSNANI

SEQ ID NO: 10770 - protein, 7 aa, Artificial Sequence
  Description of Artificial Sequence: Synthetic peptide
SRSNGVI

SEQ ID NO: 10771 - protein, 7 aa, Artificial Sequence
  Description of Artificial Sequence: Synthetic peptide
SRSPGVH

SEQ ID NO: 10772 - protein, 7 aa, Artificial Sequence
  Description of Artificial Sequence: Synthetic peptide
SRSPMQP

SEQ ID NO: 10773 - protein, 7 aa, Artificial Sequence
  Description of Artificial Sequence: Synthetic peptide
SRSPPLP

SEQ ID NO: 10774 - protein, 7 aa, Artificial Sequence
  Description of Artificial Sequence: Synthetic peptide
SRSPPMT

SEQ ID NO: 10775 - protein, 7 aa, Artificial Sequence
  Description of Artificial Sequence: Synthetic peptide
SRSRTET

SEQ ID NO: 10776 - protein, 7 aa, Artificial Sequence
  Description of Artificial Sequence: Synthetic peptide
SRSSGGN

SEQ ID NO: 10777 - protein, 7 aa, Artificial Sequence
  Description of Artificial Sequence: Synthetic peptide
SRSSGGS

SEQ ID NO: 10778 - protein, 7 aa, Artificial Sequence
  Description of Artificial Sequence: Synthetic peptide
SRSVSGT

SEQ ID NO: 10779 - protein, 7 aa, Artificial Sequence
  Description of Artificial Sequence: Synthetic peptide
SRSVSLS

SEQ ID NO: 10780 - protein, 7 aa, Artificial Sequence
  Description of Artificial Sequence: Synthetic peptide
SRTANAA

SEQ ID NO: 10781 - protein, 7 aa, Artificial Sequence
  Description of Artificial Sequence: Synthetic peptide
SRTASFP

SEQ ID NO: 10782 - protein, 7 aa, Artificial Sequence
  Description of Artificial Sequence: Synthetic peptide
SRTASSG

SEQ ID NO: 10783 - protein, 7 aa, Artificial Sequence
  Description of Artificial Sequence: Synthetic peptide
SRTDTIK

SEQ ID NO: 10784 - protein, 7 aa, Artificial Sequence
  Description of Artificial Sequence: Synthetic peptide
SRTEALG

SEQ ID NO: 10785 - protein, 7 aa, Artificial Sequence
  Description of Artificial Sequence: Synthetic peptide
SRTERSA

SEQ ID NO: 10786 - protein, 7 aa, Artificial Sequence
  Description of Artificial Sequence: Synthetic peptide
SRTGAYP

SEQ ID NO: 10787 - protein, 7 aa, Artificial Sequence
  Description of Artificial Sequence: Synthetic peptide
SRTGSTL

SEQ ID NO: 10788 - protein, 7 aa, Artificial Sequence
  Description of Artificial Sequence: Synthetic peptide
SRTHDQA

SEQ ID NO: 10789 - protein, 7 aa, Artificial Sequence
  Description of Artificial Sequence: Synthetic peptide
SRTLVGE

SEQ ID NO: 10790 - protein, 7 aa, Artificial Sequence
  Description of Artificial Sequence: Synthetic peptide
SRTPHID

SEQ ID NO: 10791 - protein, 7 aa, Artificial Sequence
  Description of Artificial Sequence: Synthetic peptide
SRTPMSM

SEQ ID NO: 10792 - protein, 7 aa, Artificial Sequence
  Description of Artificial Sequence: Synthetic peptide
SRTSMPS

SEQ ID NO: 10793 - protein, 7 aa, Artificial Sequence
  Description of Artificial Sequence: Synthetic peptide
SRTSRLD

SEQ ID NO: 10794 - protein, 7 aa, Artificial Sequence
  Description of Artificial Sequence: Synthetic peptide
SRTVASG

SEQ ID NO: 10795 - protein, 7 aa, Artificial Sequence
  Description of Artificial Sequence: Synthetic peptide
SRTVQAM

SEQ ID NO: 10796 - protein, 7 aa, Artificial Sequence
  Description of Artificial Sequence: Synthetic peptide
SRVATTL

SEQ ID NO: 10797 - protein, 7 aa, Artificial Sequence
  Description of Artificial Sequence: Synthetic peptide
SRVIHVS

SEQ ID NO: 10798 - protein, 7 aa, Artificial Sequence
  Description of Artificial Sequence: Synthetic peptide
SRVNAPS

SEQ ID NO: 10799 - protein, 7 aa, Artificial Sequence
  Description of Artificial Sequence: Synthetic peptide
SRVNAQA

SEQ ID NO: 10800 - protein, 7 aa, Artificial Sequence
  Description of Artificial Sequence: Synthetic peptide
SRVPHSD

SEQ ID NO: 10801 - protein, 7 aa, Artificial Sequence
  Description of Artificial Sequence: Synthetic peptide
SRVPNLS

SEQ ID NO: 10802 - protein, 7 aa, Artificial Sequence
  Description of Artificial Sequence: Synthetic peptide
SRVQNGV

SEQ ID NO: 10803 - protein, 7 aa, Artificial Sequence
  Description of Artificial Sequence: Synthetic peptide
SRVSAVM

SEQ ID NO: 10804 - protein, 7 aa, Artificial Sequence
  Description of Artificial Sequence: Synthetic peptide
SRVSGQS

SEQ ID NO: 10805 - protein, 7 aa, Artificial Sequence
  Description of Artificial Sequence: Synthetic peptide
SRVSQVM

SEQ ID NO: 10806 - protein, 7 aa, Artificial Sequence
  Description of Artificial Sequence: Synthetic peptide
SRWVTIE

SEQ ID NO: 10807 - protein, 7 aa, Artificial Sequence
  Description of Artificial Sequence: Synthetic peptide
SRYATSG

SEQ ID NO: 10808 - protein, 7 aa, Artificial Sequence
  Description of Artificial Sequence: Synthetic peptide
SRYEDPE

SEQ ID NO: 10809 - protein, 7 aa, Artificial Sequence
  Description of Artificial Sequence: Synthetic peptide
SRYGSDS

SEQ ID NO: 10810 - protein, 7 aa, Artificial Sequence
  Description of Artificial Sequence: Synthetic peptide
SRYNGMG

SEQ ID NO: 10811 - protein, 7 aa, Artificial Sequence
  Description of Artificial Sequence: Synthetic peptide
SRYPEAT

SEQ ID NO: 10812 - protein, 7 aa, Artificial Sequence
  Description of Artificial Sequence: Synthetic peptide
SSACIKA

SEQ ID NO: 10813 - protein, 7 aa, Artificial Sequence
  Description of Artificial Sequence: Synthetic peptide
SSAEARL

SEQ ID NO: 10814 - protein, 7 aa, Artificial Sequence
  Description of Artificial Sequence: Synthetic peptide
SSAGAPL

SEQ ID NO: 10815 - protein, 7 aa, Artificial Sequence
  Description of Artificial Sequence: Synthetic peptide
SSAGWVG

SEQ ID NO: 10816 - protein, 7 aa, Artificial Sequence
  Description of Artificial Sequence: Synthetic peptide
SSAIPMK

SEQ ID NO: 10817 - protein, 7 aa, Artificial Sequence
  Description of Artificial Sequence: Synthetic peptide
SSANAPR

SEQ ID NO: 10818 - protein, 7 aa, Artificial Sequence
  Description of Artificial Sequence: Synthetic peptide
SSANAST

SEQ ID NO: 10819 - protein, 7 aa, Artificial Sequence
  Description of Artificial Sequence: Synthetic peptide
SSAPVSP

SEQ ID NO: 10820 - protein, 7 aa, Artificial Sequence
  Description of Artificial Sequence: Synthetic peptide
SSAQVSV

SEQ ID NO: 10821 - protein, 7 aa, Artificial Sequence
  Description of Artificial Sequence: Synthetic peptide
SSATMTT

SEQ ID NO: 10822 - protein, 7 aa, Artificial Sequence
  Description of Artificial Sequence: Synthetic peptide
SSDASRR

SEQ ID NO: 10823 - protein, 7 aa, Artificial Sequence
  Description of Artificial Sequence: Synthetic peptide
SSDHGLK

SEQ ID NO: 10824 - protein, 7 aa, Artificial Sequence
  Description of Artificial Sequence: Synthetic peptide
SSDHIGC

SEQ ID NO: 10825 - protein, 7 aa, Artificial Sequence
  Description of Artificial Sequence: Synthetic peptide
SSDIRPS

SEQ ID NO: 10826 - protein, 7 aa, Artificial Sequence
  Description of Artificial Sequence: Synthetic peptide
SSDSVKH

SEQ ID NO: 10827 - protein, 7 aa, Artificial Sequence
  Description of Artificial Sequence: Synthetic peptide
SSDTSPG

SEQ ID NO: 10828 - protein, 7 aa, Artificial Sequence
  Description of Artificial Sequence: Synthetic peptide
SSDTVTE

SEQ ID NO: 10829 - protein, 7 aa, Artificial Sequence
  Description of Artificial Sequence: Synthetic peptide
SSEAARG

SEQ ID NO: 10830 - protein, 7 aa, Artificial Sequence
  Description of Artificial Sequence: Synthetic peptide
SSEDVGF

SEQ ID NO: 10831 - protein, 7 aa, Artificial Sequence
  Description of Artificial Sequence: Synthetic peptide
SSEHGRN

SEQ ID NO: 10832 - protein, 7 aa, Artificial Sequence
  Description of Artificial Sequence: Synthetic peptide
SSEKHSP

SEQ ID NO: 10833 - protein, 7 aa, Artificial Sequence
  Description of Artificial Sequence: Synthetic peptide
SSEKRPG

SEQ ID NO: 10834 - protein, 7 aa, Artificial Sequence
  Description of Artificial Sequence: Synthetic peptide
SSEMSGN

SEQ ID NO: 10835 - protein, 7 aa, Artificial Sequence
  Description of Artificial Sequence: Synthetic peptide
SSERAHG

SEQ ID NO: 10836 - protein, 7 aa, Artificial Sequence
  Description of Artificial Sequence: Synthetic peptide
SSERASS

SEQ ID NO: 10837 - protein, 7 aa, Artificial Sequence
  Description of Artificial Sequence: Synthetic peptide
SSESLGR

SEQ ID NO: 10838 - protein, 7 aa, Artificial Sequence
  Description of Artificial Sequence: Synthetic peptide
SSESRWI

SEQ ID NO: 10839 - protein, 7 aa, Artificial Sequence
  Description of Artificial Sequence: Synthetic peptide
SSFAVGG

SEQ ID NO: 10840 - protein, 7 aa, Artificial Sequence
  Description of Artificial Sequence: Synthetic peptide
SSFDRGA

SEQ ID NO: 10841 - protein, 7 aa, Artificial Sequence
  Description of Artificial Sequence: Synthetic peptide
SSFKGTF

SEQ ID NO: 10842 - protein, 7 aa, Artificial Sequence
  Description of Artificial Sequence: Synthetic peptide
SSFLTPS

SEQ ID NO: 10843 - protein, 7 aa, Artificial Sequence
  Description of Artificial Sequence: Synthetic peptide
SSFPSKA

SEQ ID NO: 10844 - protein, 7 aa, Artificial Sequence
  Description of Artificial Sequence: Synthetic peptide
SSFRTPL

SEQ ID NO: 10845 - protein, 7 aa, Artificial Sequence
  Description of Artificial Sequence: Synthetic peptide
SSGASSP

SEQ ID NO: 10846 - protein, 7 aa, Artificial Sequence
  Description of Artificial Sequence: Synthetic peptide
SSGDRSH

SEQ ID NO: 10847 - protein, 7 aa, Artificial Sequence
  Description of Artificial Sequence: Synthetic peptide
SSGEGYK

SEQ ID NO: 10848 - protein, 7 aa, Artificial Sequence
  Description of Artificial Sequence: Synthetic peptide
SSGFGKP

SEQ ID NO: 10849 - protein, 7 aa, Artificial Sequence
  Description of Artificial Sequence: Synthetic peptide
SSGIGHF

SEQ ID NO: 10850 - protein, 7 aa, Artificial Sequence
  Description of Artificial Sequence: Synthetic peptide
SSGLARA

SEQ ID NO: 10851 - protein, 7 aa, Artificial Sequence
  Description of Artificial Sequence: Synthetic peptide
SSGLISV

SEQ ID NO: 10852 - protein, 7 aa, Artificial Sequence
  Description of Artificial Sequence: Synthetic peptide
SSGNNLH

SEQ ID NO: 10853 - protein, 7 aa, Artificial Sequence
  Description of Artificial Sequence: Synthetic peptide
SSGPSLA

SEQ ID NO: 10854 - protein, 7 aa, Artificial Sequence
  Description of Artificial Sequence: Synthetic peptide
SSGQVRQ

SEQ ID NO: 10855 - protein, 7 aa, Artificial Sequence
  Description of Artificial Sequence: Synthetic peptide
SSGRPVA

SEQ ID NO: 10856 - protein, 7 aa, Artificial Sequence
  Description of Artificial Sequence: Synthetic peptide
SSGTMSY

SEQ ID NO: 10857 - protein, 7 aa, Artificial Sequence
  Description of Artificial Sequence: Synthetic peptide
SSHFRAD

SEQ ID NO: 10858 - protein, 7 aa, Artificial Sequence
  Description of Artificial Sequence: Synthetic peptide
SSHFVVT

SEQ ID NO: 10859 - protein, 7 aa, Artificial Sequence
  Description of Artificial Sequence: Synthetic peptide
SSHHQFP

SEQ ID NO: 10860 - protein, 7 aa, Artificial Sequence
  Description of Artificial Sequence: Synthetic peptide
SSHKVAW

SEQ ID NO: 10861 - protein, 7 aa, Artificial Sequence
  Description of Artificial Sequence: Synthetic peptide
SSHMSPW

SEQ ID NO: 10862 - protein, 7 aa, Artificial Sequence
  Description of Artificial Sequence: Synthetic peptide
SSHPSRI

SEQ ID NO: 10863 - protein, 7 aa, Artificial Sequence
  Description of Artificial Sequence: Synthetic peptide
SSHQEKL

SEQ ID NO: 10864 - protein, 7 aa, Artificial Sequence
  Description of Artificial Sequence: Synthetic peptide
SSHRALV

SEQ ID NO: 10865 - protein, 7 aa, Artificial Sequence
  Description of Artificial Sequence: Synthetic peptide
SSHSLYT

SEQ ID NO: 10866 - protein, 7 aa, Artificial Sequence
  Description of Artificial Sequence: Synthetic peptide
SSHSYVT

SEQ ID NO: 10867 - protein, 7 aa, Artificial Sequence
  Description of Artificial Sequence: Synthetic peptide
SSHVTGY

SEQ ID NO: 10868 - protein, 7 aa, Artificial Sequence
  Description of Artificial Sequence: Synthetic peptide
SSIHNAV

SEQ ID NO: 10869 - protein, 7 aa, Artificial Sequence
  Description of Artificial Sequence: Synthetic peptide
SSIILGD

SEQ ID NO: 10870 - protein, 7 aa, Artificial Sequence
  Description of Artificial Sequence: Synthetic peptide
SSIPRHP

SEQ ID NO: 10871 - protein, 7 aa, Artificial Sequence
  Description of Artificial Sequence: Synthetic peptide
SSIPSNV

SEQ ID NO: 10872 - protein, 7 aa, Artificial Sequence
  Description of Artificial Sequence: Synthetic peptide
SSIQTAQ

SEQ ID NO: 10873 - protein, 7 aa, Artificial Sequence
  Description of Artificial Sequence: Synthetic peptide
SSIRPSP

SEQ ID NO: 10874 - protein, 7 aa, Artificial Sequence
  Description of Artificial Sequence: Synthetic peptide
SSISGSS

SEQ ID NO: 10875 - protein, 7 aa, Artificial Sequence
  Description of Artificial Sequence: Synthetic peptide
SSISPNG

SEQ ID NO: 10876 - protein, 7 aa, Artificial Sequence
  Description of Artificial Sequence: Synthetic peptide
SSKESPL

SEQ ID NO: 10877 - protein, 7 aa, Artificial Sequence
  Description of Artificial Sequence: Synthetic peptide
SSKGYHL

SEQ ID NO: 10878 - protein, 7 aa, Artificial Sequence
  Description of Artificial Sequence: Synthetic peptide
SSKGYLV

SEQ ID NO: 10879 - protein, 7 aa, Artificial Sequence
  Description of Artificial Sequence: Synthetic peptide
SSKLETE

SEQ ID NO: 10880 - protein, 7 aa, Artificial Sequence
  Description of Artificial Sequence: Synthetic peptide
SSKMTGS

SEQ ID NO: 10881 - protein, 7 aa, Artificial Sequence
  Description of Artificial Sequence: Synthetic peptide
SSKQVTN

SEQ ID NO: 10882 - protein, 7 aa, Artificial Sequence
  Description of Artificial Sequence: Synthetic peptide
SSKYAEN

SEQ ID NO: 10883 - protein, 7 aa, Artificial Sequence
  Description of Artificial Sequence: Synthetic peptide
SSLASGA

SEQ ID NO: 10884 - protein, 7 aa, Artificial Sequence
  Description of Artificial Sequence: Synthetic peptide
SSLDREF

SEQ ID NO: 10885 - protein, 7 aa, Artificial Sequence
  Description of Artificial Sequence: Synthetic peptide
SSLGETL

SEQ ID NO: 10886 - protein, 7 aa, Artificial Sequence
  Description of Artificial Sequence: Synthetic peptide
SSLIELL

SEQ ID NO: 10887 - protein, 7 aa, Artificial Sequence
  Description of Artificial Sequence: Synthetic peptide
SSLKIET

SEQ ID NO: 10888 - protein, 7 aa, Artificial Sequence
  Description of Artificial Sequence: Synthetic peptide
SSLKLNG

SEQ ID NO: 10889 - protein, 7 aa, Artificial Sequence
  Description of Artificial Sequence: Synthetic peptide
SSLNTGA

SEQ ID NO: 10890 - protein, 7 aa, Artificial Sequence
  Description of Artificial Sequence: Synthetic peptide
SSLPAGR

SEQ ID NO: 10891 - protein, 7 aa, Artificial Sequence
  Description of Artificial Sequence: Synthetic peptide
SSLRNNI

SEQ ID NO: 10892 - protein, 7 aa, Artificial Sequence
  Description of Artificial Sequence: Synthetic peptide
SSLRPAT

SEQ ID NO: 10893 - protein, 7 aa, Artificial Sequence
  Description of Artificial Sequence: Synthetic peptide
SSLSDRD

SEQ ID NO: 10894 - protein, 7 aa, Artificial Sequence
  Description of Artificial Sequence: Synthetic peptide
SSLSRTG

SEQ ID NO: 10895 - protein, 7 aa, Artificial Sequence
  Description of Artificial Sequence: Synthetic peptide
SSMAKKE

SEQ ID NO: 10896 - protein, 7 aa, Artificial Sequence
  Description of Artificial Sequence: Synthetic peptide
SSMALGT

SEQ ID NO: 10897 - protein, 7 aa, Artificial Sequence
  Description of Artificial Sequence: Synthetic peptide
SSMVDQV

SEQ ID NO: 10898 - protein, 7 aa, Artificial Sequence
  Description of Artificial Sequence: Synthetic peptide
SSNAMLP

SEQ ID NO: 10899 - protein, 7 aa, Artificial Sequence
  Description of Artificial Sequence: Synthetic peptide
SSNEHMR

SEQ ID NO: 10900 - protein, 7 aa, Artificial Sequence
  Description of Artificial Sequence: Synthetic peptide
SSNLKLS

SEQ ID NO: 10901 - protein, 7 aa, Artificial Sequence
  Description of Artificial Sequence: Synthetic peptide
SSNPMLR

SEQ ID NO: 10902 - protein, 7 aa, Artificial Sequence
  Description of Artificial Sequence: Synthetic peptide
SSNPQRV

SEQ ID NO: 10903 - protein, 7 aa, Artificial Sequence
  Description of Artificial Sequence: Synthetic peptide
SSNRASV

SEQ ID NO: 10904 - protein, 7 aa, Artificial Sequence
  Description of Artificial Sequence: Synthetic peptide
SSNRGEL

SEQ ID NO: 10905 - protein, 7 aa, Artificial Sequence
  Description of Artificial Sequence: Synthetic peptide
SSNSFPR

SEQ ID NO: 10906 - protein, 7 aa, Artificial Sequence
  Description of Artificial Sequence: Synthetic peptide
SSNSGVP

SEQ ID NO: 10907 - protein, 7 aa, Artificial Sequence
  Description of Artificial Sequence: Synthetic peptide
SSNSRAI

SEQ ID NO: 10908 - protein, 7 aa, Artificial Sequence
  Description of Artificial Sequence: Synthetic peptide
SSNSSFA

SEQ ID NO: 10909 - protein, 7 aa, Artificial Sequence
  Description of Artificial Sequence: Synthetic peptide
SSNSVIA

SEQ ID NO: 10910 - protein, 7 aa, Artificial Sequence
  Description of Artificial Sequence: Synthetic peptide
SSPALNY

SEQ ID NO: 10911 - protein, 7 aa, Artificial Sequence
  Description of Artificial Sequence: Synthetic peptide
SSPEGLA

SEQ ID NO: 10912 - protein, 7 aa, Artificial Sequence
  Description of Artificial Sequence: Synthetic peptide
SSPMRSE

SEQ ID NO: 10913 - protein, 7 aa, Artificial Sequence
  Description of Artificial Sequence: Synthetic peptide
SSPPGNG

SEQ ID NO: 10914 - protein, 7 aa, Artificial Sequence
  Description of Artificial Sequence: Synthetic peptide
SSPRGFG

SEQ ID NO: 10915 - protein, 7 aa, Artificial Sequence
  Description of Artificial Sequence: Synthetic peptide
SSPRHSE

SEQ ID NO: 10916 - protein, 7 aa, Artificial Sequence
  Description of Artificial Sequence: Synthetic peptide
SSPSLTL

SEQ ID NO: 10917 - protein, 7 aa, Artificial Sequence
  Description of Artificial Sequence: Synthetic peptide
SSPSSNG

SEQ ID NO: 10918 - protein, 7 aa, Artificial Sequence
  Description of Artificial Sequence: Synthetic peptide
SSPTCCP

SEQ ID NO: 10919 - protein, 7 aa, Artificial Sequence
  Description of Artificial Sequence: Synthetic peptide
SSPTMFV

SEQ ID NO: 10920 - protein, 7 aa, Artificial Sequence
  Description of Artificial Sequence: Synthetic peptide
SSPTPLK

SEQ ID NO: 10921 - protein, 7 aa, Artificial Sequence
  Description of Artificial Sequence: Synthetic peptide
SSPVASS

SEQ ID NO: 10922 - protein, 7 aa, Artificial Sequence
  Description of Artificial Sequence: Synthetic peptide
SSPVKTL

SEQ ID NO: 10923 - protein, 7 aa, Artificial Sequence
  Description of Artificial Sequence: Synthetic peptide
SSPYPMM

SEQ ID NO: 10924 - protein, 7 aa, Artificial Sequence
  Description of Artificial Sequence: Synthetic peptide
SSQERNV

SEQ ID NO: 10925 - protein, 7 aa, Artificial Sequence
  Description of Artificial Sequence: Synthetic peptide
SSQGPIR

SEQ ID NO: 10926 - protein, 7 aa, Artificial Sequence
  Description of Artificial Sequence: Synthetic peptide
SSQKPVL

SEQ ID NO: 10927 - protein, 7 aa, Artificial Sequence
  Description of Artificial Sequence: Synthetic peptide
SSQLLLD

SEQ ID NO: 10928 - protein, 7 aa, Artificial Sequence
  Description of Artificial Sequence: Synthetic peptide
SSQMLYP

SEQ ID NO: 10929 - protein, 7 aa, Artificial Sequence
  Description of Artificial Sequence: Synthetic peptide
SSQPLEL

SEQ ID NO: 10930 - protein, 7 aa, Artificial Sequence
  Description of Artificial Sequence: Synthetic peptide
SSQPMSY

SEQ ID NO: 10931 - protein, 7 aa, Artificial Sequence
  Description of Artificial Sequence: Synthetic peptide
SSQRVPS

SEQ ID NO: 10932 - protein, 7 aa, Artificial Sequence
  Description of Artificial Sequence: Synthetic peptide
SSQSMTL

SEQ ID NO: 10933 - protein, 7 aa, Artificial Sequence
  Description of Artificial Sequence: Synthetic peptide
SSQVKTL

SEQ ID NO: 10934 - protein, 7 aa, Artificial Sequence
  Description of Artificial Sequence: Synthetic peptide
SSQWHAG

SEQ ID NO: 10935 - protein, 7 aa, Artificial Sequence
  Description of Artificial Sequence: Synthetic peptide
SSRAGTE

SEQ ID NO: 10936 - protein, 7 aa, Artificial Sequence
  Description of Artificial Sequence: Synthetic peptide
SSRDMTS

SEQ ID NO: 10937 - protein, 7 aa, Artificial Sequence
  Description of Artificial Sequence: Synthetic peptide
SSRDVGR

SEQ ID NO: 10938 - protein, 7 aa, Artificial Sequence
  Description of Artificial Sequence: Synthetic peptide
SSRGPIA

SEQ ID NO: 10939 - protein, 7 aa, Artificial Sequence
  Description of Artificial Sequence: Synthetic peptide
SSRGSPS

SEQ ID NO: 10940 - protein, 7 aa, Artificial Sequence
  Description of Artificial Sequence: Synthetic peptide
SSRGVPG

SEQ ID NO: 10941 - protein, 7 aa, Artificial Sequence
  Description of Artificial Sequence: Synthetic peptide
SSRINPM

SEQ ID NO: 10942 - protein, 7 aa, Artificial Sequence
  Description of Artificial Sequence: Synthetic peptide
SSRIPDT

SEQ ID NO: 10943 - protein, 7 aa, Artificial Sequence
  Description of Artificial Sequence: Synthetic peptide
SSRLNEQ

SEQ ID NO: 10944 - protein, 7 aa, Artificial Sequence
  Description of Artificial Sequence: Synthetic peptide
SSRLSAD

SEQ ID NO: 10945 - protein, 7 aa, Artificial Sequence
  Description of Artificial Sequence: Synthetic peptide
SSRLSES

SEQ ID NO: 10946 - protein, 7 aa, Artificial Sequence
  Description of Artificial Sequence: Synthetic peptide
SSRPGMS

SEQ ID NO: 10947 - protein, 7 aa, Artificial Sequence
  Description of Artificial Sequence: Synthetic peptide
SSRPGQH

SEQ ID NO: 10948 - protein, 7 aa, Artificial Sequence
  Description of Artificial Sequence: Synthetic peptide
SSRPNDD

SEQ ID NO: 10949 - protein, 7 aa, Artificial Sequence
  Description of Artificial Sequence: Synthetic peptide
SSRPSGS

SEQ ID NO: 10950 - protein, 7 aa, Artificial Sequence
  Description of Artificial Sequence: Synthetic peptide
SSRSAQS

SEQ ID NO: 10951 - protein, 7 aa, Artificial Sequence
  Description of Artificial Sequence: Synthetic peptide
SSRSPDL

SEQ ID NO: 10952 - protein, 7 aa, Artificial Sequence
  Description of Artificial Sequence: Synthetic peptide
SSRTNSY

SEQ ID NO: 10953 - protein, 7 aa, Artificial Sequence
  Description of Artificial Sequence: Synthetic peptide
SSRTVEA

SEQ ID NO: 10954 - protein, 7 aa, Artificial Sequence
  Description of Artificial Sequence: Synthetic peptide
SSSALVL

SEQ ID NO: 10955 - protein, 7 aa, Artificial Sequence
  Description of Artificial Sequence: Synthetic peptide
SSSAVAS

SEQ ID NO: 10956 - protein, 7 aa, Artificial Sequence
  Description of Artificial Sequence: Synthetic peptide
SSSESAW

SEQ ID NO: 10957 - protein, 7 aa, Artificial Sequence
  Description of Artificial Sequence: Synthetic peptide
SSSGTHP

SEQ ID NO: 10958 - protein, 7 aa, Artificial Sequence
  Description of Artificial Sequence: Synthetic peptide
SSSIIRT

SEQ ID NO: 10959 - protein, 7 aa, Artificial Sequence
  Description of Artificial Sequence: Synthetic peptide
SSSIRAN

SEQ ID NO: 10960 - protein, 7 aa, Artificial Sequence
  Description of Artificial Sequence: Synthetic peptide
SSSKPHL

SEQ ID NO: 10961 - protein, 7 aa, Artificial Sequence
  Description of Artificial Sequence: Synthetic peptide
SSSLDSR

SEQ ID NO: 10962 - protein, 7 aa, Artificial Sequence
  Description of Artificial Sequence: Synthetic peptide
SSSLQLG

SEQ ID NO: 10963 - protein, 7 aa, Artificial Sequence
  Description of Artificial Sequence: Synthetic peptide
SSSLSHS

SEQ ID NO: 10964 - protein, 7 aa, Artificial Sequence
  Description of Artificial Sequence: Synthetic peptide
SSSMRER

SEQ ID NO: 10965 - protein, 7 aa, Artificial Sequence
  Description of Artificial Sequence: Synthetic peptide
SSSNTLT

SEQ ID NO: 10966 - protein, 7 aa, Artificial Sequence
  Description of Artificial Sequence: Synthetic peptide
SSSRAVE

SEQ ID NO: 10967 - protein, 7 aa, Artificial Sequence
  Description of Artificial Sequence: Synthetic peptide
SSSRPTQ

SEQ ID NO: 10968 - protein, 7 aa, Artificial Sequence
  Description of Artificial Sequence: Synthetic peptide
SSSSKTP

SEQ ID NO: 10969 - protein, 7 aa, Artificial Sequence
  Description of Artificial Sequence: Synthetic peptide
SSSSLYT

SEQ ID NO: 10970 - protein, 7 aa, Artificial Sequence
  Description of Artificial Sequence: Synthetic peptide
SSSSPRA

SEQ ID NO: 10971 - protein, 7 aa, Artificial Sequence
  Description of Artificial Sequence: Synthetic peptide
SSSSSRP

SEQ ID NO: 10972 - protein, 7 aa, Artificial Sequence
  Description of Artificial Sequence: Synthetic peptide
SSSSVRA

SEQ ID NO: 10973 - protein, 7 aa, Artificial Sequence
  Description of Artificial Sequence: Synthetic peptide
SSSTPPL

SEQ ID NO: 10974 - protein, 7 aa, Artificial Sequence
  Description of Artificial Sequence: Synthetic peptide
SSSTPPS

SEQ ID NO: 10975 - protein, 7 aa, Artificial Sequence
  Description of Artificial Sequence: Synthetic peptide
SSSTPPT

SEQ ID NO: 10976 - protein, 7 aa, Artificial Sequence
  Description of Artificial Sequence: Synthetic peptide
SSSTSTG

SEQ ID NO: 10977 - protein, 7 aa, Artificial Sequence
  Description of Artificial Sequence: Synthetic peptide
SSSTVQF

SEQ ID NO: 10978 - protein, 7 aa, Artificial Sequence
  Description of Artificial Sequence: Synthetic peptide
SSSVSNN

SEQ ID NO: 10979 - protein, 7 aa, Artificial Sequence
  Description of Artificial Sequence: Synthetic peptide
SSSYNGK

SEQ ID NO: 10980 - protein, 7 aa, Artificial Sequence
  Description of Artificial Sequence: Synthetic peptide
SSTESIR

SEQ ID NO: 10981 - protein, 7 aa, Artificial Sequence
  Description of Artificial Sequence: Synthetic peptide
SSTHEKP

SEQ ID NO: 10982 - protein, 7 aa, Artificial Sequence
  Description of Artificial Sequence: Synthetic peptide
SSTKSLA

SEQ ID NO: 10983 - protein, 7 aa, Artificial Sequence
  Description of Artificial Sequence: Synthetic peptide
SSTPPKY

SEQ ID NO: 10984 - protein, 7 aa, Artificial Sequence
  Description of Artificial Sequence: Synthetic peptide
SSTPTSH

SEQ ID NO: 10985 - protein, 7 aa, Artificial Sequence
  Description of Artificial Sequence: Synthetic peptide
SSTPTTA

SEQ ID NO: 10986 - protein, 7 aa, Artificial Sequence
  Description of Artificial Sequence: Synthetic peptide
SSTRDAH

SEQ ID NO: 10987 - protein, 7 aa, Artificial Sequence
  Description of Artificial Sequence: Synthetic peptide
SSTRTPP

SEQ ID NO: 10988 - protein, 7 aa, Artificial Sequence
  Description of Artificial Sequence: Synthetic peptide
SSTSSRF

SEQ ID NO: 10989 - protein, 7 aa, Artificial Sequence
  Description of Artificial Sequence: Synthetic peptide
SSTSTLL

SEQ ID NO: 10990 - protein, 7 aa, Artificial Sequence
  Description of Artificial Sequence: Synthetic peptide
SSTTMIE

SEQ ID NO: 10991 - protein, 7 aa, Artificial Sequence
  Description of Artificial Sequence: Synthetic peptide
SSVASTV

SEQ ID NO: 10992 - protein, 7 aa, Artificial Sequence
  Description of Artificial Sequence: Synthetic peptide
SSVGSAG

SEQ ID NO: 10993 - protein, 7 aa, Artificial Sequence
  Description of Artificial Sequence: Synthetic peptide
SSVHLYP

SEQ ID NO: 10994 - protein, 7 aa, Artificial Sequence
  Description of Artificial Sequence: Synthetic peptide
SSVHSRM

SEQ ID NO: 10995 - protein, 7 aa, Artificial Sequence
  Description of Artificial Sequence: Synthetic peptide
SSVNTSG

SEQ ID NO: 10996 - protein, 7 aa, Artificial Sequence
  Description of Artificial Sequence: Synthetic peptide
SSVPRPS

SEQ ID NO: 10997 - protein, 7 aa, Artificial Sequence
  Description of Artificial Sequence: Synthetic peptide
SSVRLLS

SEQ ID NO: 10998 - protein, 7 aa, Artificial Sequence
  Description of Artificial Sequence: Synthetic peptide
SSVSGLS

SEQ ID NO: 10999 - protein, 7 aa, Artificial Sequence
  Description of Artificial Sequence: Synthetic peptide
SSVTRTG

SEQ ID NO: 11000 - protein, 7 aa, Artificial Sequence
  Description of Artificial Sequence: Synthetic peptide
SSVTVSS

SEQ ID NO: 11001 - protein, 7 aa, Artificial Sequence
  Description of Artificial Sequence: Synthetic peptide
SSVVHGV

SEQ ID NO: 11002 - protein, 7 aa, Artificial Sequence
  Description of Artificial Sequence: Synthetic peptide
SSVVPSM

SEQ ID NO: 11003 - protein, 7 aa, Artificial Sequence
  Description of Artificial Sequence: Synthetic peptide
SSWQPFE

SEQ ID NO: 11004 - protein, 7 aa, Artificial Sequence
  Description of Artificial Sequence: Synthetic peptide
SSYAPLH

SEQ ID NO: 11005 - protein, 7 aa, Artificial Sequence
  Description of Artificial Sequence: Synthetic peptide
SSYASGS

SEQ ID NO: 11006 - protein, 7 aa, Artificial Sequence
  Description of Artificial Sequence: Synthetic peptide
SSYDSSK

SEQ ID NO: 11007 - protein, 7 aa, Artificial Sequence
  Description of Artificial Sequence: Synthetic peptide
SSYEKGT

SEQ ID NO: 11008 - protein, 7 aa, Artificial Sequence
  Description of Artificial Sequence: Synthetic peptide
SSYHGLT

SEQ ID NO: 11009 - protein, 7 aa, Artificial Sequence
  Description of Artificial Sequence: Synthetic peptide
SSYHPAE

SEQ ID NO: 11010 - protein, 7 aa, Artificial Sequence
  Description of Artificial Sequence: Synthetic peptide
SSYPGHS

SEQ ID NO: 11011 - protein, 7 aa, Artificial Sequence
  Description of Artificial Sequence: Synthetic peptide
SSYSVPE

SEQ ID NO: 11012 - protein, 7 aa, Artificial Sequence
  Description of Artificial Sequence: Synthetic peptide
STAITIH

SEQ ID NO: 11013 - protein, 7 aa, Artificial Sequence
  Description of Artificial Sequence: Synthetic peptide
STALGIV

SEQ ID NO: 11014 - protein, 7 aa, Artificial Sequence
  Description of Artificial Sequence: Synthetic peptide
STANAQT

SEQ ID NO: 11015 - protein, 7 aa, Artificial Sequence
  Description of Artificial Sequence: Synthetic peptide
STAPGAA

SEQ ID NO: 11016 - protein, 7 aa, Artificial Sequence
  Description of Artificial Sequence: Synthetic peptide
STARAST

SEQ ID NO: 11017 - protein, 7 aa, Artificial Sequence
  Description of Artificial Sequence: Synthetic peptide
STARLRD

SEQ ID NO: 11018 - protein, 7 aa, Artificial Sequence
  Description of Artificial Sequence: Synthetic peptide
STATQLM

SEQ ID NO: 11019 - protein, 7 aa, Artificial Sequence
  Description of Artificial Sequence: Synthetic peptide
STCHPSG

SEQ ID NO: 11020 - protein, 7 aa, Artificial Sequence
  Description of Artificial Sequence: Synthetic peptide
STDEHVM

SEQ ID NO: 11021 - protein, 7 aa, Artificial Sequence
  Description of Artificial Sequence: Synthetic peptide
STDHTAY

SEQ ID NO: 11022 - protein, 7 aa, Artificial Sequence
  Description of Artificial Sequence: Synthetic peptide
STDLRQA

SEQ ID NO: 11023 - protein, 7 aa, Artificial Sequence
  Description of Artificial Sequence: Synthetic peptide
STDMRHI

SEQ ID NO: 11024 - protein, 7 aa, Artificial Sequence
  Description of Artificial Sequence: Synthetic peptide
STDNDLR

SEQ ID NO: 11025 - protein, 7 aa, Artificial Sequence
  Description of Artificial Sequence: Synthetic peptide
STDTNHQ

SEQ ID NO: 11026 - protein, 7 aa, Artificial Sequence
  Description of Artificial Sequence: Synthetic peptide
STDVKTQ

SEQ ID NO: 11027 - protein, 7 aa, Artificial Sequence
  Description of Artificial Sequence: Synthetic peptide
STEFKSA

SEQ ID NO: 11028 - protein, 7 aa, Artificial Sequence
  Description of Artificial Sequence: Synthetic peptide
STERPMP

SEQ ID NO: 11029 - protein, 7 aa, Artificial Sequence
  Description of Artificial Sequence: Synthetic peptide
STETAQS

SEQ ID NO: 11030 - protein, 7 aa, Artificial Sequence
  Description of Artificial Sequence: Synthetic peptide
STFKNVV

SEQ ID NO: 11031 - protein, 7 aa, Artificial Sequence
  Description of Artificial Sequence: Synthetic peptide
STFNSAG

SEQ ID NO: 11032 - protein, 7 aa, Artificial Sequence
  Description of Artificial Sequence: Synthetic peptide
STFSSSM

SEQ ID NO: 11033 - protein, 7 aa, Artificial Sequence
  Description of Artificial Sequence: Synthetic peptide
STFVTAG

SEQ ID NO: 11034 - protein, 7 aa, Artificial Sequence
  Description of Artificial Sequence: Synthetic peptide
STFVTRS

SEQ ID NO: 11035 - protein, 7 aa, Artificial Sequence
  Description of Artificial Sequence: Synthetic peptide
STGALPS

SEQ ID NO: 11036 - protein, 7 aa, Artificial Sequence
  Description of Artificial Sequence: Synthetic peptide
STGAMLH

SEQ ID NO: 11037 - protein, 7 aa, Artificial Sequence
  Description of Artificial Sequence: Synthetic peptide
STGAPPD

SEQ ID NO: 11038 - protein, 7 aa, Artificial Sequence
  Description of Artificial Sequence: Synthetic peptide
STGMGAF

SEQ ID NO: 11039 - protein, 7 aa, Artificial Sequence
  Description of Artificial Sequence: Synthetic peptide
STGPFLP

SEQ ID NO: 11040 - protein, 7 aa, Artificial Sequence
  Description of Artificial Sequence: Synthetic peptide
STGSAQT

SEQ ID NO: 11041 - protein, 7 aa, Artificial Sequence
  Description of Artificial Sequence: Synthetic peptide
STGSTLQ

SEQ ID NO: 11042 - protein, 7 aa, Artificial Sequence
  Description of Artificial Sequence: Synthetic peptide
STGYGGL

SEQ ID NO: 11043 - protein, 7 aa, Artificial Sequence
  Description of Artificial Sequence: Synthetic peptide
STHISPP

SEQ ID NO: 11044 - protein, 7 aa, Artificial Sequence
  Description of Artificial Sequence: Synthetic peptide
STHMRLA

SEQ ID NO: 11045 - protein, 7 aa, Artificial Sequence
  Description of Artificial Sequence: Synthetic peptide
STHNLTS

SEQ ID NO: 11046 - protein, 7 aa, Artificial Sequence
  Description of Artificial Sequence: Synthetic peptide
STHRDSS

SEQ ID NO: 11047 - protein, 7 aa, Artificial Sequence
  Description of Artificial Sequence: Synthetic peptide
STHRSLA

SEQ ID NO: 11048 - protein, 7 aa, Artificial Sequence
  Description of Artificial Sequence: Synthetic peptide
STHSYPV

SEQ ID NO: 11049 - protein, 7 aa, Artificial Sequence
  Description of Artificial Sequence: Synthetic peptide
STHVSST

SEQ ID NO: 11050 - protein, 7 aa, Artificial Sequence
  Description of Artificial Sequence: Synthetic peptide
STIAGTP

SEQ ID NO: 11051 - protein, 7 aa, Artificial Sequence
  Description of Artificial Sequence: Synthetic peptide
STISALA

SEQ ID NO: 11052 - protein, 7 aa, Artificial Sequence
  Description of Artificial Sequence: Synthetic peptide
STKESQL

SEQ ID NO: 11053 - protein, 7 aa, Artificial Sequence
  Description of Artificial Sequence: Synthetic peptide
STKSGTP

SEQ ID NO: 11054 - protein, 7 aa, Artificial Sequence
  Description of Artificial Sequence: Synthetic peptide
STKTPPA

SEQ ID NO: 11055 - protein, 7 aa, Artificial Sequence
  Description of Artificial Sequence: Synthetic peptide
STKYSSV

SEQ ID NO: 11056 - protein, 7 aa, Artificial Sequence
  Description of Artificial Sequence: Synthetic peptide
STLARDN

SEQ ID NO: 11057 - protein, 7 aa, Artificial Sequence
  Description of Artificial Sequence: Synthetic peptide
STLARVP

SEQ ID NO: 11058 - protein, 7 aa, Artificial Sequence
  Description of Artificial Sequence: Synthetic peptide
STLCPVL

SEQ ID NO: 11059 - protein, 7 aa, Artificial Sequence
  Description of Artificial Sequence: Synthetic peptide
STLGGGY

SEQ ID NO: 11060 - protein, 7 aa, Artificial Sequence
  Description of Artificial Sequence: Synthetic peptide
STLNNVP

SEQ ID NO: 11061 - protein, 7 aa, Artificial Sequence
  Description of Artificial Sequence: Synthetic peptide
STLPSPE

SEQ ID NO: 11062 - protein, 7 aa, Artificial Sequence
  Description of Artificial Sequence: Synthetic peptide
STLPSRP

SEQ ID NO: 11063 - protein, 7 aa, Artificial Sequence
  Description of Artificial Sequence: Synthetic peptide
STLRCGE

SEQ ID NO: 11064 - protein, 7 aa, Artificial Sequence
  Description of Artificial Sequence: Synthetic peptide
STLVKNA

SEQ ID NO: 11065 - protein, 7 aa, Artificial Sequence
  Description of Artificial Sequence: Synthetic peptide
STLVRAE

SEQ ID NO: 11066 - protein, 7 aa, Artificial Sequence
  Description of Artificial Sequence: Synthetic peptide
STMAGRH

SEQ ID NO: 11067 - protein, 7 aa, Artificial Sequence
  Description of Artificial Sequence: Synthetic peptide
STMIAHS

SEQ ID NO: 11068 - protein, 7 aa, Artificial Sequence
  Description of Artificial Sequence: Synthetic peptide
STMLLPS

SEQ ID NO: 11069 - protein, 7 aa, Artificial Sequence
  Description of Artificial Sequence: Synthetic peptide
STMNRGL

SEQ ID NO: 11070 - protein, 7 aa, Artificial Sequence
  Description of Artificial Sequence: Synthetic peptide
STMRPQL

SEQ ID NO: 11071 - protein, 7 aa, Artificial Sequence
  Description of Artificial Sequence: Synthetic peptide
STMSVKE

SEQ ID NO: 11072 - protein, 7 aa, Artificial Sequence
  Description of Artificial Sequence: Synthetic peptide
STNATSN

SEQ ID NO: 11073 - protein, 7 aa, Artificial Sequence
  Description of Artificial Sequence: Synthetic peptide
STNIVEY

SEQ ID NO: 11074 - protein, 7 aa, Artificial Sequence
  Description of Artificial Sequence: Synthetic peptide
STNRSTV

SEQ ID NO: 11075 - protein, 7 aa, Artificial Sequence
  Description of Artificial Sequence: Synthetic peptide
STNTALW

SEQ ID NO: 11076 - protein, 7 aa, Artificial Sequence
  Description of Artificial Sequence: Synthetic peptide
STNTPRG

SEQ ID NO: 11077 - protein, 7 aa, Artificial Sequence
  Description of Artificial Sequence: Synthetic peptide
STNTQAY

SEQ ID NO: 11078 - protein, 7 aa, Artificial Sequence
  Description of Artificial Sequence: Synthetic peptide
STNTREE

SEQ ID NO: 11079 - protein, 7 aa, Artificial Sequence
  Description of Artificial Sequence: Synthetic peptide
STNVGLA

SEQ ID NO: 11080 - protein, 7 aa, Artificial Sequence
  Description of Artificial Sequence: Synthetic peptide
STPAKYG

SEQ ID NO: 11081 - protein, 7 aa, Artificial Sequence
  Description of Artificial Sequence: Synthetic peptide
STPASRA

SEQ ID NO: 11082 - protein, 7 aa, Artificial Sequence
  Description of Artificial Sequence: Synthetic peptide
STPDNHT

SEQ ID NO: 11083 - protein, 7 aa, Artificial Sequence
  Description of Artificial Sequence: Synthetic peptide
STPDRQT

SEQ ID NO: 11084 - protein, 7 aa, Artificial Sequence
  Description of Artificial Sequence: Synthetic peptide
STPHTNA

SEQ ID NO: 11085 - protein, 7 aa, Artificial Sequence
  Description of Artificial Sequence: Synthetic peptide
STPKPSP

SEQ ID NO: 11086 - protein, 7 aa, Artificial Sequence
  Description of Artificial Sequence: Synthetic peptide
STPLIAK

SEQ ID NO: 11087 - protein, 7 aa, Artificial Sequence
  Description of Artificial Sequence: Synthetic peptide
STPLPRT

SEQ ID NO: 11088 - protein, 7 aa, Artificial Sequence
  Description of Artificial Sequence: Synthetic peptide
STPLQTP

SEQ ID NO: 11089 - protein, 7 aa, Artificial Sequence
  Description of Artificial Sequence: Synthetic peptide
STPLRTS

SEQ ID NO: 11090 - protein, 7 aa, Artificial Sequence
  Description of Artificial Sequence: Synthetic peptide
STPNARI

SEQ ID NO: 11091 - protein, 7 aa, Artificial Sequence
  Description of Artificial Sequence: Synthetic peptide
STPNMNR

SEQ ID NO: 11092 - protein, 7 aa, Artificial Sequence
  Description of Artificial Sequence: Synthetic peptide
STPPARS

SEQ ID NO: 11093 - protein, 7 aa, Artificial Sequence
  Description of Artificial Sequence: Synthetic peptide
STPPLYE

SEQ ID NO: 11094 - protein, 7 aa, Artificial Sequence
  Description of Artificial Sequence: Synthetic peptide
STPPTTL

SEQ ID NO: 11095 - protein, 7 aa, Artificial Sequence
  Description of Artificial Sequence: Synthetic peptide
STPRPHD

SEQ ID NO: 11096 - protein, 7 aa, Artificial Sequence
  Description of Artificial Sequence: Synthetic peptide
STPTGAL

SEQ ID NO: 11097 - protein, 7 aa, Artificial Sequence
  Description of Artificial Sequence: Synthetic peptide
STQQRSG

SEQ ID NO: 11098 - protein, 7 aa, Artificial Sequence
  Description of Artificial Sequence: Synthetic peptide
STQRAAA

SEQ ID NO: 11099 - protein, 7 aa, Artificial Sequence
  Description of Artificial Sequence: Synthetic peptide
STQVHLL

SEQ ID NO: 11100 - protein, 7 aa, Artificial Sequence
  Description of Artificial Sequence: Synthetic peptide
STQVHMM

SEQ ID NO: 11101 - protein, 7 aa, Artificial Sequence
  Description of Artificial Sequence: Synthetic peptide
STQVPNK

SEQ ID NO: 11102 - protein, 7 aa, Artificial Sequence
  Description of Artificial Sequence: Synthetic peptide
STQWRTE

SEQ ID NO: 11103 - protein, 7 aa, Artificial Sequence
  Description of Artificial Sequence: Synthetic peptide
STQYSPV

SEQ ID NO: 11104 - protein, 7 aa, Artificial Sequence
  Description of Artificial Sequence: Synthetic peptide
STRAPTA

SEQ ID NO: 11105 - protein, 7 aa, Artificial Sequence
  Description of Artificial Sequence: Synthetic peptide
STRDTSN

SEQ ID NO: 11106 - protein, 7 aa, Artificial Sequence
  Description of Artificial Sequence: Synthetic peptide
STREAKP

SEQ ID NO: 11107 - protein, 7 aa, Artificial Sequence
  Description of Artificial Sequence: Synthetic peptide
STREDVL

SEQ ID NO: 11108 - protein, 7 aa, Artificial Sequence
  Description of Artificial Sequence: Synthetic peptide
STRFNST

SEQ ID NO: 11109 - protein, 7 aa, Artificial Sequence
  Description of Artificial Sequence: Synthetic peptide
STRPTVN

SEQ ID NO: 11110 - protein, 7 aa, Artificial Sequence
  Description of Artificial Sequence: Synthetic peptide
STRQLQQ

SEQ ID NO: 11111 - protein, 7 aa, Artificial Sequence
  Description of Artificial Sequence: Synthetic peptide
STRSDMY

SEQ ID NO: 11112 - protein, 7 aa, Artificial Sequence
  Description of Artificial Sequence: Synthetic peptide
STRSIAG

SEQ ID NO: 11113 - protein, 7 aa, Artificial Sequence
  Description of Artificial Sequence: Synthetic peptide
STRSVEH

SEQ ID NO: 11114 - protein, 7 aa, Artificial Sequence
  Description of Artificial Sequence: Synthetic peptide
STRTVSN

SEQ ID NO: 11115 - protein, 7 aa, Artificial Sequence
  Description of Artificial Sequence: Synthetic peptide
STRVLTT

SEQ ID NO: 11116 - protein, 7 aa, Artificial Sequence
  Description of Artificial Sequence: Synthetic peptide
STSANLG

SEQ ID NO: 11117 - protein, 7 aa, Artificial Sequence
  Description of Artificial Sequence: Synthetic peptide
STSDTWK

SEQ ID NO: 11118 - protein, 7 aa, Artificial Sequence
  Description of Artificial Sequence: Synthetic peptide
STSEGLK

SEQ ID NO: 11119 - protein, 7 aa, Artificial Sequence
  Description of Artificial Sequence: Synthetic peptide
STSEIDR

SEQ ID NO: 11120 - protein, 7 aa, Artificial Sequence
  Description of Artificial Sequence: Synthetic peptide
STSFAVG

SEQ ID NO: 11121 - protein, 7 aa, Artificial Sequence
  Description of Artificial Sequence: Synthetic peptide
STSKAQC

SEQ ID NO: 11122 - protein, 7 aa, Artificial Sequence
  Description of Artificial Sequence: Synthetic peptide
STSKAQI

SEQ ID NO: 11123 - protein, 7 aa, Artificial Sequence
  Description of Artificial Sequence: Synthetic peptide
STSKYMH

SEQ ID NO: 11124 - protein, 7 aa, Artificial Sequence
  Description of Artificial Sequence: Synthetic peptide
STSLAVQ

SEQ ID NO: 11125 - protein, 7 aa, Artificial Sequence
  Description of Artificial Sequence: Synthetic peptide
STSLGYQ

SEQ ID NO: 11126 - protein, 7 aa, Artificial Sequence
  Description of Artificial Sequence: Synthetic peptide
STSLPSC

SEQ ID NO: 11127 - protein, 7 aa, Artificial Sequence
  Description of Artificial Sequence: Synthetic peptide
STSMMSA

SEQ ID NO: 11128 - protein, 7 aa, Artificial Sequence
  Description of Artificial Sequence: Synthetic peptide
STSMSRT

SEQ ID NO: 11129 - protein, 7 aa, Artificial Sequence
  Description of Artificial Sequence: Synthetic peptide
STSQPLP

SEQ ID NO: 11130 - protein, 7 aa, Artificial Sequence
  Description of Artificial Sequence: Synthetic peptide
STSRNMS

SEQ ID NO: 11131 - protein, 7 aa, Artificial Sequence
  Description of Artificial Sequence: Synthetic peptide
STSSLSA

SEQ ID NO: 11132 - protein, 7 aa, Artificial Sequence
  Description of Artificial Sequence: Synthetic peptide
STSSPRH

SEQ ID NO: 11133 - protein, 7 aa, Artificial Sequence
  Description of Artificial Sequence: Synthetic peptide
STSSSLY

SEQ ID NO: 11134 - protein, 7 aa, Artificial Sequence
  Description of Artificial Sequence: Synthetic peptide
STSSTLS

SEQ ID NO: 11135 - protein, 7 aa, Artificial Sequence
  Description of Artificial Sequence: Synthetic peptide
STSTGAP

SEQ ID NO: 11136 - protein, 7 aa, Artificial Sequence
  Description of Artificial Sequence: Synthetic peptide
STSTLPL

SEQ ID NO: 11137 - protein, 7 aa, Artificial Sequence
  Description of Artificial Sequence: Synthetic peptide
STSTLVH

SEQ ID NO: 11138 - protein, 7 aa, Artificial Sequence
  Description of Artificial Sequence: Synthetic peptide
STSVPPK

SEQ ID NO: 11139 - protein, 7 aa, Artificial Sequence
  Description of Artificial Sequence: Synthetic peptide
STSVRQT

SEQ ID NO: 11140 - protein, 7 aa, Artificial Sequence
  Description of Artificial Sequence: Synthetic peptide
STTAKAM

SEQ ID NO: 11141 - protein, 7 aa, Artificial Sequence
  Description of Artificial Sequence: Synthetic peptide
STTAQTK

SEQ ID NO: 11142 - protein, 7 aa, Artificial Sequence
  Description of Artificial Sequence: Synthetic peptide
STTARSH

SEQ ID NO: 11143 - protein, 7 aa, Artificial Sequence
  Description of Artificial Sequence: Synthetic peptide
STTDKPS

SEQ ID NO: 11144 - protein, 7 aa, Artificial Sequence
  Description of Artificial Sequence: Synthetic peptide
STTHDGR

SEQ ID NO: 11145 - protein, 7 aa, Artificial Sequence
  Description of Artificial Sequence: Synthetic peptide
STTHGRD

SEQ ID NO: 11146 - protein, 7 aa, Artificial Sequence
  Description of Artificial Sequence: Synthetic peptide
STTLHYV

SEQ ID NO: 11147 - protein, 7 aa, Artificial Sequence
  Description of Artificial Sequence: Synthetic peptide
STTLKMP

SEQ ID NO: 11148 - protein, 7 aa, Artificial Sequence
  Description of Artificial Sequence: Synthetic peptide
STTLNGL

SEQ ID NO: 11149 - protein, 7 aa, Artificial Sequence
  Description of Artificial Sequence: Synthetic peptide
STTLTPL

SEQ ID NO: 11150 - protein, 7 aa, Artificial Sequence
  Description of Artificial Sequence: Synthetic peptide
STTNMLL

SEQ ID NO: 11151 - protein, 7 aa, Artificial Sequence
  Description of Artificial Sequence: Synthetic peptide
STTPSPM

SEQ ID NO: 11152 - protein, 7 aa, Artificial Sequence
  Description of Artificial Sequence: Synthetic peptide
STTRSLL

SEQ ID NO: 11153 - protein, 7 aa, Artificial Sequence
  Description of Artificial Sequence: Synthetic peptide
STTRTGG

SEQ ID NO: 11154 - protein, 7 aa, Artificial Sequence
  Description of Artificial Sequence: Synthetic peptide
STTRTTL

SEQ ID NO: 11155 - protein, 7 aa, Artificial Sequence
  Description of Artificial Sequence: Synthetic peptide
STTSPSR

SEQ ID NO: 11156 - protein, 7 aa, Artificial Sequence
  Description of Artificial Sequence: Synthetic peptide
STTSRVE

SEQ ID NO: 11157 - protein, 7 aa, Artificial Sequence
  Description of Artificial Sequence: Synthetic peptide
STTSTLT

SEQ ID NO: 11158 - protein, 7 aa, Artificial Sequence
  Description of Artificial Sequence: Synthetic peptide
STTVITP

SEQ ID NO: 11159 - protein, 7 aa, Artificial Sequence
  Description of Artificial Sequence: Synthetic peptide
STVIKMN

SEQ ID NO: 11160 - protein, 7 aa, Artificial Sequence
  Description of Artificial Sequence: Synthetic peptide
STVINPT

SEQ ID NO: 11161 - protein, 7 aa, Artificial Sequence
  Description of Artificial Sequence: Synthetic peptide
STVIPTP

SEQ ID NO: 11162 - protein, 7 aa, Artificial Sequence
  Description of Artificial Sequence: Synthetic peptide
STVLLTA

SEQ ID NO: 11163 - protein, 7 aa, Artificial Sequence
  Description of Artificial Sequence: Synthetic peptide
STVMTKV

SEQ ID NO: 11164 - protein, 7 aa, Artificial Sequence
  Description of Artificial Sequence: Synthetic peptide
STYMTHS

SEQ ID NO: 11165 - protein, 7 aa, Artificial Sequence
  Description of Artificial Sequence: Synthetic peptide
STYNSPE

SEQ ID NO: 11166 - protein, 7 aa, Artificial Sequence
  Description of Artificial Sequence: Synthetic peptide
SVAAHQH

SEQ ID NO: 11167 - protein, 7 aa, Artificial Sequence
  Description of Artificial Sequence: Synthetic peptide
SVAAIKP

SEQ ID NO: 11168 - protein, 7 aa, Artificial Sequence
  Description of Artificial Sequence: Synthetic peptide
SVAAVSL

SEQ ID NO: 11169 - protein, 7 aa, Artificial Sequence
  Description of Artificial Sequence: Synthetic peptide
SVAGLIK

SEQ ID NO: 11170 - protein, 7 aa, Artificial Sequence
  Description of Artificial Sequence: Synthetic peptide
SVAHNRA

SEQ ID NO: 11171 - protein, 7 aa, Artificial Sequence
  Description of Artificial Sequence: Synthetic peptide
SVAHYGL

SEQ ID NO: 11172 - protein, 7 aa, Artificial Sequence
  Description of Artificial Sequence: Synthetic peptide
SVAPATL

SEQ ID NO: 11173 - protein, 7 aa, Artificial Sequence
  Description of Artificial Sequence: Synthetic peptide
SVAPVKA

SEQ ID NO: 11174 - protein, 7 aa, Artificial Sequence
  Description of Artificial Sequence: Synthetic peptide
SVARNSP

SEQ ID NO: 11175 - protein, 7 aa, Artificial Sequence
  Description of Artificial Sequence: Synthetic peptide
SVASMSS

SEQ ID NO: 11176 - protein, 7 aa, Artificial Sequence
  Description of Artificial Sequence: Synthetic peptide
SVATAQT

SEQ ID NO: 11177 - protein, 7 aa, Artificial Sequence
  Description of Artificial Sequence: Synthetic peptide
SVDAVTG

SEQ ID NO: 11178 - protein, 7 aa, Artificial Sequence
  Description of Artificial Sequence: Synthetic peptide
SVDEGAR

SEQ ID NO: 11179 - protein, 7 aa, Artificial Sequence
  Description of Artificial Sequence: Synthetic peptide
SVDPHNP

SEQ ID NO: 11180 - protein, 7 aa, Artificial Sequence
  Description of Artificial Sequence: Synthetic peptide
SVDSSII

SEQ ID NO: 11181 - protein, 7 aa, Artificial Sequence
  Description of Artificial Sequence: Synthetic peptide
SVDTGHS

SEQ ID NO: 11182 - protein, 7 aa, Artificial Sequence
  Description of Artificial Sequence: Synthetic peptide
SVDYVGV

SEQ ID NO: 11183 - protein, 7 aa, Artificial Sequence
  Description of Artificial Sequence: Synthetic peptide
SVEFSDA

SEQ ID NO: 11184 - protein, 7 aa, Artificial Sequence
  Description of Artificial Sequence: Synthetic peptide
SVEKDDH

SEQ ID NO: 11185 - protein, 7 aa, Artificial Sequence
  Description of Artificial Sequence: Synthetic peptide
SVETGRV

SEQ ID NO: 11186 - protein, 7 aa, Artificial Sequence
  Description of Artificial Sequence: Synthetic peptide
SVETTNY

SEQ ID NO: 11187 - protein, 7 aa, Artificial Sequence
  Description of Artificial Sequence: Synthetic peptide
SVEVSRA

SEQ ID NO: 11188 - protein, 7 aa, Artificial Sequence
  Description of Artificial Sequence: Synthetic peptide
SVFKCEP

SEQ ID NO: 11189 - protein, 7 aa, Artificial Sequence
  Description of Artificial Sequence: Synthetic peptide
SVFPHSA

SEQ ID NO: 11190 - protein, 7 aa, Artificial Sequence
  Description of Artificial Sequence: Synthetic peptide
SVFPLPH

SEQ ID NO: 11191 - protein, 7 aa, Artificial Sequence
  Description of Artificial Sequence: Synthetic peptide
SVGDNGS

SEQ ID NO: 11192 - protein, 7 aa, Artificial Sequence
  Description of Artificial Sequence: Synthetic peptide
SVGLQLE

SEQ ID NO: 11193 - protein, 7 aa, Artificial Sequence
  Description of Artificial Sequence: Synthetic peptide
SVGSAME

SEQ ID NO: 11194 - protein, 7 aa, Artificial Sequence
  Description of Artificial Sequence: Synthetic peptide
SVGSYSP

SEQ ID NO: 11195 - protein, 7 aa, Artificial Sequence
  Description of Artificial Sequence: Synthetic peptide
SVGSYVD

SEQ ID NO: 11196 - protein, 7 aa, Artificial Sequence
  Description of Artificial Sequence: Synthetic peptide
SVGTKDD

SEQ ID NO: 11197 - protein, 7 aa, Artificial Sequence
  Description of Artificial Sequence: Synthetic peptide
SVHDHRS

SEQ ID NO: 11198 - protein, 7 aa, Artificial Sequence
  Description of Artificial Sequence: Synthetic peptide
SVHEHSM

SEQ ID NO: 11199 - protein, 7 aa, Artificial Sequence
  Description of Artificial Sequence: Synthetic peptide
SVHPNQA

SEQ ID NO: 11200 - protein, 7 aa, Artificial Sequence
  Description of Artificial Sequence: Synthetic peptide
SVILRAT

SEQ ID NO: 11201 - protein, 7 aa, Artificial Sequence
  Description of Artificial Sequence: Synthetic peptide
SVINSRG

SEQ ID NO: 11202 - protein, 7 aa, Artificial Sequence
  Description of Artificial Sequence: Synthetic peptide
SVISRSE

SEQ ID NO: 11203 - protein, 7 aa, Artificial Sequence
  Description of Artificial Sequence: Synthetic peptide
SVITWED

SEQ ID NO: 11204 - protein, 7 aa, Artificial Sequence
  Description of Artificial Sequence: Synthetic peptide
SVKPLNH

SEQ ID NO: 11205 - protein, 7 aa, Artificial Sequence
  Description of Artificial Sequence: Synthetic peptide
SVKVLRP

SEQ ID NO: 11206 - protein, 7 aa, Artificial Sequence
  Description of Artificial Sequence: Synthetic peptide
SVLDGPP

SEQ ID NO: 11207 - protein, 7 aa, Artificial Sequence
  Description of Artificial Sequence: Synthetic peptide
SVLNLPS

SEQ ID NO: 11208 - protein, 7 aa, Artificial Sequence
  Description of Artificial Sequence: Synthetic peptide
SVLPEPS

SEQ ID NO: 11209 - protein, 7 aa, Artificial Sequence
  Description of Artificial Sequence: Synthetic peptide
SVLRHPT

SEQ ID NO: 11210 - protein, 7 aa, Artificial Sequence
  Description of Artificial Sequence: Synthetic peptide
SVLRTTP

SEQ ID NO: 11211 - protein, 7 aa, Artificial Sequence
  Description of Artificial Sequence: Synthetic peptide
SVLSAVP

SEQ ID NO: 11212 - protein, 7 aa, Artificial Sequence
  Description of Artificial Sequence: Synthetic peptide
SVLSIDR

SEQ ID NO: 11213 - protein, 7 aa, Artificial Sequence
  Description of Artificial Sequence: Synthetic peptide
SVLSSSV

SEQ ID NO: 11214 - protein, 7 aa, Artificial Sequence
  Description of Artificial Sequence: Synthetic peptide
SVMANQA

SEQ ID NO: 11215 - protein, 7 aa, Artificial Sequence
  Description of Artificial Sequence: Synthetic peptide
SVMPKPQ

SEQ ID NO: 11216 - protein, 7 aa, Artificial Sequence
  Description of Artificial Sequence: Synthetic peptide
SVNATRG

SEQ ID NO: 11217 - protein, 7 aa, Artificial Sequence
  Description of Artificial Sequence: Synthetic peptide
SVNGNDV

SEQ ID NO: 11218 - protein, 7 aa, Artificial Sequence
  Description of Artificial Sequence: Synthetic peptide
SVNGSWK

SEQ ID NO: 11219 - protein, 7 aa, Artificial Sequence
  Description of Artificial Sequence: Synthetic peptide
SVPEYNG

SEQ ID NO: 11220 - protein, 7 aa, Artificial Sequence
  Description of Artificial Sequence: Synthetic peptide
SVPGTGS

SEQ ID NO: 11221 - protein, 7 aa, Artificial Sequence
  Description of Artificial Sequence: Synthetic peptide
SVPHTST

SEQ ID NO: 11222 - protein, 7 aa, Artificial Sequence
  Description of Artificial Sequence: Synthetic peptide
SVPQMYS

SEQ ID NO: 11223 - protein, 7 aa, Artificial Sequence
  Description of Artificial Sequence: Synthetic peptide
SVPSASK

SEQ ID NO: 11224 - protein, 7 aa, Artificial Sequence
  Description of Artificial Sequence: Synthetic peptide
SVPSSTR

SEQ ID NO: 11225 - protein, 7 aa, Artificial Sequence
  Description of Artificial Sequence: Synthetic peptide
SVPVTPG

SEQ ID NO: 11226 - protein, 7 aa, Artificial Sequence
  Description of Artificial Sequence: Synthetic peptide
SVPYVGT

SEQ ID NO: 11227 - protein, 7 aa, Artificial Sequence
  Description of Artificial Sequence: Synthetic peptide
SVQREER

SEQ ID NO: 11228 - protein, 7 aa, Artificial Sequence
  Description of Artificial Sequence: Synthetic peptide
SVQRGVD

SEQ ID NO: 11229 - protein, 7 aa, Artificial Sequence
  Description of Artificial Sequence: Synthetic peptide
SVQTRPE

SEQ ID NO: 11230 - protein, 7 aa, Artificial Sequence
  Description of Artificial Sequence: Synthetic peptide
SVQVGYH

SEQ ID NO: 11231 - protein, 7 aa, Artificial Sequence
  Description of Artificial Sequence: Synthetic peptide
SVRAESA

SEQ ID NO: 11232 - protein, 7 aa, Artificial Sequence
  Description of Artificial Sequence: Synthetic peptide
SVRHVEP

SEQ ID NO: 11233 - protein, 7 aa, Artificial Sequence
  Description of Artificial Sequence: Synthetic peptide
SVRSASQ

SEQ ID NO: 11234 - protein, 7 aa, Artificial Sequence
  Description of Artificial Sequence: Synthetic peptide
SVRSLSP

SEQ ID NO: 11235 - protein, 7 aa, Artificial Sequence
  Description of Artificial Sequence: Synthetic peptide
SVRSNHA

SEQ ID NO: 11236 - protein, 7 aa, Artificial Sequence
  Description of Artificial Sequence: Synthetic peptide
SVRTKDS

SEQ ID NO: 11237 - protein, 7 aa, Artificial Sequence
  Description of Artificial Sequence: Synthetic peptide
SVSFSSS

SEQ ID NO: 11238 - protein, 7 aa, Artificial Sequence
  Description of Artificial Sequence: Synthetic peptide
SVSGAAA

SEQ ID NO: 11239 - protein, 7 aa, Artificial Sequence
  Description of Artificial Sequence: Synthetic peptide
SVSHNAP

SEQ ID NO: 11240 - protein, 7 aa, Artificial Sequence
  Description of Artificial Sequence: Synthetic peptide
SVSKEGT

SEQ ID NO: 11241 - protein, 7 aa, Artificial Sequence
  Description of Artificial Sequence: Synthetic peptide
SVSLADP

SEQ ID NO: 11242 - protein, 7 aa, Artificial Sequence
  Description of Artificial Sequence: Synthetic peptide
SVSLELY

SEQ ID NO: 11243 - protein, 7 aa, Artificial Sequence
  Description of Artificial Sequence: Synthetic peptide
SVSLGPK

SEQ ID NO: 11244 - protein, 7 aa, Artificial Sequence
  Description of Artificial Sequence: Synthetic peptide
SVSPHQA

SEQ ID NO: 11245 - protein, 7 aa, Artificial Sequence
  Description of Artificial Sequence: Synthetic peptide
SVSRMVA

SEQ ID NO: 11246 - protein, 7 aa, Artificial Sequence
  Description of Artificial Sequence: Synthetic peptide
SVSRPAL

SEQ ID NO: 11247 - protein, 7 aa, Artificial Sequence
  Description of Artificial Sequence: Synthetic peptide
SVSRQQI

SEQ ID NO: 11248 - protein, 7 aa, Artificial Sequence
  Description of Artificial Sequence: Synthetic peptide
SVSSQNT

SEQ ID NO: 11249 - protein, 7 aa, Artificial Sequence
  Description of Artificial Sequence: Synthetic peptide
SVSSSQL

SEQ ID NO: 11250 - protein, 7 aa, Artificial Sequence
  Description of Artificial Sequence: Synthetic peptide
SVSTANP

SEQ ID NO: 11251 - protein, 7 aa, Artificial Sequence
  Description of Artificial Sequence: Synthetic peptide
SVSTLPM

SEQ ID NO: 11252 - protein, 7 aa, Artificial Sequence
  Description of Artificial Sequence: Synthetic peptide
SVSTNKY

SEQ ID NO: 11253 - protein, 7 aa, Artificial Sequence
  Description of Artificial Sequence: Synthetic peptide
SVSVDYM

SEQ ID NO: 11254 - protein, 7 aa, Artificial Sequence
  Description of Artificial Sequence: Synthetic peptide
SVTAKTY

SEQ ID NO: 11255 - protein, 7 aa, Artificial Sequence
  Description of Artificial Sequence: Synthetic peptide
SVTDGVL

SEQ ID NO: 11256 - protein, 7 aa, Artificial Sequence
  Description of Artificial Sequence: Synthetic peptide
SVTEHVI

SEQ ID NO: 11257 - protein, 7 aa, Artificial Sequence
  Description of Artificial Sequence: Synthetic peptide
SVTGANT

SEQ ID NO: 11258 - protein, 7 aa, Artificial Sequence
  Description of Artificial Sequence: Synthetic peptide
SVTHLFK

SEQ ID NO: 11259 - protein, 7 aa, Artificial Sequence
  Description of Artificial Sequence: Synthetic peptide
SVTPTRA

SEQ ID NO: 11260 - protein, 7 aa, Artificial Sequence
  Description of Artificial Sequence: Synthetic peptide
SVTQMFK

SEQ ID NO: 11261 - protein, 7 aa, Artificial Sequence
  Description of Artificial Sequence: Synthetic peptide
SVTRAPY

SEQ ID NO: 11262 - protein, 7 aa, Artificial Sequence
  Description of Artificial Sequence: Synthetic peptide
SVTTRAI

SEQ ID NO: 11263 - protein, 7 aa, Artificial Sequence
  Description of Artificial Sequence: Synthetic peptide
SVVAAVI

SEQ ID NO: 11264 - protein, 7 aa, Artificial Sequence
  Description of Artificial Sequence: Synthetic peptide
SVVGTHA

SEQ ID NO: 11265 - protein, 7 aa, Artificial Sequence
  Description of Artificial Sequence: Synthetic peptide
SVVPHDL

SEQ ID NO: 11266 - protein, 7 aa, Artificial Sequence
  Description of Artificial Sequence: Synthetic peptide
SVVRKEA

SEQ ID NO: 11267 - protein, 7 aa, Artificial Sequence
  Description of Artificial Sequence: Synthetic peptide
SVVSRLG

SEQ ID NO: 11268 - protein, 7 aa, Artificial Sequence
  Description of Artificial Sequence: Synthetic peptide
SVVSSQG

SEQ ID NO: 11269 - protein, 7 aa, Artificial Sequence
  Description of Artificial Sequence: Synthetic peptide
SVYTQAP

SEQ ID NO: 11270 - protein, 7 aa, Artificial Sequence
  Description of Artificial Sequence: Synthetic peptide
SWDASAL

SEQ ID NO: 11271 - protein, 7 aa, Artificial Sequence
  Description of Artificial Sequence: Synthetic peptide
SWGAKEG

SEQ ID NO: 11272 - protein, 7 aa, Artificial Sequence
  Description of Artificial Sequence: Synthetic peptide
SWGETAK

SEQ ID NO: 11273 - protein, 7 aa, Artificial Sequence
  Description of Artificial Sequence: Synthetic peptide
SWHNSQP

SEQ ID NO: 11274 - protein, 7 aa, Artificial Sequence
  Description of Artificial Sequence: Synthetic peptide
SWPSNGV

SEQ ID NO: 11275 - protein, 7 aa, Artificial Sequence
  Description of Artificial Sequence: Synthetic peptide
SWQTSIA

SEQ ID NO: 11276 - protein, 7 aa, Artificial Sequence
  Description of Artificial Sequence: Synthetic peptide
SWRDVPP

SEQ ID NO: 11277 - protein, 7 aa, Artificial Sequence
  Description of Artificial Sequence: Synthetic peptide
SWSHEQE

SEQ ID NO: 11278 - protein, 7 aa, Artificial Sequence
  Description of Artificial Sequence: Synthetic peptide
SYAKSLD

SEQ ID NO: 11279 - protein, 7 aa, Artificial Sequence
  Description of Artificial Sequence: Synthetic peptide
SYARTSL

SEQ ID NO: 11280 - protein, 7 aa, Artificial Sequence
  Description of Artificial Sequence: Synthetic peptide
SYASLTP

SEQ ID NO: 11281 - protein, 7 aa, Artificial Sequence
  Description of Artificial Sequence: Synthetic peptide
SYASRTV

SEQ ID NO: 11282 - protein, 7 aa, Artificial Sequence
  Description of Artificial Sequence: Synthetic peptide
SYATSLT

SEQ ID NO: 11283 - protein, 7 aa, Artificial Sequence
  Description of Artificial Sequence: Synthetic peptide
SYDRSPA

SEQ ID NO: 11284 - protein, 7 aa, Artificial Sequence
  Description of Artificial Sequence: Synthetic peptide
SYEASKY

SEQ ID NO: 11285 - protein, 7 aa, Artificial Sequence
  Description of Artificial Sequence: Synthetic peptide
SYEDDSC

SEQ ID NO: 11286 - protein, 7 aa, Artificial Sequence
  Description of Artificial Sequence: Synthetic peptide
SYEPNKL

SEQ ID NO: 11287 - protein, 7 aa, Artificial Sequence
  Description of Artificial Sequence: Synthetic peptide
SYGGTLL

SEQ ID NO: 11288 - protein, 7 aa, Artificial Sequence
  Description of Artificial Sequence: Synthetic peptide
SYGKEYV

SEQ ID NO: 11289 - protein, 7 aa, Artificial Sequence
  Description of Artificial Sequence: Synthetic peptide
SYGLPAY

SEQ ID NO: 11290 - protein, 7 aa, Artificial Sequence
  Description of Artificial Sequence: Synthetic peptide
SYGPIKT

SEQ ID NO: 11291 - protein, 7 aa, Artificial Sequence
  Description of Artificial Sequence: Synthetic peptide
SYGRGAE

SEQ ID NO: 11292 - protein, 7 aa, Artificial Sequence
  Description of Artificial Sequence: Synthetic peptide
SYGSGQI

SEQ ID NO: 11293 - protein, 7 aa, Artificial Sequence
  Description of Artificial Sequence: Synthetic peptide
SYGSKLP

SEQ ID NO: 11294 - protein, 7 aa, Artificial Sequence
  Description of Artificial Sequence: Synthetic peptide
SYGTAPI

SEQ ID NO: 11295 - protein, 7 aa, Artificial Sequence
  Description of Artificial Sequence: Synthetic peptide
SYGVPRP

SEQ ID NO: 11296 - protein, 7 aa, Artificial Sequence
  Description of Artificial Sequence: Synthetic peptide
SYHPKLN

SEQ ID NO: 11297 - protein, 7 aa, Artificial Sequence
  Description of Artificial Sequence: Synthetic peptide
SYIPSTI

SEQ ID NO: 11298 - protein, 7 aa, Artificial Sequence
  Description of Artificial Sequence: Synthetic peptide
SYIREDP

SEQ ID NO: 11299 - protein, 7 aa, Artificial Sequence
  Description of Artificial Sequence: Synthetic peptide
SYKGSYM

SEQ ID NO: 11300 - protein, 7 aa, Artificial Sequence
  Description of Artificial Sequence: Synthetic peptide
SYKHMPP

SEQ ID NO: 11301 - protein, 7 aa, Artificial Sequence
  Description of Artificial Sequence: Synthetic peptide
SYKSQIA

SEQ ID NO: 11302 - protein, 7 aa, Artificial Sequence
  Description of Artificial Sequence: Synthetic peptide
SYLGIAP

SEQ ID NO: 11303 - protein, 7 aa, Artificial Sequence
  Description of Artificial Sequence: Synthetic peptide
SYLNPMN

SEQ ID NO: 11304 - protein, 7 aa, Artificial Sequence
  Description of Artificial Sequence: Synthetic peptide
SYLPPAP

SEQ ID NO: 11305 - protein, 7 aa, Artificial Sequence
  Description of Artificial Sequence: Synthetic peptide
SYMASLP

SEQ ID NO: 11306 - protein, 7 aa, Artificial Sequence
  Description of Artificial Sequence: Synthetic peptide
SYMPQTV

SEQ ID NO: 11307 - protein, 7 aa, Artificial Sequence
  Description of Artificial Sequence: Synthetic peptide
SYMSPVS

SEQ ID NO: 11308 - protein, 7 aa, Artificial Sequence
  Description of Artificial Sequence: Synthetic peptide
SYMTKDL

SEQ ID NO: 11309 - protein, 7 aa, Artificial Sequence
  Description of Artificial Sequence: Synthetic peptide
SYPAKPS

SEQ ID NO: 11310 - protein, 7 aa, Artificial Sequence
  Description of Artificial Sequence: Synthetic peptide
SYPASSR

SEQ ID NO: 11311 - protein, 7 aa, Artificial Sequence
  Description of Artificial Sequence: Synthetic peptide
SYPKSYE

SEQ ID NO: 11312 - protein, 7 aa, Artificial Sequence
  Description of Artificial Sequence: Synthetic peptide
SYPVSVP

SEQ ID NO: 11313 - protein, 7 aa, Artificial Sequence
  Description of Artificial Sequence: Synthetic peptide
SYQAIST

SEQ ID NO: 11314 - protein, 7 aa, Artificial Sequence
  Description of Artificial Sequence: Synthetic peptide
SYRPESG

SEQ ID NO: 11315 - protein, 7 aa, Artificial Sequence
  Description of Artificial Sequence: Synthetic peptide
SYRPETN

SEQ ID NO: 11316 - protein, 7 aa, Artificial Sequence
  Description of Artificial Sequence: Synthetic peptide
SYRVNTG

SEQ ID NO: 11317 - protein, 7 aa, Artificial Sequence
  Description of Artificial Sequence: Synthetic peptide
SYSASEF

SEQ ID NO: 11318 - protein, 7 aa, Artificial Sequence
  Description of Artificial Sequence: Synthetic peptide
SYSATTV

SEQ ID NO: 11319 - protein, 7 aa, Artificial Sequence
  Description of Artificial Sequence: Synthetic peptide
SYSGGCL

SEQ ID NO: 11320 - protein, 7 aa, Artificial Sequence
  Description of Artificial Sequence: Synthetic peptide
SYSHLSG

SEQ ID NO: 11321 - protein, 7 aa, Artificial Sequence
  Description of Artificial Sequence: Synthetic peptide
SYSMAHP

SEQ ID NO: 11322 - protein, 7 aa, Artificial Sequence
  Description of Artificial Sequence: Synthetic peptide
SYSSDRS

SEQ ID NO: 11323 - protein, 7 aa, Artificial Sequence
  Description of Artificial Sequence: Synthetic peptide
SYTDAAL

SEQ ID NO: 11324 - protein, 7 aa, Artificial Sequence
  Description of Artificial Sequence: Synthetic peptide
SYTHVSG

SEQ ID NO: 11325 - protein, 7 aa, Artificial Sequence
  Description of Artificial Sequence: Synthetic peptide
SYTKDVD

SEQ ID NO: 11326 - protein, 7 aa, Artificial Sequence
  Description of Artificial Sequence: Synthetic peptide
SYTKSAP

SEQ ID NO: 11327 - protein, 7 aa, Artificial Sequence
  Description of Artificial Sequence: Synthetic peptide
SYTSPSS

SEQ ID NO: 11328 - protein, 7 aa, Artificial Sequence
  Description of Artificial Sequence: Synthetic peptide
SYTVDSH

SEQ ID NO: 11329 - protein, 7 aa, Artificial Sequence
  Description of Artificial Sequence: Synthetic peptide
SYVKPAE

SEQ ID NO: 11330 - protein, 7 aa, Artificial Sequence
  Description of Artificial Sequence: Synthetic peptide
SYVNNPG

SEQ ID NO: 11331 - protein, 7 aa, Artificial Sequence
  Description of Artificial Sequence: Synthetic peptide
SYVRPTS

SEQ ID NO: 11332 - protein, 7 aa, Artificial Sequence
  Description of Artificial Sequence: Synthetic peptide
SYVSGAA

SEQ ID NO: 11333 - protein, 7 aa, Artificial Sequence
  Description of Artificial Sequence: Synthetic peptide
TAAADRV

SEQ ID NO: 11334 - protein, 7 aa, Artificial Sequence
  Description of Artificial Sequence: Synthetic peptide
TAAASNR

SEQ ID NO: 11335 - protein, 7 aa, Artificial Sequence
  Description of Artificial Sequence: Synthetic peptide
TAAASVR

SEQ ID NO: 11336 - protein, 7 aa, Artificial Sequence
  Description of Artificial Sequence: Synthetic peptide
TAADNDE

SEQ ID NO: 11337 - protein, 7 aa, Artificial Sequence
  Description of Artificial Sequence: Synthetic peptide
TAAFDRV

SEQ ID NO: 11338 - protein, 7 aa, Artificial Sequence
  Description of Artificial Sequence: Synthetic peptide
TAAHLGN

SEQ ID NO: 11339 - protein, 7 aa, Artificial Sequence
  Description of Artificial Sequence: Synthetic peptide
TAAKSAG

SEQ ID NO: 11340 - protein, 7 aa, Artificial Sequence
  Description of Artificial Sequence: Synthetic peptide
TAALTGH

SEQ ID NO: 11341 - protein, 7 aa, Artificial Sequence
  Description of Artificial Sequence: Synthetic peptide
TAARFAA

SEQ ID NO: 11342 - protein, 7 aa, Artificial Sequence
  Description of Artificial Sequence: Synthetic peptide
TAARSSD

SEQ ID NO: 11343 - protein, 7 aa, Artificial Sequence
  Description of Artificial Sequence: Synthetic peptide
TAASHST

SEQ ID NO: 11344 - protein, 7 aa, Artificial Sequence
  Description of Artificial Sequence: Synthetic peptide
TAATNVN

SEQ ID NO: 11345 - protein, 7 aa, Artificial Sequence
  Description of Artificial Sequence: Synthetic peptide
TAAVTNT

SEQ ID NO: 11346 - protein, 7 aa, Artificial Sequence
  Description of Artificial Sequence: Synthetic peptide
TADRMMS

SEQ ID NO: 11347 - protein, 7 aa, Artificial Sequence
  Description of Artificial Sequence: Synthetic peptide
TAEHTRF

SEQ ID NO: 11348 - protein, 7 aa, Artificial Sequence
  Description of Artificial Sequence: Synthetic peptide
TAENLSP

SEQ ID NO: 11349 - protein, 7 aa, Artificial Sequence
  Description of Artificial Sequence: Synthetic peptide
TAEPVRT

SEQ ID NO: 11350 - protein, 7 aa, Artificial Sequence
  Description of Artificial Sequence: Synthetic peptide
TAFQTIE

SEQ ID NO: 11351 - protein, 7 aa, Artificial Sequence
  Description of Artificial Sequence: Synthetic peptide
TAFRMDY

SEQ ID NO: 11352 - protein, 7 aa, Artificial Sequence
  Description of Artificial Sequence: Synthetic peptide
TAGGQPL

SEQ ID NO: 11353 - protein, 7 aa, Artificial Sequence
  Description of Artificial Sequence: Synthetic peptide
TAGGTTP

SEQ ID NO: 11354 - protein, 7 aa, Artificial Sequence
  Description of Artificial Sequence: Synthetic peptide
TAGLGVP

SEQ ID NO: 11355 - protein, 7 aa, Artificial Sequence
  Description of Artificial Sequence: Synthetic peptide
TAGNLIP

SEQ ID NO: 11356 - protein, 7 aa, Artificial Sequence
  Description of Artificial Sequence: Synthetic peptide
TAGPHRV

SEQ ID NO: 11357 - protein, 7 aa, Artificial Sequence
  Description of Artificial Sequence: Synthetic peptide
TAGVPAI

SEQ ID NO: 11358 - protein, 7 aa, Artificial Sequence
  Description of Artificial Sequence: Synthetic peptide
TAHEERN

SEQ ID NO: 11359 - protein, 7 aa, Artificial Sequence
  Description of Artificial Sequence: Synthetic peptide
TAHFSAT

SEQ ID NO: 11360 - protein, 7 aa, Artificial Sequence
  Description of Artificial Sequence: Synthetic peptide
TAHPFPP

SEQ ID NO: 11361 - protein, 7 aa, Artificial Sequence
  Description of Artificial Sequence: Synthetic peptide
TAHQLIA

SEQ ID NO: 11362 - protein, 7 aa, Artificial Sequence
  Description of Artificial Sequence: Synthetic peptide
TAHSLQS

SEQ ID NO: 11363 - protein, 7 aa, Artificial Sequence
  Description of Artificial Sequence: Synthetic peptide
TAHSYAH

SEQ ID NO: 11364 - protein, 7 aa, Artificial Sequence
  Description of Artificial Sequence: Synthetic peptide
TAHVFPA

SEQ ID NO: 11365 - protein, 7 aa, Artificial Sequence
  Description of Artificial Sequence: Synthetic peptide
TAIGISP

SEQ ID NO: 11366 - protein, 7 aa, Artificial Sequence
  Description of Artificial Sequence: Synthetic peptide
TAIPFPA

SEQ ID NO: 11367 - protein, 7 aa, Artificial Sequence
  Description of Artificial Sequence: Synthetic peptide
TAISSRA

SEQ ID NO: 11368 - protein, 7 aa, Artificial Sequence
  Description of Artificial Sequence: Synthetic peptide
TAKATVE

SEQ ID NO: 11369 - protein, 7 aa, Artificial Sequence
  Description of Artificial Sequence: Synthetic peptide
TAKSSNN

SEQ ID NO: 11370 - protein, 7 aa, Artificial Sequence
  Description of Artificial Sequence: Synthetic peptide
TAKTSAI

SEQ ID NO: 11371 - protein, 7 aa, Artificial Sequence
  Description of Artificial Sequence: Synthetic peptide
TAKYDHL

SEQ ID NO: 11372 - protein, 7 aa, Artificial Sequence
  Description of Artificial Sequence: Synthetic peptide
TALFQDA

SEQ ID NO: 11373 - protein, 7 aa, Artificial Sequence
  Description of Artificial Sequence: Synthetic peptide
TALHADV

SEQ ID NO: 11374 - protein, 7 aa, Artificial Sequence
  Description of Artificial Sequence: Synthetic peptide
TALHYSE

SEQ ID NO: 11375 - protein, 7 aa, Artificial Sequence
  Description of Artificial Sequence: Synthetic peptide
TAMPMKI

SEQ ID NO: 11376 - protein, 7 aa, Artificial Sequence
  Description of Artificial Sequence: Synthetic peptide
TAMQMTP

SEQ ID NO: 11377 - protein, 7 aa, Artificial Sequence
  Description of Artificial Sequence: Synthetic peptide
TAMQTAM

SEQ ID NO: 11378 - protein, 7 aa, Artificial Sequence
  Description of Artificial Sequence: Synthetic peptide
TAMTTMG

SEQ ID NO: 11379 - protein, 7 aa, Artificial Sequence
  Description of Artificial Sequence: Synthetic peptide
TANPLST

SEQ ID NO: 11380 - protein, 7 aa, Artificial Sequence
  Description of Artificial Sequence: Synthetic peptide
TANVPAR

SEQ ID NO: 11381 - protein, 7 aa, Artificial Sequence
  Description of Artificial Sequence: Synthetic peptide
TANVRSM

SEQ ID NO: 11382 - protein, 7 aa, Artificial Sequence
  Description of Artificial Sequence: Synthetic peptide
TAPERTN

SEQ ID NO: 11383 - protein, 7 aa, Artificial Sequence
  Description of Artificial Sequence: Synthetic peptide
TAPGHAS

SEQ ID NO: 11384 - protein, 7 aa, Artificial Sequence
  Description of Artificial Sequence: Synthetic peptide
TAPPTDR

SEQ ID NO: 11385 - protein, 7 aa, Artificial Sequence
  Description of Artificial Sequence: Synthetic peptide
TAPRSSE

SEQ ID NO: 11386 - protein, 7 aa, Artificial Sequence
  Description of Artificial Sequence: Synthetic peptide
TAPSRMG

SEQ ID NO: 11387 - protein, 7 aa, Artificial Sequence
  Description of Artificial Sequence: Synthetic peptide
TAPTGTI

SEQ ID NO: 11388 - protein, 7 aa, Artificial Sequence
  Description of Artificial Sequence: Synthetic peptide
TAPYGDA

SEQ ID NO: 11389 - protein, 7 aa, Artificial Sequence
  Description of Artificial Sequence: Synthetic peptide
TAQEGRT

SEQ ID NO: 11390 - protein, 7 aa, Artificial Sequence
  Description of Artificial Sequence: Synthetic peptide
TAQLTAH

SEQ ID NO: 11391 - protein, 7 aa, Artificial Sequence
  Description of Artificial Sequence: Synthetic peptide
TAQLTSS

SEQ ID NO: 11392 - protein, 7 aa, Artificial Sequence
  Description of Artificial Sequence: Synthetic peptide
TAQRGPA

SEQ ID NO: 11393 - protein, 7 aa, Artificial Sequence
  Description of Artificial Sequence: Synthetic peptide
TARDSSP

SEQ ID NO: 11394 - protein, 7 aa, Artificial Sequence
  Description of Artificial Sequence: Synthetic peptide
TARGLVP

SEQ ID NO: 11395 - protein, 7 aa, Artificial Sequence
  Description of Artificial Sequence: Synthetic peptide
TARGNML

SEQ ID NO: 11396 - protein, 7 aa, Artificial Sequence
  Description of Artificial Sequence: Synthetic peptide
TARGSPL

SEQ ID NO: 11397 - protein, 7 aa, Artificial Sequence
  Description of Artificial Sequence: Synthetic peptide
TARPPGV

SEQ ID NO: 11398 - protein, 7 aa, Artificial Sequence
  Description of Artificial Sequence: Synthetic peptide
TARSSVT

SEQ ID NO: 11399 - protein, 7 aa, Artificial Sequence
  Description of Artificial Sequence: Synthetic peptide
TARTLIS

SEQ ID NO: 11400 - protein, 7 aa, Artificial Sequence
  Description of Artificial Sequence: Synthetic peptide
TASAART

SEQ ID NO: 11401 - protein, 7 aa, Artificial Sequence
  Description of Artificial Sequence: Synthetic peptide
TASATYP

SEQ ID NO: 11402 - protein, 7 aa, Artificial Sequence
  Description of Artificial Sequence: Synthetic peptide
TASFSST

SEQ ID NO: 11403 - protein, 7 aa, Artificial Sequence
  Description of Artificial Sequence: Synthetic peptide
TASGSER

SEQ ID NO: 11404 - protein, 7 aa, Artificial Sequence
  Description of Artificial Sequence: Synthetic peptide
TASKNDY

SEQ ID NO: 11405 - protein, 7 aa, Artificial Sequence
  Description of Artificial Sequence: Synthetic peptide
TASMGER

SEQ ID NO: 11406 - protein, 7 aa, Artificial Sequence
  Description of Artificial Sequence: Synthetic peptide
TASSMGK

SEQ ID NO: 11407 - protein, 7 aa, Artificial Sequence
  Description of Artificial Sequence: Synthetic peptide
TASTVKM

SEQ ID NO: 11408 - protein, 7 aa, Artificial Sequence
  Description of Artificial Sequence: Synthetic peptide
TASVPMK

SEQ ID NO: 11409 - protein, 7 aa, Artificial Sequence
  Description of Artificial Sequence: Synthetic peptide
TASYSPK

SEQ ID NO: 11410 - protein, 7 aa, Artificial Sequence
  Description of Artificial Sequence: Synthetic peptide
TATPHIG

SEQ ID NO: 11411 - protein, 7 aa, Artificial Sequence
  Description of Artificial Sequence: Synthetic peptide
TATRNEV

SEQ ID NO: 11412 - protein, 7 aa, Artificial Sequence
  Description of Artificial Sequence: Synthetic peptide
TATRTGP

SEQ ID NO: 11413 - protein, 7 aa, Artificial Sequence
  Description of Artificial Sequence: Synthetic peptide
TATYPND

SEQ ID NO: 11414 - protein, 7 aa, Artificial Sequence
  Description of Artificial Sequence: Synthetic peptide
TAVAHPA

SEQ ID NO: 11415 - protein, 7 aa, Artificial Sequence
  Description of Artificial Sequence: Synthetic peptide
TAVPEWT

SEQ ID NO: 11416 - protein, 7 aa, Artificial Sequence
  Description of Artificial Sequence: Synthetic peptide
TAVQEHT

SEQ ID NO: 11417 - protein, 7 aa, Artificial Sequence
  Description of Artificial Sequence: Synthetic peptide
TAVRSIS

SEQ ID NO: 11418 - protein, 7 aa, Artificial Sequence
  Description of Artificial Sequence: Synthetic peptide
TAVVKFP

SEQ ID NO: 11419 - protein, 7 aa, Artificial Sequence
  Description of Artificial Sequence: Synthetic peptide
TAVYATA

SEQ ID NO: 11420 - protein, 7 aa, Artificial Sequence
  Description of Artificial Sequence: Synthetic peptide
TAVYSKG

SEQ ID NO: 11421 - protein, 7 aa, Artificial Sequence
  Description of Artificial Sequence: Synthetic peptide
TAWDPES

SEQ ID NO: 11422 - protein, 7 aa, Artificial Sequence
  Description of Artificial Sequence: Synthetic peptide
TAYCQQY

SEQ ID NO: 11423 - protein, 7 aa, Artificial Sequence
  Description of Artificial Sequence: Synthetic peptide
TAYPFEA

SEQ ID NO: 11424 - protein, 7 aa, Artificial Sequence
  Description of Artificial Sequence: Synthetic peptide
TAYPHQI

SEQ ID NO: 11425 - protein, 7 aa, Artificial Sequence
  Description of Artificial Sequence: Synthetic peptide
TDADRSP

SEQ ID NO: 11426 - protein, 7 aa, Artificial Sequence
  Description of Artificial Sequence: Synthetic peptide
TDCRQGG

SEQ ID NO: 11427 - protein, 7 aa, Artificial Sequence
  Description of Artificial Sequence: Synthetic peptide
TDDIKND

SEQ ID NO: 11428 - protein, 7 aa, Artificial Sequence
  Description of Artificial Sequence: Synthetic peptide
TDEYKKA

SEQ ID NO: 11429 - protein, 7 aa, Artificial Sequence
  Description of Artificial Sequence: Synthetic peptide
TDFRRIP

SEQ ID NO: 11430 - protein, 7 aa, Artificial Sequence
  Description of Artificial Sequence: Synthetic peptide
TDGLHKL

SEQ ID NO: 11431 - protein, 7 aa, Artificial Sequence
  Description of Artificial Sequence: Synthetic peptide
TDGPGLT

SEQ ID NO: 11432 - protein, 7 aa, Artificial Sequence
  Description of Artificial Sequence: Synthetic peptide
TDGRLGG

SEQ ID NO: 11433 - protein, 7 aa, Artificial Sequence
  Description of Artificial Sequence: Synthetic peptide
TDGSRVP

SEQ ID NO: 11434 - protein, 7 aa, Artificial Sequence
  Description of Artificial Sequence: Synthetic peptide
TDHVHRG

SEQ ID NO: 11435 - protein, 7 aa, Artificial Sequence
  Description of Artificial Sequence: Synthetic peptide
TDKHGVL

SEQ ID NO: 11436 - protein, 7 aa, Artificial Sequence
  Description of Artificial Sequence: Synthetic peptide
TDKVRSQ

SEQ ID NO: 11437 - protein, 7 aa, Artificial Sequence
  Description of Artificial Sequence: Synthetic peptide
TDLHLEL

SEQ ID NO: 11438 - protein, 7 aa, Artificial Sequence
  Description of Artificial Sequence: Synthetic peptide
TDLSHGH

SEQ ID NO: 11439 - protein, 7 aa, Artificial Sequence
  Description of Artificial Sequence: Synthetic peptide
TDLYSQS

SEQ ID NO: 11440 - protein, 7 aa, Artificial Sequence
  Description of Artificial Sequence: Synthetic peptide
TDMQRLG

SEQ ID NO: 11441 - protein, 7 aa, Artificial Sequence
  Description of Artificial Sequence: Synthetic peptide
TDNRITA

SEQ ID NO: 11442 - protein, 7 aa, Artificial Sequence
  Description of Artificial Sequence: Synthetic peptide
TDPHSDK

SEQ ID NO: 11443 - protein, 7 aa, Artificial Sequence
  Description of Artificial Sequence: Synthetic peptide
TDQSLMS

SEQ ID NO: 11444 - protein, 7 aa, Artificial Sequence
  Description of Artificial Sequence: Synthetic peptide
TDRGGVQ

SEQ ID NO: 11445 - protein, 7 aa, Artificial Sequence
  Description of Artificial Sequence: Synthetic peptide
TDRSALS

SEQ ID NO: 11446 - protein, 7 aa, Artificial Sequence
  Description of Artificial Sequence: Synthetic peptide
TDRSSLS

SEQ ID NO: 11447 - protein, 7 aa, Artificial Sequence
  Description of Artificial Sequence: Synthetic peptide
TDRVPSF

SEQ ID NO: 11448 - protein, 7 aa, Artificial Sequence
  Description of Artificial Sequence: Synthetic peptide
TDSGPTP

SEQ ID NO: 11449 - protein, 7 aa, Artificial Sequence
  Description of Artificial Sequence: Synthetic peptide
TDSHVLY

SEQ ID NO: 11450 - protein, 7 aa, Artificial Sequence
  Description of Artificial Sequence: Synthetic peptide
TDTHSSV

SEQ ID NO: 11451 - protein, 7 aa, Artificial Sequence
  Description of Artificial Sequence: Synthetic peptide
TDTSRGL

SEQ ID NO: 11452 - protein, 7 aa, Artificial Sequence
  Description of Artificial Sequence: Synthetic peptide
TDTTGGP

SEQ ID NO: 11453 - protein, 7 aa, Artificial Sequence
  Description of Artificial Sequence: Synthetic peptide
TDVITVA

SEQ ID NO: 11454 - protein, 7 aa, Artificial Sequence
  Description of Artificial Sequence: Synthetic peptide
TDVPHPN

SEQ ID NO: 11455 - protein, 7 aa, Artificial Sequence
  Description of Artificial Sequence: Synthetic peptide
TDVRPAG

SEQ ID NO: 11456 - protein, 7 aa, Artificial Sequence
  Description of Artificial Sequence: Synthetic peptide
TDVRTKN

SEQ ID NO: 11457 - protein, 7 aa, Artificial Sequence
  Description of Artificial Sequence: Synthetic peptide
TDWEHDP

SEQ ID NO: 11458 - protein, 7 aa, Artificial Sequence
  Description of Artificial Sequence: Synthetic peptide
TDYDLSS

SEQ ID NO: 11459 - protein, 7 aa, Artificial Sequence
  Description of Artificial Sequence: Synthetic peptide
TEAASRQ

SEQ ID NO: 11460 - protein, 7 aa, Artificial Sequence
  Description of Artificial Sequence: Synthetic peptide
TEARNPV

SEQ ID NO: 11461 - protein, 7 aa, Artificial Sequence
  Description of Artificial Sequence: Synthetic peptide
TEDTAPC

SEQ ID NO: 11462 - protein, 7 aa, Artificial Sequence
  Description of Artificial Sequence: Synthetic peptide
TEFYDLE

SEQ ID NO: 11463 - protein, 7 aa, Artificial Sequence
  Description of Artificial Sequence: Synthetic peptide
TEGRAPT

SEQ ID NO: 11464 - protein, 7 aa, Artificial Sequence
  Description of Artificial Sequence: Synthetic peptide
TEHGTKI

SEQ ID NO: 11465 - protein, 7 aa, Artificial Sequence
  Description of Artificial Sequence: Synthetic peptide
TELNRAI

SEQ ID NO: 11466 - protein, 7 aa, Artificial Sequence
  Description of Artificial Sequence: Synthetic peptide
TELSHNR

SEQ ID NO: 11467 - protein, 7 aa, Artificial Sequence
  Description of Artificial Sequence: Synthetic peptide
TELSSPR

SEQ ID NO: 11468 - protein, 7 aa, Artificial Sequence
  Description of Artificial Sequence: Synthetic peptide
TELVIGK

SEQ ID NO: 11469 - protein, 7 aa, Artificial Sequence
  Description of Artificial Sequence: Synthetic peptide
TENAGTG

SEQ ID NO: 11470 - protein, 7 aa, Artificial Sequence
  Description of Artificial Sequence: Synthetic peptide
TEPPHVA

SEQ ID NO: 11471 - protein, 7 aa, Artificial Sequence
  Description of Artificial Sequence: Synthetic peptide
TEPPYRL

SEQ ID NO: 11472 - protein, 7 aa, Artificial Sequence
  Description of Artificial Sequence: Synthetic peptide
TEPQIGR

SEQ ID NO: 11473 - protein, 7 aa, Artificial Sequence
  Description of Artificial Sequence: Synthetic peptide
TEPRMVS

SEQ ID NO: 11474 - protein, 7 aa, Artificial Sequence
  Description of Artificial Sequence: Synthetic peptide
TEPYAPD

SEQ ID NO: 11475 - protein, 7 aa, Artificial Sequence
  Description of Artificial Sequence: Synthetic peptide
TEPYTDF

SEQ ID NO: 11476 - protein, 7 aa, Artificial Sequence
  Description of Artificial Sequence: Synthetic peptide
TERADEH

SEQ ID NO: 11477 - protein, 7 aa, Artificial Sequence
  Description of Artificial Sequence: Synthetic peptide
TERPSPT

SEQ ID NO: 11478 - protein, 7 aa, Artificial Sequence
  Description of Artificial Sequence: Synthetic peptide
TESHHPL

SEQ ID NO: 11479 - protein, 7 aa, Artificial Sequence
  Description of Artificial Sequence: Synthetic peptide
TESTFNM

SEQ ID NO: 11480 - protein, 7 aa, Artificial Sequence
  Description of Artificial Sequence: Synthetic peptide
TESTHQT

SEQ ID NO: 11481 - protein, 7 aa, Artificial Sequence
  Description of Artificial Sequence: Synthetic peptide
TETASSP

SEQ ID NO: 11482 - protein, 7 aa, Artificial Sequence
  Description of Artificial Sequence: Synthetic peptide
TETGNCH

SEQ ID NO: 11483 - protein, 7 aa, Artificial Sequence
  Description of Artificial Sequence: Synthetic peptide
TETLHNR

SEQ ID NO: 11484 - protein, 7 aa, Artificial Sequence
  Description of Artificial Sequence: Synthetic peptide
TETVGDL

SEQ ID NO: 11485 - protein, 7 aa, Artificial Sequence
  Description of Artificial Sequence: Synthetic peptide
TEVKLLP

SEQ ID NO: 11486 - protein, 7 aa, Artificial Sequence
  Description of Artificial Sequence: Synthetic peptide
TEVRPGL

SEQ ID NO: 11487 - protein, 7 aa, Artificial Sequence
  Description of Artificial Sequence: Synthetic peptide
TEVRSPL

SEQ ID NO: 11488 - protein, 7 aa, Artificial Sequence
  Description of Artificial Sequence: Synthetic peptide
TEVSSNK

SEQ ID NO: 11489 - protein, 7 aa, Artificial Sequence
  Description of Artificial Sequence: Synthetic peptide
TEWSSND

SEQ ID NO: 11490 - protein, 7 aa, Artificial Sequence
  Description of Artificial Sequence: Synthetic peptide
TEYATRP

SEQ ID NO: 11491 - protein, 7 aa, Artificial Sequence
  Description of Artificial Sequence: Synthetic peptide
TEYTLHG

SEQ ID NO: 11492 - protein, 7 aa, Artificial Sequence
  Description of Artificial Sequence: Synthetic peptide
TFASGAP

SEQ ID NO: 11493 - protein, 7 aa, Artificial Sequence
  Description of Artificial Sequence: Synthetic peptide
TFASPLL

SEQ ID NO: 11494 - protein, 7 aa, Artificial Sequence
  Description of Artificial Sequence: Synthetic peptide
TFDPQWA

SEQ ID NO: 11495 - protein, 7 aa, Artificial Sequence
  Description of Artificial Sequence: Synthetic peptide
TFDTRGS

SEQ ID NO: 11496 - protein, 7 aa, Artificial Sequence
  Description of Artificial Sequence: Synthetic peptide
TFGAISA

SEQ ID NO: 11497 - protein, 7 aa, Artificial Sequence
  Description of Artificial Sequence: Synthetic peptide
TFGSDGT

SEQ ID NO: 11498 - protein, 7 aa, Artificial Sequence
  Description of Artificial Sequence: Synthetic peptide
TFGTSIK

SEQ ID NO: 11499 - protein, 7 aa, Artificial Sequence
  Description of Artificial Sequence: Synthetic peptide
TFHAPSS

SEQ ID NO: 11500 - protein, 7 aa, Artificial Sequence
  Description of Artificial Sequence: Synthetic peptide
TFHRTDN

SEQ ID NO: 11501 - protein, 7 aa, Artificial Sequence
  Description of Artificial Sequence: Synthetic peptide
TFKDPTV

SEQ ID NO: 11502 - protein, 7 aa, Artificial Sequence
  Description of Artificial Sequence: Synthetic peptide
TFKITGD

SEQ ID NO: 11503 - protein, 7 aa, Artificial Sequence
  Description of Artificial Sequence: Synthetic peptide
TFNGMNE

SEQ ID NO: 11504 - protein, 7 aa, Artificial Sequence
  Description of Artificial Sequence: Synthetic peptide
TFPLPRT

SEQ ID NO: 11505 - protein, 7 aa, Artificial Sequence
  Description of Artificial Sequence: Synthetic peptide
TFPLSDW

SEQ ID NO: 11506 - protein, 7 aa, Artificial Sequence
  Description of Artificial Sequence: Synthetic peptide
TFPTSGM

SEQ ID NO: 11507 - protein, 7 aa, Artificial Sequence
  Description of Artificial Sequence: Synthetic peptide
TFQPTSV

SEQ ID NO: 11508 - protein, 7 aa, Artificial Sequence
  Description of Artificial Sequence: Synthetic peptide
TFRGMKD

SEQ ID NO: 11509 - protein, 7 aa, Artificial Sequence
  Description of Artificial Sequence: Synthetic peptide
TFRTSVA

SEQ ID NO: 11510 - protein, 7 aa, Artificial Sequence
  Description of Artificial Sequence: Synthetic peptide
TFSIVSP

SEQ ID NO: 11511 - protein, 7 aa, Artificial Sequence
  Description of Artificial Sequence: Synthetic peptide
TFSPPNF

SEQ ID NO: 11512 - protein, 7 aa, Artificial Sequence
  Description of Artificial Sequence: Synthetic peptide
TFSPTFS

SEQ ID NO: 11513 - protein, 7 aa, Artificial Sequence
  Description of Artificial Sequence: Synthetic peptide
TFSSTSH

SEQ ID NO: 11514 - protein, 7 aa, Artificial Sequence
  Description of Artificial Sequence: Synthetic peptide
TFSSVAA

SEQ ID NO: 11515 - protein, 7 aa, Artificial Sequence
  Description of Artificial Sequence: Synthetic peptide
TFSSVTG

SEQ ID NO: 11516 - protein, 7 aa, Artificial Sequence
  Description of Artificial Sequence: Synthetic peptide
TFSTGRV

SEQ ID NO: 11517 - protein, 7 aa, Artificial Sequence
  Description of Artificial Sequence: Synthetic peptide
TFSTGSP

SEQ ID NO: 11518 - protein, 7 aa, Artificial Sequence
  Description of Artificial Sequence: Synthetic peptide
TFSTNTS

SEQ ID NO: 11519 - protein, 7 aa, Artificial Sequence
  Description of Artificial Sequence: Synthetic peptide
TFSVSQI

SEQ ID NO: 11520 - protein, 7 aa, Artificial Sequence
  Description of Artificial Sequence: Synthetic peptide
TFTNPTN

SEQ ID NO: 11521 - protein, 7 aa, Artificial Sequence
  Description of Artificial Sequence: Synthetic peptide
TFTQLAS

SEQ ID NO: 11522 - protein, 7 aa, Artificial Sequence
  Description of Artificial Sequence: Synthetic peptide
TFVREVV

SEQ ID NO: 11523 - protein, 7 aa, Artificial Sequence
  Description of Artificial Sequence: Synthetic peptide
TFVSGGD

SEQ ID NO: 11524 - protein, 7 aa, Artificial Sequence
  Description of Artificial Sequence: Synthetic peptide
TGAGQTL

SEQ ID NO: 11525 - protein, 7 aa, Artificial Sequence
  Description of Artificial Sequence: Synthetic peptide
TGAHVGE

SEQ ID NO: 11526 - protein, 7 aa, Artificial Sequence
  Description of Artificial Sequence: Synthetic peptide
TGALATL

SEQ ID NO: 11527 - protein, 7 aa, Artificial Sequence
  Description of Artificial Sequence: Synthetic peptide
TGAPPQI

SEQ ID NO: 11528 - protein, 7 aa, Artificial Sequence
  Description of Artificial Sequence: Synthetic peptide
TGASVLF

SEQ ID NO: 11529 - protein, 7 aa, Artificial Sequence
  Description of Artificial Sequence: Synthetic peptide
TGAVFTP

SEQ ID NO: 11530 - protein, 7 aa, Artificial Sequence
  Description of Artificial Sequence: Synthetic peptide
TGDATPF

SEQ ID NO: 11531 - protein, 7 aa, Artificial Sequence
  Description of Artificial Sequence: Synthetic peptide
TGDQKWH

SEQ ID NO: 11532 - protein, 7 aa, Artificial Sequence
  Description of Artificial Sequence: Synthetic peptide
TGDQNRY

SEQ ID NO: 11533 - protein, 7 aa, Artificial Sequence
  Description of Artificial Sequence: Synthetic peptide
TGDTSRT

SEQ ID NO: 11534 - protein, 7 aa, Artificial Sequence
  Description of Artificial Sequence: Synthetic peptide
TGDVDGW

SEQ ID NO: 11535 - protein, 7 aa, Artificial Sequence
  Description of Artificial Sequence: Synthetic peptide
TGEQPGH

SEQ ID NO: 11536 - protein, 7 aa, Artificial Sequence
  Description of Artificial Sequence: Synthetic peptide
TGFSDQF

SEQ ID NO: 11537 - protein, 7 aa, Artificial Sequence
  Description of Artificial Sequence: Synthetic peptide
TGGAQRG

SEQ ID NO: 11538 - protein, 7 aa, Artificial Sequence
  Description of Artificial Sequence: Synthetic peptide
TGGSPTS

SEQ ID NO: 11539 - protein, 7 aa, Artificial Sequence
  Description of Artificial Sequence: Synthetic peptide
TGGSTRL

SEQ ID NO: 11540 - protein, 7 aa, Artificial Sequence
  Description of Artificial Sequence: Synthetic peptide
TGGYVLA

SEQ ID NO: 11541 - protein, 7 aa, Artificial Sequence
  Description of Artificial Sequence: Synthetic peptide
TGHAQNQ

SEQ ID NO: 11542 - protein, 7 aa, Artificial Sequence
  Description of Artificial Sequence: Synthetic peptide
TGHDTVE

SEQ ID NO: 11543 - protein, 7 aa, Artificial Sequence
  Description of Artificial Sequence: Synthetic peptide
TGHTRLD

SEQ ID NO: 11544 - protein, 7 aa, Artificial Sequence
  Description of Artificial Sequence: Synthetic peptide
TGHTSTL

SEQ ID NO: 11545 - protein, 7 aa, Artificial Sequence
  Description of Artificial Sequence: Synthetic peptide
TGIAPNS

SEQ ID NO: 11546 - protein, 7 aa, Artificial Sequence
  Description of Artificial Sequence: Synthetic peptide
TGISSHM

SEQ ID NO: 11547 - protein, 7 aa, Artificial Sequence
  Description of Artificial Sequence: Synthetic peptide
TGITGAP

SEQ ID NO: 11548 - protein, 7 aa, Artificial Sequence
  Description of Artificial Sequence: Synthetic peptide
TGKVLGF

SEQ ID NO: 11549 - protein, 7 aa, Artificial Sequence
  Description of Artificial Sequence: Synthetic peptide
TGLCPHP

SEQ ID NO: 11550 - protein, 7 aa, Artificial Sequence
  Description of Artificial Sequence: Synthetic peptide
TGLGLLT

SEQ ID NO: 11551 - protein, 7 aa, Artificial Sequence
  Description of Artificial Sequence: Synthetic peptide
TGLMGPV

SEQ ID NO: 11552 - protein, 7 aa, Artificial Sequence
  Description of Artificial Sequence: Synthetic peptide
TGLNHFN

SEQ ID NO: 11553 - protein, 7 aa, Artificial Sequence
  Description of Artificial Sequence: Synthetic peptide
TGLNPAL

SEQ ID NO: 11554 - protein, 7 aa, Artificial Sequence
  Description of Artificial Sequence: Synthetic peptide
TGLPVGF

SEQ ID NO: 11555 - protein, 7 aa, Artificial Sequence
  Description of Artificial Sequence: Synthetic peptide
TGLRGTV

SEQ ID NO: 11556 - protein, 7 aa, Artificial Sequence
  Description of Artificial Sequence: Synthetic peptide
TGLVTDE

SEQ ID NO: 11557 - protein, 7 aa, Artificial Sequence
  Description of Artificial Sequence: Synthetic peptide
TGMNNFS

SEQ ID NO: 11558 - protein, 7 aa, Artificial Sequence
  Description of Artificial Sequence: Synthetic peptide
TGMQAAL

SEQ ID NO: 11559 - protein, 7 aa, Artificial Sequence
  Description of Artificial Sequence: Synthetic peptide
TGNHIRI

SEQ ID NO: 11560 - protein, 7 aa, Artificial Sequence
  Description of Artificial Sequence: Synthetic peptide
TGNHVTF

SEQ ID NO: 11561 - protein, 7 aa, Artificial Sequence
  Description of Artificial Sequence: Synthetic peptide
TGNISPL

SEQ ID NO: 11562 - protein, 7 aa, Artificial Sequence
  Description of Artificial Sequence: Synthetic peptide
TGNSPHA

SEQ ID NO: 11563 - protein, 7 aa, Artificial Sequence
  Description of Artificial Sequence: Synthetic peptide
TGPAPLD

SEQ ID NO: 11564 - protein, 7 aa, Artificial Sequence
  Description of Artificial Sequence: Synthetic peptide
TGPARGS

SEQ ID NO: 11565 - protein, 7 aa, Artificial Sequence
  Description of Artificial Sequence: Synthetic peptide
TGPDYPK

SEQ ID NO: 11566 - protein, 7 aa, Artificial Sequence
  Description of Artificial Sequence: Synthetic peptide
TGPHLKA

SEQ ID NO: 11567 - protein, 7 aa, Artificial Sequence
  Description of Artificial Sequence: Synthetic peptide
TGPINAP

SEQ ID NO: 11568 - protein, 7 aa, Artificial Sequence
  Description of Artificial Sequence: Synthetic peptide
TGPNTST

SEQ ID NO: 11569 - protein, 7 aa, Artificial Sequence
  Description of Artificial Sequence: Synthetic peptide
TGPPTTM

SEQ ID NO: 11570 - protein, 7 aa, Artificial Sequence
  Description of Artificial Sequence: Synthetic peptide
TGPRLST

SEQ ID NO: 11571 - protein, 7 aa, Artificial Sequence
  Description of Artificial Sequence: Synthetic peptide
TGPSARA

SEQ ID NO: 11572 - protein, 7 aa, Artificial Sequence
  Description of Artificial Sequence: Synthetic peptide
TGPSIHT

SEQ ID NO: 11573 - protein, 7 aa, Artificial Sequence
  Description of Artificial Sequence: Synthetic peptide
TGPSLDR

SEQ ID NO: 11574 - protein, 7 aa, Artificial Sequence
  Description of Artificial Sequence: Synthetic peptide
TGPSRTS

SEQ ID NO: 11575 - protein, 7 aa, Artificial Sequence
  Description of Artificial Sequence: Synthetic peptide
TGQGNAD

SEQ ID NO: 11576 - protein, 7 aa, Artificial Sequence
  Description of Artificial Sequence: Synthetic peptide
TGQRAGQ

SEQ ID NO: 11577 - protein, 7 aa, Artificial Sequence
  Description of Artificial Sequence: Synthetic peptide
TGQRMDL

SEQ ID NO: 11578 - protein, 7 aa, Artificial Sequence
  Description of Artificial Sequence: Synthetic peptide
TGQRQNV

SEQ ID NO: 11579 - protein, 7 aa, Artificial Sequence
  Description of Artificial Sequence: Synthetic peptide
TGRPVGN

SEQ ID NO: 11580 - protein, 7 aa, Artificial Sequence
  Description of Artificial Sequence: Synthetic peptide
TGRVAGS

SEQ ID NO: 11581 - protein, 7 aa, Artificial Sequence
  Description of Artificial Sequence: Synthetic peptide
TGSAGEK

SEQ ID NO: 11582 - protein, 7 aa, Artificial Sequence
  Description of Artificial Sequence: Synthetic peptide
TGSAHVS

SEQ ID NO: 11583 - protein, 7 aa, Artificial Sequence
  Description of Artificial Sequence: Synthetic peptide
TGSAMRP

SEQ ID NO: 11584 - protein, 7 aa, Artificial Sequence
  Description of Artificial Sequence: Synthetic peptide
TGSGHGP

SEQ ID NO: 11585 - protein, 7 aa, Artificial Sequence
  Description of Artificial Sequence: Synthetic peptide
TGSKPGS

SEQ ID NO: 11586 - protein, 7 aa, Artificial Sequence
  Description of Artificial Sequence: Synthetic peptide
TGSLQYD

SEQ ID NO: 11587 - protein, 7 aa, Artificial Sequence
  Description of Artificial Sequence: Synthetic peptide
TGSSGFL

SEQ ID NO: 11588 - protein, 7 aa, Artificial Sequence
  Description of Artificial Sequence: Synthetic peptide
TGSSVRA

SEQ ID NO: 11589 - protein, 7 aa, Artificial Sequence
  Description of Artificial Sequence: Synthetic peptide
TGTGRIH

SEQ ID NO: 11590 - protein, 7 aa, Artificial Sequence
  Description of Artificial Sequence: Synthetic peptide
TGTSSWV

SEQ ID NO: 11591 - protein, 7 aa, Artificial Sequence
  Description of Artificial Sequence: Synthetic peptide
TGTTLHP

SEQ ID NO: 11592 - protein, 7 aa, Artificial Sequence
  Description of Artificial Sequence: Synthetic peptide
TGVPRGF

SEQ ID NO: 11593 - protein, 7 aa, Artificial Sequence
  Description of Artificial Sequence: Synthetic peptide
TGVPRPY

SEQ ID NO: 11594 - protein, 7 aa, Artificial Sequence
  Description of Artificial Sequence: Synthetic peptide
TGVPVDA

SEQ ID NO: 11595 - protein, 7 aa, Artificial Sequence
  Description of Artificial Sequence: Synthetic peptide
TGYEFKL

SEQ ID NO: 11596 - protein, 7 aa, Artificial Sequence
  Description of Artificial Sequence: Synthetic peptide
TGYKSPN

SEQ ID NO: 11597 - protein, 7 aa, Artificial Sequence
  Description of Artificial Sequence: Synthetic peptide
THAAADF

SEQ ID NO: 11598 - protein, 7 aa, Artificial Sequence
  Description of Artificial Sequence: Synthetic peptide
THAIIVT

SEQ ID NO: 11599 - protein, 7 aa, Artificial Sequence
  Description of Artificial Sequence: Synthetic peptide
THAQTSV

SEQ ID NO: 11600 - protein, 7 aa, Artificial Sequence
  Description of Artificial Sequence: Synthetic peptide
THDEDRR

SEQ ID NO: 11601 - protein, 7 aa, Artificial Sequence
  Description of Artificial Sequence: Synthetic peptide
THDHADS

SEQ ID NO: 11602 - protein, 7 aa, Artificial Sequence
  Description of Artificial Sequence: Synthetic peptide
THDLSLA

SEQ ID NO: 11603 - protein, 7 aa, Artificial Sequence
  Description of Artificial Sequence: Synthetic peptide
THDPRHG

SEQ ID NO: 11604 - protein, 7 aa, Artificial Sequence
  Description of Artificial Sequence: Synthetic peptide
THEHYSH

SEQ ID NO: 11605 - protein, 7 aa, Artificial Sequence
  Description of Artificial Sequence: Synthetic peptide
THEPRRA

SEQ ID NO: 11606 - protein, 7 aa, Artificial Sequence
  Description of Artificial Sequence: Synthetic peptide
THESAAA

SEQ ID NO: 11607 - protein, 7 aa, Artificial Sequence
  Description of Artificial Sequence: Synthetic peptide
THFPGLP

SEQ ID NO: 11608 - protein, 7 aa, Artificial Sequence
  Description of Artificial Sequence: Synthetic peptide
THGRLPN

SEQ ID NO: 11609 - protein, 7 aa, Artificial Sequence
  Description of Artificial Sequence: Synthetic peptide
THHAALT

SEQ ID NO: 11610 - protein, 7 aa, Artificial Sequence
  Description of Artificial Sequence: Synthetic peptide
THHSGSI

SEQ ID NO: 11611 - protein, 7 aa, Artificial Sequence
  Description of Artificial Sequence: Synthetic peptide
THHVTQT

SEQ ID NO: 11612 - protein, 7 aa, Artificial Sequence
  Description of Artificial Sequence: Synthetic peptide
THIPSRP

SEQ ID NO: 11613 - protein, 7 aa, Artificial Sequence
  Description of Artificial Sequence: Synthetic peptide
THIRSAQ

SEQ ID NO: 11614 - protein, 7 aa, Artificial Sequence
  Description of Artificial Sequence: Synthetic peptide
THKETHM

SEQ ID NO: 11615 - protein, 7 aa, Artificial Sequence
  Description of Artificial Sequence: Synthetic peptide
THKFPTS

SEQ ID NO: 11616 - protein, 7 aa, Artificial Sequence
  Description of Artificial Sequence: Synthetic peptide
THKLTAE

SEQ ID NO: 11617 - protein, 7 aa, Artificial Sequence
  Description of Artificial Sequence: Synthetic peptide
THKSISN

SEQ ID NO: 11618 - protein, 7 aa, Artificial Sequence
  Description of Artificial Sequence: Synthetic peptide
THLASSD

SEQ ID NO: 11619 - protein, 7 aa, Artificial Sequence
  Description of Artificial Sequence: Synthetic peptide
THLGESV

SEQ ID NO: 11620 - protein, 7 aa, Artificial Sequence
  Description of Artificial Sequence: Synthetic peptide
THLSNTL

SEQ ID NO: 11621 - protein, 7 aa, Artificial Sequence
  Description of Artificial Sequence: Synthetic peptide
THLSTAK

SEQ ID NO: 11622 - protein, 7 aa, Artificial Sequence
  Description of Artificial Sequence: Synthetic peptide
THLSTPS

SEQ ID NO: 11623 - protein, 7 aa, Artificial Sequence
  Description of Artificial Sequence: Synthetic peptide
THMIGNT

SEQ ID NO: 11624 - protein, 7 aa, Artificial Sequence
  Description of Artificial Sequence: Synthetic peptide
THNALTV

SEQ ID NO: 11625 - protein, 7 aa, Artificial Sequence
  Description of Artificial Sequence: Synthetic peptide
THNLSIR

SEQ ID NO: 11626 - protein, 7 aa, Artificial Sequence
  Description of Artificial Sequence: Synthetic peptide
THPAVTQ

SEQ ID NO: 11627 - protein, 7 aa, Artificial Sequence
  Description of Artificial Sequence: Synthetic peptide
THPDRGL

SEQ ID NO: 11628 - protein, 7 aa, Artificial Sequence
  Description of Artificial Sequence: Synthetic peptide
THPKPTL

SEQ ID NO: 11629 - protein, 7 aa, Artificial Sequence
  Description of Artificial Sequence: Synthetic peptide
THPQSVD

SEQ ID NO: 11630 - protein, 7 aa, Artificial Sequence
  Description of Artificial Sequence: Synthetic peptide
THPSVPV

SEQ ID NO: 11631 - protein, 7 aa, Artificial Sequence
  Description of Artificial Sequence: Synthetic peptide
THPVGIL

SEQ ID NO: 11632 - protein, 7 aa, Artificial Sequence
  Description of Artificial Sequence: Synthetic peptide
THPVSSV

SEQ ID NO: 11633 - protein, 7 aa, Artificial Sequence
  Description of Artificial Sequence: Synthetic peptide
THQTSVY

SEQ ID NO: 11634 - protein, 7 aa, Artificial Sequence
  Description of Artificial Sequence: Synthetic peptide
THQVPSV

SEQ ID NO: 11635 - protein, 7 aa, Artificial Sequence
  Description of Artificial Sequence: Synthetic peptide
THRDGIM

SEQ ID NO: 11636 - protein, 7 aa, Artificial Sequence
  Description of Artificial Sequence: Synthetic peptide
THRQDTS

SEQ ID NO: 11637 - protein, 7 aa, Artificial Sequence
  Description of Artificial Sequence: Synthetic peptide
THRSLDV

SEQ ID NO: 11638 - protein, 7 aa, Artificial Sequence
  Description of Artificial Sequence: Synthetic peptide
THRSQTV

SEQ ID NO: 11639 - protein, 7 aa, Artificial Sequence
  Description of Artificial Sequence: Synthetic peptide
THSAYNH

SEQ ID NO: 11640 - protein, 7 aa, Artificial Sequence
  Description of Artificial Sequence: Synthetic peptide
THSESSK

SEQ ID NO: 11641 - protein, 7 aa, Artificial Sequence
  Description of Artificial Sequence: Synthetic peptide
THSGANN

SEQ ID NO: 11642 - protein, 7 aa, Artificial Sequence
  Description of Artificial Sequence: Synthetic peptide
THSHVDD

SEQ ID NO: 11643 - protein, 7 aa, Artificial Sequence
  Description of Artificial Sequence: Synthetic peptide
THSMVMP

SEQ ID NO: 11644 - protein, 7 aa, Artificial Sequence
  Description of Artificial Sequence: Synthetic peptide
THSPLTR

SEQ ID NO: 11645 - protein, 7 aa, Artificial Sequence
  Description of Artificial Sequence: Synthetic peptide
THTLNTR

SEQ ID NO: 11646 - protein, 7 aa, Artificial Sequence
  Description of Artificial Sequence: Synthetic peptide
THTPLPA

SEQ ID NO: 11647 - protein, 7 aa, Artificial Sequence
  Description of Artificial Sequence: Synthetic peptide
THTRTLM

SEQ ID NO: 11648 - protein, 7 aa, Artificial Sequence
  Description of Artificial Sequence: Synthetic peptide
THTSAAE

SEQ ID NO: 11649 - protein, 7 aa, Artificial Sequence
  Description of Artificial Sequence: Synthetic peptide
THTVGTQ

SEQ ID NO: 11650 - protein, 7 aa, Artificial Sequence
  Description of Artificial Sequence: Synthetic peptide
THVAEVT

SEQ ID NO: 11651 - protein, 7 aa, Artificial Sequence
  Description of Artificial Sequence: Synthetic peptide
THVPPMR

SEQ ID NO: 11652 - protein, 7 aa, Artificial Sequence
  Description of Artificial Sequence: Synthetic peptide
THYDVVM

SEQ ID NO: 11653 - protein, 7 aa, Artificial Sequence
  Description of Artificial Sequence: Synthetic peptide
TIADDQK

SEQ ID NO: 11654 - protein, 7 aa, Artificial Sequence
  Description of Artificial Sequence: Synthetic peptide
TIADMRT

SEQ ID NO: 11655 - protein, 7 aa, Artificial Sequence
  Description of Artificial Sequence: Synthetic peptide
TICNDGP

SEQ ID NO: 11656 - protein, 7 aa, Artificial Sequence
  Description of Artificial Sequence: Synthetic peptide
TIDPPLT

SEQ ID NO: 11657 - protein, 7 aa, Artificial Sequence
  Description of Artificial Sequence: Synthetic peptide
TIDTTSL

SEQ ID NO: 11658 - protein, 7 aa, Artificial Sequence
  Description of Artificial Sequence: Synthetic peptide
TIEQRER

SEQ ID NO: 11659 - protein, 7 aa, Artificial Sequence
  Description of Artificial Sequence: Synthetic peptide
TIESPGV

SEQ ID NO: 11660 - protein, 7 aa, Artificial Sequence
  Description of Artificial Sequence: Synthetic peptide
TIGHESY

SEQ ID NO: 11661 - protein, 7 aa, Artificial Sequence
  Description of Artificial Sequence: Synthetic peptide
TIGRLMQ

SEQ ID NO: 11662 - protein, 7 aa, Artificial Sequence
  Description of Artificial Sequence: Synthetic peptide
TIGSVRL

SEQ ID NO: 11663 - protein, 7 aa, Artificial Sequence
  Description of Artificial Sequence: Synthetic peptide
TIHRPDM

SEQ ID NO: 11664 - protein, 7 aa, Artificial Sequence
  Description of Artificial Sequence: Synthetic peptide
TIIPSKL

SEQ ID NO: 11665 - protein, 7 aa, Artificial Sequence
  Description of Artificial Sequence: Synthetic peptide
TIIRKDS

SEQ ID NO: 11666 - protein, 7 aa, Artificial Sequence
  Description of Artificial Sequence: Synthetic peptide
TIKAQVS

SEQ ID NO: 11667 - protein, 7 aa, Artificial Sequence
  Description of Artificial Sequence: Synthetic peptide
TIKLNVG

SEQ ID NO: 11668 - protein, 7 aa, Artificial Sequence
  Description of Artificial Sequence: Synthetic peptide
TIKPLSQ

SEQ ID NO: 11669 - protein, 7 aa, Artificial Sequence
  Description of Artificial Sequence: Synthetic peptide
TILNPNN

SEQ ID NO: 11670 - protein, 7 aa, Artificial Sequence
  Description of Artificial Sequence: Synthetic peptide
TILRTEE

SEQ ID NO: 11671 - protein, 7 aa, Artificial Sequence
  Description of Artificial Sequence: Synthetic peptide
TILSSHG

SEQ ID NO: 11672 - protein, 7 aa, Artificial Sequence
  Description of Artificial Sequence: Synthetic peptide
TILSTGS

SEQ ID NO: 11673 - protein, 7 aa, Artificial Sequence
  Description of Artificial Sequence: Synthetic peptide
TINHAEQ

SEQ ID NO: 11674 - protein, 7 aa, Artificial Sequence
  Description of Artificial Sequence: Synthetic peptide
TINWVGD

SEQ ID NO: 11675 - protein, 7 aa, Artificial Sequence
  Description of Artificial Sequence: Synthetic peptide
TIPSQIA

SEQ ID NO: 11676 - protein, 7 aa, Artificial Sequence
  Description of Artificial Sequence: Synthetic peptide
TIQLRSA

SEQ ID NO: 11677 - protein, 7 aa, Artificial Sequence
  Description of Artificial Sequence: Synthetic peptide
TIREAFT

SEQ ID NO: 11678 - protein, 7 aa, Artificial Sequence
  Description of Artificial Sequence: Synthetic peptide
TIRGSFL

SEQ ID NO: 11679 - protein, 7 aa, Artificial Sequence
  Description of Artificial Sequence: Synthetic peptide
TIRGTIS

SEQ ID NO: 11680 - protein, 7 aa, Artificial Sequence
  Description of Artificial Sequence: Synthetic peptide
TIRVNPT

SEQ ID NO: 11681 - protein, 7 aa, Artificial Sequence
  Description of Artificial Sequence: Synthetic peptide
TIRVSLA

SEQ ID NO: 11682 - protein, 7 aa, Artificial Sequence
  Description of Artificial Sequence: Synthetic peptide
TISNASS

SEQ ID NO: 11683 - protein, 7 aa, Artificial Sequence
  Description of Artificial Sequence: Synthetic peptide
TISSSQS

SEQ ID NO: 11684 - protein, 7 aa, Artificial Sequence
  Description of Artificial Sequence: Synthetic peptide
TISTSKH

SEQ ID NO: 11685 - protein, 7 aa, Artificial Sequence
  Description of Artificial Sequence: Synthetic peptide
TITAHDP

SEQ ID NO: 11686 - protein, 7 aa, Artificial Sequence
  Description of Artificial Sequence: Synthetic peptide
TITPRAD

SEQ ID NO: 11687 - protein, 7 aa, Artificial Sequence
  Description of Artificial Sequence: Synthetic peptide
TITSPKM

SEQ ID NO: 11688 - protein, 7 aa, Artificial Sequence
  Description of Artificial Sequence: Synthetic peptide
TITYELT

SEQ ID NO: 11689 - protein, 7 aa, Artificial Sequence
  Description of Artificial Sequence: Synthetic peptide
TIVRELT

SEQ ID NO: 11690 - protein, 7 aa, Artificial Sequence
  Description of Artificial Sequence: Synthetic peptide
TIVSDPR

SEQ ID NO: 11691 - protein, 7 aa, Artificial Sequence
  Description of Artificial Sequence: Synthetic peptide
TIVSGVV

SEQ ID NO: 11692 - protein, 7 aa, Artificial Sequence
  Description of Artificial Sequence: Synthetic peptide
TIVTGAS

SEQ ID NO: 11693 - protein, 7 aa, Artificial Sequence
  Description of Artificial Sequence: Synthetic peptide
TIYYDVT

SEQ ID NO: 11694 - protein, 7 aa, Artificial Sequence
  Description of Artificial Sequence: Synthetic peptide
TKAGSFH

SEQ ID NO: 11695 - protein, 7 aa, Artificial Sequence
  Description of Artificial Sequence: Synthetic peptide
TKAHCCG

SEQ ID NO: 11696 - protein, 7 aa, Artificial Sequence
  Description of Artificial Sequence: Synthetic peptide
TKALVHM

SEQ ID NO: 11697 - protein, 7 aa, Artificial Sequence
  Description of Artificial Sequence: Synthetic peptide
TKDQVRL

SEQ ID NO: 11698 - protein, 7 aa, Artificial Sequence
  Description of Artificial Sequence: Synthetic peptide
TKDRPFL

SEQ ID NO: 11699 - protein, 7 aa, Artificial Sequence
  Description of Artificial Sequence: Synthetic peptide
TKECMLT

SEQ ID NO: 11700 - protein, 7 aa, Artificial Sequence
  Description of Artificial Sequence: Synthetic peptide
TKGGFND

SEQ ID NO: 11701 - protein, 7 aa, Artificial Sequence
  Description of Artificial Sequence: Synthetic peptide
TKGGKQP

SEQ ID NO: 11702 - protein, 7 aa, Artificial Sequence
  Description of Artificial Sequence: Synthetic peptide
TKGREPV

SEQ ID NO: 11703 - protein, 7 aa, Artificial Sequence
  Description of Artificial Sequence: Synthetic peptide
TKGVPGY

SEQ ID NO: 11704 - protein, 7 aa, Artificial Sequence
  Description of Artificial Sequence: Synthetic peptide
TKHLMPA

SEQ ID NO: 11705 - protein, 7 aa, Artificial Sequence
  Description of Artificial Sequence: Synthetic peptide
TKIAGFS

SEQ ID NO: 11706 - protein, 7 aa, Artificial Sequence
  Description of Artificial Sequence: Synthetic peptide
TKIGSAM

SEQ ID NO: 11707 - protein, 7 aa, Artificial Sequence
  Description of Artificial Sequence: Synthetic peptide
TKLNAFD

SEQ ID NO: 11708 - protein, 7 aa, Artificial Sequence
  Description of Artificial Sequence: Synthetic peptide
TKLPNSS

SEQ ID NO: 11709 - protein, 7 aa, Artificial Sequence
  Description of Artificial Sequence: Synthetic peptide
TKLQASL

SEQ ID NO: 11710 - protein, 7 aa, Artificial Sequence
  Description of Artificial Sequence: Synthetic peptide
TKLVTES

SEQ ID NO: 11711 - protein, 7 aa, Artificial Sequence
  Description of Artificial Sequence: Synthetic peptide
TKMNASG

SEQ ID NO: 11712 - protein, 7 aa, Artificial Sequence
  Description of Artificial Sequence: Synthetic peptide
TKNLDHT

SEQ ID NO: 11713 - protein, 7 aa, Artificial Sequence
  Description of Artificial Sequence: Synthetic peptide
TKNLTER

SEQ ID NO: 11714 - protein, 7 aa, Artificial Sequence
  Description of Artificial Sequence: Synthetic peptide
TKNRMDL

SEQ ID NO: 11715 - protein, 7 aa, Artificial Sequence
  Description of Artificial Sequence: Synthetic peptide
TKPGSIF

SEQ ID NO: 11716 - protein, 7 aa, Artificial Sequence
  Description of Artificial Sequence: Synthetic peptide
TKPPVQS

SEQ ID NO: 11717 - protein, 7 aa, Artificial Sequence
  Description of Artificial Sequence: Synthetic peptide
TKPQSSY

SEQ ID NO: 11718 - protein, 7 aa, Artificial Sequence
  Description of Artificial Sequence: Synthetic peptide
TKRESHS

SEQ ID NO: 11719 - protein, 7 aa, Artificial Sequence
  Description of Artificial Sequence: Synthetic peptide
TKSAATA

SEQ ID NO: 11720 - protein, 7 aa, Artificial Sequence
  Description of Artificial Sequence: Synthetic peptide
TKSGLTQ

SEQ ID NO: 11721 - protein, 7 aa, Artificial Sequence
  Description of Artificial Sequence: Synthetic peptide
TKSGNSL

SEQ ID NO: 11722 - protein, 7 aa, Artificial Sequence
  Description of Artificial Sequence: Synthetic peptide
TKSQTHL

SEQ ID NO: 11723 - protein, 7 aa, Artificial Sequence
  Description of Artificial Sequence: Synthetic peptide
TKSSVLP

SEQ ID NO: 11724 - protein, 7 aa, Artificial Sequence
  Description of Artificial Sequence: Synthetic peptide
TKSYSPN

SEQ ID NO: 11725 - protein, 7 aa, Artificial Sequence
  Description of Artificial Sequence: Synthetic peptide
TKTGDGP

SEQ ID NO: 11726 - protein, 7 aa, Artificial Sequence
  Description of Artificial Sequence: Synthetic peptide
TKTSFPN

SEQ ID NO: 11727 - protein, 7 aa, Artificial Sequence
  Description of Artificial Sequence: Synthetic peptide
TKVALDP

SEQ ID NO: 11728 - protein, 7 aa, Artificial Sequence
  Description of Artificial Sequence: Synthetic peptide
TKVAREV

SEQ ID NO: 11729 - protein, 7 aa, Artificial Sequence
  Description of Artificial Sequence: Synthetic peptide
TLALYAS

SEQ ID NO: 11730 - protein, 7 aa, Artificial Sequence
  Description of Artificial Sequence: Synthetic peptide
TLAPTTK

SEQ ID NO: 11731 - protein, 7 aa, Artificial Sequence
  Description of Artificial Sequence: Synthetic peptide
TLASGRA

SEQ ID NO: 11732 - protein, 7 aa, Artificial Sequence
  Description of Artificial Sequence: Synthetic peptide
TLASRSV

SEQ ID NO: 11733 - protein, 7 aa, Artificial Sequence
  Description of Artificial Sequence: Synthetic peptide
TLATSSN

SEQ ID NO: 11734 - protein, 7 aa, Artificial Sequence
  Description of Artificial Sequence: Synthetic peptide
TLAVNSM

SEQ ID NO: 11735 - protein, 7 aa, Artificial Sequence
  Description of Artificial Sequence: Synthetic peptide
TLDMTSV

SEQ ID NO: 11736 - protein, 7 aa, Artificial Sequence
  Description of Artificial Sequence: Synthetic peptide
TLDNSRA

SEQ ID NO: 11737 - protein, 7 aa, Artificial Sequence
  Description of Artificial Sequence: Synthetic peptide
TLDVHYV

SEQ ID NO: 11738 - protein, 7 aa, Artificial Sequence
  Description of Artificial Sequence: Synthetic peptide
TLEAQTD

SEQ ID NO: 11739 - protein, 7 aa, Artificial Sequence
  Description of Artificial Sequence: Synthetic peptide
TLEHTCR

SEQ ID NO: 11740 - protein, 7 aa, Artificial Sequence
  Description of Artificial Sequence: Synthetic peptide
TLEPRKD

SEQ ID NO: 11741 - protein, 7 aa, Artificial Sequence
  Description of Artificial Sequence: Synthetic peptide
TLEQFGS

SEQ ID NO: 11742 - protein, 7 aa, Artificial Sequence
  Description of Artificial Sequence: Synthetic peptide
TLEQYKL

SEQ ID NO: 11743 - protein, 7 aa, Artificial Sequence
  Description of Artificial Sequence: Synthetic peptide
TLERKLD

SEQ ID NO: 11744 - protein, 7 aa, Artificial Sequence
  Description of Artificial Sequence: Synthetic peptide
TLERPFI

SEQ ID NO: 11745 - protein, 7 aa, Artificial Sequence
  Description of Artificial Sequence: Synthetic peptide
TLFNSEK

SEQ ID NO: 11746 - protein, 7 aa, Artificial Sequence
  Description of Artificial Sequence: Synthetic peptide
TLFQQPP

SEQ ID NO: 11747 - protein, 7 aa, Artificial Sequence
  Description of Artificial Sequence: Synthetic peptide
TLFRDGS

SEQ ID NO: 11748 - protein, 7 aa, Artificial Sequence
  Description of Artificial Sequence: Synthetic peptide
TLGGSPV

SEQ ID NO: 11749 - protein, 7 aa, Artificial Sequence
  Description of Artificial Sequence: Synthetic peptide
TLGGSRA

SEQ ID NO: 11750 - protein, 7 aa, Artificial Sequence
  Description of Artificial Sequence: Synthetic peptide
TLGHAFA

SEQ ID NO: 11751 - protein, 7 aa, Artificial Sequence
  Description of Artificial Sequence: Synthetic peptide
TLGHVPP

SEQ ID NO: 11752 - protein, 7 aa, Artificial Sequence
  Description of Artificial Sequence: Synthetic peptide
TLGITAH

SEQ ID NO: 11753 - protein, 7 aa, Artificial Sequence
  Description of Artificial Sequence: Synthetic peptide
TLGIVTQ

SEQ ID NO: 11754 - protein, 7 aa, Artificial Sequence
  Description of Artificial Sequence: Synthetic peptide
TLGLTMP

SEQ ID NO: 11755 - protein, 7 aa, Artificial Sequence
  Description of Artificial Sequence: Synthetic peptide
TLGPNSR

SEQ ID NO: 11756 - protein, 7 aa, Artificial Sequence
  Description of Artificial Sequence: Synthetic peptide
TLGQTTG

SEQ ID NO: 11757 - protein, 7 aa, Artificial Sequence
  Description of Artificial Sequence: Synthetic peptide
TLHQIPA

SEQ ID NO: 11758 - protein, 7 aa, Artificial Sequence
  Description of Artificial Sequence: Synthetic peptide
TLHSSSS

SEQ ID NO: 11759 - protein, 7 aa, Artificial Sequence
  Description of Artificial Sequence: Synthetic peptide
TLIGNDT

SEQ ID NO: 11760 - protein, 7 aa, Artificial Sequence
  Description of Artificial Sequence: Synthetic peptide
TLISSVT

SEQ ID NO: 11761 - protein, 7 aa, Artificial Sequence
  Description of Artificial Sequence: Synthetic peptide
TLKAEDL

SEQ ID NO: 11762 - protein, 7 aa, Artificial Sequence
  Description of Artificial Sequence: Synthetic peptide
TLKGPGQ

SEQ ID NO: 11763 - protein, 7 aa, Artificial Sequence
  Description of Artificial Sequence: Synthetic peptide
TLKRGLD

SEQ ID NO: 11764 - protein, 7 aa, Artificial Sequence
  Description of Artificial Sequence: Synthetic peptide
TLKSNAK

SEQ ID NO: 11765 - protein, 7 aa, Artificial Sequence
  Description of Artificial Sequence: Synthetic peptide
TLLPASP

SEQ ID NO: 11766 - protein, 7 aa, Artificial Sequence
  Description of Artificial Sequence: Synthetic peptide
TLLPGDP

SEQ ID NO: 11767 - protein, 7 aa, Artificial Sequence
  Description of Artificial Sequence: Synthetic peptide
TLLPHPT

SEQ ID NO: 11768 - protein, 7 aa, Artificial Sequence
  Description of Artificial Sequence: Synthetic peptide
TLLTDDL

SEQ ID NO: 11769 - protein, 7 aa, Artificial Sequence
  Description of Artificial Sequence: Synthetic peptide
TLMQVSG

SEQ ID NO: 11770 - protein, 7 aa, Artificial Sequence
  Description of Artificial Sequence: Synthetic peptide
TLMRGAS

SEQ ID NO: 11771 - protein, 7 aa, Artificial Sequence
  Description of Artificial Sequence: Synthetic peptide
TLNSAKK

SEQ ID NO: 11772 - protein, 7 aa, Artificial Sequence
  Description of Artificial Sequence: Synthetic peptide
TLNSERM

SEQ ID NO: 11773 - protein, 7 aa, Artificial Sequence
  Description of Artificial Sequence: Synthetic peptide
TLPHRVA

SEQ ID NO: 11774 - protein, 7 aa, Artificial Sequence
  Description of Artificial Sequence: Synthetic peptide
TLPHSPK

SEQ ID NO: 11775 - protein, 7 aa, Artificial Sequence
  Description of Artificial Sequence: Synthetic peptide
TLPKTNL

SEQ ID NO: 11776 - protein, 7 aa, Artificial Sequence
  Description of Artificial Sequence: Synthetic peptide
TLPLTST

SEQ ID NO: 11777 - protein, 7 aa, Artificial Sequence
  Description of Artificial Sequence: Synthetic peptide
TLPNYLA

SEQ ID NO: 11778 - protein, 7 aa, Artificial Sequence
  Description of Artificial Sequence: Synthetic peptide
TLPPNSP

SEQ ID NO: 11779 - protein, 7 aa, Artificial Sequence
  Description of Artificial Sequence: Synthetic peptide
TLPSERV

SEQ ID NO: 11780 - protein, 7 aa, Artificial Sequence
  Description of Artificial Sequence: Synthetic peptide
TLPTTLV

SEQ ID NO: 11781 - protein, 7 aa, Artificial Sequence
  Description of Artificial Sequence: Synthetic peptide
TLPVNNL

SEQ ID NO: 11782 - protein, 7 aa, Artificial Sequence
  Description of Artificial Sequence: Synthetic peptide
TLQDNRA

SEQ ID NO: 11783 - protein, 7 aa, Artificial Sequence
  Description of Artificial Sequence: Synthetic peptide
TLQEGTG

SEQ ID NO: 11784 - protein, 7 aa, Artificial Sequence
  Description of Artificial Sequence: Synthetic peptide
TLQFGAG

SEQ ID NO: 11785 - protein, 7 aa, Artificial Sequence
  Description of Artificial Sequence: Synthetic peptide
TLQGGSL

SEQ ID NO: 11786 - protein, 7 aa, Artificial Sequence
  Description of Artificial Sequence: Synthetic peptide
TLQPLRI

SEQ ID NO: 11787 - protein, 7 aa, Artificial Sequence
  Description of Artificial Sequence: Synthetic peptide
TLRDTAD

SEQ ID NO: 11788 - protein, 7 aa, Artificial Sequence
  Description of Artificial Sequence: Synthetic peptide
TLRESDT

SEQ ID NO: 11789 - protein, 7 aa, Artificial Sequence
  Description of Artificial Sequence: Synthetic peptide
TLRGAED

SEQ ID NO: 11790 - protein, 7 aa, Artificial Sequence
  Description of Artificial Sequence: Synthetic peptide
TLRLTAG

SEQ ID NO: 11791 - protein, 7 aa, Artificial Sequence
  Description of Artificial Sequence: Synthetic peptide
TLRMQLN

SEQ ID NO: 11792 - protein, 7 aa, Artificial Sequence
  Description of Artificial Sequence: Synthetic peptide
TLRNSPA

SEQ ID NO: 11793 - protein, 7 aa, Artificial Sequence
  Description of Artificial Sequence: Synthetic peptide
TLRPLQA

SEQ ID NO: 11794 - protein, 7 aa, Artificial Sequence
  Description of Artificial Sequence: Synthetic peptide
TLRSAGP

SEQ ID NO: 11795 - protein, 7 aa, Artificial Sequence
  Description of Artificial Sequence: Synthetic peptide
TLRTLAE

SEQ ID NO: 11796 - protein, 7 aa, Artificial Sequence
  Description of Artificial Sequence: Synthetic peptide
TLSALPP

SEQ ID NO: 11797 - protein, 7 aa, Artificial Sequence
  Description of Artificial Sequence: Synthetic peptide
TLSDRPP

SEQ ID NO: 11798 - protein, 7 aa, Artificial Sequence
  Description of Artificial Sequence: Synthetic peptide
TLSDSVD

SEQ ID NO: 11799 - protein, 7 aa, Artificial Sequence
  Description of Artificial Sequence: Synthetic peptide
TLSENLP

SEQ ID NO: 11800 - protein, 7 aa, Artificial Sequence
  Description of Artificial Sequence: Synthetic peptide
TLSHLPY

SEQ ID NO: 11801 - protein, 7 aa, Artificial Sequence
  Description of Artificial Sequence: Synthetic peptide
TLSHNAP

SEQ ID NO: 11802 - protein, 7 aa, Artificial Sequence
  Description of Artificial Sequence: Synthetic peptide
TLSHRLP

SEQ ID NO: 11803 - protein, 7 aa, Artificial Sequence
  Description of Artificial Sequence: Synthetic peptide
TLSKHLL

SEQ ID NO: 11804 - protein, 7 aa, Artificial Sequence
  Description of Artificial Sequence: Synthetic peptide
TLSKPPS

SEQ ID NO: 11805 - protein, 7 aa, Artificial Sequence
  Description of Artificial Sequence: Synthetic peptide
TLSLSAI

SEQ ID NO: 11806 - protein, 7 aa, Artificial Sequence
  Description of Artificial Sequence: Synthetic peptide
TLSLSNN

SEQ ID NO: 11807 - protein, 7 aa, Artificial Sequence
  Description of Artificial Sequence: Synthetic peptide
TLSLSTG

SEQ ID NO: 11808 - protein, 7 aa, Artificial Sequence
  Description of Artificial Sequence: Synthetic peptide
TLSNSVP

SEQ ID NO: 11809 - protein, 7 aa, Artificial Sequence
  Description of Artificial Sequence: Synthetic peptide
TLSPKSV

SEQ ID NO: 11810 - protein, 7 aa, Artificial Sequence
  Description of Artificial Sequence: Synthetic peptide
TLSPSGS

SEQ ID NO: 11811 - protein, 7 aa, Artificial Sequence
  Description of Artificial Sequence: Synthetic peptide
TLSPTTS

SEQ ID NO: 11812 - protein, 7 aa, Artificial Sequence
  Description of Artificial Sequence: Synthetic peptide
TLSQRPP

SEQ ID NO: 11813 - protein, 7 aa, Artificial Sequence
  Description of Artificial Sequence: Synthetic peptide
TLSQSTH

SEQ ID NO: 11814 - protein, 7 aa, Artificial Sequence
  Description of Artificial Sequence: Synthetic peptide
TLSRTLE

SEQ ID NO: 11815 - protein, 7 aa, Artificial Sequence
  Description of Artificial Sequence: Synthetic peptide
TLSSGQT

SEQ ID NO: 11816 - protein, 7 aa, Artificial Sequence
  Description of Artificial Sequence: Synthetic peptide
TLSSRPM

SEQ ID NO: 11817 - protein, 7 aa, Artificial Sequence
  Description of Artificial Sequence: Synthetic peptide
TLSSRQS

SEQ ID NO: 11818 - protein, 7 aa, Artificial Sequence
  Description of Artificial Sequence: Synthetic peptide
TLSTVSL

SEQ ID NO: 11819 - protein, 7 aa, Artificial Sequence
  Description of Artificial Sequence: Synthetic peptide
TLSYTPA

SEQ ID NO: 11820 - protein, 7 aa, Artificial Sequence
  Description of Artificial Sequence: Synthetic peptide
TLTFRGD

SEQ ID NO: 11821 - protein, 7 aa, Artificial Sequence
  Description of Artificial Sequence: Synthetic peptide
TLTKNST

SEQ ID NO: 11822 - protein, 7 aa, Artificial Sequence
  Description of Artificial Sequence: Synthetic peptide
TLTPLYE

SEQ ID NO: 11823 - protein, 7 aa, Artificial Sequence
  Description of Artificial Sequence: Synthetic peptide
TLTPNES

SEQ ID NO: 11824 - protein, 7 aa, Artificial Sequence
  Description of Artificial Sequence: Synthetic peptide
TLTRLSP

SEQ ID NO: 11825 - protein, 7 aa, Artificial Sequence
  Description of Artificial Sequence: Synthetic peptide
TLTRMNV

SEQ ID NO: 11826 - protein, 7 aa, Artificial Sequence
  Description of Artificial Sequence: Synthetic peptide
TLTTNVS

SEQ ID NO: 11827 - protein, 7 aa, Artificial Sequence
  Description of Artificial Sequence: Synthetic peptide
TLTTPMN

SEQ ID NO: 11828 - protein, 7 aa, Artificial Sequence
  Description of Artificial Sequence: Synthetic peptide
TLTVLDP

SEQ ID NO: 11829 - protein, 7 aa, Artificial Sequence
  Description of Artificial Sequence: Synthetic peptide
TLTYHRD

SEQ ID NO: 11830 - protein, 7 aa, Artificial Sequence
  Description of Artificial Sequence: Synthetic peptide
TLVGHYY

SEQ ID NO: 11831 - protein, 7 aa, Artificial Sequence
  Description of Artificial Sequence: Synthetic peptide
TLVGPAS

SEQ ID NO: 11832 - protein, 7 aa, Artificial Sequence
  Description of Artificial Sequence: Synthetic peptide
TLVPRDL

SEQ ID NO: 11833 - protein, 7 aa, Artificial Sequence
  Description of Artificial Sequence: Synthetic peptide
TLVQAEM

SEQ ID NO: 11834 - protein, 7 aa, Artificial Sequence
  Description of Artificial Sequence: Synthetic peptide
TLVTREN

SEQ ID NO: 11835 - protein, 7 aa, Artificial Sequence
  Description of Artificial Sequence: Synthetic peptide
TLVVRSP

SEQ ID NO: 11836 - protein, 7 aa, Artificial Sequence
  Description of Artificial Sequence: Synthetic peptide
TLYGHPS

SEQ ID NO: 11837 - protein, 7 aa, Artificial Sequence
  Description of Artificial Sequence: Synthetic peptide
TLYLHSE

SEQ ID NO: 11838 - protein, 7 aa, Artificial Sequence
  Description of Artificial Sequence: Synthetic peptide
TLYNTTM

SEQ ID NO: 11839 - protein, 7 aa, Artificial Sequence
  Description of Artificial Sequence: Synthetic peptide
TLYRVNP

SEQ ID NO: 11840 - protein, 7 aa, Artificial Sequence
  Description of Artificial Sequence: Synthetic peptide
TLYSQSE

SEQ ID NO: 11841 - protein, 7 aa, Artificial Sequence
  Description of Artificial Sequence: Synthetic peptide
TLYTNSV

SEQ ID NO: 11842 - protein, 7 aa, Artificial Sequence
  Description of Artificial Sequence: Synthetic peptide
TMAMNPR

SEQ ID NO: 11843 - protein, 7 aa, Artificial Sequence
  Description of Artificial Sequence: Synthetic peptide
TMAPRDL

SEQ ID NO: 11844 - protein, 7 aa, Artificial Sequence
  Description of Artificial Sequence: Synthetic peptide
TMDNLRQ

SEQ ID NO: 11845 - protein, 7 aa, Artificial Sequence
  Description of Artificial Sequence: Synthetic peptide
TMDRTPG

SEQ ID NO: 11846 - protein, 7 aa, Artificial Sequence
  Description of Artificial Sequence: Synthetic peptide
TMDVLSF

SEQ ID NO: 11847 - protein, 7 aa, Artificial Sequence
  Description of Artificial Sequence: Synthetic peptide
TMERGDS

SEQ ID NO: 11848 - protein, 7 aa, Artificial Sequence
  Description of Artificial Sequence: Synthetic peptide
TMHAHPL

SEQ ID NO: 11849 - protein, 7 aa, Artificial Sequence
  Description of Artificial Sequence: Synthetic peptide
TMLTRTG

SEQ ID NO: 11850 - protein, 7 aa, Artificial Sequence
  Description of Artificial Sequence: Synthetic peptide
TMMKPLD

SEQ ID NO: 11851 - protein, 7 aa, Artificial Sequence
  Description of Artificial Sequence: Synthetic peptide
TMNKPTL

SEQ ID NO: 11852 - protein, 7 aa, Artificial Sequence
  Description of Artificial Sequence: Synthetic peptide
TMNLGEM

SEQ ID NO: 11853 - protein, 7 aa, Artificial Sequence
  Description of Artificial Sequence: Synthetic peptide
TMNPTQN

SEQ ID NO: 11854 - protein, 7 aa, Artificial Sequence
  Description of Artificial Sequence: Synthetic peptide
TMNTLVT

SEQ ID NO: 11855 - protein, 7 aa, Artificial Sequence
  Description of Artificial Sequence: Synthetic peptide
TMPNHGP

SEQ ID NO: 11856 - protein, 7 aa, Artificial Sequence
  Description of Artificial Sequence: Synthetic peptide
TMPSESV

SEQ ID NO: 11857 - protein, 7 aa, Artificial Sequence
  Description of Artificial Sequence: Synthetic peptide
TMQAPSA

SEQ ID NO: 11858 - protein, 7 aa, Artificial Sequence
  Description of Artificial Sequence: Synthetic peptide
TMQYGST

SEQ ID NO: 11859 - protein, 7 aa, Artificial Sequence
  Description of Artificial Sequence: Synthetic peptide
TMREGPA

SEQ ID NO: 11860 - protein, 7 aa, Artificial Sequence
  Description of Artificial Sequence: Synthetic peptide
TMRIDLP

SEQ ID NO: 11861 - protein, 7 aa, Artificial Sequence
  Description of Artificial Sequence: Synthetic peptide
TMRSSEI

SEQ ID NO: 11862 - protein, 7 aa, Artificial Sequence
  Description of Artificial Sequence: Synthetic peptide
TMRTNPD

SEQ ID NO: 11863 - protein, 7 aa, Artificial Sequence
  Description of Artificial Sequence: Synthetic peptide
TMSGTSR

SEQ ID NO: 11864 - protein, 7 aa, Artificial Sequence
  Description of Artificial Sequence: Synthetic peptide
TMSIALA

SEQ ID NO: 11865 - protein, 7 aa, Artificial Sequence
  Description of Artificial Sequence: Synthetic peptide
TMSKPSY

SEQ ID NO: 11866 - protein, 7 aa, Artificial Sequence
  Description of Artificial Sequence: Synthetic peptide
TMSMSIT

SEQ ID NO: 11867 - protein, 7 aa, Artificial Sequence
  Description of Artificial Sequence: Synthetic peptide
TMSPGNN

SEQ ID NO: 11868 - protein, 7 aa, Artificial Sequence
  Description of Artificial Sequence: Synthetic peptide
TMSPHSP

SEQ ID NO: 11869 - protein, 7 aa, Artificial Sequence
  Description of Artificial Sequence: Synthetic peptide
TMSPLNR

SEQ ID NO: 11870 - protein, 7 aa, Artificial Sequence
  Description of Artificial Sequence: Synthetic peptide
TMTHHQF

SEQ ID NO: 11871 - protein, 7 aa, Artificial Sequence
  Description of Artificial Sequence: Synthetic peptide
TMTRSML

SEQ ID NO: 11872 - protein, 7 aa, Artificial Sequence
  Description of Artificial Sequence: Synthetic peptide
TMTVLTM

SEQ ID NO: 11873 - protein, 7 aa, Artificial Sequence
  Description of Artificial Sequence: Synthetic peptide
TMVASMA

SEQ ID NO: 11874 - protein, 7 aa, Artificial Sequence
  Description of Artificial Sequence: Synthetic peptide
TMVKQGN

SEQ ID NO: 11875 - protein, 7 aa, Artificial Sequence
  Description of Artificial Sequence: Synthetic peptide
TMVSGGH

SEQ ID NO: 11876 - protein, 7 aa, Artificial Sequence
  Description of Artificial Sequence: Synthetic peptide
TMVVVSS

SEQ ID NO: 11877 - protein, 7 aa, Artificial Sequence
  Description of Artificial Sequence: Synthetic peptide
TMVYTDN

SEQ ID NO: 11878 - protein, 7 aa, Artificial Sequence
  Description of Artificial Sequence: Synthetic peptide
TNAALQS

SEQ ID NO: 11879 - protein, 7 aa, Artificial Sequence
  Description of Artificial Sequence: Synthetic peptide
TNAIKSG

SEQ ID NO: 11880 - protein, 7 aa, Artificial Sequence
  Description of Artificial Sequence: Synthetic peptide
TNASWPP

SEQ ID NO: 11881 - protein, 7 aa, Artificial Sequence
  Description of Artificial Sequence: Synthetic peptide
TNDPMMP

SEQ ID NO: 11882 - protein, 7 aa, Artificial Sequence
  Description of Artificial Sequence: Synthetic peptide
TNEHKFS

SEQ ID NO: 11883 - protein, 7 aa, Artificial Sequence
  Description of Artificial Sequence: Synthetic peptide
TNESSGT

SEQ ID NO: 11884 - protein, 7 aa, Artificial Sequence
  Description of Artificial Sequence: Synthetic peptide
TNFLPHG

SEQ ID NO: 11885 - protein, 7 aa, Artificial Sequence
  Description of Artificial Sequence: Synthetic peptide
TNFPQSA

SEQ ID NO: 11886 - protein, 7 aa, Artificial Sequence
  Description of Artificial Sequence: Synthetic peptide
TNFQLTV

SEQ ID NO: 11887 - protein, 7 aa, Artificial Sequence
  Description of Artificial Sequence: Synthetic peptide
TNGRVTA

SEQ ID NO: 11888 - protein, 7 aa, Artificial Sequence
  Description of Artificial Sequence: Synthetic peptide
TNGTKPT

SEQ ID NO: 11889 - protein, 7 aa, Artificial Sequence
  Description of Artificial Sequence: Synthetic peptide
TNGVKLS

SEQ ID NO: 11890 - protein, 7 aa, Artificial Sequence
  Description of Artificial Sequence: Synthetic peptide
TNHIAAL

SEQ ID NO: 11891 - protein, 7 aa, Artificial Sequence
  Description of Artificial Sequence: Synthetic peptide
TNHSSPL

SEQ ID NO: 11892 - protein, 7 aa, Artificial Sequence
  Description of Artificial Sequence: Synthetic peptide
TNKTVGC

SEQ ID NO: 11893 - protein, 7 aa, Artificial Sequence
  Description of Artificial Sequence: Synthetic peptide
TNLAARP

SEQ ID NO: 11894 - protein, 7 aa, Artificial Sequence
  Description of Artificial Sequence: Synthetic peptide
TNLKRMD

SEQ ID NO: 11895 - protein, 7 aa, Artificial Sequence
  Description of Artificial Sequence: Synthetic peptide
TNLNGND

SEQ ID NO: 11896 - protein, 7 aa, Artificial Sequence
  Description of Artificial Sequence: Synthetic peptide
TNLNTRP

SEQ ID NO: 11897 - protein, 7 aa, Artificial Sequence
  Description of Artificial Sequence: Synthetic peptide
TNLRSEL

SEQ ID NO: 11898 - protein, 7 aa, Artificial Sequence
  Description of Artificial Sequence: Synthetic peptide
TNLRTAV

SEQ ID NO: 11899 - protein, 7 aa, Artificial Sequence
  Description of Artificial Sequence: Synthetic peptide
TNMKTDS

SEQ ID NO: 11900 - protein, 7 aa, Artificial Sequence
  Description of Artificial Sequence: Synthetic peptide
TNMPMNP

SEQ ID NO: 11901 - protein, 7 aa, Artificial Sequence
  Description of Artificial Sequence: Synthetic peptide
TNMPPLP

SEQ ID NO: 11902 - protein, 7 aa, Artificial Sequence
  Description of Artificial Sequence: Synthetic peptide
TNMPPLT

SEQ ID NO: 11903 - protein, 7 aa, Artificial Sequence
  Description of Artificial Sequence: Synthetic peptide
TNNGGMY

SEQ ID NO: 11904 - protein, 7 aa, Artificial Sequence
  Description of Artificial Sequence: Synthetic peptide
TNNSTNP

SEQ ID NO: 11905 - protein, 7 aa, Artificial Sequence
  Description of Artificial Sequence: Synthetic peptide
TNPAPNS

SEQ ID NO: 11906 - protein, 7 aa, Artificial Sequence
  Description of Artificial Sequence: Synthetic peptide
TNPGPLD

SEQ ID NO: 11907 - protein, 7 aa, Artificial Sequence
  Description of Artificial Sequence: Synthetic peptide
TNPHRDT

SEQ ID NO: 11908 - protein, 7 aa, Artificial Sequence
  Description of Artificial Sequence: Synthetic peptide
TNPLSTG

SEQ ID NO: 11909 - protein, 7 aa, Artificial Sequence
  Description of Artificial Sequence: Synthetic peptide
TNPNNAN

SEQ ID NO: 11910 - protein, 7 aa, Artificial Sequence
  Description of Artificial Sequence: Synthetic peptide
TNPRSYT

SEQ ID NO: 11911 - protein, 7 aa, Artificial Sequence
  Description of Artificial Sequence: Synthetic peptide
TNPSALG

SEQ ID NO: 11912 - protein, 7 aa, Artificial Sequence
  Description of Artificial Sequence: Synthetic peptide
TNPSMCL

SEQ ID NO: 11913 - protein, 7 aa, Artificial Sequence
  Description of Artificial Sequence: Synthetic peptide
TNPTSMA

SEQ ID NO: 11914 - protein, 7 aa, Artificial Sequence
  Description of Artificial Sequence: Synthetic peptide
TNPVLTE

SEQ ID NO: 11915 - protein, 7 aa, Artificial Sequence
  Description of Artificial Sequence: Synthetic peptide
TNPVRLV

SEQ ID NO: 11916 - protein, 7 aa, Artificial Sequence
  Description of Artificial Sequence: Synthetic peptide
TNPVRTS

SEQ ID NO: 11917 - protein, 7 aa, Artificial Sequence
  Description of Artificial Sequence: Synthetic peptide
TNRGWTD

SEQ ID NO: 11918 - protein, 7 aa, Artificial Sequence
  Description of Artificial Sequence: Synthetic peptide
TNRNSEV

SEQ ID NO: 11919 - protein, 7 aa, Artificial Sequence
  Description of Artificial Sequence: Synthetic peptide
TNRPIDT

SEQ ID NO: 11920 - protein, 7 aa, Artificial Sequence
  Description of Artificial Sequence: Synthetic peptide
TNRQAST

SEQ ID NO: 11921 - protein, 7 aa, Artificial Sequence
  Description of Artificial Sequence: Synthetic peptide
TNRQDTR

SEQ ID NO: 11922 - protein, 7 aa, Artificial Sequence
  Description of Artificial Sequence: Synthetic peptide
TNSAISG

SEQ ID NO: 11923 - protein, 7 aa, Artificial Sequence
  Description of Artificial Sequence: Synthetic peptide
TNSGSDA

SEQ ID NO: 11924 - protein, 7 aa, Artificial Sequence
  Description of Artificial Sequence: Synthetic peptide
TNSHAML

SEQ ID NO: 11925 - protein, 7 aa, Artificial Sequence
  Description of Artificial Sequence: Synthetic peptide
TNSLPAL

SEQ ID NO: 11926 - protein, 7 aa, Artificial Sequence
  Description of Artificial Sequence: Synthetic peptide
TNSMGVP

SEQ ID NO: 11927 - protein, 7 aa, Artificial Sequence
  Description of Artificial Sequence: Synthetic peptide
TNSNHTY

SEQ ID NO: 11928 - protein, 7 aa, Artificial Sequence
  Description of Artificial Sequence: Synthetic peptide
TNSPSRS

SEQ ID NO: 11929 - protein, 7 aa, Artificial Sequence
  Description of Artificial Sequence: Synthetic peptide
TNTDVTK

SEQ ID NO: 11930 - protein, 7 aa, Artificial Sequence
  Description of Artificial Sequence: Synthetic peptide
TNTRTPY

SEQ ID NO: 11931 - protein, 7 aa, Artificial Sequence
  Description of Artificial Sequence: Synthetic peptide
TNTSASR

SEQ ID NO: 11932 - protein, 7 aa, Artificial Sequence
  Description of Artificial Sequence: Synthetic peptide
TNTSSTY

SEQ ID NO: 11933 - protein, 7 aa, Artificial Sequence
  Description of Artificial Sequence: Synthetic peptide
TNTTINL

SEQ ID NO: 11934 - protein, 7 aa, Artificial Sequence
  Description of Artificial Sequence: Synthetic peptide
TNTVRNF

SEQ ID NO: 11935 - protein, 7 aa, Artificial Sequence
  Description of Artificial Sequence: Synthetic peptide
TNVMKAG

SEQ ID NO: 11936 - protein, 7 aa, Artificial Sequence
  Description of Artificial Sequence: Synthetic peptide
TNYNVGS

SEQ ID NO: 11937 - protein, 7 aa, Artificial Sequence
  Description of Artificial Sequence: Synthetic peptide
TNYVLAP

SEQ ID NO: 11938 - protein, 7 aa, Artificial Sequence
  Description of Artificial Sequence: Synthetic peptide
TPAFKIQ

SEQ ID NO: 11939 - protein, 7 aa, Artificial Sequence
  Description of Artificial Sequence: Synthetic peptide
TPAIVPT

SEQ ID NO: 11940 - protein, 7 aa, Artificial Sequence
  Description of Artificial Sequence: Synthetic peptide
TPALNRP

SEQ ID NO: 11941 - protein, 7 aa, Artificial Sequence
  Description of Artificial Sequence: Synthetic peptide
TPANDPR

SEQ ID NO: 11942 - protein, 7 aa, Artificial Sequence
  Description of Artificial Sequence: Synthetic peptide
TPAPNRF

SEQ ID NO: 11943 - protein, 7 aa, Artificial Sequence
  Description of Artificial Sequence: Synthetic peptide
TPASPSD

SEQ ID NO: 11944 - protein, 7 aa, Artificial Sequence
  Description of Artificial Sequence: Synthetic peptide
TPATLPS

SEQ ID NO: 11945 - protein, 7 aa, Artificial Sequence
  Description of Artificial Sequence: Synthetic peptide
TPAVEKL

SEQ ID NO: 11946 - protein, 7 aa, Artificial Sequence
  Description of Artificial Sequence: Synthetic peptide
TPAYGRI

SEQ ID NO: 11947 - protein, 7 aa, Artificial Sequence
  Description of Artificial Sequence: Synthetic peptide
TPDMPFT

SEQ ID NO: 11948 - protein, 7 aa, Artificial Sequence
  Description of Artificial Sequence: Synthetic peptide
TPDQYEF

SEQ ID NO: 11949 - protein, 7 aa, Artificial Sequence
  Description of Artificial Sequence: Synthetic peptide
TPDSMTA

SEQ ID NO: 11950 - protein, 7 aa, Artificial Sequence
  Description of Artificial Sequence: Synthetic peptide
TPEMKSN

SEQ ID NO: 11951 - protein, 7 aa, Artificial Sequence
  Description of Artificial Sequence: Synthetic peptide
TPERAMS

SEQ ID NO: 11952 - protein, 7 aa, Artificial Sequence
  Description of Artificial Sequence: Synthetic peptide
TPETNRP

SEQ ID NO: 11953 - protein, 7 aa, Artificial Sequence
  Description of Artificial Sequence: Synthetic peptide
TPGGARP

SEQ ID NO: 11954 - protein, 7 aa, Artificial Sequence
  Description of Artificial Sequence: Synthetic peptide
TPGHMDS

SEQ ID NO: 11955 - protein, 7 aa, Artificial Sequence
  Description of Artificial Sequence: Synthetic peptide
TPGIPRC

SEQ ID NO: 11956 - protein, 7 aa, Artificial Sequence
  Description of Artificial Sequence: Synthetic peptide
TPGRQFP

SEQ ID NO: 11957 - protein, 7 aa, Artificial Sequence
  Description of Artificial Sequence: Synthetic peptide
TPGTING

SEQ ID NO: 11958 - protein, 7 aa, Artificial Sequence
  Description of Artificial Sequence: Synthetic peptide
TPHGVSP

SEQ ID NO: 11959 - protein, 7 aa, Artificial Sequence
  Description of Artificial Sequence: Synthetic peptide
TPHLDGH

SEQ ID NO: 11960 - protein, 7 aa, Artificial Sequence
  Description of Artificial Sequence: Synthetic peptide
TPHTGNQ

SEQ ID NO: 11961 - protein, 7 aa, Artificial Sequence
  Description of Artificial Sequence: Synthetic peptide
TPHTLEV

SEQ ID NO: 11962 - protein, 7 aa, Artificial Sequence
  Description of Artificial Sequence: Synthetic peptide
TPIGLPS

SEQ ID NO: 11963 - protein, 7 aa, Artificial Sequence
  Description of Artificial Sequence: Synthetic peptide
TPIRNIP

SEQ ID NO: 11964 - protein, 7 aa, Artificial Sequence
  Description of Artificial Sequence: Synthetic peptide
TPISMPS

SEQ ID NO: 11965 - protein, 7 aa, Artificial Sequence
  Description of Artificial Sequence: Synthetic peptide
TPIVHIN

SEQ ID NO: 11966 - protein, 7 aa, Artificial Sequence
  Description of Artificial Sequence: Synthetic peptide
TPIVHPR

SEQ ID NO: 11967 - protein, 7 aa, Artificial Sequence
  Description of Artificial Sequence: Synthetic peptide
TPIVKPD

SEQ ID NO: 11968 - protein, 7 aa, Artificial Sequence
  Description of Artificial Sequence: Synthetic peptide
TPKDAEV

SEQ ID NO: 11969 - protein, 7 aa, Artificial Sequence
  Description of Artificial Sequence: Synthetic peptide
TPKLSEQ

SEQ ID NO: 11970 - protein, 7 aa, Artificial Sequence
  Description of Artificial Sequence: Synthetic peptide
TPKNTLA

SEQ ID NO: 11971 - protein, 7 aa, Artificial Sequence
  Description of Artificial Sequence: Synthetic peptide
TPKSASG

SEQ ID NO: 11972 - protein, 7 aa, Artificial Sequence
  Description of Artificial Sequence: Synthetic peptide
TPLGGSS

SEQ ID NO: 11973 - protein, 7 aa, Artificial Sequence
  Description of Artificial Sequence: Synthetic peptide
TPLHSPG

SEQ ID NO: 11974 - protein, 7 aa, Artificial Sequence
  Description of Artificial Sequence: Synthetic peptide
TPLHSTT

SEQ ID NO: 11975 - protein, 7 aa, Artificial Sequence
  Description of Artificial Sequence: Synthetic peptide
TPLLCGK

SEQ ID NO: 11976 - protein, 7 aa, Artificial Sequence
  Description of Artificial Sequence: Synthetic peptide
TPLLSHS

SEQ ID NO: 11977 - protein, 7 aa, Artificial Sequence
  Description of Artificial Sequence: Synthetic peptide
TPLQTTV

SEQ ID NO: 11978 - protein, 7 aa, Artificial Sequence
  Description of Artificial Sequence: Synthetic peptide
TPLRSSN

SEQ ID NO: 11979 - protein, 7 aa, Artificial Sequence
  Description of Artificial Sequence: Synthetic peptide
TPLSAIQ

SEQ ID NO: 11980 - protein, 7 aa, Artificial Sequence
  Description of Artificial Sequence: Synthetic peptide
TPLTNIA

SEQ ID NO: 11981 - protein, 7 aa, Artificial Sequence
  Description of Artificial Sequence: Synthetic peptide
TPLTTAG

SEQ ID NO: 11982 - protein, 7 aa, Artificial Sequence
  Description of Artificial Sequence: Synthetic peptide
TPMAVES

SEQ ID NO: 11983 - protein, 7 aa, Artificial Sequence
  Description of Artificial Sequence: Synthetic peptide
TPMEMIP

SEQ ID NO: 11984 - protein, 7 aa, Artificial Sequence
  Description of Artificial Sequence: Synthetic peptide
TPMGSGW

SEQ ID NO: 11985 - protein, 7 aa, Artificial Sequence
  Description of Artificial Sequence: Synthetic peptide
TPMQVPA

SEQ ID NO: 11986 - protein, 7 aa, Artificial Sequence
  Description of Artificial Sequence: Synthetic peptide
TPNMLSA

SEQ ID NO: 11987 - protein, 7 aa, Artificial Sequence
  Description of Artificial Sequence: Synthetic peptide
TPNMVTG

SEQ ID NO: 11988 - protein, 7 aa, Artificial Sequence
  Description of Artificial Sequence: Synthetic peptide
TPNSRTV

SEQ ID NO: 11989 - protein, 7 aa, Artificial Sequence
  Description of Artificial Sequence: Synthetic peptide
TPNVTYR

SEQ ID NO: 11990 - protein, 7 aa, Artificial Sequence
  Description of Artificial Sequence: Synthetic peptide
TPNYYHE

SEQ ID NO: 11991 - protein, 7 aa, Artificial Sequence
  Description of Artificial Sequence: Synthetic peptide
TPPDGTR

SEQ ID NO: 11992 - protein, 7 aa, Artificial Sequence
  Description of Artificial Sequence: Synthetic peptide
TPPDQSR

SEQ ID NO: 11993 - protein, 7 aa, Artificial Sequence
  Description of Artificial Sequence: Synthetic peptide
TPPGEMR

SEQ ID NO: 11994 - protein, 7 aa, Artificial Sequence
  Description of Artificial Sequence: Synthetic peptide
TPPLKAS

SEQ ID NO: 11995 - protein, 7 aa, Artificial Sequence
  Description of Artificial Sequence: Synthetic peptide
TPPPPTW

SEQ ID NO: 11996 - protein, 7 aa, Artificial Sequence
  Description of Artificial Sequence: Synthetic peptide
TPPRGIP

SEQ ID NO: 11997 - protein, 7 aa, Artificial Sequence
  Description of Artificial Sequence: Synthetic peptide
TPPRTVV

SEQ ID NO: 11998 - protein, 7 aa, Artificial Sequence
  Description of Artificial Sequence: Synthetic peptide
TPPSSEW

SEQ ID NO: 11999 - protein, 7 aa, Artificial Sequence
  Description of Artificial Sequence: Synthetic peptide
TPPTATR

SEQ ID NO: 12000 - protein, 7 aa, Artificial Sequence
  Description of Artificial Sequence: Synthetic peptide
TPPTLME

SEQ ID NO: 12001 - protein, 7 aa, Artificial Sequence
  Description of Artificial Sequence: Synthetic peptide
TPPYVAQ

SEQ ID NO: 12002 - protein, 7 aa, Artificial Sequence
  Description of Artificial Sequence: Synthetic peptide
TPQGDIA

SEQ ID NO: 12003 - protein, 7 aa, Artificial Sequence
  Description of Artificial Sequence: Synthetic peptide
TPQHMGP

SEQ ID NO: 12004 - protein, 7 aa, Artificial Sequence
  Description of Artificial Sequence: Synthetic peptide
TPQHMRG

SEQ ID NO: 12005 - protein, 7 aa, Artificial Sequence
  Description of Artificial Sequence: Synthetic peptide
TPQMPFP

SEQ ID NO: 12006 - protein, 7 aa, Artificial Sequence
  Description of Artificial Sequence: Synthetic peptide
TPQNIMD

SEQ ID NO: 12007 - protein, 7 aa, Artificial Sequence
  Description of Artificial Sequence: Synthetic peptide
TPQRAGI

SEQ ID NO: 12008 - protein, 7 aa, Artificial Sequence
  Description of Artificial Sequence: Synthetic peptide
TPRAEHT

SEQ ID NO: 12009 - protein, 7 aa, Artificial Sequence
  Description of Artificial Sequence: Synthetic peptide
TPRGQSL

SEQ ID NO: 12010 - protein, 7 aa, Artificial Sequence
  Description of Artificial Sequence: Synthetic peptide
TPRGSLD

SEQ ID NO: 12011 - protein, 7 aa, Artificial Sequence
  Description of Artificial Sequence: Synthetic peptide
TPRLTVE

SEQ ID NO: 12012 - protein, 7 aa, Artificial Sequence
  Description of Artificial Sequence: Synthetic peptide
TPRPTYT

SEQ ID NO: 12013 - protein, 7 aa, Artificial Sequence
  Description of Artificial Sequence: Synthetic peptide
TPRTPSS

SEQ ID NO: 12014 - protein, 7 aa, Artificial Sequence
  Description of Artificial Sequence: Synthetic peptide
TPSAAMI

SEQ ID NO: 12015 - protein, 7 aa, Artificial Sequence
  Description of Artificial Sequence: Synthetic peptide
TPSASRL

SEQ ID NO: 12016 - protein, 7 aa, Artificial Sequence
  Description of Artificial Sequence: Synthetic peptide
TPSHLMS

SEQ ID NO: 12017 - protein, 7 aa, Artificial Sequence
  Description of Artificial Sequence: Synthetic peptide
TPSKGLV

SEQ ID NO: 12018 - protein, 7 aa, Artificial Sequence
  Description of Artificial Sequence: Synthetic peptide
TPSNDIS

SEQ ID NO: 12019 - protein, 7 aa, Artificial Sequence
  Description of Artificial Sequence: Synthetic peptide
TPSNQSS

SEQ ID NO: 12020 - protein, 7 aa, Artificial Sequence
  Description of Artificial Sequence: Synthetic peptide
TPSPGDA

SEQ ID NO: 12021 - protein, 7 aa, Artificial Sequence
  Description of Artificial Sequence: Synthetic peptide
TPSPPGV

SEQ ID NO: 12022 - protein, 7 aa, Artificial Sequence
  Description of Artificial Sequence: Synthetic peptide
TPSSAGI

SEQ ID NO: 12023 - protein, 7 aa, Artificial Sequence
  Description of Artificial Sequence: Synthetic peptide
TPSSGSR

SEQ ID NO: 12024 - protein, 7 aa, Artificial Sequence
  Description of Artificial Sequence: Synthetic peptide
TPSSMHP

SEQ ID NO: 12025 - protein, 7 aa, Artificial Sequence
  Description of Artificial Sequence: Synthetic peptide
TPSSTQL

SEQ ID NO: 12026 - protein, 7 aa, Artificial Sequence
  Description of Artificial Sequence: Synthetic peptide
TPSVDAC

SEQ ID NO: 12027 - protein, 7 aa, Artificial Sequence
  Description of Artificial Sequence: Synthetic peptide
TPSVTLL

SEQ ID NO: 12028 - protein, 7 aa, Artificial Sequence
  Description of Artificial Sequence: Synthetic peptide
TPSYVMA

SEQ ID NO: 12029 - protein, 7 aa, Artificial Sequence
  Description of Artificial Sequence: Synthetic peptide
TPTARNP

SEQ ID NO: 12030 - protein, 7 aa, Artificial Sequence
  Description of Artificial Sequence: Synthetic peptide
TPTETKY

SEQ ID NO: 12031 - protein, 7 aa, Artificial Sequence
  Description of Artificial Sequence: Synthetic peptide
TPTGRDF

SEQ ID NO: 12032 - protein, 7 aa, Artificial Sequence
  Description of Artificial Sequence: Synthetic peptide
TPTLKSN

SEQ ID NO: 12033 - protein, 7 aa, Artificial Sequence
  Description of Artificial Sequence: Synthetic peptide
TPTPAFR

SEQ ID NO: 12034 - protein, 7 aa, Artificial Sequence
  Description of Artificial Sequence: Synthetic peptide
TPTRPSA

SEQ ID NO: 12035 - protein, 7 aa, Artificial Sequence
  Description of Artificial Sequence: Synthetic peptide
TPTSSEW

SEQ ID NO: 12036 - protein, 7 aa, Artificial Sequence
  Description of Artificial Sequence: Synthetic peptide
TPTTSNE

SEQ ID NO: 12037 - protein, 7 aa, Artificial Sequence
  Description of Artificial Sequence: Synthetic peptide
TPTVPRD

SEQ ID NO: 12038 - protein, 7 aa, Artificial Sequence
  Description of Artificial Sequence: Synthetic peptide
TPVLNYG

SEQ ID NO: 12039 - protein, 7 aa, Artificial Sequence
  Description of Artificial Sequence: Synthetic peptide
TPVLSSL

SEQ ID NO: 12040 - protein, 7 aa, Artificial Sequence
  Description of Artificial Sequence: Synthetic peptide
TPVQAVA

SEQ ID NO: 12041 - protein, 7 aa, Artificial Sequence
  Description of Artificial Sequence: Synthetic peptide
TPVTINM

SEQ ID NO: 12042 - protein, 7 aa, Artificial Sequence
  Description of Artificial Sequence: Synthetic peptide
TPYPDTS

SEQ ID NO: 12043 - protein, 7 aa, Artificial Sequence
  Description of Artificial Sequence: Synthetic peptide
TQAAAYR

SEQ ID NO: 12044 - protein, 7 aa, Artificial Sequence
  Description of Artificial Sequence: Synthetic peptide
TQAGFSS

SEQ ID NO: 12045 - protein, 7 aa, Artificial Sequence
  Description of Artificial Sequence: Synthetic peptide
TQAHFAG

SEQ ID NO: 12046 - protein, 7 aa, Artificial Sequence
  Description of Artificial Sequence: Synthetic peptide
TQDSFRH

SEQ ID NO: 12047 - protein, 7 aa, Artificial Sequence
  Description of Artificial Sequence: Synthetic peptide
TQELPRS

SEQ ID NO: 12048 - protein, 7 aa, Artificial Sequence
  Description of Artificial Sequence: Synthetic peptide
TQENVER

SEQ ID NO: 12049 - protein, 7 aa, Artificial Sequence
  Description of Artificial Sequence: Synthetic peptide
TQEVERE

SEQ ID NO: 12050 - protein, 7 aa, Artificial Sequence
  Description of Artificial Sequence: Synthetic peptide
TQFPALG

SEQ ID NO: 12051 - protein, 7 aa, Artificial Sequence
  Description of Artificial Sequence: Synthetic peptide
TQFTHKA

SEQ ID NO: 12052 - protein, 7 aa, Artificial Sequence
  Description of Artificial Sequence: Synthetic peptide
TQGDVSS

SEQ ID NO: 12053 - protein, 7 aa, Artificial Sequence
  Description of Artificial Sequence: Synthetic peptide
TQGLDVE

SEQ ID NO: 12054 - protein, 7 aa, Artificial Sequence
  Description of Artificial Sequence: Synthetic peptide
TQGQANP

SEQ ID NO: 12055 - protein, 7 aa, Artificial Sequence
  Description of Artificial Sequence: Synthetic peptide
TQGRDYV

SEQ ID NO: 12056 - protein, 7 aa, Artificial Sequence
  Description of Artificial Sequence: Synthetic peptide
TQGTRAW

SEQ ID NO: 12057 - protein, 7 aa, Artificial Sequence
  Description of Artificial Sequence: Synthetic peptide
TQHAGGF

SEQ ID NO: 12058 - protein, 7 aa, Artificial Sequence
  Description of Artificial Sequence: Synthetic peptide
TQISSMS

SEQ ID NO: 12059 - protein, 7 aa, Artificial Sequence
  Description of Artificial Sequence: Synthetic peptide
TQITVDE

SEQ ID NO: 12060 - protein, 7 aa, Artificial Sequence
  Description of Artificial Sequence: Synthetic peptide
TQKLSMS

SEQ ID NO: 12061 - protein, 7 aa, Artificial Sequence
  Description of Artificial Sequence: Synthetic peptide
TQKVSDP

SEQ ID NO: 12062 - protein, 7 aa, Artificial Sequence
  Description of Artificial Sequence: Synthetic peptide
TQLNVSR

SEQ ID NO: 12063 - protein, 7 aa, Artificial Sequence
  Description of Artificial Sequence: Synthetic peptide
TQLSVNP

SEQ ID NO: 12064 - protein, 7 aa, Artificial Sequence
  Description of Artificial Sequence: Synthetic peptide
TQMTKAS

SEQ ID NO: 12065 - protein, 7 aa, Artificial Sequence
  Description of Artificial Sequence: Synthetic peptide
TQNEPHL

SEQ ID NO: 12066 - protein, 7 aa, Artificial Sequence
  Description of Artificial Sequence: Synthetic peptide
TQNLCDR

SEQ ID NO: 12067 - protein, 7 aa, Artificial Sequence
  Description of Artificial Sequence: Synthetic peptide
TQPPLSQ

SEQ ID NO: 12068 - protein, 7 aa, Artificial Sequence
  Description of Artificial Sequence: Synthetic peptide
TQPSAAA

SEQ ID NO: 12069 - protein, 7 aa, Artificial Sequence
  Description of Artificial Sequence: Synthetic peptide
TQPSLQA

SEQ ID NO: 12070 - protein, 7 aa, Artificial Sequence
  Description of Artificial Sequence: Synthetic peptide
TQPSRPL

SEQ ID NO: 12071 - protein, 7 aa, Artificial Sequence
  Description of Artificial Sequence: Synthetic peptide
TQPTGCE

SEQ ID NO: 12072 - protein, 7 aa, Artificial Sequence
  Description of Artificial Sequence: Synthetic peptide
TQPYGHA

SEQ ID NO: 12073 - protein, 7 aa, Artificial Sequence
  Description of Artificial Sequence: Synthetic peptide
TQQSTIS

SEQ ID NO: 12074 - protein, 7 aa, Artificial Sequence
  Description of Artificial Sequence: Synthetic peptide
TQQTPRG

SEQ ID NO: 12075 - protein, 7 aa, Artificial Sequence
  Description of Artificial Sequence: Synthetic peptide
TQQTSAY

SEQ ID NO: 12076 - protein, 7 aa, Artificial Sequence
  Description of Artificial Sequence: Synthetic peptide
TQRETNS

SEQ ID NO: 12077 - protein, 7 aa, Artificial Sequence
  Description of Artificial Sequence: Synthetic peptide
TQRGSAE

SEQ ID NO: 12078 - protein, 7 aa, Artificial Sequence
  Description of Artificial Sequence: Synthetic peptide
TQRPITV

SEQ ID NO: 12079 - protein, 7 aa, Artificial Sequence
  Description of Artificial Sequence: Synthetic peptide
TQRVARD

SEQ ID NO: 12080 - protein, 7 aa, Artificial Sequence
  Description of Artificial Sequence: Synthetic peptide
TQSAMSV

SEQ ID NO: 12081 - protein, 7 aa, Artificial Sequence
  Description of Artificial Sequence: Synthetic peptide
TQSETVL

SEQ ID NO: 12082 - protein, 7 aa, Artificial Sequence
  Description of Artificial Sequence: Synthetic peptide
TQSFGSA

SEQ ID NO: 12083 - protein, 7 aa, Artificial Sequence
  Description of Artificial Sequence: Synthetic peptide
TQSLASE

SEQ ID NO: 12084 - protein, 7 aa, Artificial Sequence
  Description of Artificial Sequence: Synthetic peptide
TQSLMDD

SEQ ID NO: 12085 - protein, 7 aa, Artificial Sequence
  Description of Artificial Sequence: Synthetic peptide
TQSRDMS

SEQ ID NO: 12086 - protein, 7 aa, Artificial Sequence
  Description of Artificial Sequence: Synthetic peptide
TQSSALS

SEQ ID NO: 12087 - protein, 7 aa, Artificial Sequence
  Description of Artificial Sequence: Synthetic peptide
TQSSQRI

SEQ ID NO: 12088 - protein, 7 aa, Artificial Sequence
  Description of Artificial Sequence: Synthetic peptide
TQSSTGP

SEQ ID NO: 12089 - protein, 7 aa, Artificial Sequence
  Description of Artificial Sequence: Synthetic peptide
TQSSTQP

SEQ ID NO: 12090 - protein, 7 aa, Artificial Sequence
  Description of Artificial Sequence: Synthetic peptide
TQTRPVG

SEQ ID NO: 12091 - protein, 7 aa, Artificial Sequence
  Description of Artificial Sequence: Synthetic peptide
TQTTIMP

SEQ ID NO: 12092 - protein, 7 aa, Artificial Sequence
  Description of Artificial Sequence: Synthetic peptide
TQTTSLY

SEQ ID NO: 12093 - protein, 7 aa, Artificial Sequence
  Description of Artificial Sequence: Synthetic peptide
TQTTSPV

SEQ ID NO: 12094 - protein, 7 aa, Artificial Sequence
  Description of Artificial Sequence: Synthetic peptide
TQVALRP

SEQ ID NO: 12095 - protein, 7 aa, Artificial Sequence
  Description of Artificial Sequence: Synthetic peptide
TQVATYQ

SEQ ID NO: 12096 - protein, 7 aa, Artificial Sequence
  Description of Artificial Sequence: Synthetic peptide
TQWLAQG

SEQ ID NO: 12097 - protein, 7 aa, Artificial Sequence
  Description of Artificial Sequence: Synthetic peptide
TRAALGT

SEQ ID NO: 12098 - protein, 7 aa, Artificial Sequence
  Description of Artificial Sequence: Synthetic peptide
TRALQAG

SEQ ID NO: 12099 - protein, 7 aa, Artificial Sequence
  Description of Artificial Sequence: Synthetic peptide
TRANATN

SEQ ID NO: 12100 - protein, 7 aa, Artificial Sequence
  Description of Artificial Sequence: Synthetic peptide
TRAPATM

SEQ ID NO: 12101 - protein, 7 aa, Artificial Sequence
  Description of Artificial Sequence: Synthetic peptide
TRASTAN

SEQ ID NO: 12102 - protein, 7 aa, Artificial Sequence
  Description of Artificial Sequence: Synthetic peptide
TRATGDA

SEQ ID NO: 12103 - protein, 7 aa, Artificial Sequence
  Description of Artificial Sequence: Synthetic peptide
TRAVDGR

SEQ ID NO: 12104 - protein, 7 aa, Artificial Sequence
  Description of Artificial Sequence: Synthetic peptide
TRAVGGQ

SEQ ID NO: 12105 - protein, 7 aa, Artificial Sequence
  Description of Artificial Sequence: Synthetic peptide
TRDEWAT

SEQ ID NO: 12106 - protein, 7 aa, Artificial Sequence
  Description of Artificial Sequence: Synthetic peptide
TRDRGPS

SEQ ID NO: 12107 - protein, 7 aa, Artificial Sequence
  Description of Artificial Sequence: Synthetic peptide
TRDTSYT

SEQ ID NO: 12108 - protein, 7 aa, Artificial Sequence
  Description of Artificial Sequence: Synthetic peptide
TREGFMV

SEQ ID NO: 12109 - protein, 7 aa, Artificial Sequence
  Description of Artificial Sequence: Synthetic peptide
TREMGPS

SEQ ID NO: 12110 - protein, 7 aa, Artificial Sequence
  Description of Artificial Sequence: Synthetic peptide
TRETVPA

SEQ ID NO: 12111 - protein, 7 aa, Artificial Sequence
  Description of Artificial Sequence: Synthetic peptide
TRFCSSP

SEQ ID NO: 12112 - protein, 7 aa, Artificial Sequence
  Description of Artificial Sequence: Synthetic peptide
TRFEKYD

SEQ ID NO: 12113 - protein, 7 aa, Artificial Sequence
  Description of Artificial Sequence: Synthetic peptide
TRFQVEV

SEQ ID NO: 12114 - protein, 7 aa, Artificial Sequence
  Description of Artificial Sequence: Synthetic peptide
TRGGDGV

SEQ ID NO: 12115 - protein, 7 aa, Artificial Sequence
  Description of Artificial Sequence: Synthetic peptide
TRGTDLS

SEQ ID NO: 12116 - protein, 7 aa, Artificial Sequence
  Description of Artificial Sequence: Synthetic peptide
TRGTSVS

SEQ ID NO: 12117 - protein, 7 aa, Artificial Sequence
  Description of Artificial Sequence: Synthetic peptide
TRGVINA

SEQ ID NO: 12118 - protein, 7 aa, Artificial Sequence
  Description of Artificial Sequence: Synthetic peptide
TRHDFLN

SEQ ID NO: 12119 - protein, 7 aa, Artificial Sequence
  Description of Artificial Sequence: Synthetic peptide
TRIGPSE

SEQ ID NO: 12120 - protein, 7 aa, Artificial Sequence
  Description of Artificial Sequence: Synthetic peptide
TRIHALP

SEQ ID NO: 12121 - protein, 7 aa, Artificial Sequence
  Description of Artificial Sequence: Synthetic peptide
TRISLSG

SEQ ID NO: 12122 - protein, 7 aa, Artificial Sequence
  Description of Artificial Sequence: Synthetic peptide
TRKLAVD

SEQ ID NO: 12123 - protein, 7 aa, Artificial Sequence
  Description of Artificial Sequence: Synthetic peptide
TRLNSID

SEQ ID NO: 12124 - protein, 7 aa, Artificial Sequence
  Description of Artificial Sequence: Synthetic peptide
TRLPTSL

SEQ ID NO: 12125 - protein, 7 aa, Artificial Sequence
  Description of Artificial Sequence: Synthetic peptide
TRLQTSA

SEQ ID NO: 12126 - protein, 7 aa, Artificial Sequence
  Description of Artificial Sequence: Synthetic peptide
TRLSENT

SEQ ID NO: 12127 - protein, 7 aa, Artificial Sequence
  Description of Artificial Sequence: Synthetic peptide
TRLSSSV

SEQ ID NO: 12128 - protein, 7 aa, Artificial Sequence
  Description of Artificial Sequence: Synthetic peptide
TRMASDG

SEQ ID NO: 12129 - protein, 7 aa, Artificial Sequence
  Description of Artificial Sequence: Synthetic peptide
TRMPSGV

SEQ ID NO: 12130 - protein, 7 aa, Artificial Sequence
  Description of Artificial Sequence: Synthetic peptide
TRMPVIS

SEQ ID NO: 12131 - protein, 7 aa, Artificial Sequence
  Description of Artificial Sequence: Synthetic peptide
TRNEYSF

SEQ ID NO: 12132 - protein, 7 aa, Artificial Sequence
  Description of Artificial Sequence: Synthetic peptide
TRNLDSV

SEQ ID NO: 12133 - protein, 7 aa, Artificial Sequence
  Description of Artificial Sequence: Synthetic peptide
TRNMSDT

SEQ ID NO: 12134 - protein, 7 aa, Artificial Sequence
  Description of Artificial Sequence: Synthetic peptide
TRNNHVT

SEQ ID NO: 12135 - protein, 7 aa, Artificial Sequence
  Description of Artificial Sequence: Synthetic peptide
TRNPEPK

SEQ ID NO: 12136 - protein, 7 aa, Artificial Sequence
  Description of Artificial Sequence: Synthetic peptide
TRNPEST

SEQ ID NO: 12137 - protein, 7 aa, Artificial Sequence
  Description of Artificial Sequence: Synthetic peptide
TRNPGTT

SEQ ID NO: 12138 - protein, 7 aa, Artificial Sequence
  Description of Artificial Sequence: Synthetic peptide
TRNQLRD

SEQ ID NO: 12139 - protein, 7 aa, Artificial Sequence
  Description of Artificial Sequence: Synthetic peptide
TRNSGMA

SEQ ID NO: 12140 - protein, 7 aa, Artificial Sequence
  Description of Artificial Sequence: Synthetic peptide
TRNTTEA

SEQ ID NO: 12141 - protein, 7 aa, Artificial Sequence
  Description of Artificial Sequence: Synthetic peptide
TRPAPMA

SEQ ID NO: 12142 - protein, 7 aa, Artificial Sequence
  Description of Artificial Sequence: Synthetic peptide
TRPDSLP

SEQ ID NO: 12143 - protein, 7 aa, Artificial Sequence
  Description of Artificial Sequence: Synthetic peptide
TRPGVDT

SEQ ID NO: 12144 - protein, 7 aa, Artificial Sequence
  Description of Artificial Sequence: Synthetic peptide
TRPLAIA

SEQ ID NO: 12145 - protein, 7 aa, Artificial Sequence
  Description of Artificial Sequence: Synthetic peptide
TRPLPSN

SEQ ID NO: 12146 - protein, 7 aa, Artificial Sequence
  Description of Artificial Sequence: Synthetic peptide
TRPLSSG

SEQ ID NO: 12147 - protein, 7 aa, Artificial Sequence
  Description of Artificial Sequence: Synthetic peptide
TRPLSSP

SEQ ID NO: 12148 - protein, 7 aa, Artificial Sequence
  Description of Artificial Sequence: Synthetic peptide
TRPMESA

SEQ ID NO: 12149 - protein, 7 aa, Artificial Sequence
  Description of Artificial Sequence: Synthetic peptide
TRPNLPY

SEQ ID NO: 12150 - protein, 7 aa, Artificial Sequence
  Description of Artificial Sequence: Synthetic peptide
TRPSEAQ

SEQ ID NO: 12151 - protein, 7 aa, Artificial Sequence
  Description of Artificial Sequence: Synthetic peptide
TRPSYEM

SEQ ID NO: 12152 - protein, 7 aa, Artificial Sequence
  Description of Artificial Sequence: Synthetic peptide
TRPTADD

SEQ ID NO: 12153 - protein, 7 aa, Artificial Sequence
  Description of Artificial Sequence: Synthetic peptide
TRPTPLL

SEQ ID NO: 12154 - protein, 7 aa, Artificial Sequence
  Description of Artificial Sequence: Synthetic peptide
TRPVGTS

SEQ ID NO: 12155 - protein, 7 aa, Artificial Sequence
  Description of Artificial Sequence: Synthetic peptide
TRPVYAD

SEQ ID NO: 12156 - protein, 7 aa, Artificial Sequence
  Description of Artificial Sequence: Synthetic peptide
TRQATSE

SEQ ID NO: 12157 - protein, 7 aa, Artificial Sequence
  Description of Artificial Sequence: Synthetic peptide
TRQLLTA

SEQ ID NO: 12158 - protein, 7 aa, Artificial Sequence
  Description of Artificial Sequence: Synthetic peptide
TRQYTNS

SEQ ID NO: 12159 - protein, 7 aa, Artificial Sequence
  Description of Artificial Sequence: Synthetic peptide
TRRPDIA

SEQ ID NO: 12160 - protein, 7 aa, Artificial Sequence
  Description of Artificial Sequence: Synthetic peptide
TRRVPSE

SEQ ID NO: 12161 - protein, 7 aa, Artificial Sequence
  Description of Artificial Sequence: Synthetic peptide
TRSALEL

SEQ ID NO: 12162 - protein, 7 aa, Artificial Sequence
  Description of Artificial Sequence: Synthetic peptide
TRSAVGS

SEQ ID NO: 12163 - protein, 7 aa, Artificial Sequence
  Description of Artificial Sequence: Synthetic peptide
TRSFESS

SEQ ID NO: 12164 - protein, 7 aa, Artificial Sequence
  Description of Artificial Sequence: Synthetic peptide
TRSGLIE

SEQ ID NO: 12165 - protein, 7 aa, Artificial Sequence
  Description of Artificial Sequence: Synthetic peptide
TRSGTDL

SEQ ID NO: 12166 - protein, 7 aa, Artificial Sequence
  Description of Artificial Sequence: Synthetic peptide
TRSMVTL

SEQ ID NO: 12167 - protein, 7 aa, Artificial Sequence
  Description of Artificial Sequence: Synthetic peptide
TRSNETV

SEQ ID NO: 12168 - protein, 7 aa, Artificial Sequence
  Description of Artificial Sequence: Synthetic peptide
TRSNGLT

SEQ ID NO: 12169 - protein, 7 aa, Artificial Sequence
  Description of Artificial Sequence: Synthetic peptide
TRSNNST

SEQ ID NO: 12170 - protein, 7 aa, Artificial Sequence
  Description of Artificial Sequence: Synthetic peptide
TRSPSSY

SEQ ID NO: 12171 - protein, 7 aa, Artificial Sequence
  Description of Artificial Sequence: Synthetic peptide
TRSQHES

SEQ ID NO: 12172 - protein, 7 aa, Artificial Sequence
  Description of Artificial Sequence: Synthetic peptide
TRSQSPM

SEQ ID NO: 12173 - protein, 7 aa, Artificial Sequence
  Description of Artificial Sequence: Synthetic peptide
TRSSLTP

SEQ ID NO: 12174 - protein, 7 aa, Artificial Sequence
  Description of Artificial Sequence: Synthetic peptide
TRSSSIL

SEQ ID NO: 12175 - protein, 7 aa, Artificial Sequence
  Description of Artificial Sequence: Synthetic peptide
TRSTASP

SEQ ID NO: 12176 - protein, 7 aa, Artificial Sequence
  Description of Artificial Sequence: Synthetic peptide
TRSTPIY

SEQ ID NO: 12177 - protein, 7 aa, Artificial Sequence
  Description of Artificial Sequence: Synthetic peptide
TRSVELL

SEQ ID NO: 12178 - protein, 7 aa, Artificial Sequence
  Description of Artificial Sequence: Synthetic peptide
TRTITPL

SEQ ID NO: 12179 - protein, 7 aa, Artificial Sequence
  Description of Artificial Sequence: Synthetic peptide
TRTLTSS

SEQ ID NO: 12180 - protein, 7 aa, Artificial Sequence
  Description of Artificial Sequence: Synthetic peptide
TRTMSMS

SEQ ID NO: 12181 - protein, 7 aa, Artificial Sequence
  Description of Artificial Sequence: Synthetic peptide
TRTNSII

SEQ ID NO: 12182 - protein, 7 aa, Artificial Sequence
  Description of Artificial Sequence: Synthetic peptide
TRTRLGD

SEQ ID NO: 12183 - protein, 7 aa, Artificial Sequence
  Description of Artificial Sequence: Synthetic peptide
TRTSDFP

SEQ ID NO: 12184 - protein, 7 aa, Artificial Sequence
  Description of Artificial Sequence: Synthetic peptide
TRTSHAL

SEQ ID NO: 12185 - protein, 7 aa, Artificial Sequence
  Description of Artificial Sequence: Synthetic peptide
TRTSQPS

SEQ ID NO: 12186 - protein, 7 aa, Artificial Sequence
  Description of Artificial Sequence: Synthetic peptide
TRTSTGS

SEQ ID NO: 12187 - protein, 7 aa, Artificial Sequence
  Description of Artificial Sequence: Synthetic peptide
TRTTGSM

SEQ ID NO: 12188 - protein, 7 aa, Artificial Sequence
  Description of Artificial Sequence: Synthetic peptide
TRTTLES

SEQ ID NO: 12189 - protein, 7 aa, Artificial Sequence
  Description of Artificial Sequence: Synthetic peptide
TRTTTVT

SEQ ID NO: 12190 - protein, 7 aa, Artificial Sequence
  Description of Artificial Sequence: Synthetic peptide
TRTVATY

SEQ ID NO: 12191 - protein, 7 aa, Artificial Sequence
  Description of Artificial Sequence: Synthetic peptide
TRTVQLG

SEQ ID NO: 12192 - protein, 7 aa, Artificial Sequence
  Description of Artificial Sequence: Synthetic peptide
TRVHGVS

SEQ ID NO: 12193 - protein, 7 aa, Artificial Sequence
  Description of Artificial Sequence: Synthetic peptide
TRVIMND

SEQ ID NO: 12194 - protein, 7 aa, Artificial Sequence
  Description of Artificial Sequence: Synthetic peptide
TRVSSIP

SEQ ID NO: 12195 - protein, 7 aa, Artificial Sequence
  Description of Artificial Sequence: Synthetic peptide
TRVTAPL

SEQ ID NO: 12196 - protein, 7 aa, Artificial Sequence
  Description of Artificial Sequence: Synthetic peptide
TRVYPAG

SEQ ID NO: 12197 - protein, 7 aa, Artificial Sequence
  Description of Artificial Sequence: Synthetic peptide
TSAGLNY

SEQ ID NO: 12198 - protein, 7 aa, Artificial Sequence
  Description of Artificial Sequence: Synthetic peptide
TSAGVYK

SEQ ID NO: 12199 - protein, 7 aa, Artificial Sequence
  Description of Artificial Sequence: Synthetic peptide
TSAKHTM

SEQ ID NO: 12200 - protein, 7 aa, Artificial Sequence
  Description of Artificial Sequence: Synthetic peptide
TSALIFE

SEQ ID NO: 12201 - protein, 7 aa, Artificial Sequence
  Description of Artificial Sequence: Synthetic peptide
TSAQSGP

SEQ ID NO: 12202 - protein, 7 aa, Artificial Sequence
  Description of Artificial Sequence: Synthetic peptide
TSARPFL

SEQ ID NO: 12203 - protein, 7 aa, Artificial Sequence
  Description of Artificial Sequence: Synthetic peptide
TSARPVG

SEQ ID NO: 12204 - protein, 7 aa, Artificial Sequence
  Description of Artificial Sequence: Synthetic peptide
TSASIPP

SEQ ID NO: 12205 - protein, 7 aa, Artificial Sequence
  Description of Artificial Sequence: Synthetic peptide
TSASSTT

SEQ ID NO: 12206 - protein, 7 aa, Artificial Sequence
  Description of Artificial Sequence: Synthetic peptide
TSDLPLN

SEQ ID NO: 12207 - protein, 7 aa, Artificial Sequence
  Description of Artificial Sequence: Synthetic peptide
TSDLRGR

SEQ ID NO: 12208 - protein, 7 aa, Artificial Sequence
  Description of Artificial Sequence: Synthetic peptide
TSDNMPH

SEQ ID NO: 12209 - protein, 7 aa, Artificial Sequence
  Description of Artificial Sequence: Synthetic peptide
TSDPCMS

SEQ ID NO: 12210 - protein, 7 aa, Artificial Sequence
  Description of Artificial Sequence: Synthetic peptide
TSDSAVT

SEQ ID NO: 12211 - protein, 7 aa, Artificial Sequence
  Description of Artificial Sequence: Synthetic peptide
TSDVLLT

SEQ ID NO: 12212 - protein, 7 aa, Artificial Sequence
  Description of Artificial Sequence: Synthetic peptide
TSESKAH

SEQ ID NO: 12213 - protein, 7 aa, Artificial Sequence
  Description of Artificial Sequence: Synthetic peptide
TSESWPS

SEQ ID NO: 12214 - protein, 7 aa, Artificial Sequence
  Description of Artificial Sequence: Synthetic peptide
TSFGPSS

SEQ ID NO: 12215 - protein, 7 aa, Artificial Sequence
  Description of Artificial Sequence: Synthetic peptide
TSFLKTS

SEQ ID NO: 12216 - protein, 7 aa, Artificial Sequence
  Description of Artificial Sequence: Synthetic peptide
TSFPSSA

SEQ ID NO: 12217 - protein, 7 aa, Artificial Sequence
  Description of Artificial Sequence: Synthetic peptide
TSFRLDE

SEQ ID NO: 12218 - protein, 7 aa, Artificial Sequence
  Description of Artificial Sequence: Synthetic peptide
TSFSQST

SEQ ID NO: 12219 - protein, 7 aa, Artificial Sequence
  Description of Artificial Sequence: Synthetic peptide
TSFSRGL

SEQ ID NO: 12220 - protein, 7 aa, Artificial Sequence
  Description of Artificial Sequence: Synthetic peptide
TSGHHIL

SEQ ID NO: 12221 - protein, 7 aa, Artificial Sequence
  Description of Artificial Sequence: Synthetic peptide
TSGLPEA

SEQ ID NO: 12222 - protein, 7 aa, Artificial Sequence
  Description of Artificial Sequence: Synthetic peptide
TSGLSEV

SEQ ID NO: 12223 - protein, 7 aa, Artificial Sequence
  Description of Artificial Sequence: Synthetic peptide
TSGLTLG

SEQ ID NO: 12224 - protein, 7 aa, Artificial Sequence
  Description of Artificial Sequence: Synthetic peptide
TSGPSHG

SEQ ID NO: 12225 - protein, 7 aa, Artificial Sequence
  Description of Artificial Sequence: Synthetic peptide
TSGRSPT

SEQ ID NO: 12226 - protein, 7 aa, Artificial Sequence
  Description of Artificial Sequence: Synthetic peptide
TSGSLRP

SEQ ID NO: 12227 - protein, 7 aa, Artificial Sequence
  Description of Artificial Sequence: Synthetic peptide
TSGSTSG

SEQ ID NO: 12228 - protein, 7 aa, Artificial Sequence
  Description of Artificial Sequence: Synthetic peptide
TSGTLST

SEQ ID NO: 12229 - protein, 7 aa, Artificial Sequence
  Description of Artificial Sequence: Synthetic peptide
TSGTSTD

SEQ ID NO: 12230 - protein, 7 aa, Artificial Sequence
  Description of Artificial Sequence: Synthetic peptide
TSHGPAT

SEQ ID NO: 12231 - protein, 7 aa, Artificial Sequence
  Description of Artificial Sequence: Synthetic peptide
TSHNGFS

SEQ ID NO: 12232 - protein, 7 aa, Artificial Sequence
  Description of Artificial Sequence: Synthetic peptide
TSHRPQP

SEQ ID NO: 12233 - protein, 7 aa, Artificial Sequence
  Description of Artificial Sequence: Synthetic peptide
TSIGPRI

SEQ ID NO: 12234 - protein, 7 aa, Artificial Sequence
  Description of Artificial Sequence: Synthetic peptide
TSINRLP

SEQ ID NO: 12235 - protein, 7 aa, Artificial Sequence
  Description of Artificial Sequence: Synthetic peptide
TSKDGHP

SEQ ID NO: 12236 - protein, 7 aa, Artificial Sequence
  Description of Artificial Sequence: Synthetic peptide
TSKLSCP

SEQ ID NO: 12237 - protein, 7 aa, Artificial Sequence
  Description of Artificial Sequence: Synthetic peptide
TSKTPSI

SEQ ID NO: 12238 - protein, 7 aa, Artificial Sequence
  Description of Artificial Sequence: Synthetic peptide
TSKVATI

SEQ ID NO: 12239 - protein, 7 aa, Artificial Sequence
  Description of Artificial Sequence: Synthetic peptide
TSKWLTP

SEQ ID NO: 12240 - protein, 7 aa, Artificial Sequence
  Description of Artificial Sequence: Synthetic peptide
TSLDARS

SEQ ID NO: 12241 - protein, 7 aa, Artificial Sequence
  Description of Artificial Sequence: Synthetic peptide
TSLGSVS

SEQ ID NO: 12242 - protein, 7 aa, Artificial Sequence
  Description of Artificial Sequence: Synthetic peptide
TSLHSGD

SEQ ID NO: 12243 - protein, 7 aa, Artificial Sequence
  Description of Artificial Sequence: Synthetic peptide
TSLNNRL

SEQ ID NO: 12244 - protein, 7 aa, Artificial Sequence
  Description of Artificial Sequence: Synthetic peptide
TSLRIMP

SEQ ID NO: 12245 - protein, 7 aa, Artificial Sequence
  Description of Artificial Sequence: Synthetic peptide
TSLRMNG

SEQ ID NO: 12246 - protein, 7 aa, Artificial Sequence
  Description of Artificial Sequence: Synthetic peptide
TSLRSDP

SEQ ID NO: 12247 - protein, 7 aa, Artificial Sequence
  Description of Artificial Sequence: Synthetic peptide
TSLSLAL

SEQ ID NO: 12248 - protein, 7 aa, Artificial Sequence
  Description of Artificial Sequence: Synthetic peptide
TSLTPVS

SEQ ID NO: 12249 - protein, 7 aa, Artificial Sequence
  Description of Artificial Sequence: Synthetic peptide
TSLVFAV

SEQ ID NO: 12250 - protein, 7 aa, Artificial Sequence
  Description of Artificial Sequence: Synthetic peptide
TSMNLPD

SEQ ID NO: 12251 - protein, 7 aa, Artificial Sequence
  Description of Artificial Sequence: Synthetic peptide
TSMRTEL

SEQ ID NO: 12252 - protein, 7 aa, Artificial Sequence
  Description of Artificial Sequence: Synthetic peptide
TSMSPRH

SEQ ID NO: 12253 - protein, 7 aa, Artificial Sequence
  Description of Artificial Sequence: Synthetic peptide
TSMSPTT

SEQ ID NO: 12254 - protein, 7 aa, Artificial Sequence
  Description of Artificial Sequence: Synthetic peptide
TSNAVDY

SEQ ID NO: 12255 - protein, 7 aa, Artificial Sequence
  Description of Artificial Sequence: Synthetic peptide
TSNGLKL

SEQ ID NO: 12256 - protein, 7 aa, Artificial Sequence
  Description of Artificial Sequence: Synthetic peptide
TSNPLPR

SEQ ID NO: 12257 - protein, 7 aa, Artificial Sequence
  Description of Artificial Sequence: Synthetic peptide
TSNQSAM

SEQ ID NO: 12258 - protein, 7 aa, Artificial Sequence
  Description of Artificial Sequence: Synthetic peptide
TSNTSMS

SEQ ID NO: 12259 - protein, 7 aa, Artificial Sequence
  Description of Artificial Sequence: Synthetic peptide
TSNVRPY

SEQ ID NO: 12260 - protein, 7 aa, Artificial Sequence
  Description of Artificial Sequence: Synthetic peptide
TSNYHSL

SEQ ID NO: 12261 - protein, 7 aa, Artificial Sequence
  Description of Artificial Sequence: Synthetic peptide
TSNYLQT

SEQ ID NO: 12262 - protein, 7 aa, Artificial Sequence
  Description of Artificial Sequence: Synthetic peptide
TSPARYS

SEQ ID NO: 12263 - protein, 7 aa, Artificial Sequence
  Description of Artificial Sequence: Synthetic peptide
TSPDFSL

SEQ ID NO: 12264 - protein, 7 aa, Artificial Sequence
  Description of Artificial Sequence: Synthetic peptide
TSPDPNK

SEQ ID NO: 12265 - protein, 7 aa, Artificial Sequence
  Description of Artificial Sequence: Synthetic peptide
TSPMHTI

SEQ ID NO: 12266 - protein, 7 aa, Artificial Sequence
  Description of Artificial Sequence: Synthetic peptide
TSPPLST

SEQ ID NO: 12267 - protein, 7 aa, Artificial Sequence
  Description of Artificial Sequence: Synthetic peptide
TSPTGPT

SEQ ID NO: 12268 - protein, 7 aa, Artificial Sequence
  Description of Artificial Sequence: Synthetic peptide
TSPVSHV

SEQ ID NO: 12269 - protein, 7 aa, Artificial Sequence
  Description of Artificial Sequence: Synthetic peptide
TSQAVHL

SEQ ID NO: 12270 - protein, 7 aa, Artificial Sequence
  Description of Artificial Sequence: Synthetic peptide
TSQHRQA

SEQ ID NO: 12271 - protein, 7 aa, Artificial Sequence
  Description of Artificial Sequence: Synthetic peptide
TSQINRQ

SEQ ID NO: 12272 - protein, 7 aa, Artificial Sequence
  Description of Artificial Sequence: Synthetic peptide
TSQQLPQ

SEQ ID NO: 12273 - protein, 7 aa, Artificial Sequence
  Description of Artificial Sequence: Synthetic peptide
TSQRPML

SEQ ID NO: 12274 - protein, 7 aa, Artificial Sequence
  Description of Artificial Sequence: Synthetic peptide
TSQRYQP

SEQ ID NO: 12275 - protein, 7 aa, Artificial Sequence
  Description of Artificial Sequence: Synthetic peptide
TSQVRTT

SEQ ID NO: 12276 - protein, 7 aa, Artificial Sequence
  Description of Artificial Sequence: Synthetic peptide
TSRAPVL

SEQ ID NO: 12277 - protein, 7 aa, Artificial Sequence
  Description of Artificial Sequence: Synthetic peptide
TSRDHVR

SEQ ID NO: 12278 - protein, 7 aa, Artificial Sequence
  Description of Artificial Sequence: Synthetic peptide
TSRETYT

SEQ ID NO: 12279 - protein, 7 aa, Artificial Sequence
  Description of Artificial Sequence: Synthetic peptide
TSRNEVA

SEQ ID NO: 12280 - protein, 7 aa, Artificial Sequence
  Description of Artificial Sequence: Synthetic peptide
TSRTITT

SEQ ID NO: 12281 - protein, 7 aa, Artificial Sequence
  Description of Artificial Sequence: Synthetic peptide
TSRTNDP

SEQ ID NO: 12282 - protein, 7 aa, Artificial Sequence
  Description of Artificial Sequence: Synthetic peptide
TSRVDTS

SEQ ID NO: 12283 - protein, 7 aa, Artificial Sequence
  Description of Artificial Sequence: Synthetic peptide
TSSASAV

SEQ ID NO: 12284 - protein, 7 aa, Artificial Sequence
  Description of Artificial Sequence: Synthetic peptide
TSSDGLG

SEQ ID NO: 12285 - protein, 7 aa, Artificial Sequence
  Description of Artificial Sequence: Synthetic peptide
TSSGFKV

SEQ ID NO: 12286 - protein, 7 aa, Artificial Sequence
  Description of Artificial Sequence: Synthetic peptide
TSSGLTG

SEQ ID NO: 12287 - protein, 7 aa, Artificial Sequence
  Description of Artificial Sequence: Synthetic peptide
TSSGTNQ

SEQ ID NO: 12288 - protein, 7 aa, Artificial Sequence
  Description of Artificial Sequence: Synthetic peptide
TSSHSDV

SEQ ID NO: 12289 - protein, 7 aa, Artificial Sequence
  Description of Artificial Sequence: Synthetic peptide
TSSHTEH

SEQ ID NO: 12290 - protein, 7 aa, Artificial Sequence
  Description of Artificial Sequence: Synthetic peptide
TSSLAHI

SEQ ID NO: 12291 - protein, 7 aa, Artificial Sequence
  Description of Artificial Sequence: Synthetic peptide
TSSLATH

SEQ ID NO: 12292 - protein, 7 aa, Artificial Sequence
  Description of Artificial Sequence: Synthetic peptide
TSSLRLD

SEQ ID NO: 12293 - protein, 7 aa, Artificial Sequence
  Description of Artificial Sequence: Synthetic peptide
TSSLRPP

SEQ ID NO: 12294 - protein, 7 aa, Artificial Sequence
  Description of Artificial Sequence: Synthetic peptide
TSSNYPS

SEQ ID NO: 12295 - protein, 7 aa, Artificial Sequence
  Description of Artificial Sequence: Synthetic peptide
TSSPALT

SEQ ID NO: 12296 - protein, 7 aa, Artificial Sequence
  Description of Artificial Sequence: Synthetic peptide
TSSPLQG

SEQ ID NO: 12297 - protein, 7 aa, Artificial Sequence
  Description of Artificial Sequence: Synthetic peptide
TSSQHST

SEQ ID NO: 12298 - protein, 7 aa, Artificial Sequence
  Description of Artificial Sequence: Synthetic peptide
TSSRAYS

SEQ ID NO: 12299 - protein, 7 aa, Artificial Sequence
  Description of Artificial Sequence: Synthetic peptide
TSSRLPF

SEQ ID NO: 12300 - protein, 7 aa, Artificial Sequence
  Description of Artificial Sequence: Synthetic peptide
TSSSARD

SEQ ID NO: 12301 - protein, 7 aa, Artificial Sequence
  Description of Artificial Sequence: Synthetic peptide
TSSSGLT

SEQ ID NO: 12302 - protein, 7 aa, Artificial Sequence
  Description of Artificial Sequence: Synthetic peptide
TSSSNSP

SEQ ID NO: 12303 - protein, 7 aa, Artificial Sequence
  Description of Artificial Sequence: Synthetic peptide
TSSTMSP

SEQ ID NO: 12304 - protein, 7 aa, Artificial Sequence
  Description of Artificial Sequence: Synthetic peptide
TSSTYEE

SEQ ID NO: 12305 - protein, 7 aa, Artificial Sequence
  Description of Artificial Sequence: Synthetic peptide
TSSVSSI

SEQ ID NO: 12306 - protein, 7 aa, Artificial Sequence
  Description of Artificial Sequence: Synthetic peptide
TSTAALP

SEQ ID NO: 12307 - protein, 7 aa, Artificial Sequence
  Description of Artificial Sequence: Synthetic peptide
TSTFEGM

SEQ ID NO: 12308 - protein, 7 aa, Artificial Sequence
  Description of Artificial Sequence: Synthetic peptide
TSTGHTV

SEQ ID NO: 12309 - protein, 7 aa, Artificial Sequence
  Description of Artificial Sequence: Synthetic peptide
TSTGVRM

SEQ ID NO: 12310 - protein, 7 aa, Artificial Sequence
  Description of Artificial Sequence: Synthetic peptide
TSTLLSL

SEQ ID NO: 12311 - protein, 7 aa, Artificial Sequence
  Description of Artificial Sequence: Synthetic peptide
TSTNSLA

SEQ ID NO: 12312 - protein, 7 aa, Artificial Sequence
  Description of Artificial Sequence: Synthetic peptide
TSTSMAI

SEQ ID NO: 12313 - protein, 7 aa, Artificial Sequence
  Description of Artificial Sequence: Synthetic peptide
TSTSNRN

SEQ ID NO: 12314 - protein, 7 aa, Artificial Sequence
  Description of Artificial Sequence: Synthetic peptide
TSTTMPL

SEQ ID NO: 12315 - protein, 7 aa, Artificial Sequence
  Description of Artificial Sequence: Synthetic peptide
TSTTVGN

SEQ ID NO: 12316 - protein, 7 aa, Artificial Sequence
  Description of Artificial Sequence: Synthetic peptide
TSTVSPK

SEQ ID NO: 12317 - protein, 7 aa, Artificial Sequence
  Description of Artificial Sequence: Synthetic peptide
TSVERSW

SEQ ID NO: 12318 - protein, 7 aa, Artificial Sequence
  Description of Artificial Sequence: Synthetic peptide
TSVGDHF

SEQ ID NO: 12319 - protein, 7 aa, Artificial Sequence
  Description of Artificial Sequence: Synthetic peptide
TSVGWQP

SEQ ID NO: 12320 - protein, 7 aa, Artificial Sequence
  Description of Artificial Sequence: Synthetic peptide
TSVKSAS

SEQ ID NO: 12321 - protein, 7 aa, Artificial Sequence
  Description of Artificial Sequence: Synthetic peptide
TSVQPPP

SEQ ID NO: 12322 - protein, 7 aa, Artificial Sequence
  Description of Artificial Sequence: Synthetic peptide
TSVSHAG

SEQ ID NO: 12323 - protein, 7 aa, Artificial Sequence
  Description of Artificial Sequence: Synthetic peptide
TSVTMKV

SEQ ID NO: 12324 - protein, 7 aa, Artificial Sequence
  Description of Artificial Sequence: Synthetic peptide
TSVTTHY

SEQ ID NO: 12325 - protein, 7 aa, Artificial Sequence
  Description of Artificial Sequence: Synthetic peptide
TSWQGAV

SEQ ID NO: 12326 - protein, 7 aa, Artificial Sequence
  Description of Artificial Sequence: Synthetic peptide
TSYGPKV

SEQ ID NO: 12327 - protein, 7 aa, Artificial Sequence
  Description of Artificial Sequence: Synthetic peptide
TSYQRIE

SEQ ID NO: 12328 - protein, 7 aa, Artificial Sequence
  Description of Artificial Sequence: Synthetic peptide
TTAAKVG

SEQ ID NO: 12329 - protein, 7 aa, Artificial Sequence
  Description of Artificial Sequence: Synthetic peptide
TTAEYTR

SEQ ID NO: 12330 - protein, 7 aa, Artificial Sequence
  Description of Artificial Sequence: Synthetic peptide
TTALPQF

SEQ ID NO: 12331 - protein, 7 aa, Artificial Sequence
  Description of Artificial Sequence: Synthetic peptide
TTAMRGP

SEQ ID NO: 12332 - protein, 7 aa, Artificial Sequence
  Description of Artificial Sequence: Synthetic peptide
TTARQFQ

SEQ ID NO: 12333 - protein, 7 aa, Artificial Sequence
  Description of Artificial Sequence: Synthetic peptide
TTAVSSK

SEQ ID NO: 12334 - protein, 7 aa, Artificial Sequence
  Description of Artificial Sequence: Synthetic peptide
TTDAARP

SEQ ID NO: 12335 - protein, 7 aa, Artificial Sequence
  Description of Artificial Sequence: Synthetic peptide
TTDCCAA

SEQ ID NO: 12336 - protein, 7 aa, Artificial Sequence
  Description of Artificial Sequence: Synthetic peptide
TTDVYVR

SEQ ID NO: 12337 - protein, 7 aa, Artificial Sequence
  Description of Artificial Sequence: Synthetic peptide
TTDYPLS

SEQ ID NO: 12338 - protein, 7 aa, Artificial Sequence
  Description of Artificial Sequence: Synthetic peptide
TTEHGYV

SEQ ID NO: 12339 - protein, 7 aa, Artificial Sequence
  Description of Artificial Sequence: Synthetic peptide
TTFLQNG

SEQ ID NO: 12340 - protein, 7 aa, Artificial Sequence
  Description of Artificial Sequence: Synthetic peptide
TTGAIDI

SEQ ID NO: 12341 - protein, 7 aa, Artificial Sequence
  Description of Artificial Sequence: Synthetic peptide
TTGHLSV

SEQ ID NO: 12342 - protein, 7 aa, Artificial Sequence
  Description of Artificial Sequence: Synthetic peptide
TTGHTLI

SEQ ID NO: 12343 - protein, 7 aa, Artificial Sequence
  Description of Artificial Sequence: Synthetic peptide
TTGLSLG

SEQ ID NO: 12344 - protein, 7 aa, Artificial Sequence
  Description of Artificial Sequence: Synthetic peptide
TTGNSLP

SEQ ID NO: 12345 - protein, 7 aa, Artificial Sequence
  Description of Artificial Sequence: Synthetic peptide
TTGNTLS

SEQ ID NO: 12346 - protein, 7 aa, Artificial Sequence
  Description of Artificial Sequence: Synthetic peptide
TTGSIPH

SEQ ID NO: 12347 - protein, 7 aa, Artificial Sequence
  Description of Artificial Sequence: Synthetic peptide
TTHAPLS

SEQ ID NO: 12348 - protein, 7 aa, Artificial Sequence
  Description of Artificial Sequence: Synthetic peptide
TTHASCT

SEQ ID NO: 12349 - protein, 7 aa, Artificial Sequence
  Description of Artificial Sequence: Synthetic peptide
TTHDVYR

SEQ ID NO: 12350 - protein, 7 aa, Artificial Sequence
  Description of Artificial Sequence: Synthetic peptide
TTHSTAA

SEQ ID NO: 12351 - protein, 7 aa, Artificial Sequence
  Description of Artificial Sequence: Synthetic peptide
TTHTQYR

SEQ ID NO: 12352 - protein, 7 aa, Artificial Sequence
  Description of Artificial Sequence: Synthetic peptide
TTILGPM

SEQ ID NO: 12353 - protein, 7 aa, Artificial Sequence
  Description of Artificial Sequence: Synthetic peptide
TTKIGDD

SEQ ID NO: 12354 - protein, 7 aa, Artificial Sequence
  Description of Artificial Sequence: Synthetic peptide
TTKSADT

SEQ ID NO: 12355 - protein, 7 aa, Artificial Sequence
  Description of Artificial Sequence: Synthetic peptide
TTKVGSP

SEQ ID NO: 12356 - protein, 7 aa, Artificial Sequence
  Description of Artificial Sequence: Synthetic peptide
TTLDPSL

SEQ ID NO: 12357 - protein, 7 aa, Artificial Sequence
  Description of Artificial Sequence: Synthetic peptide
TTLGPSR

SEQ ID NO: 12358 - protein, 7 aa, Artificial Sequence
  Description of Artificial Sequence: Synthetic peptide
TTLGSAV

SEQ ID NO: 12359 - protein, 7 aa, Artificial Sequence
  Description of Artificial Sequence: Synthetic peptide
TTLSGGT

SEQ ID NO: 12360 - protein, 7 aa, Artificial Sequence
  Description of Artificial Sequence: Synthetic peptide
TTLSPNK

SEQ ID NO: 12361 - protein, 7 aa, Artificial Sequence
  Description of Artificial Sequence: Synthetic peptide
TTLSPRG

SEQ ID NO: 12362 - protein, 7 aa, Artificial Sequence
  Description of Artificial Sequence: Synthetic peptide
TTLSSLA

SEQ ID NO: 12363 - protein, 7 aa, Artificial Sequence
  Description of Artificial Sequence: Synthetic peptide
TTMALGA

SEQ ID NO: 12364 - protein, 7 aa, Artificial Sequence
  Description of Artificial Sequence: Synthetic peptide
TTMKPEA

SEQ ID NO: 12365 - protein, 7 aa, Artificial Sequence
  Description of Artificial Sequence: Synthetic peptide
TTMTLVS

SEQ ID NO: 12366 - protein, 7 aa, Artificial Sequence
  Description of Artificial Sequence: Synthetic peptide
TTMYTTT

SEQ ID NO: 12367 - protein, 7 aa, Artificial Sequence
  Description of Artificial Sequence: Synthetic peptide
TTNAQGG

SEQ ID NO: 12368 - protein, 7 aa, Artificial Sequence
  Description of Artificial Sequence: Synthetic peptide
TTNIVRQ

SEQ ID NO: 12369 - protein, 7 aa, Artificial Sequence
  Description of Artificial Sequence: Synthetic peptide
TTNLAMM

SEQ ID NO: 12370 - protein, 7 aa, Artificial Sequence
  Description of Artificial Sequence: Synthetic peptide
TTPGYAP

SEQ ID NO: 12371 - protein, 7 aa, Artificial Sequence
  Description of Artificial Sequence: Synthetic peptide
TTPIRDG

SEQ ID NO: 12372 - protein, 7 aa, Artificial Sequence
  Description of Artificial Sequence: Synthetic peptide
TTPLTKG

SEQ ID NO: 12373 - protein, 7 aa, Artificial Sequence
  Description of Artificial Sequence: Synthetic peptide
TTPPMHL

SEQ ID NO: 12374 - protein, 7 aa, Artificial Sequence
  Description of Artificial Sequence: Synthetic peptide
TTPQLNL

SEQ ID NO: 12375 - protein, 7 aa, Artificial Sequence
  Description of Artificial Sequence: Synthetic peptide
TTPRLLS

SEQ ID NO: 12376 - protein, 7 aa, Artificial Sequence
  Description of Artificial Sequence: Synthetic peptide
TTPTDGA

SEQ ID NO: 12377 - protein, 7 aa, Artificial Sequence
  Description of Artificial Sequence: Synthetic peptide
TTPTNRP

SEQ ID NO: 12378 - protein, 7 aa, Artificial Sequence
  Description of Artificial Sequence: Synthetic peptide
TTQEHLP

SEQ ID NO: 12379 - protein, 7 aa, Artificial Sequence
  Description of Artificial Sequence: Synthetic peptide
TTQNVNQ

SEQ ID NO: 12380 - protein, 7 aa, Artificial Sequence
  Description of Artificial Sequence: Synthetic peptide
TTQSTYE

SEQ ID NO: 12381 - protein, 7 aa, Artificial Sequence
  Description of Artificial Sequence: Synthetic peptide
TTQTAET

SEQ ID NO: 12382 - protein, 7 aa, Artificial Sequence
  Description of Artificial Sequence: Synthetic peptide
TTRDPPA

SEQ ID NO: 12383 - protein, 7 aa, Artificial Sequence
  Description of Artificial Sequence: Synthetic peptide
TTRGDEP

SEQ ID NO: 12384 - protein, 7 aa, Artificial Sequence
  Description of Artificial Sequence: Synthetic peptide
TTRIAAE

SEQ ID NO: 12385 - protein, 7 aa, Artificial Sequence
  Description of Artificial Sequence: Synthetic peptide
TTRLALA

SEQ ID NO: 12386 - protein, 7 aa, Artificial Sequence
  Description of Artificial Sequence: Synthetic peptide
TTRLVSP

SEQ ID NO: 12387 - protein, 7 aa, Artificial Sequence
  Description of Artificial Sequence: Synthetic peptide
TTRPPHY

SEQ ID NO: 12388 - protein, 7 aa, Artificial Sequence
  Description of Artificial Sequence: Synthetic peptide
TTRPSEP

SEQ ID NO: 12389 - protein, 7 aa, Artificial Sequence
  Description of Artificial Sequence: Synthetic peptide
TTRQSDN

SEQ ID NO: 12390 - protein, 7 aa, Artificial Sequence
  Description of Artificial Sequence: Synthetic peptide
TTRSAAS

SEQ ID NO: 12391 - protein, 7 aa, Artificial Sequence
  Description of Artificial Sequence: Synthetic peptide
TTRSESG

SEQ ID NO: 12392 - protein, 7 aa, Artificial Sequence
  Description of Artificial Sequence: Synthetic peptide
TTRSVLQ

SEQ ID NO: 12393 - protein, 7 aa, Artificial Sequence
  Description of Artificial Sequence: Synthetic peptide
TTRVEMA

SEQ ID NO: 12394 - protein, 7 aa, Artificial Sequence
  Description of Artificial Sequence: Synthetic peptide
TTRVGLV

SEQ ID NO: 12395 - protein, 7 aa, Artificial Sequence
  Description of Artificial Sequence: Synthetic peptide
TTSADHS

SEQ ID NO: 12396 - protein, 7 aa, Artificial Sequence
  Description of Artificial Sequence: Synthetic peptide
TTSAREL

SEQ ID NO: 12397 - protein, 7 aa, Artificial Sequence
  Description of Artificial Sequence: Synthetic peptide
TTSGDRL

SEQ ID NO: 12398 - protein, 7 aa, Artificial Sequence
  Description of Artificial Sequence: Synthetic peptide
TTSGFSP

SEQ ID NO: 12399 - protein, 7 aa, Artificial Sequence
  Description of Artificial Sequence: Synthetic peptide
TTSHAPS

SEQ ID NO: 12400 - protein, 7 aa, Artificial Sequence
  Description of Artificial Sequence: Synthetic peptide
TTSHPLM

SEQ ID NO: 12401 - protein, 7 aa, Artificial Sequence
  Description of Artificial Sequence: Synthetic peptide
TTSIGSA

SEQ ID NO: 12402 - protein, 7 aa, Artificial Sequence
  Description of Artificial Sequence: Synthetic peptide
TTSLGRV

SEQ ID NO: 12403 - protein, 7 aa, Artificial Sequence
  Description of Artificial Sequence: Synthetic peptide
TTSLMEA

SEQ ID NO: 12404 - protein, 7 aa, Artificial Sequence
  Description of Artificial Sequence: Synthetic peptide
TTSNVHT

SEQ ID NO: 12405 - protein, 7 aa, Artificial Sequence
  Description of Artificial Sequence: Synthetic peptide
TTSPLRT

SEQ ID NO: 12406 - protein, 7 aa, Artificial Sequence
  Description of Artificial Sequence: Synthetic peptide
TTSPQRS

SEQ ID NO: 12407 - protein, 7 aa, Artificial Sequence
  Description of Artificial Sequence: Synthetic peptide
TTSRLSA

SEQ ID NO: 12408 - protein, 7 aa, Artificial Sequence
  Description of Artificial Sequence: Synthetic peptide
TTSSSPS

SEQ ID NO: 12409 - protein, 7 aa, Artificial Sequence
  Description of Artificial Sequence: Synthetic peptide
TTTAMIV

SEQ ID NO: 12410 - protein, 7 aa, Artificial Sequence
  Description of Artificial Sequence: Synthetic peptide
TTTASFE

SEQ ID NO: 12411 - protein, 7 aa, Artificial Sequence
  Description of Artificial Sequence: Synthetic peptide
TTTDKPL

SEQ ID NO: 12412 - protein, 7 aa, Artificial Sequence
  Description of Artificial Sequence: Synthetic peptide
TTTDVAR

SEQ ID NO: 12413 - protein, 7 aa, Artificial Sequence
  Description of Artificial Sequence: Synthetic peptide
TTTERTR

SEQ ID NO: 12414 - protein, 7 aa, Artificial Sequence
  Description of Artificial Sequence: Synthetic peptide
TTTKHVY

SEQ ID NO: 12415 - protein, 7 aa, Artificial Sequence
  Description of Artificial Sequence: Synthetic peptide
TTTPITN

SEQ ID NO: 12416 - protein, 7 aa, Artificial Sequence
  Description of Artificial Sequence: Synthetic peptide
TTTRVNA

SEQ ID NO: 12417 - protein, 7 aa, Artificial Sequence
  Description of Artificial Sequence: Synthetic peptide
TTTVPIF

SEQ ID NO: 12418 - protein, 7 aa, Artificial Sequence
  Description of Artificial Sequence: Synthetic peptide
TTTVTYL

SEQ ID NO: 12419 - protein, 7 aa, Artificial Sequence
  Description of Artificial Sequence: Synthetic peptide
TTVDVVH

SEQ ID NO: 12420 - protein, 7 aa, Artificial Sequence
  Description of Artificial Sequence: Synthetic peptide
TTVPDSV

SEQ ID NO: 12421 - protein, 7 aa, Artificial Sequence
  Description of Artificial Sequence: Synthetic peptide
TTVPNTS

SEQ ID NO: 12422 - protein, 7 aa, Artificial Sequence
  Description of Artificial Sequence: Synthetic peptide
TTVRVHP

SEQ ID NO: 12423 - protein, 7 aa, Artificial Sequence
  Description of Artificial Sequence: Synthetic peptide
TTVVSDL

SEQ ID NO: 12424 - protein, 7 aa, Artificial Sequence
  Description of Artificial Sequence: Synthetic peptide
TTVVYTA

SEQ ID NO: 12425 - protein, 7 aa, Artificial Sequence
  Description of Artificial Sequence: Synthetic peptide
TTYPIHA

SEQ ID NO: 12426 - protein, 7 aa, Artificial Sequence
  Description of Artificial Sequence: Synthetic peptide
TTYSNSA

SEQ ID NO: 12427 - protein, 7 aa, Artificial Sequence
  Description of Artificial Sequence: Synthetic peptide
TVAGNIA

SEQ ID NO: 12428 - protein, 7 aa, Artificial Sequence
  Description of Artificial Sequence: Synthetic peptide
TVAHRIP

SEQ ID NO: 12429 - protein, 7 aa, Artificial Sequence
  Description of Artificial Sequence: Synthetic peptide
TVAIHEP

SEQ ID NO: 12430 - protein, 7 aa, Artificial Sequence
  Description of Artificial Sequence: Synthetic peptide
TVAPDLN

SEQ ID NO: 12431 - protein, 7 aa, Artificial Sequence
  Description of Artificial Sequence: Synthetic peptide
TVCVSRT

SEQ ID NO: 12432 - protein, 7 aa, Artificial Sequence
  Description of Artificial Sequence: Synthetic peptide
TVDEWAG

SEQ ID NO: 12433 - protein, 7 aa, Artificial Sequence
  Description of Artificial Sequence: Synthetic peptide
TVDGSHQ

SEQ ID NO: 12434 - protein, 7 aa, Artificial Sequence
  Description of Artificial Sequence: Synthetic peptide
TVDSSGV

SEQ ID NO: 12435 - protein, 7 aa, Artificial Sequence
  Description of Artificial Sequence: Synthetic peptide
TVDTKHS

SEQ ID NO: 12436 - protein, 7 aa, Artificial Sequence
  Description of Artificial Sequence: Synthetic peptide
TVEGDRL

SEQ ID NO: 12437 - protein, 7 aa, Artificial Sequence
  Description of Artificial Sequence: Synthetic peptide
TVFSESE

SEQ ID NO: 12438 - protein, 7 aa, Artificial Sequence
  Description of Artificial Sequence: Synthetic peptide
TVGHLNV

SEQ ID NO: 12439 - protein, 7 aa, Artificial Sequence
  Description of Artificial Sequence: Synthetic peptide
TVGNYRD

SEQ ID NO: 12440 - protein, 7 aa, Artificial Sequence
  Description of Artificial Sequence: Synthetic peptide
TVGSLSD

SEQ ID NO: 12441 - protein, 7 aa, Artificial Sequence
  Description of Artificial Sequence: Synthetic peptide
TVGTLML

SEQ ID NO: 12442 - protein, 7 aa, Artificial Sequence
  Description of Artificial Sequence: Synthetic peptide
TVGTPPT

SEQ ID NO: 12443 - protein, 7 aa, Artificial Sequence
  Description of Artificial Sequence: Synthetic peptide
TVGTRAM

SEQ ID NO: 12444 - protein, 7 aa, Artificial Sequence
  Description of Artificial Sequence: Synthetic peptide
TVGVEGS

SEQ ID NO: 12445 - protein, 7 aa, Artificial Sequence
  Description of Artificial Sequence: Synthetic peptide
TVGVNAS

SEQ ID NO: 12446 - protein, 7 aa, Artificial Sequence
  Description of Artificial Sequence: Synthetic peptide
TVHFSQA

SEQ ID NO: 12447 - protein, 7 aa, Artificial Sequence
  Description of Artificial Sequence: Synthetic peptide
TVHILTP

SEQ ID NO: 12448 - protein, 7 aa, Artificial Sequence
  Description of Artificial Sequence: Synthetic peptide
TVHNVQF

SEQ ID NO: 12449 - protein, 7 aa, Artificial Sequence
  Description of Artificial Sequence: Synthetic peptide
TVHRQVD

SEQ ID NO: 12450 - protein, 7 aa, Artificial Sequence
  Description of Artificial Sequence: Synthetic peptide
TVHTFRE

SEQ ID NO: 12451 - protein, 7 aa, Artificial Sequence
  Description of Artificial Sequence: Synthetic peptide
TVKISEG

SEQ ID NO: 12452 - protein, 7 aa, Artificial Sequence
  Description of Artificial Sequence: Synthetic peptide
TVKQSQV

SEQ ID NO: 12453 - protein, 7 aa, Artificial Sequence
  Description of Artificial Sequence: Synthetic peptide
TVKVSKP

SEQ ID NO: 12454 - protein, 7 aa, Artificial Sequence
  Description of Artificial Sequence: Synthetic peptide
TVLAARG

SEQ ID NO: 12455 - protein, 7 aa, Artificial Sequence
  Description of Artificial Sequence: Synthetic peptide
TVLASPV

SEQ ID NO: 12456 - protein, 7 aa, Artificial Sequence
  Description of Artificial Sequence: Synthetic peptide
TVLESQS

SEQ ID NO: 12457 - protein, 7 aa, Artificial Sequence
  Description of Artificial Sequence: Synthetic peptide
TVLKTSI

SEQ ID NO: 12458 - protein, 7 aa, Artificial Sequence
  Description of Artificial Sequence: Synthetic peptide
TVMRTLA

SEQ ID NO: 12459 - protein, 7 aa, Artificial Sequence
  Description of Artificial Sequence: Synthetic peptide
TVMRVTG

SEQ ID NO: 12460 - protein, 7 aa, Artificial Sequence
  Description of Artificial Sequence: Synthetic peptide
TVNGLRA

SEQ ID NO: 12461 - protein, 7 aa, Artificial Sequence
  Description of Artificial Sequence: Synthetic peptide
TVNHQSL

SEQ ID NO: 12462 - protein, 7 aa, Artificial Sequence
  Description of Artificial Sequence: Synthetic peptide
TVNIETN

SEQ ID NO: 12463 - protein, 7 aa, Artificial Sequence
  Description of Artificial Sequence: Synthetic peptide
TVNKVCL

SEQ ID NO: 12464 - protein, 7 aa, Artificial Sequence
  Description of Artificial Sequence: Synthetic peptide
TVNYNDI

SEQ ID NO: 12465 - protein, 7 aa, Artificial Sequence
  Description of Artificial Sequence: Synthetic peptide
TVPAGHE

SEQ ID NO: 12466 - protein, 7 aa, Artificial Sequence
  Description of Artificial Sequence: Synthetic peptide
TVPARTM

SEQ ID NO: 12467 - protein, 7 aa, Artificial Sequence
  Description of Artificial Sequence: Synthetic peptide
TVPQSVL

SEQ ID NO: 12468 - protein, 7 aa, Artificial Sequence
  Description of Artificial Sequence: Synthetic peptide
TVPTAVA

SEQ ID NO: 12469 - protein, 7 aa, Artificial Sequence
  Description of Artificial Sequence: Synthetic peptide
TVPVAIV

SEQ ID NO: 12470 - protein, 7 aa, Artificial Sequence
  Description of Artificial Sequence: Synthetic peptide
TVQDTFR

SEQ ID NO: 12471 - protein, 7 aa, Artificial Sequence
  Description of Artificial Sequence: Synthetic peptide
TVQGIDR

SEQ ID NO: 12472 - protein, 7 aa, Artificial Sequence
  Description of Artificial Sequence: Synthetic peptide
TVQQQAN

SEQ ID NO: 12473 - protein, 7 aa, Artificial Sequence
  Description of Artificial Sequence: Synthetic peptide
TVQSPLL

SEQ ID NO: 12474 - protein, 7 aa, Artificial Sequence
  Description of Artificial Sequence: Synthetic peptide
TVQSSAT

SEQ ID NO: 12475 - protein, 7 aa, Artificial Sequence
  Description of Artificial Sequence: Synthetic peptide
TVQTTST

SEQ ID NO: 12476 - protein, 7 aa, Artificial Sequence
  Description of Artificial Sequence: Synthetic peptide
TVQVRLP

SEQ ID NO: 12477 - protein, 7 aa, Artificial Sequence
  Description of Artificial Sequence: Synthetic peptide
TVRGISL

SEQ ID NO: 12478 - protein, 7 aa, Artificial Sequence
  Description of Artificial Sequence: Synthetic peptide
TVRGLDT

SEQ ID NO: 12479 - protein, 7 aa, Artificial Sequence
  Description of Artificial Sequence: Synthetic peptide
TVRGSPL

SEQ ID NO: 12480 - protein, 7 aa, Artificial Sequence
  Description of Artificial Sequence: Synthetic peptide
TVRLDGV

SEQ ID NO: 12481 - protein, 7 aa, Artificial Sequence
  Description of Artificial Sequence: Synthetic peptide
TVRPVSS

SEQ ID NO: 12482 - protein, 7 aa, Artificial Sequence
  Description of Artificial Sequence: Synthetic peptide
TVRSPSI

SEQ ID NO: 12483 - protein, 7 aa, Artificial Sequence
  Description of Artificial Sequence: Synthetic peptide
TVSAQPR

SEQ ID NO: 12484 - protein, 7 aa, Artificial Sequence
  Description of Artificial Sequence: Synthetic peptide
TVSDTSF

SEQ ID NO: 12485 - protein, 7 aa, Artificial Sequence
  Description of Artificial Sequence: Synthetic peptide
TVSGKHT

SEQ ID NO: 12486 - protein, 7 aa, Artificial Sequence
  Description of Artificial Sequence: Synthetic peptide
TVSHGQR

SEQ ID NO: 12487 - protein, 7 aa, Artificial Sequence
  Description of Artificial Sequence: Synthetic peptide
TVSKMGG

SEQ ID NO: 12488 - protein, 7 aa, Artificial Sequence
  Description of Artificial Sequence: Synthetic peptide
TVSRNDA

SEQ ID NO: 12489 - protein, 7 aa, Artificial Sequence
  Description of Artificial Sequence: Synthetic peptide
TVSRQVC

SEQ ID NO: 12490 - protein, 7 aa, Artificial Sequence
  Description of Artificial Sequence: Synthetic peptide
TVSTTCA

SEQ ID NO: 12491 - protein, 7 aa, Artificial Sequence
  Description of Artificial Sequence: Synthetic peptide
TVSVTKP

SEQ ID NO: 12492 - protein, 7 aa, Artificial Sequence
  Description of Artificial Sequence: Synthetic peptide
TVSVVDK

SEQ ID NO: 12493 - protein, 7 aa, Artificial Sequence
  Description of Artificial Sequence: Synthetic peptide
TVTEARN

SEQ ID NO: 12494 - protein, 7 aa, Artificial Sequence
  Description of Artificial Sequence: Synthetic peptide
TVTGNGF

SEQ ID NO: 12495 - protein, 7 aa, Artificial Sequence
  Description of Artificial Sequence: Synthetic peptide
TVTHNME

SEQ ID NO: 12496 - protein, 7 aa, Artificial Sequence
  Description of Artificial Sequence: Synthetic peptide
TVTNPRN

SEQ ID NO: 12497 - protein, 7 aa, Artificial Sequence
  Description of Artificial Sequence: Synthetic peptide
TVTPAVN

SEQ ID NO: 12498 - protein, 7 aa, Artificial Sequence
  Description of Artificial Sequence: Synthetic peptide
TVTRHPS

SEQ ID NO: 12499 - protein, 7 aa, Artificial Sequence
  Description of Artificial Sequence: Synthetic peptide
TVTTAER

SEQ ID NO: 12500 - protein, 7 aa, Artificial Sequence
  Description of Artificial Sequence: Synthetic peptide
TVTTGRW

SEQ ID NO: 12501 - protein, 7 aa, Artificial Sequence
  Description of Artificial Sequence: Synthetic peptide
TVTTRQA

SEQ ID NO: 12502 - protein, 7 aa, Artificial Sequence
  Description of Artificial Sequence: Synthetic peptide
TVVKSGD

SEQ ID NO: 12503 - protein, 7 aa, Artificial Sequence
  Description of Artificial Sequence: Synthetic peptide
TVVLTSG

SEQ ID NO: 12504 - protein, 7 aa, Artificial Sequence
  Description of Artificial Sequence: Synthetic peptide
TVVPSGR

SEQ ID NO: 12505 - protein, 7 aa, Artificial Sequence
  Description of Artificial Sequence: Synthetic peptide
TVVPVPG

SEQ ID NO: 12506 - protein, 7 aa, Artificial Sequence
  Description of Artificial Sequence: Synthetic peptide
TVYSGRP

SEQ ID NO: 12507 - protein, 7 aa, Artificial Sequence
  Description of Artificial Sequence: Synthetic peptide
TVYSPNT

SEQ ID NO: 12508 - protein, 7 aa, Artificial Sequence
  Description of Artificial Sequence: Synthetic peptide
TWNATMN

SEQ ID NO: 12509 - protein, 7 aa, Artificial Sequence
  Description of Artificial Sequence: Synthetic peptide
TWQDNRA

SEQ ID NO: 12510 - protein, 7 aa, Artificial Sequence
  Description of Artificial Sequence: Synthetic peptide
TWSATQG

SEQ ID NO: 12511 - protein, 7 aa, Artificial Sequence
  Description of Artificial Sequence: Synthetic peptide
TWSSGTD

SEQ ID NO: 12512 - protein, 7 aa, Artificial Sequence
  Description of Artificial Sequence: Synthetic peptide
TWSTNVS

SEQ ID NO: 12513 - protein, 7 aa, Artificial Sequence
  Description of Artificial Sequence: Synthetic peptide
TYAIIPD

SEQ ID NO: 12514 - protein, 7 aa, Artificial Sequence
  Description of Artificial Sequence: Synthetic peptide
TYANSAF

SEQ ID NO: 12515 - protein, 7 aa, Artificial Sequence
  Description of Artificial Sequence: Synthetic peptide
TYANVSS

SEQ ID NO: 12516 - protein, 7 aa, Artificial Sequence
  Description of Artificial Sequence: Synthetic peptide
TYAPSRG

SEQ ID NO: 12517 - protein, 7 aa, Artificial Sequence
  Description of Artificial Sequence: Synthetic peptide
TYAPVET

SEQ ID NO: 12518 - protein, 7 aa, Artificial Sequence
  Description of Artificial Sequence: Synthetic peptide
TYARSQA

SEQ ID NO: 12519 - protein, 7 aa, Artificial Sequence
  Description of Artificial Sequence: Synthetic peptide
TYEARQL

SEQ ID NO: 12520 - protein, 7 aa, Artificial Sequence
  Description of Artificial Sequence: Synthetic peptide
TYEGRLR

SEQ ID NO: 12521 - protein, 7 aa, Artificial Sequence
  Description of Artificial Sequence: Synthetic peptide
TYELSPP

SEQ ID NO: 12522 - protein, 7 aa, Artificial Sequence
  Description of Artificial Sequence: Synthetic peptide
TYEVRQL

SEQ ID NO: 12523 - protein, 7 aa, Artificial Sequence
  Description of Artificial Sequence: Synthetic peptide
TYGAAVQ

SEQ ID NO: 12524 - protein, 7 aa, Artificial Sequence
  Description of Artificial Sequence: Synthetic peptide
TYGGPMI

SEQ ID NO: 12525 - protein, 7 aa, Artificial Sequence
  Description of Artificial Sequence: Synthetic peptide
TYGIQAP

SEQ ID NO: 12526 - protein, 7 aa, Artificial Sequence
  Description of Artificial Sequence: Synthetic peptide
TYGLSVP

SEQ ID NO: 12527 - protein, 7 aa, Artificial Sequence
  Description of Artificial Sequence: Synthetic peptide
TYGMTGA

SEQ ID NO: 12528 - protein, 7 aa, Artificial Sequence
  Description of Artificial Sequence: Synthetic peptide
TYHTGDG

SEQ ID NO: 12529 - protein, 7 aa, Artificial Sequence
  Description of Artificial Sequence: Synthetic peptide
TYINTNP

SEQ ID NO: 12530 - protein, 7 aa, Artificial Sequence
  Description of Artificial Sequence: Synthetic peptide
TYKDEQP

SEQ ID NO: 12531 - protein, 7 aa, Artificial Sequence
  Description of Artificial Sequence: Synthetic peptide
TYKGAPP

SEQ ID NO: 12532 - protein, 7 aa, Artificial Sequence
  Description of Artificial Sequence: Synthetic peptide
TYKNQTH

SEQ ID NO: 12533 - protein, 7 aa, Artificial Sequence
  Description of Artificial Sequence: Synthetic peptide
TYLIATP

SEQ ID NO: 12534 - protein, 7 aa, Artificial Sequence
  Description of Artificial Sequence: Synthetic peptide
TYLSGAY

SEQ ID NO: 12535 - protein, 7 aa, Artificial Sequence
  Description of Artificial Sequence: Synthetic peptide
TYPLPNE

SEQ ID NO: 12536 - protein, 7 aa, Artificial Sequence
  Description of Artificial Sequence: Synthetic peptide
TYPPAAL

SEQ ID NO: 12537 - protein, 7 aa, Artificial Sequence
  Description of Artificial Sequence: Synthetic peptide
TYPTEPR

SEQ ID NO: 12538 - protein, 7 aa, Artificial Sequence
  Description of Artificial Sequence: Synthetic peptide
TYPTLLD

SEQ ID NO: 12539 - protein, 7 aa, Artificial Sequence
  Description of Artificial Sequence: Synthetic peptide
TYQASLI

SEQ ID NO: 12540 - protein, 7 aa, Artificial Sequence
  Description of Artificial Sequence: Synthetic peptide
TYQSQSG

SEQ ID NO: 12541 - protein, 7 aa, Artificial Sequence
  Description of Artificial Sequence: Synthetic peptide
TYSAETM

SEQ ID NO: 12542 - protein, 7 aa, Artificial Sequence
  Description of Artificial Sequence: Synthetic peptide
TYSAVLA

SEQ ID NO: 12543 - protein, 7 aa, Artificial Sequence
  Description of Artificial Sequence: Synthetic peptide
TYSHARA

SEQ ID NO: 12544 - protein, 7 aa, Artificial Sequence
  Description of Artificial Sequence: Synthetic peptide
TYSPTAT

SEQ ID NO: 12545 - protein, 7 aa, Artificial Sequence
  Description of Artificial Sequence: Synthetic peptide
TYSTAIY

SEQ ID NO: 12546 - protein, 7 aa, Artificial Sequence
  Description of Artificial Sequence: Synthetic peptide
TYSVSLA

SEQ ID NO: 12547 - protein, 7 aa, Artificial Sequence
  Description of Artificial Sequence: Synthetic peptide
TYSYSSA

SEQ ID NO: 12548 - protein, 7 aa, Artificial Sequence
  Description of Artificial Sequence: Synthetic peptide
TYTGLAA

SEQ ID NO: 12549 - protein, 7 aa, Artificial Sequence
  Description of Artificial Sequence: Synthetic peptide
TYTHHSV

SEQ ID NO: 12550 - protein, 7 aa, Artificial Sequence
  Description of Artificial Sequence: Synthetic peptide
TYTSTYA

SEQ ID NO: 12551 - protein, 7 aa, Artificial Sequence
  Description of Artificial Sequence: Synthetic peptide
TYVDVLH

SEQ ID NO: 12552 - protein, 7 aa, Artificial Sequence
  Description of Artificial Sequence: Synthetic peptide
TYVGRGA

SEQ ID NO: 12553 - protein, 7 aa, Artificial Sequence
  Description of Artificial Sequence: Synthetic peptide
TYVMTPK

SEQ ID NO: 12554 - protein, 7 aa, Artificial Sequence
  Description of Artificial Sequence: Synthetic peptide
TYYAAEI

SEQ ID NO: 12555 - protein, 7 aa, Artificial Sequence
  Description of Artificial Sequence: Synthetic peptide
TYYKNTG

SEQ ID NO: 12556 - protein, 7 aa, Artificial Sequence
  Description of Artificial Sequence: Synthetic peptide
VAAGQSP

SEQ ID NO: 12557 - protein, 7 aa, Artificial Sequence
  Description of Artificial Sequence: Synthetic peptide
VAARSAQ

SEQ ID NO: 12558 - protein, 7 aa, Artificial Sequence
  Description of Artificial Sequence: Synthetic peptide
VADATKP

SEQ ID NO: 12559 - protein, 7 aa, Artificial Sequence
  Description of Artificial Sequence: Synthetic peptide
VADFVRC

SEQ ID NO: 12560 - protein, 7 aa, Artificial Sequence
  Description of Artificial Sequence: Synthetic peptide
VADKALV

SEQ ID NO: 12561 - protein, 7 aa, Artificial Sequence
  Description of Artificial Sequence: Synthetic peptide
VADLRPE

SEQ ID NO: 12562 - protein, 7 aa, Artificial Sequence
  Description of Artificial Sequence: Synthetic peptide
VADPPRS

SEQ ID NO: 12563 - protein, 7 aa, Artificial Sequence
  Description of Artificial Sequence: Synthetic peptide
VADRLTT

SEQ ID NO: 12564 - protein, 7 aa, Artificial Sequence
  Description of Artificial Sequence: Synthetic peptide
VAEHPKR

SEQ ID NO: 12565 - protein, 7 aa, Artificial Sequence
  Description of Artificial Sequence: Synthetic peptide
VAEQHSL

SEQ ID NO: 12566 - protein, 7 aa, Artificial Sequence
  Description of Artificial Sequence: Synthetic peptide
VAGAGTT

SEQ ID NO: 12567 - protein, 7 aa, Artificial Sequence
  Description of Artificial Sequence: Synthetic peptide
VAGAHAT

SEQ ID NO: 12568 - protein, 7 aa, Artificial Sequence
  Description of Artificial Sequence: Synthetic peptide
VAGDAKN

SEQ ID NO: 12569 - protein, 7 aa, Artificial Sequence
  Description of Artificial Sequence: Synthetic peptide
VAGIRSQ

SEQ ID NO: 12570 - protein, 7 aa, Artificial Sequence
  Description of Artificial Sequence: Synthetic peptide
VAGLNHR

SEQ ID NO: 12571 - protein, 7 aa, Artificial Sequence
  Description of Artificial Sequence: Synthetic peptide
VAGPTGP

SEQ ID NO: 12572 - protein, 7 aa, Artificial Sequence
  Description of Artificial Sequence: Synthetic peptide
VAGQRSG

SEQ ID NO: 12573 - protein, 7 aa, Artificial Sequence
  Description of Artificial Sequence: Synthetic peptide
VAGQSPP

SEQ ID NO: 12574 - protein, 7 aa, Artificial Sequence
  Description of Artificial Sequence: Synthetic peptide
VAGRDQP

SEQ ID NO: 12575 - protein, 7 aa, Artificial Sequence
  Description of Artificial Sequence: Synthetic peptide
VAGRDVR

SEQ ID NO: 12576 - protein, 7 aa, Artificial Sequence
  Description of Artificial Sequence: Synthetic peptide
VAGRDYQ

SEQ ID NO: 12577 - protein, 7 aa, Artificial Sequence
  Description of Artificial Sequence: Synthetic peptide
VAGSATV

SEQ ID NO: 12578 - protein, 7 aa, Artificial Sequence
  Description of Artificial Sequence: Synthetic peptide
VAGTVER

SEQ ID NO: 12579 - protein, 7 aa, Artificial Sequence
  Description of Artificial Sequence: Synthetic peptide
VAGVRTA

SEQ ID NO: 12580 - protein, 7 aa, Artificial Sequence
  Description of Artificial Sequence: Synthetic peptide
VAGVSEM

SEQ ID NO: 12581 - protein, 7 aa, Artificial Sequence
  Description of Artificial Sequence: Synthetic peptide
VAHLSMS

SEQ ID NO: 12582 - protein, 7 aa, Artificial Sequence
  Description of Artificial Sequence: Synthetic peptide
VAHSLPA

SEQ ID NO: 12583 - protein, 7 aa, Artificial Sequence
  Description of Artificial Sequence: Synthetic peptide
VAHSTNA

SEQ ID NO: 12584 - protein, 7 aa, Artificial Sequence
  Description of Artificial Sequence: Synthetic peptide
VAHTGAR

SEQ ID NO: 12585 - protein, 7 aa, Artificial Sequence
  Description of Artificial Sequence: Synthetic peptide
VAHTVYS

SEQ ID NO: 12586 - protein, 7 aa, Artificial Sequence
  Description of Artificial Sequence: Synthetic peptide
VAHVQSD

SEQ ID NO: 12587 - protein, 7 aa, Artificial Sequence
  Description of Artificial Sequence: Synthetic peptide
VAHYPAS

SEQ ID NO: 12588 - protein, 7 aa, Artificial Sequence
  Description of Artificial Sequence: Synthetic peptide
VAIHGAV

SEQ ID NO: 12589 - protein, 7 aa, Artificial Sequence
  Description of Artificial Sequence: Synthetic peptide
VAIPRGS

SEQ ID NO: 12590 - protein, 7 aa, Artificial Sequence
  Description of Artificial Sequence: Synthetic peptide
VAIRSPA

SEQ ID NO: 12591 - protein, 7 aa, Artificial Sequence
  Description of Artificial Sequence: Synthetic peptide
VALAGQY

SEQ ID NO: 12592 - protein, 7 aa, Artificial Sequence
  Description of Artificial Sequence: Synthetic peptide
VALHPLN

SEQ ID NO: 12593 - protein, 7 aa, Artificial Sequence
  Description of Artificial Sequence: Synthetic peptide
VALIKYS

SEQ ID NO: 12594 - protein, 7 aa, Artificial Sequence
  Description of Artificial Sequence: Synthetic peptide
VALSAAK

SEQ ID NO: 12595 - protein, 7 aa, Artificial Sequence
  Description of Artificial Sequence: Synthetic peptide
VANETHY

SEQ ID NO: 12596 - protein, 7 aa, Artificial Sequence
  Description of Artificial Sequence: Synthetic peptide
VANGKSH

SEQ ID NO: 12597 - protein, 7 aa, Artificial Sequence
  Description of Artificial Sequence: Synthetic peptide
VANHIEV

SEQ ID NO: 12598 - protein, 7 aa, Artificial Sequence
  Description of Artificial Sequence: Synthetic peptide
VANQQGT

SEQ ID NO: 12599 - protein, 7 aa, Artificial Sequence
  Description of Artificial Sequence: Synthetic peptide
VANRDVQ

SEQ ID NO: 12600 - protein, 7 aa, Artificial Sequence
  Description of Artificial Sequence: Synthetic peptide
VANVLTN

SEQ ID NO: 12601 - protein, 7 aa, Artificial Sequence
  Description of Artificial Sequence: Synthetic peptide
VAPAIPG

SEQ ID NO: 12602 - protein, 7 aa, Artificial Sequence
  Description of Artificial Sequence: Synthetic peptide
VAPIGSE

SEQ ID NO: 12603 - protein, 7 aa, Artificial Sequence
  Description of Artificial Sequence: Synthetic peptide
VAPLIPK

SEQ ID NO: 12604 - protein, 7 aa, Artificial Sequence
  Description of Artificial Sequence: Synthetic peptide
VAPPPQK

SEQ ID NO: 12605 - protein, 7 aa, Artificial Sequence
  Description of Artificial Sequence: Synthetic peptide
VAPPPRH

SEQ ID NO: 12606 - protein, 7 aa, Artificial Sequence
  Description of Artificial Sequence: Synthetic peptide
VAPPYSG

SEQ ID NO: 12607 - protein, 7 aa, Artificial Sequence
  Description of Artificial Sequence: Synthetic peptide
VAPSEGS

SEQ ID NO: 12608 - protein, 7 aa, Artificial Sequence
  Description of Artificial Sequence: Synthetic peptide
VAPSQRL

SEQ ID NO: 12609 - protein, 7 aa, Artificial Sequence
  Description of Artificial Sequence: Synthetic peptide
VAQRSGP

SEQ ID NO: 12610 - protein, 7 aa, Artificial Sequence
  Description of Artificial Sequence: Synthetic peptide
VAQSRSI

SEQ ID NO: 12611 - protein, 7 aa, Artificial Sequence
  Description of Artificial Sequence: Synthetic peptide
VARAHIV

SEQ ID NO: 12612 - protein, 7 aa, Artificial Sequence
  Description of Artificial Sequence: Synthetic peptide
VARGPTT

SEQ ID NO: 12613 - protein, 7 aa, Artificial Sequence
  Description of Artificial Sequence: Synthetic peptide
VARHSNE

SEQ ID NO: 12614 - protein, 7 aa, Artificial Sequence
  Description of Artificial Sequence: Synthetic peptide
VARIDGM

SEQ ID NO: 12615 - protein, 7 aa, Artificial Sequence
  Description of Artificial Sequence: Synthetic peptide
VARLPQV

SEQ ID NO: 12616 - protein, 7 aa, Artificial Sequence
  Description of Artificial Sequence: Synthetic peptide
VARPLSM

SEQ ID NO: 12617 - protein, 7 aa, Artificial Sequence
  Description of Artificial Sequence: Synthetic peptide
VARSGTT

SEQ ID NO: 12618 - protein, 7 aa, Artificial Sequence
  Description of Artificial Sequence: Synthetic peptide
VARSLQA

SEQ ID NO: 12619 - protein, 7 aa, Artificial Sequence
  Description of Artificial Sequence: Synthetic peptide
VARSNLD

SEQ ID NO: 12620 - protein, 7 aa, Artificial Sequence
  Description of Artificial Sequence: Synthetic peptide
VASALGG

SEQ ID NO: 12621 - protein, 7 aa, Artificial Sequence
  Description of Artificial Sequence: Synthetic peptide
VASASPA

SEQ ID NO: 12622 - protein, 7 aa, Artificial Sequence
  Description of Artificial Sequence: Synthetic peptide
VASGVVF

SEQ ID NO: 12623 - protein, 7 aa, Artificial Sequence
  Description of Artificial Sequence: Synthetic peptide
VASHITP

SEQ ID NO: 12624 - protein, 7 aa, Artificial Sequence
  Description of Artificial Sequence: Synthetic peptide
VASKIID

SEQ ID NO: 12625 - protein, 7 aa, Artificial Sequence
  Description of Artificial Sequence: Synthetic peptide
VASLQVG

SEQ ID NO: 12626 - protein, 7 aa, Artificial Sequence
  Description of Artificial Sequence: Synthetic peptide
VASLTHD

SEQ ID NO: 12627 - protein, 7 aa, Artificial Sequence
  Description of Artificial Sequence: Synthetic peptide
VASNNKA

SEQ ID NO: 12628 - protein, 7 aa, Artificial Sequence
  Description of Artificial Sequence: Synthetic peptide
VASRAPT

SEQ ID NO: 12629 - protein, 7 aa, Artificial Sequence
  Description of Artificial Sequence: Synthetic peptide
VASSKTP

SEQ ID NO: 12630 - protein, 7 aa, Artificial Sequence
  Description of Artificial Sequence: Synthetic peptide
VASSSGI

SEQ ID NO: 12631 - protein, 7 aa, Artificial Sequence
  Description of Artificial Sequence: Synthetic peptide
VASTGSP

SEQ ID NO: 12632 - protein, 7 aa, Artificial Sequence
  Description of Artificial Sequence: Synthetic peptide
VASVKML

SEQ ID NO: 12633 - protein, 7 aa, Artificial Sequence
  Description of Artificial Sequence: Synthetic peptide
VASVRTN

SEQ ID NO: 12634 - protein, 7 aa, Artificial Sequence
  Description of Artificial Sequence: Synthetic peptide
VASYSGF

SEQ ID NO: 12635 - protein, 7 aa, Artificial Sequence
  Description of Artificial Sequence: Synthetic peptide
VASYSRE

SEQ ID NO: 12636 - protein, 7 aa, Artificial Sequence
  Description of Artificial Sequence: Synthetic peptide
VATASVT

SEQ ID NO: 12637 - protein, 7 aa, Artificial Sequence
  Description of Artificial Sequence: Synthetic peptide
VATELAG

SEQ ID NO: 12638 - protein, 7 aa, Artificial Sequence
  Description of Artificial Sequence: Synthetic peptide
VATLNYV

SEQ ID NO: 12639 - protein, 7 aa, Artificial Sequence
  Description of Artificial Sequence: Synthetic peptide
VATLRGN

SEQ ID NO: 12640 - protein, 7 aa, Artificial Sequence
  Description of Artificial Sequence: Synthetic peptide
VATMVVP

SEQ ID NO: 12641 - protein, 7 aa, Artificial Sequence
  Description of Artificial Sequence: Synthetic peptide
VATNNDV

SEQ ID NO: 12642 - protein, 7 aa, Artificial Sequence
  Description of Artificial Sequence: Synthetic peptide
VATNSIS

SEQ ID NO: 12643 - protein, 7 aa, Artificial Sequence
  Description of Artificial Sequence: Synthetic peptide
VATNTYL

SEQ ID NO: 12644 - protein, 7 aa, Artificial Sequence
  Description of Artificial Sequence: Synthetic peptide
VATPTVL

SEQ ID NO: 12645 - protein, 7 aa, Artificial Sequence
  Description of Artificial Sequence: Synthetic peptide
VATRDSY

SEQ ID NO: 12646 - protein, 7 aa, Artificial Sequence
  Description of Artificial Sequence: Synthetic peptide
VATRVVE

SEQ ID NO: 12647 - protein, 7 aa, Artificial Sequence
  Description of Artificial Sequence: Synthetic peptide
VATSVRP

SEQ ID NO: 12648 - protein, 7 aa, Artificial Sequence
  Description of Artificial Sequence: Synthetic peptide
VAVMMPS

SEQ ID NO: 12649 - protein, 7 aa, Artificial Sequence
  Description of Artificial Sequence: Synthetic peptide
VAVNSRS

SEQ ID NO: 12650 - protein, 7 aa, Artificial Sequence
  Description of Artificial Sequence: Synthetic peptide
VAVRTSD

SEQ ID NO: 12651 - protein, 7 aa, Artificial Sequence
  Description of Artificial Sequence: Synthetic peptide
VAVSAPL

SEQ ID NO: 12652 - protein, 7 aa, Artificial Sequence
  Description of Artificial Sequence: Synthetic peptide
VAVSTVT

SEQ ID NO: 12653 - protein, 7 aa, Artificial Sequence
  Description of Artificial Sequence: Synthetic peptide
VAYDTAV

SEQ ID NO: 12654 - protein, 7 aa, Artificial Sequence
  Description of Artificial Sequence: Synthetic peptide
VAYPARS

SEQ ID NO: 12655 - protein, 7 aa, Artificial Sequence
  Description of Artificial Sequence: Synthetic peptide
VCGPPFH

SEQ ID NO: 12656 - protein, 7 aa, Artificial Sequence
  Description of Artificial Sequence: Synthetic peptide
VCNSVGY

SEQ ID NO: 12657 - protein, 7 aa, Artificial Sequence
  Description of Artificial Sequence: Synthetic peptide
VDAKAND

SEQ ID NO: 12658 - protein, 7 aa, Artificial Sequence
  Description of Artificial Sequence: Synthetic peptide
VDDFPRC

SEQ ID NO: 12659 - protein, 7 aa, Artificial Sequence
  Description of Artificial Sequence: Synthetic peptide
VDDLRAR

SEQ ID NO: 12660 - protein, 7 aa, Artificial Sequence
  Description of Artificial Sequence: Synthetic peptide
VDEIRRP

SEQ ID NO: 12661 - protein, 7 aa, Artificial Sequence
  Description of Artificial Sequence: Synthetic peptide
VDFEHSQ

SEQ ID NO: 12662 - protein, 7 aa, Artificial Sequence
  Description of Artificial Sequence: Synthetic peptide
VDGARQP

SEQ ID NO: 12663 - protein, 7 aa, Artificial Sequence
  Description of Artificial Sequence: Synthetic peptide
VDGLGSK

SEQ ID NO: 12664 - protein, 7 aa, Artificial Sequence
  Description of Artificial Sequence: Synthetic peptide
VDGVRGA

SEQ ID NO: 12665 - protein, 7 aa, Artificial Sequence
  Description of Artificial Sequence: Synthetic peptide
VDKLSHT

SEQ ID NO: 12666 - protein, 7 aa, Artificial Sequence
  Description of Artificial Sequence: Synthetic peptide
VDKPHLA

SEQ ID NO: 12667 - protein, 7 aa, Artificial Sequence
  Description of Artificial Sequence: Synthetic peptide
VDLQCAP

SEQ ID NO: 12668 - protein, 7 aa, Artificial Sequence
  Description of Artificial Sequence: Synthetic peptide
VDLRPYA

SEQ ID NO: 12669 - protein, 7 aa, Artificial Sequence
  Description of Artificial Sequence: Synthetic peptide
VDNAAQS

SEQ ID NO: 12670 - protein, 7 aa, Artificial Sequence
  Description of Artificial Sequence: Synthetic peptide
VDNLARA

SEQ ID NO: 12671 - protein, 7 aa, Artificial Sequence
  Description of Artificial Sequence: Synthetic peptide
VDNTLTD

SEQ ID NO: 12672 - protein, 7 aa, Artificial Sequence
  Description of Artificial Sequence: Synthetic peptide
VDPGRHH

SEQ ID NO: 12673 - protein, 7 aa, Artificial Sequence
  Description of Artificial Sequence: Synthetic peptide
VDPMPAL

SEQ ID NO: 12674 - protein, 7 aa, Artificial Sequence
  Description of Artificial Sequence: Synthetic peptide
VDPRWHP

SEQ ID NO: 12675 - protein, 7 aa, Artificial Sequence
  Description of Artificial Sequence: Synthetic peptide
VDQHTIA

SEQ ID NO: 12676 - protein, 7 aa, Artificial Sequence
  Description of Artificial Sequence: Synthetic peptide
VDQVNNP

SEQ ID NO: 12677 - protein, 7 aa, Artificial Sequence
  Description of Artificial Sequence: Synthetic peptide
VDRHHSP

SEQ ID NO: 12678 - protein, 7 aa, Artificial Sequence
  Description of Artificial Sequence: Synthetic peptide
VDRRPDS

SEQ ID NO: 12679 - protein, 7 aa, Artificial Sequence
  Description of Artificial Sequence: Synthetic peptide
VDRRTTT

SEQ ID NO: 12680 - protein, 7 aa, Artificial Sequence
  Description of Artificial Sequence: Synthetic peptide
VDSLTPY

SEQ ID NO: 12681 - protein, 7 aa, Artificial Sequence
  Description of Artificial Sequence: Synthetic peptide
VDSPSAP

SEQ ID NO: 12682 - protein, 7 aa, Artificial Sequence
  Description of Artificial Sequence: Synthetic peptide
VDSSTNL

SEQ ID NO: 12683 - protein, 7 aa, Artificial Sequence
  Description of Artificial Sequence: Synthetic peptide
VDTLMNR

SEQ ID NO: 12684 - protein, 7 aa, Artificial Sequence
  Description of Artificial Sequence: Synthetic peptide
VDTPGNR

SEQ ID NO: 12685 - protein, 7 aa, Artificial Sequence
  Description of Artificial Sequence: Synthetic peptide
VDTRRES

SEQ ID NO: 12686 - protein, 7 aa, Artificial Sequence
  Description of Artificial Sequence: Synthetic peptide
VDTSLEC

SEQ ID NO: 12687 - protein, 7 aa, Artificial Sequence
  Description of Artificial Sequence: Synthetic peptide
VDTTKFQ

SEQ ID NO: 12688 - protein, 7 aa, Artificial Sequence
  Description of Artificial Sequence: Synthetic peptide
VDVRKHP

SEQ ID NO: 12689 - protein, 7 aa, Artificial Sequence
  Description of Artificial Sequence: Synthetic peptide
VDYAVSM

SEQ ID NO: 12690 - protein, 7 aa, Artificial Sequence
  Description of Artificial Sequence: Synthetic peptide
VEATSRV

SEQ ID NO: 12691 - protein, 7 aa, Artificial Sequence
  Description of Artificial Sequence: Synthetic peptide
VEGVRSA

SEQ ID NO: 12692 - protein, 7 aa, Artificial Sequence
  Description of Artificial Sequence: Synthetic peptide
VEHNSLN

SEQ ID NO: 12693 - protein, 7 aa, Artificial Sequence
  Description of Artificial Sequence: Synthetic peptide
VEHNTPF

SEQ ID NO: 12694 - protein, 7 aa, Artificial Sequence
  Description of Artificial Sequence: Synthetic peptide
VEHRVST

SEQ ID NO: 12695 - protein, 7 aa, Artificial Sequence
  Description of Artificial Sequence: Synthetic peptide
VEHSTNV

SEQ ID NO: 12696 - protein, 7 aa, Artificial Sequence
  Description of Artificial Sequence: Synthetic peptide
VEIKTRS

SEQ ID NO: 12697 - protein, 7 aa, Artificial Sequence
  Description of Artificial Sequence: Synthetic peptide
VEISSVS

SEQ ID NO: 12698 - protein, 7 aa, Artificial Sequence
  Description of Artificial Sequence: Synthetic peptide
VEKEMNS

SEQ ID NO: 12699 - protein, 7 aa, Artificial Sequence
  Description of Artificial Sequence: Synthetic peptide
VEKTPME

SEQ ID NO: 12700 - protein, 7 aa, Artificial Sequence
  Description of Artificial Sequence: Synthetic peptide
VEKVSML

SEQ ID NO: 12701 - protein, 7 aa, Artificial Sequence
  Description of Artificial Sequence: Synthetic peptide
VEKYKNL

SEQ ID NO: 12702 - protein, 7 aa, Artificial Sequence
  Description of Artificial Sequence: Synthetic peptide
VELNQGD

SEQ ID NO: 12703 - protein, 7 aa, Artificial Sequence
  Description of Artificial Sequence: Synthetic peptide
VENARPQ

SEQ ID NO: 12704 - protein, 7 aa, Artificial Sequence
  Description of Artificial Sequence: Synthetic peptide
VEPAFTD

SEQ ID NO: 12705 - protein, 7 aa, Artificial Sequence
  Description of Artificial Sequence: Synthetic peptide
VEPRKSA

SEQ ID NO: 12706 - protein, 7 aa, Artificial Sequence
  Description of Artificial Sequence: Synthetic peptide
VEPRSMY

SEQ ID NO: 12707 - protein, 7 aa, Artificial Sequence
  Description of Artificial Sequence: Synthetic peptide
VEPTLTR

SEQ ID NO: 12708 - protein, 7 aa, Artificial Sequence
  Description of Artificial Sequence: Synthetic peptide
VEPVLHT

SEQ ID NO: 12709 - protein, 7 aa, Artificial Sequence
  Description of Artificial Sequence: Synthetic peptide
VERDDRT

SEQ ID NO: 12710 - protein, 7 aa, Artificial Sequence
  Description of Artificial Sequence: Synthetic peptide
VERDIDS

SEQ ID NO: 12711 - protein, 7 aa, Artificial Sequence
  Description of Artificial Sequence: Synthetic peptide
VERPVNK

SEQ ID NO: 12712 - protein, 7 aa, Artificial Sequence
  Description of Artificial Sequence: Synthetic peptide
VERVRTL

SEQ ID NO: 12713 - protein, 7 aa, Artificial Sequence
  Description of Artificial Sequence: Synthetic peptide
VESDTSW

SEQ ID NO: 12714 - protein, 7 aa, Artificial Sequence
  Description of Artificial Sequence: Synthetic peptide
VESNSPM

SEQ ID NO: 12715 - protein, 7 aa, Artificial Sequence
  Description of Artificial Sequence: Synthetic peptide
VESNSSF

SEQ ID NO: 12716 - protein, 7 aa, Artificial Sequence
  Description of Artificial Sequence: Synthetic peptide
VESSPLP

SEQ ID NO: 12717 - protein, 7 aa, Artificial Sequence
  Description of Artificial Sequence: Synthetic peptide
VETGHNK

SEQ ID NO: 12718 - protein, 7 aa, Artificial Sequence
  Description of Artificial Sequence: Synthetic peptide
VETNRNR

SEQ ID NO: 12719 - protein, 7 aa, Artificial Sequence
  Description of Artificial Sequence: Synthetic peptide
VETNVKL

SEQ ID NO: 12720 - protein, 7 aa, Artificial Sequence
  Description of Artificial Sequence: Synthetic peptide
VETPLRK

SEQ ID NO: 12721 - protein, 7 aa, Artificial Sequence
  Description of Artificial Sequence: Synthetic peptide
VEVNTLH

SEQ ID NO: 12722 - protein, 7 aa, Artificial Sequence
  Description of Artificial Sequence: Synthetic peptide
VFDNTVR

SEQ ID NO: 12723 - protein, 7 aa, Artificial Sequence
  Description of Artificial Sequence: Synthetic peptide
VFGANVA

SEQ ID NO: 12724 - protein, 7 aa, Artificial Sequence
  Description of Artificial Sequence: Synthetic peptide
VFGDTLL

SEQ ID NO: 12725 - protein, 7 aa, Artificial Sequence
  Description of Artificial Sequence: Synthetic peptide
VFGIPSP

SEQ ID NO: 12726 - protein, 7 aa, Artificial Sequence
  Description of Artificial Sequence: Synthetic peptide
VFHKGFD

SEQ ID NO: 12727 - protein, 7 aa, Artificial Sequence
  Description of Artificial Sequence: Synthetic peptide
VFHKSET

SEQ ID NO: 12728 - protein, 7 aa, Artificial Sequence
  Description of Artificial Sequence: Synthetic peptide
VFHTPEP

SEQ ID NO: 12729 - protein, 7 aa, Artificial Sequence
  Description of Artificial Sequence: Synthetic peptide
VFLEPSS

SEQ ID NO: 12730 - protein, 7 aa, Artificial Sequence
  Description of Artificial Sequence: Synthetic peptide
VFPQSTP

SEQ ID NO: 12731 - protein, 7 aa, Artificial Sequence
  Description of Artificial Sequence: Synthetic peptide
VFQDSIP

SEQ ID NO: 12732 - protein, 7 aa, Artificial Sequence
  Description of Artificial Sequence: Synthetic peptide
VFQGQIV

SEQ ID NO: 12733 - protein, 7 aa, Artificial Sequence
  Description of Artificial Sequence: Synthetic peptide
VFQTNNA

SEQ ID NO: 12734 - protein, 7 aa, Artificial Sequence
  Description of Artificial Sequence: Synthetic peptide
VFRTTSP

SEQ ID NO: 12735 - protein, 7 aa, Artificial Sequence
  Description of Artificial Sequence: Synthetic peptide
VFSGRQA

SEQ ID NO: 12736 - protein, 7 aa, Artificial Sequence
  Description of Artificial Sequence: Synthetic peptide
VFSNSAV

SEQ ID NO: 12737 - protein, 7 aa, Artificial Sequence
  Description of Artificial Sequence: Synthetic peptide
VFTHERT

SEQ ID NO: 12738 - protein, 7 aa, Artificial Sequence
  Description of Artificial Sequence: Synthetic peptide
VFTHSDP

SEQ ID NO: 12739 - protein, 7 aa, Artificial Sequence
  Description of Artificial Sequence: Synthetic peptide
VFTNPRL

SEQ ID NO: 12740 - protein, 7 aa, Artificial Sequence
  Description of Artificial Sequence: Synthetic peptide
VFTPEER

SEQ ID NO: 12741 - protein, 7 aa, Artificial Sequence
  Description of Artificial Sequence: Synthetic peptide
VFTSVTT

SEQ ID NO: 12742 - protein, 7 aa, Artificial Sequence
  Description of Artificial Sequence: Synthetic peptide
VFTTGSP

SEQ ID NO: 12743 - protein, 7 aa, Artificial Sequence
  Description of Artificial Sequence: Synthetic peptide
VFVGLKP

SEQ ID NO: 12744 - protein, 7 aa, Artificial Sequence
  Description of Artificial Sequence: Synthetic peptide
VGAASER

SEQ ID NO: 12745 - protein, 7 aa, Artificial Sequence
  Description of Artificial Sequence: Synthetic peptide
VGADTRD

SEQ ID NO: 12746 - protein, 7 aa, Artificial Sequence
  Description of Artificial Sequence: Synthetic peptide
VGAPNRT

SEQ ID NO: 12747 - protein, 7 aa, Artificial Sequence
  Description of Artificial Sequence: Synthetic peptide
VGAPVER

SEQ ID NO: 12748 - protein, 7 aa, Artificial Sequence
  Description of Artificial Sequence: Synthetic peptide
VGARAPA

SEQ ID NO: 12749 - protein, 7 aa, Artificial Sequence
  Description of Artificial Sequence: Synthetic peptide
VGASHAK

SEQ ID NO: 12750 - protein, 7 aa, Artificial Sequence
  Description of Artificial Sequence: Synthetic peptide
VGAVYSQ

SEQ ID NO: 12751 - protein, 7 aa, Artificial Sequence
  Description of Artificial Sequence: Synthetic peptide
VGDDSVL

SEQ ID NO: 12752 - protein, 7 aa, Artificial Sequence
  Description of Artificial Sequence: Synthetic peptide
VGEIMAM

SEQ ID NO: 12753 - protein, 7 aa, Artificial Sequence
  Description of Artificial Sequence: Synthetic peptide
VGERSSR

SEQ ID NO: 12754 - protein, 7 aa, Artificial Sequence
  Description of Artificial Sequence: Synthetic peptide
VGGDDDM

SEQ ID NO: 12755 - protein, 7 aa, Artificial Sequence
  Description of Artificial Sequence: Synthetic peptide
VGGDLCD

SEQ ID NO: 12756 - protein, 7 aa, Artificial Sequence
  Description of Artificial Sequence: Synthetic peptide
VGGDSVP

SEQ ID NO: 12757 - protein, 7 aa, Artificial Sequence
  Description of Artificial Sequence: Synthetic peptide
VGGGHGT

SEQ ID NO: 12758 - protein, 7 aa, Artificial Sequence
  Description of Artificial Sequence: Synthetic peptide
VGGGTGP

SEQ ID NO: 12759 - protein, 7 aa, Artificial Sequence
  Description of Artificial Sequence: Synthetic peptide
VGGMDLT

SEQ ID NO: 12760 - protein, 7 aa, Artificial Sequence
  Description of Artificial Sequence: Synthetic peptide
VGGPIGY

SEQ ID NO: 12761 - protein, 7 aa, Artificial Sequence
  Description of Artificial Sequence: Synthetic peptide
VGHPLKP

SEQ ID NO: 12762 - protein, 7 aa, Artificial Sequence
  Description of Artificial Sequence: Synthetic peptide
VGHSLMP

SEQ ID NO: 12763 - protein, 7 aa, Artificial Sequence
  Description of Artificial Sequence: Synthetic peptide
VGHSMPP

SEQ ID NO: 12764 - protein, 7 aa, Artificial Sequence
  Description of Artificial Sequence: Synthetic peptide
VGHSVTL

SEQ ID NO: 12765 - protein, 7 aa, Artificial Sequence
  Description of Artificial Sequence: Synthetic peptide
VGKDMSV

SEQ ID NO: 12766 - protein, 7 aa, Artificial Sequence
  Description of Artificial Sequence: Synthetic peptide
VGKGEAS

SEQ ID NO: 12767 - protein, 7 aa, Artificial Sequence
  Description of Artificial Sequence: Synthetic peptide
VGKLVNC

SEQ ID NO: 12768 - protein, 7 aa, Artificial Sequence
  Description of Artificial Sequence: Synthetic peptide
VGLPPAP

SEQ ID NO: 12769 - protein, 7 aa, Artificial Sequence
  Description of Artificial Sequence: Synthetic peptide
VGLQHNL

SEQ ID NO: 12770 - protein, 7 aa, Artificial Sequence
  Description of Artificial Sequence: Synthetic peptide
VGLTSTV

SEQ ID NO: 12771 - protein, 7 aa, Artificial Sequence
  Description of Artificial Sequence: Synthetic peptide
VGMRIPA

SEQ ID NO: 12772 - protein, 7 aa, Artificial Sequence
  Description of Artificial Sequence: Synthetic peptide
VGNKGIS

SEQ ID NO: 12773 - protein, 7 aa, Artificial Sequence
  Description of Artificial Sequence: Synthetic peptide
VGNLQAF

SEQ ID NO: 12774 - protein, 7 aa, Artificial Sequence
  Description of Artificial Sequence: Synthetic peptide
VGNRAFI

SEQ ID NO: 12775 - protein, 7 aa, Artificial Sequence
  Description of Artificial Sequence: Synthetic peptide
VGNSLHA

SEQ ID NO: 12776 - protein, 7 aa, Artificial Sequence
  Description of Artificial Sequence: Synthetic peptide
VGNYVGR

SEQ ID NO: 12777 - protein, 7 aa, Artificial Sequence
  Description of Artificial Sequence: Synthetic peptide
VGPTGSA

SEQ ID NO: 12778 - protein, 7 aa, Artificial Sequence
  Description of Artificial Sequence: Synthetic peptide
VGQNAEW

SEQ ID NO: 12779 - protein, 7 aa, Artificial Sequence
  Description of Artificial Sequence: Synthetic peptide
VGRLTMP

SEQ ID NO: 12780 - protein, 7 aa, Artificial Sequence
  Description of Artificial Sequence: Synthetic peptide
VGRSVLD

SEQ ID NO: 12781 - protein, 7 aa, Artificial Sequence
  Description of Artificial Sequence: Synthetic peptide
VGSFIPT

SEQ ID NO: 12782 - protein, 7 aa, Artificial Sequence
  Description of Artificial Sequence: Synthetic peptide
VGSGAPE

SEQ ID NO: 12783 - protein, 7 aa, Artificial Sequence
  Description of Artificial Sequence: Synthetic peptide
VGSGLDN

SEQ ID NO: 12784 - protein, 7 aa, Artificial Sequence
  Description of Artificial Sequence: Synthetic peptide
VGSIDLP

SEQ ID NO: 12785 - protein, 7 aa, Artificial Sequence
  Description of Artificial Sequence: Synthetic peptide
VGSKALL

SEQ ID NO: 12786 - protein, 7 aa, Artificial Sequence
  Description of Artificial Sequence: Synthetic peptide
VGSLWLD

SEQ ID NO: 12787 - protein, 7 aa, Artificial Sequence
  Description of Artificial Sequence: Synthetic peptide
VGSPKPT

SEQ ID NO: 12788 - protein, 7 aa, Artificial Sequence
  Description of Artificial Sequence: Synthetic peptide
VGSQYLP

SEQ ID NO: 12789 - protein, 7 aa, Artificial Sequence
  Description of Artificial Sequence: Synthetic peptide
VGSRATS

SEQ ID NO: 12790 - protein, 7 aa, Artificial Sequence
  Description of Artificial Sequence: Synthetic peptide
VGSSKGA

SEQ ID NO: 12791 - protein, 7 aa, Artificial Sequence
  Description of Artificial Sequence: Synthetic peptide
VGSSVDA

SEQ ID NO: 12792 - protein, 7 aa, Artificial Sequence
  Description of Artificial Sequence: Synthetic peptide
VGSTGRT

SEQ ID NO: 12793 - protein, 7 aa, Artificial Sequence
  Description of Artificial Sequence: Synthetic peptide
VGSTREL

SEQ ID NO: 12794 - protein, 7 aa, Artificial Sequence
  Description of Artificial Sequence: Synthetic peptide
VGSYITV

SEQ ID NO: 12795 - protein, 7 aa, Artificial Sequence
  Description of Artificial Sequence: Synthetic peptide
VGTVTRP

SEQ ID NO: 12796 - protein, 7 aa, Artificial Sequence
  Description of Artificial Sequence: Synthetic peptide
VGVTMPY

SEQ ID NO: 12797 - protein, 7 aa, Artificial Sequence
  Description of Artificial Sequence: Synthetic peptide
VGYEAHA

SEQ ID NO: 12798 - protein, 7 aa, Artificial Sequence
  Description of Artificial Sequence: Synthetic peptide
VGYPANP

SEQ ID NO: 12799 - protein, 7 aa, Artificial Sequence
  Description of Artificial Sequence: Synthetic peptide
VHAELMR

SEQ ID NO: 12800 - protein, 7 aa, Artificial Sequence
  Description of Artificial Sequence: Synthetic peptide
VHASTAV

SEQ ID NO: 12801 - protein, 7 aa, Artificial Sequence
  Description of Artificial Sequence: Synthetic peptide
VHDGGRH

SEQ ID NO: 12802 - protein, 7 aa, Artificial Sequence
  Description of Artificial Sequence: Synthetic peptide
VHDGKIR

SEQ ID NO: 12803 - protein, 7 aa, Artificial Sequence
  Description of Artificial Sequence: Synthetic peptide
VHENGSV

SEQ ID NO: 12804 - protein, 7 aa, Artificial Sequence
  Description of Artificial Sequence: Synthetic peptide
VHGAAQT

SEQ ID NO: 12805 - protein, 7 aa, Artificial Sequence
  Description of Artificial Sequence: Synthetic peptide
VHGPMQH

SEQ ID NO: 12806 - protein, 7 aa, Artificial Sequence
  Description of Artificial Sequence: Synthetic peptide
VHGTDPD

SEQ ID NO: 12807 - protein, 7 aa, Artificial Sequence
  Description of Artificial Sequence: Synthetic peptide
VHHNLTP

SEQ ID NO: 12808 - protein, 7 aa, Artificial Sequence
  Description of Artificial Sequence: Synthetic peptide
VHKSADY

SEQ ID NO: 12809 - protein, 7 aa, Artificial Sequence
  Description of Artificial Sequence: Synthetic peptide
VHLPSMP

SEQ ID NO: 12810 - protein, 7 aa, Artificial Sequence
  Description of Artificial Sequence: Synthetic peptide
VHLPTLA

SEQ ID NO: 12811 - protein, 7 aa, Artificial Sequence
  Description of Artificial Sequence: Synthetic peptide
VHNGGRS

SEQ ID NO: 12812 - protein, 7 aa, Artificial Sequence
  Description of Artificial Sequence: Synthetic peptide
VHNGLTP

SEQ ID NO: 12813 - protein, 7 aa, Artificial Sequence
  Description of Artificial Sequence: Synthetic peptide
VHNMLKA

SEQ ID NO: 12814 - protein, 7 aa, Artificial Sequence
  Description of Artificial Sequence: Synthetic peptide
VHPHSVN

SEQ ID NO: 12815 - protein, 7 aa, Artificial Sequence
  Description of Artificial Sequence: Synthetic peptide
VHPRMLT

SEQ ID NO: 12816 - protein, 7 aa, Artificial Sequence
  Description of Artificial Sequence: Synthetic peptide
VHPSSVT

SEQ ID NO: 12817 - protein, 7 aa, Artificial Sequence
  Description of Artificial Sequence: Synthetic peptide
VHPVLAS

SEQ ID NO: 12818 - protein, 7 aa, Artificial Sequence
  Description of Artificial Sequence: Synthetic peptide
VHQARFA

SEQ ID NO: 12819 - protein, 7 aa, Artificial Sequence
  Description of Artificial Sequence: Synthetic peptide
VHQERSW

SEQ ID NO: 12820 - protein, 7 aa, Artificial Sequence
  Description of Artificial Sequence: Synthetic peptide
VHRQLED

SEQ ID NO: 12821 - protein, 7 aa, Artificial Sequence
  Description of Artificial Sequence: Synthetic peptide
VHRTQDS

SEQ ID NO: 12822 - protein, 7 aa, Artificial Sequence
  Description of Artificial Sequence: Synthetic peptide
VHSFKLG

SEQ ID NO: 12823 - protein, 7 aa, Artificial Sequence
  Description of Artificial Sequence: Synthetic peptide
VHSNSPS

SEQ ID NO: 12824 - protein, 7 aa, Artificial Sequence
  Description of Artificial Sequence: Synthetic peptide
VHSPQQS

SEQ ID NO: 12825 - protein, 7 aa, Artificial Sequence
  Description of Artificial Sequence: Synthetic peptide
VHSSINA

SEQ ID NO: 12826 - protein, 7 aa, Artificial Sequence
  Description of Artificial Sequence: Synthetic peptide
VHTPIGT

SEQ ID NO: 12827 - protein, 7 aa, Artificial Sequence
  Description of Artificial Sequence: Synthetic peptide
VHTSTIS

SEQ ID NO: 12828 - protein, 7 aa, Artificial Sequence
  Description of Artificial Sequence: Synthetic peptide
VHTTGML

SEQ ID NO: 12829 - protein, 7 aa, Artificial Sequence
  Description of Artificial Sequence: Synthetic peptide
VHVSTMP

SEQ ID NO: 12830 - protein, 7 aa, Artificial Sequence
  Description of Artificial Sequence: Synthetic peptide
VHVTGNL

SEQ ID NO: 12831 - protein, 7 aa, Artificial Sequence
  Description of Artificial Sequence: Synthetic peptide
VIASDIS

SEQ ID NO: 12832 - protein, 7 aa, Artificial Sequence
  Description of Artificial Sequence: Synthetic peptide
VIATDRL

SEQ ID NO: 12833 - protein, 7 aa, Artificial Sequence
  Description of Artificial Sequence: Synthetic peptide
VIAVDRM

SEQ ID NO: 12834 - protein, 7 aa, Artificial Sequence
  Description of Artificial Sequence: Synthetic peptide
VIDSELD

SEQ ID NO: 12835 - protein, 7 aa, Artificial Sequence
  Description of Artificial Sequence: Synthetic peptide
VIDSQKK

SEQ ID NO: 12836 - protein, 7 aa, Artificial Sequence
  Description of Artificial Sequence: Synthetic peptide
VIEASRN

SEQ ID NO: 12837 - protein, 7 aa, Artificial Sequence
  Description of Artificial Sequence: Synthetic peptide
VIGKGTH

SEQ ID NO: 12838 - protein, 7 aa, Artificial Sequence
  Description of Artificial Sequence: Synthetic peptide
VIHTMGA

SEQ ID NO: 12839 - protein, 7 aa, Artificial Sequence
  Description of Artificial Sequence: Synthetic peptide
VIIETSA

SEQ ID NO: 12840 - protein, 7 aa, Artificial Sequence
  Description of Artificial Sequence: Synthetic peptide
VILDKAV

SEQ ID NO: 12841 - protein, 7 aa, Artificial Sequence
  Description of Artificial Sequence: Synthetic peptide
VILKGAP

SEQ ID NO: 12842 - protein, 7 aa, Artificial Sequence
  Description of Artificial Sequence: Synthetic peptide
VILTSAV

SEQ ID NO: 12843 - protein, 7 aa, Artificial Sequence
  Description of Artificial Sequence: Synthetic peptide
VINGLAS

SEQ ID NO: 12844 - protein, 7 aa, Artificial Sequence
  Description of Artificial Sequence: Synthetic peptide
VINGLGV

SEQ ID NO: 12845 - protein, 7 aa, Artificial Sequence
  Description of Artificial Sequence: Synthetic peptide
VINNTGN

SEQ ID NO: 12846 - protein, 7 aa, Artificial Sequence
  Description of Artificial Sequence: Synthetic peptide
VIPPMRS

SEQ ID NO: 12847 - protein, 7 aa, Artificial Sequence
  Description of Artificial Sequence: Synthetic peptide
VIPPWDI

SEQ ID NO: 12848 - protein, 7 aa, Artificial Sequence
  Description of Artificial Sequence: Synthetic peptide
VIPRTLQ

SEQ ID NO: 12849 - protein, 7 aa, Artificial Sequence
  Description of Artificial Sequence: Synthetic peptide
VIQLRGA

SEQ ID NO: 12850 - protein, 7 aa, Artificial Sequence
  Description of Artificial Sequence: Synthetic peptide
VIRPSTH

SEQ ID NO: 12851 - protein, 7 aa, Artificial Sequence
  Description of Artificial Sequence: Synthetic peptide
VISGLNM

SEQ ID NO: 12852 - protein, 7 aa, Artificial Sequence
  Description of Artificial Sequence: Synthetic peptide
VISHKTN

SEQ ID NO: 12853 - protein, 7 aa, Artificial Sequence
  Description of Artificial Sequence: Synthetic peptide
VISLSEL

SEQ ID NO: 12854 - protein, 7 aa, Artificial Sequence
  Description of Artificial Sequence: Synthetic peptide
VISNTRD

SEQ ID NO: 12855 - protein, 7 aa, Artificial Sequence
  Description of Artificial Sequence: Synthetic peptide
VISRKGP

SEQ ID NO: 12856 - protein, 7 aa, Artificial Sequence
  Description of Artificial Sequence: Synthetic peptide
VISSADL

SEQ ID NO: 12857 - protein, 7 aa, Artificial Sequence
  Description of Artificial Sequence: Synthetic peptide
VISSFAE

SEQ ID NO: 12858 - protein, 7 aa, Artificial Sequence
  Description of Artificial Sequence: Synthetic peptide
VISTSLP

SEQ ID NO: 12859 - protein, 7 aa, Artificial Sequence
  Description of Artificial Sequence: Synthetic peptide
VISVPAS

SEQ ID NO: 12860 - protein, 7 aa, Artificial Sequence
  Description of Artificial Sequence: Synthetic peptide
VITEKSA

SEQ ID NO: 12861 - protein, 7 aa, Artificial Sequence
  Description of Artificial Sequence: Synthetic peptide
VITRSGT

SEQ ID NO: 12862 - protein, 7 aa, Artificial Sequence
  Description of Artificial Sequence: Synthetic peptide
VITSLGP

SEQ ID NO: 12863 - protein, 7 aa, Artificial Sequence
  Description of Artificial Sequence: Synthetic peptide
VITSTGA

SEQ ID NO: 12864 - protein, 7 aa, Artificial Sequence
  Description of Artificial Sequence: Synthetic peptide
VIVLGPV

SEQ ID NO: 12865 - protein, 7 aa, Artificial Sequence
  Description of Artificial Sequence: Synthetic peptide
VIVPDVW

SEQ ID NO: 12866 - protein, 7 aa, Artificial Sequence
  Description of Artificial Sequence: Synthetic peptide
VKDAFAP

SEQ ID NO: 12867 - protein, 7 aa, Artificial Sequence
  Description of Artificial Sequence: Synthetic peptide
VKDDHRC

SEQ ID NO: 12868 - protein, 7 aa, Artificial Sequence
  Description of Artificial Sequence: Synthetic peptide
VKDLPQA

SEQ ID NO: 12869 - protein, 7 aa, Artificial Sequence
  Description of Artificial Sequence: Synthetic peptide
VKDPRMS

SEQ ID NO: 12870 - protein, 7 aa, Artificial Sequence
  Description of Artificial Sequence: Synthetic peptide
VKDSTIG

SEQ ID NO: 12871 - protein, 7 aa, Artificial Sequence
  Description of Artificial Sequence: Synthetic peptide
VKFQPSL

SEQ ID NO: 12872 - protein, 7 aa, Artificial Sequence
  Description of Artificial Sequence: Synthetic peptide
VKGQLCC

SEQ ID NO: 12873 - protein, 7 aa, Artificial Sequence
  Description of Artificial Sequence: Synthetic peptide
VKGYSNY

SEQ ID NO: 12874 - protein, 7 aa, Artificial Sequence
  Description of Artificial Sequence: Synthetic peptide
VKLAMED

SEQ ID NO: 12875 - protein, 7 aa, Artificial Sequence
  Description of Artificial Sequence: Synthetic peptide
VKLGIQA

SEQ ID NO: 12876 - protein, 7 aa, Artificial Sequence
  Description of Artificial Sequence: Synthetic peptide
VKNAVTP

SEQ ID NO: 12877 - protein, 7 aa, Artificial Sequence
  Description of Artificial Sequence: Synthetic peptide
VKNCMVE

SEQ ID NO: 12878 - protein, 7 aa, Artificial Sequence
  Description of Artificial Sequence: Synthetic peptide
VKNPISY

SEQ ID NO: 12879 - protein, 7 aa, Artificial Sequence
  Description of Artificial Sequence: Synthetic peptide
VKNTNVS

SEQ ID NO: 12880 - protein, 7 aa, Artificial Sequence
  Description of Artificial Sequence: Synthetic peptide
VKNTYPE

SEQ ID NO: 12881 - protein, 7 aa, Artificial Sequence
  Description of Artificial Sequence: Synthetic peptide
VKNYEPQ

SEQ ID NO: 12882 - protein, 7 aa, Artificial Sequence
  Description of Artificial Sequence: Synthetic peptide
VKPDACF

SEQ ID NO: 12883 - protein, 7 aa, Artificial Sequence
  Description of Artificial Sequence: Synthetic peptide
VKPGMMP

SEQ ID NO: 12884 - protein, 7 aa, Artificial Sequence
  Description of Artificial Sequence: Synthetic peptide
VKPLGMP

SEQ ID NO: 12885 - protein, 7 aa, Artificial Sequence
  Description of Artificial Sequence: Synthetic peptide
VKPMASS

SEQ ID NO: 12886 - protein, 7 aa, Artificial Sequence
  Description of Artificial Sequence: Synthetic peptide
VKPSPIL

SEQ ID NO: 12887 - protein, 7 aa, Artificial Sequence
  Description of Artificial Sequence: Synthetic peptide
VKPTPDA

SEQ ID NO: 12888 - protein, 7 aa, Artificial Sequence
  Description of Artificial Sequence: Synthetic peptide
VKPYSLH

SEQ ID NO: 12889 - protein, 7 aa, Artificial Sequence
  Description of Artificial Sequence: Synthetic peptide
VKPYVTM

SEQ ID NO: 12890 - protein, 7 aa, Artificial Sequence
  Description of Artificial Sequence: Synthetic peptide
VKQRAMV

SEQ ID NO: 12891 - protein, 7 aa, Artificial Sequence
  Description of Artificial Sequence: Synthetic peptide
VKSAETI

SEQ ID NO: 12892 - protein, 7 aa, Artificial Sequence
  Description of Artificial Sequence: Synthetic peptide
VKSDILA

SEQ ID NO: 12893 - protein, 7 aa, Artificial Sequence
  Description of Artificial Sequence: Synthetic peptide
VKSEFPK

SEQ ID NO: 12894 - protein, 7 aa, Artificial Sequence
  Description of Artificial Sequence: Synthetic peptide
VKSETGV

SEQ ID NO: 12895 - protein, 7 aa, Artificial Sequence
  Description of Artificial Sequence: Synthetic peptide
VKSRAET

SEQ ID NO: 12896 - protein, 7 aa, Artificial Sequence
  Description of Artificial Sequence: Synthetic peptide
VKSSDST

SEQ ID NO: 12897 - protein, 7 aa, Artificial Sequence
  Description of Artificial Sequence: Synthetic peptide
VKTNATL

SEQ ID NO: 12898 - protein, 7 aa, Artificial Sequence
  Description of Artificial Sequence: Synthetic peptide
VKTPPLT

SEQ ID NO: 12899 - protein, 7 aa, Artificial Sequence
  Description of Artificial Sequence: Synthetic peptide
VKTPSLN

SEQ ID NO: 12900 - protein, 7 aa, Artificial Sequence
  Description of Artificial Sequence: Synthetic peptide
VKTPWGP

SEQ ID NO: 12901 - protein, 7 aa, Artificial Sequence
  Description of Artificial Sequence: Synthetic peptide
VKTQSDL

SEQ ID NO: 12902 - protein, 7 aa, Artificial Sequence
  Description of Artificial Sequence: Synthetic peptide
VKVPGAF

SEQ ID NO: 12903 - protein, 7 aa, Artificial Sequence
  Description of Artificial Sequence: Synthetic peptide
VLAHSDS

SEQ ID NO: 12904 - protein, 7 aa, Artificial Sequence
  Description of Artificial Sequence: Synthetic peptide
VLAHSTY

SEQ ID NO: 12905 - protein, 7 aa, Artificial Sequence
  Description of Artificial Sequence: Synthetic peptide
VLAPLVS

SEQ ID NO: 12906 - protein, 7 aa, Artificial Sequence
  Description of Artificial Sequence: Synthetic peptide
VLARQYP

SEQ ID NO: 12907 - protein, 7 aa, Artificial Sequence
  Description of Artificial Sequence: Synthetic peptide
VLASTVS

SEQ ID NO: 12908 - protein, 7 aa, Artificial Sequence
  Description of Artificial Sequence: Synthetic peptide
VLATTVG

SEQ ID NO: 12909 - protein, 7 aa, Artificial Sequence
  Description of Artificial Sequence: Synthetic peptide
VLATVTK

SEQ ID NO: 12910 - protein, 7 aa, Artificial Sequence
  Description of Artificial Sequence: Synthetic peptide
VLAVRTN

SEQ ID NO: 12911 - protein, 7 aa, Artificial Sequence
  Description of Artificial Sequence: Synthetic peptide
VLDWEGD

SEQ ID NO: 12912 - protein, 7 aa, Artificial Sequence
  Description of Artificial Sequence: Synthetic peptide
VLEHLHP

SEQ ID NO: 12913 - protein, 7 aa, Artificial Sequence
  Description of Artificial Sequence: Synthetic peptide
VLEKLKT

SEQ ID NO: 12914 - protein, 7 aa, Artificial Sequence
  Description of Artificial Sequence: Synthetic peptide
VLELEHR

SEQ ID NO: 12915 - protein, 7 aa, Artificial Sequence
  Description of Artificial Sequence: Synthetic peptide
VLEPLSK

SEQ ID NO: 12916 - protein, 7 aa, Artificial Sequence
  Description of Artificial Sequence: Synthetic peptide
VLETRTL

SEQ ID NO: 12917 - protein, 7 aa, Artificial Sequence
  Description of Artificial Sequence: Synthetic peptide
VLGGLAS

SEQ ID NO: 12918 - protein, 7 aa, Artificial Sequence
  Description of Artificial Sequence: Synthetic peptide
VLGLAPA

SEQ ID NO: 12919 - protein, 7 aa, Artificial Sequence
  Description of Artificial Sequence: Synthetic peptide
VLGLGGP

SEQ ID NO: 12920 - protein, 7 aa, Artificial Sequence
  Description of Artificial Sequence: Synthetic peptide
VLGMGEW

SEQ ID NO: 12921 - protein, 7 aa, Artificial Sequence
  Description of Artificial Sequence: Synthetic peptide
VLGRGYS

SEQ ID NO: 12922 - protein, 7 aa, Artificial Sequence
  Description of Artificial Sequence: Synthetic peptide
VLGSLQH

SEQ ID NO: 12923 - protein, 7 aa, Artificial Sequence
  Description of Artificial Sequence: Synthetic peptide
VLGSVGS

SEQ ID NO: 12924 - protein, 7 aa, Artificial Sequence
  Description of Artificial Sequence: Synthetic peptide
VLGYSKP

SEQ ID NO: 12925 - protein, 7 aa, Artificial Sequence
  Description of Artificial Sequence: Synthetic peptide
VLHAASA

SEQ ID NO: 12926 - protein, 7 aa, Artificial Sequence
  Description of Artificial Sequence: Synthetic peptide
VLHQRGA

SEQ ID NO: 12927 - protein, 7 aa, Artificial Sequence
  Description of Artificial Sequence: Synthetic peptide
VLKAHPD

SEQ ID NO: 12928 - protein, 7 aa, Artificial Sequence
  Description of Artificial Sequence: Synthetic peptide
VLKPGVT

SEQ ID NO: 12929 - protein, 7 aa, Artificial Sequence
  Description of Artificial Sequence: Synthetic peptide
VLKPSVP

SEQ ID NO: 12930 - protein, 7 aa, Artificial Sequence
  Description of Artificial Sequence: Synthetic peptide
VLKPYIN

SEQ ID NO: 12931 - protein, 7 aa, Artificial Sequence
  Description of Artificial Sequence: Synthetic peptide
VLKSHSA

SEQ ID NO: 12932 - protein, 7 aa, Artificial Sequence
  Description of Artificial Sequence: Synthetic peptide
VLKSSAS

SEQ ID NO: 12933 - protein, 7 aa, Artificial Sequence
  Description of Artificial Sequence: Synthetic peptide
VLLPSHP

SEQ ID NO: 12934 - protein, 7 aa, Artificial Sequence
  Description of Artificial Sequence: Synthetic peptide
VLLTKTC

SEQ ID NO: 12935 - protein, 7 aa, Artificial Sequence
  Description of Artificial Sequence: Synthetic peptide
VLMPSTI

SEQ ID NO: 12936 - protein, 7 aa, Artificial Sequence
  Description of Artificial Sequence: Synthetic peptide
VLMPTEA

SEQ ID NO: 12937 - protein, 7 aa, Artificial Sequence
  Description of Artificial Sequence: Synthetic peptide
VLNGRSS

SEQ ID NO: 12938 - protein, 7 aa, Artificial Sequence
  Description of Artificial Sequence: Synthetic peptide
VLNHPTF

SEQ ID NO: 12939 - protein, 7 aa, Artificial Sequence
  Description of Artificial Sequence: Synthetic peptide
VLNHQSS

SEQ ID NO: 12940 - protein, 7 aa, Artificial Sequence
  Description of Artificial Sequence: Synthetic peptide
VLNLTQG

SEQ ID NO: 12941 - protein, 7 aa, Artificial Sequence
  Description of Artificial Sequence: Synthetic peptide
VLNPLNS

SEQ ID NO: 12942 - protein, 7 aa, Artificial Sequence
  Description of Artificial Sequence: Synthetic peptide
VLNTDVT

SEQ ID NO: 12943 - protein, 7 aa, Artificial Sequence
  Description of Artificial Sequence: Synthetic peptide
VLNTGVG

SEQ ID NO: 12944 - protein, 7 aa, Artificial Sequence
  Description of Artificial Sequence: Synthetic peptide
VLPKTSA

SEQ ID NO: 12945 - protein, 7 aa, Artificial Sequence
  Description of Artificial Sequence: Synthetic peptide
VLPNSKN

SEQ ID NO: 12946 - protein, 7 aa, Artificial Sequence
  Description of Artificial Sequence: Synthetic peptide
VLPPLAA

SEQ ID NO: 12947 - protein, 7 aa, Artificial Sequence
  Description of Artificial Sequence: Synthetic peptide
VLPPNNK

SEQ ID NO: 12948 - protein, 7 aa, Artificial Sequence
  Description of Artificial Sequence: Synthetic peptide
VLPVPRA

SEQ ID NO: 12949 - protein, 7 aa, Artificial Sequence
  Description of Artificial Sequence: Synthetic peptide
VLQGSSA

SEQ ID NO: 12950 - protein, 7 aa, Artificial Sequence
  Description of Artificial Sequence: Synthetic peptide
VLQTTRP

SEQ ID NO: 12951 - protein, 7 aa, Artificial Sequence
  Description of Artificial Sequence: Synthetic peptide
VLRGHLA

SEQ ID NO: 12952 - protein, 7 aa, Artificial Sequence
  Description of Artificial Sequence: Synthetic peptide
VLRLGTA

SEQ ID NO: 12953 - protein, 7 aa, Artificial Sequence
  Description of Artificial Sequence: Synthetic peptide
VLRNGAE

SEQ ID NO: 12954 - protein, 7 aa, Artificial Sequence
  Description of Artificial Sequence: Synthetic peptide
VLRQSVP

SEQ ID NO: 12955 - protein, 7 aa, Artificial Sequence
  Description of Artificial Sequence: Synthetic peptide
VLRSDAA

SEQ ID NO: 12956 - protein, 7 aa, Artificial Sequence
  Description of Artificial Sequence: Synthetic peptide
VLRTGEF

SEQ ID NO: 12957 - protein, 7 aa, Artificial Sequence
  Description of Artificial Sequence: Synthetic peptide
VLRTSSG

SEQ ID NO: 12958 - protein, 7 aa, Artificial Sequence
  Description of Artificial Sequence: Synthetic peptide
VLSHDVV

SEQ ID NO: 12959 - protein, 7 aa, Artificial Sequence
  Description of Artificial Sequence: Synthetic peptide
VLSHGGA

SEQ ID NO: 12960 - protein, 7 aa, Artificial Sequence
  Description of Artificial Sequence: Synthetic peptide
VLSPNTA

SEQ ID NO: 12961 - protein, 7 aa, Artificial Sequence
  Description of Artificial Sequence: Synthetic peptide
VLSPTGM

SEQ ID NO: 12962 - protein, 7 aa, Artificial Sequence
  Description of Artificial Sequence: Synthetic peptide
VLSRGNT

SEQ ID NO: 12963 - protein, 7 aa, Artificial Sequence
  Description of Artificial Sequence: Synthetic peptide
VLSSNSY

SEQ ID NO: 12964 - protein, 7 aa, Artificial Sequence
  Description of Artificial Sequence: Synthetic peptide
VLSTISS

SEQ ID NO: 12965 - protein, 7 aa, Artificial Sequence
  Description of Artificial Sequence: Synthetic peptide
VLSTMSP

SEQ ID NO: 12966 - protein, 7 aa, Artificial Sequence
  Description of Artificial Sequence: Synthetic peptide
VLSVSGR

SEQ ID NO: 12967 - protein, 7 aa, Artificial Sequence
  Description of Artificial Sequence: Synthetic peptide
VLSYHTG

SEQ ID NO: 12968 - protein, 7 aa, Artificial Sequence
  Description of Artificial Sequence: Synthetic peptide
VLTATMS

SEQ ID NO: 12969 - protein, 7 aa, Artificial Sequence
  Description of Artificial Sequence: Synthetic peptide
VLTGQRL

SEQ ID NO: 12970 - protein, 7 aa, Artificial Sequence
  Description of Artificial Sequence: Synthetic peptide
VLTQQPV

SEQ ID NO: 12971 - protein, 7 aa, Artificial Sequence
  Description of Artificial Sequence: Synthetic peptide
VLTRAGI

SEQ ID NO: 12972 - protein, 7 aa, Artificial Sequence
  Description of Artificial Sequence: Synthetic peptide
VLTSNTP

SEQ ID NO: 12973 - protein, 7 aa, Artificial Sequence
  Description of Artificial Sequence: Synthetic peptide
VLVAASM

SEQ ID NO: 12974 - protein, 7 aa, Artificial Sequence
  Description of Artificial Sequence: Synthetic peptide
VLVRSGS

SEQ ID NO: 12975 - protein, 7 aa, Artificial Sequence
  Description of Artificial Sequence: Synthetic peptide
VLVVPNH

SEQ ID NO: 12976 - protein, 7 aa, Artificial Sequence
  Description of Artificial Sequence: Synthetic peptide
VLVVRGT

SEQ ID NO: 12977 - protein, 7 aa, Artificial Sequence
  Description of Artificial Sequence: Synthetic peptide
VLYSGLS

SEQ ID NO: 12978 - protein, 7 aa, Artificial Sequence
  Description of Artificial Sequence: Synthetic peptide
VLYTNLE

SEQ ID NO: 12979 - protein, 7 aa, Artificial Sequence
  Description of Artificial Sequence: Synthetic peptide
VMDGLEP

SEQ ID NO: 12980 - protein, 7 aa, Artificial Sequence
  Description of Artificial Sequence: Synthetic peptide
VMDGVRP

SEQ ID NO: 12981 - protein, 7 aa, Artificial Sequence
  Description of Artificial Sequence: Synthetic peptide
VMGAKGL

SEQ ID NO: 12982 - protein, 7 aa, Artificial Sequence
  Description of Artificial Sequence: Synthetic peptide
VMGGNPS

SEQ ID NO: 12983 - protein, 7 aa, Artificial Sequence
  Description of Artificial Sequence: Synthetic peptide
VMHLADD

SEQ ID NO: 12984 - protein, 7 aa, Artificial Sequence
  Description of Artificial Sequence: Synthetic peptide
VMNLLKH

SEQ ID NO: 12985 - protein, 7 aa, Artificial Sequence
  Description of Artificial Sequence: Synthetic peptide
VMNLSTM

SEQ ID NO: 12986 - protein, 7 aa, Artificial Sequence
  Description of Artificial Sequence: Synthetic peptide
VMNSPRS

SEQ ID NO: 12987 - protein, 7 aa, Artificial Sequence
  Description of Artificial Sequence: Synthetic peptide
VMPFTHD

SEQ ID NO: 12988 - protein, 7 aa, Artificial Sequence
  Description of Artificial Sequence: Synthetic peptide
VMPNTPS

SEQ ID NO: 12989 - protein, 7 aa, Artificial Sequence
  Description of Artificial Sequence: Synthetic peptide
VMPQRLS

SEQ ID NO: 12990 - protein, 7 aa, Artificial Sequence
  Description of Artificial Sequence: Synthetic peptide
VMPSASA

SEQ ID NO: 12991 - protein, 7 aa, Artificial Sequence
  Description of Artificial Sequence: Synthetic peptide
VMPSLVS

SEQ ID NO: 12992 - protein, 7 aa, Artificial Sequence
  Description of Artificial Sequence: Synthetic peptide
VMQASNS

SEQ ID NO: 12993 - protein, 7 aa, Artificial Sequence
  Description of Artificial Sequence: Synthetic peptide
VMQENCP

SEQ ID NO: 12994 - protein, 7 aa, Artificial Sequence
  Description of Artificial Sequence: Synthetic peptide
VMQLGES

SEQ ID NO: 12995 - protein, 7 aa, Artificial Sequence
  Description of Artificial Sequence: Synthetic peptide
VMQSILA

SEQ ID NO: 12996 - protein, 7 aa, Artificial Sequence
  Description of Artificial Sequence: Synthetic peptide
VMRLDKQ

SEQ ID NO: 12997 - protein, 7 aa, Artificial Sequence
  Description of Artificial Sequence: Synthetic peptide
VMRPDRS

SEQ ID NO: 12998 - protein, 7 aa, Artificial Sequence
  Description of Artificial Sequence: Synthetic peptide
VMSAVDL

SEQ ID NO: 12999 - protein, 7 aa, Artificial Sequence
  Description of Artificial Sequence: Synthetic peptide
VMSDSKV

SEQ ID NO: 13000 - protein, 7 aa, Artificial Sequence
  Description of Artificial Sequence: Synthetic peptide
VMSMPRL

SEQ ID NO: 13001 - protein, 7 aa, Artificial Sequence
  Description of Artificial Sequence: Synthetic peptide
VMSPDSM

SEQ ID NO: 13002 - protein, 7 aa, Artificial Sequence
  Description of Artificial Sequence: Synthetic peptide
VMSSRTT

SEQ ID NO: 13003 - protein, 7 aa, Artificial Sequence
  Description of Artificial Sequence: Synthetic peptide
VMTDALH

SEQ ID NO: 13004 - protein, 7 aa, Artificial Sequence
  Description of Artificial Sequence: Synthetic peptide
VMTSHPM

SEQ ID NO: 13005 - protein, 7 aa, Artificial Sequence
  Description of Artificial Sequence: Synthetic peptide
VMTSQAM

SEQ ID NO: 13006 - protein, 7 aa, Artificial Sequence
  Description of Artificial Sequence: Synthetic peptide
VMTTTGH

SEQ ID NO: 13007 - protein, 7 aa, Artificial Sequence
  Description of Artificial Sequence: Synthetic peptide
VMTVASL

SEQ ID NO: 13008 - protein, 7 aa, Artificial Sequence
  Description of Artificial Sequence: Synthetic peptide
VMVESGP

SEQ ID NO: 13009 - protein, 7 aa, Artificial Sequence
  Description of Artificial Sequence: Synthetic peptide
VNAKSST

SEQ ID NO: 13010 - protein, 7 aa, Artificial Sequence
  Description of Artificial Sequence: Synthetic peptide
VNALSSA

SEQ ID NO: 13011 - protein, 7 aa, Artificial Sequence
  Description of Artificial Sequence: Synthetic peptide
VNAVGAP

SEQ ID NO: 13012 - protein, 7 aa, Artificial Sequence
  Description of Artificial Sequence: Synthetic peptide
VNDVLPT

SEQ ID NO: 13013 - protein, 7 aa, Artificial Sequence
  Description of Artificial Sequence: Synthetic peptide
VNDYAHS

SEQ ID NO: 13014 - protein, 7 aa, Artificial Sequence
  Description of Artificial Sequence: Synthetic peptide
VNELGRT

SEQ ID NO: 13015 - protein, 7 aa, Artificial Sequence
  Description of Artificial Sequence: Synthetic peptide
VNELVRT

SEQ ID NO: 13016 - protein, 7 aa, Artificial Sequence
  Description of Artificial Sequence: Synthetic peptide
VNFNPIS

SEQ ID NO: 13017 - protein, 7 aa, Artificial Sequence
  Description of Artificial Sequence: Synthetic peptide
VNGHALT

SEQ ID NO: 13018 - protein, 7 aa, Artificial Sequence
  Description of Artificial Sequence: Synthetic peptide
VNGLNVV

SEQ ID NO: 13019 - protein, 7 aa, Artificial Sequence
  Description of Artificial Sequence: Synthetic peptide
VNGNEHG

SEQ ID NO: 13020 - protein, 7 aa, Artificial Sequence
  Description of Artificial Sequence: Synthetic peptide
VNGSAFS

SEQ ID NO: 13021 - protein, 7 aa, Artificial Sequence
  Description of Artificial Sequence: Synthetic peptide
VNHMSSP

SEQ ID NO: 13022 - protein, 7 aa, Artificial Sequence
  Description of Artificial Sequence: Synthetic peptide
VNHRSAP

SEQ ID NO: 13023 - protein, 7 aa, Artificial Sequence
  Description of Artificial Sequence: Synthetic peptide
VNKDPLA

SEQ ID NO: 13024 - protein, 7 aa, Artificial Sequence
  Description of Artificial Sequence: Synthetic peptide
VNKGVSA

SEQ ID NO: 13025 - protein, 7 aa, Artificial Sequence
  Description of Artificial Sequence: Synthetic peptide
VNKSGYP

SEQ ID NO: 13026 - protein, 7 aa, Artificial Sequence
  Description of Artificial Sequence: Synthetic peptide
VNKSTVS

SEQ ID NO: 13027 - protein, 7 aa, Artificial Sequence
  Description of Artificial Sequence: Synthetic peptide
VNKSYSM

SEQ ID NO: 13028 - protein, 7 aa, Artificial Sequence
  Description of Artificial Sequence: Synthetic peptide
VNLASSV

SEQ ID NO: 13029 - protein, 7 aa, Artificial Sequence
  Description of Artificial Sequence: Synthetic peptide
VNLGSNN

SEQ ID NO: 13030 - protein, 7 aa, Artificial Sequence
  Description of Artificial Sequence: Synthetic peptide
VNLRLGS

SEQ ID NO: 13031 - protein, 7 aa, Artificial Sequence
  Description of Artificial Sequence: Synthetic peptide
VNLSSVC

SEQ ID NO: 13032 - protein, 7 aa, Artificial Sequence
  Description of Artificial Sequence: Synthetic peptide
VNLVHGV

SEQ ID NO: 13033 - protein, 7 aa, Artificial Sequence
  Description of Artificial Sequence: Synthetic peptide
VNLYLTE

SEQ ID NO: 13034 - protein, 7 aa, Artificial Sequence
  Description of Artificial Sequence: Synthetic peptide
VNNTRNV

SEQ ID NO: 13035 - protein, 7 aa, Artificial Sequence
  Description of Artificial Sequence: Synthetic peptide
VNPPNVG

SEQ ID NO: 13036 - protein, 7 aa, Artificial Sequence
  Description of Artificial Sequence: Synthetic peptide
VNPPSRP

SEQ ID NO: 13037 - protein, 7 aa, Artificial Sequence
  Description of Artificial Sequence: Synthetic peptide
VNPPTHV

SEQ ID NO: 13038 - protein, 7 aa, Artificial Sequence
  Description of Artificial Sequence: Synthetic peptide
VNPRVVQ

SEQ ID NO: 13039 - protein, 7 aa, Artificial Sequence
  Description of Artificial Sequence: Synthetic peptide
VNPSASS

SEQ ID NO: 13040 - protein, 7 aa, Artificial Sequence
  Description of Artificial Sequence: Synthetic peptide
VNPSSPS

SEQ ID NO: 13041 - protein, 7 aa, Artificial Sequence
  Description of Artificial Sequence: Synthetic peptide
VNRSVSP

SEQ ID NO: 13042 - protein, 7 aa, Artificial Sequence
  Description of Artificial Sequence: Synthetic peptide
VNRTTLY

SEQ ID NO: 13043 - protein, 7 aa, Artificial Sequence
  Description of Artificial Sequence: Synthetic peptide
VNSASKS

SEQ ID NO: 13044 - protein, 7 aa, Artificial Sequence
  Description of Artificial Sequence: Synthetic peptide
VNSFERS

SEQ ID NO: 13045 - protein, 7 aa, Artificial Sequence
  Description of Artificial Sequence: Synthetic peptide
VNSGATT

SEQ ID NO: 13046 - protein, 7 aa, Artificial Sequence
  Description of Artificial Sequence: Synthetic peptide
VNSMERP

SEQ ID NO: 13047 - protein, 7 aa, Artificial Sequence
  Description of Artificial Sequence: Synthetic peptide
VNSRLIA

SEQ ID NO: 13048 - protein, 7 aa, Artificial Sequence
  Description of Artificial Sequence: Synthetic peptide
VNSSLHG

SEQ ID NO: 13049 - protein, 7 aa, Artificial Sequence
  Description of Artificial Sequence: Synthetic peptide
VNSSNSR

SEQ ID NO: 13050 - protein, 7 aa, Artificial Sequence
  Description of Artificial Sequence: Synthetic peptide
VNSSVWA

SEQ ID NO: 13051 - protein, 7 aa, Artificial Sequence
  Description of Artificial Sequence: Synthetic peptide
VNSTAFH

SEQ ID NO: 13052 - protein, 7 aa, Artificial Sequence
  Description of Artificial Sequence: Synthetic peptide
VNTKVGP

SEQ ID NO: 13053 - protein, 7 aa, Artificial Sequence
  Description of Artificial Sequence: Synthetic peptide
VNTLTGD

SEQ ID NO: 13054 - protein, 7 aa, Artificial Sequence
  Description of Artificial Sequence: Synthetic peptide
VNTNLAS

SEQ ID NO: 13055 - protein, 7 aa, Artificial Sequence
  Description of Artificial Sequence: Synthetic peptide
VNTSGWQ

SEQ ID NO: 13056 - protein, 7 aa, Artificial Sequence
  Description of Artificial Sequence: Synthetic peptide
VNTVPYG

SEQ ID NO: 13057 - protein, 7 aa, Artificial Sequence
  Description of Artificial Sequence: Synthetic peptide
VNTVTSS

SEQ ID NO: 13058 - protein, 7 aa, Artificial Sequence
  Description of Artificial Sequence: Synthetic peptide
VNVGTLY

SEQ ID NO: 13059 - protein, 7 aa, Artificial Sequence
  Description of Artificial Sequence: Synthetic peptide
VNVKREV

SEQ ID NO: 13060 - protein, 7 aa, Artificial Sequence
  Description of Artificial Sequence: Synthetic peptide
VNVRETT

SEQ ID NO: 13061 - protein, 7 aa, Artificial Sequence
  Description of Artificial Sequence: Synthetic peptide
VNVSHYS

SEQ ID NO: 13062 - protein, 7 aa, Artificial Sequence
  Description of Artificial Sequence: Synthetic peptide
VNVSQTG

SEQ ID NO: 13063 - protein, 7 aa, Artificial Sequence
  Description of Artificial Sequence: Synthetic peptide
VNYAPAV

SEQ ID NO: 13064 - protein, 7 aa, Artificial Sequence
  Description of Artificial Sequence: Synthetic peptide
VNYPEST

SEQ ID NO: 13065 - protein, 7 aa, Artificial Sequence
  Description of Artificial Sequence: Synthetic peptide
VPAMTQG

SEQ ID NO: 13066 - protein, 7 aa, Artificial Sequence
  Description of Artificial Sequence: Synthetic peptide
VPAPGYN

SEQ ID NO: 13067 - protein, 7 aa, Artificial Sequence
  Description of Artificial Sequence: Synthetic peptide
VPAQSRE

SEQ ID NO: 13068 - protein, 7 aa, Artificial Sequence
  Description of Artificial Sequence: Synthetic peptide
VPARSPG

SEQ ID NO: 13069 - protein, 7 aa, Artificial Sequence
  Description of Artificial Sequence: Synthetic peptide
VPASSTS

SEQ ID NO: 13070 - protein, 7 aa, Artificial Sequence
  Description of Artificial Sequence: Synthetic peptide
VPATDFR

SEQ ID NO: 13071 - protein, 7 aa, Artificial Sequence
  Description of Artificial Sequence: Synthetic peptide
VPAVTSR

SEQ ID NO: 13072 - protein, 7 aa, Artificial Sequence
  Description of Artificial Sequence: Synthetic peptide
VPCPSHT

SEQ ID NO: 13073 - protein, 7 aa, Artificial Sequence
  Description of Artificial Sequence: Synthetic peptide
VPDASDF

SEQ ID NO: 13074 - protein, 7 aa, Artificial Sequence
  Description of Artificial Sequence: Synthetic peptide
VPDSWDR

SEQ ID NO: 13075 - protein, 7 aa, Artificial Sequence
  Description of Artificial Sequence: Synthetic peptide
VPERATI

SEQ ID NO: 13076 - protein, 7 aa, Artificial Sequence
  Description of Artificial Sequence: Synthetic peptide
VPEYIIT

SEQ ID NO: 13077 - protein, 7 aa, Artificial Sequence
  Description of Artificial Sequence: Synthetic peptide
VPFASMT

SEQ ID NO: 13078 - protein, 7 aa, Artificial Sequence
  Description of Artificial Sequence: Synthetic peptide
VPFQFEG

SEQ ID NO: 13079 - protein, 7 aa, Artificial Sequence
  Description of Artificial Sequence: Synthetic peptide
VPGANRI

SEQ ID NO: 13080 - protein, 7 aa, Artificial Sequence
  Description of Artificial Sequence: Synthetic peptide
VPGDLRV

SEQ ID NO: 13081 - protein, 7 aa, Artificial Sequence
  Description of Artificial Sequence: Synthetic peptide
VPGKPGD

SEQ ID NO: 13082 - protein, 7 aa, Artificial Sequence
  Description of Artificial Sequence: Synthetic peptide
VPGMTTL

SEQ ID NO: 13083 - protein, 7 aa, Artificial Sequence
  Description of Artificial Sequence: Synthetic peptide
VPGNPAT

SEQ ID NO: 13084 - protein, 7 aa, Artificial Sequence
  Description of Artificial Sequence: Synthetic peptide
VPGPVVA

SEQ ID NO: 13085 - protein, 7 aa, Artificial Sequence
  Description of Artificial Sequence: Synthetic peptide
VPGRTTP

SEQ ID NO: 13086 - protein, 7 aa, Artificial Sequence
  Description of Artificial Sequence: Synthetic peptide
VPGSRST

SEQ ID NO: 13087 - protein, 7 aa, Artificial Sequence
  Description of Artificial Sequence: Synthetic peptide
VPGSSRL

SEQ ID NO: 13088 - protein, 7 aa, Artificial Sequence
  Description of Artificial Sequence: Synthetic peptide
VPGSSSH

SEQ ID NO: 13089 - protein, 7 aa, Artificial Sequence
  Description of Artificial Sequence: Synthetic peptide
VPHEKTP

SEQ ID NO: 13090 - protein, 7 aa, Artificial Sequence
  Description of Artificial Sequence: Synthetic peptide
VPHIVST

SEQ ID NO: 13091 - protein, 7 aa, Artificial Sequence
  Description of Artificial Sequence: Synthetic peptide
VPHLTST

SEQ ID NO: 13092 - protein, 7 aa, Artificial Sequence
  Description of Artificial Sequence: Synthetic peptide
VPHLTVV

SEQ ID NO: 13093 - protein, 7 aa, Artificial Sequence
  Description of Artificial Sequence: Synthetic peptide
VPHYSSS

SEQ ID NO: 13094 - protein, 7 aa, Artificial Sequence
  Description of Artificial Sequence: Synthetic peptide
VPIISDQ

SEQ ID NO: 13095 - protein, 7 aa, Artificial Sequence
  Description of Artificial Sequence: Synthetic peptide
VPKFPLE

SEQ ID NO: 13096 - protein, 7 aa, Artificial Sequence
  Description of Artificial Sequence: Synthetic peptide
VPKLSYP

SEQ ID NO: 13097 - protein, 7 aa, Artificial Sequence
  Description of Artificial Sequence: Synthetic peptide
VPKNEMG

SEQ ID NO: 13098 - protein, 7 aa, Artificial Sequence
  Description of Artificial Sequence: Synthetic peptide
VPKQSMQ

SEQ ID NO: 13099 - protein, 7 aa, Artificial Sequence
  Description of Artificial Sequence: Synthetic peptide
VPKQSVN

SEQ ID NO: 13100 - protein, 7 aa, Artificial Sequence
  Description of Artificial Sequence: Synthetic peptide
VPKQVSF

SEQ ID NO: 13101 - protein, 7 aa, Artificial Sequence
  Description of Artificial Sequence: Synthetic peptide
VPLDHAD

SEQ ID NO: 13102 - protein, 7 aa, Artificial Sequence
  Description of Artificial Sequence: Synthetic peptide
VPLDRIH

SEQ ID NO: 13103 - protein, 7 aa, Artificial Sequence
  Description of Artificial Sequence: Synthetic peptide
VPLDSES

SEQ ID NO: 13104 - protein, 7 aa, Artificial Sequence
  Description of Artificial Sequence: Synthetic peptide
VPLGTDV

SEQ ID NO: 13105 - protein, 7 aa, Artificial Sequence
  Description of Artificial Sequence: Synthetic peptide
VPLHTSL

SEQ ID NO: 13106 - protein, 7 aa, Artificial Sequence
  Description of Artificial Sequence: Synthetic peptide
VPLISMD

SEQ ID NO: 13107 - protein, 7 aa, Artificial Sequence
  Description of Artificial Sequence: Synthetic peptide
VPLNKAA

SEQ ID NO: 13108 - protein, 7 aa, Artificial Sequence
  Description of Artificial Sequence: Synthetic peptide
VPLQETF

SEQ ID NO: 13109 - protein, 7 aa, Artificial Sequence
  Description of Artificial Sequence: Synthetic peptide
VPLSGGF

SEQ ID NO: 13110 - protein, 7 aa, Artificial Sequence
  Description of Artificial Sequence: Synthetic peptide
VPLSNMS

SEQ ID NO: 13111 - protein, 7 aa, Artificial Sequence
  Description of Artificial Sequence: Synthetic peptide
VPLSQLN

SEQ ID NO: 13112 - protein, 7 aa, Artificial Sequence
  Description of Artificial Sequence: Synthetic peptide
VPLSVTV

SEQ ID NO: 13113 - protein, 7 aa, Artificial Sequence
  Description of Artificial Sequence: Synthetic peptide
VPLYSGS

SEQ ID NO: 13114 - protein, 7 aa, Artificial Sequence
  Description of Artificial Sequence: Synthetic peptide
VPMQTVL

SEQ ID NO: 13115 - protein, 7 aa, Artificial Sequence
  Description of Artificial Sequence: Synthetic peptide
VPMSGAP

SEQ ID NO: 13116 - protein, 7 aa, Artificial Sequence
  Description of Artificial Sequence: Synthetic peptide
VPMSRPS

SEQ ID NO: 13117 - protein, 7 aa, Artificial Sequence
  Description of Artificial Sequence: Synthetic peptide
VPNDRLQ

SEQ ID NO: 13118 - protein, 7 aa, Artificial Sequence
  Description of Artificial Sequence: Synthetic peptide
VPNHSTG

SEQ ID NO: 13119 - protein, 7 aa, Artificial Sequence
  Description of Artificial Sequence: Synthetic peptide
VPNLEDD

SEQ ID NO: 13120 - protein, 7 aa, Artificial Sequence
  Description of Artificial Sequence: Synthetic peptide
VPPAARS

SEQ ID NO: 13121 - protein, 7 aa, Artificial Sequence
  Description of Artificial Sequence: Synthetic peptide
VPPAIHA

SEQ ID NO: 13122 - protein, 7 aa, Artificial Sequence
  Description of Artificial Sequence: Synthetic peptide
VPPISPS

SEQ ID NO: 13123 - protein, 7 aa, Artificial Sequence
  Description of Artificial Sequence: Synthetic peptide
VPPLRQE

SEQ ID NO: 13124 - protein, 7 aa, Artificial Sequence
  Description of Artificial Sequence: Synthetic peptide
VPPLTSS

SEQ ID NO: 13125 - protein, 7 aa, Artificial Sequence
  Description of Artificial Sequence: Synthetic peptide
VPPRHIN

SEQ ID NO: 13126 - protein, 7 aa, Artificial Sequence
  Description of Artificial Sequence: Synthetic peptide
VPPRQTH

SEQ ID NO: 13127 - protein, 7 aa, Artificial Sequence
  Description of Artificial Sequence: Synthetic peptide
VPPSRQS

SEQ ID NO: 13128 - protein, 7 aa, Artificial Sequence
  Description of Artificial Sequence: Synthetic peptide
VPPSVSR

SEQ ID NO: 13129 - protein, 7 aa, Artificial Sequence
  Description of Artificial Sequence: Synthetic peptide
VPPVQTP

SEQ ID NO: 13130 - protein, 7 aa, Artificial Sequence
  Description of Artificial Sequence: Synthetic peptide
VPPYSVP

SEQ ID NO: 13131 - protein, 7 aa, Artificial Sequence
  Description of Artificial Sequence: Synthetic peptide
VPQKVTV

SEQ ID NO: 13132 - protein, 7 aa, Artificial Sequence
  Description of Artificial Sequence: Synthetic peptide
VPRDYRY

SEQ ID NO: 13133 - protein, 7 aa, Artificial Sequence
  Description of Artificial Sequence: Synthetic peptide
VPRERVN

SEQ ID NO: 13134 - protein, 7 aa, Artificial Sequence
  Description of Artificial Sequence: Synthetic peptide
VPRGDAA

SEQ ID NO: 13135 - protein, 7 aa, Artificial Sequence
  Description of Artificial Sequence: Synthetic peptide
VPRNAPD

SEQ ID NO: 13136 - protein, 7 aa, Artificial Sequence
  Description of Artificial Sequence: Synthetic peptide
VPRNVTM

SEQ ID NO: 13137 - protein, 7 aa, Artificial Sequence
  Description of Artificial Sequence: Synthetic peptide
VPRSDTL

SEQ ID NO: 13138 - protein, 7 aa, Artificial Sequence
  Description of Artificial Sequence: Synthetic peptide
VPRSNVS

SEQ ID NO: 13139 - protein, 7 aa, Artificial Sequence
  Description of Artificial Sequence: Synthetic peptide
VPRSQLT

SEQ ID NO: 13140 - protein, 7 aa, Artificial Sequence
  Description of Artificial Sequence: Synthetic peptide
VPRSTNL

SEQ ID NO: 13141 - protein, 7 aa, Artificial Sequence
  Description of Artificial Sequence: Synthetic peptide
VPRTGSN

SEQ ID NO: 13142 - protein, 7 aa, Artificial Sequence
  Description of Artificial Sequence: Synthetic peptide
VPRTLTP

SEQ ID NO: 13143 - protein, 7 aa, Artificial Sequence
  Description of Artificial Sequence: Synthetic peptide
VPSATKI

SEQ ID NO: 13144 - protein, 7 aa, Artificial Sequence
  Description of Artificial Sequence: Synthetic peptide
VPSHIGA

SEQ ID NO: 13145 - protein, 7 aa, Artificial Sequence
  Description of Artificial Sequence: Synthetic peptide
VPSKPSY

SEQ ID NO: 13146 - protein, 7 aa, Artificial Sequence
  Description of Artificial Sequence: Synthetic peptide
VPSKTPF

SEQ ID NO: 13147 - protein, 7 aa, Artificial Sequence
  Description of Artificial Sequence: Synthetic peptide
VPSPSSS

SEQ ID NO: 13148 - protein, 7 aa, Artificial Sequence
  Description of Artificial Sequence: Synthetic peptide
VPSRSQN

SEQ ID NO: 13149 - protein, 7 aa, Artificial Sequence
  Description of Artificial Sequence: Synthetic peptide
VPSSISS

SEQ ID NO: 13150 - protein, 7 aa, Artificial Sequence
  Description of Artificial Sequence: Synthetic peptide
VPSVPGA

SEQ ID NO: 13151 - protein, 7 aa, Artificial Sequence
  Description of Artificial Sequence: Synthetic peptide
VPSVVRS

SEQ ID NO: 13152 - protein, 7 aa, Artificial Sequence
  Description of Artificial Sequence: Synthetic peptide
VPTALMS

SEQ ID NO: 13153 - protein, 7 aa, Artificial Sequence
  Description of Artificial Sequence: Synthetic peptide
VPTDYLS

SEQ ID NO: 13154 - protein, 7 aa, Artificial Sequence
  Description of Artificial Sequence: Synthetic peptide
VPTHYDP

SEQ ID NO: 13155 - protein, 7 aa, Artificial Sequence
  Description of Artificial Sequence: Synthetic peptide
VPTRGEF

SEQ ID NO: 13156 - protein, 7 aa, Artificial Sequence
  Description of Artificial Sequence: Synthetic peptide
VPTSAVK

SEQ ID NO: 13157 - protein, 7 aa, Artificial Sequence
  Description of Artificial Sequence: Synthetic peptide
VPTTSDF

SEQ ID NO: 13158 - protein, 7 aa, Artificial Sequence
  Description of Artificial Sequence: Synthetic peptide
VPTVSNI

SEQ ID NO: 13159 - protein, 7 aa, Artificial Sequence
  Description of Artificial Sequence: Synthetic peptide
VPVDILS

SEQ ID NO: 13160 - protein, 7 aa, Artificial Sequence
  Description of Artificial Sequence: Synthetic peptide
VPVKTSP

SEQ ID NO: 13161 - protein, 7 aa, Artificial Sequence
  Description of Artificial Sequence: Synthetic peptide
VPVKTTY

SEQ ID NO: 13162 - protein, 7 aa, Artificial Sequence
  Description of Artificial Sequence: Synthetic peptide
VPVNPRA

SEQ ID NO: 13163 - protein, 7 aa, Artificial Sequence
  Description of Artificial Sequence: Synthetic peptide
VPVSRAF

SEQ ID NO: 13164 - protein, 7 aa, Artificial Sequence
  Description of Artificial Sequence: Synthetic peptide
VPWDSPV

SEQ ID NO: 13165 - protein, 7 aa, Artificial Sequence
  Description of Artificial Sequence: Synthetic peptide
VPYGQVH

SEQ ID NO: 13166 - protein, 7 aa, Artificial Sequence
  Description of Artificial Sequence: Synthetic peptide
VPYSSLP

SEQ ID NO: 13167 - protein, 7 aa, Artificial Sequence
  Description of Artificial Sequence: Synthetic peptide
VPYTGMT

SEQ ID NO: 13168 - protein, 7 aa, Artificial Sequence
  Description of Artificial Sequence: Synthetic peptide
VPYTSTD

SEQ ID NO: 13169 - protein, 7 aa, Artificial Sequence
  Description of Artificial Sequence: Synthetic peptide
VQAGLRS

SEQ ID NO: 13170 - protein, 7 aa, Artificial Sequence
  Description of Artificial Sequence: Synthetic peptide
VQASSMK

SEQ ID NO: 13171 - protein, 7 aa, Artificial Sequence
  Description of Artificial Sequence: Synthetic peptide
VQDTDST

SEQ ID NO: 13172 - protein, 7 aa, Artificial Sequence
  Description of Artificial Sequence: Synthetic peptide
VQEPVVM

SEQ ID NO: 13173 - protein, 7 aa, Artificial Sequence
  Description of Artificial Sequence: Synthetic peptide
VQGGSNT

SEQ ID NO: 13174 - protein, 7 aa, Artificial Sequence
  Description of Artificial Sequence: Synthetic peptide
VQGRLAG

SEQ ID NO: 13175 - protein, 7 aa, Artificial Sequence
  Description of Artificial Sequence: Synthetic peptide
VQGRSGM

SEQ ID NO: 13176 - protein, 7 aa, Artificial Sequence
  Description of Artificial Sequence: Synthetic peptide
VQGSKPE

SEQ ID NO: 13177 - protein, 7 aa, Artificial Sequence
  Description of Artificial Sequence: Synthetic peptide
VQGTLPS

SEQ ID NO: 13178 - protein, 7 aa, Artificial Sequence
  Description of Artificial Sequence: Synthetic peptide
VQHLRAT

SEQ ID NO: 13179 - protein, 7 aa, Artificial Sequence
  Description of Artificial Sequence: Synthetic peptide
VQHPTRA

SEQ ID NO: 13180 - protein, 7 aa, Artificial Sequence
  Description of Artificial Sequence: Synthetic peptide
VQHRMEV

SEQ ID NO: 13181 - protein, 7 aa, Artificial Sequence
  Description of Artificial Sequence: Synthetic peptide
VQHVAEL

SEQ ID NO: 13182 - protein, 7 aa, Artificial Sequence
  Description of Artificial Sequence: Synthetic peptide
VQLASNS

SEQ ID NO: 13183 - protein, 7 aa, Artificial Sequence
  Description of Artificial Sequence: Synthetic peptide
VQLGGHV

SEQ ID NO: 13184 - protein, 7 aa, Artificial Sequence
  Description of Artificial Sequence: Synthetic peptide
VQMERHS

SEQ ID NO: 13185 - protein, 7 aa, Artificial Sequence
  Description of Artificial Sequence: Synthetic peptide
VQMMRDA

SEQ ID NO: 13186 - protein, 7 aa, Artificial Sequence
  Description of Artificial Sequence: Synthetic peptide
VQNVIGP

SEQ ID NO: 13187 - protein, 7 aa, Artificial Sequence
  Description of Artificial Sequence: Synthetic peptide
VQPEILA

SEQ ID NO: 13188 - protein, 7 aa, Artificial Sequence
  Description of Artificial Sequence: Synthetic peptide
VQPGPLV

SEQ ID NO: 13189 - protein, 7 aa, Artificial Sequence
  Description of Artificial Sequence: Synthetic peptide
VQPINQS

SEQ ID NO: 13190 - protein, 7 aa, Artificial Sequence
  Description of Artificial Sequence: Synthetic peptide
VQPLPAH

SEQ ID NO: 13191 - protein, 7 aa, Artificial Sequence
  Description of Artificial Sequence: Synthetic peptide
VQPMISN

SEQ ID NO: 13192 - protein, 7 aa, Artificial Sequence
  Description of Artificial Sequence: Synthetic peptide
VQPREYV

SEQ ID NO: 13193 - protein, 7 aa, Artificial Sequence
  Description of Artificial Sequence: Synthetic peptide
VQPVQSD

SEQ ID NO: 13194 - protein, 7 aa, Artificial Sequence
  Description of Artificial Sequence: Synthetic peptide
VQQKGLA

SEQ ID NO: 13195 - protein, 7 aa, Artificial Sequence
  Description of Artificial Sequence: Synthetic peptide
VQRMMGP

SEQ ID NO: 13196 - protein, 7 aa, Artificial Sequence
  Description of Artificial Sequence: Synthetic peptide
VQSDSTS

SEQ ID NO: 13197 - protein, 7 aa, Artificial Sequence
  Description of Artificial Sequence: Synthetic peptide
VQSIPSA

SEQ ID NO: 13198 - protein, 7 aa, Artificial Sequence
  Description of Artificial Sequence: Synthetic peptide
VQSLHTG

SEQ ID NO: 13199 - protein, 7 aa, Artificial Sequence
  Description of Artificial Sequence: Synthetic peptide
VQSPTWV

SEQ ID NO: 13200 - protein, 7 aa, Artificial Sequence
  Description of Artificial Sequence: Synthetic peptide
VQSRPDS

SEQ ID NO: 13201 - protein, 7 aa, Artificial Sequence
  Description of Artificial Sequence: Synthetic peptide
VQSSVTL

SEQ ID NO: 13202 - protein, 7 aa, Artificial Sequence
  Description of Artificial Sequence: Synthetic peptide
VQSTLLE

SEQ ID NO: 13203 - protein, 7 aa, Artificial Sequence
  Description of Artificial Sequence: Synthetic peptide
VQSVMPH

SEQ ID NO: 13204 - protein, 7 aa, Artificial Sequence
  Description of Artificial Sequence: Synthetic peptide
VQSVRIS

SEQ ID NO: 13205 - protein, 7 aa, Artificial Sequence
  Description of Artificial Sequence: Synthetic peptide
VQTAPAE

SEQ ID NO: 13206 - protein, 7 aa, Artificial Sequence
  Description of Artificial Sequence: Synthetic peptide
VQTHSAA

SEQ ID NO: 13207 - protein, 7 aa, Artificial Sequence
  Description of Artificial Sequence: Synthetic peptide
VQTQPYR

SEQ ID NO: 13208 - protein, 7 aa, Artificial Sequence
  Description of Artificial Sequence: Synthetic peptide
VQTSGYL

SEQ ID NO: 13209 - protein, 7 aa, Artificial Sequence
  Description of Artificial Sequence: Synthetic peptide
VQYMSKA

SEQ ID NO: 13210 - protein, 7 aa, Artificial Sequence
  Description of Artificial Sequence: Synthetic peptide
VQYPTES

SEQ ID NO: 13211 - protein, 7 aa, Artificial Sequence
  Description of Artificial Sequence: Synthetic peptide
VQYSGTP

SEQ ID NO: 13212 - protein, 7 aa, Artificial Sequence
  Description of Artificial Sequence: Synthetic peptide
VRADAAG

SEQ ID NO: 13213 - protein, 7 aa, Artificial Sequence
  Description of Artificial Sequence: Synthetic peptide
VRALPLS

SEQ ID NO: 13214 - protein, 7 aa, Artificial Sequence
  Description of Artificial Sequence: Synthetic peptide
VRANPST

SEQ ID NO: 13215 - protein, 7 aa, Artificial Sequence
  Description of Artificial Sequence: Synthetic peptide
VRAPPNA

SEQ ID NO: 13216 - protein, 7 aa, Artificial Sequence
  Description of Artificial Sequence: Synthetic peptide
VRAPPSL

SEQ ID NO: 13217 - protein, 7 aa, Artificial Sequence
  Description of Artificial Sequence: Synthetic peptide
VRAPREV

SEQ ID NO: 13218 - protein, 7 aa, Artificial Sequence
  Description of Artificial Sequence: Synthetic peptide
VRASNTL

SEQ ID NO: 13219 - protein, 7 aa, Artificial Sequence
  Description of Artificial Sequence: Synthetic peptide
VRATQTE

SEQ ID NO: 13220 - protein, 7 aa, Artificial Sequence
  Description of Artificial Sequence: Synthetic peptide
VRAVHPV

SEQ ID NO: 13221 - protein, 7 aa, Artificial Sequence
  Description of Artificial Sequence: Synthetic peptide
VRAVQIN

SEQ ID NO: 13222 - protein, 7 aa, Artificial Sequence
  Description of Artificial Sequence: Synthetic peptide
VRDAASC

SEQ ID NO: 13223 - protein, 7 aa, Artificial Sequence
  Description of Artificial Sequence: Synthetic peptide
VRDDVGW

SEQ ID NO: 13224 - protein, 7 aa, Artificial Sequence
  Description of Artificial Sequence: Synthetic peptide
VRDPVTS

SEQ ID NO: 13225 - protein, 7 aa, Artificial Sequence
  Description of Artificial Sequence: Synthetic peptide
VRDSMHS

SEQ ID NO: 13226 - protein, 7 aa, Artificial Sequence
  Description of Artificial Sequence: Synthetic peptide
VRDTMGQ

SEQ ID NO: 13227 - protein, 7 aa, Artificial Sequence
  Description of Artificial Sequence: Synthetic peptide
VRDWQTQ

SEQ ID NO: 13228 - protein, 7 aa, Artificial Sequence
  Description of Artificial Sequence: Synthetic peptide
VREATSL

SEQ ID NO: 13229 - protein, 7 aa, Artificial Sequence
  Description of Artificial Sequence: Synthetic peptide
VREVLGS

SEQ ID NO: 13230 - protein, 7 aa, Artificial Sequence
  Description of Artificial Sequence: Synthetic peptide
VRFNEQA

SEQ ID NO: 13231 - protein, 7 aa, Artificial Sequence
  Description of Artificial Sequence: Synthetic peptide
VRFNGQT

SEQ ID NO: 13232 - protein, 7 aa, Artificial Sequence
  Description of Artificial Sequence: Synthetic peptide
VRGALTP

SEQ ID NO: 13233 - protein, 7 aa, Artificial Sequence
  Description of Artificial Sequence: Synthetic peptide
VRGAVAA

SEQ ID NO: 13234 - protein, 7 aa, Artificial Sequence
  Description of Artificial Sequence: Synthetic peptide
VRGIVAP

SEQ ID NO: 13235 - protein, 7 aa, Artificial Sequence
  Description of Artificial Sequence: Synthetic peptide
VRGPEMT

SEQ ID NO: 13236 - protein, 7 aa, Artificial Sequence
  Description of Artificial Sequence: Synthetic peptide
VRGPGED

SEQ ID NO: 13237 - protein, 7 aa, Artificial Sequence
  Description of Artificial Sequence: Synthetic peptide
VRGPHDT

SEQ ID NO: 13238 - protein, 7 aa, Artificial Sequence
  Description of Artificial Sequence: Synthetic peptide
VRGSLSM

SEQ ID NO: 13239 - protein, 7 aa, Artificial Sequence
  Description of Artificial Sequence: Synthetic peptide
VRGSLTS

SEQ ID NO: 13240 - protein, 7 aa, Artificial Sequence
  Description of Artificial Sequence: Synthetic peptide
VRGSQYA

SEQ ID NO: 13241 - protein, 7 aa, Artificial Sequence
  Description of Artificial Sequence: Synthetic peptide
VRGSTQA

SEQ ID NO: 13242 - protein, 7 aa, Artificial Sequence
  Description of Artificial Sequence: Synthetic peptide
VRGVQLD

SEQ ID NO: 13243 - protein, 7 aa, Artificial Sequence
  Description of Artificial Sequence: Synthetic peptide
VRGVSDS

SEQ ID NO: 13244 - protein, 7 aa, Artificial Sequence
  Description of Artificial Sequence: Synthetic peptide
VRHIKLE

SEQ ID NO: 13245 - protein, 7 aa, Artificial Sequence
  Description of Artificial Sequence: Synthetic peptide
VRHPGPE

SEQ ID NO: 13246 - protein, 7 aa, Artificial Sequence
  Description of Artificial Sequence: Synthetic peptide
VRKDYHL

SEQ ID NO: 13247 - protein, 7 aa, Artificial Sequence
  Description of Artificial Sequence: Synthetic peptide
VRLDASI

SEQ ID NO: 13248 - protein, 7 aa, Artificial Sequence
  Description of Artificial Sequence: Synthetic peptide
VRLDMAA

SEQ ID NO: 13249 - protein, 7 aa, Artificial Sequence
  Description of Artificial Sequence: Synthetic peptide
VRLDREG

SEQ ID NO: 13250 - protein, 7 aa, Artificial Sequence
  Description of Artificial Sequence: Synthetic peptide
VRLPDTS

SEQ ID NO: 13251 - protein, 7 aa, Artificial Sequence
  Description of Artificial Sequence: Synthetic peptide
VRLQGGL

SEQ ID NO: 13252 - protein, 7 aa, Artificial Sequence
  Description of Artificial Sequence: Synthetic peptide
VRLSEVP

SEQ ID NO: 13253 - protein, 7 aa, Artificial Sequence
  Description of Artificial Sequence: Synthetic peptide
VRMLPGD

SEQ ID NO: 13254 - protein, 7 aa, Artificial Sequence
  Description of Artificial Sequence: Synthetic peptide
VRNAPGA

SEQ ID NO: 13255 - protein, 7 aa, Artificial Sequence
  Description of Artificial Sequence: Synthetic peptide
VRNASDL

SEQ ID NO: 13256 - protein, 7 aa, Artificial Sequence
  Description of Artificial Sequence: Synthetic peptide
VRNIPSM

SEQ ID NO: 13257 - protein, 7 aa, Artificial Sequence
  Description of Artificial Sequence: Synthetic peptide
VRNSAMN

SEQ ID NO: 13258 - protein, 7 aa, Artificial Sequence
  Description of Artificial Sequence: Synthetic peptide
VRPADQF

SEQ ID NO: 13259 - protein, 7 aa, Artificial Sequence
  Description of Artificial Sequence: Synthetic peptide
VRPEREN

SEQ ID NO: 13260 - protein, 7 aa, Artificial Sequence
  Description of Artificial Sequence: Synthetic peptide
VRPGKLI

SEQ ID NO: 13261 - protein, 7 aa, Artificial Sequence
  Description of Artificial Sequence: Synthetic peptide
VRPHMTV

SEQ ID NO: 13262 - protein, 7 aa, Artificial Sequence
  Description of Artificial Sequence: Synthetic peptide
VRPIPPN

SEQ ID NO: 13263 - protein, 7 aa, Artificial Sequence
  Description of Artificial Sequence: Synthetic peptide
VRPLSIG

SEQ ID NO: 13264 - protein, 7 aa, Artificial Sequence
  Description of Artificial Sequence: Synthetic peptide
VRPQTAY

SEQ ID NO: 13265 - protein, 7 aa, Artificial Sequence
  Description of Artificial Sequence: Synthetic peptide
VRPRDGM

SEQ ID NO: 13266 - protein, 7 aa, Artificial Sequence
  Description of Artificial Sequence: Synthetic peptide
VRPSILA

SEQ ID NO: 13267 - protein, 7 aa, Artificial Sequence
  Description of Artificial Sequence: Synthetic peptide
VRPSSLE

SEQ ID NO: 13268 - protein, 7 aa, Artificial Sequence
  Description of Artificial Sequence: Synthetic peptide
VRPTNSG

SEQ ID NO: 13269 - protein, 7 aa, Artificial Sequence
  Description of Artificial Sequence: Synthetic peptide
VRPTQNS

SEQ ID NO: 13270 - protein, 7 aa, Artificial Sequence
  Description of Artificial Sequence: Synthetic peptide
VRPVKEV

SEQ ID NO: 13271 - protein, 7 aa, Artificial Sequence
  Description of Artificial Sequence: Synthetic peptide
VRPVNGV

SEQ ID NO: 13272 - protein, 7 aa, Artificial Sequence
  Description of Artificial Sequence: Synthetic peptide
VRQEIIS

SEQ ID NO: 13273 - protein, 7 aa, Artificial Sequence
  Description of Artificial Sequence: Synthetic peptide
VRQMTPG

SEQ ID NO: 13274 - protein, 7 aa, Artificial Sequence
  Description of Artificial Sequence: Synthetic peptide
VRQPGVD

SEQ ID NO: 13275 - protein, 7 aa, Artificial Sequence
  Description of Artificial Sequence: Synthetic peptide
VRQSSNT

SEQ ID NO: 13276 - protein, 7 aa, Artificial Sequence
  Description of Artificial Sequence: Synthetic peptide
VRRVASE

SEQ ID NO: 13277 - protein, 7 aa, Artificial Sequence
  Description of Artificial Sequence: Synthetic peptide
VRSAISD

SEQ ID NO: 13278 - protein, 7 aa, Artificial Sequence
  Description of Artificial Sequence: Synthetic peptide
VRSATFH

SEQ ID NO: 13279 - protein, 7 aa, Artificial Sequence
  Description of Artificial Sequence: Synthetic peptide
VRSLEQS

SEQ ID NO: 13280 - protein, 7 aa, Artificial Sequence
  Description of Artificial Sequence: Synthetic peptide
VRSPSHC

SEQ ID NO: 13281 - protein, 7 aa, Artificial Sequence
  Description of Artificial Sequence: Synthetic peptide
VRSQLPP

SEQ ID NO: 13282 - protein, 7 aa, Artificial Sequence
  Description of Artificial Sequence: Synthetic peptide
VRSSLDR

SEQ ID NO: 13283 - protein, 7 aa, Artificial Sequence
  Description of Artificial Sequence: Synthetic peptide
VRSSTYT

SEQ ID NO: 13284 - protein, 7 aa, Artificial Sequence
  Description of Artificial Sequence: Synthetic peptide
VRSVAPE

SEQ ID NO: 13285 - protein, 7 aa, Artificial Sequence
  Description of Artificial Sequence: Synthetic peptide
VRTLPSP

SEQ ID NO: 13286 - protein, 7 aa, Artificial Sequence
  Description of Artificial Sequence: Synthetic peptide
VRTMPHS

SEQ ID NO: 13287 - protein, 7 aa, Artificial Sequence
  Description of Artificial Sequence: Synthetic peptide
VRTPFEA

SEQ ID NO: 13288 - protein, 7 aa, Artificial Sequence
  Description of Artificial Sequence: Synthetic peptide
VRTQGLS

SEQ ID NO: 13289 - protein, 7 aa, Artificial Sequence
  Description of Artificial Sequence: Synthetic peptide
VRTQGTN

SEQ ID NO: 13290 - protein, 7 aa, Artificial Sequence
  Description of Artificial Sequence: Synthetic peptide
VRTSIGT

SEQ ID NO: 13291 - protein, 7 aa, Artificial Sequence
  Description of Artificial Sequence: Synthetic peptide
VRTSPMS

SEQ ID NO: 13292 - protein, 7 aa, Artificial Sequence
  Description of Artificial Sequence: Synthetic peptide
VRVAVPM

SEQ ID NO: 13293 - protein, 7 aa, Artificial Sequence
  Description of Artificial Sequence: Synthetic peptide
VRVGTIG

SEQ ID NO: 13294 - protein, 7 aa, Artificial Sequence
  Description of Artificial Sequence: Synthetic peptide
VRVGTLN

SEQ ID NO: 13295 - protein, 7 aa, Artificial Sequence
  Description of Artificial Sequence: Synthetic peptide
VRVMGSS

SEQ ID NO: 13296 - protein, 7 aa, Artificial Sequence
  Description of Artificial Sequence: Synthetic peptide
VSAASLT

SEQ ID NO: 13297 - protein, 7 aa, Artificial Sequence
  Description of Artificial Sequence: Synthetic peptide
VSAATSF

SEQ ID NO: 13298 - protein, 7 aa, Artificial Sequence
  Description of Artificial Sequence: Synthetic peptide
VSAHTNS

SEQ ID NO: 13299 - protein, 7 aa, Artificial Sequence
  Description of Artificial Sequence: Synthetic peptide
VSAIMDV

SEQ ID NO: 13300 - protein, 7 aa, Artificial Sequence
  Description of Artificial Sequence: Synthetic peptide
VSAISAT

SEQ ID NO: 13301 - protein, 7 aa, Artificial Sequence
  Description of Artificial Sequence: Synthetic peptide
VSAPEDH

SEQ ID NO: 13302 - protein, 7 aa, Artificial Sequence
  Description of Artificial Sequence: Synthetic peptide
VSAQISI

SEQ ID NO: 13303 - protein, 7 aa, Artificial Sequence
  Description of Artificial Sequence: Synthetic peptide
VSARESV

SEQ ID NO: 13304 - protein, 7 aa, Artificial Sequence
  Description of Artificial Sequence: Synthetic peptide
VSARSFQ

SEQ ID NO: 13305 - protein, 7 aa, Artificial Sequence
  Description of Artificial Sequence: Synthetic peptide
VSASAGR

SEQ ID NO: 13306 - protein, 7 aa, Artificial Sequence
  Description of Artificial Sequence: Synthetic peptide
VSASLAL

SEQ ID NO: 13307 - protein, 7 aa, Artificial Sequence
  Description of Artificial Sequence: Synthetic peptide
VSASSSA

SEQ ID NO: 13308 - protein, 7 aa, Artificial Sequence
  Description of Artificial Sequence: Synthetic peptide
VSATHVQ

SEQ ID NO: 13309 - protein, 7 aa, Artificial Sequence
  Description of Artificial Sequence: Synthetic peptide
VSATTSV

SEQ ID NO: 13310 - protein, 7 aa, Artificial Sequence
  Description of Artificial Sequence: Synthetic peptide
VSDDKSS

SEQ ID NO: 13311 - protein, 7 aa, Artificial Sequence
  Description of Artificial Sequence: Synthetic peptide
VSDGNKL

SEQ ID NO: 13312 - protein, 7 aa, Artificial Sequence
  Description of Artificial Sequence: Synthetic peptide
VSDNLWS

SEQ ID NO: 13313 - protein, 7 aa, Artificial Sequence
  Description of Artificial Sequence: Synthetic peptide
VSDSYQW

SEQ ID NO: 13314 - protein, 7 aa, Artificial Sequence
  Description of Artificial Sequence: Synthetic peptide
VSDVAFY

SEQ ID NO: 13315 - protein, 7 aa, Artificial Sequence
  Description of Artificial Sequence: Synthetic peptide
VSDVTSD

SEQ ID NO: 13316 - protein, 7 aa, Artificial Sequence
  Description of Artificial Sequence: Synthetic peptide
VSDYLTQ

SEQ ID NO: 13317 - protein, 7 aa, Artificial Sequence
  Description of Artificial Sequence: Synthetic peptide
VSFPYEE

SEQ ID NO: 13318 - protein, 7 aa, Artificial Sequence
  Description of Artificial Sequence: Synthetic peptide
VSFQPLG

SEQ ID NO: 13319 - protein, 7 aa, Artificial Sequence
  Description of Artificial Sequence: Synthetic peptide
VSGFNQH

SEQ ID NO: 13320 - protein, 7 aa, Artificial Sequence
  Description of Artificial Sequence: Synthetic peptide
VSGPNHY

SEQ ID NO: 13321 - protein, 7 aa, Artificial Sequence
  Description of Artificial Sequence: Synthetic peptide
VSGSLQY

SEQ ID NO: 13322 - protein, 7 aa, Artificial Sequence
  Description of Artificial Sequence: Synthetic peptide
VSGSTRT

SEQ ID NO: 13323 - protein, 7 aa, Artificial Sequence
  Description of Artificial Sequence: Synthetic peptide
VSHATHQ

SEQ ID NO: 13324 - protein, 7 aa, Artificial Sequence
  Description of Artificial Sequence: Synthetic peptide
VSHGMNM

SEQ ID NO: 13325 - protein, 7 aa, Artificial Sequence
  Description of Artificial Sequence: Synthetic peptide
VSHGMSS

SEQ ID NO: 13326 - protein, 7 aa, Artificial Sequence
  Description of Artificial Sequence: Synthetic peptide
VSHPNAP

SEQ ID NO: 13327 - protein, 7 aa, Artificial Sequence
  Description of Artificial Sequence: Synthetic peptide
VSHTMQE

SEQ ID NO: 13328 - protein, 7 aa, Artificial Sequence
  Description of Artificial Sequence: Synthetic peptide
VSIAGAS

SEQ ID NO: 13329 - protein, 7 aa, Artificial Sequence
  Description of Artificial Sequence: Synthetic peptide
VSISIPS

SEQ ID NO: 13330 - protein, 7 aa, Artificial Sequence
  Description of Artificial Sequence: Synthetic peptide
VSISMPP

SEQ ID NO: 13331 - protein, 7 aa, Artificial Sequence
  Description of Artificial Sequence: Synthetic peptide
VSKEMIL

SEQ ID NO: 13332 - protein, 7 aa, Artificial Sequence
  Description of Artificial Sequence: Synthetic peptide
VSKPTNS

SEQ ID NO: 13333 - protein, 7 aa, Artificial Sequence
  Description of Artificial Sequence: Synthetic peptide
VSKSISS

SEQ ID NO: 13334 - protein, 7 aa, Artificial Sequence
  Description of Artificial Sequence: Synthetic peptide
VSLGYPD

SEQ ID NO: 13335 - protein, 7 aa, Artificial Sequence
  Description of Artificial Sequence: Synthetic peptide
VSLLPTS

SEQ ID NO: 13336 - protein, 7 aa, Artificial Sequence
  Description of Artificial Sequence: Synthetic peptide
VSLLTSK

SEQ ID NO: 13337 - protein, 7 aa, Artificial Sequence
  Description of Artificial Sequence: Synthetic peptide
VSLPQER

SEQ ID NO: 13338 - protein, 7 aa, Artificial Sequence
  Description of Artificial Sequence: Synthetic peptide
VSLQGID

SEQ ID NO: 13339 - protein, 7 aa, Artificial Sequence
  Description of Artificial Sequence: Synthetic peptide
VSLRAPT

SEQ ID NO: 13340 - protein, 7 aa, Artificial Sequence
  Description of Artificial Sequence: Synthetic peptide
VSLRHTA

SEQ ID NO: 13341 - protein, 7 aa, Artificial Sequence
  Description of Artificial Sequence: Synthetic peptide
VSLSPIS

SEQ ID NO: 13342 - protein, 7 aa, Artificial Sequence
  Description of Artificial Sequence: Synthetic peptide
VSLSTTA

SEQ ID NO: 13343 - protein, 7 aa, Artificial Sequence
  Description of Artificial Sequence: Synthetic peptide
VSLTLSS

SEQ ID NO: 13344 - protein, 7 aa, Artificial Sequence
  Description of Artificial Sequence: Synthetic peptide
VSMGRPL

SEQ ID NO: 13345 - protein, 7 aa, Artificial Sequence
  Description of Artificial Sequence: Synthetic peptide
VSMHLEP

SEQ ID NO: 13346 - protein, 7 aa, Artificial Sequence
  Description of Artificial Sequence: Synthetic peptide
VSMKNLH

SEQ ID NO: 13347 - protein, 7 aa, Artificial Sequence
  Description of Artificial Sequence: Synthetic peptide
VSMMEPE

SEQ ID NO: 13348 - protein, 7 aa, Artificial Sequence
  Description of Artificial Sequence: Synthetic peptide
VSMPSRS

SEQ ID NO: 13349 - protein, 7 aa, Artificial Sequence
  Description of Artificial Sequence: Synthetic peptide
VSNAARM

SEQ ID NO: 13350 - protein, 7 aa, Artificial Sequence
  Description of Artificial Sequence: Synthetic peptide
VSNFQNP

SEQ ID NO: 13351 - protein, 7 aa, Artificial Sequence
  Description of Artificial Sequence: Synthetic peptide
VSNISSP

SEQ ID NO: 13352 - protein, 7 aa, Artificial Sequence
  Description of Artificial Sequence: Synthetic peptide
VSNMQFA

SEQ ID NO: 13353 - protein, 7 aa, Artificial Sequence
  Description of Artificial Sequence: Synthetic peptide
VSNPDLM

SEQ ID NO: 13354 - protein, 7 aa, Artificial Sequence
  Description of Artificial Sequence: Synthetic peptide
VSNPQVS

SEQ ID NO: 13355 - protein, 7 aa, Artificial Sequence
  Description of Artificial Sequence: Synthetic peptide
VSNQAGY

SEQ ID NO: 13356 - protein, 7 aa, Artificial Sequence
  Description of Artificial Sequence: Synthetic peptide
VSNQKQV

SEQ ID NO: 13357 - protein, 7 aa, Artificial Sequence
  Description of Artificial Sequence: Synthetic peptide
VSNRSTQ

SEQ ID NO: 13358 - protein, 7 aa, Artificial Sequence
  Description of Artificial Sequence: Synthetic peptide
VSNSMAH

SEQ ID NO: 13359 - protein, 7 aa, Artificial Sequence
  Description of Artificial Sequence: Synthetic peptide
VSNTLLV

SEQ ID NO: 13360 - protein, 7 aa, Artificial Sequence
  Description of Artificial Sequence: Synthetic peptide
VSPAFHK

SEQ ID NO: 13361 - protein, 7 aa, Artificial Sequence
  Description of Artificial Sequence: Synthetic peptide
VSPAWHG

SEQ ID NO: 13362 - protein, 7 aa, Artificial Sequence
  Description of Artificial Sequence: Synthetic peptide
VSPEEDR

SEQ ID NO: 13363 - protein, 7 aa, Artificial Sequence
  Description of Artificial Sequence: Synthetic peptide
VSPEPLR

SEQ ID NO: 13364 - protein, 7 aa, Artificial Sequence
  Description of Artificial Sequence: Synthetic peptide
VSPGNPA

SEQ ID NO: 13365 - protein, 7 aa, Artificial Sequence
  Description of Artificial Sequence: Synthetic peptide
VSPHPVH

SEQ ID NO: 13366 - protein, 7 aa, Artificial Sequence
  Description of Artificial Sequence: Synthetic peptide
VSPLLPS

SEQ ID NO: 13367 - protein, 7 aa, Artificial Sequence
  Description of Artificial Sequence: Synthetic peptide
VSPLNTS

SEQ ID NO: 13368 - protein, 7 aa, Artificial Sequence
  Description of Artificial Sequence: Synthetic peptide
VSPMTEI

SEQ ID NO: 13369 - protein, 7 aa, Artificial Sequence
  Description of Artificial Sequence: Synthetic peptide
VSPRPGQ

SEQ ID NO: 13370 - protein, 7 aa, Artificial Sequence
  Description of Artificial Sequence: Synthetic peptide
VSPSNRG

SEQ ID NO: 13371 - protein, 7 aa, Artificial Sequence
  Description of Artificial Sequence: Synthetic peptide
VSPSSAL

SEQ ID NO: 13372 - protein, 7 aa, Artificial Sequence
  Description of Artificial Sequence: Synthetic peptide
VSPTQHF

SEQ ID NO: 13373 - protein, 7 aa, Artificial Sequence
  Description of Artificial Sequence: Synthetic peptide
VSPTYSL

SEQ ID NO: 13374 - protein, 7 aa, Artificial Sequence
  Description of Artificial Sequence: Synthetic peptide
VSPVYTS

SEQ ID NO: 13375 - protein, 7 aa, Artificial Sequence
  Description of Artificial Sequence: Synthetic peptide
VSPYPRD

SEQ ID NO: 13376 - protein, 7 aa, Artificial Sequence
  Description of Artificial Sequence: Synthetic peptide
VSQLGSP

SEQ ID NO: 13377 - protein, 7 aa, Artificial Sequence
  Description of Artificial Sequence: Synthetic peptide
VSQLTQV

SEQ ID NO: 13378 - protein, 7 aa, Artificial Sequence
  Description of Artificial Sequence: Synthetic peptide
VSQPSYG

SEQ ID NO: 13379 - protein, 7 aa, Artificial Sequence
  Description of Artificial Sequence: Synthetic peptide
VSQSYTN

SEQ ID NO: 13380 - protein, 7 aa, Artificial Sequence
  Description of Artificial Sequence: Synthetic peptide
VSQVKQG

SEQ ID NO: 13381 - protein, 7 aa, Artificial Sequence
  Description of Artificial Sequence: Synthetic peptide
VSRATPN

SEQ ID NO: 13382 - protein, 7 aa, Artificial Sequence
  Description of Artificial Sequence: Synthetic peptide
VSREINS

SEQ ID NO: 13383 - protein, 7 aa, Artificial Sequence
  Description of Artificial Sequence: Synthetic peptide
VSRQDSL

SEQ ID NO: 13384 - protein, 7 aa, Artificial Sequence
  Description of Artificial Sequence: Synthetic peptide
VSRSGNS

SEQ ID NO: 13385 - protein, 7 aa, Artificial Sequence
  Description of Artificial Sequence: Synthetic peptide
VSRTMDT

SEQ ID NO: 13386 - protein, 7 aa, Artificial Sequence
  Description of Artificial Sequence: Synthetic peptide
VSRVELA

SEQ ID NO: 13387 - protein, 7 aa, Artificial Sequence
  Description of Artificial Sequence: Synthetic peptide
VSSAHSI

SEQ ID NO: 13388 - protein, 7 aa, Artificial Sequence
  Description of Artificial Sequence: Synthetic peptide
VSSAHTS

SEQ ID NO: 13389 - protein, 7 aa, Artificial Sequence
  Description of Artificial Sequence: Synthetic peptide
VSSAISY

SEQ ID NO: 13390 - protein, 7 aa, Artificial Sequence
  Description of Artificial Sequence: Synthetic peptide
VSSARGT

SEQ ID NO: 13391 - protein, 7 aa, Artificial Sequence
  Description of Artificial Sequence: Synthetic peptide
VSSASPM

SEQ ID NO: 13392 - protein, 7 aa, Artificial Sequence
  Description of Artificial Sequence: Synthetic peptide
VSSDRLL

SEQ ID NO: 13393 - protein, 7 aa, Artificial Sequence
  Description of Artificial Sequence: Synthetic peptide
VSSDYSN

SEQ ID NO: 13394 - protein, 7 aa, Artificial Sequence
  Description of Artificial Sequence: Synthetic peptide
VSSFLED

SEQ ID NO: 13395 - protein, 7 aa, Artificial Sequence
  Description of Artificial Sequence: Synthetic peptide
VSSLELA

SEQ ID NO: 13396 - protein, 7 aa, Artificial Sequence
  Description of Artificial Sequence: Synthetic peptide
VSSLKTY

SEQ ID NO: 13397 - protein, 7 aa, Artificial Sequence
  Description of Artificial Sequence: Synthetic peptide
VSSLRGP

SEQ ID NO: 13398 - protein, 7 aa, Artificial Sequence
  Description of Artificial Sequence: Synthetic peptide
VSSLSSL

SEQ ID NO: 13399 - protein, 7 aa, Artificial Sequence
  Description of Artificial Sequence: Synthetic peptide
VSSMLDA

SEQ ID NO: 13400 - protein, 7 aa, Artificial Sequence
  Description of Artificial Sequence: Synthetic peptide
VSSMNIV

SEQ ID NO: 13401 - protein, 7 aa, Artificial Sequence
  Description of Artificial Sequence: Synthetic peptide
VSSMPVP

SEQ ID NO: 13402 - protein, 7 aa, Artificial Sequence
  Description of Artificial Sequence: Synthetic peptide
VSSNSFA

SEQ ID NO: 13403 - protein, 7 aa, Artificial Sequence
  Description of Artificial Sequence: Synthetic peptide
VSSPDSN

SEQ ID NO: 13404 - protein, 7 aa, Artificial Sequence
  Description of Artificial Sequence: Synthetic peptide
VSSPLSG

SEQ ID NO: 13405 - protein, 7 aa, Artificial Sequence
  Description of Artificial Sequence: Synthetic peptide
VSSPPDL

SEQ ID NO: 13406 - protein, 7 aa, Artificial Sequence
  Description of Artificial Sequence: Synthetic peptide
VSSPREH

SEQ ID NO: 13407 - protein, 7 aa, Artificial Sequence
  Description of Artificial Sequence: Synthetic peptide
VSSQNVF

SEQ ID NO: 13408 - protein, 7 aa, Artificial Sequence
  Description of Artificial Sequence: Synthetic peptide
VSSQRNG

SEQ ID NO: 13409 - protein, 7 aa, Artificial Sequence
  Description of Artificial Sequence: Synthetic peptide
VSSRYHA

SEQ ID NO: 13410 - protein, 7 aa, Artificial Sequence
  Description of Artificial Sequence: Synthetic peptide
VSSSGMT

SEQ ID NO: 13411 - protein, 7 aa, Artificial Sequence
  Description of Artificial Sequence: Synthetic peptide
VSSSLMS

SEQ ID NO: 13412 - protein, 7 aa, Artificial Sequence
  Description of Artificial Sequence: Synthetic peptide
VSSSQMP

SEQ ID NO: 13413 - protein, 7 aa, Artificial Sequence
  Description of Artificial Sequence: Synthetic peptide
VSSSVLR

SEQ ID NO: 13414 - protein, 7 aa, Artificial Sequence
  Description of Artificial Sequence: Synthetic peptide
VSSTIVM

SEQ ID NO: 13415 - protein, 7 aa, Artificial Sequence
  Description of Artificial Sequence: Synthetic peptide
VSSVVSG

SEQ ID NO: 13416 - protein, 7 aa, Artificial Sequence
  Description of Artificial Sequence: Synthetic peptide
VSTAHQS

SEQ ID NO: 13417 - protein, 7 aa, Artificial Sequence
  Description of Artificial Sequence: Synthetic peptide
VSTFGPT

SEQ ID NO: 13418 - protein, 7 aa, Artificial Sequence
  Description of Artificial Sequence: Synthetic peptide
VSTGLTK

SEQ ID NO: 13419 - protein, 7 aa, Artificial Sequence
  Description of Artificial Sequence: Synthetic peptide
VSTGYAV

SEQ ID NO: 13420 - protein, 7 aa, Artificial Sequence
  Description of Artificial Sequence: Synthetic peptide
VSTIAFE

SEQ ID NO: 13421 - protein, 7 aa, Artificial Sequence
  Description of Artificial Sequence: Synthetic peptide
VSTISSL

SEQ ID NO: 13422 - protein, 7 aa, Artificial Sequence
  Description of Artificial Sequence: Synthetic peptide
VSTLQAG

SEQ ID NO: 13423 - protein, 7 aa, Artificial Sequence
  Description of Artificial Sequence: Synthetic peptide
VSTMRSP

SEQ ID NO: 13424 - protein, 7 aa, Artificial Sequence
  Description of Artificial Sequence: Synthetic peptide
VSTPNNK

SEQ ID NO: 13425 - protein, 7 aa, Artificial Sequence
  Description of Artificial Sequence: Synthetic peptide
VSTQTYK

SEQ ID NO: 13426 - protein, 7 aa, Artificial Sequence
  Description of Artificial Sequence: Synthetic peptide
VSTRQLL

SEQ ID NO: 13427 - protein, 7 aa, Artificial Sequence
  Description of Artificial Sequence: Synthetic peptide
VSTSVLR

SEQ ID NO: 13428 - protein, 7 aa, Artificial Sequence
  Description of Artificial Sequence: Synthetic peptide
VSTTFKV

SEQ ID NO: 13429 - protein, 7 aa, Artificial Sequence
  Description of Artificial Sequence: Synthetic peptide
VSVKVHD

SEQ ID NO: 13430 - protein, 7 aa, Artificial Sequence
  Description of Artificial Sequence: Synthetic peptide
VSVQSSR

SEQ ID NO: 13431 - protein, 7 aa, Artificial Sequence
  Description of Artificial Sequence: Synthetic peptide
VSVSTHH

SEQ ID NO: 13432 - protein, 7 aa, Artificial Sequence
  Description of Artificial Sequence: Synthetic peptide
VSVSVGE

SEQ ID NO: 13433 - protein, 7 aa, Artificial Sequence
  Description of Artificial Sequence: Synthetic peptide
VSVTAGG

SEQ ID NO: 13434 - protein, 7 aa, Artificial Sequence
  Description of Artificial Sequence: Synthetic peptide
VSVTSAG

SEQ ID NO: 13435 - protein, 7 aa, Artificial Sequence
  Description of Artificial Sequence: Synthetic peptide
VSYAMEN

SEQ ID NO: 13436 - protein, 7 aa, Artificial Sequence
  Description of Artificial Sequence: Synthetic peptide
VSYPAQA

SEQ ID NO: 13437 - protein, 7 aa, Artificial Sequence
  Description of Artificial Sequence: Synthetic peptide
VTAGPMR

SEQ ID NO: 13438 - protein, 7 aa, Artificial Sequence
  Description of Artificial Sequence: Synthetic peptide
VTALTIA

SEQ ID NO: 13439 - protein, 7 aa, Artificial Sequence
  Description of Artificial Sequence: Synthetic peptide
VTALVKD

SEQ ID NO: 13440 - protein, 7 aa, Artificial Sequence
  Description of Artificial Sequence: Synthetic peptide
VTANLPQ

SEQ ID NO: 13441 - protein, 7 aa, Artificial Sequence
  Description of Artificial Sequence: Synthetic peptide
VTANVLP

SEQ ID NO: 13442 - protein, 7 aa, Artificial Sequence
  Description of Artificial Sequence: Synthetic peptide
VTAPVTG

SEQ ID NO: 13443 - protein, 7 aa, Artificial Sequence
  Description of Artificial Sequence: Synthetic peptide
VTAQSSV

SEQ ID NO: 13444 - protein, 7 aa, Artificial Sequence
  Description of Artificial Sequence: Synthetic peptide
VTARSLA

SEQ ID NO: 13445 - protein, 7 aa, Artificial Sequence
  Description of Artificial Sequence: Synthetic peptide
VTASHRV

SEQ ID NO: 13446 - protein, 7 aa, Artificial Sequence
  Description of Artificial Sequence: Synthetic peptide
VTDAVTT

SEQ ID NO: 13447 - protein, 7 aa, Artificial Sequence
  Description of Artificial Sequence: Synthetic peptide
VTDNVRN

SEQ ID NO: 13448 - protein, 7 aa, Artificial Sequence
  Description of Artificial Sequence: Synthetic peptide
VTDSTDD

SEQ ID NO: 13449 - protein, 7 aa, Artificial Sequence
  Description of Artificial Sequence: Synthetic peptide
VTDTRER

SEQ ID NO: 13450 - protein, 7 aa, Artificial Sequence
  Description of Artificial Sequence: Synthetic peptide
VTEARSA

SEQ ID NO: 13451 - protein, 7 aa, Artificial Sequence
  Description of Artificial Sequence: Synthetic peptide
VTEESDM

SEQ ID NO: 13452 - protein, 7 aa, Artificial Sequence
  Description of Artificial Sequence: Synthetic peptide
VTEESNT

SEQ ID NO: 13453 - protein, 7 aa, Artificial Sequence
  Description of Artificial Sequence: Synthetic peptide
VTEHLKN

SEQ ID NO: 13454 - protein, 7 aa, Artificial Sequence
  Description of Artificial Sequence: Synthetic peptide
VTERMTL

SEQ ID NO: 13455 - protein, 7 aa, Artificial Sequence
  Description of Artificial Sequence: Synthetic peptide
VTFSSSG

SEQ ID NO: 13456 - protein, 7 aa, Artificial Sequence
  Description of Artificial Sequence: Synthetic peptide
VTGARLA

SEQ ID NO: 13457 - protein, 7 aa, Artificial Sequence
  Description of Artificial Sequence: Synthetic peptide
VTGHAIL

SEQ ID NO: 13458 - protein, 7 aa, Artificial Sequence
  Description of Artificial Sequence: Synthetic peptide
VTGKPSL

SEQ ID NO: 13459 - protein, 7 aa, Artificial Sequence
  Description of Artificial Sequence: Synthetic peptide
VTGPGLR

SEQ ID NO: 13460 - protein, 7 aa, Artificial Sequence
  Description of Artificial Sequence: Synthetic peptide
VTGTRTV

SEQ ID NO: 13461 - protein, 7 aa, Artificial Sequence
  Description of Artificial Sequence: Synthetic peptide
VTHLMQG

SEQ ID NO: 13462 - protein, 7 aa, Artificial Sequence
  Description of Artificial Sequence: Synthetic peptide
VTHPNLS

SEQ ID NO: 13463 - protein, 7 aa, Artificial Sequence
  Description of Artificial Sequence: Synthetic peptide
VTHTEFP

SEQ ID NO: 13464 - protein, 7 aa, Artificial Sequence
  Description of Artificial Sequence: Synthetic peptide
VTHTGHK

SEQ ID NO: 13465 - protein, 7 aa, Artificial Sequence
  Description of Artificial Sequence: Synthetic peptide
VTHYSSV

SEQ ID NO: 13466 - protein, 7 aa, Artificial Sequence
  Description of Artificial Sequence: Synthetic peptide
VTIDDYP

SEQ ID NO: 13467 - protein, 7 aa, Artificial Sequence
  Description of Artificial Sequence: Synthetic peptide
VTKASAP

SEQ ID NO: 13468 - protein, 7 aa, Artificial Sequence
  Description of Artificial Sequence: Synthetic peptide
VTLKPLS

SEQ ID NO: 13469 - protein, 7 aa, Artificial Sequence
  Description of Artificial Sequence: Synthetic peptide
VTLLASR

SEQ ID NO: 13470 - protein, 7 aa, Artificial Sequence
  Description of Artificial Sequence: Synthetic peptide
VTLPLTR

SEQ ID NO: 13471 - protein, 7 aa, Artificial Sequence
  Description of Artificial Sequence: Synthetic peptide
VTLQRPG

SEQ ID NO: 13472 - protein, 7 aa, Artificial Sequence
  Description of Artificial Sequence: Synthetic peptide
VTLSAEG

SEQ ID NO: 13473 - protein, 7 aa, Artificial Sequence
  Description of Artificial Sequence: Synthetic peptide
VTLSDRL

SEQ ID NO: 13474 - protein, 7 aa, Artificial Sequence
  Description of Artificial Sequence: Synthetic peptide
VTMSTIR

SEQ ID NO: 13475 - protein, 7 aa, Artificial Sequence
  Description of Artificial Sequence: Synthetic peptide
VTNRVHP

SEQ ID NO: 13476 - protein, 7 aa, Artificial Sequence
  Description of Artificial Sequence: Synthetic peptide
VTPDLRH

SEQ ID NO: 13477 - protein, 7 aa, Artificial Sequence
  Description of Artificial Sequence: Synthetic peptide
VTPDSLK

SEQ ID NO: 13478 - protein, 7 aa, Artificial Sequence
  Description of Artificial Sequence: Synthetic peptide
VTPDYRN

SEQ ID NO: 13479 - protein, 7 aa, Artificial Sequence
  Description of Artificial Sequence: Synthetic peptide
VTPGLAY

SEQ ID NO: 13480 - protein, 7 aa, Artificial Sequence
  Description of Artificial Sequence: Synthetic peptide
VTPLLTA

SEQ ID NO: 13481 - protein, 7 aa, Artificial Sequence
  Description of Artificial Sequence: Synthetic peptide
VTPQTNF

SEQ ID NO: 13482 - protein, 7 aa, Artificial Sequence
  Description of Artificial Sequence: Synthetic peptide
VTPVGKT

SEQ ID NO: 13483 - protein, 7 aa, Artificial Sequence
  Description of Artificial Sequence: Synthetic peptide
VTQHTST

SEQ ID NO: 13484 - protein, 7 aa, Artificial Sequence
  Description of Artificial Sequence: Synthetic peptide
VTQILRT

SEQ ID NO: 13485 - protein, 7 aa, Artificial Sequence
  Description of Artificial Sequence: Synthetic peptide
VTQPHAS

SEQ ID NO: 13486 - protein, 7 aa, Artificial Sequence
  Description of Artificial Sequence: Synthetic peptide
VTRALHD

SEQ ID NO: 13487 - protein, 7 aa, Artificial Sequence
  Description of Artificial Sequence: Synthetic peptide
VTRMESA

SEQ ID NO: 13488 - protein, 7 aa, Artificial Sequence
  Description of Artificial Sequence: Synthetic peptide
VTSALVR

SEQ ID NO: 13489 - protein, 7 aa, Artificial Sequence
  Description of Artificial Sequence: Synthetic peptide
VTSAMQG

SEQ ID NO: 13490 - protein, 7 aa, Artificial Sequence
  Description of Artificial Sequence: Synthetic peptide
VTSASTH

SEQ ID NO: 13491 - protein, 7 aa, Artificial Sequence
  Description of Artificial Sequence: Synthetic peptide
VTSFVAP

SEQ ID NO: 13492 - protein, 7 aa, Artificial Sequence
  Description of Artificial Sequence: Synthetic peptide
VTSHTGE

SEQ ID NO: 13493 - protein, 7 aa, Artificial Sequence
  Description of Artificial Sequence: Synthetic peptide
VTSPTFE

SEQ ID NO: 13494 - protein, 7 aa, Artificial Sequence
  Description of Artificial Sequence: Synthetic peptide
VTSRSAV

SEQ ID NO: 13495 - protein, 7 aa, Artificial Sequence
  Description of Artificial Sequence: Synthetic peptide
VTSSTQL

SEQ ID NO: 13496 - protein, 7 aa, Artificial Sequence
  Description of Artificial Sequence: Synthetic peptide
VTSTSTN

SEQ ID NO: 13497 - protein, 7 aa, Artificial Sequence
  Description of Artificial Sequence: Synthetic peptide
VTSVSPI

SEQ ID NO: 13498 - protein, 7 aa, Artificial Sequence
  Description of Artificial Sequence: Synthetic peptide
VTTATGI

SEQ ID NO: 13499 - protein, 7 aa, Artificial Sequence
  Description of Artificial Sequence: Synthetic peptide
VTTEPRF

SEQ ID NO: 13500 - protein, 7 aa, Artificial Sequence
  Description of Artificial Sequence: Synthetic peptide
VTTIRAH

SEQ ID NO: 13501 - protein, 7 aa, Artificial Sequence
  Description of Artificial Sequence: Synthetic peptide
VTTKQTC

SEQ ID NO: 13502 - protein, 7 aa, Artificial Sequence
  Description of Artificial Sequence: Synthetic peptide
VTTNGPI

SEQ ID NO: 13503 - protein, 7 aa, Artificial Sequence
  Description of Artificial Sequence: Synthetic peptide
VTTQFES

SEQ ID NO: 13504 - protein, 7 aa, Artificial Sequence
  Description of Artificial Sequence: Synthetic peptide
VTTRPYP

SEQ ID NO: 13505 - protein, 7 aa, Artificial Sequence
  Description of Artificial Sequence: Synthetic peptide
VTTSRYL

SEQ ID NO: 13506 - protein, 7 aa, Artificial Sequence
  Description of Artificial Sequence: Synthetic peptide
VTTSTSR

SEQ ID NO: 13507 - protein, 7 aa, Artificial Sequence
  Description of Artificial Sequence: Synthetic peptide
VTTTQIT

SEQ ID NO: 13508 - protein, 7 aa, Artificial Sequence
  Description of Artificial Sequence: Synthetic peptide
VTTVILD

SEQ ID NO: 13509 - protein, 7 aa, Artificial Sequence
  Description of Artificial Sequence: Synthetic peptide
VTVHSHF

SEQ ID NO: 13510 - protein, 7 aa, Artificial Sequence
  Description of Artificial Sequence: Synthetic peptide
VTVPLPS

SEQ ID NO: 13511 - protein, 7 aa, Artificial Sequence
  Description of Artificial Sequence: Synthetic peptide
VTVQMNV

SEQ ID NO: 13512 - protein, 7 aa, Artificial Sequence
  Description of Artificial Sequence: Synthetic peptide
VTVRGSI

SEQ ID NO: 13513 - protein, 7 aa, Artificial Sequence
  Description of Artificial Sequence: Synthetic peptide
VTVTGTI

SEQ ID NO: 13514 - protein, 7 aa, Artificial Sequence
  Description of Artificial Sequence: Synthetic peptide
VTYSPLG

SEQ ID NO: 13515 - protein, 7 aa, Artificial Sequence
  Description of Artificial Sequence: Synthetic peptide
VVAGRSS

SEQ ID NO: 13516 - protein, 7 aa, Artificial Sequence
  Description of Artificial Sequence: Synthetic peptide
VVAQPGH

SEQ ID NO: 13517 - protein, 7 aa, Artificial Sequence
  Description of Artificial Sequence: Synthetic peptide
VVATTLN

SEQ ID NO: 13518 - protein, 7 aa, Artificial Sequence
  Description of Artificial Sequence: Synthetic peptide
VVDSPRA

SEQ ID NO: 13519 - protein, 7 aa, Artificial Sequence
  Description of Artificial Sequence: Synthetic peptide
VVDVPLR

SEQ ID NO: 13520 - protein, 7 aa, Artificial Sequence
  Description of Artificial Sequence: Synthetic peptide
VVETFEP

SEQ ID NO: 13521 - protein, 7 aa, Artificial Sequence
  Description of Artificial Sequence: Synthetic peptide
VVGDGTI

SEQ ID NO: 13522 - protein, 7 aa, Artificial Sequence
  Description of Artificial Sequence: Synthetic peptide
VVGDQAD

SEQ ID NO: 13523 - protein, 7 aa, Artificial Sequence
  Description of Artificial Sequence: Synthetic peptide
VVGGQLL

SEQ ID NO: 13524 - protein, 7 aa, Artificial Sequence
  Description of Artificial Sequence: Synthetic peptide
VVGIRGE

SEQ ID NO: 13525 - protein, 7 aa, Artificial Sequence
  Description of Artificial Sequence: Synthetic peptide
VVGMGTG

SEQ ID NO: 13526 - protein, 7 aa, Artificial Sequence
  Description of Artificial Sequence: Synthetic peptide
VVGPSLP

SEQ ID NO: 13527 - protein, 7 aa, Artificial Sequence
  Description of Artificial Sequence: Synthetic peptide
VVGRQER

SEQ ID NO: 13528 - protein, 7 aa, Artificial Sequence
  Description of Artificial Sequence: Synthetic peptide
VVGRSNP

SEQ ID NO: 13529 - protein, 7 aa, Artificial Sequence
  Description of Artificial Sequence: Synthetic peptide
VVGSPTR

SEQ ID NO: 13530 - protein, 7 aa, Artificial Sequence
  Description of Artificial Sequence: Synthetic peptide
VVGSSGP

SEQ ID NO: 13531 - protein, 7 aa, Artificial Sequence
  Description of Artificial Sequence: Synthetic peptide
VVHPPGQ

SEQ ID NO: 13532 - protein, 7 aa, Artificial Sequence
  Description of Artificial Sequence: Synthetic peptide
VVHPSPG

SEQ ID NO: 13533 - protein, 7 aa, Artificial Sequence
  Description of Artificial Sequence: Synthetic peptide
VVHSNEP

SEQ ID NO: 13534 - protein, 7 aa, Artificial Sequence
  Description of Artificial Sequence: Synthetic peptide
VVHTMSV

SEQ ID NO: 13535 - protein, 7 aa, Artificial Sequence
  Description of Artificial Sequence: Synthetic peptide
VVHVSHP

SEQ ID NO: 13536 - protein, 7 aa, Artificial Sequence
  Description of Artificial Sequence: Synthetic peptide
VVHVVNS

SEQ ID NO: 13537 - protein, 7 aa, Artificial Sequence
  Description of Artificial Sequence: Synthetic peptide
VVIDQNG

SEQ ID NO: 13538 - protein, 7 aa, Artificial Sequence
  Description of Artificial Sequence: Synthetic peptide
VVLKDNH

SEQ ID NO: 13539 - protein, 7 aa, Artificial Sequence
  Description of Artificial Sequence: Synthetic peptide
VVMRDDP

SEQ ID NO: 13540 - protein, 7 aa, Artificial Sequence
  Description of Artificial Sequence: Synthetic peptide
VVNASAN

SEQ ID NO: 13541 - protein, 7 aa, Artificial Sequence
  Description of Artificial Sequence: Synthetic peptide
VVNNLRI

SEQ ID NO: 13542 - protein, 7 aa, Artificial Sequence
  Description of Artificial Sequence: Synthetic peptide
VVNQAQL

SEQ ID NO: 13543 - protein, 7 aa, Artificial Sequence
  Description of Artificial Sequence: Synthetic peptide
VVNTKAN

SEQ ID NO: 13544 - protein, 7 aa, Artificial Sequence
  Description of Artificial Sequence: Synthetic peptide
VVNTKSG

SEQ ID NO: 13545 - protein, 7 aa, Artificial Sequence
  Description of Artificial Sequence: Synthetic peptide
VVPALKM

SEQ ID NO: 13546 - protein, 7 aa, Artificial Sequence
  Description of Artificial Sequence: Synthetic peptide
VVPHSRQ

SEQ ID NO: 13547 - protein, 7 aa, Artificial Sequence
  Description of Artificial Sequence: Synthetic peptide
VVPLGPV

SEQ ID NO: 13548 - protein, 7 aa, Artificial Sequence
  Description of Artificial Sequence: Synthetic peptide
VVPRDPG

SEQ ID NO: 13549 - protein, 7 aa, Artificial Sequence
  Description of Artificial Sequence: Synthetic peptide
VVPRMTG

SEQ ID NO: 13550 - protein, 7 aa, Artificial Sequence
  Description of Artificial Sequence: Synthetic peptide
VVPRPGM

SEQ ID NO: 13551 - protein, 7 aa, Artificial Sequence
  Description of Artificial Sequence: Synthetic peptide
VVPRSGD

SEQ ID NO: 13552 - protein, 7 aa, Artificial Sequence
  Description of Artificial Sequence: Synthetic peptide
VVPTDDG

SEQ ID NO: 13553 - protein, 7 aa, Artificial Sequence
  Description of Artificial Sequence: Synthetic peptide
VVQPRAG

SEQ ID NO: 13554 - protein, 7 aa, Artificial Sequence
  Description of Artificial Sequence: Synthetic peptide
VVQQSSL

SEQ ID NO: 13555 - protein, 7 aa, Artificial Sequence
  Description of Artificial Sequence: Synthetic peptide
VVRASSV

SEQ ID NO: 13556 - protein, 7 aa, Artificial Sequence
  Description of Artificial Sequence: Synthetic peptide
VVRGSSV

SEQ ID NO: 13557 - protein, 7 aa, Artificial Sequence
  Description of Artificial Sequence: Synthetic peptide
VVRNAGG

SEQ ID NO: 13558 - protein, 7 aa, Artificial Sequence
  Description of Artificial Sequence: Synthetic peptide
VVRNAIN

SEQ ID NO: 13559 - protein, 7 aa, Artificial Sequence
  Description of Artificial Sequence: Synthetic peptide
VVRPSGL

SEQ ID NO: 13560 - protein, 7 aa, Artificial Sequence
  Description of Artificial Sequence: Synthetic peptide
VVSAPLV

SEQ ID NO: 13561 - protein, 7 aa, Artificial Sequence
  Description of Artificial Sequence: Synthetic peptide
VVSFDRA

SEQ ID NO: 13562 - protein, 7 aa, Artificial Sequence
  Description of Artificial Sequence: Synthetic peptide
VVSGSRP

SEQ ID NO: 13563 - protein, 7 aa, Artificial Sequence
  Description of Artificial Sequence: Synthetic peptide
VVSHISV

SEQ ID NO: 13564 - protein, 7 aa, Artificial Sequence
  Description of Artificial Sequence: Synthetic peptide
VVSIARV

SEQ ID NO: 13565 - protein, 7 aa, Artificial Sequence
  Description of Artificial Sequence: Synthetic peptide
VVSQPSP

SEQ ID NO: 13566 - protein, 7 aa, Artificial Sequence
  Description of Artificial Sequence: Synthetic peptide
VVSRPIS

SEQ ID NO: 13567 - protein, 7 aa, Artificial Sequence
  Description of Artificial Sequence: Synthetic peptide
VVSRSYN

SEQ ID NO: 13568 - protein, 7 aa, Artificial Sequence
  Description of Artificial Sequence: Synthetic peptide
VVSRVAS

SEQ ID NO: 13569 - protein, 7 aa, Artificial Sequence
  Description of Artificial Sequence: Synthetic peptide
VVSSGSL

SEQ ID NO: 13570 - protein, 7 aa, Artificial Sequence
  Description of Artificial Sequence: Synthetic peptide
VVSSSLM

SEQ ID NO: 13571 - protein, 7 aa, Artificial Sequence
  Description of Artificial Sequence: Synthetic peptide
VVSTTLP

SEQ ID NO: 13572 - protein, 7 aa, Artificial Sequence
  Description of Artificial Sequence: Synthetic peptide
VVSVATS

SEQ ID NO: 13573 - protein, 7 aa, Artificial Sequence
  Description of Artificial Sequence: Synthetic peptide
VVTDSGG

SEQ ID NO: 13574 - protein, 7 aa, Artificial Sequence
  Description of Artificial Sequence: Synthetic peptide
VVTSASG

SEQ ID NO: 13575 - protein, 7 aa, Artificial Sequence
  Description of Artificial Sequence: Synthetic peptide
VVTTRIT

SEQ ID NO: 13576 - protein, 7 aa, Artificial Sequence
  Description of Artificial Sequence: Synthetic peptide
VVVAGSE

SEQ ID NO: 13577 - protein, 7 aa, Artificial Sequence
  Description of Artificial Sequence: Synthetic peptide
VWADDNV

SEQ ID NO: 13578 - protein, 7 aa, Artificial Sequence
  Description of Artificial Sequence: Synthetic peptide
VWARGSE

SEQ ID NO: 13579 - protein, 7 aa, Artificial Sequence
  Description of Artificial Sequence: Synthetic peptide
VWPASGT

SEQ ID NO: 13580 - protein, 7 aa, Artificial Sequence
  Description of Artificial Sequence: Synthetic peptide
VWQPSND

SEQ ID NO: 13581 - protein, 7 aa, Artificial Sequence
  Description of Artificial Sequence: Synthetic peptide
VWSGSSD

SEQ ID NO: 13582 - protein, 7 aa, Artificial Sequence
  Description of Artificial Sequence: Synthetic peptide
VWTHETS

SEQ ID NO: 13583 - protein, 7 aa, Artificial Sequence
  Description of Artificial Sequence: Synthetic peptide
VYAPEKR

SEQ ID NO: 13584 - protein, 7 aa, Artificial Sequence
  Description of Artificial Sequence: Synthetic peptide
VYATLPE

SEQ ID NO: 13585 - protein, 7 aa, Artificial Sequence
  Description of Artificial Sequence: Synthetic peptide
VYEPSKY

SEQ ID NO: 13586 - protein, 7 aa, Artificial Sequence
  Description of Artificial Sequence: Synthetic peptide
VYESNRF

SEQ ID NO: 13587 - protein, 7 aa, Artificial Sequence
  Description of Artificial Sequence: Synthetic peptide
VYGYSGS

SEQ ID NO: 13588 - protein, 7 aa, Artificial Sequence
  Description of Artificial Sequence: Synthetic peptide
VYHPNEF

SEQ ID NO: 13589 - protein, 7 aa, Artificial Sequence
  Description of Artificial Sequence: Synthetic peptide
VYIGRQE

SEQ ID NO: 13590 - protein, 7 aa, Artificial Sequence
  Description of Artificial Sequence: Synthetic peptide
VYKASNY

SEQ ID NO: 13591 - protein, 7 aa, Artificial Sequence
  Description of Artificial Sequence: Synthetic peptide
VYLKSST

SEQ ID NO: 13592 - protein, 7 aa, Artificial Sequence
  Description of Artificial Sequence: Synthetic peptide
VYNAGVD

SEQ ID NO: 13593 - protein, 7 aa, Artificial Sequence
  Description of Artificial Sequence: Synthetic peptide
VYNTSTA

SEQ ID NO: 13594 - protein, 7 aa, Artificial Sequence
  Description of Artificial Sequence: Synthetic peptide
VYPPSTT

SEQ ID NO: 13595 - protein, 7 aa, Artificial Sequence
  Description of Artificial Sequence: Synthetic peptide
VYPRDLT

SEQ ID NO: 13596 - protein, 7 aa, Artificial Sequence
  Description of Artificial Sequence: Synthetic peptide
VYRDSTP

SEQ ID NO: 13597 - protein, 7 aa, Artificial Sequence
  Description of Artificial Sequence: Synthetic peptide
VYRSHET

SEQ ID NO: 13598 - protein, 7 aa, Artificial Sequence
  Description of Artificial Sequence: Synthetic peptide
VYSLGGL

SEQ ID NO: 13599 - protein, 7 aa, Artificial Sequence
  Description of Artificial Sequence: Synthetic peptide
VYSNMTG

SEQ ID NO: 13600 - protein, 7 aa, Artificial Sequence
  Description of Artificial Sequence: Synthetic peptide
VYSQGAR

SEQ ID NO: 13601 - protein, 7 aa, Artificial Sequence
  Description of Artificial Sequence: Synthetic peptide
VYTAARA

SEQ ID NO: 13602 - protein, 7 aa, Artificial Sequence
  Description of Artificial Sequence: Synthetic peptide
VYTQNSP

SEQ ID NO: 13603 - protein, 7 aa, Artificial Sequence
  Description of Artificial Sequence: Synthetic peptide
VYTSSMH

SEQ ID NO: 13604 - protein, 7 aa, Artificial Sequence
  Description of Artificial Sequence: Synthetic peptide
VYYGKEP

SEQ ID NO: 13605 - protein, 7 aa, Artificial Sequence
  Description of Artificial Sequence: Synthetic peptide
WADKSHP

SEQ ID NO: 13606 - protein, 7 aa, Artificial Sequence
  Description of Artificial Sequence: Synthetic peptide
WADNSVN

SEQ ID NO: 13607 - protein, 7 aa, Artificial Sequence
  Description of Artificial Sequence: Synthetic peptide
WADTTTR

SEQ ID NO: 13608 - protein, 7 aa, Artificial Sequence
  Description of Artificial Sequence: Synthetic peptide
WAGAMPM

SEQ ID NO: 13609 - protein, 7 aa, Artificial Sequence
  Description of Artificial Sequence: Synthetic peptide
WAHKGLP

SEQ ID NO: 13610 - protein, 7 aa, Artificial Sequence
  Description of Artificial Sequence: Synthetic peptide
WAKSQLA

SEQ ID NO: 13611 - protein, 7 aa, Artificial Sequence
  Description of Artificial Sequence: Synthetic peptide
WAPRSPG

SEQ ID NO: 13612 - protein, 7 aa, Artificial Sequence
  Description of Artificial Sequence: Synthetic peptide
WASAERQ

SEQ ID NO: 13613 - protein, 7 aa, Artificial Sequence
  Description of Artificial Sequence: Synthetic peptide
WASGHQA

SEQ ID NO: 13614 - protein, 7 aa, Artificial Sequence
  Description of Artificial Sequence: Synthetic peptide
WASPIRG

SEQ ID NO: 13615 - protein, 7 aa, Artificial Sequence
  Description of Artificial Sequence: Synthetic peptide
WATELRG

SEQ ID NO: 13616 - protein, 7 aa, Artificial Sequence
  Description of Artificial Sequence: Synthetic peptide
WATGSSP

SEQ ID NO: 13617 - protein, 7 aa, Artificial Sequence
  Description of Artificial Sequence: Synthetic peptide
WCQRPGA

SEQ ID NO: 13618 - protein, 7 aa, Artificial Sequence
  Description of Artificial Sequence: Synthetic peptide
WDAAVTL

SEQ ID NO: 13619 - protein, 7 aa, Artificial Sequence
  Description of Artificial Sequence: Synthetic peptide
WDAFSTD

SEQ ID NO: 13620 - protein, 7 aa, Artificial Sequence
  Description of Artificial Sequence: Synthetic peptide
WDALEPV

SEQ ID NO: 13621 - protein, 7 aa, Artificial Sequence
  Description of Artificial Sequence: Synthetic peptide
WDAMTAP

SEQ ID NO: 13622 - protein, 7 aa, Artificial Sequence
  Description of Artificial Sequence: Synthetic peptide
WDATAPT

SEQ ID NO: 13623 - protein, 7 aa, Artificial Sequence
  Description of Artificial Sequence: Synthetic peptide
WDDGGTP

SEQ ID NO: 13624 - protein, 7 aa, Artificial Sequence
  Description of Artificial Sequence: Synthetic peptide
WDITKTF

SEQ ID NO: 13625 - protein, 7 aa, Artificial Sequence
  Description of Artificial Sequence: Synthetic peptide
WDKKPTI

SEQ ID NO: 13626 - protein, 7 aa, Artificial Sequence
  Description of Artificial Sequence: Synthetic peptide
WDPAYGS

SEQ ID NO: 13627 - protein, 7 aa, Artificial Sequence
  Description of Artificial Sequence: Synthetic peptide
WDPRNSQ

SEQ ID NO: 13628 - protein, 7 aa, Artificial Sequence
  Description of Artificial Sequence: Synthetic peptide
WDPSRTT

SEQ ID NO: 13629 - protein, 7 aa, Artificial Sequence
  Description of Artificial Sequence: Synthetic peptide
WDQLERA

SEQ ID NO: 13630 - protein, 7 aa, Artificial Sequence
  Description of Artificial Sequence: Synthetic peptide
WDQPHQA

SEQ ID NO: 13631 - protein, 7 aa, Artificial Sequence
  Description of Artificial Sequence: Synthetic peptide
WDRDAAL

SEQ ID NO: 13632 - protein, 7 aa, Artificial Sequence
  Description of Artificial Sequence: Synthetic peptide
WDSGSLG

SEQ ID NO: 13633 - protein, 7 aa, Artificial Sequence
  Description of Artificial Sequence: Synthetic peptide
WDSRHHV

SEQ ID NO: 13634 - protein, 7 aa, Artificial Sequence
  Description of Artificial Sequence: Synthetic peptide
WDTPGQS

SEQ ID NO: 13635 - protein, 7 aa, Artificial Sequence
  Description of Artificial Sequence: Synthetic peptide
WDTQFSS

SEQ ID NO: 13636 - protein, 7 aa, Artificial Sequence
  Description of Artificial Sequence: Synthetic peptide
WEAHWTP

SEQ ID NO: 13637 - protein, 7 aa, Artificial Sequence
  Description of Artificial Sequence: Synthetic peptide
WEGANPV

SEQ ID NO: 13638 - protein, 7 aa, Artificial Sequence
  Description of Artificial Sequence: Synthetic peptide
WEGSHPY

SEQ ID NO: 13639 - protein, 7 aa, Artificial Sequence
  Description of Artificial Sequence: Synthetic peptide
WEGSKDF

SEQ ID NO: 13640 - protein, 7 aa, Artificial Sequence
  Description of Artificial Sequence: Synthetic peptide
WEMTRVD

SEQ ID NO: 13641 - protein, 7 aa, Artificial Sequence
  Description of Artificial Sequence: Synthetic peptide
WERSRSA

SEQ ID NO: 13642 - protein, 7 aa, Artificial Sequence
  Description of Artificial Sequence: Synthetic peptide
WESGGGF

SEQ ID NO: 13643 - protein, 7 aa, Artificial Sequence
  Description of Artificial Sequence: Synthetic peptide
WFEDRLD

SEQ ID NO: 13644 - protein, 7 aa, Artificial Sequence
  Description of Artificial Sequence: Synthetic peptide
WFEKCKD

SEQ ID NO: 13645 - protein, 7 aa, Artificial Sequence
  Description of Artificial Sequence: Synthetic peptide
WFPSGHA

SEQ ID NO: 13646 - protein, 7 aa, Artificial Sequence
  Description of Artificial Sequence: Synthetic peptide
WGAALTP

SEQ ID NO: 13647 - protein, 7 aa, Artificial Sequence
  Description of Artificial Sequence: Synthetic peptide
WGARLDS

SEQ ID NO: 13648 - protein, 7 aa, Artificial Sequence
  Description of Artificial Sequence: Synthetic peptide
WGASQTS

SEQ ID NO: 13649 - protein, 7 aa, Artificial Sequence
  Description of Artificial Sequence: Synthetic peptide
WGGTSPG

SEQ ID NO: 13650 - protein, 7 aa, Artificial Sequence
  Description of Artificial Sequence: Synthetic peptide
WGHNNSP

SEQ ID NO: 13651 - protein, 7 aa, Artificial Sequence
  Description of Artificial Sequence: Synthetic peptide
WGHSSGV

SEQ ID NO: 13652 - protein, 7 aa, Artificial Sequence
  Description of Artificial Sequence: Synthetic peptide
WGLLHSA

SEQ ID NO: 13653 - protein, 7 aa, Artificial Sequence
  Description of Artificial Sequence: Synthetic peptide
WGLVTSP

SEQ ID NO: 13654 - protein, 7 aa, Artificial Sequence
  Description of Artificial Sequence: Synthetic peptide
WGNQQPR

SEQ ID NO: 13655 - protein, 7 aa, Artificial Sequence
  Description of Artificial Sequence: Synthetic peptide
WGNSHNT

SEQ ID NO: 13656 - protein, 7 aa, Artificial Sequence
  Description of Artificial Sequence: Synthetic peptide
WGPTTSH

SEQ ID NO: 13657 - protein, 7 aa, Artificial Sequence
  Description of Artificial Sequence: Synthetic peptide
WGSGAAG

SEQ ID NO: 13658 - protein, 7 aa, Artificial Sequence
  Description of Artificial Sequence: Synthetic peptide
WGSGAET

SEQ ID NO: 13659 - protein, 7 aa, Artificial Sequence
  Description of Artificial Sequence: Synthetic peptide
WGSSGQG

SEQ ID NO: 13660 - protein, 7 aa, Artificial Sequence
  Description of Artificial Sequence: Synthetic peptide
WGTQLAM

SEQ ID NO: 13661 - protein, 7 aa, Artificial Sequence
  Description of Artificial Sequence: Synthetic peptide
WGTSDKS

SEQ ID NO: 13662 - protein, 7 aa, Artificial Sequence
  Description of Artificial Sequence: Synthetic peptide
WGYLHVA

SEQ ID NO: 13663 - protein, 7 aa, Artificial Sequence
  Description of Artificial Sequence: Synthetic peptide
WHGTGLI

SEQ ID NO: 13664 - protein, 7 aa, Artificial Sequence
  Description of Artificial Sequence: Synthetic peptide
WHKSSSS

SEQ ID NO: 13665 - protein, 7 aa, Artificial Sequence
  Description of Artificial Sequence: Synthetic peptide
WHPSGSR

SEQ ID NO: 13666 - protein, 7 aa, Artificial Sequence
  Description of Artificial Sequence: Synthetic peptide
WHRTAQD

SEQ ID NO: 13667 - protein, 7 aa, Artificial Sequence
  Description of Artificial Sequence: Synthetic peptide
WHSAKLA

SEQ ID NO: 13668 - protein, 7 aa, Artificial Sequence
  Description of Artificial Sequence: Synthetic peptide
WHSLMEP

SEQ ID NO: 13669 - protein, 7 aa, Artificial Sequence
  Description of Artificial Sequence: Synthetic peptide
WHSRMYE

SEQ ID NO: 13670 - protein, 7 aa, Artificial Sequence
  Description of Artificial Sequence: Synthetic peptide
WHSSATQ

SEQ ID NO: 13671 - protein, 7 aa, Artificial Sequence
  Description of Artificial Sequence: Synthetic peptide
WHSSDLV

SEQ ID NO: 13672 - protein, 7 aa, Artificial Sequence
  Description of Artificial Sequence: Synthetic peptide
WIGNGGP

SEQ ID NO: 13673 - protein, 7 aa, Artificial Sequence
  Description of Artificial Sequence: Synthetic peptide
WIGQNTV

SEQ ID NO: 13674 - protein, 7 aa, Artificial Sequence
  Description of Artificial Sequence: Synthetic peptide
WIKEASS

SEQ ID NO: 13675 - protein, 7 aa, Artificial Sequence
  Description of Artificial Sequence: Synthetic peptide
WIPGAPS

SEQ ID NO: 13676 - protein, 7 aa, Artificial Sequence
  Description of Artificial Sequence: Synthetic peptide
WIPQQDV

SEQ ID NO: 13677 - protein, 7 aa, Artificial Sequence
  Description of Artificial Sequence: Synthetic peptide
WIPSGLS

SEQ ID NO: 13678 - protein, 7 aa, Artificial Sequence
  Description of Artificial Sequence: Synthetic peptide
WITTEPL

SEQ ID NO: 13679 - protein, 7 aa, Artificial Sequence
  Description of Artificial Sequence: Synthetic peptide
WKANLPS

SEQ ID NO: 13680 - protein, 7 aa, Artificial Sequence
  Description of Artificial Sequence: Synthetic peptide
WKDECQT

SEQ ID NO: 13681 - protein, 7 aa, Artificial Sequence
  Description of Artificial Sequence: Synthetic peptide
WKDSHYE

SEQ ID NO: 13682 - protein, 7 aa, Artificial Sequence
  Description of Artificial Sequence: Synthetic peptide
WKEHGAA

SEQ ID NO: 13683 - protein, 7 aa, Artificial Sequence
  Description of Artificial Sequence: Synthetic peptide
WKHSTQS

SEQ ID NO: 13684 - protein, 7 aa, Artificial Sequence
  Description of Artificial Sequence: Synthetic peptide
WKIMIAE

SEQ ID NO: 13685 - protein, 7 aa, Artificial Sequence
  Description of Artificial Sequence: Synthetic peptide
WKKNMDF

SEQ ID NO: 13686 - protein, 7 aa, Artificial Sequence
  Description of Artificial Sequence: Synthetic peptide
WKLNRDQ

SEQ ID NO: 13687 - protein, 7 aa, Artificial Sequence
  Description of Artificial Sequence: Synthetic peptide
WKNTSCG

SEQ ID NO: 13688 - protein, 7 aa, Artificial Sequence
  Description of Artificial Sequence: Synthetic peptide
WKPAVPQ

SEQ ID NO: 13689 - protein, 7 aa, Artificial Sequence
  Description of Artificial Sequence: Synthetic peptide
WKPEILP

SEQ ID NO: 13690 - protein, 7 aa, Artificial Sequence
  Description of Artificial Sequence: Synthetic peptide
WKPPLNP

SEQ ID NO: 13691 - protein, 7 aa, Artificial Sequence
  Description of Artificial Sequence: Synthetic peptide
WKQGSTG

SEQ ID NO: 13692 - protein, 7 aa, Artificial Sequence
  Description of Artificial Sequence: Synthetic peptide
WKSDSAS

SEQ ID NO: 13693 - protein, 7 aa, Artificial Sequence
  Description of Artificial Sequence: Synthetic peptide
WKSNTLT

SEQ ID NO: 13694 - protein, 7 aa, Artificial Sequence
  Description of Artificial Sequence: Synthetic peptide
WKSQIPL

SEQ ID NO: 13695 - protein, 7 aa, Artificial Sequence
  Description of Artificial Sequence: Synthetic peptide
WKSQLPN

SEQ ID NO: 13696 - protein, 7 aa, Artificial Sequence
  Description of Artificial Sequence: Synthetic peptide
WKSQMNP

SEQ ID NO: 13697 - protein, 7 aa, Artificial Sequence
  Description of Artificial Sequence: Synthetic peptide
WKSTDLT

SEQ ID NO: 13698 - protein, 7 aa, Artificial Sequence
  Description of Artificial Sequence: Synthetic peptide
WKVSTDT

SEQ ID NO: 13699 - protein, 7 aa, Artificial Sequence
  Description of Artificial Sequence: Synthetic peptide
WLADPSD

SEQ ID NO: 13700 - protein, 7 aa, Artificial Sequence
  Description of Artificial Sequence: Synthetic peptide
WLENSQS

SEQ ID NO: 13701 - protein, 7 aa, Artificial Sequence
  Description of Artificial Sequence: Synthetic peptide
WLESGTG

SEQ ID NO: 13702 - protein, 7 aa, Artificial Sequence
  Description of Artificial Sequence: Synthetic peptide
WLGRADA

SEQ ID NO: 13703 - protein, 7 aa, Artificial Sequence
  Description of Artificial Sequence: Synthetic peptide
WLHDTTS

SEQ ID NO: 13704 - protein, 7 aa, Artificial Sequence
  Description of Artificial Sequence: Synthetic peptide
WLHEQPN

SEQ ID NO: 13705 - protein, 7 aa, Artificial Sequence
  Description of Artificial Sequence: Synthetic peptide
WLHRSNA

SEQ ID NO: 13706 - protein, 7 aa, Artificial Sequence
  Description of Artificial Sequence: Synthetic peptide
WLKQTDN

SEQ ID NO: 13707 - protein, 7 aa, Artificial Sequence
  Description of Artificial Sequence: Synthetic peptide
WLLNQEE

SEQ ID NO: 13708 - protein, 7 aa, Artificial Sequence
  Description of Artificial Sequence: Synthetic peptide
WLNDSSR

SEQ ID NO: 13709 - protein, 7 aa, Artificial Sequence
  Description of Artificial Sequence: Synthetic peptide
WLPKLPH

SEQ ID NO: 13710 - protein, 7 aa, Artificial Sequence
  Description of Artificial Sequence: Synthetic peptide
WLPTQTE

SEQ ID NO: 13711 - protein, 7 aa, Artificial Sequence
  Description of Artificial Sequence: Synthetic peptide
WLRTPDA

SEQ ID NO: 13712 - protein, 7 aa, Artificial Sequence
  Description of Artificial Sequence: Synthetic peptide
WLTSLKM

SEQ ID NO: 13713 - protein, 7 aa, Artificial Sequence
  Description of Artificial Sequence: Synthetic peptide
WLTSPNV

SEQ ID NO: 13714 - protein, 7 aa, Artificial Sequence
  Description of Artificial Sequence: Synthetic peptide
WMAMRQD

SEQ ID NO: 13715 - protein, 7 aa, Artificial Sequence
  Description of Artificial Sequence: Synthetic peptide
WMLQETS

SEQ ID NO: 13716 - protein, 7 aa, Artificial Sequence
  Description of Artificial Sequence: Synthetic peptide
WMMESRP

SEQ ID NO: 13717 - protein, 7 aa, Artificial Sequence
  Description of Artificial Sequence: Synthetic peptide
WMQSANR

SEQ ID NO: 13718 - protein, 7 aa, Artificial Sequence
  Description of Artificial Sequence: Synthetic peptide
WMSRLPA

SEQ ID NO: 13719 - protein, 7 aa, Artificial Sequence
  Description of Artificial Sequence: Synthetic peptide
WNDVTAR

SEQ ID NO: 13720 - protein, 7 aa, Artificial Sequence
  Description of Artificial Sequence: Synthetic peptide
WNKSLLS

SEQ ID NO: 13721 - protein, 7 aa, Artificial Sequence
  Description of Artificial Sequence: Synthetic peptide
WNKTELD

SEQ ID NO: 13722 - protein, 7 aa, Artificial Sequence
  Description of Artificial Sequence: Synthetic peptide
WNLESTT

SEQ ID NO: 13723 - protein, 7 aa, Artificial Sequence
  Description of Artificial Sequence: Synthetic peptide
WNNPDQL

SEQ ID NO: 13724 - protein, 7 aa, Artificial Sequence
  Description of Artificial Sequence: Synthetic peptide
WNPPLPA

SEQ ID NO: 13725 - protein, 7 aa, Artificial Sequence
  Description of Artificial Sequence: Synthetic peptide
WNPRSSE

SEQ ID NO: 13726 - protein, 7 aa, Artificial Sequence
  Description of Artificial Sequence: Synthetic peptide
WNTQQGV

SEQ ID NO: 13727 - protein, 7 aa, Artificial Sequence
  Description of Artificial Sequence: Synthetic peptide
WNTTLPI

SEQ ID NO: 13728 - protein, 7 aa, Artificial Sequence
  Description of Artificial Sequence: Synthetic peptide
WNTVTIR

SEQ ID NO: 13729 - protein, 7 aa, Artificial Sequence
  Description of Artificial Sequence: Synthetic peptide
WPAKTVE

SEQ ID NO: 13730 - protein, 7 aa, Artificial Sequence
  Description of Artificial Sequence: Synthetic peptide
WPAQVSS

SEQ ID NO: 13731 - protein, 7 aa, Artificial Sequence
  Description of Artificial Sequence: Synthetic peptide
WPASVTD

SEQ ID NO: 13732 - protein, 7 aa, Artificial Sequence
  Description of Artificial Sequence: Synthetic peptide
WPEKRLT

SEQ ID NO: 13733 - protein, 7 aa, Artificial Sequence
  Description of Artificial Sequence: Synthetic peptide
WPESYST

SEQ ID NO: 13734 - protein, 7 aa, Artificial Sequence
  Description of Artificial Sequence: Synthetic peptide
WPGMSAG

SEQ ID NO: 13735 - protein, 7 aa, Artificial Sequence
  Description of Artificial Sequence: Synthetic peptide
WPGSSHV

SEQ ID NO: 13736 - protein, 7 aa, Artificial Sequence
  Description of Artificial Sequence: Synthetic peptide
WPNLVSG

SEQ ID NO: 13737 - protein, 7 aa, Artificial Sequence
  Description of Artificial Sequence: Synthetic peptide
WPPASTL

SEQ ID NO: 13738 - protein, 7 aa, Artificial Sequence
  Description of Artificial Sequence: Synthetic peptide
WPPAVSS

SEQ ID NO: 13739 - protein, 7 aa, Artificial Sequence
  Description of Artificial Sequence: Synthetic peptide
WPPSVNG

SEQ ID NO: 13740 - protein, 7 aa, Artificial Sequence
  Description of Artificial Sequence: Synthetic peptide
WPQSSSG

SEQ ID NO: 13741 - protein, 7 aa, Artificial Sequence
  Description of Artificial Sequence: Synthetic peptide
WPSMDGS

SEQ ID NO: 13742 - protein, 7 aa, Artificial Sequence
  Description of Artificial Sequence: Synthetic peptide
WPSSIQI

SEQ ID NO: 13743 - protein, 7 aa, Artificial Sequence
  Description of Artificial Sequence: Synthetic peptide
WPSSTLS

SEQ ID NO: 13744 - protein, 7 aa, Artificial Sequence
  Description of Artificial Sequence: Synthetic peptide
WPTIINR

SEQ ID NO: 13745 - protein, 7 aa, Artificial Sequence
  Description of Artificial Sequence: Synthetic peptide
WPTKSTP

SEQ ID NO: 13746 - protein, 7 aa, Artificial Sequence
  Description of Artificial Sequence: Synthetic peptide
WPTNSRP

SEQ ID NO: 13747 - protein, 7 aa, Artificial Sequence
  Description of Artificial Sequence: Synthetic peptide
WPTNTIP

SEQ ID NO: 13748 - protein, 7 aa, Artificial Sequence
  Description of Artificial Sequence: Synthetic peptide
WPVHHAA

SEQ ID NO: 13749 - protein, 7 aa, Artificial Sequence
  Description of Artificial Sequence: Synthetic peptide
WPVTSYG

SEQ ID NO: 13750 - protein, 7 aa, Artificial Sequence
  Description of Artificial Sequence: Synthetic peptide
WPYDPGR

SEQ ID NO: 13751 - protein, 7 aa, Artificial Sequence
  Description of Artificial Sequence: Synthetic peptide
WQGLTQG

SEQ ID NO: 13752 - protein, 7 aa, Artificial Sequence
  Description of Artificial Sequence: Synthetic peptide
WQLATQP

SEQ ID NO: 13753 - protein, 7 aa, Artificial Sequence
  Description of Artificial Sequence: Synthetic peptide
WQMLLSE

SEQ ID NO: 13754 - protein, 7 aa, Artificial Sequence
  Description of Artificial Sequence: Synthetic peptide
WQQLSAS

SEQ ID NO: 13755 - protein, 7 aa, Artificial Sequence
  Description of Artificial Sequence: Synthetic peptide
WQRSGDV

SEQ ID NO: 13756 - protein, 7 aa, Artificial Sequence
  Description of Artificial Sequence: Synthetic peptide
WQSQATM

SEQ ID NO: 13757 - protein, 7 aa, Artificial Sequence
  Description of Artificial Sequence: Synthetic peptide
WQTQSRS

SEQ ID NO: 13758 - protein, 7 aa, Artificial Sequence
  Description of Artificial Sequence: Synthetic peptide
WQYSHEP

SEQ ID NO: 13759 - protein, 7 aa, Artificial Sequence
  Description of Artificial Sequence: Synthetic peptide
WRAMLEE

SEQ ID NO: 13760 - protein, 7 aa, Artificial Sequence
  Description of Artificial Sequence: Synthetic peptide
WRAPGSA

SEQ ID NO: 13761 - protein, 7 aa, Artificial Sequence
  Description of Artificial Sequence: Synthetic peptide
WRDATCC

SEQ ID NO: 13762 - protein, 7 aa, Artificial Sequence
  Description of Artificial Sequence: Synthetic peptide
WRERYAA

SEQ ID NO: 13763 - protein, 7 aa, Artificial Sequence
  Description of Artificial Sequence: Synthetic peptide
WRGLDIE

SEQ ID NO: 13764 - protein, 7 aa, Artificial Sequence
  Description of Artificial Sequence: Synthetic peptide
WRHDYNL

SEQ ID NO: 13765 - protein, 7 aa, Artificial Sequence
  Description of Artificial Sequence: Synthetic peptide
WRHTEAI

SEQ ID NO: 13766 - protein, 7 aa, Artificial Sequence
  Description of Artificial Sequence: Synthetic peptide
WRITAES

SEQ ID NO: 13767 - protein, 7 aa, Artificial Sequence
  Description of Artificial Sequence: Synthetic peptide
WRPLVET

SEQ ID NO: 13768 - protein, 7 aa, Artificial Sequence
  Description of Artificial Sequence: Synthetic peptide
WRPNMAA

SEQ ID NO: 13769 - protein, 7 aa, Artificial Sequence
  Description of Artificial Sequence: Synthetic peptide
WRPNMSV

SEQ ID NO: 13770 - protein, 7 aa, Artificial Sequence
  Description of Artificial Sequence: Synthetic peptide
WRPQRPV

SEQ ID NO: 13771 - protein, 7 aa, Artificial Sequence
  Description of Artificial Sequence: Synthetic peptide
WRQETSV

SEQ ID NO: 13772 - protein, 7 aa, Artificial Sequence
  Description of Artificial Sequence: Synthetic peptide
WRRDASP

SEQ ID NO: 13773 - protein, 7 aa, Artificial Sequence
  Description of Artificial Sequence: Synthetic peptide
WRSASSA

SEQ ID NO: 13774 - protein, 7 aa, Artificial Sequence
  Description of Artificial Sequence: Synthetic peptide
WRSREIA

SEQ ID NO: 13775 - protein, 7 aa, Artificial Sequence
  Description of Artificial Sequence: Synthetic peptide
WRSSAEA

SEQ ID NO: 13776 - protein, 7 aa, Artificial Sequence
  Description of Artificial Sequence: Synthetic peptide
WSADPDT

SEQ ID NO: 13777 - protein, 7 aa, Artificial Sequence
  Description of Artificial Sequence: Synthetic peptide
WSASSHQ

SEQ ID NO: 13778 - protein, 7 aa, Artificial Sequence
  Description of Artificial Sequence: Synthetic peptide
WSAVGEV

SEQ ID NO: 13779 - protein, 7 aa, Artificial Sequence
  Description of Artificial Sequence: Synthetic peptide
WSDSTAV

SEQ ID NO: 13780 - protein, 7 aa, Artificial Sequence
  Description of Artificial Sequence: Synthetic peptide
WSGHPVA

SEQ ID NO: 13781 - protein, 7 aa, Artificial Sequence
  Description of Artificial Sequence: Synthetic peptide
WSGKANA

SEQ ID NO: 13782 - protein, 7 aa, Artificial Sequence
  Description of Artificial Sequence: Synthetic peptide
WSGPISL

SEQ ID NO: 13783 - protein, 7 aa, Artificial Sequence
  Description of Artificial Sequence: Synthetic peptide
WSHGPMP

SEQ ID NO: 13784 - protein, 7 aa, Artificial Sequence
  Description of Artificial Sequence: Synthetic peptide
WSHGSTT

SEQ ID NO: 13785 - protein, 7 aa, Artificial Sequence
  Description of Artificial Sequence: Synthetic peptide
WSKVPDR

SEQ ID NO: 13786 - protein, 7 aa, Artificial Sequence
  Description of Artificial Sequence: Synthetic peptide
WSLVHRE

SEQ ID NO: 13787 - protein, 7 aa, Artificial Sequence
  Description of Artificial Sequence: Synthetic peptide
WSNHAHA

SEQ ID NO: 13788 - protein, 7 aa, Artificial Sequence
  Description of Artificial Sequence: Synthetic peptide
WSPARET

SEQ ID NO: 13789 - protein, 7 aa, Artificial Sequence
  Description of Artificial Sequence: Synthetic peptide
WSPLYHA

SEQ ID NO: 13790 - protein, 7 aa, Artificial Sequence
  Description of Artificial Sequence: Synthetic peptide
WSPNSTP

SEQ ID NO: 13791 - protein, 7 aa, Artificial Sequence
  Description of Artificial Sequence: Synthetic peptide
WSPNVCP

SEQ ID NO: 13792 - protein, 7 aa, Artificial Sequence
  Description of Artificial Sequence: Synthetic peptide
WSPRNTL

SEQ ID NO: 13793 - protein, 7 aa, Artificial Sequence
  Description of Artificial Sequence: Synthetic peptide
WSPSEGK

SEQ ID NO: 13794 - protein, 7 aa, Artificial Sequence
  Description of Artificial Sequence: Synthetic peptide
WSPSQAY

SEQ ID NO: 13795 - protein, 7 aa, Artificial Sequence
  Description of Artificial Sequence: Synthetic peptide
WSPVVVR

SEQ ID NO: 13796 - protein, 7 aa, Artificial Sequence
  Description of Artificial Sequence: Synthetic peptide
WSRAAVD

SEQ ID NO: 13797 - protein, 7 aa, Artificial Sequence
  Description of Artificial Sequence: Synthetic peptide
WSRPAAD

SEQ ID NO: 13798 - protein, 7 aa, Artificial Sequence
  Description of Artificial Sequence: Synthetic peptide
WSRQDLP

SEQ ID NO: 13799 - protein, 7 aa, Artificial Sequence
  Description of Artificial Sequence: Synthetic peptide
WSSAYVS

SEQ ID NO: 13800 - protein, 7 aa, Artificial Sequence
  Description of Artificial Sequence: Synthetic peptide
WSSDAPE

SEQ ID NO: 13801 - protein, 7 aa, Artificial Sequence
  Description of Artificial Sequence: Synthetic peptide
WSSMSMH

SEQ ID NO: 13802 - protein, 7 aa, Artificial Sequence
  Description of Artificial Sequence: Synthetic peptide
WSTKLEG

SEQ ID NO: 13803 - protein, 7 aa, Artificial Sequence
  Description of Artificial Sequence: Synthetic peptide
WSTNAYQ

SEQ ID NO: 13804 - protein, 7 aa, Artificial Sequence
  Description of Artificial Sequence: Synthetic peptide
WSTSTLH

SEQ ID NO: 13805 - protein, 7 aa, Artificial Sequence
  Description of Artificial Sequence: Synthetic peptide
WTAPSDV

SEQ ID NO: 13806 - protein, 7 aa, Artificial Sequence
  Description of Artificial Sequence: Synthetic peptide
WTAQNVQ

SEQ ID NO: 13807 - protein, 7 aa, Artificial Sequence
  Description of Artificial Sequence: Synthetic peptide
WTASRAS

SEQ ID NO: 13808 - protein, 7 aa, Artificial Sequence
  Description of Artificial Sequence: Synthetic peptide
WTERVGT

SEQ ID NO: 13809 - protein, 7 aa, Artificial Sequence
  Description of Artificial Sequence: Synthetic peptide
WTGSAHQ

SEQ ID NO: 13810 - protein, 7 aa, Artificial Sequence
  Description of Artificial Sequence: Synthetic peptide
WTGYSQQ

SEQ ID NO: 13811 - protein, 7 aa, Artificial Sequence
  Description of Artificial Sequence: Synthetic peptide
WTNSTQP

SEQ ID NO: 13812 - protein, 7 aa, Artificial Sequence
  Description of Artificial Sequence: Synthetic peptide
WTPHSPM

SEQ ID NO: 13813 - protein, 7 aa, Artificial Sequence
  Description of Artificial Sequence: Synthetic peptide
WTPRVMH

SEQ ID NO: 13814 - protein, 7 aa, Artificial Sequence
  Description of Artificial Sequence: Synthetic peptide
WTPSMAP

SEQ ID NO: 13815 - protein, 7 aa, Artificial Sequence
  Description of Artificial Sequence: Synthetic peptide
WTPSNKH

SEQ ID NO: 13816 - protein, 7 aa, Artificial Sequence
  Description of Artificial Sequence: Synthetic peptide
WTRLESL

SEQ ID NO: 13817 - protein, 7 aa, Artificial Sequence
  Description of Artificial Sequence: Synthetic peptide
WTSDGNY

SEQ ID NO: 13818 - protein, 7 aa, Artificial Sequence
  Description of Artificial Sequence: Synthetic peptide
WTSKIGP

SEQ ID NO: 13819 - protein, 7 aa, Artificial Sequence
  Description of Artificial Sequence: Synthetic peptide
WTSRDAS

SEQ ID NO: 13820 - protein, 7 aa, Artificial Sequence
  Description of Artificial Sequence: Synthetic peptide
WTSSGGS

SEQ ID NO: 13821 - protein, 7 aa, Artificial Sequence
  Description of Artificial Sequence: Synthetic peptide
WTTNTGG

SEQ ID NO: 13822 - protein, 7 aa, Artificial Sequence
  Description of Artificial Sequence: Synthetic peptide
WTTSGSI

SEQ ID NO: 13823 - protein, 7 aa, Artificial Sequence
  Description of Artificial Sequence: Synthetic peptide
WTVDLTH

SEQ ID NO: 13824 - protein, 7 aa, Artificial Sequence
  Description of Artificial Sequence: Synthetic peptide
WTVETSH

SEQ ID NO: 13825 - protein, 7 aa, Artificial Sequence
  Description of Artificial Sequence: Synthetic peptide
WVHSSDS

SEQ ID NO: 13826 - protein, 7 aa, Artificial Sequence
  Description of Artificial Sequence: Synthetic peptide
WVIQNCN

SEQ ID NO: 13827 - protein, 7 aa, Artificial Sequence
  Description of Artificial Sequence: Synthetic peptide
WVQSGTP

SEQ ID NO: 13828 - protein, 7 aa, Artificial Sequence
  Description of Artificial Sequence: Synthetic peptide
WVTGLTD

SEQ ID NO: 13829 - protein, 7 aa, Artificial Sequence
  Description of Artificial Sequence: Synthetic peptide
WVTQHPS

SEQ ID NO: 13830 - protein, 7 aa, Artificial Sequence
  Description of Artificial Sequence: Synthetic peptide
YAAAPSR

SEQ ID NO: 13831 - protein, 7 aa, Artificial Sequence
  Description of Artificial Sequence: Synthetic peptide
YAAAYAS

SEQ ID NO: 13832 - protein, 7 aa, Artificial Sequence
  Description of Artificial Sequence: Synthetic peptide
YAAHYKE

SEQ ID NO: 13833 - protein, 7 aa, Artificial Sequence
  Description of Artificial Sequence: Synthetic peptide
YAANRQP

SEQ ID NO: 13834 - protein, 7 aa, Artificial Sequence
  Description of Artificial Sequence: Synthetic peptide
YAAPSSA

SEQ ID NO: 13835 - protein, 7 aa, Artificial Sequence
  Description of Artificial Sequence: Synthetic peptide
YAASHVS

SEQ ID NO: 13836 - protein, 7 aa, Artificial Sequence
  Description of Artificial Sequence: Synthetic peptide
YAASNLT

SEQ ID NO: 13837 - protein, 7 aa, Artificial Sequence
  Description of Artificial Sequence: Synthetic peptide
YAASSAT

SEQ ID NO: 13838 - protein, 7 aa, Artificial Sequence
  Description of Artificial Sequence: Synthetic peptide
YAAVGLN

SEQ ID NO: 13839 - protein, 7 aa, Artificial Sequence
  Description of Artificial Sequence: Synthetic peptide
YAAVRSN

SEQ ID NO: 13840 - protein, 7 aa, Artificial Sequence
  Description of Artificial Sequence: Synthetic peptide
YADLPSR

SEQ ID NO: 13841 - protein, 7 aa, Artificial Sequence
  Description of Artificial Sequence: Synthetic peptide
YADSAPY

SEQ ID NO: 13842 - protein, 7 aa, Artificial Sequence
  Description of Artificial Sequence: Synthetic peptide
YAERQGR

SEQ ID NO: 13843 - protein, 7 aa, Artificial Sequence
  Description of Artificial Sequence: Synthetic peptide
YAEYSRN

SEQ ID NO: 13844 - protein, 7 aa, Artificial Sequence
  Description of Artificial Sequence: Synthetic peptide
YAGAALG

SEQ ID NO: 13845 - protein, 7 aa, Artificial Sequence
  Description of Artificial Sequence: Synthetic peptide
YAGAQRS

SEQ ID NO: 13846 - protein, 7 aa, Artificial Sequence
  Description of Artificial Sequence: Synthetic peptide
YAGGKLI

SEQ ID NO: 13847 - protein, 7 aa, Artificial Sequence
  Description of Artificial Sequence: Synthetic peptide
YAGKEPE

SEQ ID NO: 13848 - protein, 7 aa, Artificial Sequence
  Description of Artificial Sequence: Synthetic peptide
YAGPNSP

SEQ ID NO: 13849 - protein, 7 aa, Artificial Sequence
  Description of Artificial Sequence: Synthetic peptide
YAGSEVM

SEQ ID NO: 13850 - protein, 7 aa, Artificial Sequence
  Description of Artificial Sequence: Synthetic peptide
YAGSVTS

SEQ ID NO: 13851 - protein, 7 aa, Artificial Sequence
  Description of Artificial Sequence: Synthetic peptide
YAHQKPM

SEQ ID NO: 13852 - protein, 7 aa, Artificial Sequence
  Description of Artificial Sequence: Synthetic peptide
YAHTRVV

SEQ ID NO: 13853 - protein, 7 aa, Artificial Sequence
  Description of Artificial Sequence: Synthetic peptide
YAKPLTS

SEQ ID NO: 13854 - protein, 7 aa, Artificial Sequence
  Description of Artificial Sequence: Synthetic peptide
YALDSAE

SEQ ID NO: 13855 - protein, 7 aa, Artificial Sequence
  Description of Artificial Sequence: Synthetic peptide
YALEHRN

SEQ ID NO: 13856 - protein, 7 aa, Artificial Sequence
  Description of Artificial Sequence: Synthetic peptide
YALHQDK

SEQ ID NO: 13857 - protein, 7 aa, Artificial Sequence
  Description of Artificial Sequence: Synthetic peptide
YALQSKE

SEQ ID NO: 13858 - protein, 7 aa, Artificial Sequence
  Description of Artificial Sequence: Synthetic peptide
YALSGST

SEQ ID NO: 13859 - protein, 7 aa, Artificial Sequence
  Description of Artificial Sequence: Synthetic peptide
YANAMTL

SEQ ID NO: 13860 - protein, 7 aa, Artificial Sequence
  Description of Artificial Sequence: Synthetic peptide
YANDSGL

SEQ ID NO: 13861 - protein, 7 aa, Artificial Sequence
  Description of Artificial Sequence: Synthetic peptide
YANNLPH

SEQ ID NO: 13862 - protein, 7 aa, Artificial Sequence
  Description of Artificial Sequence: Synthetic peptide
YANTTSA

SEQ ID NO: 13863 - protein, 7 aa, Artificial Sequence
  Description of Artificial Sequence: Synthetic peptide
YAPGLRS

SEQ ID NO: 13864 - protein, 7 aa, Artificial Sequence
  Description of Artificial Sequence: Synthetic peptide
YAPQSVA

SEQ ID NO: 13865 - protein, 7 aa, Artificial Sequence
  Description of Artificial Sequence: Synthetic peptide
YAQAFRN

SEQ ID NO: 13866 - protein, 7 aa, Artificial Sequence
  Description of Artificial Sequence: Synthetic peptide
YAQYSAV

SEQ ID NO: 13867 - protein, 7 aa, Artificial Sequence
  Description of Artificial Sequence: Synthetic peptide
YAREAHA

SEQ ID NO: 13868 - protein, 7 aa, Artificial Sequence
  Description of Artificial Sequence: Synthetic peptide
YARETLH

SEQ ID NO: 13869 - protein, 7 aa, Artificial Sequence
  Description of Artificial Sequence: Synthetic peptide
YARLTGP

SEQ ID NO: 13870 - protein, 7 aa, Artificial Sequence
  Description of Artificial Sequence: Synthetic peptide
YARQITA

SEQ ID NO: 13871 - protein, 7 aa, Artificial Sequence
  Description of Artificial Sequence: Synthetic peptide
YARQPAV

SEQ ID NO: 13872 - protein, 7 aa, Artificial Sequence
  Description of Artificial Sequence: Synthetic peptide
YASASHP

SEQ ID NO: 13873 - protein, 7 aa, Artificial Sequence
  Description of Artificial Sequence: Synthetic peptide
YASLKGA

SEQ ID NO: 13874 - protein, 7 aa, Artificial Sequence
  Description of Artificial Sequence: Synthetic peptide
YASPGRT

SEQ ID NO: 13875 - protein, 7 aa, Artificial Sequence
  Description of Artificial Sequence: Synthetic peptide
YASSAAL

SEQ ID NO: 13876 - protein, 7 aa, Artificial Sequence
  Description of Artificial Sequence: Synthetic peptide
YASSSTR

SEQ ID NO: 13877 - protein, 7 aa, Artificial Sequence
  Description of Artificial Sequence: Synthetic peptide
YATESGN

SEQ ID NO: 13878 - protein, 7 aa, Artificial Sequence
  Description of Artificial Sequence: Synthetic peptide
YATFAPA

SEQ ID NO: 13879 - protein, 7 aa, Artificial Sequence
  Description of Artificial Sequence: Synthetic peptide
YATHEPD

SEQ ID NO: 13880 - protein, 7 aa, Artificial Sequence
  Description of Artificial Sequence: Synthetic peptide
YATPSHH

SEQ ID NO: 13881 - protein, 7 aa, Artificial Sequence
  Description of Artificial Sequence: Synthetic peptide
YATTVLT

SEQ ID NO: 13882 - protein, 7 aa, Artificial Sequence
  Description of Artificial Sequence: Synthetic peptide
YATVIGL

SEQ ID NO: 13883 - protein, 7 aa, Artificial Sequence
  Description of Artificial Sequence: Synthetic peptide
YAVEASR

SEQ ID NO: 13884 - protein, 7 aa, Artificial Sequence
  Description of Artificial Sequence: Synthetic peptide
YAVEGKN

SEQ ID NO: 13885 - protein, 7 aa, Artificial Sequence
  Description of Artificial Sequence: Synthetic peptide
YAVSRPL

SEQ ID NO: 13886 - protein, 7 aa, Artificial Sequence
  Description of Artificial Sequence: Synthetic peptide
YAYEGFA

SEQ ID NO: 13887 - protein, 7 aa, Artificial Sequence
  Description of Artificial Sequence: Synthetic peptide
YAYERQI

SEQ ID NO: 13888 - protein, 7 aa, Artificial Sequence
  Description of Artificial Sequence: Synthetic peptide
YCESFPD

SEQ ID NO: 13889 - protein, 7 aa, Artificial Sequence
  Description of Artificial Sequence: Synthetic peptide
YCSHQSV

SEQ ID NO: 13890 - protein, 7 aa, Artificial Sequence
  Description of Artificial Sequence: Synthetic peptide
YCTGNDA

SEQ ID NO: 13891 - protein, 7 aa, Artificial Sequence
  Description of Artificial Sequence: Synthetic peptide
YDAISNP

SEQ ID NO: 13892 - protein, 7 aa, Artificial Sequence
  Description of Artificial Sequence: Synthetic peptide
YDHVIAT

SEQ ID NO: 13893 - protein, 7 aa, Artificial Sequence
  Description of Artificial Sequence: Synthetic peptide
YDKAMSP

SEQ ID NO: 13894 - protein, 7 aa, Artificial Sequence
  Description of Artificial Sequence: Synthetic peptide
YDLGVTT

SEQ ID NO: 13895 - protein, 7 aa, Artificial Sequence
  Description of Artificial Sequence: Synthetic peptide
YDMGPVP

SEQ ID NO: 13896 - protein, 7 aa, Artificial Sequence
  Description of Artificial Sequence: Synthetic peptide
YDNKTRL

SEQ ID NO: 13897 - protein, 7 aa, Artificial Sequence
  Description of Artificial Sequence: Synthetic peptide
YDNMHCK

SEQ ID NO: 13898 - protein, 7 aa, Artificial Sequence
  Description of Artificial Sequence: Synthetic peptide
YDNQLNN

SEQ ID NO: 13899 - protein, 7 aa, Artificial Sequence
  Description of Artificial Sequence: Synthetic peptide
YDPYHSP

SEQ ID NO: 13900 - protein, 7 aa, Artificial Sequence
  Description of Artificial Sequence: Synthetic peptide
YDREPLD

SEQ ID NO: 13901 - protein, 7 aa, Artificial Sequence
  Description of Artificial Sequence: Synthetic peptide
YDSNTET

SEQ ID NO: 13902 - protein, 7 aa, Artificial Sequence
  Description of Artificial Sequence: Synthetic peptide
YDSRGPA

SEQ ID NO: 13903 - protein, 7 aa, Artificial Sequence
  Description of Artificial Sequence: Synthetic peptide
YDSSVPN

SEQ ID NO: 13904 - protein, 7 aa, Artificial Sequence
  Description of Artificial Sequence: Synthetic peptide
YDSVATL

SEQ ID NO: 13905 - protein, 7 aa, Artificial Sequence
  Description of Artificial Sequence: Synthetic peptide
YDTHGSP

SEQ ID NO: 13906 - protein, 7 aa, Artificial Sequence
  Description of Artificial Sequence: Synthetic peptide
YDTKLQM

SEQ ID NO: 13907 - protein, 7 aa, Artificial Sequence
  Description of Artificial Sequence: Synthetic peptide
YEAPTRS

SEQ ID NO: 13908 - protein, 7 aa, Artificial Sequence
  Description of Artificial Sequence: Synthetic peptide
YEATSSN

SEQ ID NO: 13909 - protein, 7 aa, Artificial Sequence
  Description of Artificial Sequence: Synthetic peptide
YEGSPRN

SEQ ID NO: 13910 - protein, 7 aa, Artificial Sequence
  Description of Artificial Sequence: Synthetic peptide
YEGYKLP

SEQ ID NO: 13911 - protein, 7 aa, Artificial Sequence
  Description of Artificial Sequence: Synthetic peptide
YEIQGTG

SEQ ID NO: 13912 - protein, 7 aa, Artificial Sequence
  Description of Artificial Sequence: Synthetic peptide
YELAHHA

SEQ ID NO: 13913 - protein, 7 aa, Artificial Sequence
  Description of Artificial Sequence: Synthetic peptide
YELQLFS

SEQ ID NO: 13914 - protein, 7 aa, Artificial Sequence
  Description of Artificial Sequence: Synthetic peptide
YELRRIP

SEQ ID NO: 13915 - protein, 7 aa, Artificial Sequence
  Description of Artificial Sequence: Synthetic peptide
YEPGTDA

SEQ ID NO: 13916 - protein, 7 aa, Artificial Sequence
  Description of Artificial Sequence: Synthetic peptide
YEPKVRV

SEQ ID NO: 13917 - protein, 7 aa, Artificial Sequence
  Description of Artificial Sequence: Synthetic peptide
YESSNDP

SEQ ID NO: 13918 - protein, 7 aa, Artificial Sequence
  Description of Artificial Sequence: Synthetic peptide
YESYIER

SEQ ID NO: 13919 - protein, 7 aa, Artificial Sequence
  Description of Artificial Sequence: Synthetic peptide
YETAFRA

SEQ ID NO: 13920 - protein, 7 aa, Artificial Sequence
  Description of Artificial Sequence: Synthetic peptide
YETDISQ

SEQ ID NO: 13921 - protein, 7 aa, Artificial Sequence
  Description of Artificial Sequence: Synthetic peptide
YETELRA

SEQ ID NO: 13922 - protein, 7 aa, Artificial Sequence
  Description of Artificial Sequence: Synthetic peptide
YFAGRTD

SEQ ID NO: 13923 - protein, 7 aa, Artificial Sequence
  Description of Artificial Sequence: Synthetic peptide
YFASPTS

SEQ ID NO: 13924 - protein, 7 aa, Artificial Sequence
  Description of Artificial Sequence: Synthetic peptide
YFEASSA

SEQ ID NO: 13925 - protein, 7 aa, Artificial Sequence
  Description of Artificial Sequence: Synthetic peptide
YFGSSAT

SEQ ID NO: 13926 - protein, 7 aa, Artificial Sequence
  Description of Artificial Sequence: Synthetic peptide
YFGSSDP

SEQ ID NO: 13927 - protein, 7 aa, Artificial Sequence
  Description of Artificial Sequence: Synthetic peptide
YFHLATS

SEQ ID NO: 13928 - protein, 7 aa, Artificial Sequence
  Description of Artificial Sequence: Synthetic peptide
YFPSMVD

SEQ ID NO: 13929 - protein, 7 aa, Artificial Sequence
  Description of Artificial Sequence: Synthetic peptide
YFSHDET

SEQ ID NO: 13930 - protein, 7 aa, Artificial Sequence
  Description of Artificial Sequence: Synthetic peptide
YFTNDSV

SEQ ID NO: 13931 - protein, 7 aa, Artificial Sequence
  Description of Artificial Sequence: Synthetic peptide
YFTSRSE

SEQ ID NO: 13932 - protein, 7 aa, Artificial Sequence
  Description of Artificial Sequence: Synthetic peptide
YFVANNP

SEQ ID NO: 13933 - protein, 7 aa, Artificial Sequence
  Description of Artificial Sequence: Synthetic peptide
YFVKILI

SEQ ID NO: 13934 - protein, 7 aa, Artificial Sequence
  Description of Artificial Sequence: Synthetic peptide
YGASPDT

SEQ ID NO: 13935 - protein, 7 aa, Artificial Sequence
  Description of Artificial Sequence: Synthetic peptide
YGAVAKH

SEQ ID NO: 13936 - protein, 7 aa, Artificial Sequence
  Description of Artificial Sequence: Synthetic peptide
YGAVRHN

SEQ ID NO: 13937 - protein, 7 aa, Artificial Sequence
  Description of Artificial Sequence: Synthetic peptide
YGAVSPV

SEQ ID NO: 13938 - protein, 7 aa, Artificial Sequence
  Description of Artificial Sequence: Synthetic peptide
YGDPGPP

SEQ ID NO: 13939 - protein, 7 aa, Artificial Sequence
  Description of Artificial Sequence: Synthetic peptide
YGDVADS

SEQ ID NO: 13940 - protein, 7 aa, Artificial Sequence
  Description of Artificial Sequence: Synthetic peptide
YGEPIRP

SEQ ID NO: 13941 - protein, 7 aa, Artificial Sequence
  Description of Artificial Sequence: Synthetic peptide
YGGAGSL

SEQ ID NO: 13942 - protein, 7 aa, Artificial Sequence
  Description of Artificial Sequence: Synthetic peptide
YGGHTVS

SEQ ID NO: 13943 - protein, 7 aa, Artificial Sequence
  Description of Artificial Sequence: Synthetic peptide
YGGPNMT

SEQ ID NO: 13944 - protein, 7 aa, Artificial Sequence
  Description of Artificial Sequence: Synthetic peptide
YGISPKT

SEQ ID NO: 13945 - protein, 7 aa, Artificial Sequence
  Description of Artificial Sequence: Synthetic peptide
YGKMTSD

SEQ ID NO: 13946 - protein, 7 aa, Artificial Sequence
  Description of Artificial Sequence: Synthetic peptide
YGLKSAI

SEQ ID NO: 13947 - protein, 7 aa, Artificial Sequence
  Description of Artificial Sequence: Synthetic peptide
YGLSAHS

SEQ ID NO: 13948 - protein, 7 aa, Artificial Sequence
  Description of Artificial Sequence: Synthetic peptide
YGMKVAQ

SEQ ID NO: 13949 - protein, 7 aa, Artificial Sequence
  Description of Artificial Sequence: Synthetic peptide
YGMSFKE

SEQ ID NO: 13950 - protein, 7 aa, Artificial Sequence
  Description of Artificial Sequence: Synthetic peptide
YGNARAV

SEQ ID NO: 13951 - protein, 7 aa, Artificial Sequence
  Description of Artificial Sequence: Synthetic peptide
YGNGSLG

SEQ ID NO: 13952 - protein, 7 aa, Artificial Sequence
  Description of Artificial Sequence: Synthetic peptide
YGNHLLS

SEQ ID NO: 13953 - protein, 7 aa, Artificial Sequence
  Description of Artificial Sequence: Synthetic peptide
YGPALLS

SEQ ID NO: 13954 - protein, 7 aa, Artificial Sequence
  Description of Artificial Sequence: Synthetic peptide
YGPDLRQ

SEQ ID NO: 13955 - protein, 7 aa, Artificial Sequence
  Description of Artificial Sequence: Synthetic peptide
YGPHAKS

SEQ ID NO: 13956 - protein, 7 aa, Artificial Sequence
  Description of Artificial Sequence: Synthetic peptide
YGQSGAS

SEQ ID NO: 13957 - protein, 7 aa, Artificial Sequence
  Description of Artificial Sequence: Synthetic peptide
YGQSKSS

SEQ ID NO: 13958 - protein, 7 aa, Artificial Sequence
  Description of Artificial Sequence: Synthetic peptide
YGRNMTQ

SEQ ID NO: 13959 - protein, 7 aa, Artificial Sequence
  Description of Artificial Sequence: Synthetic peptide
YGRSQSL

SEQ ID NO: 13960 - protein, 7 aa, Artificial Sequence
  Description of Artificial Sequence: Synthetic peptide
YGSLNIA

SEQ ID NO: 13961 - protein, 7 aa, Artificial Sequence
  Description of Artificial Sequence: Synthetic peptide
YGSPRVT

SEQ ID NO: 13962 - protein, 7 aa, Artificial Sequence
  Description of Artificial Sequence: Synthetic peptide
YGSSCHT

SEQ ID NO: 13963 - protein, 7 aa, Artificial Sequence
  Description of Artificial Sequence: Synthetic peptide
YGSSRTT

SEQ ID NO: 13964 - protein, 7 aa, Artificial Sequence
  Description of Artificial Sequence: Synthetic peptide
YGTATQA

SEQ ID NO: 13965 - protein, 7 aa, Artificial Sequence
  Description of Artificial Sequence: Synthetic peptide
YGTETNY

SEQ ID NO: 13966 - protein, 7 aa, Artificial Sequence
  Description of Artificial Sequence: Synthetic peptide
YGTGGHL

SEQ ID NO: 13967 - protein, 7 aa, Artificial Sequence
  Description of Artificial Sequence: Synthetic peptide
YGTLARH

SEQ ID NO: 13968 - protein, 7 aa, Artificial Sequence
  Description of Artificial Sequence: Synthetic peptide
YGVRPST

SEQ ID NO: 13969 - protein, 7 aa, Artificial Sequence
  Description of Artificial Sequence: Synthetic peptide
YGYAALN

SEQ ID NO: 13970 - protein, 7 aa, Artificial Sequence
  Description of Artificial Sequence: Synthetic peptide
YHAGPPD

SEQ ID NO: 13971 - protein, 7 aa, Artificial Sequence
  Description of Artificial Sequence: Synthetic peptide
YHGRTVV

SEQ ID NO: 13972 - protein, 7 aa, Artificial Sequence
  Description of Artificial Sequence: Synthetic peptide
YHKTGVH

SEQ ID NO: 13973 - protein, 7 aa, Artificial Sequence
  Description of Artificial Sequence: Synthetic peptide
YHMTVKS

SEQ ID NO: 13974 - protein, 7 aa, Artificial Sequence
  Description of Artificial Sequence: Synthetic peptide
YHNHGTS

SEQ ID NO: 13975 - protein, 7 aa, Artificial Sequence
  Description of Artificial Sequence: Synthetic peptide
YHNLQGM

SEQ ID NO: 13976 - protein, 7 aa, Artificial Sequence
  Description of Artificial Sequence: Synthetic peptide
YHNNSSP

SEQ ID NO: 13977 - protein, 7 aa, Artificial Sequence
  Description of Artificial Sequence: Synthetic peptide
YHPPREN

SEQ ID NO: 13978 - protein, 7 aa, Artificial Sequence
  Description of Artificial Sequence: Synthetic peptide
YHPVIAP

SEQ ID NO: 13979 - protein, 7 aa, Artificial Sequence
  Description of Artificial Sequence: Synthetic peptide
YHSEVRA

SEQ ID NO: 13980 - protein, 7 aa, Artificial Sequence
  Description of Artificial Sequence: Synthetic peptide
YHSNTTS

SEQ ID NO: 13981 - protein, 7 aa, Artificial Sequence
  Description of Artificial Sequence: Synthetic peptide
YHSVSTS

SEQ ID NO: 13982 - protein, 7 aa, Artificial Sequence
  Description of Artificial Sequence: Synthetic peptide
YHTASMN

SEQ ID NO: 13983 - protein, 7 aa, Artificial Sequence
  Description of Artificial Sequence: Synthetic peptide
YHTLNKD

SEQ ID NO: 13984 - protein, 7 aa, Artificial Sequence
  Description of Artificial Sequence: Synthetic peptide
YHTVSSN

SEQ ID NO: 13985 - protein, 7 aa, Artificial Sequence
  Description of Artificial Sequence: Synthetic peptide
YHVRAAS

SEQ ID NO: 13986 - protein, 7 aa, Artificial Sequence
  Description of Artificial Sequence: Synthetic peptide
YIETRVT

SEQ ID NO: 13987 - protein, 7 aa, Artificial Sequence
  Description of Artificial Sequence: Synthetic peptide
YIGERDP

SEQ ID NO: 13988 - protein, 7 aa, Artificial Sequence
  Description of Artificial Sequence: Synthetic peptide
YIGPDLA

SEQ ID NO: 13989 - protein, 7 aa, Artificial Sequence
  Description of Artificial Sequence: Synthetic peptide
YIHPEQE

SEQ ID NO: 13990 - protein, 7 aa, Artificial Sequence
  Description of Artificial Sequence: Synthetic peptide
YIIAQEC

SEQ ID NO: 13991 - protein, 7 aa, Artificial Sequence
  Description of Artificial Sequence: Synthetic peptide
YILTSET

SEQ ID NO: 13992 - protein, 7 aa, Artificial Sequence
  Description of Artificial Sequence: Synthetic peptide
YINALIA

SEQ ID NO: 13993 - protein, 7 aa, Artificial Sequence
  Description of Artificial Sequence: Synthetic peptide
YIPSKFT

SEQ ID NO: 13994 - protein, 7 aa, Artificial Sequence
  Description of Artificial Sequence: Synthetic peptide
YIQVPKG

SEQ ID NO: 13995 - protein, 7 aa, Artificial Sequence
  Description of Artificial Sequence: Synthetic peptide
YISAGTS

SEQ ID NO: 13996 - protein, 7 aa, Artificial Sequence
  Description of Artificial Sequence: Synthetic peptide
YISPVSV

SEQ ID NO: 13997 - protein, 7 aa, Artificial Sequence
  Description of Artificial Sequence: Synthetic peptide
YKAASVP

SEQ ID NO: 13998 - protein, 7 aa, Artificial Sequence
  Description of Artificial Sequence: Synthetic peptide
YKGAPVT

SEQ ID NO: 13999 - protein, 7 aa, Artificial Sequence
  Description of Artificial Sequence: Synthetic peptide
YKGASLD

SEQ ID NO: 14000 - protein, 7 aa, Artificial Sequence
  Description of Artificial Sequence: Synthetic peptide
YKGGNSF

SEQ ID NO: 14001 - protein, 7 aa, Artificial Sequence
  Description of Artificial Sequence: Synthetic peptide
YKLNATY

SEQ ID NO: 14002 - protein, 7 aa, Artificial Sequence
  Description of Artificial Sequence: Synthetic peptide
YKLQQVS

SEQ ID NO: 14003 - protein, 7 aa, Artificial Sequence
  Description of Artificial Sequence: Synthetic peptide
YKPANVN

SEQ ID NO: 14004 - protein, 7 aa, Artificial Sequence
  Description of Artificial Sequence: Synthetic peptide
YKPSEGT

SEQ ID NO: 14005 - protein, 7 aa, Artificial Sequence
  Description of Artificial Sequence: Synthetic peptide
YKQHVIS

SEQ ID NO: 14006 - protein, 7 aa, Artificial Sequence
  Description of Artificial Sequence: Synthetic peptide
YKSSAGS

SEQ ID NO: 14007 - protein, 7 aa, Artificial Sequence
  Description of Artificial Sequence: Synthetic peptide
YKTGRLA

SEQ ID NO: 14008 - protein, 7 aa, Artificial Sequence
  Description of Artificial Sequence: Synthetic peptide
YKVLPSA

SEQ ID NO: 14009 - protein, 7 aa, Artificial Sequence
  Description of Artificial Sequence: Synthetic peptide
YLAGERT

SEQ ID NO: 14010 - protein, 7 aa, Artificial Sequence
  Description of Artificial Sequence: Synthetic peptide
YLAHGLQ

SEQ ID NO: 14011 - protein, 7 aa, Artificial Sequence
  Description of Artificial Sequence: Synthetic peptide
YLALQYK

SEQ ID NO: 14012 - protein, 7 aa, Artificial Sequence
  Description of Artificial Sequence: Synthetic peptide
YLDHIWE

SEQ ID NO: 14013 - protein, 7 aa, Artificial Sequence
  Description of Artificial Sequence: Synthetic peptide
YLDTSPV

SEQ ID NO: 14014 - protein, 7 aa, Artificial Sequence
  Description of Artificial Sequence: Synthetic peptide
YLERYGS

SEQ ID NO: 14015 - protein, 7 aa, Artificial Sequence
  Description of Artificial Sequence: Synthetic peptide
YLGDKMA

SEQ ID NO: 14016 - protein, 7 aa, Artificial Sequence
  Description of Artificial Sequence: Synthetic peptide
YLGHSTK

SEQ ID NO: 14017 - protein, 7 aa, Artificial Sequence
  Description of Artificial Sequence: Synthetic peptide
YLGTQVN

SEQ ID NO: 14018 - protein, 7 aa, Artificial Sequence
  Description of Artificial Sequence: Synthetic peptide
YLKFTDS

SEQ ID NO: 14019 - protein, 7 aa, Artificial Sequence
  Description of Artificial Sequence: Synthetic peptide
YLKSNSP

SEQ ID NO: 14020 - protein, 7 aa, Artificial Sequence
  Description of Artificial Sequence: Synthetic peptide
YLLSELS

SEQ ID NO: 14021 - protein, 7 aa, Artificial Sequence
  Description of Artificial Sequence: Synthetic peptide
YLLSHAG

SEQ ID NO: 14022 - protein, 7 aa, Artificial Sequence
  Description of Artificial Sequence: Synthetic peptide
YLMHASA

SEQ ID NO: 14023 - protein, 7 aa, Artificial Sequence
  Description of Artificial Sequence: Synthetic peptide
YLNVTPA

SEQ ID NO: 14024 - protein, 7 aa, Artificial Sequence
  Description of Artificial Sequence: Synthetic peptide
YLPKSNF

SEQ ID NO: 14025 - protein, 7 aa, Artificial Sequence
  Description of Artificial Sequence: Synthetic peptide
YLPLTAV

SEQ ID NO: 14026 - protein, 7 aa, Artificial Sequence
  Description of Artificial Sequence: Synthetic peptide
YLPRGTF

SEQ ID NO: 14027 - protein, 7 aa, Artificial Sequence
  Description of Artificial Sequence: Synthetic peptide
YLPRGTS

SEQ ID NO: 14028 - protein, 7 aa, Artificial Sequence
  Description of Artificial Sequence: Synthetic peptide
YLPTRHE

SEQ ID NO: 14029 - protein, 7 aa, Artificial Sequence
  Description of Artificial Sequence: Synthetic peptide
YLQAHYN

SEQ ID NO: 14030 - protein, 7 aa, Artificial Sequence
  Description of Artificial Sequence: Synthetic peptide
YLQHGHT

SEQ ID NO: 14031 - protein, 7 aa, Artificial Sequence
  Description of Artificial Sequence: Synthetic peptide
YLQTEDP

SEQ ID NO: 14032 - protein, 7 aa, Artificial Sequence
  Description of Artificial Sequence: Synthetic peptide
YLRLQTG

SEQ ID NO: 14033 - protein, 7 aa, Artificial Sequence
  Description of Artificial Sequence: Synthetic peptide
YLRPQSG

SEQ ID NO: 14034 - protein, 7 aa, Artificial Sequence
  Description of Artificial Sequence: Synthetic peptide
YLSDPRM

SEQ ID NO: 14035 - protein, 7 aa, Artificial Sequence
  Description of Artificial Sequence: Synthetic peptide
YLSGMIK

SEQ ID NO: 14036 - protein, 7 aa, Artificial Sequence
  Description of Artificial Sequence: Synthetic peptide
YLSHRSE

SEQ ID NO: 14037 - protein, 7 aa, Artificial Sequence
  Description of Artificial Sequence: Synthetic peptide
YLSNTEM

SEQ ID NO: 14038 - protein, 7 aa, Artificial Sequence
  Description of Artificial Sequence: Synthetic peptide
YLSVDES

SEQ ID NO: 14039 - protein, 7 aa, Artificial Sequence
  Description of Artificial Sequence: Synthetic peptide
YLSVQSN

SEQ ID NO: 14040 - protein, 7 aa, Artificial Sequence
  Description of Artificial Sequence: Synthetic peptide
YLTKHTS

SEQ ID NO: 14041 - protein, 7 aa, Artificial Sequence
  Description of Artificial Sequence: Synthetic peptide
YLTQLST

SEQ ID NO: 14042 - protein, 7 aa, Artificial Sequence
  Description of Artificial Sequence: Synthetic peptide
YLVETTK

SEQ ID NO: 14043 - protein, 7 aa, Artificial Sequence
  Description of Artificial Sequence: Synthetic peptide
YLVGQRV

SEQ ID NO: 14044 - protein, 7 aa, Artificial Sequence
  Description of Artificial Sequence: Synthetic peptide
YMDTDDR

SEQ ID NO: 14045 - protein, 7 aa, Artificial Sequence
  Description of Artificial Sequence: Synthetic peptide
YMGHALS

SEQ ID NO: 14046 - protein, 7 aa, Artificial Sequence
  Description of Artificial Sequence: Synthetic peptide
YMHASNV

SEQ ID NO: 14047 - protein, 7 aa, Artificial Sequence
  Description of Artificial Sequence: Synthetic peptide
YMHGSHA

SEQ ID NO: 14048 - protein, 7 aa, Artificial Sequence
  Description of Artificial Sequence: Synthetic peptide
YMHSPTP

SEQ ID NO: 14049 - protein, 7 aa, Artificial Sequence
  Description of Artificial Sequence: Synthetic peptide
YMHSSRT

SEQ ID NO: 14050 - protein, 7 aa, Artificial Sequence
  Description of Artificial Sequence: Synthetic peptide
YMHYTVT

SEQ ID NO: 14051 - protein, 7 aa, Artificial Sequence
  Description of Artificial Sequence: Synthetic peptide
YMPAPVQ

SEQ ID NO: 14052 - protein, 7 aa, Artificial Sequence
  Description of Artificial Sequence: Synthetic peptide
YMQTRDT

SEQ ID NO: 14053 - protein, 7 aa, Artificial Sequence
  Description of Artificial Sequence: Synthetic peptide
YMQVFSP

SEQ ID NO: 14054 - protein, 7 aa, Artificial Sequence
  Description of Artificial Sequence: Synthetic peptide
YMSAIRM

SEQ ID NO: 14055 - protein, 7 aa, Artificial Sequence
  Description of Artificial Sequence: Synthetic peptide
YMSATTR

SEQ ID NO: 14056 - protein, 7 aa, Artificial Sequence
  Description of Artificial Sequence: Synthetic peptide
YMSRTAS

SEQ ID NO: 14057 - protein, 7 aa, Artificial Sequence
  Description of Artificial Sequence: Synthetic peptide
YMSVTQQ

SEQ ID NO: 14058 - protein, 7 aa, Artificial Sequence
  Description of Artificial Sequence: Synthetic peptide
YMTGRPH

SEQ ID NO: 14059 - protein, 7 aa, Artificial Sequence
  Description of Artificial Sequence: Synthetic peptide
YMTKNFG

SEQ ID NO: 14060 - protein, 7 aa, Artificial Sequence
  Description of Artificial Sequence: Synthetic peptide
YMTNLQP

SEQ ID NO: 14061 - protein, 7 aa, Artificial Sequence
  Description of Artificial Sequence: Synthetic peptide
YMTSQSR

SEQ ID NO: 14062 - protein, 7 aa, Artificial Sequence
  Description of Artificial Sequence: Synthetic peptide
YMYDGSV

SEQ ID NO: 14063 - protein, 7 aa, Artificial Sequence
  Description of Artificial Sequence: Synthetic peptide
YNAASGL

SEQ ID NO: 14064 - protein, 7 aa, Artificial Sequence
  Description of Artificial Sequence: Synthetic peptide
YNAGGPR

SEQ ID NO: 14065 - protein, 7 aa, Artificial Sequence
  Description of Artificial Sequence: Synthetic peptide
YNALLQP

SEQ ID NO: 14066 - protein, 7 aa, Artificial Sequence
  Description of Artificial Sequence: Synthetic peptide
YNDVMSN

SEQ ID NO: 14067 - protein, 7 aa, Artificial Sequence
  Description of Artificial Sequence: Synthetic peptide
YNGNLRL

SEQ ID NO: 14068 - protein, 7 aa, Artificial Sequence
  Description of Artificial Sequence: Synthetic peptide
YNGQHIA

SEQ ID NO: 14069 - protein, 7 aa, Artificial Sequence
  Description of Artificial Sequence: Synthetic peptide
YNIGTSN

SEQ ID NO: 14070 - protein, 7 aa, Artificial Sequence
  Description of Artificial Sequence: Synthetic peptide
YNINQLT

SEQ ID NO: 14071 - protein, 7 aa, Artificial Sequence
  Description of Artificial Sequence: Synthetic peptide
YNLRPLQ

SEQ ID NO: 14072 - protein, 7 aa, Artificial Sequence
  Description of Artificial Sequence: Synthetic peptide
YNLSGPS

SEQ ID NO: 14073 - protein, 7 aa, Artificial Sequence
  Description of Artificial Sequence: Synthetic peptide
YNLSNPA

SEQ ID NO: 14074 - protein, 7 aa, Artificial Sequence
  Description of Artificial Sequence: Synthetic peptide
YNLSVGF

SEQ ID NO: 14075 - protein, 7 aa, Artificial Sequence
  Description of Artificial Sequence: Synthetic peptide
YNNSNTT

SEQ ID NO: 14076 - protein, 7 aa, Artificial Sequence
  Description of Artificial Sequence: Synthetic peptide
YNPLNQR

SEQ ID NO: 14077 - protein, 7 aa, Artificial Sequence
  Description of Artificial Sequence: Synthetic peptide
YNPPEPL

SEQ ID NO: 14078 - protein, 7 aa, Artificial Sequence
  Description of Artificial Sequence: Synthetic peptide
YNPPRSS

SEQ ID NO: 14079 - protein, 7 aa, Artificial Sequence
  Description of Artificial Sequence: Synthetic peptide
YNQHGPP

SEQ ID NO: 14080 - protein, 7 aa, Artificial Sequence
  Description of Artificial Sequence: Synthetic peptide
YNQLARP

SEQ ID NO: 14081 - protein, 7 aa, Artificial Sequence
  Description of Artificial Sequence: Synthetic peptide
YNQRPIV

SEQ ID NO: 14082 - protein, 7 aa, Artificial Sequence
  Description of Artificial Sequence: Synthetic peptide
YNRANLS

SEQ ID NO: 14083 - protein, 7 aa, Artificial Sequence
  Description of Artificial Sequence: Synthetic peptide
YNRGQMQ

SEQ ID NO: 14084 - protein, 7 aa, Artificial Sequence
  Description of Artificial Sequence: Synthetic peptide
YNRVATS

SEQ ID NO: 14085 - protein, 7 aa, Artificial Sequence
  Description of Artificial Sequence: Synthetic peptide
YNSSGVP

SEQ ID NO: 14086 - protein, 7 aa, Artificial Sequence
  Description of Artificial Sequence: Synthetic peptide
YNSSSLG

SEQ ID NO: 14087 - protein, 7 aa, Artificial Sequence
  Description of Artificial Sequence: Synthetic peptide
YNSTGLR

SEQ ID NO: 14088 - protein, 7 aa, Artificial Sequence
  Description of Artificial Sequence: Synthetic peptide
YNTGRIT

SEQ ID NO: 14089 - protein, 7 aa, Artificial Sequence
  Description of Artificial Sequence: Synthetic peptide
YNTIKAV

SEQ ID NO: 14090 - protein, 7 aa, Artificial Sequence
  Description of Artificial Sequence: Synthetic peptide
YNTPRME

SEQ ID NO: 14091 - protein, 7 aa, Artificial Sequence
  Description of Artificial Sequence: Synthetic peptide
YNVETDN

SEQ ID NO: 14092 - protein, 7 aa, Artificial Sequence
  Description of Artificial Sequence: Synthetic peptide
YNVYTVP

SEQ ID NO: 14093 - protein, 7 aa, Artificial Sequence
  Description of Artificial Sequence: Synthetic peptide
YPALDVF

SEQ ID NO: 14094 - protein, 7 aa, Artificial Sequence
  Description of Artificial Sequence: Synthetic peptide
YPANRLL

SEQ ID NO: 14095 - protein, 7 aa, Artificial Sequence
  Description of Artificial Sequence: Synthetic peptide
YPDSDLL

SEQ ID NO: 14096 - protein, 7 aa, Artificial Sequence
  Description of Artificial Sequence: Synthetic peptide
YPFGDMA

SEQ ID NO: 14097 - protein, 7 aa, Artificial Sequence
  Description of Artificial Sequence: Synthetic peptide
YPGATET

SEQ ID NO: 14098 - protein, 7 aa, Artificial Sequence
  Description of Artificial Sequence: Synthetic peptide
YPGTKQM

SEQ ID NO: 14099 - protein, 7 aa, Artificial Sequence
  Description of Artificial Sequence: Synthetic peptide
YPGVTVK

SEQ ID NO: 14100 - protein, 7 aa, Artificial Sequence
  Description of Artificial Sequence: Synthetic peptide
YPHAASW

SEQ ID NO: 14101 - protein, 7 aa, Artificial Sequence
  Description of Artificial Sequence: Synthetic peptide
YPHHSQH

SEQ ID NO: 14102 - protein, 7 aa, Artificial Sequence
  Description of Artificial Sequence: Synthetic peptide
YPHTPAA

SEQ ID NO: 14103 - protein, 7 aa, Artificial Sequence
  Description of Artificial Sequence: Synthetic peptide
YPIATVR

SEQ ID NO: 14104 - protein, 7 aa, Artificial Sequence
  Description of Artificial Sequence: Synthetic peptide
YPIRPLG

SEQ ID NO: 14105 - protein, 7 aa, Artificial Sequence
  Description of Artificial Sequence: Synthetic peptide
YPKVPTF

SEQ ID NO: 14106 - protein, 7 aa, Artificial Sequence
  Description of Artificial Sequence: Synthetic peptide
YPKVYSA

SEQ ID NO: 14107 - protein, 7 aa, Artificial Sequence
  Description of Artificial Sequence: Synthetic peptide
YPLSTSA

SEQ ID NO: 14108 - protein, 7 aa, Artificial Sequence
  Description of Artificial Sequence: Synthetic peptide
YPMPSPP

SEQ ID NO: 14109 - protein, 7 aa, Artificial Sequence
  Description of Artificial Sequence: Synthetic peptide
YPNDSYA

SEQ ID NO: 14110 - protein, 7 aa, Artificial Sequence
  Description of Artificial Sequence: Synthetic peptide
YPNHSRN

SEQ ID NO: 14111 - protein, 7 aa, Artificial Sequence
  Description of Artificial Sequence: Synthetic peptide
YPNSLSL

SEQ ID NO: 14112 - protein, 7 aa, Artificial Sequence
  Description of Artificial Sequence: Synthetic peptide
YPPDSHP

SEQ ID NO: 14113 - protein, 7 aa, Artificial Sequence
  Description of Artificial Sequence: Synthetic peptide
YPPIAQG

SEQ ID NO: 14114 - protein, 7 aa, Artificial Sequence
  Description of Artificial Sequence: Synthetic peptide
YPPKLGS

SEQ ID NO: 14115 - protein, 7 aa, Artificial Sequence
  Description of Artificial Sequence: Synthetic peptide
YPPKYAN

SEQ ID NO: 14116 - protein, 7 aa, Artificial Sequence
  Description of Artificial Sequence: Synthetic peptide
YPPPKAS

SEQ ID NO: 14117 - protein, 7 aa, Artificial Sequence
  Description of Artificial Sequence: Synthetic peptide
YPPSGYN

SEQ ID NO: 14118 - protein, 7 aa, Artificial Sequence
  Description of Artificial Sequence: Synthetic peptide
YPPTARA

SEQ ID NO: 14119 - protein, 7 aa, Artificial Sequence
  Description of Artificial Sequence: Synthetic peptide
YPPTPLP

SEQ ID NO: 14120 - protein, 7 aa, Artificial Sequence
  Description of Artificial Sequence: Synthetic peptide
YPPWHNP

SEQ ID NO: 14121 - protein, 7 aa, Artificial Sequence
  Description of Artificial Sequence: Synthetic peptide
YPRDASS

SEQ ID NO: 14122 - protein, 7 aa, Artificial Sequence
  Description of Artificial Sequence: Synthetic peptide
YPREKSL

SEQ ID NO: 14123 - protein, 7 aa, Artificial Sequence
  Description of Artificial Sequence: Synthetic peptide
YPRHPSF

SEQ ID NO: 14124 - protein, 7 aa, Artificial Sequence
  Description of Artificial Sequence: Synthetic peptide
YPRTLPE

SEQ ID NO: 14125 - protein, 7 aa, Artificial Sequence
  Description of Artificial Sequence: Synthetic peptide
YPSASSM

SEQ ID NO: 14126 - protein, 7 aa, Artificial Sequence
  Description of Artificial Sequence: Synthetic peptide
YPSHLLN

SEQ ID NO: 14127 - protein, 7 aa, Artificial Sequence
  Description of Artificial Sequence: Synthetic peptide
YPSPAGE

SEQ ID NO: 14128 - protein, 7 aa, Artificial Sequence
  Description of Artificial Sequence: Synthetic peptide
YPSPSNL

SEQ ID NO: 14129 - protein, 7 aa, Artificial Sequence
  Description of Artificial Sequence: Synthetic peptide
YPSSSMP

SEQ ID NO: 14130 - protein, 7 aa, Artificial Sequence
  Description of Artificial Sequence: Synthetic peptide
YPTGETP

SEQ ID NO: 14131 - protein, 7 aa, Artificial Sequence
  Description of Artificial Sequence: Synthetic peptide
YPTHSHM

SEQ ID NO: 14132 - protein, 7 aa, Artificial Sequence
  Description of Artificial Sequence: Synthetic peptide
YPTKHLH

SEQ ID NO: 14133 - protein, 7 aa, Artificial Sequence
  Description of Artificial Sequence: Synthetic peptide
YPTTPLM

SEQ ID NO: 14134 - protein, 7 aa, Artificial Sequence
  Description of Artificial Sequence: Synthetic peptide
YPVNAPT

SEQ ID NO: 14135 - protein, 7 aa, Artificial Sequence
  Description of Artificial Sequence: Synthetic peptide
YPVQDAL

SEQ ID NO: 14136 - protein, 7 aa, Artificial Sequence
  Description of Artificial Sequence: Synthetic peptide
YPVSTTQ

SEQ ID NO: 14137 - protein, 7 aa, Artificial Sequence
  Description of Artificial Sequence: Synthetic peptide
YQGIALG

SEQ ID NO: 14138 - protein, 7 aa, Artificial Sequence
  Description of Artificial Sequence: Synthetic peptide
YQGTLPS

SEQ ID NO: 14139 - protein, 7 aa, Artificial Sequence
  Description of Artificial Sequence: Synthetic peptide
YQLDNTP

SEQ ID NO: 14140 - protein, 7 aa, Artificial Sequence
  Description of Artificial Sequence: Synthetic peptide
YQLQRSE

SEQ ID NO: 14141 - protein, 7 aa, Artificial Sequence
  Description of Artificial Sequence: Synthetic peptide
YQLRQSP

SEQ ID NO: 14142 - protein, 7 aa, Artificial Sequence
  Description of Artificial Sequence: Synthetic peptide
YQLVTQP

SEQ ID NO: 14143 - protein, 7 aa, Artificial Sequence
  Description of Artificial Sequence: Synthetic peptide
YQPPDMG

SEQ ID NO: 14144 - protein, 7 aa, Artificial Sequence
  Description of Artificial Sequence: Synthetic peptide
YQQDGRC

SEQ ID NO: 14145 - protein, 7 aa, Artificial Sequence
  Description of Artificial Sequence: Synthetic peptide
YQRVSSS

SEQ ID NO: 14146 - protein, 7 aa, Artificial Sequence
  Description of Artificial Sequence: Synthetic peptide
YQSDGNP

SEQ ID NO: 14147 - protein, 7 aa, Artificial Sequence
  Description of Artificial Sequence: Synthetic peptide
YQTEITR

SEQ ID NO: 14148 - protein, 7 aa, Artificial Sequence
  Description of Artificial Sequence: Synthetic peptide
YQTYTRE

SEQ ID NO: 14149 - protein, 7 aa, Artificial Sequence
  Description of Artificial Sequence: Synthetic peptide
YQVKTGP

SEQ ID NO: 14150 - protein, 7 aa, Artificial Sequence
  Description of Artificial Sequence: Synthetic peptide
YQVNAGM

SEQ ID NO: 14151 - protein, 7 aa, Artificial Sequence
  Description of Artificial Sequence: Synthetic peptide
YRADGEA

SEQ ID NO: 14152 - protein, 7 aa, Artificial Sequence
  Description of Artificial Sequence: Synthetic peptide
YRAMAPP

SEQ ID NO: 14153 - protein, 7 aa, Artificial Sequence
  Description of Artificial Sequence: Synthetic peptide
YRANSPV

SEQ ID NO: 14154 - protein, 7 aa, Artificial Sequence
  Description of Artificial Sequence: Synthetic peptide
YRASGEL

SEQ ID NO: 14155 - protein, 7 aa, Artificial Sequence
  Description of Artificial Sequence: Synthetic peptide
YRDHEVL

SEQ ID NO: 14156 - protein, 7 aa, Artificial Sequence
  Description of Artificial Sequence: Synthetic peptide
YRDIQRG

SEQ ID NO: 14157 - protein, 7 aa, Artificial Sequence
  Description of Artificial Sequence: Synthetic peptide
YRDNRPN

SEQ ID NO: 14158 - protein, 7 aa, Artificial Sequence
  Description of Artificial Sequence: Synthetic peptide
YRDSSNI

SEQ ID NO: 14159 - protein, 7 aa, Artificial Sequence
  Description of Artificial Sequence: Synthetic peptide
YREMANR

SEQ ID NO: 14160 - protein, 7 aa, Artificial Sequence
  Description of Artificial Sequence: Synthetic peptide
YRENARA

SEQ ID NO: 14161 - protein, 7 aa, Artificial Sequence
  Description of Artificial Sequence: Synthetic peptide
YRGITLD

SEQ ID NO: 14162 - protein, 7 aa, Artificial Sequence
  Description of Artificial Sequence: Synthetic peptide
YRGNHAP

SEQ ID NO: 14163 - protein, 7 aa, Artificial Sequence
  Description of Artificial Sequence: Synthetic peptide
YRGYHVE

SEQ ID NO: 14164 - protein, 7 aa, Artificial Sequence
  Description of Artificial Sequence: Synthetic peptide
YRHGSIE

SEQ ID NO: 14165 - protein, 7 aa, Artificial Sequence
  Description of Artificial Sequence: Synthetic peptide
YRLYADD

SEQ ID NO: 14166 - protein, 7 aa, Artificial Sequence
  Description of Artificial Sequence: Synthetic peptide
YRMGTDQ

SEQ ID NO: 14167 - protein, 7 aa, Artificial Sequence
  Description of Artificial Sequence: Synthetic peptide
YRPGASA

SEQ ID NO: 14168 - protein, 7 aa, Artificial Sequence
  Description of Artificial Sequence: Synthetic peptide
YRPLSTP

SEQ ID NO: 14169 - protein, 7 aa, Artificial Sequence
  Description of Artificial Sequence: Synthetic peptide
YRPQEND

SEQ ID NO: 14170 - protein, 7 aa, Artificial Sequence
  Description of Artificial Sequence: Synthetic peptide
YRQALDH

SEQ ID NO: 14171 - protein, 7 aa, Artificial Sequence
  Description of Artificial Sequence: Synthetic peptide
YRQLDFP

SEQ ID NO: 14172 - protein, 7 aa, Artificial Sequence
  Description of Artificial Sequence: Synthetic peptide
YRQTRDP

SEQ ID NO: 14173 - protein, 7 aa, Artificial Sequence
  Description of Artificial Sequence: Synthetic peptide
YRQVTEV

SEQ ID NO: 14174 - protein, 7 aa, Artificial Sequence
  Description of Artificial Sequence: Synthetic peptide
YRSDTLR

SEQ ID NO: 14175 - protein, 7 aa, Artificial Sequence
  Description of Artificial Sequence: Synthetic peptide
YRSHTPP

SEQ ID NO: 14176 - protein, 7 aa, Artificial Sequence
  Description of Artificial Sequence: Synthetic peptide
YRSIVPD

SEQ ID NO: 14177 - protein, 7 aa, Artificial Sequence
  Description of Artificial Sequence: Synthetic peptide
YRSPDEM

SEQ ID NO: 14178 - protein, 7 aa, Artificial Sequence
  Description of Artificial Sequence: Synthetic peptide
YRSSTPD

SEQ ID NO: 14179 - protein, 7 aa, Artificial Sequence
  Description of Artificial Sequence: Synthetic peptide
YRSVVQS

SEQ ID NO: 14180 - protein, 7 aa, Artificial Sequence
  Description of Artificial Sequence: Synthetic peptide
YRTATPP

SEQ ID NO: 14181 - protein, 7 aa, Artificial Sequence
  Description of Artificial Sequence: Synthetic peptide
YRTEQLG

SEQ ID NO: 14182 - protein, 7 aa, Artificial Sequence
  Description of Artificial Sequence: Synthetic peptide
YRTIDSG

SEQ ID NO: 14183 - protein, 7 aa, Artificial Sequence
  Description of Artificial Sequence: Synthetic peptide
YRTLDNP

SEQ ID NO: 14184 - protein, 7 aa, Artificial Sequence
  Description of Artificial Sequence: Synthetic peptide
YRTPASS

SEQ ID NO: 14185 - protein, 7 aa, Artificial Sequence
  Description of Artificial Sequence: Synthetic peptide
YRTQPTQ

SEQ ID NO: 14186 - protein, 7 aa, Artificial Sequence
  Description of Artificial Sequence: Synthetic peptide
YRVDSAN

SEQ ID NO: 14187 - protein, 7 aa, Artificial Sequence
  Description of Artificial Sequence: Synthetic peptide
YRVSMLS

SEQ ID NO: 14188 - protein, 7 aa, Artificial Sequence
  Description of Artificial Sequence: Synthetic peptide
YRVSMSS

SEQ ID NO: 14189 - protein, 7 aa, Artificial Sequence
  Description of Artificial Sequence: Synthetic peptide
YRVVVGP

SEQ ID NO: 14190 - protein, 7 aa, Artificial Sequence
  Description of Artificial Sequence: Synthetic peptide
YSAHSAR

SEQ ID NO: 14191 - protein, 7 aa, Artificial Sequence
  Description of Artificial Sequence: Synthetic peptide
YSASSYL

SEQ ID NO: 14192 - protein, 7 aa, Artificial Sequence
  Description of Artificial Sequence: Synthetic peptide
YSDPARP

SEQ ID NO: 14193 - protein, 7 aa, Artificial Sequence
  Description of Artificial Sequence: Synthetic peptide
YSDSPKQ

SEQ ID NO: 14194 - protein, 7 aa, Artificial Sequence
  Description of Artificial Sequence: Synthetic peptide
YSDTDSS

SEQ ID NO: 14195 - protein, 7 aa, Artificial Sequence
  Description of Artificial Sequence: Synthetic peptide
YSDYGRP

SEQ ID NO: 14196 - protein, 7 aa, Artificial Sequence
  Description of Artificial Sequence: Synthetic peptide
YSEANIR

SEQ ID NO: 14197 - protein, 7 aa, Artificial Sequence
  Description of Artificial Sequence: Synthetic peptide
YSEFTLN

SEQ ID NO: 14198 - protein, 7 aa, Artificial Sequence
  Description of Artificial Sequence: Synthetic peptide
YSFPTSA

SEQ ID NO: 14199 - protein, 7 aa, Artificial Sequence
  Description of Artificial Sequence: Synthetic peptide
YSGHDTS

SEQ ID NO: 14200 - protein, 7 aa, Artificial Sequence
  Description of Artificial Sequence: Synthetic peptide
YSGRIGP

SEQ ID NO: 14201 - protein, 7 aa, Artificial Sequence
  Description of Artificial Sequence: Synthetic peptide
YSGRPAS

SEQ ID NO: 14202 - protein, 7 aa, Artificial Sequence
  Description of Artificial Sequence: Synthetic peptide
YSGSSRN

SEQ ID NO: 14203 - protein, 7 aa, Artificial Sequence
  Description of Artificial Sequence: Synthetic peptide
YSGTGFA

SEQ ID NO: 14204 - protein, 7 aa, Artificial Sequence
  Description of Artificial Sequence: Synthetic peptide
YSHANLP

SEQ ID NO: 14205 - protein, 7 aa, Artificial Sequence
  Description of Artificial Sequence: Synthetic peptide
YSHEAVM

SEQ ID NO: 14206 - protein, 7 aa, Artificial Sequence
  Description of Artificial Sequence: Synthetic peptide
YSHIEGS

SEQ ID NO: 14207 - protein, 7 aa, Artificial Sequence
  Description of Artificial Sequence: Synthetic peptide
YSHTQMS

SEQ ID NO: 14208 - protein, 7 aa, Artificial Sequence
  Description of Artificial Sequence: Synthetic peptide
YSHVTTC

SEQ ID NO: 14209 - protein, 7 aa, Artificial Sequence
  Description of Artificial Sequence: Synthetic peptide
YSIAHQS

SEQ ID NO: 14210 - protein, 7 aa, Artificial Sequence
  Description of Artificial Sequence: Synthetic peptide
YSLAYSP

SEQ ID NO: 14211 - protein, 7 aa, Artificial Sequence
  Description of Artificial Sequence: Synthetic peptide
YSLEDAP

SEQ ID NO: 14212 - protein, 7 aa, Artificial Sequence
  Description of Artificial Sequence: Synthetic peptide
YSLGGPS

SEQ ID NO: 14213 - protein, 7 aa, Artificial Sequence
  Description of Artificial Sequence: Synthetic peptide
YSLPTDL

SEQ ID NO: 14214 - protein, 7 aa, Artificial Sequence
  Description of Artificial Sequence: Synthetic peptide
YSLSHPS

SEQ ID NO: 14215 - protein, 7 aa, Artificial Sequence
  Description of Artificial Sequence: Synthetic peptide
YSLTLHD

SEQ ID NO: 14216 - protein, 7 aa, Artificial Sequence
  Description of Artificial Sequence: Synthetic peptide
YSMHAAI

SEQ ID NO: 14217 - protein, 7 aa, Artificial Sequence
  Description of Artificial Sequence: Synthetic peptide
YSMNKSP

SEQ ID NO: 14218 - protein, 7 aa, Artificial Sequence
  Description of Artificial Sequence: Synthetic peptide
YSMVRTP

SEQ ID NO: 14219 - protein, 7 aa, Artificial Sequence
  Description of Artificial Sequence: Synthetic peptide
YSNEAPR

SEQ ID NO: 14220 - protein, 7 aa, Artificial Sequence
  Description of Artificial Sequence: Synthetic peptide
YSNEKWA

SEQ ID NO: 14221 - protein, 7 aa, Artificial Sequence
  Description of Artificial Sequence: Synthetic peptide
YSNQARG

SEQ ID NO: 14222 - protein, 7 aa, Artificial Sequence
  Description of Artificial Sequence: Synthetic peptide
YSPHFRP

SEQ ID NO: 14223 - protein, 7 aa, Artificial Sequence
  Description of Artificial Sequence: Synthetic peptide
YSPIKTH

SEQ ID NO: 14224 - protein, 7 aa, Artificial Sequence
  Description of Artificial Sequence: Synthetic peptide
YSPISGS

SEQ ID NO: 14225 - protein, 7 aa, Artificial Sequence
  Description of Artificial Sequence: Synthetic peptide
YSPLPSR

SEQ ID NO: 14226 - protein, 7 aa, Artificial Sequence
  Description of Artificial Sequence: Synthetic peptide
YSPLSHH

SEQ ID NO: 14227 - protein, 7 aa, Artificial Sequence
  Description of Artificial Sequence: Synthetic peptide
YSPNLNG

SEQ ID NO: 14228 - protein, 7 aa, Artificial Sequence
  Description of Artificial Sequence: Synthetic peptide
YSPPPSM

SEQ ID NO: 14229 - protein, 7 aa, Artificial Sequence
  Description of Artificial Sequence: Synthetic peptide
YSPRTPT

SEQ ID NO: 14230 - protein, 7 aa, Artificial Sequence
  Description of Artificial Sequence: Synthetic peptide
YSPRTSL

SEQ ID NO: 14231 - protein, 7 aa, Artificial Sequence
  Description of Artificial Sequence: Synthetic peptide
YSPTEAF

SEQ ID NO: 14232 - protein, 7 aa, Artificial Sequence
  Description of Artificial Sequence: Synthetic peptide
YSPTRSS

SEQ ID NO: 14233 - protein, 7 aa, Artificial Sequence
  Description of Artificial Sequence: Synthetic peptide
YSQRGAD

SEQ ID NO: 14234 - protein, 7 aa, Artificial Sequence
  Description of Artificial Sequence: Synthetic peptide
YSQRNDS

SEQ ID NO: 14235 - protein, 7 aa, Artificial Sequence
  Description of Artificial Sequence: Synthetic peptide
YSRPSPL

SEQ ID NO: 14236 - protein, 7 aa, Artificial Sequence
  Description of Artificial Sequence: Synthetic peptide
YSSGGLR

SEQ ID NO: 14237 - protein, 7 aa, Artificial Sequence
  Description of Artificial Sequence: Synthetic peptide
YSSHLRN

SEQ ID NO: 14238 - protein, 7 aa, Artificial Sequence
  Description of Artificial Sequence: Synthetic peptide
YSSHSSS

SEQ ID NO: 14239 - protein, 7 aa, Artificial Sequence
  Description of Artificial Sequence: Synthetic peptide
YSSLAAL

SEQ ID NO: 14240 - protein, 7 aa, Artificial Sequence
  Description of Artificial Sequence: Synthetic peptide
YSSNLAR

SEQ ID NO: 14241 - protein, 7 aa, Artificial Sequence
  Description of Artificial Sequence: Synthetic peptide
YSSPDWS

SEQ ID NO: 14242 - protein, 7 aa, Artificial Sequence
  Description of Artificial Sequence: Synthetic peptide
YSSPPIT

SEQ ID NO: 14243 - protein, 7 aa, Artificial Sequence
  Description of Artificial Sequence: Synthetic peptide
YSSQLSE

SEQ ID NO: 14244 - protein, 7 aa, Artificial Sequence
  Description of Artificial Sequence: Synthetic peptide
YSSRGEA

SEQ ID NO: 14245 - protein, 7 aa, Artificial Sequence
  Description of Artificial Sequence: Synthetic peptide
YSSSVLA

SEQ ID NO: 14246 - protein, 7 aa, Artificial Sequence
  Description of Artificial Sequence: Synthetic peptide
YSTDRYS

SEQ ID NO: 14247 - protein, 7 aa, Artificial Sequence
  Description of Artificial Sequence: Synthetic peptide
YSTFQPE

SEQ ID NO: 14248 - protein, 7 aa, Artificial Sequence
  Description of Artificial Sequence: Synthetic peptide
YSTMRSM

SEQ ID NO: 14249 - protein, 7 aa, Artificial Sequence
  Description of Artificial Sequence: Synthetic peptide
YSTQSLN

SEQ ID NO: 14250 - protein, 7 aa, Artificial Sequence
  Description of Artificial Sequence: Synthetic peptide
YSTRSLS

SEQ ID NO: 14251 - protein, 7 aa, Artificial Sequence
  Description of Artificial Sequence: Synthetic peptide
YSTTGRL

SEQ ID NO: 14252 - protein, 7 aa, Artificial Sequence
  Description of Artificial Sequence: Synthetic peptide
YSTTVHA

SEQ ID NO: 14253 - protein, 7 aa, Artificial Sequence
  Description of Artificial Sequence: Synthetic peptide
YSTVGSS

SEQ ID NO: 14254 - protein, 7 aa, Artificial Sequence
  Description of Artificial Sequence: Synthetic peptide
YSVDAVW

SEQ ID NO: 14255 - protein, 7 aa, Artificial Sequence
  Description of Artificial Sequence: Synthetic peptide
YSVRTMS

SEQ ID NO: 14256 - protein, 7 aa, Artificial Sequence
  Description of Artificial Sequence: Synthetic peptide
YSVVTVD

SEQ ID NO: 14257 - protein, 7 aa, Artificial Sequence
  Description of Artificial Sequence: Synthetic peptide
YSYNSDH

SEQ ID NO: 14258 - protein, 7 aa, Artificial Sequence
  Description of Artificial Sequence: Synthetic peptide
YTAGVSA

SEQ ID NO: 14259 - protein, 7 aa, Artificial Sequence
  Description of Artificial Sequence: Synthetic peptide
YTARAQS

SEQ ID NO: 14260 - protein, 7 aa, Artificial Sequence
  Description of Artificial Sequence: Synthetic peptide
YTASGDI

SEQ ID NO: 14261 - protein, 7 aa, Artificial Sequence
  Description of Artificial Sequence: Synthetic peptide
YTEFAAN

SEQ ID NO: 14262 - protein, 7 aa, Artificial Sequence
  Description of Artificial Sequence: Synthetic peptide
YTGFTLD

SEQ ID NO: 14263 - protein, 7 aa, Artificial Sequence
  Description of Artificial Sequence: Synthetic peptide
YTGGQLH

SEQ ID NO: 14264 - protein, 7 aa, Artificial Sequence
  Description of Artificial Sequence: Synthetic peptide
YTGLEPS

SEQ ID NO: 14265 - protein, 7 aa, Artificial Sequence
  Description of Artificial Sequence: Synthetic peptide
YTGSSVL

SEQ ID NO: 14266 - protein, 7 aa, Artificial Sequence
  Description of Artificial Sequence: Synthetic peptide
YTHLTTA

SEQ ID NO: 14267 - protein, 7 aa, Artificial Sequence
  Description of Artificial Sequence: Synthetic peptide
YTHSIVT

SEQ ID NO: 14268 - protein, 7 aa, Artificial Sequence
  Description of Artificial Sequence: Synthetic peptide
YTHVLTP

SEQ ID NO: 14269 - protein, 7 aa, Artificial Sequence
  Description of Artificial Sequence: Synthetic peptide
YTKMLGP

SEQ ID NO: 14270 - protein, 7 aa, Artificial Sequence
  Description of Artificial Sequence: Synthetic peptide
YTKNSTV

SEQ ID NO: 14271 - protein, 7 aa, Artificial Sequence
  Description of Artificial Sequence: Synthetic peptide
YTLDQLS

SEQ ID NO: 14272 - protein, 7 aa, Artificial Sequence
  Description of Artificial Sequence: Synthetic peptide
YTLSATT

SEQ ID NO: 14273 - protein, 7 aa, Artificial Sequence
  Description of Artificial Sequence: Synthetic peptide
YTMSPRP

SEQ ID NO: 14274 - protein, 7 aa, Artificial Sequence
  Description of Artificial Sequence: Synthetic peptide
YTNDRRS

SEQ ID NO: 14275 - protein, 7 aa, Artificial Sequence
  Description of Artificial Sequence: Synthetic peptide
YTNNFVA

SEQ ID NO: 14276 - protein, 7 aa, Artificial Sequence
  Description of Artificial Sequence: Synthetic peptide
YTPAGLS

SEQ ID NO: 14277 - protein, 7 aa, Artificial Sequence
  Description of Artificial Sequence: Synthetic peptide
YTPHRMS

SEQ ID NO: 14278 - protein, 7 aa, Artificial Sequence
  Description of Artificial Sequence: Synthetic peptide
YTPLMSS

SEQ ID NO: 14279 - protein, 7 aa, Artificial Sequence
  Description of Artificial Sequence: Synthetic peptide
YTQSKTE

SEQ ID NO: 14280 - protein, 7 aa, Artificial Sequence
  Description of Artificial Sequence: Synthetic peptide
YTQTTWK

SEQ ID NO: 14281 - protein, 7 aa, Artificial Sequence
  Description of Artificial Sequence: Synthetic peptide
YTRAPDG

SEQ ID NO: 14282 - protein, 7 aa, Artificial Sequence
  Description of Artificial Sequence: Synthetic peptide
YTSHPTC

SEQ ID NO: 14283 - protein, 7 aa, Artificial Sequence
  Description of Artificial Sequence: Synthetic peptide
YTSISNM

SEQ ID NO: 14284 - protein, 7 aa, Artificial Sequence
  Description of Artificial Sequence: Synthetic peptide
YTSLSMA

SEQ ID NO: 14285 - protein, 7 aa, Artificial Sequence
  Description of Artificial Sequence: Synthetic peptide
YTSMHVS

SEQ ID NO: 14286 - protein, 7 aa, Artificial Sequence
  Description of Artificial Sequence: Synthetic peptide
YTSNIDM

SEQ ID NO: 14287 - protein, 7 aa, Artificial Sequence
  Description of Artificial Sequence: Synthetic peptide
YTSPAHV

SEQ ID NO: 14288 - protein, 7 aa, Artificial Sequence
  Description of Artificial Sequence: Synthetic peptide
YTSRHIA

SEQ ID NO: 14289 - protein, 7 aa, Artificial Sequence
  Description of Artificial Sequence: Synthetic peptide
YTSRVLS

SEQ ID NO: 14290 - protein, 7 aa, Artificial Sequence
  Description of Artificial Sequence: Synthetic peptide
YTSVYAH

SEQ ID NO: 14291 - protein, 7 aa, Artificial Sequence
  Description of Artificial Sequence: Synthetic peptide
YTSYTAP

SEQ ID NO: 14292 - protein, 7 aa, Artificial Sequence
  Description of Artificial Sequence: Synthetic peptide
YTTLPAR

SEQ ID NO: 14293 - protein, 7 aa, Artificial Sequence
  Description of Artificial Sequence: Synthetic peptide
YTTNRQS

SEQ ID NO: 14294 - protein, 7 aa, Artificial Sequence
  Description of Artificial Sequence: Synthetic peptide
YTTSPAL

SEQ ID NO: 14295 - protein, 7 aa, Artificial Sequence
  Description of Artificial Sequence: Synthetic peptide
YTTSPIK

SEQ ID NO: 14296 - protein, 7 aa, Artificial Sequence
  Description of Artificial Sequence: Synthetic peptide
YTVRHVN

SEQ ID NO: 14297 - protein, 7 aa, Artificial Sequence
  Description of Artificial Sequence: Synthetic peptide
YVATEQK

SEQ ID NO: 14298 - protein, 7 aa, Artificial Sequence
  Description of Artificial Sequence: Synthetic peptide
YVDDPSG

SEQ ID NO: 14299 - protein, 7 aa, Artificial Sequence
  Description of Artificial Sequence: Synthetic peptide
YVHLNTT

SEQ ID NO: 14300 - protein, 7 aa, Artificial Sequence
  Description of Artificial Sequence: Synthetic peptide
YVKLYEK

SEQ ID NO: 14301 - protein, 7 aa, Artificial Sequence
  Description of Artificial Sequence: Synthetic peptide
YVKPNGA

SEQ ID NO: 14302 - protein, 7 aa, Artificial Sequence
  Description of Artificial Sequence: Synthetic peptide
YVKSQTA

SEQ ID NO: 14303 - protein, 7 aa, Artificial Sequence
  Description of Artificial Sequence: Synthetic peptide
YVMSQSA

SEQ ID NO: 14304 - protein, 7 aa, Artificial Sequence
  Description of Artificial Sequence: Synthetic peptide
YVPGRNE

SEQ ID NO: 14305 - protein, 7 aa, Artificial Sequence
  Description of Artificial Sequence: Synthetic peptide
YVPMTSP

SEQ ID NO: 14306 - protein, 7 aa, Artificial Sequence
  Description of Artificial Sequence: Synthetic peptide
YVPTSLG

SEQ ID NO: 14307 - protein, 7 aa, Artificial Sequence
  Description of Artificial Sequence: Synthetic peptide
YVQQHVK

SEQ ID NO: 14308 - protein, 7 aa, Artificial Sequence
  Description of Artificial Sequence: Synthetic peptide
YVRGMDA

SEQ ID NO: 14309 - protein, 7 aa, Artificial Sequence
  Description of Artificial Sequence: Synthetic peptide
YVRVSNV

SEQ ID NO: 14310 - protein, 7 aa, Artificial Sequence
  Description of Artificial Sequence: Synthetic peptide
YVSHVDL

SEQ ID NO: 14311 - protein, 7 aa, Artificial Sequence
  Description of Artificial Sequence: Synthetic peptide
YVSMPNG

SEQ ID NO: 14312 - protein, 7 aa, Artificial Sequence
  Description of Artificial Sequence: Synthetic peptide
YVTDRMP

SEQ ID NO: 14313 - protein, 7 aa, Artificial Sequence
  Description of Artificial Sequence: Synthetic peptide
YVTGHHD

SEQ ID NO: 14314 - protein, 7 aa, Artificial Sequence
  Description of Artificial Sequence: Synthetic peptide
YVTKAPL

SEQ ID NO: 14315 - protein, 7 aa, Artificial Sequence
  Description of Artificial Sequence: Synthetic peptide
YVTQIHG

SEQ ID NO: 14316 - protein, 7 aa, Artificial Sequence
  Description of Artificial Sequence: Synthetic peptide
YVVEPEP

SEQ ID NO: 14317 - protein, 7 aa, Artificial Sequence
  Description of Artificial Sequence: Synthetic peptide
YVVNLPR

SEQ ID NO: 14318 - protein, 7 aa, Artificial Sequence
  Description of Artificial Sequence: Synthetic peptide
YVVRADG

SEQ ID NO: 14319 - protein, 7 aa, Artificial Sequence
  Description of Artificial Sequence: Synthetic peptide
YYDRSIG

SEQ ID NO: 14320 - protein, 7 aa, Artificial Sequence
  Description of Artificial Sequence: Synthetic peptide
YYESSKQ

SEQ ID NO: 14321 - protein, 7 aa, Artificial Sequence
  Description of Artificial Sequence: Synthetic peptide
YYGSAPA

SEQ ID NO: 14322 - protein, 7 aa, Artificial Sequence
  Description of Artificial Sequence: Synthetic peptide
YYGVHPN

SEQ ID NO: 14323 - protein, 7 aa, Artificial Sequence
  Description of Artificial Sequence: Synthetic peptide
YYNPSTS

SEQ ID NO: 14324 - protein, 7 aa, Artificial Sequence
  Description of Artificial Sequence: Synthetic peptide
YYPRPGG

SEQ ID NO: 14325 - protein, 7 aa, Artificial Sequence
  Description of Artificial Sequence: Synthetic peptide
YYSAMAD

SEQ ID NO: 14326 - protein, 7 aa, Artificial Sequence
  Description of Artificial Sequence: Synthetic peptide
YYSNTVT

SEQ ID NO: 14327 - DNA, 21 bp, Artificial Sequence
  Description of Artificial Sequence: Synthetic oligonucleotide
gcggctgcggcgtcgaatact

SEQ ID NO: 14328 - DNA, 21 bp, Artificial Sequence
  Description of Artificial Sequence: Synthetic oligonucleotide
gcggcggcgattgatggtgat

SEQ ID NO: 14329 - DNA, 21 bp, Artificial Sequence
  Description of Artificial Sequence: Synthetic oligonucleotide
gctgcggctctgtcgactaag

SEQ ID NO: 14330 - DNA, 21 bp, Artificial Sequence
  Description of Artificial Sequence: Synthetic oligonucleotide
gcggctgatgcgaatgttaat

SEQ ID NO: 14331 - DNA, 21 bp, Artificial Sequence
  Description of Artificial Sequence: Synthetic oligonucleotide
gctgctgattttaagcgtgat

SEQ ID NO: 14332 - DNA, 21 bp, Artificial Sequence
  Description of Artificial Sequence: Synthetic oligonucleotide
gcggctgataagacttctcgt

SEQ ID NO: 14333 - DNA, 21 bp, Artificial Sequence
  Description of Artificial Sequence: Synthetic oligonucleotide
gctgctgatcctgggtcgagg

SEQ ID NO: 14334 - DNA, 21 bp, Artificial Sequence
  Description of Artificial Sequence: Synthetic oligonucleotide
gcggcggatagggttcggccg

SEQ ID NO: 14335 - DNA, 21 bp, Artificial Sequence
  Description of Artificial Sequence: Synthetic oligonucleotide
gctgcttttatggttgagcgt

SEQ ID NO: 14336 - DNA, 21 bp, Artificial Sequence
  Description of Artificial Sequence: Synthetic oligonucleotide
gctgcggggtttgctactgat

SEQ ID NO: 14337 - DNA, 21 bp, Artificial Sequence
  Description of Artificial Sequence: Synthetic oligonucleotide
gcggcgggttttcatctgtcg

SEQ ID NO: 14338 - DNA, 21 bp, Artificial Sequence
  Description of Artificial Sequence: Synthetic oligonucleotide
gctgcggggatgattgcttct

SEQ ID NO: 14339 - DNA, 21 bp, Artificial Sequence
  Description of Artificial Sequence: Synthetic oligonucleotide
gctgctgggtcgacgcatatt

SEQ ID NO: 14340 - DNA, 21 bp, Artificial Sequence
  Description of Artificial Sequence: Synthetic oligonucleotide
gcggctcatgcgaatactgtt

SEQ ID NO: 14341 - DNA, 21 bp, Artificial Sequence
  Description of Artificial Sequence: Synthetic oligonucleotide
gcggctcatcctcagctgttt

SEQ ID NO: 14342 - DNA, 21 bp, Artificial Sequence
  Description of Artificial Sequence: Synthetic oligonucleotide
gcggctcatcgtacggcgcat

SEQ ID NO: 14343 - DNA, 21 bp, Artificial Sequence
  Description of Artificial Sequence: Synthetic oligonucleotide
gctgctattggtaaggatgag

SEQ ID NO: 14344 - DNA, 21 bp, Artificial Sequence
  Description of Artificial Sequence: Synthetic oligonucleotide
gctgcgattcggtctagttat

SEQ ID NO: 14345 - DNA, 21 bp, Artificial Sequence
  Description of Artificial Sequence: Synthetic oligonucleotide
gctgcgaagacgtctcagctg

SEQ ID NO: 14346 - DNA, 21 bp, Artificial Sequence
  Description of Artificial Sequence: Synthetic oligonucleotide
gcggcgttgccgacgttgctt

SEQ ID NO: 14347 - DNA, 21 bp, Artificial Sequence
  Description of Artificial Sequence: Synthetic oligonucleotide
gcggcgttgagtcatttgcat

SEQ ID NO: 14348 - DNA, 21 bp, Artificial Sequence
  Description of Artificial Sequence: Synthetic oligonucleotide
gctgcgttgagtcgggttgat

SEQ ID NO: 14349 - DNA, 21 bp, Artificial Sequence
  Description of Artificial Sequence: Synthetic oligonucleotide
gctgctcttacgaaggttctg

SEQ ID NO: 14350 - DNA, 21 bp, Artificial Sequence
  Description of Artificial Sequence: Synthetic oligonucleotide
gctgcgcttactaggctgact

SEQ ID NO: 14351 - DNA, 21 bp, Artificial Sequence
  Description of Artificial Sequence: Synthetic oligonucleotide
gctgctatgattaagcggcag

SEQ ID NO: 14352 - DNA, 21 bp, Artificial Sequence
  Description of Artificial Sequence: Synthetic oligonucleotide
gctgcgatgatgaagactgtt

SEQ ID NO: 14353 - DNA, 21 bp, Artificial Sequence
  Description of Artificial Sequence: Synthetic oligonucleotide
gctgcgatggtgagtactccg

SEQ ID NO: 14354 - DNA, 21 bp, Artificial Sequence
  Description of Artificial Sequence: Synthetic oligonucleotide
gctgcgaatcttcgtacgggt

SEQ ID NO: 14355 - DNA, 21 bp, Artificial Sequence
  Description of Artificial Sequence: Synthetic oligonucleotide
gctgctaatcttgttctgcag

SEQ ID NO: 14356 - DNA, 21 bp, Artificial Sequence
  Description of Artificial Sequence: Synthetic oligonucleotide
gcggcgaattcgacgcagtct

SEQ ID NO: 14357 - DNA, 21 bp, Artificial Sequence
  Description of Artificial Sequence: Synthetic oligonucleotide
gcggctccgattgcggctgct

SEQ ID NO: 14358 - DNA, 21 bp, Artificial Sequence
  Description of Artificial Sequence: Synthetic oligonucleotide
gcggctccgccttttggtcat

SEQ ID NO: 14359 - DNA, 21 bp, Artificial Sequence
  Description of Artificial Sequence: Synthetic oligonucleotide
gcggctcctagttcgtctatt

SEQ ID NO: 14360 - DNA, 21 bp, Artificial Sequence
  Description of Artificial Sequence: Synthetic oligonucleotide
gctgcgccgagttatcggggt

SEQ ID NO: 14361 - DNA, 21 bp, Artificial Sequence
  Description of Artificial Sequence: Synthetic oligonucleotide
gctgctcctacgattactcct

SEQ ID NO: 14362 - DNA, 21 bp, Artificial Sequence
  Description of Artificial Sequence: Synthetic oligonucleotide
gcggcgcagttgggggagcgg

SEQ ID NO: 14363 - DNA, 21 bp, Artificial Sequence
  Description of Artificial Sequence: Synthetic oligonucleotide
gctgcgcagccttatactcat

SEQ ID NO: 14364 - DNA, 21 bp, Artificial Sequence
  Description of Artificial Sequence: Synthetic oligonucleotide
gcggcgcgtccgccgaatgct

SEQ ID NO: 14365 - DNA, 21 bp, Artificial Sequence
  Description of Artificial Sequence: Synthetic oligonucleotide
gcggcgaggagtacggtggtt

SEQ ID NO: 14366 - DNA, 21 bp, Artificial Sequence
  Description of Artificial Sequence: Synthetic oligonucleotide
gctgctcgtacgtcttttaat

SEQ ID NO: 14367 - DNA, 21 bp, Artificial Sequence
  Description of Artificial Sequence: Synthetic oligonucleotide
gctgctaggactacttatact

SEQ ID NO: 14368 - DNA, 21 bp, Artificial Sequence
  Description of Artificial Sequence: Synthetic oligonucleotide
gctgcttcggctagtaggtat

SEQ ID NO: 14369 - DNA, 21 bp, Artificial Sequence
  Description of Artificial Sequence: Synthetic oligonucleotide
gctgctagttctgattcttat

SEQ ID NO: 14370 - DNA, 21 bp, Artificial Sequence
  Description of Artificial Sequence: Synthetic oligonucleotide
gcggcgtcttatgttgggatt

SEQ ID NO: 14371 - DNA, 21 bp, Artificial Sequence
  Description of Artificial Sequence: Synthetic oligonucleotide
gctgcgacttgtggtcagaat

SEQ ID NO: 14372 - DNA, 21 bp, Artificial Sequence
  Description of Artificial Sequence: Synthetic oligonucleotide
gcggctacgctggctactgct

SEQ ID NO: 14373 - DNA, 21 bp, Artificial Sequence
  Description of Artificial Sequence: Synthetic oligonucleotide
gcggctacgcctagtaagcat

SEQ ID NO: 14374 - DNA, 21 bp, Artificial Sequence
  Description of Artificial Sequence: Synthetic oligonucleotide
gctgctacgagtcttaattcg

SEQ ID NO: 14375 - DNA, 21 bp, Artificial Sequence
  Description of Artificial Sequence: Synthetic oligonucleotide
gcggctgtgggtgcgtcttct

SEQ ID NO: 14376 - DNA, 21 bp, Artificial Sequence
  Description of Artificial Sequence: Synthetic oligonucleotide
gctgctgtgggtgggcttggg

SEQ ID NO: 14377 - DNA, 21 bp, Artificial Sequence
  Description of Artificial Sequence: Synthetic oligonucleotide
gctgcgtgggcggatgagagt

SEQ ID NO: 14378 - DNA, 21 bp, Artificial Sequence
  Description of Artificial Sequence: Synthetic oligonucleotide
gctgcttattctttttcgcct

SEQ ID NO: 14379 - DNA, 21 bp, Artificial Sequence
  Description of Artificial Sequence: Synthetic oligonucleotide
gcggatgctcatatgaatcgt

SEQ ID NO: 14380 - DNA, 21 bp, Artificial Sequence
  Description of Artificial Sequence: Synthetic oligonucleotide
gctgatgatcatcattcgcat

SEQ ID NO: 14381 - DNA, 21 bp, Artificial Sequence
  Description of Artificial Sequence: Synthetic oligonucleotide
gctgatgaggaggattcttgt

SEQ ID NO: 14382 - DNA, 21 bp, Artificial Sequence
  Description of Artificial Sequence: Synthetic oligonucleotide
gcggatggtgatgtgccgcgg

SEQ ID NO: 14383 - DNA, 21 bp, Artificial Sequence
  Description of Artificial Sequence: Synthetic oligonucleotide
gcggatgggaagtcttctgat

SEQ ID NO: 14384 - DNA, 21 bp, Artificial Sequence
  Description of Artificial Sequence: Synthetic oligonucleotide
gcggatggttcgacgactctt

SEQ ID NO: 14385 - DNA, 21 bp, Artificial Sequence
  Description of Artificial Sequence: Synthetic oligonucleotide
gcggatcatgttccttatatt

SEQ ID NO: 14386 - DNA, 21 bp, Artificial Sequence
  Description of Artificial Sequence: Synthetic oligonucleotide
gctgataagttggggcatact

SEQ ID NO: 14387 - DNA, 21 bp, Artificial Sequence
  Description of Artificial Sequence: Synthetic oligonucleotide
gctgataagccgtcggatcgg

SEQ ID NO: 14388 - DNA, 21 bp, Artificial Sequence
  Description of Artificial Sequence: Synthetic oligonucleotide
gcggataagagtcgggtgggg

SEQ ID NO: 14389 - DNA, 21 bp, Artificial Sequence
  Description of Artificial Sequence: Synthetic oligonucleotide
gctgataaggttcggttggtg

SEQ ID NO: 14390 - DNA, 21 bp, Artificial Sequence
  Description of Artificial Sequence: Synthetic oligonucleotide
gctgatcttgctattagtgtt

SEQ ID NO: 14391 - DNA, 21 bp, Artificial Sequence
  Description of Artificial Sequence: Synthetic oligonucleotide
gctgatcttctgccgagtact

SEQ ID NO: 14392 - DNA, 21 bp, Artificial Sequence
  Description of Artificial Sequence: Synthetic oligonucleotide
gctgatctgtcgcctactgag

SEQ ID NO: 14393 - DNA, 21 bp, Artificial Sequence
  Description of Artificial Sequence: Synthetic oligonucleotide
gcggatttgtatacgcggccg

SEQ ID NO: 14394 - DNA, 21 bp, Artificial Sequence
  Description of Artificial Sequence: Synthetic oligonucleotide
gctgatatgaggagtagtgcg

SEQ ID NO: 14395 - DNA, 21 bp, Artificial Sequence
  Description of Artificial Sequence: Synthetic oligonucleotide
gcggataatcaggttcctctg

SEQ ID NO: 14396 - DNA, 21 bp, Artificial Sequence
  Description of Artificial Sequence: Synthetic oligonucleotide
gctgatcctgagggtgcgagt

SEQ ID NO: 14397 - DNA, 21 bp, Artificial Sequence
  Description of Artificial Sequence: Synthetic oligonucleotide
gcggatccggagagggttcgg

SEQ ID NO: 14398 - DNA, 21 bp, Artificial Sequence
  Description of Artificial Sequence: Synthetic oligonucleotide
gcggatccgcatatgccgaag

SEQ ID NO: 14399 - DNA, 21 bp, Artificial Sequence
  Description of Artificial Sequence: Synthetic oligonucleotide
gctgatccgcatcggaatcag

SEQ ID NO: 14400 - DNA, 21 bp, Artificial Sequence
  Description of Artificial Sequence: Synthetic oligonucleotide
gcggatcctatgcatcgtgct

SEQ ID NO: 14401 - DNA, 21 bp, Artificial Sequence
  Description of Artificial Sequence: Synthetic oligonucleotide
gcggatccgcctaagttttgg

SEQ ID NO: 14402 - DNA, 21 bp, Artificial Sequence
  Description of Artificial Sequence: Synthetic oligonucleotide
gctgatcctcggcagaagtcg

SEQ ID NO: 14403 - DNA, 21 bp, Artificial Sequence
  Description of Artificial Sequence: Synthetic oligonucleotide
gctgatcgtgctcatgcggtt

SEQ ID NO: 14404 - DNA, 21 bp, Artificial Sequence
  Description of Artificial Sequence: Synthetic oligonucleotide
gcggatagggggtctcattct

SEQ ID NO: 14405 - DNA, 21 bp, Artificial Sequence
  Description of Artificial Sequence: Synthetic oligonucleotide
gcggataggcttccttttttg

SEQ ID NO: 14406 - DNA, 21 bp, Artificial Sequence
  Description of Artificial Sequence: Synthetic oligonucleotide
gcggatcgttcgcctattact

SEQ ID NO: 14407 - DNA, 21 bp, Artificial Sequence
  Description of Artificial Sequence: Synthetic oligonucleotide
gctgatcgttatgggcgggtg

SEQ ID NO: 14408 - DNA, 21 bp, Artificial Sequence
  Description of Artificial Sequence: Synthetic oligonucleotide
gctgattcgggtcgtacgatt

SEQ ID NO: 14409 - DNA, 21 bp, Artificial Sequence
  Description of Artificial Sequence: Synthetic oligonucleotide
gcggattcgactcatgctgct

SEQ ID NO: 14410 - DNA, 21 bp, Artificial Sequence
  Description of Artificial Sequence: Synthetic oligonucleotide
gctgatactatgacgtcgtcg

SEQ ID NO: 14411 - DNA, 21 bp, Artificial Sequence
  Description of Artificial Sequence: Synthetic oligonucleotide
gctgatacgatgactactgtg

SEQ ID NO: 14412 - DNA, 21 bp, Artificial Sequence
  Description of Artificial Sequence: Synthetic oligonucleotide
gctgatactcgtttgcatagt

SEQ ID NO: 14413 - DNA, 21 bp, Artificial Sequence
  Description of Artificial Sequence: Synthetic oligonucleotide
gctgatactaggcttcagacg

SEQ ID NO: 14414 - DNA, 21 bp, Artificial Sequence
  Description of Artificial Sequence: Synthetic oligonucleotide
gctgatgttaggactttgtct

SEQ ID NO: 14415 - DNA, 21 bp, Artificial Sequence
  Description of Artificial Sequence: Synthetic oligonucleotide
gcggaggctgggatgtttgat

SEQ ID NO: 14416 - DNA, 21 bp, Artificial Sequence
  Description of Artificial Sequence: Synthetic oligonucleotide
gctgaggctaagaatacgagg

SEQ ID NO: 14417 - DNA, 21 bp, Artificial Sequence
  Description of Artificial Sequence: Synthetic oligonucleotide
gctgaggcgcctacgcgggat

SEQ ID NO: 14418 - DNA, 21 bp, Artificial Sequence
  Description of Artificial Sequence: Synthetic oligonucleotide
gctgaggcgacgagtgttgag

SEQ ID NO: 14419 - DNA, 21 bp, Artificial Sequence
  Description of Artificial Sequence: Synthetic oligonucleotide
gcggaggggaatccgaagatt

SEQ ID NO: 14420 - DNA, 21 bp, Artificial Sequence
  Description of Artificial Sequence: Synthetic oligonucleotide
gctgagggtccggagtggcgt

SEQ ID NO: 14421 - DNA, 21 bp, Artificial Sequence
  Description of Artificial Sequence: Synthetic oligonucleotide
gctgagcatcctaattcgctt

SEQ ID NO: 14422 - DNA, 21 bp, Artificial Sequence
  Description of Artificial Sequence: Synthetic oligonucleotide
gctgagcattctccgtcgctg

SEQ ID NO: 14423 - DNA, 21 bp, Artificial Sequence
  Description of Artificial Sequence: Synthetic oligonucleotide
gcggagattgttcggcatgtt

SEQ ID NO: 14424 - DNA, 21 bp, Artificial Sequence
  Description of Artificial Sequence: Synthetic oligonucleotide
gcggagcttgcgtcgccgatt

SEQ ID NO: 14425 - DNA, 21 bp, Artificial Sequence
  Description of Artificial Sequence: Synthetic oligonucleotide
gctgagctgaagagggggccg

SEQ ID NO: 14426 - DNA, 21 bp, Artificial Sequence
  Description of Artificial Sequence: Synthetic oligonucleotide
gcggagcttcctcctcggcag

SEQ ID NO: 14427 - DNA, 21 bp, Artificial Sequence
  Description of Artificial Sequence: Synthetic oligonucleotide
gctgagctgcagcctcatctt

SEQ ID NO: 14428 - DNA, 21 bp, Artificial Sequence
  Description of Artificial Sequence: Synthetic oligonucleotide
gcggagccgaggtcgtggtct

SEQ ID NO: 14429 - DNA, 21 bp, Artificial Sequence
  Description of Artificial Sequence: Synthetic oligonucleotide
gctgagccgactgattttctt

SEQ ID NO: 14430 - DNA, 21 bp, Artificial Sequence
  Description of Artificial Sequence: Synthetic oligonucleotide
gctgagcgggcgacttggagt

SEQ ID NO: 14431 - DNA, 21 bp, Artificial Sequence
  Description of Artificial Sequence: Synthetic oligonucleotide
gcggagcgtaatatggctccg

SEQ ID NO: 14432 - DNA, 21 bp, Artificial Sequence
  Description of Artificial Sequence: Synthetic oligonucleotide
gctgagcggcagcagtatttg

SEQ ID NO: 14433 - DNA, 21 bp, Artificial Sequence
  Description of Artificial Sequence: Synthetic oligonucleotide
gcggagtctgcgtatgttccg

SEQ ID NO: 14434 - DNA, 21 bp, Artificial Sequence
  Description of Artificial Sequence: Synthetic oligonucleotide
gctgagacgagttcgtcttcg

SEQ ID NO: 14435 - DNA, 21 bp, Artificial Sequence
  Description of Artificial Sequence: Synthetic oligonucleotide
gcttttgcgggggttcgtggt

SEQ ID NO: 14436 - DNA, 21 bp, Artificial Sequence
  Description of Artificial Sequence: Synthetic oligonucleotide
gcgtttgcgcggagtgctcct

SEQ ID NO: 14437 - DNA, 21 bp, Artificial Sequence
  Description of Artificial Sequence: Synthetic oligonucleotide
gcgtttgatacgcgtgggggt

SEQ ID NO: 14438 - DNA, 21 bp, Artificial Sequence
  Description of Artificial Sequence: Synthetic oligonucleotide
gcgtttgaggggcggtcgccg

SEQ ID NO: 14439 - DNA, 21 bp, Artificial Sequence
  Description of Artificial Sequence: Synthetic oligonucleotide
gcttttgagtcgcctagggct

SEQ ID NO: 14440 - DNA, 21 bp, Artificial Sequence
  Description of Artificial Sequence: Synthetic oligonucleotide
gcttttggtgcgagtatgtct

SEQ ID NO: 14441 - DNA, 21 bp, Artificial Sequence
  Description of Artificial Sequence: Synthetic oligonucleotide
gcgtttggtaaggggcatacg

SEQ ID NO: 14442 - DNA, 21 bp, Artificial Sequence
  Description of Artificial Sequence: Synthetic oligonucleotide
gcttttgggaagaatactgtt

SEQ ID NO: 14443 - DNA, 21 bp, Artificial Sequence
  Description of Artificial Sequence: Synthetic oligonucleotide
gcgtttggtactttgaagatg

SEQ ID NO: 14444 - DNA, 21 bp, Artificial Sequence
  Description of Artificial Sequence: Synthetic oligonucleotide
gcttttctggctgctaatgcg

SEQ ID NO: 14445 - DNA, 21 bp, Artificial Sequence
  Description of Artificial Sequence: Synthetic oligonucleotide
gcttttcttaatcagcttagt

SEQ ID NO: 14446 - DNA, 21 bp, Artificial Sequence
  Description of Artificial Sequence: Synthetic oligonucleotide
gcgtttctttcgtcggcgcct

SEQ ID NO: 14447 - DNA, 21 bp, Artificial Sequence
  Description of Artificial Sequence: Synthetic oligonucleotide
gcttttatgtctaagctggag

SEQ ID NO: 14448 - DNA, 21 bp, Artificial Sequence
  Description of Artificial Sequence: Synthetic oligonucleotide
gcgtttaatggtacggattcg

SEQ ID NO: 14449 - DNA, 21 bp, Artificial Sequence
  Description of Artificial Sequence: Synthetic oligonucleotide
gcgtttaatcatgagctgtct

SEQ ID NO: 14450 - DNA, 21 bp, Artificial Sequence
  Description of Artificial Sequence: Synthetic oligonucleotide
gcttttaatacgagtcatgat

SEQ ID NO: 14451 - DNA, 21 bp, Artificial Sequence
  Description of Artificial Sequence: Synthetic oligonucleotide
gcttttccgttgccgcctcat

SEQ ID NO: 14452 - DNA, 21 bp, Artificial Sequence
  Description of Artificial Sequence: Synthetic oligonucleotide
gcttttccgcagtctggtaat

SEQ ID NO: 14453 - DNA, 21 bp, Artificial Sequence
  Description of Artificial Sequence: Synthetic oligonucleotide
gcttttcaggataagcagact

SEQ ID NO: 14454 - DNA, 21 bp, Artificial Sequence
  Description of Artificial Sequence: Synthetic oligonucleotide
gcgtttcagcatcagcctccg

SEQ ID NO: 14455 - DNA, 21 bp, Artificial Sequence
  Description of Artificial Sequence: Synthetic oligonucleotide
gcttttcagagtgcgagggct

SEQ ID NO: 14456 - DNA, 21 bp, Artificial Sequence
  Description of Artificial Sequence: Synthetic oligonucleotide
gctttttctaatgcgggtccg

SEQ ID NO: 14457 - DNA, 21 bp, Artificial Sequence
  Description of Artificial Sequence: Synthetic oligonucleotide
gctttttctacgactgttatg

SEQ ID NO: 14458 - DNA, 21 bp, Artificial Sequence
  Description of Artificial Sequence: Synthetic oligonucleotide
gcgtttacggggaagtcttcg

SEQ ID NO: 14459 - DNA, 21 bp, Artificial Sequence
  Description of Artificial Sequence: Synthetic oligonucleotide
gcttttgtggcgagttcgcct

SEQ ID NO: 14460 - DNA, 21 bp, Artificial Sequence
  Description of Artificial Sequence: Synthetic oligonucleotide
gcgtttgtggggaaggtgact

SEQ ID NO: 14461 - DNA, 21 bp, Artificial Sequence
  Description of Artificial Sequence: Synthetic oligonucleotide
gcgtttgtgcctaagagtatg

SEQ ID NO: 14462 - DNA, 21 bp, Artificial Sequence
  Description of Artificial Sequence: Synthetic oligonucleotide
gctggggcggaggagcatatg

SEQ ID NO: 14463 - DNA, 21 bp, Artificial Sequence
  Description of Artificial Sequence: Synthetic oligonucleotide
gctggggcgcttatgcatttg

SEQ ID NO: 14464 - DNA, 21 bp, Artificial Sequence
  Description of Artificial Sequence: Synthetic oligonucleotide
gcgggggcgccgactggtctt

SEQ ID NO: 14465 - DNA, 21 bp, Artificial Sequence
  Description of Artificial Sequence: Synthetic oligonucleotide
gctggtgcgacttcgttttat

SEQ ID NO: 14466 - DNA, 21 bp, Artificial Sequence
  Description of Artificial Sequence: Synthetic oligonucleotide
gctgggggtgctgggcagatg

SEQ ID NO: 14467 - DNA, 21 bp, Artificial Sequence
  Description of Artificial Sequence: Synthetic oligonucleotide
gcgggtggtcagccttcgctg

SEQ ID NO: 14468 - DNA, 21 bp, Artificial Sequence
  Description of Artificial Sequence: Synthetic oligonucleotide
gctggtggtagttggcctgcg

SEQ ID NO: 14469 - DNA, 21 bp, Artificial Sequence
  Description of Artificial Sequence: Synthetic oligonucleotide
gctggggggacgtctatgccg

SEQ ID NO: 14470 - DNA, 21 bp, Artificial Sequence
  Description of Artificial Sequence: Synthetic oligonucleotide
gctggtgggtatcttgttccg

SEQ ID NO: 14471 - DNA, 21 bp, Artificial Sequence
  Description of Artificial Sequence: Synthetic oligonucleotide
gcgggtcatcgggctgattct

SEQ ID NO: 14472 - DNA, 21 bp, Artificial Sequence
  Description of Artificial Sequence: Synthetic oligonucleotide
gctggtcatactaatttgccg

SEQ ID NO: 14473 - DNA, 21 bp, Artificial Sequence
  Description of Artificial Sequence: Synthetic oligonucleotide
gctgggcatgttgtgtctatg

SEQ ID NO: 14474 - DNA, 21 bp, Artificial Sequence
  Description of Artificial Sequence: Synthetic oligonucleotide
gctgggattactactgctgtg

SEQ ID NO: 14475 - DNA, 21 bp, Artificial Sequence
  Description of Artificial Sequence: Synthetic oligonucleotide
gcgggtaaggctacgtatatt

SEQ ID NO: 14476 - DNA, 21 bp, Artificial Sequence
  Description of Artificial Sequence: Synthetic oligonucleotide
gcggggaagctggtgtcttct

SEQ ID NO: 14477 - DNA, 21 bp, Artificial Sequence
  Description of Artificial Sequence: Synthetic oligonucleotide
gcggggttggcggtgaagccg

SEQ ID NO: 14478 - DNA, 21 bp, Artificial Sequence
  Description of Artificial Sequence: Synthetic oligonucleotide
gctgggttggatttttatcct

SEQ ID NO: 14479 - DNA, 21 bp, Artificial Sequence
  Description of Artificial Sequence: Synthetic oligonucleotide
gctggtttgaaggatgttacg

SEQ ID NO: 14480 - DNA, 21 bp, Artificial Sequence
  Description of Artificial Sequence: Synthetic oligonucleotide
gctggtctgttgacgcagatt

SEQ ID NO: 14481 - DNA, 21 bp, Artificial Sequence
  Description of Artificial Sequence: Synthetic oligonucleotide
gctggtcttaatgggcagggt

SEQ ID NO: 14482 - DNA, 21 bp, Artificial Sequence
  Description of Artificial Sequence: Synthetic oligonucleotide
gctggtcttaatcattctgtt

SEQ ID NO: 14483 - DNA, 21 bp, Artificial Sequence
  Description of Artificial Sequence: Synthetic oligonucleotide
gcgggtcttcagcagctgtcg

SEQ ID NO: 14484 - DNA, 21 bp, Artificial Sequence
  Description of Artificial Sequence: Synthetic oligonucleotide
gctggtatggatagtaatgat

SEQ ID NO: 14485 - DNA, 21 bp, Artificial Sequence
  Description of Artificial Sequence: Synthetic oligonucleotide
gcggggatgcattctatgact

SEQ ID NO: 14486 - DNA, 21 bp, Artificial Sequence
  Description of Artificial Sequence: Synthetic oligonucleotide
gctgggatgcctcctgctcct

SEQ ID NO: 14487 - DNA, 21 bp, Artificial Sequence
  Description of Artificial Sequence: Synthetic oligonucleotide
gctgggaatcatgctgtgcag

SEQ ID NO: 14488 - DNA, 21 bp, Artificial Sequence
  Description of Artificial Sequence: Synthetic oligonucleotide
gctgggaattctaagacttct

SEQ ID NO: 14489 - DNA, 21 bp, Artificial Sequence
  Description of Artificial Sequence: Synthetic oligonucleotide
gctggtaattcgcttagttct

SEQ ID NO: 14490 - DNA, 21 bp, Artificial Sequence
  Description of Artificial Sequence: Synthetic oligonucleotide
gctggtccgcatgttctggcg

SEQ ID NO: 14491 - DNA, 21 bp, Artificial Sequence
  Description of Artificial Sequence: Synthetic oligonucleotide
gctgggccttcgaattttgat

SEQ ID NO: 14492 - DNA, 21 bp, Artificial Sequence
  Description of Artificial Sequence: Synthetic oligonucleotide
gctggtccgacgaatccgttt

SEQ ID NO: 14493 - DNA, 21 bp, Artificial Sequence
  Description of Artificial Sequence: Synthetic oligonucleotide
gctgggcagtttactaagtct

SEQ ID NO: 14494 - DNA, 21 bp, Artificial Sequence
  Description of Artificial Sequence: Synthetic oligonucleotide
gcgggtcagggttctcagagt

SEQ ID NO: 14495 - DNA, 21 bp, Artificial Sequence
  Description of Artificial Sequence: Synthetic oligonucleotide
gcggggcagaattcgttggtt

SEQ ID NO: 14496 - DNA, 21 bp, Artificial Sequence
  Description of Artificial Sequence: Synthetic oligonucleotide
gcggggcagtctgctcctcgg

SEQ ID NO: 14497 - DNA, 21 bp, Artificial Sequence
  Description of Artificial Sequence: Synthetic oligonucleotide
gcgggtcgggattcggcgtgg

SEQ ID NO: 14498 - DNA, 21 bp, Artificial Sequence
  Description of Artificial Sequence: Synthetic oligonucleotide
gctggtcggaatatgcatcct

SEQ ID NO: 14499 - DNA, 21 bp, Artificial Sequence
  Description of Artificial Sequence: Synthetic oligonucleotide
gcgggtcggccgccgcagtct

SEQ ID NO: 14500 - DNA, 21 bp, Artificial Sequence
  Description of Artificial Sequence: Synthetic oligonucleotide
gctggtcgggtgcttacgatg

SEQ ID NO: 14501 - DNA, 21 bp, Artificial Sequence
  Description of Artificial Sequence: Synthetic oligonucleotide
gctggttcgggtggttctccg

SEQ ID NO: 14502 - DNA, 21 bp, Artificial Sequence
  Description of Artificial Sequence: Synthetic oligonucleotide
gctggttcgggggttctgaat

SEQ ID NO: 14503 - DNA, 21 bp, Artificial Sequence
  Description of Artificial Sequence: Synthetic oligonucleotide
gcggggtcgcatcagtctgag

SEQ ID NO: 14504 - DNA, 21 bp, Artificial Sequence
  Description of Artificial Sequence: Synthetic oligonucleotide
gcgggttcgattatttcgcgt

SEQ ID NO: 14505 - DNA, 21 bp, Artificial Sequence
  Description of Artificial Sequence: Synthetic oligonucleotide
gctggttctctttcggttgat

SEQ ID NO: 14506 - DNA, 21 bp, Artificial Sequence
  Description of Artificial Sequence: Synthetic oligonucleotide
gctggtagtcagcatccggct

SEQ ID NO: 14507 - DNA, 21 bp, Artificial Sequence
  Description of Artificial Sequence: Synthetic oligonucleotide
gctgggtctcagacgccgccg

SEQ ID NO: 14508 - DNA, 21 bp, Artificial Sequence
  Description of Artificial Sequence: Synthetic oligonucleotide
gcgggttcgagtcggacgttt

SEQ ID NO: 14509 - DNA, 21 bp, Artificial Sequence
  Description of Artificial Sequence: Synthetic oligonucleotide
gctggtacgggtttggggatg

SEQ ID NO: 14510 - DNA, 21 bp, Artificial Sequence
  Description of Artificial Sequence: Synthetic oligonucleotide
gctggtactgggccttttgct

SEQ ID NO: 14511 - DNA, 21 bp, Artificial Sequence
  Description of Artificial Sequence: Synthetic oligonucleotide
gcggggactattcgtatttcg

SEQ ID NO: 14512 - DNA, 21 bp, Artificial Sequence
  Description of Artificial Sequence: Synthetic oligonucleotide
gctggtacgctggtgattatg

SEQ ID NO: 14513 - DNA, 21 bp, Artificial Sequence
  Description of Artificial Sequence: Synthetic oligonucleotide
gctgggacgaatcagcgtaat

SEQ ID NO: 14514 - DNA, 21 bp, Artificial Sequence
  Description of Artificial Sequence: Synthetic oligonucleotide
gcgggtacgcagccgatgacg

SEQ ID NO: 14515 - DNA, 21 bp, Artificial Sequence
  Description of Artificial Sequence: Synthetic oligonucleotide
gctgggactcagagggcttat

SEQ ID NO: 14516 - DNA, 21 bp, Artificial Sequence
  Description of Artificial Sequence: Synthetic oligonucleotide
gcgggtacttctcattctcat

SEQ ID NO: 14517 - DNA, 21 bp, Artificial Sequence
  Description of Artificial Sequence: Synthetic oligonucleotide
gcggggactgtggagcatctt

SEQ ID NO: 14518 - DNA, 21 bp, Artificial Sequence
  Description of Artificial Sequence: Synthetic oligonucleotide
gctggtgtgggtaaggcgcag

SEQ ID NO: 14519 - DNA, 21 bp, Artificial Sequence
  Description of Artificial Sequence: Synthetic oligonucleotide
gctggggtgttgaagatgtcg

SEQ ID NO: 14520 - DNA, 21 bp, Artificial Sequence
  Description of Artificial Sequence: Synthetic oligonucleotide
gctggtgtgcctaggatggag

SEQ ID NO: 14521 - DNA, 21 bp, Artificial Sequence
  Description of Artificial Sequence: Synthetic oligonucleotide
gctggtgttccttctcctgct

SEQ ID NO: 14522 - DNA, 21 bp, Artificial Sequence
  Description of Artificial Sequence: Synthetic oligonucleotide
gctggtgttcagcctgggcag

SEQ ID NO: 14523 - DNA, 21 bp, Artificial Sequence
  Description of Artificial Sequence: Synthetic oligonucleotide
gctggggtgtctgaggctatt

SEQ ID NO: 14524 - DNA, 21 bp, Artificial Sequence
  Description of Artificial Sequence: Synthetic oligonucleotide
gcgcatgctgtgtctttgcag

SEQ ID NO: 14525 - DNA, 21 bp, Artificial Sequence
  Description of Artificial Sequence: Synthetic oligonucleotide
gcgcatgatgaggttccttat

SEQ ID NO: 14526 - DNA, 21 bp, Artificial Sequence
  Description of Artificial Sequence: Synthetic oligonucleotide
gcgcatgatattccgatgtcg

SEQ ID NO: 14527 - DNA, 21 bp, Artificial Sequence
  Description of Artificial Sequence: Synthetic oligonucleotide
gctcatgataataagagtatg

SEQ ID NO: 14528 - DNA, 21 bp, Artificial Sequence
  Description of Artificial Sequence: Synthetic oligonucleotide
gcgcatgaggtgttgagtttt

SEQ ID NO: 14529 - DNA, 21 bp, Artificial Sequence
  Description of Artificial Sequence: Synthetic oligonucleotide
gcgcatggtgagagtaagccg

SEQ ID NO: 14530 - DNA, 21 bp, Artificial Sequence
  Description of Artificial Sequence: Synthetic oligonucleotide
gctcatggtaatgcgccgtcg

SEQ ID NO: 14531 - DNA, 21 bp, Artificial Sequence
  Description of Artificial Sequence: Synthetic oligonucleotide
gctcatgggaatagttctctt

SEQ ID NO: 14532 - DNA, 21 bp, Artificial Sequence
  Description of Artificial Sequence: Synthetic oligonucleotide
gctcatgggagtctgcaggtt

SEQ ID NO: 14533 - DNA, 21 bp, Artificial Sequence
  Description of Artificial Sequence: Synthetic oligonucleotide
gctcatggggttgcttatatt

SEQ ID NO: 14534 - DNA, 21 bp, Artificial Sequence
  Description of Artificial Sequence: Synthetic oligonucleotide
gcgcatggggtgaagacgtcg

SEQ ID NO: 14535 - DNA, 21 bp, Artificial Sequence
  Description of Artificial Sequence: Synthetic oligonucleotide
gctcatcatagtgtgccgccg

SEQ ID NO: 14536 - DNA, 21 bp, Artificial Sequence
  Description of Artificial Sequence: Synthetic oligonucleotide
gctcatattgcgcgtcatggg

SEQ ID NO: 14537 - DNA, 21 bp, Artificial Sequence
  Description of Artificial Sequence: Synthetic oligonucleotide
gcgcataagtcgcttcctctg

SEQ ID NO: 14538 - DNA, 21 bp, Artificial Sequence
  Description of Artificial Sequence: Synthetic oligonucleotide
gctcatcttaagtatgggagt

SEQ ID NO: 14539 - DNA, 21 bp, Artificial Sequence
  Description of Artificial Sequence: Synthetic oligonucleotide
gctcatatggatcgtactagt

SEQ ID NO: 14540 - DNA, 21 bp, Artificial Sequence
  Description of Artificial Sequence: Synthetic oligonucleotide
gctcatatgacggatggtgag

SEQ ID NO: 14541 - DNA, 21 bp, Artificial Sequence
  Description of Artificial Sequence: Synthetic oligonucleotide
gcgcataatgttcagggggcg

SEQ ID NO: 14542 - DNA, 21 bp, Artificial Sequence
  Description of Artificial Sequence: Synthetic oligonucleotide
gctcatccgcctcagccgggg

SEQ ID NO: 14543 - DNA, 21 bp, Artificial Sequence
  Description of Artificial Sequence: Synthetic oligonucleotide
gctcatccgagtcttcctctg

SEQ ID NO: 14544 - DNA, 21 bp, Artificial Sequence
  Description of Artificial Sequence: Synthetic oligonucleotide
gctcatccttcgcggggtatt

SEQ ID NO: 14545 - DNA, 21 bp, Artificial Sequence
  Description of Artificial Sequence: Synthetic oligonucleotide
gcgcatccgtcgtcgcatggt

SEQ ID NO: 14546 - DNA, 21 bp, Artificial Sequence
  Description of Artificial Sequence: Synthetic oligonucleotide
gctcatcaggtggggctggct

SEQ ID NO: 14547 - DNA, 21 bp, Artificial Sequence
  Description of Artificial Sequence: Synthetic oligonucleotide
gctcattcgcatgttccgccg

SEQ ID NO: 14548 - DNA, 21 bp, Artificial Sequence
  Description of Artificial Sequence: Synthetic oligonucleotide
gctcattcgcttaagcaggtt

SEQ ID NO: 14549 - DNA, 21 bp, Artificial Sequence
  Description of Artificial Sequence: Synthetic oligonucleotide
gctcatagtccggctctggtt

SEQ ID NO: 14550 - DNA, 21 bp, Artificial Sequence
  Description of Artificial Sequence: Synthetic oligonucleotide
gctcatagtcgtagtgggcct

SEQ ID NO: 14551 - DNA, 21 bp, Artificial Sequence
  Description of Artificial Sequence: Synthetic oligonucleotide
gctcatactctgacggagcct

SEQ ID NO: 14552 - DNA, 21 bp, Artificial Sequence
  Description of Artificial Sequence: Synthetic oligonucleotide
gcgcatacgaatcttacgtcg

SEQ ID NO: 14553 - DNA, 21 bp, Artificial Sequence
  Description of Artificial Sequence: Synthetic oligonucleotide
gctcatacgcgtattatgccg

SEQ ID NO: 14554 - DNA, 21 bp, Artificial Sequence
  Description of Artificial Sequence: Synthetic oligonucleotide
gctcatgtgaatagttttagt

SEQ ID NO: 14555 - DNA, 21 bp, Artificial Sequence
  Description of Artificial Sequence: Synthetic oligonucleotide
gctcatgttcctgcggcggat

SEQ ID NO: 14556 - DNA, 21 bp, Artificial Sequence
  Description of Artificial Sequence: Synthetic oligonucleotide
gctcatgtgtctcagtctggt

SEQ ID NO: 14557 - DNA, 21 bp, Artificial Sequence
  Description of Artificial Sequence: Synthetic oligonucleotide
gctattgcgtttcggcgggag

SEQ ID NO: 14558 - DNA, 21 bp, Artificial Sequence
  Description of Artificial Sequence: Synthetic oligonucleotide
gcgattgcgccgccgtatacg

SEQ ID NO: 14559 - DNA, 21 bp, Artificial Sequence
  Description of Artificial Sequence: Synthetic oligonucleotide
gctattgctgtgtctgcgggg

SEQ ID NO: 14560 - DNA, 21 bp, Artificial Sequence
  Description of Artificial Sequence: Synthetic oligonucleotide
gctattgattctggttatcat

SEQ ID NO: 14561 - DNA, 21 bp, Artificial Sequence
  Description of Artificial Sequence: Synthetic oligonucleotide
gctattggtgcgattggttcg

SEQ ID NO: 14562 - DNA, 21 bp, Artificial Sequence
  Description of Artificial Sequence: Synthetic oligonucleotide
gctattgggcctagggggggt

SEQ ID NO: 14563 - DNA, 21 bp, Artificial Sequence
  Description of Artificial Sequence: Synthetic oligonucleotide
gcgattgggagtactacgtct

SEQ ID NO: 14564 - DNA, 21 bp, Artificial Sequence
  Description of Artificial Sequence: Synthetic oligonucleotide
gcgattcatgcggtgtcgccg

SEQ ID NO: 14565 - DNA, 21 bp, Artificial Sequence
  Description of Artificial Sequence: Synthetic oligonucleotide
gcgattcattctacgaagtct

SEQ ID NO: 14566 - DNA, 21 bp, Artificial Sequence
  Description of Artificial Sequence: Synthetic oligonucleotide
gctattaagggtcaggatctt

SEQ ID NO: 14567 - DNA, 21 bp, Artificial Sequence
  Description of Artificial Sequence: Synthetic oligonucleotide
gcgattaattttcaggcgggt

SEQ ID NO: 14568 - DNA, 21 bp, Artificial Sequence
  Description of Artificial Sequence: Synthetic oligonucleotide
gctattaatcatgcgatgact

SEQ ID NO: 14569 - DNA, 21 bp, Artificial Sequence
  Description of Artificial Sequence: Synthetic oligonucleotide
gctattcctggtcatattatg

SEQ ID NO: 14570 - DNA, 21 bp, Artificial Sequence
  Description of Artificial Sequence: Synthetic oligonucleotide
gcgattcctggttcgtcgcgt

SEQ ID NO: 14571 - DNA, 21 bp, Artificial Sequence
  Description of Artificial Sequence: Synthetic oligonucleotide
gctattccgatgactcatgat

SEQ ID NO: 14572 - DNA, 21 bp, Artificial Sequence
  Description of Artificial Sequence: Synthetic oligonucleotide
gctattccgaatcctcttgat

SEQ ID NO: 14573 - DNA, 21 bp, Artificial Sequence
  Description of Artificial Sequence: Synthetic oligonucleotide
gctattaggaatgtgttggct

SEQ ID NO: 14574 - DNA, 21 bp, Artificial Sequence
  Description of Artificial Sequence: Synthetic oligonucleotide
gcgattaggtctgctaatgat

SEQ ID NO: 14575 - DNA, 21 bp, Artificial Sequence
  Description of Artificial Sequence: Synthetic oligonucleotide
gcgattcggtcgccgtcgcct

SEQ ID NO: 14576 - DNA, 21 bp, Artificial Sequence
  Description of Artificial Sequence: Synthetic oligonucleotide
gcgattcggtatacggatcct

SEQ ID NO: 14577 - DNA, 21 bp, Artificial Sequence
  Description of Artificial Sequence: Synthetic oligonucleotide
gcgattagtgttggggggtct

SEQ ID NO: 14578 - DNA, 21 bp, Artificial Sequence
  Description of Artificial Sequence: Synthetic oligonucleotide
gcgattacgacggcgcgtaat

SEQ ID NO: 14579 - DNA, 21 bp, Artificial Sequence
  Description of Artificial Sequence: Synthetic oligonucleotide
gcgatttatggtggtcttacg

SEQ ID NO: 14580 - DNA, 21 bp, Artificial Sequence
  Description of Artificial Sequence: Synthetic oligonucleotide
gcgatttatatgcagcagcct

SEQ ID NO: 14581 - DNA, 21 bp, Artificial Sequence
  Description of Artificial Sequence: Synthetic oligonucleotide
gcgatttatcagggggtggat

SEQ ID NO: 14582 - DNA, 21 bp, Artificial Sequence
  Description of Artificial Sequence: Synthetic oligonucleotide
gctaaggctagtaatcaggat

SEQ ID NO: 14583 - DNA, 21 bp, Artificial Sequence
  Description of Artificial Sequence: Synthetic oligonucleotide
gctaaggcgactgctcttgag

SEQ ID NO: 14584 - DNA, 21 bp, Artificial Sequence
  Description of Artificial Sequence: Synthetic oligonucleotide
gcgaaggatattggtcagatt

SEQ ID NO: 14585 - DNA, 21 bp, Artificial Sequence
  Description of Artificial Sequence: Synthetic oligonucleotide
gctaaggatattcctccgcgg

SEQ ID NO: 14586 - DNA, 21 bp, Artificial Sequence
  Description of Artificial Sequence: Synthetic oligonucleotide
gctaagtttgctcctagtgag

SEQ ID NO: 14587 - DNA, 21 bp, Artificial Sequence
  Description of Artificial Sequence: Synthetic oligonucleotide
gctaagggggatccgcgtatg

SEQ ID NO: 14588 - DNA, 21 bp, Artificial Sequence
  Description of Artificial Sequence: Synthetic oligonucleotide
gcgaagggtcagattcatgtt

SEQ ID NO: 14589 - DNA, 21 bp, Artificial Sequence
  Description of Artificial Sequence: Synthetic oligonucleotide
gctaagcatactgagttttct

SEQ ID NO: 14590 - DNA, 21 bp, Artificial Sequence
  Description of Artificial Sequence: Synthetic oligonucleotide
gctaagattagtagtgcttct

SEQ ID NO: 14591 - DNA, 21 bp, Artificial Sequence
  Description of Artificial Sequence: Synthetic oligonucleotide
gcgaagttggaggcgattcct

SEQ ID NO: 14592 - DNA, 21 bp, Artificial Sequence
  Description of Artificial Sequence: Synthetic oligonucleotide
gcgaagaatcgggattcgtgt

SEQ ID NO: 14593 - DNA, 21 bp, Artificial Sequence
  Description of Artificial Sequence: Synthetic oligonucleotide
gctaagaattcgccgcatccg

SEQ ID NO: 14594 - DNA, 21 bp, Artificial Sequence
  Description of Artificial Sequence: Synthetic oligonucleotide
gcgaagaattctactttttct

SEQ ID NO: 14595 - DNA, 21 bp, Artificial Sequence
  Description of Artificial Sequence: Synthetic oligonucleotide
gctaagccggcgttgctggtt

SEQ ID NO: 14596 - DNA, 21 bp, Artificial Sequence
  Description of Artificial Sequence: Synthetic oligonucleotide
gctaagccgcatttgcagttt

SEQ ID NO: 14597 - DNA, 21 bp, Artificial Sequence
  Description of Artificial Sequence: Synthetic oligonucleotide
gcgaagccgattcgtcctcct

SEQ ID NO: 14598 - DNA, 21 bp, Artificial Sequence
  Description of Artificial Sequence: Synthetic oligonucleotide
gctaagccgtctgaggagaag

SEQ ID NO: 14599 - DNA, 21 bp, Artificial Sequence
  Description of Artificial Sequence: Synthetic oligonucleotide
gcgaagccgacttatcagccg

SEQ ID NO: 14600 - DNA, 21 bp, Artificial Sequence
  Description of Artificial Sequence: Synthetic oligonucleotide
gctaagcgtctggatgatgcg

SEQ ID NO: 14601 - DNA, 21 bp, Artificial Sequence
  Description of Artificial Sequence: Synthetic oligonucleotide
gcgaagtctattaagcttagt

SEQ ID NO: 14602 - DNA, 21 bp, Artificial Sequence
  Description of Artificial Sequence: Synthetic oligonucleotide
gctaagagtaatgttggtctt

SEQ ID NO: 14603 - DNA, 21 bp, Artificial Sequence
  Description of Artificial Sequence: Synthetic oligonucleotide
gctaagtctagttatccgatt

SEQ ID NO: 14604 - DNA, 21 bp, Artificial Sequence
  Description of Artificial Sequence: Synthetic oligonucleotide
gctaagtcggtggctctttcg

SEQ ID NO: 14605 - DNA, 21 bp, Artificial Sequence
  Description of Artificial Sequence: Synthetic oligonucleotide
gctaagacgattgagatttct

SEQ ID NO: 14606 - DNA, 21 bp, Artificial Sequence
  Description of Artificial Sequence: Synthetic oligonucleotide
gcgaagactttgagggatgat

SEQ ID NO: 14607 - DNA, 21 bp, Artificial Sequence
  Description of Artificial Sequence: Synthetic oligonucleotide
gctaagacgatggggacgatg

SEQ ID NO: 14608 - DNA, 21 bp, Artificial Sequence
  Description of Artificial Sequence: Synthetic oligonucleotide
gctaagacgactttgagtgcg

SEQ ID NO: 14609 - DNA, 21 bp, Artificial Sequence
  Description of Artificial Sequence: Synthetic oligonucleotide
gctaagtatagtccttctgcg

SEQ ID NO: 14610 - DNA, 21 bp, Artificial Sequence
  Description of Artificial Sequence: Synthetic oligonucleotide
gcgaagtatagtagtatgccg

SEQ ID NO: 14611 - DNA, 21 bp, Artificial Sequence
  Description of Artificial Sequence: Synthetic oligonucleotide
gcgctggctattgggcgggat

SEQ ID NO: 14612 - DNA, 21 bp, Artificial Sequence
  Description of Artificial Sequence: Synthetic oligonucleotide
gcgcttgcgcttaagacttcg

SEQ ID NO: 14613 - DNA, 21 bp, Artificial Sequence
  Description of Artificial Sequence: Synthetic oligonucleotide
gcgttggcgacgaaggttatt

SEQ ID NO: 14614 - DNA, 21 bp, Artificial Sequence
  Description of Artificial Sequence: Synthetic oligonucleotide
gctttggatgctcgtcgggtg

SEQ ID NO: 14615 - DNA, 21 bp, Artificial Sequence
  Description of Artificial Sequence: Synthetic oligonucleotide
gctcttgatcagatgactatt

SEQ ID NO: 14616 - DNA, 21 bp, Artificial Sequence
  Description of Artificial Sequence: Synthetic oligonucleotide
gctctggagtgtcctcgggct

SEQ ID NO: 14617 - DNA, 21 bp, Artificial Sequence
  Description of Artificial Sequence: Synthetic oligonucleotide
gctcttgaggggttgcgtcct

SEQ ID NO: 14618 - DNA, 21 bp, Artificial Sequence
  Description of Artificial Sequence: Synthetic oligonucleotide
gcgctggagcttggttcggag

SEQ ID NO: 14619 - DNA, 21 bp, Artificial Sequence
  Description of Artificial Sequence: Synthetic oligonucleotide
gcgctggagaggacgtctttg

SEQ ID NO: 14620 - DNA, 21 bp, Artificial Sequence
  Description of Artificial Sequence: Synthetic oligonucleotide
gcgctgtttccgggtatgagt

SEQ ID NO: 14621 - DNA, 21 bp, Artificial Sequence
  Description of Artificial Sequence: Synthetic oligonucleotide
gctctgggtgattttccgtct

SEQ ID NO: 14622 - DNA, 21 bp, Artificial Sequence
  Description of Artificial Sequence: Synthetic oligonucleotide
gcgcttgggcatcaggcgatg

SEQ ID NO: 14623 - DNA, 21 bp, Artificial Sequence
  Description of Artificial Sequence: Synthetic oligonucleotide
gcgctggggaataataagtct

SEQ ID NO: 14624 - DNA, 21 bp, Artificial Sequence
  Description of Artificial Sequence: Synthetic oligonucleotide
gctttgggtcgtaatgagggt

SEQ ID NO: 14625 - DNA, 21 bp, Artificial Sequence
  Description of Artificial Sequence: Synthetic oligonucleotide
gcgttgggggtgccgccttct

SEQ ID NO: 14626 - DNA, 21 bp, Artificial Sequence
  Description of Artificial Sequence: Synthetic oligonucleotide
gcgttgggggttagtgctttg

SEQ ID NO: 14627 - DNA, 21 bp, Artificial Sequence
  Description of Artificial Sequence: Synthetic oligonucleotide
gctttggggtatcataatact

SEQ ID NO: 14628 - DNA, 21 bp, Artificial Sequence
  Description of Artificial Sequence: Synthetic oligonucleotide
gctttgcatccgagtgcgccg

SEQ ID NO: 14629 - DNA, 21 bp, Artificial Sequence
  Description of Artificial Sequence: Synthetic oligonucleotide
gcgcttattgagcgtgttaat

SEQ ID NO: 14630 - DNA, 21 bp, Artificial Sequence
  Description of Artificial Sequence: Synthetic oligonucleotide
gcgcttattaaggtgcataat

SEQ ID NO: 14631 - DNA, 21 bp, Artificial Sequence
  Description of Artificial Sequence: Synthetic oligonucleotide
gcgttgattccgagtccgcct

SEQ ID NO: 14632 - DNA, 21 bp, Artificial Sequence
  Description of Artificial Sequence: Synthetic oligonucleotide
gcgctgctggattctaagctg

SEQ ID NO: 14633 - DNA, 21 bp, Artificial Sequence
  Description of Artificial Sequence: Synthetic oligonucleotide
gctctgttggagcagcggccg

SEQ ID NO: 14634 - DNA, 21 bp, Artificial Sequence
  Description of Artificial Sequence: Synthetic oligonucleotide
gctttgctgggggtgaatagg

SEQ ID NO: 14635 - DNA, 21 bp, Artificial Sequence
  Description of Artificial Sequence: Synthetic oligonucleotide
gctttgcttcattctattggg

SEQ ID NO: 14636 - DNA, 21 bp, Artificial Sequence
  Description of Artificial Sequence: Synthetic oligonucleotide
gcgttgttgcagaatgcgtcg

SEQ ID NO: 14637 - DNA, 21 bp, Artificial Sequence
  Description of Artificial Sequence: Synthetic oligonucleotide
gctcttctttcttctgggaat

SEQ ID NO: 14638 - DNA, 21 bp, Artificial Sequence
  Description of Artificial Sequence: Synthetic oligonucleotide
gctcttatgcgggggacgatt

SEQ ID NO: 14639 - DNA, 21 bp, Artificial Sequence
  Description of Artificial Sequence: Synthetic oligonucleotide
gctttgaatgatgcggcgggt

SEQ ID NO: 14640 - DNA, 21 bp, Artificial Sequence
  Description of Artificial Sequence: Synthetic oligonucleotide
gcgctgaatcatgataagcct

SEQ ID NO: 14641 - DNA, 21 bp, Artificial Sequence
  Description of Artificial Sequence: Synthetic oligonucleotide
gcgttgaatattcctgagctt

SEQ ID NO: 14642 - DNA, 21 bp, Artificial Sequence
  Description of Artificial Sequence: Synthetic oligonucleotide
gctttgaatacgcatacggtt

SEQ ID NO: 14643 - DNA, 21 bp, Artificial Sequence
  Description of Artificial Sequence: Synthetic oligonucleotide
gctcttcctgctaagtcgtat

SEQ ID NO: 14644 - DNA, 21 bp, Artificial Sequence
  Description of Artificial Sequence: Synthetic oligonucleotide
gctctgccggcgagtgtggat

SEQ ID NO: 14645 - DNA, 21 bp, Artificial Sequence
  Description of Artificial Sequence: Synthetic oligonucleotide
gctcttcctggtactccgaat

SEQ ID NO: 14646 - DNA, 21 bp, Artificial Sequence
  Description of Artificial Sequence: Synthetic oligonucleotide
gctctgcctttgagtcgggcg

SEQ ID NO: 14647 - DNA, 21 bp, Artificial Sequence
  Description of Artificial Sequence: Synthetic oligonucleotide
gcgttgcctcagttggcggtt

SEQ ID NO: 14648 - DNA, 21 bp, Artificial Sequence
  Description of Artificial Sequence: Synthetic oligonucleotide
gctcttcctcagcgtcgggat

SEQ ID NO: 14649 - DNA, 21 bp, Artificial Sequence
  Description of Artificial Sequence: Synthetic oligonucleotide
gcgttgccgagtagtgatcat

SEQ ID NO: 14650 - DNA, 21 bp, Artificial Sequence
  Description of Artificial Sequence: Synthetic oligonucleotide
gctttgccttcgactttggtg

SEQ ID NO: 14651 - DNA, 21 bp, Artificial Sequence
  Description of Artificial Sequence: Synthetic oligonucleotide
gctttgccgactactaaggcg

SEQ ID NO: 14652 - DNA, 21 bp, Artificial Sequence
  Description of Artificial Sequence: Synthetic oligonucleotide
gcgctgcaggcgccgcatacg

SEQ ID NO: 14653 - DNA, 21 bp, Artificial Sequence
  Description of Artificial Sequence: Synthetic oligonucleotide
gctcttcaggggtattctgtg

SEQ ID NO: 14654 - DNA, 21 bp, Artificial Sequence
  Description of Artificial Sequence: Synthetic oligonucleotide
gctctgcagcgggattggtcg

SEQ ID NO: 14655 - DNA, 21 bp, Artificial Sequence
  Description of Artificial Sequence: Synthetic oligonucleotide
gctcttcagagtgatactgtt

SEQ ID NO: 14656 - DNA, 21 bp, Artificial Sequence
  Description of Artificial Sequence: Synthetic oligonucleotide
gcgttgcagtcttctgtgagg

SEQ ID NO: 14657 - DNA, 21 bp, Artificial Sequence
  Description of Artificial Sequence: Synthetic oligonucleotide
gctcttcggatgggtatgacg

SEQ ID NO: 14658 - DNA, 21 bp, Artificial Sequence
  Description of Artificial Sequence: Synthetic oligonucleotide
gcgctgcggaatccgattaat

SEQ ID NO: 14659 - DNA, 21 bp, Artificial Sequence
  Description of Artificial Sequence: Synthetic oligonucleotide
gcgcttcgtacgtctctgacg

SEQ ID NO: 14660 - DNA, 21 bp, Artificial Sequence
  Description of Artificial Sequence: Synthetic oligonucleotide
gcgttgcgtgttgcggcgatg

SEQ ID NO: 14661 - DNA, 21 bp, Artificial Sequence
  Description of Artificial Sequence: Synthetic oligonucleotide
gctttgagtgctggtcgggtg

SEQ ID NO: 14662 - DNA, 21 bp, Artificial Sequence
  Description of Artificial Sequence: Synthetic oligonucleotide
gcgctgtcggagcttcagatt

SEQ ID NO: 14663 - DNA, 21 bp, Artificial Sequence
  Description of Artificial Sequence: Synthetic oligonucleotide
gctctgtctggtacgtttggt

SEQ ID NO: 14664 - DNA, 21 bp, Artificial Sequence
  Description of Artificial Sequence: Synthetic oligonucleotide
gcgctttcgcatgatgggaat

SEQ ID NO: 14665 - DNA, 21 bp, Artificial Sequence
  Description of Artificial Sequence: Synthetic oligonucleotide
gcgctttcgcatgagtctaat

SEQ ID NO: 14666 - DNA, 21 bp, Artificial Sequence
  Description of Artificial Sequence: Synthetic oligonucleotide
gcgctgtctaagtgggctatg

SEQ ID NO: 14667 - DNA, 21 bp, Artificial Sequence
  Description of Artificial Sequence: Synthetic oligonucleotide
gcgttgagtctgaatactatt

SEQ ID NO: 14668 - DNA, 21 bp, Artificial Sequence
  Description of Artificial Sequence: Synthetic oligonucleotide
gcgttgtctccgatgccttgt

SEQ ID NO: 14669 - DNA, 21 bp, Artificial Sequence
  Description of Artificial Sequence: Synthetic oligonucleotide
gcgttgagtcaggctgagcgt

SEQ ID NO: 14670 - DNA, 21 bp, Artificial Sequence
  Description of Artificial Sequence: Synthetic oligonucleotide
gctttgtctcgtgatcggcct

SEQ ID NO: 14671 - DNA, 21 bp, Artificial Sequence
  Description of Artificial Sequence: Synthetic oligonucleotide
gcgctttcgtcgattcatgtt

SEQ ID NO: 14672 - DNA, 21 bp, Artificial Sequence
  Description of Artificial Sequence: Synthetic oligonucleotide
gcgctttctagttctgctctt

SEQ ID NO: 14673 - DNA, 21 bp, Artificial Sequence
  Description of Artificial Sequence: Synthetic oligonucleotide
gctctttcgacggggatgcct

SEQ ID NO: 14674 - DNA, 21 bp, Artificial Sequence
  Description of Artificial Sequence: Synthetic oligonucleotide
gctctttcgactccggtgcct

SEQ ID NO: 14675 - DNA, 21 bp, Artificial Sequence
  Description of Artificial Sequence: Synthetic oligonucleotide
gctcttacgcattatgatccg

SEQ ID NO: 14676 - DNA, 21 bp, Artificial Sequence
  Description of Artificial Sequence: Synthetic oligonucleotide
gctttgactaagaatgtggct

SEQ ID NO: 14677 - DNA, 21 bp, Artificial Sequence
  Description of Artificial Sequence: Synthetic oligonucleotide
gctttgacgcggtctgcggtt

SEQ ID NO: 14678 - DNA, 21 bp, Artificial Sequence
  Description of Artificial Sequence: Synthetic oligonucleotide
gctcttactagtactcatgtt

SEQ ID NO: 14679 - DNA, 21 bp, Artificial Sequence
  Description of Artificial Sequence: Synthetic oligonucleotide
gctcttacgacgcttgcggag

SEQ ID NO: 14680 - DNA, 21 bp, Artificial Sequence
  Description of Artificial Sequence: Synthetic oligonucleotide
gctctgactacgcttggtccg

SEQ ID NO: 14681 - DNA, 21 bp, Artificial Sequence
  Description of Artificial Sequence: Synthetic oligonucleotide
gcgttgacggttctgttggag

SEQ ID NO: 14682 - DNA, 21 bp, Artificial Sequence
  Description of Artificial Sequence: Synthetic oligonucleotide
gcgctggtgtcgtctaatctt

SEQ ID NO: 14683 - DNA, 21 bp, Artificial Sequence
  Description of Artificial Sequence: Synthetic oligonucleotide
gcgctgtatgataatgcgcct

SEQ ID NO: 14684 - DNA, 21 bp, Artificial Sequence
  Description of Artificial Sequence: Synthetic oligonucleotide
gctctttataatactccgccg

SEQ ID NO: 14685 - DNA, 21 bp, Artificial Sequence
  Description of Artificial Sequence: Synthetic oligonucleotide
gcgttgtatactcatttggat

SEQ ID NO: 14686 - DNA, 21 bp, Artificial Sequence
  Description of Artificial Sequence: Synthetic oligonucleotide
gcgatggcggcttctcctgct

SEQ ID NO: 14687 - DNA, 21 bp, Artificial Sequence
  Description of Artificial Sequence: Synthetic oligonucleotide
gctatggctcctaagctgtct

SEQ ID NO: 14688 - DNA, 21 bp, Artificial Sequence
  Description of Artificial Sequence: Synthetic oligonucleotide
gctatggcgcggccgtcgggg

SEQ ID NO: 14689 - DNA, 21 bp, Artificial Sequence
  Description of Artificial Sequence: Synthetic oligonucleotide
gctatggagcattctgttaag

SEQ ID NO: 14690 - DNA, 21 bp, Artificial Sequence
  Description of Artificial Sequence: Synthetic oligonucleotide
gcgatggagacgtgtgatctg

SEQ ID NO: 14691 - DNA, 21 bp, Artificial Sequence
  Description of Artificial Sequence: Synthetic oligonucleotide
gcgatgggtccgtctgcttcg

SEQ ID NO: 14692 - DNA, 21 bp, Artificial Sequence
  Description of Artificial Sequence: Synthetic oligonucleotide
gcgatgattcagatgcgtgag

SEQ ID NO: 14693 - DNA, 21 bp, Artificial Sequence
  Description of Artificial Sequence: Synthetic oligonucleotide
gcgatgaaggctcagaatact

SEQ ID NO: 14694 - DNA, 21 bp, Artificial Sequence
  Description of Artificial Sequence: Synthetic oligonucleotide
gctatgaaggataatcggagt

SEQ ID NO: 14695 - DNA, 21 bp, Artificial Sequence
  Description of Artificial Sequence: Synthetic oligonucleotide
gcgatgaagcttaatatgcct

SEQ ID NO: 14696 - DNA, 21 bp, Artificial Sequence
  Description of Artificial Sequence: Synthetic oligonucleotide
gctatgatgcagcatgttgct

SEQ ID NO: 14697 - DNA, 21 bp, Artificial Sequence
  Description of Artificial Sequence: Synthetic oligonucleotide
gcgatgatgagtgctgagtct

SEQ ID NO: 14698 - DNA, 21 bp, Artificial Sequence
  Description of Artificial Sequence: Synthetic oligonucleotide
gctatgcctgggcttggggtt

SEQ ID NO: 14699 - DNA, 21 bp, Artificial Sequence
  Description of Artificial Sequence: Synthetic oligonucleotide
gctatgcctgggctgcagtct

SEQ ID NO: 14700 - DNA, 21 bp, Artificial Sequence
  Description of Artificial Sequence: Synthetic oligonucleotide
gcgatgccgcgtctgacgcct

SEQ ID NO: 14701 - DNA, 21 bp, Artificial Sequence
  Description of Artificial Sequence: Synthetic oligonucleotide
gctatgcctaggcaggtgagt

SEQ ID NO: 14702 - DNA, 21 bp, Artificial Sequence
  Description of Artificial Sequence: Synthetic oligonucleotide
gctatgccgacggttgtggcg

SEQ ID NO: 14703 - DNA, 21 bp, Artificial Sequence
  Description of Artificial Sequence: Synthetic oligonucleotide
gctatgcagacggatagggtt

SEQ ID NO: 14704 - DNA, 21 bp, Artificial Sequence
  Description of Artificial Sequence: Synthetic oligonucleotide
gctatgcggccttcgcatgag

SEQ ID NO: 14705 - DNA, 21 bp, Artificial Sequence
  Description of Artificial Sequence: Synthetic oligonucleotide
gcgatgtcgcttattcatgcg

SEQ ID NO: 14706 - DNA, 21 bp, Artificial Sequence
  Description of Artificial Sequence: Synthetic oligonucleotide
gcgatgtcgtcggcttcttat

SEQ ID NO: 14707 - DNA, 21 bp, Artificial Sequence
  Description of Artificial Sequence: Synthetic oligonucleotide
gcgatgtcgtctattgctggg

SEQ ID NO: 14708 - DNA, 21 bp, Artificial Sequence
  Description of Artificial Sequence: Synthetic oligonucleotide
gcgatgagtacgcagctgtct

SEQ ID NO: 14709 - DNA, 21 bp, Artificial Sequence
  Description of Artificial Sequence: Synthetic oligonucleotide
gctatgacggataaggtgcag

SEQ ID NO: 14710 - DNA, 21 bp, Artificial Sequence
  Description of Artificial Sequence: Synthetic oligonucleotide
gcgatgactgatgttcgtggt

SEQ ID NO: 14711 - DNA, 21 bp, Artificial Sequence
  Description of Artificial Sequence: Synthetic oligonucleotide
gctatgactcatatgccttcg

SEQ ID NO: 14712 - DNA, 21 bp, Artificial Sequence
  Description of Artificial Sequence: Synthetic oligonucleotide
gctatgactttgcgtagtgat

SEQ ID NO: 14713 - DNA, 21 bp, Artificial Sequence
  Description of Artificial Sequence: Synthetic oligonucleotide
gcgatgacttctcctaagctt

SEQ ID NO: 14714 - DNA, 21 bp, Artificial Sequence
  Description of Artificial Sequence: Synthetic oligonucleotide
gcgatgtggggggcggatgct

SEQ ID NO: 14715 - DNA, 21 bp, Artificial Sequence
  Description of Artificial Sequence: Synthetic oligonucleotide
gctaatgctggtgggtcgccg

SEQ ID NO: 14716 - DNA, 21 bp, Artificial Sequence
  Description of Artificial Sequence: Synthetic oligonucleotide
gcgaatgatagtcgtgcggtt

SEQ ID NO: 14717 - DNA, 21 bp, Artificial Sequence
  Description of Artificial Sequence: Synthetic oligonucleotide
gctaatgaggattttcggaag

SEQ ID NO: 14718 - DNA, 21 bp, Artificial Sequence
  Description of Artificial Sequence: Synthetic oligonucleotide
gcgaatgagcctgatgtgctt

SEQ ID NO: 14719 - DNA, 21 bp, Artificial Sequence
  Description of Artificial Sequence: Synthetic oligonucleotide
gcgaatggggctagtagtccg

SEQ ID NO: 14720 - DNA, 21 bp, Artificial Sequence
  Description of Artificial Sequence: Synthetic oligonucleotide
gctaatcatggtgctactttt

SEQ ID NO: 14721 - DNA, 21 bp, Artificial Sequence
  Description of Artificial Sequence: Synthetic oligonucleotide
gcgaatcatacgactcggtcg

SEQ ID NO: 14722 - DNA, 21 bp, Artificial Sequence
  Description of Artificial Sequence: Synthetic oligonucleotide
gcgaataagccgcaggttacg

SEQ ID NO: 14723 - DNA, 21 bp, Artificial Sequence
  Description of Artificial Sequence: Synthetic oligonucleotide
gcgaatcttggtttgccgcct

SEQ ID NO: 14724 - DNA, 21 bp, Artificial Sequence
  Description of Artificial Sequence: Synthetic oligonucleotide
gctaatcttggtagtgcgagg

SEQ ID NO: 14725 - DNA, 21 bp, Artificial Sequence
  Description of Artificial Sequence: Synthetic oligonucleotide
gcgaatctgcctggtcatttg

SEQ ID NO: 14726 - DNA, 21 bp, Artificial Sequence
  Description of Artificial Sequence: Synthetic oligonucleotide
gcgaatatgactagggttgag

SEQ ID NO: 14727 - DNA, 21 bp, Artificial Sequence
  Description of Artificial Sequence: Synthetic oligonucleotide
gcgaatatgactgtgcattgt

SEQ ID NO: 14728 - DNA, 21 bp, Artificial Sequence
  Description of Artificial Sequence: Synthetic oligonucleotide
gctaatcctgctaagactgtt

SEQ ID NO: 14729 - DNA, 21 bp, Artificial Sequence
  Description of Artificial Sequence: Synthetic oligonucleotide
gctaatcctggtaagatttat

SEQ ID NO: 14730 - DNA, 21 bp, Artificial Sequence
  Description of Artificial Sequence: Synthetic oligonucleotide
gcgaatccggggactgctccg

SEQ ID NO: 14731 - DNA, 21 bp, Artificial Sequence
  Description of Artificial Sequence: Synthetic oligonucleotide
gcgaatcctctgctgtcgtct

SEQ ID NO: 14732 - DNA, 21 bp, Artificial Sequence
  Description of Artificial Sequence: Synthetic oligonucleotide
gctaatcagggtattgattcg

SEQ ID NO: 14733 - DNA, 21 bp, Artificial Sequence
  Description of Artificial Sequence: Synthetic oligonucleotide
gcgaatcagaataataagaat

SEQ ID NO: 14734 - DNA, 21 bp, Artificial Sequence
  Description of Artificial Sequence: Synthetic oligonucleotide
gctaatcagtctttgccgagt

SEQ ID NO: 14735 - DNA, 21 bp, Artificial Sequence
  Description of Artificial Sequence: Synthetic oligonucleotide
gcgaatcgttctggtcatggt

SEQ ID NO: 14736 - DNA, 21 bp, Artificial Sequence
  Description of Artificial Sequence: Synthetic oligonucleotide
gctaatagtgattggggtccg

SEQ ID NO: 14737 - DNA, 21 bp, Artificial Sequence
  Description of Artificial Sequence: Synthetic oligonucleotide
gctaatagtgaggagtttgtg

SEQ ID NO: 14738 - DNA, 21 bp, Artificial Sequence
  Description of Artificial Sequence: Synthetic oligonucleotide
gctaattctggtccgccgccg

SEQ ID NO: 14739 - DNA, 21 bp, Artificial Sequence
  Description of Artificial Sequence: Synthetic oligonucleotide
gctaattctcatgagcagatg

SEQ ID NO: 14740 - DNA, 21 bp, Artificial Sequence
  Description of Artificial Sequence: Synthetic oligonucleotide
gcgaatagtcatatgcttaag

SEQ ID NO: 14741 - DNA, 21 bp, Artificial Sequence
  Description of Artificial Sequence: Synthetic oligonucleotide
gcgaattcgatgatgcatccg

SEQ ID NO: 14742 - DNA, 21 bp, Artificial Sequence
  Description of Artificial Sequence: Synthetic oligonucleotide
gcgaattcgaattcggtgtat

SEQ ID NO: 14743 - DNA, 21 bp, Artificial Sequence
  Description of Artificial Sequence: Synthetic oligonucleotide
gcgaattctaggttgggtggg

SEQ ID NO: 14744 - DNA, 21 bp, Artificial Sequence
  Description of Artificial Sequence: Synthetic oligonucleotide
gctaattcgaggcctactcag

SEQ ID NO: 14745 - DNA, 21 bp, Artificial Sequence
  Description of Artificial Sequence: Synthetic oligonucleotide
gctaattcgcgttcgatggtg

SEQ ID NO: 14746 - DNA, 21 bp, Artificial Sequence
  Description of Artificial Sequence: Synthetic oligonucleotide
gctaattctagttctcctggg

SEQ ID NO: 14747 - DNA, 21 bp, Artificial Sequence
  Description of Artificial Sequence: Synthetic oligonucleotide
gctaattcgactaagggtctg

SEQ ID NO: 14748 - DNA, 21 bp, Artificial Sequence
  Description of Artificial Sequence: Synthetic oligonucleotide
gctaatactgatccgaggaat

SEQ ID NO: 14749 - DNA, 21 bp, Artificial Sequence
  Description of Artificial Sequence: Synthetic oligonucleotide
gctaatacggagacgatttgg

SEQ ID NO: 14750 - DNA, 21 bp, Artificial Sequence
  Description of Artificial Sequence: Synthetic oligonucleotide
gcgaatactcttttgcatgtt

SEQ ID NO: 14751 - DNA, 21 bp, Artificial Sequence
  Description of Artificial Sequence: Synthetic oligonucleotide
gcgaatgtggcttcttcgggt

SEQ ID NO: 14752 - DNA, 21 bp, Artificial Sequence
  Description of Artificial Sequence: Synthetic oligonucleotide
gcgaatgtttctagtactcat

SEQ ID NO: 14753 - DNA, 21 bp, Artificial Sequence
  Description of Artificial Sequence: Synthetic oligonucleotide
gctaatgtgtctgtgcaggtt

SEQ ID NO: 14754 - DNA, 21 bp, Artificial Sequence
  Description of Artificial Sequence: Synthetic oligonucleotide
gctccggctgatcataggatg

SEQ ID NO: 14755 - DNA, 21 bp, Artificial Sequence
  Description of Artificial Sequence: Synthetic oligonucleotide
gctccggcggatatgacgagt

SEQ ID NO: 14756 - DNA, 21 bp, Artificial Sequence
  Description of Artificial Sequence: Synthetic oligonucleotide
gcgcctgcggattggccggtg

SEQ ID NO: 14757 - DNA, 21 bp, Artificial Sequence
  Description of Artificial Sequence: Synthetic oligonucleotide
gcgccggcggggaggcctagt

SEQ ID NO: 14758 - DNA, 21 bp, Artificial Sequence
  Description of Artificial Sequence: Synthetic oligonucleotide
gctcctgctttggggcttgct

SEQ ID NO: 14759 - DNA, 21 bp, Artificial Sequence
  Description of Artificial Sequence: Synthetic oligonucleotide
gctcctgctaatgatgagggt

SEQ ID NO: 14760 - DNA, 21 bp, Artificial Sequence
  Description of Artificial Sequence: Synthetic oligonucleotide
gctccggctcagaggttgtat

SEQ ID NO: 14761 - DNA, 21 bp, Artificial Sequence
  Description of Artificial Sequence: Synthetic oligonucleotide
gcgccggctcggatggtgaat

SEQ ID NO: 14762 - DNA, 21 bp, Artificial Sequence
  Description of Artificial Sequence: Synthetic oligonucleotide
gcgccggatgggacttatttg

SEQ ID NO: 14763 - DNA, 21 bp, Artificial Sequence
  Description of Artificial Sequence: Synthetic oligonucleotide
gctccggatccttcgtctctg

SEQ ID NO: 14764 - DNA, 21 bp, Artificial Sequence
  Description of Artificial Sequence: Synthetic oligonucleotide
gcgcctgaggatgctggttct

SEQ ID NO: 14765 - DNA, 21 bp, Artificial Sequence
  Description of Artificial Sequence: Synthetic oligonucleotide
gctccggagacgaatgattct

SEQ ID NO: 14766 - DNA, 21 bp, Artificial Sequence
  Description of Artificial Sequence: Synthetic oligonucleotide
gctccgtttaatactcagggg

SEQ ID NO: 14767 - DNA, 21 bp, Artificial Sequence
  Description of Artificial Sequence: Synthetic oligonucleotide
gcgccttttccggagaagtgg

SEQ ID NO: 14768 - DNA, 21 bp, Artificial Sequence
  Description of Artificial Sequence: Synthetic oligonucleotide
gcgccgtttcctgagcagcct

SEQ ID NO: 14769 - DNA, 21 bp, Artificial Sequence
  Description of Artificial Sequence: Synthetic oligonucleotide
gctcctggtattacgaattat

SEQ ID NO: 14770 - DNA, 21 bp, Artificial Sequence
  Description of Artificial Sequence: Synthetic oligonucleotide
gcgcctgggttgcgtcatagt

SEQ ID NO: 14771 - DNA, 21 bp, Artificial Sequence
  Description of Artificial Sequence: Synthetic oligonucleotide
gcgccgggtcgtttgtcgctt

SEQ ID NO: 14772 - DNA, 21 bp, Artificial Sequence
  Description of Artificial Sequence: Synthetic oligonucleotide
gctccgcattttccttcgact

SEQ ID NO: 14773 - DNA, 21 bp, Artificial Sequence
  Description of Artificial Sequence: Synthetic oligonucleotide
gctcctcatctgcctacgcat

SEQ ID NO: 14774 - DNA, 21 bp, Artificial Sequence
  Description of Artificial Sequence: Synthetic oligonucleotide
gctccgattttgcgtactccg

SEQ ID NO: 14775 - DNA, 21 bp, Artificial Sequence
  Description of Artificial Sequence: Synthetic oligonucleotide
gcgcctatttctcatcagatg

SEQ ID NO: 14776 - DNA, 21 bp, Artificial Sequence
  Description of Artificial Sequence: Synthetic oligonucleotide
gctccgttggcggttaggccg

SEQ ID NO: 14777 - DNA, 21 bp, Artificial Sequence
  Description of Artificial Sequence: Synthetic oligonucleotide
gcgcctttgaagtctgtgcag

SEQ ID NO: 14778 - DNA, 21 bp, Artificial Sequence
  Description of Artificial Sequence: Synthetic oligonucleotide
gcgcctaatttgttgattggg

SEQ ID NO: 14779 - DNA, 21 bp, Artificial Sequence
  Description of Artificial Sequence: Synthetic oligonucleotide
gctcctaatagtggtgtgaag

SEQ ID NO: 14780 - DNA, 21 bp, Artificial Sequence
  Description of Artificial Sequence: Synthetic oligonucleotide
gctccgaatacgtctgtgcgt

SEQ ID NO: 14781 - DNA, 21 bp, Artificial Sequence
  Description of Artificial Sequence: Synthetic oligonucleotide
gcgcctcctaatctggagtct

SEQ ID NO: 14782 - DNA, 21 bp, Artificial Sequence
  Description of Artificial Sequence: Synthetic oligonucleotide
gcgcctcctaatgttcggact

SEQ ID NO: 14783 - DNA, 21 bp, Artificial Sequence
  Description of Artificial Sequence: Synthetic oligonucleotide
gctccgccttcgctgcgtacg

SEQ ID NO: 14784 - DNA, 21 bp, Artificial Sequence
  Description of Artificial Sequence: Synthetic oligonucleotide
gcgccgcaggcgaagactccg

SEQ ID NO: 14785 - DNA, 21 bp, Artificial Sequence
  Description of Artificial Sequence: Synthetic oligonucleotide
gctccgcagggtcggcagatt

SEQ ID NO: 14786 - DNA, 21 bp, Artificial Sequence
  Description of Artificial Sequence: Synthetic oligonucleotide
gctccgcagttgcagccggct

SEQ ID NO: 14787 - DNA, 21 bp, Artificial Sequence
  Description of Artificial Sequence: Synthetic oligonucleotide
gcgcctcagcctaaggatccg

SEQ ID NO: 14788 - DNA, 21 bp, Artificial Sequence
  Description of Artificial Sequence: Synthetic oligonucleotide
gctcctagggctgtgaattat

SEQ ID NO: 14789 - DNA, 21 bp, Artificial Sequence
  Description of Artificial Sequence: Synthetic oligonucleotide
gcgccgcggcttactgtgtcg

SEQ ID NO: 14790 - DNA, 21 bp, Artificial Sequence
  Description of Artificial Sequence: Synthetic oligonucleotide
gctcctcggcctcctcttgtg

SEQ ID NO: 14791 - DNA, 21 bp, Artificial Sequence
  Description of Artificial Sequence: Synthetic oligonucleotide
gcgcctcggcagactcataat

SEQ ID NO: 14792 - DNA, 21 bp, Artificial Sequence
  Description of Artificial Sequence: Synthetic oligonucleotide
gctccgcgtacgcattctacg

SEQ ID NO: 14793 - DNA, 21 bp, Artificial Sequence
  Description of Artificial Sequence: Synthetic oligonucleotide
gcgccgagggttcttcagacg

SEQ ID NO: 14794 - DNA, 21 bp, Artificial Sequence
  Description of Artificial Sequence: Synthetic oligonucleotide
gcgcctcgttatgagcttcgg

SEQ ID NO: 14795 - DNA, 21 bp, Artificial Sequence
  Description of Artificial Sequence: Synthetic oligonucleotide
gcgccttctggtagtacgtcg

SEQ ID NO: 14796 - DNA, 21 bp, Artificial Sequence
  Description of Artificial Sequence: Synthetic oligonucleotide
gcgcctagtggggttaagcct

SEQ ID NO: 14797 - DNA, 21 bp, Artificial Sequence
  Description of Artificial Sequence: Synthetic oligonucleotide
gctccgtcgaagatggctatt

SEQ ID NO: 14798 - DNA, 21 bp, Artificial Sequence
  Description of Artificial Sequence: Synthetic oligonucleotide
gctccgagtaggtgtgcgttg

SEQ ID NO: 14799 - DNA, 21 bp, Artificial Sequence
  Description of Artificial Sequence: Synthetic oligonucleotide
gcgccgtcgtcggcggagaat

SEQ ID NO: 14800 - DNA, 21 bp, Artificial Sequence
  Description of Artificial Sequence: Synthetic oligonucleotide
gctccgtcgacgcttaataat

SEQ ID NO: 14801 - DNA, 21 bp, Artificial Sequence
  Description of Artificial Sequence: Synthetic oligonucleotide
gcgccttctgttcggccgatt

SEQ ID NO: 14802 - DNA, 21 bp, Artificial Sequence
  Description of Artificial Sequence: Synthetic oligonucleotide
gcgcctagtgttgttacgact

SEQ ID NO: 14803 - DNA, 21 bp, Artificial Sequence
  Description of Artificial Sequence: Synthetic oligonucleotide
gcgcctactgcgggtagtatg

SEQ ID NO: 14804 - DNA, 21 bp, Artificial Sequence
  Description of Artificial Sequence: Synthetic oligonucleotide
gcgcctactcctcatcctagt

SEQ ID NO: 14805 - DNA, 21 bp, Artificial Sequence
  Description of Artificial Sequence: Synthetic oligonucleotide
gctcctacgcctaagggtatt

SEQ ID NO: 14806 - DNA, 21 bp, Artificial Sequence
  Description of Artificial Sequence: Synthetic oligonucleotide
gcgcctactaggaatccgcag

SEQ ID NO: 14807 - DNA, 21 bp, Artificial Sequence
  Description of Artificial Sequence: Synthetic oligonucleotide
gctccgactactccttcgctt

SEQ ID NO: 14808 - DNA, 21 bp, Artificial Sequence
  Description of Artificial Sequence: Synthetic oligonucleotide
gctcctactgtttctaatatt

SEQ ID NO: 14809 - DNA, 21 bp, Artificial Sequence
  Description of Artificial Sequence: Synthetic oligonucleotide
gctcctgtgccggatcagacg

SEQ ID NO: 14810 - DNA, 21 bp, Artificial Sequence
  Description of Artificial Sequence: Synthetic oligonucleotide
gcgccggtgactgataatttt

SEQ ID NO: 14811 - DNA, 21 bp, Artificial Sequence
  Description of Artificial Sequence: Synthetic oligonucleotide
gctcaggcgctgaggggtcat

SEQ ID NO: 14812 - DNA, 21 bp, Artificial Sequence
  Description of Artificial Sequence: Synthetic oligonucleotide
gcgcaggctcctcggactgag

SEQ ID NO: 14813 - DNA, 21 bp, Artificial Sequence
  Description of Artificial Sequence: Synthetic oligonucleotide
gcgcaggctactagtagtctt

SEQ ID NO: 14814 - DNA, 21 bp, Artificial Sequence
  Description of Artificial Sequence: Synthetic oligonucleotide
gcgcagtgttcgacgcatctt

SEQ ID NO: 14815 - DNA, 21 bp, Artificial Sequence
  Description of Artificial Sequence: Synthetic oligonucleotide
gcgcaggatcgtgcgacgcgg

SEQ ID NO: 14816 - DNA, 21 bp, Artificial Sequence
  Description of Artificial Sequence: Synthetic oligonucleotide
gcgcagttttctactaaggat

SEQ ID NO: 14817 - DNA, 21 bp, Artificial Sequence
  Description of Artificial Sequence: Synthetic oligonucleotide
gctcagggtcagacgatgctt

SEQ ID NO: 14818 - DNA, 21 bp, Artificial Sequence
  Description of Artificial Sequence: Synthetic oligonucleotide
gctcagggtcaggttacgcct

SEQ ID NO: 14819 - DNA, 21 bp, Artificial Sequence
  Description of Artificial Sequence: Synthetic oligonucleotide
gctcagggttggactagtggt

SEQ ID NO: 14820 - DNA, 21 bp, Artificial Sequence
  Description of Artificial Sequence: Synthetic oligonucleotide
gcgcagcataagttgggtttg

SEQ ID NO: 14821 - DNA, 21 bp, Artificial Sequence
  Description of Artificial Sequence: Synthetic oligonucleotide
gcgcagcatcgtggggagacg

SEQ ID NO: 14822 - DNA, 21 bp, Artificial Sequence
  Description of Artificial Sequence: Synthetic oligonucleotide
gcgcagattcatatggagatg

SEQ ID NO: 14823 - DNA, 21 bp, Artificial Sequence
  Description of Artificial Sequence: Synthetic oligonucleotide
gcgcagaagccgacgacgatg

SEQ ID NO: 14824 - DNA, 21 bp, Artificial Sequence
  Description of Artificial Sequence: Synthetic oligonucleotide
gctcagaagcctgtggttatt

SEQ ID NO: 14825 - DNA, 21 bp, Artificial Sequence
  Description of Artificial Sequence: Synthetic oligonucleotide
gctcagaagcagaaggcgccg

SEQ ID NO: 14826 - DNA, 21 bp, Artificial Sequence
  Description of Artificial Sequence: Synthetic oligonucleotide
gcgcagaatatgcggaataat

SEQ ID NO: 14827 - DNA, 21 bp, Artificial Sequence
  Description of Artificial Sequence: Synthetic oligonucleotide
gctcagccgggtactgttttt

SEQ ID NO: 14828 - DNA, 21 bp, Artificial Sequence
  Description of Artificial Sequence: Synthetic oligonucleotide
gcgcagccgtcgctgtatgct

SEQ ID NO: 14829 - DNA, 21 bp, Artificial Sequence
  Description of Artificial Sequence: Synthetic oligonucleotide
gcgcagcctacgcgggctgat

SEQ ID NO: 14830 - DNA, 21 bp, Artificial Sequence
  Description of Artificial Sequence: Synthetic oligonucleotide
gctcagccggtgtctaggttg

SEQ ID NO: 14831 - DNA, 21 bp, Artificial Sequence
  Description of Artificial Sequence: Synthetic oligonucleotide
gctcagcgtcttagtgggggt

SEQ ID NO: 14832 - DNA, 21 bp, Artificial Sequence
  Description of Artificial Sequence: Synthetic oligonucleotide
gctcagcggaatacgtcgccg

SEQ ID NO: 14833 - DNA, 21 bp, Artificial Sequence
  Description of Artificial Sequence: Synthetic oligonucleotide
gcgcagaggcctacgtctgtg

SEQ ID NO: 14834 - DNA, 21 bp, Artificial Sequence
  Description of Artificial Sequence: Synthetic oligonucleotide
gctcagagtggggcgatttcg

SEQ ID NO: 14835 - DNA, 21 bp, Artificial Sequence
  Description of Artificial Sequence: Synthetic oligonucleotide
gcgcagtcgaggtctcctttg

SEQ ID NO: 14836 - DNA, 21 bp, Artificial Sequence
  Description of Artificial Sequence: Synthetic oligonucleotide
gctcagacgagtttgcgtctg

SEQ ID NO: 14837 - DNA, 21 bp, Artificial Sequence
  Description of Artificial Sequence: Synthetic oligonucleotide
gctcagacgtcgatgcatact

SEQ ID NO: 14838 - DNA, 21 bp, Artificial Sequence
  Description of Artificial Sequence: Synthetic oligonucleotide
gctcagtatattccgtctacg

SEQ ID NO: 14839 - DNA, 21 bp, Artificial Sequence
  Description of Artificial Sequence: Synthetic oligonucleotide
gctcagtatcctaagcctaat

SEQ ID NO: 14840 - DNA, 21 bp, Artificial Sequence
  Description of Artificial Sequence: Synthetic oligonucleotide
gctcgggcgggtgatctggtt

SEQ ID NO: 14841 - DNA, 21 bp, Artificial Sequence
  Description of Artificial Sequence: Synthetic oligonucleotide
gctagggcgcatgattctact

SEQ ID NO: 14842 - DNA, 21 bp, Artificial Sequence
  Description of Artificial Sequence: Synthetic oligonucleotide
gcgcgggcgcatctgactgct

SEQ ID NO: 14843 - DNA, 21 bp, Artificial Sequence
  Description of Artificial Sequence: Synthetic oligonucleotide
gcgcgtgctcttagtccgaat

SEQ ID NO: 14844 - DNA, 21 bp, Artificial Sequence
  Description of Artificial Sequence: Synthetic oligonucleotide
gctcgggctccgggtgagctt

SEQ ID NO: 14845 - DNA, 21 bp, Artificial Sequence
  Description of Artificial Sequence: Synthetic oligonucleotide
gctcgtgctcctggtccgatt

SEQ ID NO: 14846 - DNA, 21 bp, Artificial Sequence
  Description of Artificial Sequence: Synthetic oligonucleotide
gcgcgggcgcctacgttgatg

SEQ ID NO: 14847 - DNA, 21 bp, Artificial Sequence
  Description of Artificial Sequence: Synthetic oligonucleotide
gcgagggcttcgccgatgact

SEQ ID NO: 14848 - DNA, 21 bp, Artificial Sequence
  Description of Artificial Sequence: Synthetic oligonucleotide
gctagggattttaatgcgtcg

SEQ ID NO: 14849 - DNA, 21 bp, Artificial Sequence
  Description of Artificial Sequence: Synthetic oligonucleotide
gcgagggatggtgtgagtctt

SEQ ID NO: 14850 - DNA, 21 bp, Artificial Sequence
  Description of Artificial Sequence: Synthetic oligonucleotide
gcgagggatttgccggcttat

SEQ ID NO: 14851 - DNA, 21 bp, Artificial Sequence
  Description of Artificial Sequence: Synthetic oligonucleotide
gctcgtgatatggttcctcat

SEQ ID NO: 14852 - DNA, 21 bp, Artificial Sequence
  Description of Artificial Sequence: Synthetic oligonucleotide
gcgcgtgatcagcgtagtccg

SEQ ID NO: 14853 - DNA, 21 bp, Artificial Sequence
  Description of Artificial Sequence: Synthetic oligonucleotide
gcgcgggagcattctcagctt

SEQ ID NO: 14854 - DNA, 21 bp, Artificial Sequence
  Description of Artificial Sequence: Synthetic oligonucleotide
gctcgtgagttggggcggtcg

SEQ ID NO: 14855 - DNA, 21 bp, Artificial Sequence
  Description of Artificial Sequence: Synthetic oligonucleotide
gcgaggtttgatgttgggtcg

SEQ ID NO: 14856 - DNA, 21 bp, Artificial Sequence
  Description of Artificial Sequence: Synthetic oligonucleotide
gctaggtttgagactggtcat

SEQ ID NO: 14857 - DNA, 21 bp, Artificial Sequence
  Description of Artificial Sequence: Synthetic oligonucleotide
gctcggggtcttgcggcgcat

SEQ ID NO: 14858 - DNA, 21 bp, Artificial Sequence
  Description of Artificial Sequence: Synthetic oligonucleotide
gcgcgggggaatgcgcaggct

SEQ ID NO: 14859 - DNA, 21 bp, Artificial Sequence
  Description of Artificial Sequence: Synthetic oligonucleotide
gcgcgtggtaatgttatgatt

SEQ ID NO: 14860 - DNA, 21 bp, Artificial Sequence
  Description of Artificial Sequence: Synthetic oligonucleotide
gctcgtggttcggatgcttcg

SEQ ID NO: 14861 - DNA, 21 bp, Artificial Sequence
  Description of Artificial Sequence: Synthetic oligonucleotide
gcgcgtggttctatgacgttg

SEQ ID NO: 14862 - DNA, 21 bp, Artificial Sequence
  Description of Artificial Sequence: Synthetic oligonucleotide
gcgaggggtgttgctagtcct

SEQ ID NO: 14863 - DNA, 21 bp, Artificial Sequence
  Description of Artificial Sequence: Synthetic oligonucleotide
gctcggcatgcttctgtggct

SEQ ID NO: 14864 - DNA, 21 bp, Artificial Sequence
  Description of Artificial Sequence: Synthetic oligonucleotide
gctaggcatatgccgattgag

SEQ ID NO: 14865 - DNA, 21 bp, Artificial Sequence
  Description of Artificial Sequence: Synthetic oligonucleotide
gcgcgtatttatgagtcgccg

SEQ ID NO: 14866 - DNA, 21 bp, Artificial Sequence
  Description of Artificial Sequence: Synthetic oligonucleotide
gctcgtttggctacttctgag

SEQ ID NO: 14867 - DNA, 21 bp, Artificial Sequence
  Description of Artificial Sequence: Synthetic oligonucleotide
gctcgtcttggttatgatggt

SEQ ID NO: 14868 - DNA, 21 bp, Artificial Sequence
  Description of Artificial Sequence: Synthetic oligonucleotide
gctaggcttaattttgctgcg

SEQ ID NO: 14869 - DNA, 21 bp, Artificial Sequence
  Description of Artificial Sequence: Synthetic oligonucleotide
gcgcgtctgcagactgctgtg

SEQ ID NO: 14870 - DNA, 21 bp, Artificial Sequence
  Description of Artificial Sequence: Synthetic oligonucleotide
gcgcggatggggctggggttg

SEQ ID NO: 14871 - DNA, 21 bp, Artificial Sequence
  Description of Artificial Sequence: Synthetic oligonucleotide
gcgcgtatgccgatgctggag

SEQ ID NO: 14872 - DNA, 21 bp, Artificial Sequence
  Description of Artificial Sequence: Synthetic oligonucleotide
gctaggatgcctagtccgccg

SEQ ID NO: 14873 - DNA, 21 bp, Artificial Sequence
  Description of Artificial Sequence: Synthetic oligonucleotide
gctaggatggttgatcctatt

SEQ ID NO: 14874 - DNA, 21 bp, Artificial Sequence
  Description of Artificial Sequence: Synthetic oligonucleotide
gcgcgtatggttggtgagcct

SEQ ID NO: 14875 - DNA, 21 bp, Artificial Sequence
  Description of Artificial Sequence: Synthetic oligonucleotide
gcgaggaatcctggtccggat

SEQ ID NO: 14876 - DNA, 21 bp, Artificial Sequence
  Description of Artificial Sequence: Synthetic oligonucleotide
gcgcgtaatcaggcggctcag

SEQ ID NO: 14877 - DNA, 21 bp, Artificial Sequence
  Description of Artificial Sequence: Synthetic oligonucleotide
gctcgtaatagtctgtcggat

SEQ ID NO: 14878 - DNA, 21 bp, Artificial Sequence
  Description of Artificial Sequence: Synthetic oligonucleotide
gctcggccggagattaagtat

SEQ ID NO: 14879 - DNA, 21 bp, Artificial Sequence
  Description of Artificial Sequence: Synthetic oligonucleotide
gcgcggccggagtatcgggtg

SEQ ID NO: 14880 - DNA, 21 bp, Artificial Sequence
  Description of Artificial Sequence: Synthetic oligonucleotide
gcgcgtccgccgaattcgtat

SEQ ID NO: 14881 - DNA, 21 bp, Artificial Sequence
  Description of Artificial Sequence: Synthetic oligonucleotide
gctcggcctactgagcatgag

SEQ ID NO: 14882 - DNA, 21 bp, Artificial Sequence
  Description of Artificial Sequence: Synthetic oligonucleotide
gcgaggcagcattttgcgccg

SEQ ID NO: 14883 - DNA, 21 bp, Artificial Sequence
  Description of Artificial Sequence: Synthetic oligonucleotide
gctcgtcagcatgttggtcct

SEQ ID NO: 14884 - DNA, 21 bp, Artificial Sequence
  Description of Artificial Sequence: Synthetic oligonucleotide
gctcgtcagacgatgaatgag

SEQ ID NO: 14885 - DNA, 21 bp, Artificial Sequence
  Description of Artificial Sequence: Synthetic oligonucleotide
gcgcgtcgtgatcctccgctg

SEQ ID NO: 14886 - DNA, 21 bp, Artificial Sequence
  Description of Artificial Sequence: Synthetic oligonucleotide
gctcggtctgctgctctggcg

SEQ ID NO: 14887 - DNA, 21 bp, Artificial Sequence
  Description of Artificial Sequence: Synthetic oligonucleotide
gcgcggagtgctcagactaat

SEQ ID NO: 14888 - DNA, 21 bp, Artificial Sequence
  Description of Artificial Sequence: Synthetic oligonucleotide
gcgcggtcggatcgtgtgtcg

SEQ ID NO: 14889 - DNA, 21 bp, Artificial Sequence
  Description of Artificial Sequence: Synthetic oligonucleotide
gctcggtctgagcctactcct

SEQ ID NO: 14890 - DNA, 21 bp, Artificial Sequence
  Description of Artificial Sequence: Synthetic oligonucleotide
gctcggtctggggagggtttt

SEQ ID NO: 14891 - DNA, 21 bp, Artificial Sequence
  Description of Artificial Sequence: Synthetic oligonucleotide
gctcgttcgcatattgtgtcg

SEQ ID NO: 14892 - DNA, 21 bp, Artificial Sequence
  Description of Artificial Sequence: Synthetic oligonucleotide
gctaggagtatttcggttgtt

SEQ ID NO: 14893 - DNA, 21 bp, Artificial Sequence
  Description of Artificial Sequence: Synthetic oligonucleotide
gcgcggtctattgttggtccg

SEQ ID NO: 14894 - DNA, 21 bp, Artificial Sequence
  Description of Artificial Sequence: Synthetic oligonucleotide
gcgcggtcgaatgagcttcat

SEQ ID NO: 14895 - DNA, 21 bp, Artificial Sequence
  Description of Artificial Sequence: Synthetic oligonucleotide
gctcgttcgcctgatgttttg

SEQ ID NO: 14896 - DNA, 21 bp, Artificial Sequence
  Description of Artificial Sequence: Synthetic oligonucleotide
gctcggtctccgcatgtttat

SEQ ID NO: 14897 - DNA, 21 bp, Artificial Sequence
  Description of Artificial Sequence: Synthetic oligonucleotide
gcgcggtcgaggcctttggag

SEQ ID NO: 14898 - DNA, 21 bp, Artificial Sequence
  Description of Artificial Sequence: Synthetic oligonucleotide
gctcgtagttctgatctggag

SEQ ID NO: 14899 - DNA, 21 bp, Artificial Sequence
  Description of Artificial Sequence: Synthetic oligonucleotide
gcgcgttctagtcctccgttg

SEQ ID NO: 14900 - DNA, 21 bp, Artificial Sequence
  Description of Artificial Sequence: Synthetic oligonucleotide
gcgaggtctacggtgttgggg

SEQ ID NO: 14901 - DNA, 21 bp, Artificial Sequence
  Description of Artificial Sequence: Synthetic oligonucleotide
gcgaggtctgtggctacttct

SEQ ID NO: 14902 - DNA, 21 bp, Artificial Sequence
  Description of Artificial Sequence: Synthetic oligonucleotide
gcgaggagtgtgcaggattct

SEQ ID NO: 14903 - DNA, 21 bp, Artificial Sequence
  Description of Artificial Sequence: Synthetic oligonucleotide
gctcggactgcgtcgcttcct

SEQ ID NO: 14904 - DNA, 21 bp, Artificial Sequence
  Description of Artificial Sequence: Synthetic oligonucleotide
gctcgtacgggtgcgtatagt

SEQ ID NO: 14905 - DNA, 21 bp, Artificial Sequence
  Description of Artificial Sequence: Synthetic oligonucleotide
gctcggactctgccgcagctt

SEQ ID NO: 14906 - DNA, 21 bp, Artificial Sequence
  Description of Artificial Sequence: Synthetic oligonucleotide
gctaggacgctgagtactcat

SEQ ID NO: 14907 - DNA, 21 bp, Artificial Sequence
  Description of Artificial Sequence: Synthetic oligonucleotide
gcgcgtactcctgttctgtat

SEQ ID NO: 14908 - DNA, 21 bp, Artificial Sequence
  Description of Artificial Sequence: Synthetic oligonucleotide
gctaggactagtgaggagcct

SEQ ID NO: 14909 - DNA, 21 bp, Artificial Sequence
  Description of Artificial Sequence: Synthetic oligonucleotide
gctcgtacgacggtggggttg

SEQ ID NO: 14910 - DNA, 21 bp, Artificial Sequence
  Description of Artificial Sequence: Synthetic oligonucleotide
gctcggactgtgccgtctatg

SEQ ID NO: 14911 - DNA, 21 bp, Artificial Sequence
  Description of Artificial Sequence: Synthetic oligonucleotide
gctcgtgtggatgtgtctatg

SEQ ID NO: 14912 - DNA, 21 bp, Artificial Sequence
  Description of Artificial Sequence: Synthetic oligonucleotide
gctcgggttaatcgtgagccg

SEQ ID NO: 14913 - DNA, 21 bp, Artificial Sequence
  Description of Artificial Sequence: Synthetic oligonucleotide
gctcgtgtgtctcttgaggct

SEQ ID NO: 14914 - DNA, 21 bp, Artificial Sequence
  Description of Artificial Sequence: Synthetic oligonucleotide
gcgagggttgttgctccggag

SEQ ID NO: 14915 - DNA, 21 bp, Artificial Sequence
  Description of Artificial Sequence: Synthetic oligonucleotide
gctaggtatggtggtatggtt

SEQ ID NO: 14916 - DNA, 21 bp, Artificial Sequence
  Description of Artificial Sequence: Synthetic oligonucleotide
gcgtctgcgtttaagcagccg

SEQ ID NO: 14917 - DNA, 21 bp, Artificial Sequence
  Description of Artificial Sequence: Synthetic oligonucleotide
gcgagtgctggtggtcagcct

SEQ ID NO: 14918 - DNA, 21 bp, Artificial Sequence
  Description of Artificial Sequence: Synthetic oligonucleotide
gcttcggcggggcctccgcct

SEQ ID NO: 14919 - DNA, 21 bp, Artificial Sequence
  Description of Artificial Sequence: Synthetic oligonucleotide
gcttcggcgcagcaggtttct

SEQ ID NO: 14920 - DNA, 21 bp, Artificial Sequence
  Description of Artificial Sequence: Synthetic oligonucleotide
gcgtcggcgagtaatcgtggg

SEQ ID NO: 14921 - DNA, 21 bp, Artificial Sequence
  Description of Artificial Sequence: Synthetic oligonucleotide
gcgtcttgttcttctactacg

SEQ ID NO: 14922 - DNA, 21 bp, Artificial Sequence
  Description of Artificial Sequence: Synthetic oligonucleotide
gcgtctgatgcttcgtgtagt

SEQ ID NO: 14923 - DNA, 21 bp, Artificial Sequence
  Description of Artificial Sequence: Synthetic oligonucleotide
gcgtctgatttgagtcttcgt

SEQ ID NO: 14924 - DNA, 21 bp, Artificial Sequence
  Description of Artificial Sequence: Synthetic oligonucleotide
gcgtcggatatgcttaagagt

SEQ ID NO: 14925 - DNA, 21 bp, Artificial Sequence
  Description of Artificial Sequence: Synthetic oligonucleotide
gcgagtgataatattagggct

SEQ ID NO: 14926 - DNA, 21 bp, Artificial Sequence
  Description of Artificial Sequence: Synthetic oligonucleotide
gcttctgatcctatgaagggt

SEQ ID NO: 14927 - DNA, 21 bp, Artificial Sequence
  Description of Artificial Sequence: Synthetic oligonucleotide
gcgtctgatactacgacgatg

SEQ ID NO: 14928 - DNA, 21 bp, Artificial Sequence
  Description of Artificial Sequence: Synthetic oligonucleotide
gctagtgatgtgtctcgtcct

SEQ ID NO: 14929 - DNA, 21 bp, Artificial Sequence
  Description of Artificial Sequence: Synthetic oligonucleotide
gcgtcggaggagcgggcgaat

SEQ ID NO: 14930 - DNA, 21 bp, Artificial Sequence
  Description of Artificial Sequence: Synthetic oligonucleotide
gcgtctgagaattcgcagaat

SEQ ID NO: 14931 - DNA, 21 bp, Artificial Sequence
  Description of Artificial Sequence: Synthetic oligonucleotide
gcttcggagcggaataggttg

SEQ ID NO: 14932 - DNA, 21 bp, Artificial Sequence
  Description of Artificial Sequence: Synthetic oligonucleotide
gcgagtgaggtgtctaatgcg

SEQ ID NO: 14933 - DNA, 21 bp, Artificial Sequence
  Description of Artificial Sequence: Synthetic oligonucleotide
gcttctttttgtacgagttgg

SEQ ID NO: 14934 - DNA, 21 bp, Artificial Sequence
  Description of Artificial Sequence: Synthetic oligonucleotide
gcgtcttttcatgggggtgtg

SEQ ID NO: 14935 - DNA, 21 bp, Artificial Sequence
  Description of Artificial Sequence: Synthetic oligonucleotide
gcttcttttatggaggcggcg

SEQ ID NO: 14936 - DNA, 21 bp, Artificial Sequence
  Description of Artificial Sequence: Synthetic oligonucleotide
gcttcttttcctgctactagt

SEQ ID NO: 14937 - DNA, 21 bp, Artificial Sequence
  Description of Artificial Sequence: Synthetic oligonucleotide
gcgagttttcgtttgatggct

SEQ ID NO: 14938 - DNA, 21 bp, Artificial Sequence
  Description of Artificial Sequence: Synthetic oligonucleotide
gctagtgggagggcggtgggg

SEQ ID NO: 14939 - DNA, 21 bp, Artificial Sequence
  Description of Artificial Sequence: Synthetic oligonucleotide
gcttctgggaggcaggatctt

SEQ ID NO: 14940 - DNA, 21 bp, Artificial Sequence
  Description of Artificial Sequence: Synthetic oligonucleotide
gcgagtgggtctgatgattcg

SEQ ID NO: 14941 - DNA, 21 bp, Artificial Sequence
  Description of Artificial Sequence: Synthetic oligonucleotide
gcttcggggtcgacttctggt

SEQ ID NO: 14942 - DNA, 21 bp, Artificial Sequence
  Description of Artificial Sequence: Synthetic oligonucleotide
gcgtctgggacgcgggcggct

SEQ ID NO: 14943 - DNA, 21 bp, Artificial Sequence
  Description of Artificial Sequence: Synthetic oligonucleotide
gcgagtggtacttatactagt

SEQ ID NO: 14944 - DNA, 21 bp, Artificial Sequence
  Description of Artificial Sequence: Synthetic oligonucleotide
gcttctggttatcttccgcag

SEQ ID NO: 14945 - DNA, 21 bp, Artificial Sequence
  Description of Artificial Sequence: Synthetic oligonucleotide
gcgtctcatgagcgtgatttt

SEQ ID NO: 14946 - DNA, 21 bp, Artificial Sequence
  Description of Artificial Sequence: Synthetic oligonucleotide
gcgtctcatcatcttactgag

SEQ ID NO: 14947 - DNA, 21 bp, Artificial Sequence
  Description of Artificial Sequence: Synthetic oligonucleotide
gcttctcatcgttcgggtgat

SEQ ID NO: 14948 - DNA, 21 bp, Artificial Sequence
  Description of Artificial Sequence: Synthetic oligonucleotide
gcttctattcatacgacgagt

SEQ ID NO: 14949 - DNA, 21 bp, Artificial Sequence
  Description of Artificial Sequence: Synthetic oligonucleotide
gctagtatttctggtagtgct

SEQ ID NO: 14950 - DNA, 21 bp, Artificial Sequence
  Description of Artificial Sequence: Synthetic oligonucleotide
gcgagtatttctattggggcg

SEQ ID NO: 14951 - DNA, 21 bp, Artificial Sequence
  Description of Artificial Sequence: Synthetic oligonucleotide
gcgtctttgccgtctccgagg

SEQ ID NO: 14952 - DNA, 21 bp, Artificial Sequence
  Description of Artificial Sequence: Synthetic oligonucleotide
gcgtctcttcgggcgactggt

SEQ ID NO: 14953 - DNA, 21 bp, Artificial Sequence
  Description of Artificial Sequence: Synthetic oligonucleotide
gcttctttgtctgcggctatg

SEQ ID NO: 14954 - DNA, 21 bp, Artificial Sequence
  Description of Artificial Sequence: Synthetic oligonucleotide
gcgtcgttgagtggtagtatg

SEQ ID NO: 14955 - DNA, 21 bp, Artificial Sequence
  Description of Artificial Sequence: Synthetic oligonucleotide
gcgtcgttgtcgaatttgcct

SEQ ID NO: 14956 - DNA, 21 bp, Artificial Sequence
  Description of Artificial Sequence: Synthetic oligonucleotide
gcttcgctgtctccgcttttg

SEQ ID NO: 14957 - DNA, 21 bp, Artificial Sequence
  Description of Artificial Sequence: Synthetic oligonucleotide
gcgtctatgaagccgactatt

SEQ ID NO: 14958 - DNA, 21 bp, Artificial Sequence
  Description of Artificial Sequence: Synthetic oligonucleotide
gcgagtatgaatgggctgccg

SEQ ID NO: 14959 - DNA, 21 bp, Artificial Sequence
  Description of Artificial Sequence: Synthetic oligonucleotide
gcgtcgatgaatatgaatgct

SEQ ID NO: 14960 - DNA, 21 bp, Artificial Sequence
  Description of Artificial Sequence: Synthetic oligonucleotide
gcgtcgaataagtctagtctg

SEQ ID NO: 14961 - DNA, 21 bp, Artificial Sequence
  Description of Artificial Sequence: Synthetic oligonucleotide
gcttcgaatcgggtttcgtat

SEQ ID NO: 14962 - DNA, 21 bp, Artificial Sequence
  Description of Artificial Sequence: Synthetic oligonucleotide
gcttcgaatagtgctttgcgt

SEQ ID NO: 14963 - DNA, 21 bp, Artificial Sequence
  Description of Artificial Sequence: Synthetic oligonucleotide
gcgagtcctgcggctgttcat

SEQ ID NO: 14964 - DNA, 21 bp, Artificial Sequence
  Description of Artificial Sequence: Synthetic oligonucleotide
gctagtcctcttaatagttct

SEQ ID NO: 14965 - DNA, 21 bp, Artificial Sequence
  Description of Artificial Sequence: Synthetic oligonucleotide
gcgagtcctccgcagactacg

SEQ ID NO: 14966 - DNA, 21 bp, Artificial Sequence
  Description of Artificial Sequence: Synthetic oligonucleotide
gctagtcctcagtttaattcg

SEQ ID NO: 14967 - DNA, 21 bp, Artificial Sequence
  Description of Artificial Sequence: Synthetic oligonucleotide
gcgtcgcctagggggcgggag

SEQ ID NO: 14968 - DNA, 21 bp, Artificial Sequence
  Description of Artificial Sequence: Synthetic oligonucleotide
gcgtcgcaggcggcgtgtttg

SEQ ID NO: 14969 - DNA, 21 bp, Artificial Sequence
  Description of Artificial Sequence: Synthetic oligonucleotide
gcgagtcagattgagcctacg

SEQ ID NO: 14970 - DNA, 21 bp, Artificial Sequence
  Description of Artificial Sequence: Synthetic oligonucleotide
gcttctcagattcggactacg

SEQ ID NO: 14971 - DNA, 21 bp, Artificial Sequence
  Description of Artificial Sequence: Synthetic oligonucleotide
gcttcgcagccgtctcgtgtt

SEQ ID NO: 14972 - DNA, 21 bp, Artificial Sequence
  Description of Artificial Sequence: Synthetic oligonucleotide
gcttctcagcagcctcgttct

SEQ ID NO: 14973 - DNA, 21 bp, Artificial Sequence
  Description of Artificial Sequence: Synthetic oligonucleotide
gcttctcagcggttgggtggt

SEQ ID NO: 14974 - DNA, 21 bp, Artificial Sequence
  Description of Artificial Sequence: Synthetic oligonucleotide
gcgtctcagtcgcgtgatgcg

SEQ ID NO: 14975 - DNA, 21 bp, Artificial Sequence
  Description of Artificial Sequence: Synthetic oligonucleotide
gcgagtcagtatcgggagtct

SEQ ID NO: 14976 - DNA, 21 bp, Artificial Sequence
  Description of Artificial Sequence: Synthetic oligonucleotide
gcttctcgggctccggctggt

SEQ ID NO: 14977 - DNA, 21 bp, Artificial Sequence
  Description of Artificial Sequence: Synthetic oligonucleotide
gcttctcgtgcgcctagtaat

SEQ ID NO: 14978 - DNA, 21 bp, Artificial Sequence
  Description of Artificial Sequence: Synthetic oligonucleotide
gcttctcgtgataatgttgat

SEQ ID NO: 14979 - DNA, 21 bp, Artificial Sequence
  Description of Artificial Sequence: Synthetic oligonucleotide
gctagtcggggtatgtcgacg

SEQ ID NO: 14980 - DNA, 21 bp, Artificial Sequence
  Description of Artificial Sequence: Synthetic oligonucleotide
gcttcgcggccgtatttggtt

SEQ ID NO: 14981 - DNA, 21 bp, Artificial Sequence
  Description of Artificial Sequence: Synthetic oligonucleotide
gcttctcgttctactacttcg

SEQ ID NO: 14982 - DNA, 21 bp, Artificial Sequence
  Description of Artificial Sequence: Synthetic oligonucleotide
gcgtctaggactattgctcct

SEQ ID NO: 14983 - DNA, 21 bp, Artificial Sequence
  Description of Artificial Sequence: Synthetic oligonucleotide
gcgagtcggactactcctttg

SEQ ID NO: 14984 - DNA, 21 bp, Artificial Sequence
  Description of Artificial Sequence: Synthetic oligonucleotide
gctagttcggcgcgtcctatt

SEQ ID NO: 14985 - DNA, 21 bp, Artificial Sequence
  Description of Artificial Sequence: Synthetic oligonucleotide
gctagtagtgctgtgctgacg

SEQ ID NO: 14986 - DNA, 21 bp, Artificial Sequence
  Description of Artificial Sequence: Synthetic oligonucleotide
gcttcgtcggagcgtggtgag

SEQ ID NO: 14987 - DNA, 21 bp, Artificial Sequence
  Description of Artificial Sequence: Synthetic oligonucleotide
gcttcgtctggtgatgttctt

SEQ ID NO: 14988 - DNA, 21 bp, Artificial Sequence
  Description of Artificial Sequence: Synthetic oligonucleotide
gcgtcttctggtccggataag

SEQ ID NO: 14989 - DNA, 21 bp, Artificial Sequence
  Description of Artificial Sequence: Synthetic oligonucleotide
gcttctagtggtcgttcggcg

SEQ ID NO: 14990 - DNA, 21 bp, Artificial Sequence
  Description of Artificial Sequence: Synthetic oligonucleotide
gcttcgtctgggtctgggact

SEQ ID NO: 14991 - DNA, 21 bp, Artificial Sequence
  Description of Artificial Sequence: Synthetic oligonucleotide
gcgtcttcgaaggggtctaat

SEQ ID NO: 14992 - DNA, 21 bp, Artificial Sequence
  Description of Artificial Sequence: Synthetic oligonucleotide
gcgtcgtctaagccggcgaat

SEQ ID NO: 14993 - DNA, 21 bp, Artificial Sequence
  Description of Artificial Sequence: Synthetic oligonucleotide
gcgagttcgaagccgttgggg

SEQ ID NO: 14994 - DNA, 21 bp, Artificial Sequence
  Description of Artificial Sequence: Synthetic oligonucleotide
gcgtcgtctcctaagatttat

SEQ ID NO: 14995 - DNA, 21 bp, Artificial Sequence
  Description of Artificial Sequence: Synthetic oligonucleotide
gctagtagtcctgtgctgtcg

SEQ ID NO: 14996 - DNA, 21 bp, Artificial Sequence
  Description of Artificial Sequence: Synthetic oligonucleotide
gctagtagtcagcatggtctg

SEQ ID NO: 14997 - DNA, 21 bp, Artificial Sequence
  Description of Artificial Sequence: Synthetic oligonucleotide
gcgtctagtcgtacggtgaat

SEQ ID NO: 14998 - DNA, 21 bp, Artificial Sequence
  Description of Artificial Sequence: Synthetic oligonucleotide
gcttcttcgtctgattctcgt

SEQ ID NO: 14999 - DNA, 21 bp, Artificial Sequence
  Description of Artificial Sequence: Synthetic oligonucleotide
gctagtagttcgctgtctttt

SEQ ID NO: 15000 - DNA, 21 bp, Artificial Sequence
  Description of Artificial Sequence: Synthetic oligonucleotide
gcgtcttcgacttctttggag

SEQ ID NO: 15001 - DNA, 21 bp, Artificial Sequence
  Description of Artificial Sequence: Synthetic oligonucleotide
gctagtagtgttaatccgagt

SEQ ID NO: 15002 - DNA, 21 bp, Artificial Sequence
  Description of Artificial Sequence: Synthetic oligonucleotide
gcttcgactgcgcttctgctg

SEQ ID NO: 15003 - DNA, 21 bp, Artificial Sequence
  Description of Artificial Sequence: Synthetic oligonucleotide
gcgtcgactggtattgtgctt

SEQ ID NO: 15004 - DNA, 21 bp, Artificial Sequence
  Description of Artificial Sequence: Synthetic oligonucleotide
gcgagtactgggagttttggt

SEQ ID NO: 15005 - DNA, 21 bp, Artificial Sequence
  Description of Artificial Sequence: Synthetic oligonucleotide
gcttcgactggtagtcaggag

SEQ ID NO: 15006 - DNA, 21 bp, Artificial Sequence
  Description of Artificial Sequence: Synthetic oligonucleotide
gcgtctactttgcaggttggg

SEQ ID NO: 15007 - DNA, 21 bp, Artificial Sequence
  Description of Artificial Sequence: Synthetic oligonucleotide
gcgtcgactcctaatttgctt

SEQ ID NO: 15008 - DNA, 21 bp, Artificial Sequence
  Description of Artificial Sequence: Synthetic oligonucleotide
gctagtacgcagaagcaggct

SEQ ID NO: 15009 - DNA, 21 bp, Artificial Sequence
  Description of Artificial Sequence: Synthetic oligonucleotide
gcgtcgactcggatgttgttt

SEQ ID NO: 15010 - DNA, 21 bp, Artificial Sequence
  Description of Artificial Sequence: Synthetic oligonucleotide
gcgtcgactacgtttcgtccg

SEQ ID NO: 15011 - DNA, 21 bp, Artificial Sequence
  Description of Artificial Sequence: Synthetic oligonucleotide
gcttcgacgactaggatgctt

SEQ ID NO: 15012 - DNA, 21 bp, Artificial Sequence
  Description of Artificial Sequence: Synthetic oligonucleotide
gcgtcggttcttcaggaggct

SEQ ID NO: 15013 - DNA, 21 bp, Artificial Sequence
  Description of Artificial Sequence: Synthetic oligonucleotide
gcgtcggtgcctttgattcct

SEQ ID NO: 15014 - DNA, 21 bp, Artificial Sequence
  Description of Artificial Sequence: Synthetic oligonucleotide
gctagtgtgcggatgggtgat

SEQ ID NO: 15015 - DNA, 21 bp, Artificial Sequence
  Description of Artificial Sequence: Synthetic oligonucleotide
gctagtgtgagtatggttgcg

SEQ ID NO: 15016 - DNA, 21 bp, Artificial Sequence
  Description of Artificial Sequence: Synthetic oligonucleotide
gcttctgttagtacggagggg

SEQ ID NO: 15017 - DNA, 21 bp, Artificial Sequence
  Description of Artificial Sequence: Synthetic oligonucleotide
gctagttgggatattaatatt

SEQ ID NO: 15018 - DNA, 21 bp, Artificial Sequence
  Description of Artificial Sequence: Synthetic oligonucleotide
gctagttgggatagtaatatt

SEQ ID NO: 15019 - DNA, 21 bp, Artificial Sequence
  Description of Artificial Sequence: Synthetic oligonucleotide
gcttcttatgatactagtcgg

SEQ ID NO: 15020 - DNA, 21 bp, Artificial Sequence
  Description of Artificial Sequence: Synthetic oligonucleotide
gcgtcgtatgatgtttcgtcg

SEQ ID NO: 15021 - DNA, 21 bp, Artificial Sequence
  Description of Artificial Sequence: Synthetic oligonucleotide
gctactgctgcgactgcttat

SEQ ID NO: 15022 - DNA, 21 bp, Artificial Sequence
  Description of Artificial Sequence: Synthetic oligonucleotide
gcgactgctgcgactacgagt

SEQ ID NO: 15023 - DNA, 21 bp, Artificial Sequence
  Description of Artificial Sequence: Synthetic oligonucleotide
gctactgcgggtctgtatcag

SEQ ID NO: 15024 - DNA, 21 bp, Artificial Sequence
  Description of Artificial Sequence: Synthetic oligonucleotide
gcgacggctaagattctggat

SEQ ID NO: 15025 - DNA, 21 bp, Artificial Sequence
  Description of Artificial Sequence: Synthetic oligonucleotide
gctacggcgaagcttttgcct

SEQ ID NO: 15026 - DNA, 21 bp, Artificial Sequence
  Description of Artificial Sequence: Synthetic oligonucleotide
gctactgctaagcctcttatt

SEQ ID NO: 15027 - DNA, 21 bp, Artificial Sequence
  Description of Artificial Sequence: Synthetic oligonucleotide
gcgactgcgcggcaggtgcag

SEQ ID NO: 15028 - DNA, 21 bp, Artificial Sequence
  Description of Artificial Sequence: Synthetic oligonucleotide
gctactgcttctacttcttct

SEQ ID NO: 15029 - DNA, 21 bp, Artificial Sequence
  Description of Artificial Sequence: Synthetic oligonucleotide
gcgacggcgtcttataatggt

SEQ ID NO: 15030 - DNA, 21 bp, Artificial Sequence
  Description of Artificial Sequence: Synthetic oligonucleotide
gcgactgcggtgcatgattat

SEQ ID NO: 15031 - DNA, 21 bp, Artificial Sequence
  Description of Artificial Sequence: Synthetic oligonucleotide
gcgactgatcatatgtctcct

SEQ ID NO: 15032 - DNA, 21 bp, Artificial Sequence
  Description of Artificial Sequence: Synthetic oligonucleotide
gcgactgattatcagagtatg

SEQ ID NO: 15033 - DNA, 21 bp, Artificial Sequence
  Description of Artificial Sequence: Synthetic oligonucleotide
gcgacggaggcgccgttgaag

SEQ ID NO: 15034 - DNA, 21 bp, Artificial Sequence
  Description of Artificial Sequence: Synthetic oligonucleotide
gctacggagggtcatccttgg

SEQ ID NO: 15035 - DNA, 21 bp, Artificial Sequence
  Description of Artificial Sequence: Synthetic oligonucleotide
gctacgtttgttacttctaag

SEQ ID NO: 15036 - DNA, 21 bp, Artificial Sequence
  Description of Artificial Sequence: Synthetic oligonucleotide
gctacgggggggcatagtcct

SEQ ID NO: 15037 - DNA, 21 bp, Artificial Sequence
  Description of Artificial Sequence: Synthetic oligonucleotide
gctactggtacgtctgcgggt

SEQ ID NO: 15038 - DNA, 21 bp, Artificial Sequence
  Description of Artificial Sequence: Synthetic oligonucleotide
gctactggggtgctgatgagt

SEQ ID NO: 15039 - DNA, 21 bp, Artificial Sequence
  Description of Artificial Sequence: Synthetic oligonucleotide
gctacgggggttcagaattat

SEQ ID NO: 15040 - DNA, 21 bp, Artificial Sequence
  Description of Artificial Sequence: Synthetic oligonucleotide
gctacgcatattttgaagctt

SEQ ID NO: 15041 - DNA, 21 bp, Artificial Sequence
  Description of Artificial Sequence: Synthetic oligonucleotide
gctactcattctcttctgtct

SEQ ID NO: 15042 - DNA, 21 bp, Artificial Sequence
  Description of Artificial Sequence: Synthetic oligonucleotide
gcgacgcatgtttgtgtgtct

SEQ ID NO: 15043 - DNA, 21 bp, Artificial Sequence
  Description of Artificial Sequence: Synthetic oligonucleotide
gctacgattccgaggacgccg

SEQ ID NO: 15044 - DNA, 21 bp, Artificial Sequence
  Description of Artificial Sequence: Synthetic oligonucleotide
gcgactaagtttcaggggatg

SEQ ID NO: 15045 - DNA, 21 bp, Artificial Sequence
  Description of Artificial Sequence: Synthetic oligonucleotide
gctacgaagggtatttctttt

SEQ ID NO: 15046 - DNA, 21 bp, Artificial Sequence
  Description of Artificial Sequence: Synthetic oligonucleotide
gcgactaagcatgattgtaag

SEQ ID NO: 15047 - DNA, 21 bp, Artificial Sequence
  Description of Artificial Sequence: Synthetic oligonucleotide
gctacgttgcatcgtgagctt

SEQ ID NO: 15048 - DNA, 21 bp, Artificial Sequence
  Description of Artificial Sequence: Synthetic oligonucleotide
gctactttgaagattcctgtt

SEQ ID NO: 15049 - DNA, 21 bp, Artificial Sequence
  Description of Artificial Sequence: Synthetic oligonucleotide
gctactcttcgtattgtggag

SEQ ID NO: 15050 - DNA, 21 bp, Artificial Sequence
  Description of Artificial Sequence: Synthetic oligonucleotide
gcgactcttaggcctaatgat

SEQ ID NO: 15051 - DNA, 21 bp, Artificial Sequence
  Description of Artificial Sequence: Synthetic oligonucleotide
gctactttgcggacggctacg

SEQ ID NO: 15052 - DNA, 21 bp, Artificial Sequence
  Description of Artificial Sequence: Synthetic oligonucleotide
gcgactttgtcgacgaatgct

SEQ ID NO: 15053 - DNA, 21 bp, Artificial Sequence
  Description of Artificial Sequence: Synthetic oligonucleotide
gcgactctgacgttgagtgcg

SEQ ID NO: 15054 - DNA, 21 bp, Artificial Sequence
  Description of Artificial Sequence: Synthetic oligonucleotide
gcgactttggtgagtgcggag

SEQ ID NO: 15055 - DNA, 21 bp, Artificial Sequence
  Description of Artificial Sequence: Synthetic oligonucleotide
gctactatgccttcgactatg

SEQ ID NO: 15056 - DNA, 21 bp, Artificial Sequence
  Description of Artificial Sequence: Synthetic oligonucleotide
gctactatgcgtcctcgtgat

SEQ ID NO: 15057 - DNA, 21 bp, Artificial Sequence
  Description of Artificial Sequence: Synthetic oligonucleotide
gctacgatgtcgttgtcttct

SEQ ID NO: 15058 - DNA, 21 bp, Artificial Sequence
  Description of Artificial Sequence: Synthetic oligonucleotide
gcgacgatgtcgatgaggggg

SEQ ID NO: 15059 - DNA, 21 bp, Artificial Sequence
  Description of Artificial Sequence: Synthetic oligonucleotide
gcgactatggtgacgacgtct

SEQ ID NO: 15060 - DNA, 21 bp, Artificial Sequence
  Description of Artificial Sequence: Synthetic oligonucleotide
gcgacgaatgctcatcagtcg

SEQ ID NO: 15061 - DNA, 21 bp, Artificial Sequence
  Description of Artificial Sequence: Synthetic oligonucleotide
gcgacgaatcggtttccgtct

SEQ ID NO: 15062 - DNA, 21 bp, Artificial Sequence
  Description of Artificial Sequence: Synthetic oligonucleotide
gctactaattcttcggctact

SEQ ID NO: 15063 - DNA, 21 bp, Artificial Sequence
  Description of Artificial Sequence: Synthetic oligonucleotide
gctacgaatacgaggattgct

SEQ ID NO: 15064 - DNA, 21 bp, Artificial Sequence
  Description of Artificial Sequence: Synthetic oligonucleotide
gctacgcctctgcgtactagt

SEQ ID NO: 15065 - DNA, 21 bp, Artificial Sequence
  Description of Artificial Sequence: Synthetic oligonucleotide
gcgacgccgcctatgcagaat

SEQ ID NO: 15066 - DNA, 21 bp, Artificial Sequence
  Description of Artificial Sequence: Synthetic oligonucleotide
gctacgcctagtgctgcgatt

SEQ ID NO: 15067 - DNA, 21 bp, Artificial Sequence
  Description of Artificial Sequence: Synthetic oligonucleotide
gcgactcctactcttagtgct

SEQ ID NO: 15068 - DNA, 21 bp, Artificial Sequence
  Description of Artificial Sequence: Synthetic oligonucleotide
gcgacgcctgttccgcatccg

SEQ ID NO: 15069 - DNA, 21 bp, Artificial Sequence
  Description of Artificial Sequence: Synthetic oligonucleotide
gctactcagaatctgcctcct

SEQ ID NO: 15070 - DNA, 21 bp, Artificial Sequence
  Description of Artificial Sequence: Synthetic oligonucleotide
gcgacgcagcggattgtgtat

SEQ ID NO: 15071 - DNA, 21 bp, Artificial Sequence
  Description of Artificial Sequence: Synthetic oligonucleotide
gcgactcagtatggtatgaat

SEQ ID NO: 15072 - DNA, 21 bp, Artificial Sequence
  Description of Artificial Sequence: Synthetic oligonucleotide
gcgacgcgtgcggagtcgagt

SEQ ID NO: 15073 - DNA, 21 bp, Artificial Sequence
  Description of Artificial Sequence: Synthetic oligonucleotide
gctacgcggcttcctgattct

SEQ ID NO: 15074 - DNA, 21 bp, Artificial Sequence
  Description of Artificial Sequence: Synthetic oligonucleotide
gctactcggcttactgagaag

SEQ ID NO: 15075 - DNA, 21 bp, Artificial Sequence
  Description of Artificial Sequence: Synthetic oligonucleotide
gctactcggccgcaggctgat

SEQ ID NO: 15076 - DNA, 21 bp, Artificial Sequence
  Description of Artificial Sequence: Synthetic oligonucleotide
gctactcgtacttcgcttgag

SEQ ID NO: 15077 - DNA, 21 bp, Artificial Sequence
  Description of Artificial Sequence: Synthetic oligonucleotide
gctactagtattacgaagtcg

SEQ ID NO: 15078 - DNA, 21 bp, Artificial Sequence
  Description of Artificial Sequence: Synthetic oligonucleotide
gctacgtctcagatgaatttt

SEQ ID NO: 15079 - DNA, 21 bp, Artificial Sequence
  Description of Artificial Sequence: Synthetic oligonucleotide
gctacgtcgactttgaatctt

SEQ ID NO: 15080 - DNA, 21 bp, Artificial Sequence
  Description of Artificial Sequence: Synthetic oligonucleotide
gctacttctactatgactact

SEQ ID NO: 15081 - DNA, 21 bp, Artificial Sequence
  Description of Artificial Sequence: Synthetic oligonucleotide
gctacttcgactgtgtttagg

SEQ ID NO: 15082 - DNA, 21 bp, Artificial Sequence
  Description of Artificial Sequence: Synthetic oligonucleotide
gctactacggctggtagtaat

SEQ ID NO: 15083 - DNA, 21 bp, Artificial Sequence
  Description of Artificial Sequence: Synthetic oligonucleotide
gcgacgactgcgatgggtgag

SEQ ID NO: 15084 - DNA, 21 bp, Artificial Sequence
  Description of Artificial Sequence: Synthetic oligonucleotide
gcgacgactggtcctccttgt

SEQ ID NO: 15085 - DNA, 21 bp, Artificial Sequence
  Description of Artificial Sequence: Synthetic oligonucleotide
gctactactaaggatactact

SEQ ID NO: 15086 - DNA, 21 bp, Artificial Sequence
  Description of Artificial Sequence: Synthetic oligonucleotide
gcgacgactttgattcggccg

SEQ ID NO: 15087 - DNA, 21 bp, Artificial Sequence
  Description of Artificial Sequence: Synthetic oligonucleotide
gctacgacttcgcggtcttct

SEQ ID NO: 15088 - DNA, 21 bp, Artificial Sequence
  Description of Artificial Sequence: Synthetic oligonucleotide
gctactactgttgctagtcgt

SEQ ID NO: 15089 - DNA, 21 bp, Artificial Sequence
  Description of Artificial Sequence: Synthetic oligonucleotide
gctactgttatgccgacggct

SEQ ID NO: 15090 - DNA, 21 bp, Artificial Sequence
  Description of Artificial Sequence: Synthetic oligonucleotide
gcgacggtgatgactttgccg

SEQ ID NO: 15091 - DNA, 21 bp, Artificial Sequence
  Description of Artificial Sequence: Synthetic oligonucleotide
gctactgttaatcctgcggtg

SEQ ID NO: 15092 - DNA, 21 bp, Artificial Sequence
  Description of Artificial Sequence: Synthetic oligonucleotide
gctacggtgccgcagcgtact

SEQ ID NO: 15093 - DNA, 21 bp, Artificial Sequence
  Description of Artificial Sequence: Synthetic oligonucleotide
gctactgttcgtactatgttg

SEQ ID NO: 15094 - DNA, 21 bp, Artificial Sequence
  Description of Artificial Sequence: Synthetic oligonucleotide
gcgacggtgtctgatactctt

SEQ ID NO: 15095 - DNA, 21 bp, Artificial Sequence
  Description of Artificial Sequence: Synthetic oligonucleotide
gctacggtttcgtctctgacg

SEQ ID NO: 15096 - DNA, 21 bp, Artificial Sequence
  Description of Artificial Sequence: Synthetic oligonucleotide
gcgacgtggccgtataaggag

SEQ ID NO: 15097 - DNA, 21 bp, Artificial Sequence
  Description of Artificial Sequence: Synthetic oligonucleotide
gcgacttatgcgcgtaatgag

SEQ ID NO: 15098 - DNA, 21 bp, Artificial Sequence
  Description of Artificial Sequence: Synthetic oligonucleotide
gcgacgtatacggctactgct

SEQ ID NO: 15099 - DNA, 21 bp, Artificial Sequence
  Description of Artificial Sequence: Synthetic oligonucleotide
gcggtggcgggtactttgcgt

SEQ ID NO: 15100 - DNA, 21 bp, Artificial Sequence
  Description of Artificial Sequence: Synthetic oligonucleotide
gctgttgcgcttaatacgacg

SEQ ID NO: 15101 - DNA, 21 bp, Artificial Sequence
  Description of Artificial Sequence: Synthetic oligonucleotide
gcggttgcgcagatggggatt

SEQ ID NO: 15102 - DNA, 21 bp, Artificial Sequence
  Description of Artificial Sequence: Synthetic oligonucleotide
gctgttgcggttgattttgtt

SEQ ID NO: 15103 - DNA, 21 bp, Artificial Sequence
  Description of Artificial Sequence: Synthetic oligonucleotide
gctgttgatcatgagggtttg

SEQ ID NO: 15104 - DNA, 21 bp, Artificial Sequence
  Description of Artificial Sequence: Synthetic oligonucleotide
gcggtggatccgggtaatccg

SEQ ID NO: 15105 - DNA, 21 bp, Artificial Sequence
  Description of Artificial Sequence: Synthetic oligonucleotide
gctgtggatcggtcggagatt

SEQ ID NO: 15106 - DNA, 21 bp, Artificial Sequence
  Description of Artificial Sequence: Synthetic oligonucleotide
gctgtggagtgtatgcctccg

SEQ ID NO: 15107 - DNA, 21 bp, Artificial Sequence
  Description of Artificial Sequence: Synthetic oligonucleotide
gcggttgagccgatgtgggag

SEQ ID NO: 15108 - DNA, 21 bp, Artificial Sequence
  Description of Artificial Sequence: Synthetic oligonucleotide
gctgttgagacgggttatacg

SEQ ID NO: 15109 - DNA, 21 bp, Artificial Sequence
  Description of Artificial Sequence: Synthetic oligonucleotide
gctgtgtttgctcggcttccg

SEQ ID NO: 15110 - DNA, 21 bp, Artificial Sequence
  Description of Artificial Sequence: Synthetic oligonucleotide
gctgtgggtgagtctgaggtg

SEQ ID NO: 15111 - DNA, 21 bp, Artificial Sequence
  Description of Artificial Sequence: Synthetic oligonucleotide
gctgttgggaattcgctgtat

SEQ ID NO: 15112 - DNA, 21 bp, Artificial Sequence
  Description of Artificial Sequence: Synthetic oligonucleotide
gctgtggggcagaatatgcgg

SEQ ID NO: 15113 - DNA, 21 bp, Artificial Sequence
  Description of Artificial Sequence: Synthetic oligonucleotide
gctgtgcataagatggatatg

SEQ ID NO: 15114 - DNA, 21 bp, Artificial Sequence
  Description of Artificial Sequence: Synthetic oligonucleotide
gcggtgcatcagctgacgctt

SEQ ID NO: 15115 - DNA, 21 bp, Artificial Sequence
  Description of Artificial Sequence: Synthetic oligonucleotide
gctgtgcatcgtgagaatgtt

SEQ ID NO: 15116 - DNA, 21 bp, Artificial Sequence
  Description of Artificial Sequence: Synthetic oligonucleotide
gctgtgattggggggatgact

SEQ ID NO: 15117 - DNA, 21 bp, Artificial Sequence
  Description of Artificial Sequence: Synthetic oligonucleotide
gctgtgaaggggatgcctctt

SEQ ID NO: 15118 - DNA, 21 bp, Artificial Sequence
  Description of Artificial Sequence: Synthetic oligonucleotide
gcggtgaagcagttgattgtt

SEQ ID NO: 15119 - DNA, 21 bp, Artificial Sequence
  Description of Artificial Sequence: Synthetic oligonucleotide
gctgttcttcatactctgggg

SEQ ID NO: 15120 - DNA, 21 bp, Artificial Sequence
  Description of Artificial Sequence: Synthetic oligonucleotide
gctgtgttgaagaatcgggat

SEQ ID NO: 15121 - DNA, 21 bp, Artificial Sequence
  Description of Artificial Sequence: Synthetic oligonucleotide
gctgtgcttaataaggaggat

SEQ ID NO: 15122 - DNA, 21 bp, Artificial Sequence
  Description of Artificial Sequence: Synthetic oligonucleotide
gctgttcttaattctgcggat

SEQ ID NO: 15123 - DNA, 21 bp, Artificial Sequence
  Description of Artificial Sequence: Synthetic oligonucleotide
gcggtgcttgttcctcatgcg

SEQ ID NO: 15124 - DNA, 21 bp, Artificial Sequence
  Description of Artificial Sequence: Synthetic oligonucleotide
gctgttcttgtgcgtgaggat

SEQ ID NO: 15125 - DNA, 21 bp, Artificial Sequence
  Description of Artificial Sequence: Synthetic oligonucleotide
gctgtgatgggtcgtagtgag

SEQ ID NO: 15126 - DNA, 21 bp, Artificial Sequence
  Description of Artificial Sequence: Synthetic oligonucleotide
gcggttatgcctcggacgcct

SEQ ID NO: 15127 - DNA, 21 bp, Artificial Sequence
  Description of Artificial Sequence: Synthetic oligonucleotide
gctgttatgcgtattgctcct

SEQ ID NO: 15128 - DNA, 21 bp, Artificial Sequence
  Description of Artificial Sequence: Synthetic oligonucleotide
gcggttaatgctgcgcaggct

SEQ ID NO: 15129 - DNA, 21 bp, Artificial Sequence
  Description of Artificial Sequence: Synthetic oligonucleotide
gctgtgaattttgatgtgatt

SEQ ID NO: 15130 - DNA, 21 bp, Artificial Sequence
  Description of Artificial Sequence: Synthetic oligonucleotide
gcggtgaatcctcctgagctt

SEQ ID NO: 15131 - DNA, 21 bp, Artificial Sequence
  Description of Artificial Sequence: Synthetic oligonucleotide
gctgtgaatcgtgtgcctttg

SEQ ID NO: 15132 - DNA, 21 bp, Artificial Sequence
  Description of Artificial Sequence: Synthetic oligonucleotide
gctgtgcctgggcctaagtct

SEQ ID NO: 15133 - DNA, 21 bp, Artificial Sequence
  Description of Artificial Sequence: Synthetic oligonucleotide
gctgttccgttgcttcttact

SEQ ID NO: 15134 - DNA, 21 bp, Artificial Sequence
  Description of Artificial Sequence: Synthetic oligonucleotide
gcggttcctatgcgttttcct

SEQ ID NO: 15135 - DNA, 21 bp, Artificial Sequence
  Description of Artificial Sequence: Synthetic oligonucleotide
gctgtgcctagtcatgcgcag

SEQ ID NO: 15136 - DNA, 21 bp, Artificial Sequence
  Description of Artificial Sequence: Synthetic oligonucleotide
gctgtgccggtgtctcatgcg

SEQ ID NO: 15137 - DNA, 21 bp, Artificial Sequence
  Description of Artificial Sequence: Synthetic oligonucleotide
gcggtgcagacgcatggtttt

SEQ ID NO: 15138 - DNA, 21 bp, Artificial Sequence
  Description of Artificial Sequence: Synthetic oligonucleotide
gctgttcagacgactgatcat

SEQ ID NO: 15139 - DNA, 21 bp, Artificial Sequence
  Description of Artificial Sequence: Synthetic oligonucleotide
gcggtgcgtgcgtctcagcag

SEQ ID NO: 15140 - DNA, 21 bp, Artificial Sequence
  Description of Artificial Sequence: Synthetic oligonucleotide
gctgtgcgtgcgagtactccg

SEQ ID NO: 15141 - DNA, 21 bp, Artificial Sequence
  Description of Artificial Sequence: Synthetic oligonucleotide
gctgttcgtgattctgtgttg

SEQ ID NO: 15142 - DNA, 21 bp, Artificial Sequence
  Description of Artificial Sequence: Synthetic oligonucleotide
gctgttcggcatcagggtgat

SEQ ID NO: 15143 - DNA, 21 bp, Artificial Sequence
  Description of Artificial Sequence: Synthetic oligonucleotide
gctgttcgtttgaagatggag

SEQ ID NO: 15144 - DNA, 21 bp, Artificial Sequence
  Description of Artificial Sequence: Synthetic oligonucleotide
gctgtgcgtccgcctccgcct

SEQ ID NO: 15145 - DNA, 21 bp, Artificial Sequence
  Description of Artificial Sequence: Synthetic oligonucleotide
gctgttcgtcgtgatgatgct

SEQ ID NO: 15146 - DNA, 21 bp, Artificial Sequence
  Description of Artificial Sequence: Synthetic oligonucleotide
gcggttcggtctctgactgtg

SEQ ID NO: 15147 - DNA, 21 bp, Artificial Sequence
  Description of Artificial Sequence: Synthetic oligonucleotide
gctgtgcgtactaatccgttg

SEQ ID NO: 15148 - DNA, 21 bp, Artificial Sequence
  Description of Artificial Sequence: Synthetic oligonucleotide
gctgtttctggtcattcgctg

SEQ ID NO: 15149 - DNA, 21 bp, Artificial Sequence
  Description of Artificial Sequence: Synthetic oligonucleotide
gcggtgtcgcatgcgagtgat

SEQ ID NO: 15150 - DNA, 21 bp, Artificial Sequence
  Description of Artificial Sequence: Synthetic oligonucleotide
gcggtttcgccttattctttg

SEQ ID NO: 15151 - DNA, 21 bp, Artificial Sequence
  Description of Artificial Sequence: Synthetic oligonucleotide
gctgtgagtcgggcggggggt

SEQ ID NO: 15152 - DNA, 21 bp, Artificial Sequence
  Description of Artificial Sequence: Synthetic oligonucleotide
gcggtgtctcgtccgaattcg

SEQ ID NO: 15153 - DNA, 21 bp, Artificial Sequence
  Description of Artificial Sequence: Synthetic oligonucleotide
gctgttacgaattctatgatt

SEQ ID NO: 15154 - DNA, 21 bp, Artificial Sequence
  Description of Artificial Sequence: Synthetic oligonucleotide
gctgttacgcctttgcctctt

SEQ ID NO: 15155 - DNA, 21 bp, Artificial Sequence
  Description of Artificial Sequence: Synthetic oligonucleotide
gcggttactagtggttttcgt

SEQ ID NO: 15156 - DNA, 21 bp, Artificial Sequence
  Description of Artificial Sequence: Synthetic oligonucleotide
gctgtgactgttaatgcgtat

SEQ ID NO: 15157 - DNA, 21 bp, Artificial Sequence
  Description of Artificial Sequence: Synthetic oligonucleotide
gctgttgtgggggcgattctg

SEQ ID NO: 15158 - DNA, 21 bp, Artificial Sequence
  Description of Artificial Sequence: Synthetic oligonucleotide
gcggtggttcggaatcagtct

SEQ ID NO: 15159 - DNA, 21 bp, Artificial Sequence
  Description of Artificial Sequence: Synthetic oligonucleotide
gctgtttataatgatgtttgt

SEQ ID NO: 15160 - DNA, 21 bp, Artificial Sequence
  Description of Artificial Sequence: Synthetic oligonucleotide
gctgtgtatagtagtgagccg

SEQ ID NO: 15161 - DNA, 21 bp, Artificial Sequence
  Description of Artificial Sequence: Synthetic oligonucleotide
gcttggaatccgaatgagaag

SEQ ID NO: 15162 - DNA, 21 bp, Artificial Sequence
  Description of Artificial Sequence: Synthetic oligonucleotide
gcttggccgaatagtcttaag

SEQ ID NO: 15163 - DNA, 21 bp, Artificial Sequence
  Description of Artificial Sequence: Synthetic oligonucleotide
gcgtggacgcagcaggggcct

SEQ ID NO: 15164 - DNA, 21 bp, Artificial Sequence
  Description of Artificial Sequence: Synthetic oligonucleotide
gcttatgctattctggaggcg

SEQ ID NO: 15165 - DNA, 21 bp, Artificial Sequence
  Description of Artificial Sequence: Synthetic oligonucleotide
gcttatgcgaaggctattgct

SEQ ID NO: 15166 - DNA, 21 bp, Artificial Sequence
  Description of Artificial Sequence: Synthetic oligonucleotide
gcttatgataagtcgctggtt

SEQ ID NO: 15167 - DNA, 21 bp, Artificial Sequence
  Description of Artificial Sequence: Synthetic oligonucleotide
gcgtatgatagggctttttcg

SEQ ID NO: 15168 - DNA, 21 bp, Artificial Sequence
  Description of Artificial Sequence: Synthetic oligonucleotide
gcttatgattctgctccttat

SEQ ID NO: 15169 - DNA, 21 bp, Artificial Sequence
  Description of Artificial Sequence: Synthetic oligonucleotide
gcttatgattcgcgggctgct

SEQ ID NO: 15170 - DNA, 21 bp, Artificial Sequence
  Description of Artificial Sequence: Synthetic oligonucleotide
gcgtatgaggcgaggacgcat

SEQ ID NO: 15171 - DNA, 21 bp, Artificial Sequence
  Description of Artificial Sequence: Synthetic oligonucleotide
gcgtatgagggtactctgagt

SEQ ID NO: 15172 - DNA, 21 bp, Artificial Sequence
  Description of Artificial Sequence: Synthetic oligonucleotide
gcttatgagccgatttctaag

SEQ ID NO: 15173 - DNA, 21 bp, Artificial Sequence
  Description of Artificial Sequence: Synthetic oligonucleotide
gcttattttgaggttcagcct

SEQ ID NO: 15174 - DNA, 21 bp, Artificial Sequence
  Description of Artificial Sequence: Synthetic oligonucleotide
gcgtatggggggccgagtgct

SEQ ID NO: 15175 - DNA, 21 bp, Artificial Sequence
  Description of Artificial Sequence: Synthetic oligonucleotide
gcttatggtgttacggagaag

SEQ ID NO: 15176 - DNA, 21 bp, Artificial Sequence
  Description of Artificial Sequence: Synthetic oligonucleotide
gcttatcatgagaagggggct

SEQ ID NO: 15177 - DNA, 21 bp, Artificial Sequence
  Description of Artificial Sequence: Synthetic oligonucleotide
gcttatcatagggcggatgct

SEQ ID NO: 15178 - DNA, 21 bp, Artificial Sequence
  Description of Artificial Sequence: Synthetic oligonucleotide
gcgtatcatgtgcgggttgat

SEQ ID NO: 15179 - DNA, 21 bp, Artificial Sequence
  Description of Artificial Sequence: Synthetic oligonucleotide
gcttatattcagggtagtctt

SEQ ID NO: 15180 - DNA, 21 bp, Artificial Sequence
  Description of Artificial Sequence: Synthetic oligonucleotide
gcgtataagcagcagatgtct

SEQ ID NO: 15181 - DNA, 21 bp, Artificial Sequence
  Description of Artificial Sequence: Synthetic oligonucleotide
gcgtatatgccgagtgcttat

SEQ ID NO: 15182 - DNA, 21 bp, Artificial Sequence
  Description of Artificial Sequence: Synthetic oligonucleotide
gcgtataatgggactaggcct

SEQ ID NO: 15183 - DNA, 21 bp, Artificial Sequence
  Description of Artificial Sequence: Synthetic oligonucleotide
gcttataatcagcctggtgcg

SEQ ID NO: 15184 - DNA, 21 bp, Artificial Sequence
  Description of Artificial Sequence: Synthetic oligonucleotide
gcgtataatacgacgaagcag

SEQ ID NO: 15185 - DNA, 21 bp, Artificial Sequence
  Description of Artificial Sequence: Synthetic oligonucleotide
gcgtatccgtttaaggagcat

SEQ ID NO: 15186 - DNA, 21 bp, Artificial Sequence
  Description of Artificial Sequence: Synthetic oligonucleotide
gcttatccgcgtgagtcgggt

SEQ ID NO: 15187 - DNA, 21 bp, Artificial Sequence
  Description of Artificial Sequence: Synthetic oligonucleotide
gcgtatccttctaatgcgtcg

SEQ ID NO: 15188 - DNA, 21 bp, Artificial Sequence
  Description of Artificial Sequence: Synthetic oligonucleotide
gcgtatccttcgagtcagttt

SEQ ID NO: 15189 - DNA, 21 bp, Artificial Sequence
  Description of Artificial Sequence: Synthetic oligonucleotide
gcgtatccgacttcttttgct

SEQ ID NO: 15190 - DNA, 21 bp, Artificial Sequence
  Description of Artificial Sequence: Synthetic oligonucleotide
gcttatcgggcttcgagtgag

SEQ ID NO: 15191 - DNA, 21 bp, Artificial Sequence
  Description of Artificial Sequence: Synthetic oligonucleotide
gcttatcgggattctacgact

SEQ ID NO: 15192 - DNA, 21 bp, Artificial Sequence
  Description of Artificial Sequence: Synthetic oligonucleotide
gcttatcgtggttcgacgact

SEQ ID NO: 15193 - DNA, 21 bp, Artificial Sequence
  Description of Artificial Sequence: Synthetic oligonucleotide
gcttattctgatagtcagcgg

SEQ ID NO: 15194 - DNA, 21 bp, Artificial Sequence
  Description of Artificial Sequence: Synthetic oligonucleotide
gcttattcgaagtctgctgat

SEQ ID NO: 15195 - DNA, 21 bp, Artificial Sequence
  Description of Artificial Sequence: Synthetic oligonucleotide
gcgtattcgaatcgtacgatg

SEQ ID NO: 15196 - DNA, 21 bp, Artificial Sequence
  Description of Artificial Sequence: Synthetic oligonucleotide
gcgtattctccgactcggaat

SEQ ID NO: 15197 - DNA, 21 bp, Artificial Sequence
  Description of Artificial Sequence: Synthetic oligonucleotide
gcgtatgttggtacgactccg

SEQ ID NO: 15198 - DNA, 21 bp, Artificial Sequence
  Description of Artificial Sequence: Synthetic oligonucleotide
gcttatgttaatacgcctcct

SEQ ID NO: 15199 - DNA, 21 bp, Artificial Sequence
  Description of Artificial Sequence: Synthetic oligonucleotide
gcgtatgttacgccgtcgtcg

SEQ ID NO: 15200 - DNA, 21 bp, Artificial Sequence
  Description of Artificial Sequence: Synthetic oligonucleotide
tgtgcggctaggtctacggct

SEQ ID NO: 15201 - DNA, 21 bp, Artificial Sequence
  Description of Artificial Sequence: Synthetic oligonucleotide
tgtgcggcgtctcagtcggag

SEQ ID NO: 15202 - DNA, 21 bp, Artificial Sequence
  Description of Artificial Sequence: Synthetic oligonucleotide
tgtgctaagacgactgctaat

SEQ ID NO: 15203 - DNA, 21 bp, Artificial Sequence
  Description of Artificial Sequence: Synthetic oligonucleotide
tgtgctttgggggcgtcttat

SEQ ID NO: 15204 - DNA, 21 bp, Artificial Sequence
  Description of Artificial Sequence: Synthetic oligonucleotide
tgtgcgccgcttaggcctttg

SEQ ID NO: 15205 - DNA, 21 bp, Artificial Sequence
  Description of Artificial Sequence: Synthetic oligonucleotide
tgtgctagggatactcatccg

SEQ ID NO: 15206 - DNA, 21 bp, Artificial Sequence
  Description of Artificial Sequence: Synthetic oligonucleotide
tgtgctaggatgaaggaggtt

SEQ ID NO: 15207 - DNA, 21 bp, Artificial Sequence
  Description of Artificial Sequence: Synthetic oligonucleotide
tgtgcgcggagttttgaggtt

SEQ ID NO: 15208 - DNA, 21 bp, Artificial Sequence
  Description of Artificial Sequence: Synthetic oligonucleotide
tgtgctgtgtttcagacgggt

SEQ ID NO: 15209 - DNA, 21 bp, Artificial Sequence
  Description of Artificial Sequence: Synthetic oligonucleotide
tgtgctgtgggtgttaggtcg

SEQ ID NO: 15210 - DNA, 21 bp, Artificial Sequence
  Description of Artificial Sequence: Synthetic oligonucleotide
tgttgtgcgccgggtttgagt

SEQ ID NO: 15211 - DNA, 21 bp, Artificial Sequence
  Description of Artificial Sequence: Synthetic oligonucleotide
tgtgatgcgcttaatcttgcg

SEQ ID NO: 15212 - DNA, 21 bp, Artificial Sequence
  Description of Artificial Sequence: Synthetic oligonucleotide
tgtgattcgagtaattcgtcg

SEQ ID NO: 15213 - DNA, 21 bp, Artificial Sequence
  Description of Artificial Sequence: Synthetic oligonucleotide
tgtgaggcttcttcgaaggtt

SEQ ID NO: 15214 - DNA, 21 bp, Artificial Sequence
  Description of Artificial Sequence: Synthetic oligonucleotide
tgtgagaagctggtgcgtgtg

SEQ ID NO: 15215 - DNA, 21 bp, Artificial Sequence
  Description of Artificial Sequence: Synthetic oligonucleotide
tgtgagatggaggcgacgttg

SEQ ID NO: 15216 - DNA, 21 bp, Artificial Sequence
  Description of Artificial Sequence: Synthetic oligonucleotide
tgtgagccgtgtcaggagctt

SEQ ID NO: 15217 - DNA, 21 bp, Artificial Sequence
  Description of Artificial Sequence: Synthetic oligonucleotide
tgtgagccttatgagaggtct

SEQ ID NO: 15218 - DNA, 21 bp, Artificial Sequence
  Description of Artificial Sequence: Synthetic oligonucleotide
tgtgagactattacgttggcg

SEQ ID NO: 15219 - DNA, 21 bp, Artificial Sequence
  Description of Artificial Sequence: Synthetic oligonucleotide
tgtgagacttggcagatgcat

SEQ ID NO: 15220 - DNA, 21 bp, Artificial Sequence
  Description of Artificial Sequence: Synthetic oligonucleotide
tgtgaggttgagaagaaggag

SEQ ID NO: 15221 - DNA, 21 bp, Artificial Sequence
  Description of Artificial Sequence: Synthetic oligonucleotide
tgtgaggtgggggcgccttct

SEQ ID NO: 15222 - DNA, 21 bp, Artificial Sequence
  Description of Artificial Sequence: Synthetic oligonucleotide
tgttttcctaagacggtgagt

SEQ ID NO: 15223 - DNA, 21 bp, Artificial Sequence
  Description of Artificial Sequence: Synthetic oligonucleotide
tgttttacgtctgagcgtggg

SEQ ID NO: 15224 - DNA, 21 bp, Artificial Sequence
  Description of Artificial Sequence: Synthetic oligonucleotide
tgtggtttggttatttgtgat

SEQ ID NO: 15225 - DNA, 21 bp, Artificial Sequence
  Description of Artificial Sequence: Synthetic oligonucleotide
tgtggtatgcggcagagttct

SEQ ID NO: 15226 - DNA, 21 bp, Artificial Sequence
  Description of Artificial Sequence: Synthetic oligonucleotide
tgtgggaatcatgaggcgtcg

SEQ ID NO: 15227 - DNA, 21 bp, Artificial Sequence
  Description of Artificial Sequence: Synthetic oligonucleotide
tgtgggtcttttattacgcat

SEQ ID NO: 15228 - DNA, 21 bp, Artificial Sequence
  Description of Artificial Sequence: Synthetic oligonucleotide
tgtcatccgaagatggagttt

SEQ ID NO: 15229 - DNA, 21 bp, Artificial Sequence
  Description of Artificial Sequence: Synthetic oligonucleotide
tgtcatacggcgtcttgttcg

SEQ ID NO: 15230 - DNA, 21 bp, Artificial Sequence
  Description of Artificial Sequence: Synthetic oligonucleotide
tgtattgctaggcctgagtgt

SEQ ID NO: 15231 - DNA, 21 bp, Artificial Sequence
  Description of Artificial Sequence: Synthetic oligonucleotide
tgtattcagtcgagtctgcat

SEQ ID NO: 15232 - DNA, 21 bp, Artificial Sequence
  Description of Artificial Sequence: Synthetic oligonucleotide
tgtattgttgttgagactgtg

SEQ ID NO: 15233 - DNA, 21 bp, Artificial Sequence
  Description of Artificial Sequence: Synthetic oligonucleotide
tgtaaggaggttccgcgtgcg

SEQ ID NO: 15234 - DNA, 21 bp, Artificial Sequence
  Description of Artificial Sequence: Synthetic oligonucleotide
tgtaaggggactcataattat

SEQ ID NO: 15235 - DNA, 21 bp, Artificial Sequence
  Description of Artificial Sequence: Synthetic oligonucleotide
tgtaagcatgggactcctatg

SEQ ID NO: 15236 - DNA, 21 bp, Artificial Sequence
  Description of Artificial Sequence: Synthetic oligonucleotide
tgtaagtcgaatagtacttgt

SEQ ID NO: 15237 - DNA, 21 bp, Artificial Sequence
  Description of Artificial Sequence: Synthetic oligonucleotide
tgtaagtcgtcgattgggtct

SEQ ID NO: 15238 - DNA, 21 bp, Artificial Sequence
  Description of Artificial Sequence: Synthetic oligonucleotide
tgtttggaggattgtatgcgg

SEQ ID NO: 15239 - DNA, 21 bp, Artificial Sequence
  Description of Artificial Sequence: Synthetic oligonucleotide
tgtttggagattcctatttcg

SEQ ID NO: 15240 - DNA, 21 bp, Artificial Sequence
  Description of Artificial Sequence: Synthetic oligonucleotide
tgtttggagtcggatcgtccg

SEQ ID NO: 15241 - DNA, 21 bp, Artificial Sequence
  Description of Artificial Sequence: Synthetic oligonucleotide
tgtcttgggactcatatgctt

SEQ ID NO: 15242 - DNA, 21 bp, Artificial Sequence
  Description of Artificial Sequence: Synthetic oligonucleotide
tgtttgcctgctgatagtgag

SEQ ID NO: 15243 - DNA, 21 bp, Artificial Sequence
  Description of Artificial Sequence: Synthetic oligonucleotide
tgtttgcagactgggttgacg

SEQ ID NO: 15244 - DNA, 21 bp, Artificial Sequence
  Description of Artificial Sequence: Synthetic oligonucleotide
tgtttgcgtacttctgttcct

SEQ ID NO: 15245 - DNA, 21 bp, Artificial Sequence
  Description of Artificial Sequence: Synthetic oligonucleotide
tgtctttcgagtggttctgtg

SEQ ID NO: 15246 - DNA, 21 bp, Artificial Sequence
  Description of Artificial Sequence: Synthetic oligonucleotide
tgtatggctgagcttatggat

SEQ ID NO: 15247 - DNA, 21 bp, Artificial Sequence
  Description of Artificial Sequence: Synthetic oligonucleotide
tgtatggctgagcttagggat

SEQ ID NO: 15248 - DNA, 21 bp, Artificial Sequence
  Description of Artificial Sequence: Synthetic oligonucleotide
tgtatgcctaggacgtgtgag

SEQ ID NO: 15249 - DNA, 21 bp, Artificial Sequence
  Description of Artificial Sequence: Synthetic oligonucleotide
tgtatgacgattccgaatgct

SEQ ID NO: 15250 - DNA, 21 bp, Artificial Sequence
  Description of Artificial Sequence: Synthetic oligonucleotide
tgtaatgcgtcttgtgggagg

SEQ ID NO: 15251 - DNA, 21 bp, Artificial Sequence
  Description of Artificial Sequence: Synthetic oligonucleotide
tgtaatgagattactgagcct

SEQ ID NO: 15252 - DNA, 21 bp, Artificial Sequence
  Description of Artificial Sequence: Synthetic oligonucleotide
tgtaatcctaagactagtagt

SEQ ID NO: 15253 - DNA, 21 bp, Artificial Sequence
  Description of Artificial Sequence: Synthetic oligonucleotide
tgtaatagttctagttgtacg

SEQ ID NO: 15254 - DNA, 21 bp, Artificial Sequence
  Description of Artificial Sequence: Synthetic oligonucleotide
tgtccggctgagaatcagttg

SEQ ID NO: 15255 - DNA, 21 bp, Artificial Sequence
  Description of Artificial Sequence: Synthetic oligonucleotide
tgtccggctaagtcgtgtggt

SEQ ID NO: 15256 - DNA, 21 bp, Artificial Sequence
  Description of Artificial Sequence: Synthetic oligonucleotide
tgtcctgatcggtatcagtgt

SEQ ID NO: 15257 - DNA, 21 bp, Artificial Sequence
  Description of Artificial Sequence: Synthetic oligonucleotide
tgtccgctggctccgtatagt

SEQ ID NO: 15258 - DNA, 21 bp, Artificial Sequence
  Description of Artificial Sequence: Synthetic oligonucleotide
tgtccgctggattcgacgatt

SEQ ID NO: 15259 - DNA, 21 bp, Artificial Sequence
  Description of Artificial Sequence: Synthetic oligonucleotide
tgtccgttgggtgatcggcat

SEQ ID NO: 15260 - DNA, 21 bp, Artificial Sequence
  Description of Artificial Sequence: Synthetic oligonucleotide
tgtcctatggtgtgttctgcg

SEQ ID NO: 15261 - DNA, 21 bp, Artificial Sequence
  Description of Artificial Sequence: Synthetic oligonucleotide
tgtccgccgcagcctttgccg

SEQ ID NO: 15262 - DNA, 21 bp, Artificial Sequence
  Description of Artificial Sequence: Synthetic oligonucleotide
tgtccgcgtacggggcttaat

SEQ ID NO: 15263 - DNA, 21 bp, Artificial Sequence
  Description of Artificial Sequence: Synthetic oligonucleotide
tgtccttctgagcggatgggg

SEQ ID NO: 15264 - DNA, 21 bp, Artificial Sequence
  Description of Artificial Sequence: Synthetic oligonucleotide
tgtccgtcgattctgcattgt

SEQ ID NO: 15265 - DNA, 21 bp, Artificial Sequence
  Description of Artificial Sequence: Synthetic oligonucleotide
tgtccttctcgtgcgccgtgt

SEQ ID NO: 15266 - DNA, 21 bp, Artificial Sequence
  Description of Artificial Sequence: Synthetic oligonucleotide
tgtccgacgccttcttcttgt

SEQ ID NO: 15267 - DNA, 21 bp, Artificial Sequence
  Description of Artificial Sequence: Synthetic oligonucleotide
tgtcctacgacgaagtctgcg

SEQ ID NO: 15268 - DNA, 21 bp, Artificial Sequence
  Description of Artificial Sequence: Synthetic oligonucleotide
tgtcaggctcggtcttgtatt

SEQ ID NO: 15269 - DNA, 21 bp, Artificial Sequence
  Description of Artificial Sequence: Synthetic oligonucleotide
tgtagggcgtcttcgtcgccg

SEQ ID NO: 15270 - DNA, 21 bp, Artificial Sequence
  Description of Artificial Sequence: Synthetic oligonucleotide
tgtcgtgcggttgagaggcct

SEQ ID NO: 15271 - DNA, 21 bp, Artificial Sequence
  Description of Artificial Sequence: Synthetic oligonucleotide
tgtcggatgatgaatcggcct

SEQ ID NO: 15272 - DNA, 21 bp, Artificial Sequence
  Description of Artificial Sequence: Synthetic oligonucleotide
tgtcgtatgaatgatctggtg

SEQ ID NO: 15273 - DNA, 21 bp, Artificial Sequence
  Description of Artificial Sequence: Synthetic oligonucleotide
tgtaggaggacgatggatatg

SEQ ID NO: 15274 - DNA, 21 bp, Artificial Sequence
  Description of Artificial Sequence: Synthetic oligonucleotide
tgtcgttcggagaataagctg

SEQ ID NO: 15275 - DNA, 21 bp, Artificial Sequence
  Description of Artificial Sequence: Synthetic oligonucleotide
tgtcgttctgggggtgaggcg

SEQ ID NO: 15276 - DNA, 21 bp, Artificial Sequence
  Description of Artificial Sequence: Synthetic oligonucleotide
tgttctgctttgcataagtgt

SEQ ID NO: 15277 - DNA, 21 bp, Artificial Sequence
  Description of Artificial Sequence: Synthetic oligonucleotide
tgtagtgctaattttacgggt

SEQ ID NO: 15278 - DNA, 21 bp, Artificial Sequence
  Description of Artificial Sequence: Synthetic oligonucleotide
tgtagtgagtcgctgatggct

SEQ ID NO: 15279 - DNA, 21 bp, Artificial Sequence
  Description of Artificial Sequence: Synthetic oligonucleotide
tgttctgagtcttctattttt

SEQ ID NO: 15280 - DNA, 21 bp, Artificial Sequence
  Description of Artificial Sequence: Synthetic oligonucleotide
tgtagtggtacgactaattgt

SEQ ID NO: 15281 - DNA, 21 bp, Artificial Sequence
  Description of Artificial Sequence: Synthetic oligonucleotide
tgttcgccgccgcattttccg

SEQ ID NO: 15282 - DNA, 21 bp, Artificial Sequence
  Description of Artificial Sequence: Synthetic oligonucleotide
tgtagtccttcgggggttatt

SEQ ID NO: 15283 - DNA, 21 bp, Artificial Sequence
  Description of Artificial Sequence: Synthetic oligonucleotide
tgttcttctaggccgtttgct

SEQ ID NO: 15284 - DNA, 21 bp, Artificial Sequence
  Description of Artificial Sequence: Synthetic oligonucleotide
tgtagttctacgacgaagtgt

SEQ ID NO: 15285 - DNA, 21 bp, Artificial Sequence
  Description of Artificial Sequence: Synthetic oligonucleotide
tgtactgcggagttgcctttt

SEQ ID NO: 15286 - DNA, 21 bp, Artificial Sequence
  Description of Artificial Sequence: Synthetic oligonucleotide
tgtacggatcatcctgcgtgt

SEQ ID NO: 15287 - DNA, 21 bp, Artificial Sequence
  Description of Artificial Sequence: Synthetic oligonucleotide
tgtactgattctacgtgtttg

SEQ ID NO: 15288 - DNA, 21 bp, Artificial Sequence
  Description of Artificial Sequence: Synthetic oligonucleotide
tgtacgggtcctttgtgttcg

SEQ ID NO: 15289 - DNA, 21 bp, Artificial Sequence
  Description of Artificial Sequence: Synthetic oligonucleotide
tgtacgaagtcgatttgtact

SEQ ID NO: 15290 - DNA, 21 bp, Artificial Sequence
  Description of Artificial Sequence: Synthetic oligonucleotide
tgtactagtacgaagatttat

SEQ ID NO: 15291 - DNA, 21 bp, Artificial Sequence
  Description of Artificial Sequence: Synthetic oligonucleotide
tgtacgacggatgctttgagt

SEQ ID NO: 15292 - DNA, 21 bp, Artificial Sequence
  Description of Artificial Sequence: Synthetic oligonucleotide
tgtacttatactcttattgat

SEQ ID NO: 15293 - DNA, 21 bp, Artificial Sequence
  Description of Artificial Sequence: Synthetic oligonucleotide
tgtgttcctgattcgtctaag

SEQ ID NO: 15294 - DNA, 21 bp, Artificial Sequence
  Description of Artificial Sequence: Synthetic oligonucleotide
tgtgtgaggctgacgacgcct

SEQ ID NO: 15295 - DNA, 21 bp, Artificial Sequence
  Description of Artificial Sequence: Synthetic oligonucleotide
tgtgttactcctgagaaggtg

SEQ ID NO: 15296 - DNA, 21 bp, Artificial Sequence
  Description of Artificial Sequence: Synthetic oligonucleotide
tgtgttgtgaatcagcagggt

SEQ ID NO: 15297 - DNA, 21 bp, Artificial Sequence
  Description of Artificial Sequence: Synthetic oligonucleotide
tgtgtggtgagtcggcaggat

SEQ ID NO: 15298 - DNA, 21 bp, Artificial Sequence
  Description of Artificial Sequence: Synthetic oligonucleotide
tgttatattgggactcagtgt

SEQ ID NO: 15299 - DNA, 21 bp, Artificial Sequence
  Description of Artificial Sequence: Synthetic oligonucleotide
tgttatcttagtacgtgtacg

SEQ ID NO: 15300 - DNA, 21 bp, Artificial Sequence
  Description of Artificial Sequence: Synthetic oligonucleotide
tgttataatcggacggagtgt

SEQ ID NO: 15301 - DNA, 21 bp, Artificial Sequence
  Description of Artificial Sequence: Synthetic oligonucleotide
tgttatccgcctgagaatgct

SEQ ID NO: 15302 - DNA, 21 bp, Artificial Sequence
  Description of Artificial Sequence: Synthetic oligonucleotide
gatgcggcgggtacgtctaag

SEQ ID NO: 15303 - DNA, 21 bp, Artificial Sequence
  Description of Artificial Sequence: Synthetic oligonucleotide
gatgctgcgaagagtgcttat

SEQ ID NO: 15304 - DNA, 21 bp, Artificial Sequence
  Description of Artificial Sequence: Synthetic oligonucleotide
gatgctgcgactaaggcgact

SEQ ID NO: 15305 - DNA, 21 bp, Artificial Sequence
  Description of Artificial Sequence: Synthetic oligonucleotide
gatgctgagcgtgcgaagccg

SEQ ID NO: 15306 - DNA, 21 bp, Artificial Sequence
  Description of Artificial Sequence: Synthetic oligonucleotide
gatgctgagtggcctatgtat

SEQ ID NO: 15307 - DNA, 21 bp, Artificial Sequence
  Description of Artificial Sequence: Synthetic oligonucleotide
gatgctggtattgggggtcct

SEQ ID NO: 15308 - DNA, 21 bp, Artificial Sequence
  Description of Artificial Sequence: Synthetic oligonucleotide
gatgcggggaattggcagcct

SEQ ID NO: 15309 - DNA, 21 bp, Artificial Sequence
  Description of Artificial Sequence: Synthetic oligonucleotide
gatgcggggcctagggctcag

SEQ ID NO: 15310 - DNA, 21 bp, Artificial Sequence
  Description of Artificial Sequence: Synthetic oligonucleotide
gatgctcataatgctccgcgt

SEQ ID NO: 15311 - DNA, 21 bp, Artificial Sequence
  Description of Artificial Sequence: Synthetic oligonucleotide
gatgctcatcgtttggtgacg

SEQ ID NO: 15312 - DNA, 21 bp, Artificial Sequence
  Description of Artificial Sequence: Synthetic oligonucleotide
gatgctattaaggctatgtcg

SEQ ID NO: 15313 - DNA, 21 bp, Artificial Sequence
  Description of Artificial Sequence: Synthetic oligonucleotide
gatgctattaatatggggggt

SEQ ID NO: 15314 - DNA, 21 bp, Artificial Sequence
  Description of Artificial Sequence: Synthetic oligonucleotide
gatgcgattcctcttgctagt

SEQ ID NO: 15315 - DNA, 21 bp, Artificial Sequence
  Description of Artificial Sequence: Synthetic oligonucleotide
gatgctaaggttatggttccg

SEQ ID NO: 15316 - DNA, 21 bp, Artificial Sequence
  Description of Artificial Sequence: Synthetic oligonucleotide
gatgcgttgaagggggcgaag

SEQ ID NO: 15317 - DNA, 21 bp, Artificial Sequence
  Description of Artificial Sequence: Synthetic oligonucleotide
gatgctcctaatagtgtgatg

SEQ ID NO: 15318 - DNA, 21 bp, Artificial Sequence
  Description of Artificial Sequence: Synthetic oligonucleotide
gatgctcctccgcttcgtact

SEQ ID NO: 15319 - DNA, 21 bp, Artificial Sequence
  Description of Artificial Sequence: Synthetic oligonucleotide
gatgctccgcgtgagtcgctt

SEQ ID NO: 15320 - DNA, 21 bp, Artificial Sequence
  Description of Artificial Sequence: Synthetic oligonucleotide
gatgctcctcggaatgcggag

SEQ ID NO: 15321 - DNA, 21 bp, Artificial Sequence
  Description of Artificial Sequence: Synthetic oligonucleotide
gatgcgcagccgtcgcagatg

SEQ ID NO: 15322 - DNA, 21 bp, Artificial Sequence
  Description of Artificial Sequence: Synthetic oligonucleotide
gatgcgcagtattctcagcgt

SEQ ID NO: 15323 - DNA, 21 bp, Artificial Sequence
  Description of Artificial Sequence: Synthetic oligonucleotide
gatgcgcgtgctcatcctttg

SEQ ID NO: 15324 - DNA, 21 bp, Artificial Sequence
  Description of Artificial Sequence: Synthetic oligonucleotide
gatgcgcggtttagtatgcag

SEQ ID NO: 15325 - DNA, 21 bp, Artificial Sequence
  Description of Artificial Sequence: Synthetic oligonucleotide
gatgcgaggcttgcgccggag

SEQ ID NO: 15326 - DNA, 21 bp, Artificial Sequence
  Description of Artificial Sequence: Synthetic oligonucleotide
gatgcgaggatgcttatttct

SEQ ID NO: 15327 - DNA, 21 bp, Artificial Sequence
  Description of Artificial Sequence: Synthetic oligonucleotide
gatgctcgtagggatattgtt

SEQ ID NO: 15328 - DNA, 21 bp, Artificial Sequence
  Description of Artificial Sequence: Synthetic oligonucleotide
gatgcgaggacggctactttt

SEQ ID NO: 15329 - DNA, 21 bp, Artificial Sequence
  Description of Artificial Sequence: Synthetic oligonucleotide
gatgctcgggttactcgtttt

SEQ ID NO: 15330 - DNA, 21 bp, Artificial Sequence
  Description of Artificial Sequence: Synthetic oligonucleotide
gatgctagtctgatgaagatg

SEQ ID NO: 15331 - DNA, 21 bp, Artificial Sequence
  Description of Artificial Sequence: Synthetic oligonucleotide
gatgcgtcgccgaatcgtgag

SEQ ID NO: 15332 - DNA, 21 bp, Artificial Sequence
  Description of Artificial Sequence: Synthetic oligonucleotide
gatgcgtctactattaaggat

SEQ ID NO: 15333 - DNA, 21 bp, Artificial Sequence
  Description of Artificial Sequence: Synthetic oligonucleotide
gatgctgtggcggatgatcct

SEQ ID NO: 15334 - DNA, 21 bp, Artificial Sequence
  Description of Artificial Sequence: Synthetic oligonucleotide
gatgctgtggagcgggtttct

SEQ ID NO: 15335 - DNA, 21 bp, Artificial Sequence
  Description of Artificial Sequence: Synthetic oligonucleotide
gatgctgttgttgagcggagt

SEQ ID NO: 15336 - DNA, 21 bp, Artificial Sequence
  Description of Artificial Sequence: Synthetic oligonucleotide
gattgtgatacgcagaagact

SEQ ID NO: 15337 - DNA, 21 bp, Artificial Sequence
  Description of Artificial Sequence: Synthetic oligonucleotide
gattgtcttttgagtggtcct

SEQ ID NO: 15338 - DNA, 21 bp, Artificial Sequence
  Description of Artificial Sequence: Synthetic oligonucleotide
gattgtccgtttcagaagggg

SEQ ID NO: 15339 - DNA, 21 bp, Artificial Sequence
  Description of Artificial Sequence: Synthetic oligonucleotide
gattgttcgtttaagtgttct

SEQ ID NO: 15340 - DNA, 21 bp, Artificial Sequence
  Description of Artificial Sequence: Synthetic oligonucleotide
gatgatgagcatcgttcgacg

SEQ ID NO: 15341 - DNA, 21 bp, Artificial Sequence
  Description of Artificial Sequence: Synthetic oligonucleotide
gatgatgggcatccgcatctg

SEQ ID NO: 15342 - DNA, 21 bp, Artificial Sequence
  Description of Artificial Sequence: Synthetic oligonucleotide
gatgatattgcttgtgatgct

SEQ ID NO: 15343 - DNA, 21 bp, Artificial Sequence
  Description of Artificial Sequence: Synthetic oligonucleotide
gatgataaggagaggcgggag

SEQ ID NO: 15344 - DNA, 21 bp, Artificial Sequence
  Description of Artificial Sequence: Synthetic oligonucleotide
gatgatatggctagggggcgg

SEQ ID NO: 15345 - DNA, 21 bp, Artificial Sequence
  Description of Artificial Sequence: Synthetic oligonucleotide
gatgatcctcattcttcgtct

SEQ ID NO: 15346 - DNA, 21 bp, Artificial Sequence
  Description of Artificial Sequence: Synthetic oligonucleotide
gatgatccgagggatgggagg

SEQ ID NO: 15347 - DNA, 21 bp, Artificial Sequence
  Description of Artificial Sequence: Synthetic oligonucleotide
gatgatcggaggcattttgtg

SEQ ID NO: 15348 - DNA, 21 bp, Artificial Sequence
  Description of Artificial Sequence: Synthetic oligonucleotide
gatgatcggagttttccgatg

SEQ ID NO: 15349 - DNA, 21 bp, Artificial Sequence
  Description of Artificial Sequence: Synthetic oligonucleotide
gatgattcgctttgtcagctg

SEQ ID NO: 15350 - DNA, 21 bp, Artificial Sequence
  Description of Artificial Sequence: Synthetic oligonucleotide
gatgatactaggtttgatgat

SEQ ID NO: 15351 - DNA, 21 bp, Artificial Sequence
  Description of Artificial Sequence: Synthetic oligonucleotide
gatgattggcctaaggtgagt

SEQ ID NO: 15352 - DNA, 21 bp, Artificial Sequence
  Description of Artificial Sequence: Synthetic oligonucleotide
gatgattatcatgctccggcg

SEQ ID NO: 15353 - DNA, 21 bp, Artificial Sequence
  Description of Artificial Sequence: Synthetic oligonucleotide
gatgaggctaagaagcatcat

SEQ ID NO: 15354 - DNA, 21 bp, Artificial Sequence
  Description of Artificial Sequence: Synthetic oligonucleotide
gatgaggctcctcatcctgct

SEQ ID NO: 15355 - DNA, 21 bp, Artificial Sequence
  Description of Artificial Sequence: Synthetic oligonucleotide
gatgaggatattaagaggctt

SEQ ID NO: 15356 - DNA, 21 bp, Artificial Sequence
  Description of Artificial Sequence: Synthetic oligonucleotide
gatgagggtaaggttaagcgt

SEQ ID NO: 15357 - DNA, 21 bp, Artificial Sequence
  Description of Artificial Sequence: Synthetic oligonucleotide
gatgaggggcggcatcagcgt

SEQ ID NO: 15358 - DNA, 21 bp, Artificial Sequence
  Description of Artificial Sequence: Synthetic oligonucleotide
gatgagaatgagacgggtcct

SEQ ID NO: 15359 - DNA, 21 bp, Artificial Sequence
  Description of Artificial Sequence: Synthetic oligonucleotide
gatgagaatgttgctttgcct

SEQ ID NO: 15360 - DNA, 21 bp, Artificial Sequence
  Description of Artificial Sequence: Synthetic oligonucleotide
gatgagccttttaagaaggct

SEQ ID NO: 15361 - DNA, 21 bp, Artificial Sequence
  Description of Artificial Sequence: Synthetic oligonucleotide
gatgagccggggatgacgtcg

SEQ ID NO: 15362 - DNA, 21 bp, Artificial Sequence
  Description of Artificial Sequence: Synthetic oligonucleotide
gatgagccgaggcatcagatg

SEQ ID NO: 15363 - DNA, 21 bp, Artificial Sequence
  Description of Artificial Sequence: Synthetic oligonucleotide
gatgagcggggttttaggtct

SEQ ID NO: 15364 - DNA, 21 bp, Artificial Sequence
  Description of Artificial Sequence: Synthetic oligonucleotide
gatgagcgtcggcttgatccg

SEQ ID NO: 15365 - DNA, 21 bp, Artificial Sequence
  Description of Artificial Sequence: Synthetic oligonucleotide
gatgagagtactatgtctagg

SEQ ID NO: 15366 - DNA, 21 bp, Artificial Sequence
  Description of Artificial Sequence: Synthetic oligonucleotide
gatgagtcttatgatcggaat

SEQ ID NO: 15367 - DNA, 21 bp, Artificial Sequence
  Description of Artificial Sequence: Synthetic oligonucleotide
gatgaggttaagaaggagggt

SEQ ID NO: 15368 - DNA, 21 bp, Artificial Sequence
  Description of Artificial Sequence: Synthetic oligonucleotide
gatgagtgggcgcatgcgcgg

SEQ ID NO: 15369 - DNA, 21 bp, Artificial Sequence
  Description of Artificial Sequence: Synthetic oligonucleotide
gattttgcggggaattcggat

SEQ ID NO: 15370 - DNA, 21 bp, Artificial Sequence
  Description of Artificial Sequence: Synthetic oligonucleotide
gattttgcgctggcgagtcct

SEQ ID NO: 15371 - DNA, 21 bp, Artificial Sequence
  Description of Artificial Sequence: Synthetic oligonucleotide
gattttgcgaggcagcatgat

SEQ ID NO: 15372 - DNA, 21 bp, Artificial Sequence
  Description of Artificial Sequence: Synthetic oligonucleotide
gattttgagtgtattggggtt

SEQ ID NO: 15373 - DNA, 21 bp, Artificial Sequence
  Description of Artificial Sequence: Synthetic oligonucleotide
gattttgagaatccgatggag

SEQ ID NO: 15374 - DNA, 21 bp, Artificial Sequence
  Description of Artificial Sequence: Synthetic oligonucleotide
gattttggggggttggctgtg

SEQ ID NO: 15375 - DNA, 21 bp, Artificial Sequence
  Description of Artificial Sequence: Synthetic oligonucleotide
gattttaaggctgtgtgttgt

SEQ ID NO: 15376 - DNA, 21 bp, Artificial Sequence
  Description of Artificial Sequence: Synthetic oligonucleotide
gattttaaggtggtttctggg

SEQ ID NO: 15377 - DNA, 21 bp, Artificial Sequence
  Description of Artificial Sequence: Synthetic oligonucleotide
gattttccgttgaagcctggt

SEQ ID NO: 15378 - DNA, 21 bp, Artificial Sequence
  Description of Artificial Sequence: Synthetic oligonucleotide
gattttcgtaagcctgagcag

SEQ ID NO: 15379 - DNA, 21 bp, Artificial Sequence
  Description of Artificial Sequence: Synthetic oligonucleotide
gattttagtttggggctgttg

SEQ ID NO: 15380 - DNA, 21 bp, Artificial Sequence
  Description of Artificial Sequence: Synthetic oligonucleotide
gattttagtcttaataattct

SEQ ID NO: 15381 - DNA, 21 bp, Artificial Sequence
  Description of Artificial Sequence: Synthetic oligonucleotide
gatttttctttgcaggatgct

SEQ ID NO: 15382 - DNA, 21 bp, Artificial Sequence
  Description of Artificial Sequence: Synthetic oligonucleotide
gattttagtcggcgggctgat

SEQ ID NO: 15383 - DNA, 21 bp, Artificial Sequence
  Description of Artificial Sequence: Synthetic oligonucleotide
gattttacgcgtgcggatggg

SEQ ID NO: 15384 - DNA, 21 bp, Artificial Sequence
  Description of Artificial Sequence: Synthetic oligonucleotide
gattttactgtgcctgctggg

SEQ ID NO: 15385 - DNA, 21 bp, Artificial Sequence
  Description of Artificial Sequence: Synthetic oligonucleotide
gattttgttccgcttaagtct

SEQ ID NO: 15386 - DNA, 21 bp, Artificial Sequence
  Description of Artificial Sequence: Synthetic oligonucleotide
gattttgtgactattcctaat

SEQ ID NO: 15387 - DNA, 21 bp, Artificial Sequence
  Description of Artificial Sequence: Synthetic oligonucleotide
gatggggcttcgggggttcct

SEQ ID NO: 15388 - DNA, 21 bp, Artificial Sequence
  Description of Artificial Sequence: Synthetic oligonucleotide
gatggtggtcattcggtgcgt

SEQ ID NO: 15389 - DNA, 21 bp, Artificial Sequence
  Description of Artificial Sequence: Synthetic oligonucleotide
gatgggattcgggatccgagg

SEQ ID NO: 15390 - DNA, 21 bp, Artificial Sequence
  Description of Artificial Sequence: Synthetic oligonucleotide
gatggtaaggctaaggtttct

SEQ ID NO: 15391 - DNA, 21 bp, Artificial Sequence
  Description of Artificial Sequence: Synthetic oligonucleotide
gatggtaagcatactgattat

SEQ ID NO: 15392 - DNA, 21 bp, Artificial Sequence
  Description of Artificial Sequence: Synthetic oligonucleotide
gatggtcttcgtacggagtcg

SEQ ID NO: 15393 - DNA, 21 bp, Artificial Sequence
  Description of Artificial Sequence: Synthetic oligonucleotide
gatgggctgtctcggttgccg

SEQ ID NO: 15394 - DNA, 21 bp, Artificial Sequence
  Description of Artificial Sequence: Synthetic oligonucleotide
gatgggatgttgagggatagg

SEQ ID NO: 15395 - DNA, 21 bp, Artificial Sequence
  Description of Artificial Sequence: Synthetic oligonucleotide
gatggtaattcttatcatccg

SEQ ID NO: 15396 - DNA, 21 bp, Artificial Sequence
  Description of Artificial Sequence: Synthetic oligonucleotide
gatgggaatacggcgaggggg

SEQ ID NO: 15397 - DNA, 21 bp, Artificial Sequence
  Description of Artificial Sequence: Synthetic oligonucleotide
gatgggccggaggaggagcgt

SEQ ID NO: 15398 - DNA, 21 bp, Artificial Sequence
  Description of Artificial Sequence: Synthetic oligonucleotide
gatgggccgggttcgccgaat

SEQ ID NO: 15399 - DNA, 21 bp, Artificial Sequence
  Description of Artificial Sequence: Synthetic oligonucleotide
gatggtcgtcatctttcgcct

SEQ ID NO: 15400 - DNA, 21 bp, Artificial Sequence
  Description of Artificial Sequence: Synthetic oligonucleotide
gatgggcgtactgttgcggcg

SEQ ID NO: 15401 - DNA, 21 bp, Artificial Sequence
  Description of Artificial Sequence: Synthetic oligonucleotide
gatggttcttttgagccttat

SEQ ID NO: 15402 - DNA, 21 bp, Artificial Sequence
  Description of Artificial Sequence: Synthetic oligonucleotide
gatggttcggggacgctgaat

SEQ ID NO: 15403 - DNA, 21 bp, Artificial Sequence
  Description of Artificial Sequence: Synthetic oligonucleotide
gatggtagtccgagttgggct

SEQ ID NO: 15404 - DNA, 21 bp, Artificial Sequence
  Description of Artificial Sequence: Synthetic oligonucleotide
gatggtacggatcagtctcag

SEQ ID NO: 15405 - DNA, 21 bp, Artificial Sequence
  Description of Artificial Sequence: Synthetic oligonucleotide
gatggtacgagggctcagtgg

SEQ ID NO: 15406 - DNA, 21 bp, Artificial Sequence
  Description of Artificial Sequence: Synthetic oligonucleotide
gatggtacttctcttaagcat

SEQ ID NO: 15407 - DNA, 21 bp, Artificial Sequence
  Description of Artificial Sequence: Synthetic oligonucleotide
gatgggacgtatcggaatatg

SEQ ID NO: 15408 - DNA, 21 bp, Artificial Sequence
  Description of Artificial Sequence: Synthetic oligonucleotide
gatggggttacgactctgtcg

SEQ ID NO: 15409 - DNA, 21 bp, Artificial Sequence
  Description of Artificial Sequence: Synthetic oligonucleotide
gatcatgcgcataggagtact

SEQ ID NO: 15410 - DNA, 21 bp, Artificial Sequence
  Description of Artificial Sequence: Synthetic oligonucleotide
gatcataagtcgaattctcgt

SEQ ID NO: 15411 - DNA, 21 bp, Artificial Sequence
  Description of Artificial Sequence: Synthetic oligonucleotide
gatcatcttgctcaggagtgt

SEQ ID NO: 15412 - DNA, 21 bp, Artificial Sequence
  Description of Artificial Sequence: Synthetic oligonucleotide
gatcatcttgatgtgaatgct

SEQ ID NO: 15413 - DNA, 21 bp, Artificial Sequence
  Description of Artificial Sequence: Synthetic oligonucleotide
gatcataatcatatggggtct

SEQ ID NO: 15414 - DNA, 21 bp, Artificial Sequence
  Description of Artificial Sequence: Synthetic oligonucleotide
gatcataatttgcggcagaat

SEQ ID NO: 15415 - DNA, 21 bp, Artificial Sequence
  Description of Artificial Sequence: Synthetic oligonucleotide
gatcatccgtatctgtctccg

SEQ ID NO: 15416 - DNA, 21 bp, Artificial Sequence
  Description of Artificial Sequence: Synthetic oligonucleotide
gatcatcgtacgcttgagagt

SEQ ID NO: 15417 - DNA, 21 bp, Artificial Sequence
  Description of Artificial Sequence: Synthetic oligonucleotide
gatcattcggctctttcttcg

SEQ ID NO: 15418 - DNA, 21 bp, Artificial Sequence
  Description of Artificial Sequence: Synthetic oligonucleotide
gatcatagtgggaagaaggat

SEQ ID NO: 15419 - DNA, 21 bp, Artificial Sequence
  Description of Artificial Sequence: Synthetic oligonucleotide
gatcattctatggcgctgcgt

SEQ ID NO: 15420 - DNA, 21 bp, Artificial Sequence
  Description of Artificial Sequence: Synthetic oligonucleotide
gatcattctgtgccggggact

SEQ ID NO: 15421 - DNA, 21 bp, Artificial Sequence
  Description of Artificial Sequence: Synthetic oligonucleotide
gatcatactgatcgggatggt

SEQ ID NO: 15422 - DNA, 21 bp, Artificial Sequence
  Description of Artificial Sequence: Synthetic oligonucleotide
gatcatacgccgctgctttcg

SEQ ID NO: 15423 - DNA, 21 bp, Artificial Sequence
  Description of Artificial Sequence: Synthetic oligonucleotide
gatcattggaatggggattcg

SEQ ID NO: 15424 - DNA, 21 bp, Artificial Sequence
  Description of Artificial Sequence: Synthetic oligonucleotide
gatcattatgctcgtttgccg

SEQ ID NO: 15425 - DNA, 21 bp, Artificial Sequence
  Description of Artificial Sequence: Synthetic oligonucleotide
gatattgctcatcctcgtaat

SEQ ID NO: 15426 - DNA, 21 bp, Artificial Sequence
  Description of Artificial Sequence: Synthetic oligonucleotide
gatattgcgcagcatgagact

SEQ ID NO: 15427 - DNA, 21 bp, Artificial Sequence
  Description of Artificial Sequence: Synthetic oligonucleotide
gatattgaggatacgccggtg

SEQ ID NO: 15428 - DNA, 21 bp, Artificial Sequence
  Description of Artificial Sequence: Synthetic oligonucleotide
gatattcatcgttcgtcgtat

SEQ ID NO: 15429 - DNA, 21 bp, Artificial Sequence
  Description of Artificial Sequence: Synthetic oligonucleotide
gatattcatagtcatctttat

SEQ ID NO: 15430 - DNA, 21 bp, Artificial Sequence
  Description of Artificial Sequence: Synthetic oligonucleotide
gatattaattttaaggctcct

SEQ ID NO: 15431 - DNA, 21 bp, Artificial Sequence
  Description of Artificial Sequence: Synthetic oligonucleotide
gatattaatcctactactctg

SEQ ID NO: 15432 - DNA, 21 bp, Artificial Sequence
  Description of Artificial Sequence: Synthetic oligonucleotide
gatattccggtggcttctaag

SEQ ID NO: 15433 - DNA, 21 bp, Artificial Sequence
  Description of Artificial Sequence: Synthetic oligonucleotide
gatattcctgtgacttcggct

SEQ ID NO: 15434 - DNA, 21 bp, Artificial Sequence
  Description of Artificial Sequence: Synthetic oligonucleotide
gatattcggcatcgtcttagt

SEQ ID NO: 15435 - DNA, 21 bp, Artificial Sequence
  Description of Artificial Sequence: Synthetic oligonucleotide
gatattcggcggcctactccg

SEQ ID NO: 15436 - DNA, 21 bp, Artificial Sequence
  Description of Artificial Sequence: Synthetic oligonucleotide
gatattaggactgggtcggtg

SEQ ID NO: 15437 - DNA, 21 bp, Artificial Sequence
  Description of Artificial Sequence: Synthetic oligonucleotide
gatattagtctgcctgaggct

SEQ ID NO: 15438 - DNA, 21 bp, Artificial Sequence
  Description of Artificial Sequence: Synthetic oligonucleotide
gatatttctaatgatcagtat

SEQ ID NO: 15439 - DNA, 21 bp, Artificial Sequence
  Description of Artificial Sequence: Synthetic oligonucleotide
gatatttcgcggcctgtgcgt

SEQ ID NO: 15440 - DNA, 21 bp, Artificial Sequence
  Description of Artificial Sequence: Synthetic oligonucleotide
gatatttcgcgtcagaattct

SEQ ID NO: 15441 - DNA, 21 bp, Artificial Sequence
  Description of Artificial Sequence: Synthetic oligonucleotide
gatattactgctacgacggcg

SEQ ID NO: 15442 - DNA, 21 bp, Artificial Sequence
  Description of Artificial Sequence: Synthetic oligonucleotide
gatattactggtcgggtgccg

SEQ ID NO: 15443 - DNA, 21 bp, Artificial Sequence
  Description of Artificial Sequence: Synthetic oligonucleotide
gataaggcggttgggatgatt

SEQ ID NO: 15444 - DNA, 21 bp, Artificial Sequence
  Description of Artificial Sequence: Synthetic oligonucleotide
gataaggatgagctgatgatg

SEQ ID NO: 15445 - DNA, 21 bp, Artificial Sequence
  Description of Artificial Sequence: Synthetic oligonucleotide
gataaggaggtgcctccgatg

SEQ ID NO: 15446 - DNA, 21 bp, Artificial Sequence
  Description of Artificial Sequence: Synthetic oligonucleotide
gataaggagtatgcggggctt

SEQ ID NO: 15447 - DNA, 21 bp, Artificial Sequence
  Description of Artificial Sequence: Synthetic oligonucleotide
gataaggggaaggcgtctccg

SEQ ID NO: 15448 - DNA, 21 bp, Artificial Sequence
  Description of Artificial Sequence: Synthetic oligonucleotide
gataagggttcgttgactatg

SEQ ID NO: 15449 - DNA, 21 bp, Artificial Sequence
  Description of Artificial Sequence: Synthetic oligonucleotide
gataagattccgaatttttct

SEQ ID NO: 15450 - DNA, 21 bp, Artificial Sequence
  Description of Artificial Sequence: Synthetic oligonucleotide
gataagctgcatgggcaggct

SEQ ID NO: 15451 - DNA, 21 bp, Artificial Sequence
  Description of Artificial Sequence: Synthetic oligonucleotide
gataagcttccgggtgatagg

SEQ ID NO: 15452 - DNA, 21 bp, Artificial Sequence
  Description of Artificial Sequence: Synthetic oligonucleotide
gataagcttagggctaataat

SEQ ID NO: 15453 - DNA, 21 bp, Artificial Sequence
  Description of Artificial Sequence: Synthetic oligonucleotide
gataagctgacgcctaggctt

SEQ ID NO: 15454 - DNA, 21 bp, Artificial Sequence
  Description of Artificial Sequence: Synthetic oligonucleotide
gataagatgaatatgccgccg

SEQ ID NO: 15455 - DNA, 21 bp, Artificial Sequence
  Description of Artificial Sequence: Synthetic oligonucleotide
gataagcgtgatggtcgtttg

SEQ ID NO: 15456 - DNA, 21 bp, Artificial Sequence
  Description of Artificial Sequence: Synthetic oligonucleotide
gataagcggagtgggacgtgt

SEQ ID NO: 15457 - DNA, 21 bp, Artificial Sequence
  Description of Artificial Sequence: Synthetic oligonucleotide
gataagtcgattgcgactaat

SEQ ID NO: 15458 - DNA, 21 bp, Artificial Sequence
  Description of Artificial Sequence: Synthetic oligonucleotide
gataagtcgcctatgatgcgt

SEQ ID NO: 15459 - DNA, 21 bp, Artificial Sequence
  Description of Artificial Sequence: Synthetic oligonucleotide
gataagtctcgtttgtatgct

SEQ ID NO: 15460 - DNA, 21 bp, Artificial Sequence
  Description of Artificial Sequence: Synthetic oligonucleotide
gataagtcgcgtaatcagatg

SEQ ID NO: 15461 - DNA, 21 bp, Artificial Sequence
  Description of Artificial Sequence: Synthetic oligonucleotide
gataagactgcggtgatttcg

SEQ ID NO: 15462 - DNA, 21 bp, Artificial Sequence
  Description of Artificial Sequence: Synthetic oligonucleotide
gatcttgcgctgagtcgtggg

SEQ ID NO: 15463 - DNA, 21 bp, Artificial Sequence
  Description of Artificial Sequence: Synthetic oligonucleotide
gatttggcttctgttcctcgg

SEQ ID NO: 15464 - DNA, 21 bp, Artificial Sequence
  Description of Artificial Sequence: Synthetic oligonucleotide
gatctggatcctatttgtact

SEQ ID NO: 15465 - DNA, 21 bp, Artificial Sequence
  Description of Artificial Sequence: Synthetic oligonucleotide
gatcttgattcgcctcattct

SEQ ID NO: 15466 - DNA, 21 bp, Artificial Sequence
  Description of Artificial Sequence: Synthetic oligonucleotide
gatctggagcatcagtgtccg

SEQ ID NO: 15467 - DNA, 21 bp, Artificial Sequence
  Description of Artificial Sequence: Synthetic oligonucleotide
gatttgtttaagattgagcgt

SEQ ID NO: 15468 - DNA, 21 bp, Artificial Sequence
  Description of Artificial Sequence: Synthetic oligonucleotide
gatctggggggtttggttcat

SEQ ID NO: 15469 - DNA, 21 bp, Artificial Sequence
  Description of Artificial Sequence: Synthetic oligonucleotide
gatcttgggccggataagggg

SEQ ID NO: 15470 - DNA, 21 bp, Artificial Sequence
  Description of Artificial Sequence: Synthetic oligonucleotide
gatctgcatggggctatgcgg

SEQ ID NO: 15471 - DNA, 21 bp, Artificial Sequence
  Description of Artificial Sequence: Synthetic oligonucleotide
gatttgcatattcaggatccg

SEQ ID NO: 15472 - DNA, 21 bp, Artificial Sequence
  Description of Artificial Sequence: Synthetic oligonucleotide
gatcttattgagaatcgggag

SEQ ID NO: 15473 - DNA, 21 bp, Artificial Sequence
  Description of Artificial Sequence: Synthetic oligonucleotide
gatcttattgagcgtgggtct

SEQ ID NO: 15474 - DNA, 21 bp, Artificial Sequence
  Description of Artificial Sequence: Synthetic oligonucleotide
gatctgattcctagtcgtcct

SEQ ID NO: 15475 - DNA, 21 bp, Artificial Sequence
  Description of Artificial Sequence: Synthetic oligonucleotide
gatcttattgttcgtgggctg

SEQ ID NO: 15476 - DNA, 21 bp, Artificial Sequence
  Description of Artificial Sequence: Synthetic oligonucleotide
gatctgaagggtgggggtttt

SEQ ID NO: 15477 - DNA, 21 bp, Artificial Sequence
  Description of Artificial Sequence: Synthetic oligonucleotide
gatcttaagaagcctgatttt

SEQ ID NO: 15478 - DNA, 21 bp, Artificial Sequence
  Description of Artificial Sequence: Synthetic oligonucleotide
gatttgaagctgcatgggcct

SEQ ID NO: 15479 - DNA, 21 bp, Artificial Sequence
  Description of Artificial Sequence: Synthetic oligonucleotide
gatttgaagccttctttgctt

SEQ ID NO: 15480 - DNA, 21 bp, Artificial Sequence
  Description of Artificial Sequence: Synthetic oligonucleotide
gatttgaagtcgtcggagagg

SEQ ID NO: 15481 - DNA, 21 bp, Artificial Sequence
  Description of Artificial Sequence: Synthetic oligonucleotide
gatcttttggagaggccgtcg

SEQ ID NO: 15482 - DNA, 21 bp, Artificial Sequence
  Description of Artificial Sequence: Synthetic oligonucleotide
gatcttcttgagacgcggctt

SEQ ID NO: 15483 - DNA, 21 bp, Artificial Sequence
  Description of Artificial Sequence: Synthetic oligonucleotide
gatctgttgactgctttggct

SEQ ID NO: 15484 - DNA, 21 bp, Artificial Sequence
  Description of Artificial Sequence: Synthetic oligonucleotide
gatttgatgcatacggatgct

SEQ ID NO: 15485 - DNA, 21 bp, Artificial Sequence
  Description of Artificial Sequence: Synthetic oligonucleotide
gatctgatgcatgttagtggt

SEQ ID NO: 15486 - DNA, 21 bp, Artificial Sequence
  Description of Artificial Sequence: Synthetic oligonucleotide
gatttgatgattcatgggctg

SEQ ID NO: 15487 - DNA, 21 bp, Artificial Sequence
  Description of Artificial Sequence: Synthetic oligonucleotide
gatttgaataggggtcctcgt

SEQ ID NO: 15488 - DNA, 21 bp, Artificial Sequence
  Description of Artificial Sequence: Synthetic oligonucleotide
gatttgaataggattgagtgt

SEQ ID NO: 15489 - DNA, 21 bp, Artificial Sequence
  Description of Artificial Sequence: Synthetic oligonucleotide
gatcttaatactactcagcat

SEQ ID NO: 15490 - DNA, 21 bp, Artificial Sequence
  Description of Artificial Sequence: Synthetic oligonucleotide
gatttgcctgcggttagtcat

SEQ ID NO: 15491 - DNA, 21 bp, Artificial Sequence
  Description of Artificial Sequence: Synthetic oligonucleotide
gatcttccgctgggtaattct

SEQ ID NO: 15492 - DNA, 21 bp, Artificial Sequence
  Description of Artificial Sequence: Synthetic oligonucleotide
gatctgccgttgaggactact

SEQ ID NO: 15493 - DNA, 21 bp, Artificial Sequence
  Description of Artificial Sequence: Synthetic oligonucleotide
gatcttccgcttacttctttg

SEQ ID NO: 15494 - DNA, 21 bp, Artificial Sequence
  Description of Artificial Sequence: Synthetic oligonucleotide
gatcttcctcgtcagtcggtg

SEQ ID NO: 15495 - DNA, 21 bp, Artificial Sequence
  Description of Artificial Sequence: Synthetic oligonucleotide
gatcttccgtatagtcatcct

SEQ ID NO: 15496 - DNA, 21 bp, Artificial Sequence
  Description of Artificial Sequence: Synthetic oligonucleotide
gatttgcagacggggcctcag

SEQ ID NO: 15497 - DNA, 21 bp, Artificial Sequence
  Description of Artificial Sequence: Synthetic oligonucleotide
gatttgcgttgtgctgagggg

SEQ ID NO: 15498 - DNA, 21 bp, Artificial Sequence
  Description of Artificial Sequence: Synthetic oligonucleotide
gatcttcgtgaggctccgcgt

SEQ ID NO: 15499 - DNA, 21 bp, Artificial Sequence
  Description of Artificial Sequence: Synthetic oligonucleotide
gatttgcgtcatgcttctagt

SEQ ID NO: 15500 - DNA, 21 bp, Artificial Sequence
  Description of Artificial Sequence: Synthetic oligonucleotide
gatttgaggcatccgcctagt

SEQ ID NO: 15501 - DNA, 21 bp, Artificial Sequence
  Description of Artificial Sequence: Synthetic oligonucleotide
gatcttaggccggggggtctg

SEQ ID NO: 15502 - DNA, 21 bp, Artificial Sequence
  Description of Artificial Sequence: Synthetic oligonucleotide
gatttgaggcgtagtatgttg

SEQ ID NO: 15503 - DNA, 21 bp, Artificial Sequence
  Description of Artificial Sequence: Synthetic oligonucleotide
gatctgcgtcgtacgcctttt

SEQ ID NO: 15504 - DNA, 21 bp, Artificial Sequence
  Description of Artificial Sequence: Synthetic oligonucleotide
gatttgagtgcgttgcgtggg

SEQ ID NO: 15505 - DNA, 21 bp, Artificial Sequence
  Description of Artificial Sequence: Synthetic oligonucleotide
gatctttcggggttgacgcgg

SEQ ID NO: 15506 - DNA, 21 bp, Artificial Sequence
  Description of Artificial Sequence: Synthetic oligonucleotide
gatttgactcatgttgggagt

SEQ ID NO: 15507 - DNA, 21 bp, Artificial Sequence
  Description of Artificial Sequence: Synthetic oligonucleotide
gatctgactcggtggccttcg

SEQ ID NO: 15508 - DNA, 21 bp, Artificial Sequence
  Description of Artificial Sequence: Synthetic oligonucleotide
gatttgactacggctcctact

SEQ ID NO: 15509 - DNA, 21 bp, Artificial Sequence
  Description of Artificial Sequence: Synthetic oligonucleotide
gatttgacggtgtcttatgct

SEQ ID NO: 15510 - DNA, 21 bp, Artificial Sequence
  Description of Artificial Sequence: Synthetic oligonucleotide
gatcttgtggagacggctagt

SEQ ID NO: 15511 - DNA, 21 bp, Artificial Sequence
  Description of Artificial Sequence: Synthetic oligonucleotide
gatttggttattccgactcgg

SEQ ID NO: 15512 - DNA, 21 bp, Artificial Sequence
  Description of Artificial Sequence: Synthetic oligonucleotide
gatatggatatgcagatggct

SEQ ID NO: 15513 - DNA, 21 bp, Artificial Sequence
  Description of Artificial Sequence: Synthetic oligonucleotide
gatatgggggctcgtcagtat

SEQ ID NO: 15514 - DNA, 21 bp, Artificial Sequence
  Description of Artificial Sequence: Synthetic oligonucleotide
gatatgaagcctgcggtgtcg

SEQ ID NO: 15515 - DNA, 21 bp, Artificial Sequence
  Description of Artificial Sequence: Synthetic oligonucleotide
gatatgttgaagaagtttaat

SEQ ID NO: 15516 - DNA, 21 bp, Artificial Sequence
  Description of Artificial Sequence: Synthetic oligonucleotide
gatatgccttttgggccgttg

SEQ ID NO: 15517 - DNA, 21 bp, Artificial Sequence
  Description of Artificial Sequence: Synthetic oligonucleotide
gatatgtcggcgcggccttct

SEQ ID NO: 15518 - DNA, 21 bp, Artificial Sequence
  Description of Artificial Sequence: Synthetic oligonucleotide
gatatgtcgacgcgtggtatg

SEQ ID NO: 15519 - DNA, 21 bp, Artificial Sequence
  Description of Artificial Sequence: Synthetic oligonucleotide
gatatgactacgggtgctgtg

SEQ ID NO: 15520 - DNA, 21 bp, Artificial Sequence
  Description of Artificial Sequence: Synthetic oligonucleotide
gatatggtggtgcctagtgat

SEQ ID NO: 15521 - DNA, 21 bp, Artificial Sequence
  Description of Artificial Sequence: Synthetic oligonucleotide
gatatgtatccgactaatagg

SEQ ID NO: 15522 - DNA, 21 bp, Artificial Sequence
  Description of Artificial Sequence: Synthetic oligonucleotide
gataatgcgagtaagcttatg

SEQ ID NO: 15523 - DNA, 21 bp, Artificial Sequence
  Description of Artificial Sequence: Synthetic oligonucleotide
gataatgagcttctgatgtcg

SEQ ID NO: 15524 - DNA, 21 bp, Artificial Sequence
  Description of Artificial Sequence: Synthetic oligonucleotide
gataatgagtcgattccgacg

SEQ ID NO: 15525 - DNA, 21 bp, Artificial Sequence
  Description of Artificial Sequence: Synthetic oligonucleotide
gataatggttctgctgataat

SEQ ID NO: 15526 - DNA, 21 bp, Artificial Sequence
  Description of Artificial Sequence: Synthetic oligonucleotide
gataatctggatgggctgtgt

SEQ ID NO: 15527 - DNA, 21 bp, Artificial Sequence
  Description of Artificial Sequence: Synthetic oligonucleotide
gataatttgctggggtcgcgt

SEQ ID NO: 15528 - DNA, 21 bp, Artificial Sequence
  Description of Artificial Sequence: Synthetic oligonucleotide
gataatctgccgactttggct

SEQ ID NO: 15529 - DNA, 21 bp, Artificial Sequence
  Description of Artificial Sequence: Synthetic oligonucleotide
gataatctgaggccgcggcct

SEQ ID NO: 15530 - DNA, 21 bp, Artificial Sequence
  Description of Artificial Sequence: Synthetic oligonucleotide
gataatttgtctcataggatg

SEQ ID NO: 15531 - DNA, 21 bp, Artificial Sequence
  Description of Artificial Sequence: Synthetic oligonucleotide
gataatcctgcgatggatcgg

SEQ ID NO: 15532 - DNA, 21 bp, Artificial Sequence
  Description of Artificial Sequence: Synthetic oligonucleotide
gataatccgcctactggggtg

SEQ ID NO: 15533 - DNA, 21 bp, Artificial Sequence
  Description of Artificial Sequence: Synthetic oligonucleotide
gataatcaggctgctgttcct

SEQ ID NO: 15534 - DNA, 21 bp, Artificial Sequence
  Description of Artificial Sequence: Synthetic oligonucleotide
gataatcggttgaatgtggtg

SEQ ID NO: 15535 - DNA, 21 bp, Artificial Sequence
  Description of Artificial Sequence: Synthetic oligonucleotide
gataataggccgcgtttgatg

SEQ ID NO: 15536 - DNA, 21 bp, Artificial Sequence
  Description of Artificial Sequence: Synthetic oligonucleotide
gataatagggtttcgattccg

SEQ ID NO: 15537 - DNA, 21 bp, Artificial Sequence
  Description of Artificial Sequence: Synthetic oligonucleotide
gataattcggcttttgcggtg

SEQ ID NO: 15538 - DNA, 21 bp, Artificial Sequence
  Description of Artificial Sequence: Synthetic oligonucleotide
gataatacgaattgggctaag

SEQ ID NO: 15539 - DNA, 21 bp, Artificial Sequence
  Description of Artificial Sequence: Synthetic oligonucleotide
gataatacgactaggactgcg

SEQ ID NO: 15540 - DNA, 21 bp, Artificial Sequence
  Description of Artificial Sequence: Synthetic oligonucleotide
gataatgtggggattaagtcg

SEQ ID NO: 15541 - DNA, 21 bp, Artificial Sequence
  Description of Artificial Sequence: Synthetic oligonucleotide
gataattatgatccgcgtccg

SEQ ID NO: 15542 - DNA, 21 bp, Artificial Sequence
  Description of Artificial Sequence: Synthetic oligonucleotide
gatccggctgctacgttgcct

SEQ ID NO: 15543 - DNA, 21 bp, Artificial Sequence
  Description of Artificial Sequence: Synthetic oligonucleotide
gatcctgcgctgcagcgggcg

SEQ ID NO: 15544 - DNA, 21 bp, Artificial Sequence
  Description of Artificial Sequence: Synthetic oligonucleotide
gatccggcgccgacgttgcct

SEQ ID NO: 15545 - DNA, 21 bp, Artificial Sequence
  Description of Artificial Sequence: Synthetic oligonucleotide
gatccttgtcataggtcgctg

SEQ ID NO: 15546 - DNA, 21 bp, Artificial Sequence
  Description of Artificial Sequence: Synthetic oligonucleotide
gatcctgatcctgcgtcgaat

SEQ ID NO: 15547 - DNA, 21 bp, Artificial Sequence
  Description of Artificial Sequence: Synthetic oligonucleotide
gatccggatccgtcgcttagt

SEQ ID NO: 15548 - DNA, 21 bp, Artificial Sequence
  Description of Artificial Sequence: Synthetic oligonucleotide
gatcctgaggttgatccggat

SEQ ID NO: 15549 - DNA, 21 bp, Artificial Sequence
  Description of Artificial Sequence: Synthetic oligonucleotide
gatccgtttactcataatggg

SEQ ID NO: 15550 - DNA, 21 bp, Artificial Sequence
  Description of Artificial Sequence: Synthetic oligonucleotide
gatcctggtcatcagcggacg

SEQ ID NO: 15551 - DNA, 21 bp, Artificial Sequence
  Description of Artificial Sequence: Synthetic oligonucleotide
gatccgggtctgcgtactgat

SEQ ID NO: 15552 - DNA, 21 bp, Artificial Sequence
  Description of Artificial Sequence: Synthetic oligonucleotide
gatcctgggatggtgcctggg

SEQ ID NO: 15553 - DNA, 21 bp, Artificial Sequence
  Description of Artificial Sequence: Synthetic oligonucleotide
gatccgcatgggaagtatcct

SEQ ID NO: 15554 - DNA, 21 bp, Artificial Sequence
  Description of Artificial Sequence: Synthetic oligonucleotide
gatccgcatctgtcgtcgccg

SEQ ID NO: 15555 - DNA, 21 bp, Artificial Sequence
  Description of Artificial Sequence: Synthetic oligonucleotide
gatcctattgcggctccgacg

SEQ ID NO: 15556 - DNA, 21 bp, Artificial Sequence
  Description of Artificial Sequence: Synthetic oligonucleotide
gatcctttggcgcctatggct

SEQ ID NO: 15557 - DNA, 21 bp, Artificial Sequence
  Description of Artificial Sequence: Synthetic oligonucleotide
gatccgctttattcgagtcgt

SEQ ID NO: 15558 - DNA, 21 bp, Artificial Sequence
  Description of Artificial Sequence: Synthetic oligonucleotide
gatcctatggcgcgggtgggg

SEQ ID NO: 15559 - DNA, 21 bp, Artificial Sequence
  Description of Artificial Sequence: Synthetic oligonucleotide
gatcctaatcttaatcttgct

SEQ ID NO: 15560 - DNA, 21 bp, Artificial Sequence
  Description of Artificial Sequence: Synthetic oligonucleotide
gatcctcctcttatggctaat

SEQ ID NO: 15561 - DNA, 21 bp, Artificial Sequence
  Description of Artificial Sequence: Synthetic oligonucleotide
gatcctccttatgctgtgagt

SEQ ID NO: 15562 - DNA, 21 bp, Artificial Sequence
  Description of Artificial Sequence: Synthetic oligonucleotide
gatccgccgtatgatcagagg

SEQ ID NO: 15563 - DNA, 21 bp, Artificial Sequence
  Description of Artificial Sequence: Synthetic oligonucleotide
gatcctcaggagaatcatgct

SEQ ID NO: 15564 - DNA, 21 bp, Artificial Sequence
  Description of Artificial Sequence: Synthetic oligonucleotide
gatcctcagaggttggtgatt

SEQ ID NO: 15565 - DNA, 21 bp, Artificial Sequence
  Description of Artificial Sequence: Synthetic oligonucleotide
gatcctcgttttacgctgccg

SEQ ID NO: 15566 - DNA, 21 bp, Artificial Sequence
  Description of Artificial Sequence: Synthetic oligonucleotide
gatcctcgtaagtcttcggct

SEQ ID NO: 15567 - DNA, 21 bp, Artificial Sequence
  Description of Artificial Sequence: Synthetic oligonucleotide
gatccgaggcttccgtcttat

SEQ ID NO: 15568 - DNA, 21 bp, Artificial Sequence
  Description of Artificial Sequence: Synthetic oligonucleotide
gatccgcggccgctggcgtct

SEQ ID NO: 15569 - DNA, 21 bp, Artificial Sequence
  Description of Artificial Sequence: Synthetic oligonucleotide
gatcctaggtcggctgtgcag

SEQ ID NO: 15570 - DNA, 21 bp, Artificial Sequence
  Description of Artificial Sequence: Synthetic oligonucleotide
gatcctaggtctagtttgact

SEQ ID NO: 15571 - DNA, 21 bp, Artificial Sequence
  Description of Artificial Sequence: Synthetic oligonucleotide
gatccgcgtacggagatggtg

SEQ ID NO: 15572 - DNA, 21 bp, Artificial Sequence
  Description of Artificial Sequence: Synthetic oligonucleotide
gatccttctgatgattatgtg

SEQ ID NO: 15573 - DNA, 21 bp, Artificial Sequence
  Description of Artificial Sequence: Synthetic oligonucleotide
gatccgtcgaggaggcctagt

SEQ ID NO: 15574 - DNA, 21 bp, Artificial Sequence
  Description of Artificial Sequence: Synthetic oligonucleotide
gatccttcgagtcttcggttg

SEQ ID NO: 15575 - DNA, 21 bp, Artificial Sequence
  Description of Artificial Sequence: Synthetic oligonucleotide
gatccttcttatgatcagcat

SEQ ID NO: 15576 - DNA, 21 bp, Artificial Sequence
  Description of Artificial Sequence: Synthetic oligonucleotide
gatcctacgttttcgtcggag

SEQ ID NO: 15577 - DNA, 21 bp, Artificial Sequence
  Description of Artificial Sequence: Synthetic oligonucleotide
gatccgacgcataggattgtt

SEQ ID NO: 15578 - DNA, 21 bp, Artificial Sequence
  Description of Artificial Sequence: Synthetic oligonucleotide
gatccgactttgcatcgtcct

SEQ ID NO: 15579 - DNA, 21 bp, Artificial Sequence
  Description of Artificial Sequence: Synthetic oligonucleotide
gatcctacttatcgtggtggg

SEQ ID NO: 15580 - DNA, 21 bp, Artificial Sequence
  Description of Artificial Sequence: Synthetic oligonucleotide
gatcctgtgggtcggagtttg

SEQ ID NO: 15581 - DNA, 21 bp, Artificial Sequence
  Description of Artificial Sequence: Synthetic oligonucleotide
gatcctgtgattcgtgctgct

SEQ ID NO: 15582 - DNA, 21 bp, Artificial Sequence
  Description of Artificial Sequence: Synthetic oligonucleotide
gatccggttatgccgcgtcgt

SEQ ID NO: 15583 - DNA, 21 bp, Artificial Sequence
  Description of Artificial Sequence: Synthetic oligonucleotide
gatccggtttcgtcgagggcg

SEQ ID NO: 15584 - DNA, 21 bp, Artificial Sequence
  Description of Artificial Sequence: Synthetic oligonucleotide
gatcaggcgatgagtcggaat

SEQ ID NO: 15585 - DNA, 21 bp, Artificial Sequence
  Description of Artificial Sequence: Synthetic oligonucleotide
gatcaggataagtctgcgagt

SEQ ID NO: 15586 - DNA, 21 bp, Artificial Sequence
  Description of Artificial Sequence: Synthetic oligonucleotide
gatcaggatcaggggcgtgcg

SEQ ID NO: 15587 - DNA, 21 bp, Artificial Sequence
  Description of Artificial Sequence: Synthetic oligonucleotide
gatcagtttcatcctaggcct

SEQ ID NO: 15588 - DNA, 21 bp, Artificial Sequence
  Description of Artificial Sequence: Synthetic oligonucleotide
gatcagctgaatccgcgtggt

SEQ ID NO: 15589 - DNA, 21 bp, Artificial Sequence
  Description of Artificial Sequence: Synthetic oligonucleotide
gatcagttgcgttcggctacg

SEQ ID NO: 15590 - DNA, 21 bp, Artificial Sequence
  Description of Artificial Sequence: Synthetic oligonucleotide
gatcagcctgcttataatgcg

SEQ ID NO: 15591 - DNA, 21 bp, Artificial Sequence
  Description of Artificial Sequence: Synthetic oligonucleotide
gatcagcagtttgagatgggt

SEQ ID NO: 15592 - DNA, 21 bp, Artificial Sequence
  Description of Artificial Sequence: Synthetic oligonucleotide
gatcagcagagttttacgcgt

SEQ ID NO: 15593 - DNA, 21 bp, Artificial Sequence
  Description of Artificial Sequence: Synthetic oligonucleotide
gatcagcgtgcgtcgtcgcct

SEQ ID NO: 15594 - DNA, 21 bp, Artificial Sequence
  Description of Artificial Sequence: Synthetic oligonucleotide
gatcagaggttgcagatgatt

SEQ ID NO: 15595 - DNA, 21 bp, Artificial Sequence
  Description of Artificial Sequence: Synthetic oligonucleotide
gatcagtctgggactgtgtct

SEQ ID NO: 15596 - DNA, 21 bp, Artificial Sequence
  Description of Artificial Sequence: Synthetic oligonucleotide
gatcagtctccgggtatgaag

SEQ ID NO: 15597 - DNA, 21 bp, Artificial Sequence
  Description of Artificial Sequence: Synthetic oligonucleotide
gatcgggctttgtctatgggg

SEQ ID NO: 15598 - DNA, 21 bp, Artificial Sequence
  Description of Artificial Sequence: Synthetic oligonucleotide
gatcgtgatacttcgtctttt

SEQ ID NO: 15599 - DNA, 21 bp, Artificial Sequence
  Description of Artificial Sequence: Synthetic oligonucleotide
gatcgggagcgtccttatagt

SEQ ID NO: 15600 - DNA, 21 bp, Artificial Sequence
  Description of Artificial Sequence: Synthetic oligonucleotide
gatcgttttaattcttatgcg

SEQ ID NO: 15601 - DNA, 21 bp, Artificial Sequence
  Description of Artificial Sequence: Synthetic oligonucleotide
gatcgggggtgtaaggatacg

SEQ ID NO: 15602 - DNA, 21 bp, Artificial Sequence
  Description of Artificial Sequence: Synthetic oligonucleotide
gataggggtgggtttaatgat

SEQ ID NO: 15603 - DNA, 21 bp, Artificial Sequence
  Description of Artificial Sequence: Synthetic oligonucleotide
gataggggtctgaggacggct

SEQ ID NO: 15604 - DNA, 21 bp, Artificial Sequence
  Description of Artificial Sequence: Synthetic oligonucleotide
gataggggtaatggtcctcgg

SEQ ID NO: 15605 - DNA, 21 bp, Artificial Sequence
  Description of Artificial Sequence: Synthetic oligonucleotide
gatcggggtagtgatttgtcg

SEQ ID NO: 15606 - DNA, 21 bp, Artificial Sequence
  Description of Artificial Sequence: Synthetic oligonucleotide
gatcggggttcgctggctcgg

SEQ ID NO: 15607 - DNA, 21 bp, Artificial Sequence
  Description of Artificial Sequence: Synthetic oligonucleotide
gatcggattgagactcagccg

SEQ ID NO: 15608 - DNA, 21 bp, Artificial Sequence
  Description of Artificial Sequence: Synthetic oligonucleotide
gataggattatgcaggagcat

SEQ ID NO: 15609 - DNA, 21 bp, Artificial Sequence
  Description of Artificial Sequence: Synthetic oligonucleotide
gatcgtattcagactgcgcct

SEQ ID NO: 15610 - DNA, 21 bp, Artificial Sequence
  Description of Artificial Sequence: Synthetic oligonucleotide
gatcggaagaagctgaatgag

SEQ ID NO: 15611 - DNA, 21 bp, Artificial Sequence
  Description of Artificial Sequence: Synthetic oligonucleotide
gatcgtaagctggtgacgcct

SEQ ID NO: 15612 - DNA, 21 bp, Artificial Sequence
  Description of Artificial Sequence: Synthetic oligonucleotide
gataggcttgcgacgatgtct

SEQ ID NO: 15613 - DNA, 21 bp, Artificial Sequence
  Description of Artificial Sequence: Synthetic oligonucleotide
gatcggttgaatcagcggggt

SEQ ID NO: 15614 - DNA, 21 bp, Artificial Sequence
  Description of Artificial Sequence: Synthetic oligonucleotide
gatcggatgactaatgctgtt

SEQ ID NO: 15615 - DNA, 21 bp, Artificial Sequence
  Description of Artificial Sequence: Synthetic oligonucleotide
gatcgtaatttggttacgcgg

SEQ ID NO: 15616 - DNA, 21 bp, Artificial Sequence
  Description of Artificial Sequence: Synthetic oligonucleotide
gatcggaatgtgaagcatgtt

SEQ ID NO: 15617 - DNA, 21 bp, Artificial Sequence
  Description of Artificial Sequence: Synthetic oligonucleotide
gatcgtccgtttgaggcgccg

SEQ ID NO: 15618 - DNA, 21 bp, Artificial Sequence
  Description of Artificial Sequence: Synthetic oligonucleotide
gatcggccgggggggaagcct

SEQ ID NO: 15619 - DNA, 21 bp, Artificial Sequence
  Description of Artificial Sequence: Synthetic oligonucleotide
gatcgtccgttgcatgttgtg

SEQ ID NO: 15620 - DNA, 21 bp, Artificial Sequence
  Description of Artificial Sequence: Synthetic oligonucleotide
gataggcctccttgtagtcgt

SEQ ID NO: 15621 - DNA, 21 bp, Artificial Sequence
  Description of Artificial Sequence: Synthetic oligonucleotide
gatcggccgtcttcgcctctg

SEQ ID NO: 15622 - DNA, 21 bp, Artificial Sequence
  Description of Artificial Sequence: Synthetic oligonucleotide
gatcggcagcggccgttgtcg

SEQ ID NO: 15623 - DNA, 21 bp, Artificial Sequence
  Description of Artificial Sequence: Synthetic oligonucleotide
gataggcagactctgactcgt

SEQ ID NO: 15624 - DNA, 21 bp, Artificial Sequence
  Description of Artificial Sequence: Synthetic oligonucleotide
gataggaggatgggtgtggct

SEQ ID NO: 15625 - DNA, 21 bp, Artificial Sequence
  Description of Artificial Sequence: Synthetic oligonucleotide
gataggcgtcctgctcatgat

SEQ ID NO: 15626 - DNA, 21 bp, Artificial Sequence
  Description of Artificial Sequence: Synthetic oligonucleotide
gataggcgttctgaggagcgg

SEQ ID NO: 15627 - DNA, 21 bp, Artificial Sequence
  Description of Artificial Sequence: Synthetic oligonucleotide
gatcggtctgctgctattatt

SEQ ID NO: 15628 - DNA, 21 bp, Artificial Sequence
  Description of Artificial Sequence: Synthetic oligonucleotide
gatcgttcgggtcctaatgag

SEQ ID NO: 15629 - DNA, 21 bp, Artificial Sequence
  Description of Artificial Sequence: Synthetic oligonucleotide
gatcgttctattgctctgcgg

SEQ ID NO: 15630 - DNA, 21 bp, Artificial Sequence
  Description of Artificial Sequence: Synthetic oligonucleotide
gatcggtctctggcgtttgcg

SEQ ID NO: 15631 - DNA, 21 bp, Artificial Sequence
  Description of Artificial Sequence: Synthetic oligonucleotide
gatcgtagtcttcgtagtctt

SEQ ID NO: 15632 - DNA, 21 bp, Artificial Sequence
  Description of Artificial Sequence: Synthetic oligonucleotide
gatcgttctaatgcgggtcat

SEQ ID NO: 15633 - DNA, 21 bp, Artificial Sequence
  Description of Artificial Sequence: Synthetic oligonucleotide
gatcggtctcagctgactgct

SEQ ID NO: 15634 - DNA, 21 bp, Artificial Sequence
  Description of Artificial Sequence: Synthetic oligonucleotide
gataggtcgcaggttcttcat

SEQ ID NO: 15635 - DNA, 21 bp, Artificial Sequence
  Description of Artificial Sequence: Synthetic oligonucleotide
gataggtcggttgttcttaat

SEQ ID NO: 15636 - DNA, 21 bp, Artificial Sequence
  Description of Artificial Sequence: Synthetic oligonucleotide
gataggactgcgcgggcgcct

SEQ ID NO: 15637 - DNA, 21 bp, Artificial Sequence
  Description of Artificial Sequence: Synthetic oligonucleotide
gataggactaagtcgtcgacg

SEQ ID NO: 15638 - DNA, 21 bp, Artificial Sequence
  Description of Artificial Sequence: Synthetic oligonucleotide
gatcgtactacggttcctcct

SEQ ID NO: 15639 - DNA, 21 bp, Artificial Sequence
  Description of Artificial Sequence: Synthetic oligonucleotide
gatcgtacggtttcgctgctg

SEQ ID NO: 15640 - DNA, 21 bp, Artificial Sequence
  Description of Artificial Sequence: Synthetic oligonucleotide
gatagggtgcattcgtcgagt

SEQ ID NO: 15641 - DNA, 21 bp, Artificial Sequence
  Description of Artificial Sequence: Synthetic oligonucleotide
gatagggtgagtacgagtaag

SEQ ID NO: 15642 - DNA, 21 bp, Artificial Sequence
  Description of Artificial Sequence: Synthetic oligonucleotide
gatcgggtgactccggagcct

SEQ ID NO: 15643 - DNA, 21 bp, Artificial Sequence
  Description of Artificial Sequence: Synthetic oligonucleotide
gatcggtggacgtctagttcg

SEQ ID NO: 15644 - DNA, 21 bp, Artificial Sequence
  Description of Artificial Sequence: Synthetic oligonucleotide
gattctgcgccggtggcgcat

SEQ ID NO: 15645 - DNA, 21 bp, Artificial Sequence
  Description of Artificial Sequence: Synthetic oligonucleotide
gatagtgctaggtcggcgatt

SEQ ID NO: 15646 - DNA, 21 bp, Artificial Sequence
  Description of Artificial Sequence: Synthetic oligonucleotide
gatagtgatatgatgggtgag

SEQ ID NO: 15647 - DNA, 21 bp, Artificial Sequence
  Description of Artificial Sequence: Synthetic oligonucleotide
gattcggatagggatagtaag

SEQ ID NO: 15648 - DNA, 21 bp, Artificial Sequence
  Description of Artificial Sequence: Synthetic oligonucleotide
gattctgatcggctttctgcg

SEQ ID NO: 15649 - DNA, 21 bp, Artificial Sequence
  Description of Artificial Sequence: Synthetic oligonucleotide
gattcggagaagacgattcct

SEQ ID NO: 15650 - DNA, 21 bp, Artificial Sequence
  Description of Artificial Sequence: Synthetic oligonucleotide
gattcggaggtgcctatgtat

SEQ ID NO: 15651 - DNA, 21 bp, Artificial Sequence
  Description of Artificial Sequence: Synthetic oligonucleotide
gattctgaggtgagtcatccg

SEQ ID NO: 15652 - DNA, 21 bp, Artificial Sequence
  Description of Artificial Sequence: Synthetic oligonucleotide
gattcgtttggtaggccgcag

SEQ ID NO: 15653 - DNA, 21 bp, Artificial Sequence
  Description of Artificial Sequence: Synthetic oligonucleotide
gattctggtgctagtctgggt

SEQ ID NO: 15654 - DNA, 21 bp, Artificial Sequence
  Description of Artificial Sequence: Synthetic oligonucleotide
gatagtggtgatcctgcgcgt

SEQ ID NO: 15655 - DNA, 21 bp, Artificial Sequence
  Description of Artificial Sequence: Synthetic oligonucleotide
gattctgggattggttatcct

SEQ ID NO: 15656 - DNA, 21 bp, Artificial Sequence
  Description of Artificial Sequence: Synthetic oligonucleotide
gattctggttcgaatggtctt

SEQ ID NO: 15657 - DNA, 21 bp, Artificial Sequence
  Description of Artificial Sequence: Synthetic oligonucleotide
gattctcattatagggttccg

SEQ ID NO: 15658 - DNA, 21 bp, Artificial Sequence
  Description of Artificial Sequence: Synthetic oligonucleotide
gattcgattgatccgaagttt

SEQ ID NO: 15659 - DNA, 21 bp, Artificial Sequence
  Description of Artificial Sequence: Synthetic oligonucleotide
gattcgattgggccggggact

SEQ ID NO: 15660 - DNA, 21 bp, Artificial Sequence
  Description of Artificial Sequence: Synthetic oligonucleotide
gattcgattcatattatggct

SEQ ID NO: 15661 - DNA, 21 bp, Artificial Sequence
  Description of Artificial Sequence: Synthetic oligonucleotide
gatagtatttcgagtcgggcg

SEQ ID NO: 15662 - DNA, 21 bp, Artificial Sequence
  Description of Artificial Sequence: Synthetic oligonucleotide
gattcgattacgagggcttct

SEQ ID NO: 15663 - DNA, 21 bp, Artificial Sequence
  Description of Artificial Sequence: Synthetic oligonucleotide
gattctattacgactcgtatt

SEQ ID NO: 15664 - DNA, 21 bp, Artificial Sequence
  Description of Artificial Sequence: Synthetic oligonucleotide
gattcgaagcggacgattacg

SEQ ID NO: 15665 - DNA, 21 bp, Artificial Sequence
  Description of Artificial Sequence: Synthetic oligonucleotide
gattcgttggcgtcgaggccg

SEQ ID NO: 15666 - DNA, 21 bp, Artificial Sequence
  Description of Artificial Sequence: Synthetic oligonucleotide
gattcgttggggaagaggtcg

SEQ ID NO: 15667 - DNA, 21 bp, Artificial Sequence
  Description of Artificial Sequence: Synthetic oligonucleotide
gattcgctgaagctgtcttcg

SEQ ID NO: 15668 - DNA, 21 bp, Artificial Sequence
  Description of Artificial Sequence: Synthetic oligonucleotide
gatagtatggagctttattct

SEQ ID NO: 15669 - DNA, 21 bp, Artificial Sequence
  Description of Artificial Sequence: Synthetic oligonucleotide
gattctatgggtgcttcgggt

SEQ ID NO: 15670 - DNA, 21 bp, Artificial Sequence
  Description of Artificial Sequence: Synthetic oligonucleotide
gattcgaatattccgccgcgt

SEQ ID NO: 15671 - DNA, 21 bp, Artificial Sequence
  Description of Artificial Sequence: Synthetic oligonucleotide
gattctaataatgagaagtct

SEQ ID NO: 15672 - DNA, 21 bp, Artificial Sequence
  Description of Artificial Sequence: Synthetic oligonucleotide
gattctaatccgtctttgtcg

SEQ ID NO: 15673 - DNA, 21 bp, Artificial Sequence
  Description of Artificial Sequence: Synthetic oligonucleotide
gatagtaatcggttggtggat

SEQ ID NO: 15674 - DNA, 21 bp, Artificial Sequence
  Description of Artificial Sequence: Synthetic oligonucleotide
gattcgccgaagtattctcat

SEQ ID NO: 15675 - DNA, 21 bp, Artificial Sequence
  Description of Artificial Sequence: Synthetic oligonucleotide
gattctcctagttttgtgttg

SEQ ID NO: 15676 - DNA, 21 bp, Artificial Sequence
  Description of Artificial Sequence: Synthetic oligonucleotide
gattctcagatttatgtgtcg

SEQ ID NO: 15677 - DNA, 21 bp, Artificial Sequence
  Description of Artificial Sequence: Synthetic oligonucleotide
gattcgcagctgaatgcgcct

SEQ ID NO: 15678 - DNA, 21 bp, Artificial Sequence
  Description of Artificial Sequence: Synthetic oligonucleotide
gattctcagatgcgtactatg

SEQ ID NO: 15679 - DNA, 21 bp, Artificial Sequence
  Description of Artificial Sequence: Synthetic oligonucleotide
gattctaggattgcggcgttg

SEQ ID NO: 15680 - DNA, 21 bp, Artificial Sequence
  Description of Artificial Sequence: Synthetic oligonucleotide
gatagtcgtttgctgtctggt

SEQ ID NO: 15681 - DNA, 21 bp, Artificial Sequence
  Description of Artificial Sequence: Synthetic oligonucleotide
gatagtcgtatggctgctagt

SEQ ID NO: 15682 - DNA, 21 bp, Artificial Sequence
  Description of Artificial Sequence: Synthetic oligonucleotide
gattctcggaatgctgtgacg

SEQ ID NO: 15683 - DNA, 21 bp, Artificial Sequence
  Description of Artificial Sequence: Synthetic oligonucleotide
gattcgcgtcctttgagtgtt

SEQ ID NO: 15684 - DNA, 21 bp, Artificial Sequence
  Description of Artificial Sequence: Synthetic oligonucleotide
gattctcgtcaggggcgggtg

SEQ ID NO: 15685 - DNA, 21 bp, Artificial Sequence
  Description of Artificial Sequence: Synthetic oligonucleotide
gattcgaggtcgttgagggcg

SEQ ID NO: 15686 - DNA, 21 bp, Artificial Sequence
  Description of Artificial Sequence: Synthetic oligonucleotide
gattcgtcggctaaggagagt

SEQ ID NO: 15687 - DNA, 21 bp, Artificial Sequence
  Description of Artificial Sequence: Synthetic oligonucleotide
gatagttctgagtatagtcct

SEQ ID NO: 15688 - DNA, 21 bp, Artificial Sequence
  Description of Artificial Sequence: Synthetic oligonucleotide
gatagtagtcatactttgcag

SEQ ID NO: 15689 - DNA, 21 bp, Artificial Sequence
  Description of Artificial Sequence: Synthetic oligonucleotide
gattctagtcatactatgatg

SEQ ID NO: 15690 - DNA, 21 bp, Artificial Sequence
  Description of Artificial Sequence: Synthetic oligonucleotide
gattcgtcgcattatcctggt

SEQ ID NO: 15691 - DNA, 21 bp, Artificial Sequence
  Description of Artificial Sequence: Synthetic oligonucleotide
gattcgtcgcctctggttcgg

SEQ ID NO: 15692 - DNA, 21 bp, Artificial Sequence
  Description of Artificial Sequence: Synthetic oligonucleotide
gatagtacgccggaggagggt

SEQ ID NO: 15693 - DNA, 21 bp, Artificial Sequence
  Description of Artificial Sequence: Synthetic oligonucleotide
gattcgactcagtttcctagg

SEQ ID NO: 15694 - DNA, 21 bp, Artificial Sequence
  Description of Artificial Sequence: Synthetic oligonucleotide
gatagtgttcatttggggcgt

SEQ ID NO: 15695 - DNA, 21 bp, Artificial Sequence
  Description of Artificial Sequence: Synthetic oligonucleotide
gattcggtgaaggctagtcag

SEQ ID NO: 15696 - DNA, 21 bp, Artificial Sequence
  Description of Artificial Sequence: Synthetic oligonucleotide
gatactgctgctaaggattct

SEQ ID NO: 15697 - DNA, 21 bp, Artificial Sequence
  Description of Artificial Sequence: Synthetic oligonucleotide
gatactgcgtcgcgtcttgct

SEQ ID NO: 15698 - DNA, 21 bp, Artificial Sequence
  Description of Artificial Sequence: Synthetic oligonucleotide
gatactgatgggcagcgtgct

SEQ ID NO: 15699 - DNA, 21 bp, Artificial Sequence
  Description of Artificial Sequence: Synthetic oligonucleotide
gatacgcatgcttatgatggg

SEQ ID NO: 15700 - DNA, 21 bp, Artificial Sequence
  Description of Artificial Sequence: Synthetic oligonucleotide
gatactcatattattgcgtcg

SEQ ID NO: 15701 - DNA, 21 bp, Artificial Sequence
  Description of Artificial Sequence: Synthetic oligonucleotide
gatactcataggtcggagagg

SEQ ID NO: 15702 - DNA, 21 bp, Artificial Sequence
  Description of Artificial Sequence: Synthetic oligonucleotide
gatactcatgttattgcgagt

SEQ ID NO: 15703 - DNA, 21 bp, Artificial Sequence
  Description of Artificial Sequence: Synthetic oligonucleotide
gatactattgcgcatgctccg

SEQ ID NO: 15704 - DNA, 21 bp, Artificial Sequence
  Description of Artificial Sequence: Synthetic oligonucleotide
gatactttggctttgtcttgt

SEQ ID NO: 15705 - DNA, 21 bp, Artificial Sequence
  Description of Artificial Sequence: Synthetic oligonucleotide
gatactctggcgaattctgcg

SEQ ID NO: 15706 - DNA, 21 bp, Artificial Sequence
  Description of Artificial Sequence: Synthetic oligonucleotide
gatacgttggggttggagccg

SEQ ID NO: 15707 - DNA, 21 bp, Artificial Sequence
  Description of Artificial Sequence: Synthetic oligonucleotide
gatactttgatgattcgtggg

SEQ ID NO: 15708 - DNA, 21 bp, Artificial Sequence
  Description of Artificial Sequence: Synthetic oligonucleotide
gatactttgagtacgacgcgg

SEQ ID NO: 15709 - DNA, 21 bp, Artificial Sequence
  Description of Artificial Sequence: Synthetic oligonucleotide
gatactaatatgttgcatgtg

SEQ ID NO: 15710 - DNA, 21 bp, Artificial Sequence
  Description of Artificial Sequence: Synthetic oligonucleotide
gatactccggatgctcttcgt

SEQ ID NO: 15711 - DNA, 21 bp, Artificial Sequence
  Description of Artificial Sequence: Synthetic oligonucleotide
gatacgccgcatctttctttg

SEQ ID NO: 15712 - DNA, 21 bp, Artificial Sequence
  Description of Artificial Sequence: Synthetic oligonucleotide
gatactccgcttgagctggct

SEQ ID NO: 15713 - DNA, 21 bp, Artificial Sequence
  Description of Artificial Sequence: Synthetic oligonucleotide
gatactccgatgcctaagatt

SEQ ID NO: 15714 - DNA, 21 bp, Artificial Sequence
  Description of Artificial Sequence: Synthetic oligonucleotide
gatacgccgaatgatactgcg

SEQ ID NO: 15715 - DNA, 21 bp, Artificial Sequence
  Description of Artificial Sequence: Synthetic oligonucleotide
gatacgcagcatcttaagccg

SEQ ID NO: 15716 - DNA, 21 bp, Artificial Sequence
  Description of Artificial Sequence: Synthetic oligonucleotide
gatactcagttgcctaatcct

SEQ ID NO: 15717 - DNA, 21 bp, Artificial Sequence
  Description of Artificial Sequence: Synthetic oligonucleotide
gatacgcagctgacgttggcg

SEQ ID NO: 15718 - DNA, 21 bp, Artificial Sequence
  Description of Artificial Sequence: Synthetic oligonucleotide
gatacgcagagtgtgtcgttg

SEQ ID NO: 15719 - DNA, 21 bp, Artificial Sequence
  Description of Artificial Sequence: Synthetic oligonucleotide
gatacgagggcgtttacgggt

SEQ ID NO: 15720 - DNA, 21 bp, Artificial Sequence
  Description of Artificial Sequence: Synthetic oligonucleotide
gatactcgtcatagtgatttg

SEQ ID NO: 15721 - DNA, 21 bp, Artificial Sequence
  Description of Artificial Sequence: Synthetic oligonucleotide
gatactcggagggagtgtgat

SEQ ID NO: 15722 - DNA, 21 bp, Artificial Sequence
  Description of Artificial Sequence: Synthetic oligonucleotide
gatacttcgaggacgtctttg

SEQ ID NO: 15723 - DNA, 21 bp, Artificial Sequence
  Description of Artificial Sequence: Synthetic oligonucleotide
gatacgagtagtcgtatgacg

SEQ ID NO: 15724 - DNA, 21 bp, Artificial Sequence
  Description of Artificial Sequence: Synthetic oligonucleotide
gatacttcttggaagagtact

SEQ ID NO: 15725 - DNA, 21 bp, Artificial Sequence
  Description of Artificial Sequence: Synthetic oligonucleotide
gatactactgagcgtccgtgg

SEQ ID NO: 15726 - DNA, 21 bp, Artificial Sequence
  Description of Artificial Sequence: Synthetic oligonucleotide
gatactacggggaggtatttg

SEQ ID NO: 15727 - DNA, 21 bp, Artificial Sequence
  Description of Artificial Sequence: Synthetic oligonucleotide
gatactactcttctgcggggt

SEQ ID NO: 15728 - DNA, 21 bp, Artificial Sequence
  Description of Artificial Sequence: Synthetic oligonucleotide
gatactacgcctattgtgcgt

SEQ ID NO: 15729 - DNA, 21 bp, Artificial Sequence
  Description of Artificial Sequence: Synthetic oligonucleotide
gatacttatgcgattgctatt

SEQ ID NO: 15730 - DNA, 21 bp, Artificial Sequence
  Description of Artificial Sequence: Synthetic oligonucleotide
gatacgtataatacgcctgcg

SEQ ID NO: 15731 - DNA, 21 bp, Artificial Sequence
  Description of Artificial Sequence: Synthetic oligonucleotide
gatgtggcgtctcgttctctg

SEQ ID NO: 15732 - DNA, 21 bp, Artificial Sequence
  Description of Artificial Sequence: Synthetic oligonucleotide
gatgttgcttcgtcgcgtctg

SEQ ID NO: 15733 - DNA, 21 bp, Artificial Sequence
  Description of Artificial Sequence: Synthetic oligonucleotide
gatgtggatgatacgatgtgg

SEQ ID NO: 15734 - DNA, 21 bp, Artificial Sequence
  Description of Artificial Sequence: Synthetic oligonucleotide
gatgttgatctgcttcctact

SEQ ID NO: 15735 - DNA, 21 bp, Artificial Sequence
  Description of Artificial Sequence: Synthetic oligonucleotide
gatgttgataggttgaatact

SEQ ID NO: 15736 - DNA, 21 bp, Artificial Sequence
  Description of Artificial Sequence: Synthetic oligonucleotide
gatgtggattcgcatcatact

SEQ ID NO: 15737 - DNA, 21 bp, Artificial Sequence
  Description of Artificial Sequence: Synthetic oligonucleotide
gatgttgatgtgaggcatggt

SEQ ID NO: 15738 - DNA, 21 bp, Artificial Sequence
  Description of Artificial Sequence: Synthetic oligonucleotide
gatgttgagcctcttcagatg

SEQ ID NO: 15739 - DNA, 21 bp, Artificial Sequence
  Description of Artificial Sequence: Synthetic oligonucleotide
gatgtgtttcgtactcagcct

SEQ ID NO: 15740 - DNA, 21 bp, Artificial Sequence
  Description of Artificial Sequence: Synthetic oligonucleotide
gatgttgggacgtatggtcgt

SEQ ID NO: 15741 - DNA, 21 bp, Artificial Sequence
  Description of Artificial Sequence: Synthetic oligonucleotide
gatgttaagacgaatgtttat

SEQ ID NO: 15742 - DNA, 21 bp, Artificial Sequence
  Description of Artificial Sequence: Synthetic oligonucleotide
gatgttttgttttctaagaat

SEQ ID NO: 15743 - DNA, 21 bp, Artificial Sequence
  Description of Artificial Sequence: Synthetic oligonucleotide
gatgttcttggtaagcatgct

SEQ ID NO: 15744 - DNA, 21 bp, Artificial Sequence
  Description of Artificial Sequence: Synthetic oligonucleotide
gatgttttgaagacggatttt

SEQ ID NO: 15745 - DNA, 21 bp, Artificial Sequence
  Description of Artificial Sequence: Synthetic oligonucleotide
gatgttctgaattctactgat

SEQ ID NO: 15746 - DNA, 21 bp, Artificial Sequence
  Description of Artificial Sequence: Synthetic oligonucleotide
gatgtgatgagtcagcttctg

SEQ ID NO: 15747 - DNA, 21 bp, Artificial Sequence
  Description of Artificial Sequence: Synthetic oligonucleotide
gatgttcctaatgcgccgtgt

SEQ ID NO: 15748 - DNA, 21 bp, Artificial Sequence
  Description of Artificial Sequence: Synthetic oligonucleotide
gatgtgccgaatccgacgggg

SEQ ID NO: 15749 - DNA, 21 bp, Artificial Sequence
  Description of Artificial Sequence: Synthetic oligonucleotide
gatgtgccgaatacgatgact

SEQ ID NO: 15750 - DNA, 21 bp, Artificial Sequence
  Description of Artificial Sequence: Synthetic oligonucleotide
gatgtgccgtattcgcttgag

SEQ ID NO: 15751 - DNA, 21 bp, Artificial Sequence
  Description of Artificial Sequence: Synthetic oligonucleotide
gatgttcagatgcataagcat

SEQ ID NO: 15752 - DNA, 21 bp, Artificial Sequence
  Description of Artificial Sequence: Synthetic oligonucleotide
gatgtgaggaatacgcggctg

SEQ ID NO: 15753 - DNA, 21 bp, Artificial Sequence
  Description of Artificial Sequence: Synthetic oligonucleotide
gatgttaggcaggcgtatttt

SEQ ID NO: 15754 - DNA, 21 bp, Artificial Sequence
  Description of Artificial Sequence: Synthetic oligonucleotide
gatgtgcgggttggtcatatt

SEQ ID NO: 15755 - DNA, 21 bp, Artificial Sequence
  Description of Artificial Sequence: Synthetic oligonucleotide
gatgtgagtggtactattggg

SEQ ID NO: 15756 - DNA, 21 bp, Artificial Sequence
  Description of Artificial Sequence: Synthetic oligonucleotide
gatgtttctctgcgtgtgacg

SEQ ID NO: 15757 - DNA, 21 bp, Artificial Sequence
  Description of Artificial Sequence: Synthetic oligonucleotide
gatgtttcttcgcctcttatt

SEQ ID NO: 15758 - DNA, 21 bp, Artificial Sequence
  Description of Artificial Sequence: Synthetic oligonucleotide
gatgttagtgtttctgatgtt

SEQ ID NO: 15759 - DNA, 21 bp, Artificial Sequence
  Description of Artificial Sequence: Synthetic oligonucleotide
gatgtgacggttggtagttct

SEQ ID NO: 15760 - DNA, 21 bp, Artificial Sequence
  Description of Artificial Sequence: Synthetic oligonucleotide
gatgttgttgcggggccgcct

SEQ ID NO: 15761 - DNA, 21 bp, Artificial Sequence
  Description of Artificial Sequence: Synthetic oligonucleotide
gatgttgtgaattcgcttaat

SEQ ID NO: 15762 - DNA, 21 bp, Artificial Sequence
  Description of Artificial Sequence: Synthetic oligonucleotide
gatgtggtgcctaggtcggcg

SEQ ID NO: 15763 - DNA, 21 bp, Artificial Sequence
  Description of Artificial Sequence: Synthetic oligonucleotide
gattggggtcctaagcagcgg

SEQ ID NO: 15764 - DNA, 21 bp, Artificial Sequence
  Description of Artificial Sequence: Synthetic oligonucleotide
gattggaagccgaatcatgag

SEQ ID NO: 15765 - DNA, 21 bp, Artificial Sequence
  Description of Artificial Sequence: Synthetic oligonucleotide
gattggaagcagactactgct

SEQ ID NO: 15766 - DNA, 21 bp, Artificial Sequence
  Description of Artificial Sequence: Synthetic oligonucleotide
gattggcagcgtcatggtcct

SEQ ID NO: 15767 - DNA, 21 bp, Artificial Sequence
  Description of Artificial Sequence: Synthetic oligonucleotide
gattggactcatattgataag

SEQ ID NO: 15768 - DNA, 21 bp, Artificial Sequence
  Description of Artificial Sequence: Synthetic oligonucleotide
gattggactccgcggactacg

SEQ ID NO: 15769 - DNA, 21 bp, Artificial Sequence
  Description of Artificial Sequence: Synthetic oligonucleotide
gattatgcgattgggaagacg

SEQ ID NO: 15770 - DNA, 21 bp, Artificial Sequence
  Description of Artificial Sequence: Synthetic oligonucleotide
gattatgagtctttttcgcgg

SEQ ID NO: 15771 - DNA, 21 bp, Artificial Sequence
  Description of Artificial Sequence: Synthetic oligonucleotide
gattatggtcctgagattatt

SEQ ID NO: 15772 - DNA, 21 bp, Artificial Sequence
  Description of Artificial Sequence: Synthetic oligonucleotide
gattatggtcagctttcgaat

SEQ ID NO: 15773 - DNA, 21 bp, Artificial Sequence
  Description of Artificial Sequence: Synthetic oligonucleotide
gattatcatcagatgcattct

SEQ ID NO: 15774 - DNA, 21 bp, Artificial Sequence
  Description of Artificial Sequence: Synthetic oligonucleotide
gattatcatcgggcgccgggg

SEQ ID NO: 15775 - DNA, 21 bp, Artificial Sequence
  Description of Artificial Sequence: Synthetic oligonucleotide
gattatcctccggaggttctt

SEQ ID NO: 15776 - DNA, 21 bp, Artificial Sequence
  Description of Artificial Sequence: Synthetic oligonucleotide
gattatagggagtatacgcgt

SEQ ID NO: 15777 - DNA, 21 bp, Artificial Sequence
  Description of Artificial Sequence: Synthetic oligonucleotide
gattatcggtttgctgatagt

SEQ ID NO: 15778 - DNA, 21 bp, Artificial Sequence
  Description of Artificial Sequence: Synthetic oligonucleotide
gattatcgtattacgaattct

SEQ ID NO: 15779 - DNA, 21 bp, Artificial Sequence
  Description of Artificial Sequence: Synthetic oligonucleotide
gattataggttgcttcctgag

SEQ ID NO: 15780 - DNA, 21 bp, Artificial Sequence
  Description of Artificial Sequence: Synthetic oligonucleotide
gattatcgtcagattgatcag

SEQ ID NO: 15781 - DNA, 21 bp, Artificial Sequence
  Description of Artificial Sequence: Synthetic oligonucleotide
gattattctgagatgtcgaag

SEQ ID NO: 15782 - DNA, 21 bp, Artificial Sequence
  Description of Artificial Sequence: Synthetic oligonucleotide
gattattcgtctgcgcgggct

SEQ ID NO: 15783 - DNA, 21 bp, Artificial Sequence
  Description of Artificial Sequence: Synthetic oligonucleotide
gattattcgtcgtcgatgcgg

SEQ ID NO: 15784 - DNA, 21 bp, Artificial Sequence
  Description of Artificial Sequence: Synthetic oligonucleotide
gattatactctgactccgtct

SEQ ID NO: 15785 - DNA, 21 bp, Artificial Sequence
  Description of Artificial Sequence: Synthetic oligonucleotide
gattatgttcctgtggagctg

SEQ ID NO: 15786 - DNA, 21 bp, Artificial Sequence
  Description of Artificial Sequence: Synthetic oligonucleotide
gaggctgcgcatccgggtatg

SEQ ID NO: 15787 - DNA, 21 bp, Artificial Sequence
  Description of Artificial Sequence: Synthetic oligonucleotide
gaggctgctatgacgcgggag

SEQ ID NO: 15788 - DNA, 21 bp, Artificial Sequence
  Description of Artificial Sequence: Synthetic oligonucleotide
gaggcggctccgattcctcgg

SEQ ID NO: 15789 - DNA, 21 bp, Artificial Sequence
  Description of Artificial Sequence: Synthetic oligonucleotide
gaggcggcttcgaggcatgat

SEQ ID NO: 15790 - DNA, 21 bp, Artificial Sequence
  Description of Artificial Sequence: Synthetic oligonucleotide
gaggcggctagtagtcctaag

SEQ ID NO: 15791 - DNA, 21 bp, Artificial Sequence
  Description of Artificial Sequence: Synthetic oligonucleotide
gaggcggcgactcttactact

SEQ ID NO: 15792 - DNA, 21 bp, Artificial Sequence
  Description of Artificial Sequence: Synthetic oligonucleotide
gaggcttttcatacgagttcg

SEQ ID NO: 15793 - DNA, 21 bp, Artificial Sequence
  Description of Artificial Sequence: Synthetic oligonucleotide
gaggcgttttctggtcgtatt

SEQ ID NO: 15794 - DNA, 21 bp, Artificial Sequence
  Description of Artificial Sequence: Synthetic oligonucleotide
gaggctaagactaataggact

SEQ ID NO: 15795 - DNA, 21 bp, Artificial Sequence
  Description of Artificial Sequence: Synthetic oligonucleotide
gaggcgctggctgtgaggcct

SEQ ID NO: 15796 - DNA, 21 bp, Artificial Sequence
  Description of Artificial Sequence: Synthetic oligonucleotide
gaggctcttcgtggtccgatt

SEQ ID NO: 15797 - DNA, 21 bp, Artificial Sequence
  Description of Artificial Sequence: Synthetic oligonucleotide
gaggctatgcattctcgtgct

SEQ ID NO: 15798 - DNA, 21 bp, Artificial Sequence
  Description of Artificial Sequence: Synthetic oligonucleotide
gaggcgaatgatgagactaag

SEQ ID NO: 15799 - DNA, 21 bp, Artificial Sequence
  Description of Artificial Sequence: Synthetic oligonucleotide
gaggcgaatcgtagtccgatg

SEQ ID NO: 15800 - DNA, 21 bp, Artificial Sequence
  Description of Artificial Sequence: Synthetic oligonucleotide
gaggctcagagggcggcgccg

SEQ ID NO: 15801 - DNA, 21 bp, Artificial Sequence
  Description of Artificial Sequence: Synthetic oligonucleotide
gaggcgcgtcatgtgtatgct

SEQ ID NO: 15802 - DNA, 21 bp, Artificial Sequence
  Description of Artificial Sequence: Synthetic oligonucleotide
gaggctcgttatgagtcgggg

SEQ ID NO: 15803 - DNA, 21 bp, Artificial Sequence
  Description of Artificial Sequence: Synthetic oligonucleotide
gaggcgcgttatgttcatgtg

SEQ ID NO: 15804 - DNA, 21 bp, Artificial Sequence
  Description of Artificial Sequence: Synthetic oligonucleotide
gaggcgtcgcattttactatg

SEQ ID NO: 15805 - DNA, 21 bp, Artificial Sequence
  Description of Artificial Sequence: Synthetic oligonucleotide
gaggcgtcgttggcggctaag

SEQ ID NO: 15806 - DNA, 21 bp, Artificial Sequence
  Description of Artificial Sequence: Synthetic oligonucleotide
gaggctagtaatgctattgct

SEQ ID NO: 15807 - DNA, 21 bp, Artificial Sequence
  Description of Artificial Sequence: Synthetic oligonucleotide
gaggctagtcgtgtgacggtt

SEQ ID NO: 15808 - DNA, 21 bp, Artificial Sequence
  Description of Artificial Sequence: Synthetic oligonucleotide
gaggcgtcttcgatgcattcg

SEQ ID NO: 15809 - DNA, 21 bp, Artificial Sequence
  Description of Artificial Sequence: Synthetic oligonucleotide
gaggcttcggttcttacgagg

SEQ ID NO: 15810 - DNA, 21 bp, Artificial Sequence
  Description of Artificial Sequence: Synthetic oligonucleotide
gaggcttcgtatatgcctcct

SEQ ID NO: 15811 - DNA, 21 bp, Artificial Sequence
  Description of Artificial Sequence: Synthetic oligonucleotide
gaggctacgatggttaaggat

SEQ ID NO: 15812 - DNA, 21 bp, Artificial Sequence
  Description of Artificial Sequence: Synthetic oligonucleotide
gaggctacgaatcggcatcct

SEQ ID NO: 15813 - DNA, 21 bp, Artificial Sequence
  Description of Artificial Sequence: Synthetic oligonucleotide
gaggctactcctccgactatt

SEQ ID NO: 15814 - DNA, 21 bp, Artificial Sequence
  Description of Artificial Sequence: Synthetic oligonucleotide
gaggctacgactaattttctt

SEQ ID NO: 15815 - DNA, 21 bp, Artificial Sequence
  Description of Artificial Sequence: Synthetic oligonucleotide
gaggcgacgacgccgatgccg

SEQ ID NO: 15816 - DNA, 21 bp, Artificial Sequence
  Description of Artificial Sequence: Synthetic oligonucleotide
gaggctgtgacgccgcgtcat

SEQ ID NO: 15817 - DNA, 21 bp, Artificial Sequence
  Description of Artificial Sequence: Synthetic oligonucleotide
gaggcggttactgtgaagatg

SEQ ID NO: 15818 - DNA, 21 bp, Artificial Sequence
  Description of Artificial Sequence: Synthetic oligonucleotide
gaggatgcggagcgtgagtat

SEQ ID NO: 15819 - DNA, 21 bp, Artificial Sequence
  Description of Artificial Sequence: Synthetic oligonucleotide
gaggatgctcctccgtcgcgg

SEQ ID NO: 15820 - DNA, 21 bp, Artificial Sequence
  Description of Artificial Sequence: Synthetic oligonucleotide
gaggatattcgtatgccttct

SEQ ID NO: 15821 - DNA, 21 bp, Artificial Sequence
  Description of Artificial Sequence: Synthetic oligonucleotide
gaggataagcagcatctttct

SEQ ID NO: 15822 - DNA, 21 bp, Artificial Sequence
  Description of Artificial Sequence: Synthetic oligonucleotide
gaggatctgccggggaagatg

SEQ ID NO: 15823 - DNA, 21 bp, Artificial Sequence
  Description of Artificial Sequence: Synthetic oligonucleotide
gaggatatgcctcagcttggt

SEQ ID NO: 15824 - DNA, 21 bp, Artificial Sequence
  Description of Artificial Sequence: Synthetic oligonucleotide
gaggatcctcttggtcagatg

SEQ ID NO: 15825 - DNA, 21 bp, Artificial Sequence
  Description of Artificial Sequence: Synthetic oligonucleotide
gaggattcgcattttgcgcct

SEQ ID NO: 15826 - DNA, 21 bp, Artificial Sequence
  Description of Artificial Sequence: Synthetic oligonucleotide
gaggaggcgatgtatcctttt

SEQ ID NO: 15827 - DNA, 21 bp, Artificial Sequence
  Description of Artificial Sequence: Synthetic oligonucleotide
gaggaggcttcgcttagtctg

SEQ ID NO: 15828 - DNA, 21 bp, Artificial Sequence
  Description of Artificial Sequence: Synthetic oligonucleotide
gaggagcttgctaaggctgat

SEQ ID NO: 15829 - DNA, 21 bp, Artificial Sequence
  Description of Artificial Sequence: Synthetic oligonucleotide
gaggagttgcggaggcatgtg

SEQ ID NO: 15830 - DNA, 21 bp, Artificial Sequence
  Description of Artificial Sequence: Synthetic oligonucleotide
gaggagaatcttcagcggact

SEQ ID NO: 15831 - DNA, 21 bp, Artificial Sequence
  Description of Artificial Sequence: Synthetic oligonucleotide
gaggagtctggtcgggttgcg

SEQ ID NO: 15832 - DNA, 21 bp, Artificial Sequence
  Description of Artificial Sequence: Synthetic oligonucleotide
gaggagtcgaagcgttcggct

SEQ ID NO: 15833 - DNA, 21 bp, Artificial Sequence
  Description of Artificial Sequence: Synthetic oligonucleotide
gaggagagtccggagtcgatt

SEQ ID NO: 15834 - DNA, 21 bp, Artificial Sequence
  Description of Artificial Sequence: Synthetic oligonucleotide
gaggagacgcggaagccgctt

SEQ ID NO: 15835 - DNA, 21 bp, Artificial Sequence
  Description of Artificial Sequence: Synthetic oligonucleotide
gaggagacttggcataggctt

SEQ ID NO: 15836 - DNA, 21 bp, Artificial Sequence
  Description of Artificial Sequence: Synthetic oligonucleotide
gaggagtatgtggagaggatt

SEQ ID NO: 15837 - DNA, 21 bp, Artificial Sequence
  Description of Artificial Sequence: Synthetic oligonucleotide
gagtttgatcagcgtaatatt

SEQ ID NO: 15838 - DNA, 21 bp, Artificial Sequence
  Description of Artificial Sequence: Synthetic oligonucleotide
gagtttgagcgtcgtacgacg

SEQ ID NO: 15839 - DNA, 21 bp, Artificial Sequence
  Description of Artificial Sequence: Synthetic oligonucleotide
gagtttgaggtttgttgtgct

SEQ ID NO: 15840 - DNA, 21 bp, Artificial Sequence
  Description of Artificial Sequence: Synthetic oligonucleotide
gagtttgggatgacggtgccg

SEQ ID NO: 15841 - DNA, 21 bp, Artificial Sequence
  Description of Artificial Sequence: Synthetic oligonucleotide
gagtttattgagatgaggcct

SEQ ID NO: 15842 - DNA, 21 bp, Artificial Sequence
  Description of Artificial Sequence: Synthetic oligonucleotide
gagtttaatggtaagaatgat

SEQ ID NO: 15843 - DNA, 21 bp, Artificial Sequence
  Description of Artificial Sequence: Synthetic oligonucleotide
gagtttaataagagtggtgct

SEQ ID NO: 15844 - DNA, 21 bp, Artificial Sequence
  Description of Artificial Sequence: Synthetic oligonucleotide
gagtttaatccggctcttagt

SEQ ID NO: 15845 - DNA, 21 bp, Artificial Sequence
  Description of Artificial Sequence: Synthetic oligonucleotide
gagtttccttcgttggatgat

SEQ ID NO: 15846 - DNA, 21 bp, Artificial Sequence
  Description of Artificial Sequence: Synthetic oligonucleotide
gagtttcctacgtctcttccg

SEQ ID NO: 15847 - DNA, 21 bp, Artificial Sequence
  Description of Artificial Sequence: Synthetic oligonucleotide
gagtttcagaagaagtcttct

SEQ ID NO: 15848 - DNA, 21 bp, Artificial Sequence
  Description of Artificial Sequence: Synthetic oligonucleotide
gagtttcagtcgttgcatgtg

SEQ ID NO: 15849 - DNA, 21 bp, Artificial Sequence
  Description of Artificial Sequence: Synthetic oligonucleotide
gagtttcggctgtctgctgtt

SEQ ID NO: 15850 - DNA, 21 bp, Artificial Sequence
  Description of Artificial Sequence: Synthetic oligonucleotide
gagtttaggtctactgggacg

SEQ ID NO: 15851 - DNA, 21 bp, Artificial Sequence
  Description of Artificial Sequence: Synthetic oligonucleotide
gagttttcgcagatgacggag

SEQ ID NO: 15852 - DNA, 21 bp, Artificial Sequence
  Description of Artificial Sequence: Synthetic oligonucleotide
gagttttctcgtatgaatacg

SEQ ID NO: 15853 - DNA, 21 bp, Artificial Sequence
  Description of Artificial Sequence: Synthetic oligonucleotide
gagttttcgacttcgcttagt

SEQ ID NO: 15854 - DNA, 21 bp, Artificial Sequence
  Description of Artificial Sequence: Synthetic oligonucleotide
gagtttacgcataataaggct

SEQ ID NO: 15855 - DNA, 21 bp, Artificial Sequence
  Description of Artificial Sequence: Synthetic oligonucleotide
gagtttacgtctgaggatctt

SEQ ID NO: 15856 - DNA, 21 bp, Artificial Sequence
  Description of Artificial Sequence: Synthetic oligonucleotide
gagtttgttttgtcgttgagt

SEQ ID NO: 15857 - DNA, 21 bp, Artificial Sequence
  Description of Artificial Sequence: Synthetic oligonucleotide
gagttttataaggattgggat

SEQ ID NO: 15858 - DNA, 21 bp, Artificial Sequence
  Description of Artificial Sequence: Synthetic oligonucleotide
gagggtgcgaatgcggctact

SEQ ID NO: 15859 - DNA, 21 bp, Artificial Sequence
  Description of Artificial Sequence: Synthetic oligonucleotide
gagggtgattttgttcgggcg

SEQ ID NO: 15860 - DNA, 21 bp, Artificial Sequence
  Description of Artificial Sequence: Synthetic oligonucleotide
gagggggataatcggttgttt

SEQ ID NO: 15861 - DNA, 21 bp, Artificial Sequence
  Description of Artificial Sequence: Synthetic oligonucleotide
gagggggagaatcagactact

SEQ ID NO: 15862 - DNA, 21 bp, Artificial Sequence
  Description of Artificial Sequence: Synthetic oligonucleotide
gagggttttgtgggtccggag

SEQ ID NO: 15863 - DNA, 21 bp, Artificial Sequence
  Description of Artificial Sequence: Synthetic oligonucleotide
gagggggggcataggcttatt

SEQ ID NO: 15864 - DNA, 21 bp, Artificial Sequence
  Description of Artificial Sequence: Synthetic oligonucleotide
gaggggcatgatactcttatg

SEQ ID NO: 15865 - DNA, 21 bp, Artificial Sequence
  Description of Artificial Sequence: Synthetic oligonucleotide
gaggggattctgaagtcgctt

SEQ ID NO: 15866 - DNA, 21 bp, Artificial Sequence
  Description of Artificial Sequence: Synthetic oligonucleotide
gaggggattccgcctttttct

SEQ ID NO: 15867 - DNA, 21 bp, Artificial Sequence
  Description of Artificial Sequence: Synthetic oligonucleotide
gagggtatttcggcgtcggtg

SEQ ID NO: 15868 - DNA, 21 bp, Artificial Sequence
  Description of Artificial Sequence: Synthetic oligonucleotide
gaggggaaggtgcggcttccg

SEQ ID NO: 15869 - DNA, 21 bp, Artificial Sequence
  Description of Artificial Sequence: Synthetic oligonucleotide
gagggtttggggcttcgtgtg

SEQ ID NO: 15870 - DNA, 21 bp, Artificial Sequence
  Description of Artificial Sequence: Synthetic oligonucleotide
gagggtatgcctcttaatcat

SEQ ID NO: 15871 - DNA, 21 bp, Artificial Sequence
  Description of Artificial Sequence: Synthetic oligonucleotide
gagggtccggttctgctggcg

SEQ ID NO: 15872 - DNA, 21 bp, Artificial Sequence
  Description of Artificial Sequence: Synthetic oligonucleotide
gagggtcgtagggagccttat

SEQ ID NO: 15873 - DNA, 21 bp, Artificial Sequence
  Description of Artificial Sequence: Synthetic oligonucleotide
gaggggagggttgttcctgct

SEQ ID NO: 15874 - DNA, 21 bp, Artificial Sequence
  Description of Artificial Sequence: Synthetic oligonucleotide
gagggtagttttcctctgcat

SEQ ID NO: 15875 - DNA, 21 bp, Artificial Sequence
  Description of Artificial Sequence: Synthetic oligonucleotide
gagggttctgggatgttgagg

SEQ ID NO: 15876 - DNA, 21 bp, Artificial Sequence
  Description of Artificial Sequence: Synthetic oligonucleotide
gagggttctaagatgatggtt

SEQ ID NO: 15877 - DNA, 21 bp, Artificial Sequence
  Description of Artificial Sequence: Synthetic oligonucleotide
gaggggtctccggatttgagg

SEQ ID NO: 15878 - DNA, 21 bp, Artificial Sequence
  Description of Artificial Sequence: Synthetic oligonucleotide
gagggttctcctcgtgcgatg

SEQ ID NO: 15879 - DNA, 21 bp, Artificial Sequence
  Description of Artificial Sequence: Synthetic oligonucleotide
gaggggtcgcagaatgatttt

SEQ ID NO: 15880 - DNA, 21 bp, Artificial Sequence
  Description of Artificial Sequence: Synthetic oligonucleotide
gagggtacggcgaggttgtat

SEQ ID NO: 15881 - DNA, 21 bp, Artificial Sequence
  Description of Artificial Sequence: Synthetic oligonucleotide
gagggggtggtgactttgcag

SEQ ID NO: 15882 - DNA, 21 bp, Artificial Sequence
  Description of Artificial Sequence: Synthetic oligonucleotide
gaggggtatgattctacgact

SEQ ID NO: 15883 - DNA, 21 bp, Artificial Sequence
  Description of Artificial Sequence: Synthetic oligonucleotide
gaggggtatgagaatggtgct

SEQ ID NO: 15884 - DNA, 21 bp, Artificial Sequence
  Description of Artificial Sequence: Synthetic oligonucleotide
gagcattgtactaatacgtgt

SEQ ID NO: 15885 - DNA, 21 bp, Artificial Sequence
  Description of Artificial Sequence: Synthetic oligonucleotide
gagcatggtattgcgatggat

SEQ ID NO: 15886 - DNA, 21 bp, Artificial Sequence
  Description of Artificial Sequence: Synthetic oligonucleotide
gagcatgggcttaatacgctt

SEQ ID NO: 15887 - DNA, 21 bp, Artificial Sequence
  Description of Artificial Sequence: Synthetic oligonucleotide
gagcatgggccggcgctgctt

SEQ ID NO: 15888 - DNA, 21 bp, Artificial Sequence
  Description of Artificial Sequence: Synthetic oligonucleotide
gagcatggttctgctatgaag

SEQ ID NO: 15889 - DNA, 21 bp, Artificial Sequence
  Description of Artificial Sequence: Synthetic oligonucleotide
gagcatcatgtgcattctcct

SEQ ID NO: 15890 - DNA, 21 bp, Artificial Sequence
  Description of Artificial Sequence: Synthetic oligonucleotide
gagcatattccgcaggcgatg

SEQ ID NO: 15891 - DNA, 21 bp, Artificial Sequence
  Description of Artificial Sequence: Synthetic oligonucleotide
gagcataagggggctcatttt

SEQ ID NO: 15892 - DNA, 21 bp, Artificial Sequence
  Description of Artificial Sequence: Synthetic oligonucleotide
gagcataagttgttggtgatg

SEQ ID NO: 15893 - DNA, 21 bp, Artificial Sequence
  Description of Artificial Sequence: Synthetic oligonucleotide
gagcatatgccttcgttgcgg

SEQ ID NO: 15894 - DNA, 21 bp, Artificial Sequence
  Description of Artificial Sequence: Synthetic oligonucleotide
gagcataatgtggggcagtct

SEQ ID NO: 15895 - DNA, 21 bp, Artificial Sequence
  Description of Artificial Sequence: Synthetic oligonucleotide
gagcatcagggtactactatt

SEQ ID NO: 15896 - DNA, 21 bp, Artificial Sequence
  Description of Artificial Sequence: Synthetic oligonucleotide
gagcatagtgattatcaggtt

SEQ ID NO: 15897 - DNA, 21 bp, Artificial Sequence
  Description of Artificial Sequence: Synthetic oligonucleotide
gagcatagtgagttgacgccg

SEQ ID NO: 15898 - DNA, 21 bp, Artificial Sequence
  Description of Artificial Sequence: Synthetic oligonucleotide
gagcatagttttaagtctgct

SEQ ID NO: 15899 - DNA, 21 bp, Artificial Sequence
  Description of Artificial Sequence: Synthetic oligonucleotide
gagcattctgggacggcgatt

SEQ ID NO: 15900 - DNA, 21 bp, Artificial Sequence
  Description of Artificial Sequence: Synthetic oligonucleotide
gagcattcttcgggtatgctt

SEQ ID NO: 15901 - DNA, 21 bp, Artificial Sequence
  Description of Artificial Sequence: Synthetic oligonucleotide
gagattgcgcgtggttctttt

SEQ ID NO: 15902 - DNA, 21 bp, Artificial Sequence
  Description of Artificial Sequence: Synthetic oligonucleotide
gagattggttatatgagtgcg

SEQ ID NO: 15903 - DNA, 21 bp, Artificial Sequence
  Description of Artificial Sequence: Synthetic oligonucleotide
gagattcattatcctctggag

SEQ ID NO: 15904 - DNA, 21 bp, Artificial Sequence
  Description of Artificial Sequence: Synthetic oligonucleotide
gagattaaggcgcagatgtct

SEQ ID NO: 15905 - DNA, 21 bp, Artificial Sequence
  Description of Artificial Sequence: Synthetic oligonucleotide
gagattaaggatgagaagctt

SEQ ID NO: 15906 - DNA, 21 bp, Artificial Sequence
  Description of Artificial Sequence: Synthetic oligonucleotide
gagattaagcattcgatgcat

SEQ ID NO: 15907 - DNA, 21 bp, Artificial Sequence
  Description of Artificial Sequence: Synthetic oligonucleotide
gagattaattctcagacgaat

SEQ ID NO: 15908 - DNA, 21 bp, Artificial Sequence
  Description of Artificial Sequence: Synthetic oligonucleotide
gagattcagcattatcatggt

SEQ ID NO: 15909 - DNA, 21 bp, Artificial Sequence
  Description of Artificial Sequence: Synthetic oligonucleotide
gagattaggaagtctattatt

SEQ ID NO: 15910 - DNA, 21 bp, Artificial Sequence
  Description of Artificial Sequence: Synthetic oligonucleotide
gagatttcgactcagcgttat

SEQ ID NO: 15911 - DNA, 21 bp, Artificial Sequence
  Description of Artificial Sequence: Synthetic oligonucleotide
gagaaggctcgggctgcgtct

SEQ ID NO: 15912 - DNA, 21 bp, Artificial Sequence
  Description of Artificial Sequence: Synthetic oligonucleotide
gagaaggagaggccgatgttg

SEQ ID NO: 15913 - DNA, 21 bp, Artificial Sequence
  Description of Artificial Sequence: Synthetic oligonucleotide
gagaagggttttttgcattcg

SEQ ID NO: 15914 - DNA, 21 bp, Artificial Sequence
  Description of Artificial Sequence: Synthetic oligonucleotide
gagaagggtctgagtactcag

SEQ ID NO: 15915 - DNA, 21 bp, Artificial Sequence
  Description of Artificial Sequence: Synthetic oligonucleotide
gagaagggtagtattatgcct

SEQ ID NO: 15916 - DNA, 21 bp, Artificial Sequence
  Description of Artificial Sequence: Synthetic oligonucleotide
gagaagggttctttgggtcat

SEQ ID NO: 15917 - DNA, 21 bp, Artificial Sequence
  Description of Artificial Sequence: Synthetic oligonucleotide
gagaagattgataggttgggg

SEQ ID NO: 15918 - DNA, 21 bp, Artificial Sequence
  Description of Artificial Sequence: Synthetic oligonucleotide
gagaagattaagatttattct

SEQ ID NO: 15919 - DNA, 21 bp, Artificial Sequence
  Description of Artificial Sequence: Synthetic oligonucleotide
gagaagattccgcatagttct

SEQ ID NO: 15920 - DNA, 21 bp, Artificial Sequence
  Description of Artificial Sequence: Synthetic oligonucleotide
gagaagaagctgtctgctgag

SEQ ID NO: 15921 - DNA, 21 bp, Artificial Sequence
  Description of Artificial Sequence: Synthetic oligonucleotide
gagaagttggcgcgtactggg

SEQ ID NO: 15922 - DNA, 21 bp, Artificial Sequence
  Description of Artificial Sequence: Synthetic oligonucleotide
gagaagatgcatgctaatcct

SEQ ID NO: 15923 - DNA, 21 bp, Artificial Sequence
  Description of Artificial Sequence: Synthetic oligonucleotide
gagaagccttatattactatg

SEQ ID NO: 15924 - DNA, 21 bp, Artificial Sequence
  Description of Artificial Sequence: Synthetic oligonucleotide
gagaagcagaatttgccgctt

SEQ ID NO: 15925 - DNA, 21 bp, Artificial Sequence
  Description of Artificial Sequence: Synthetic oligonucleotide
gagaaggtgattcgtcctgtg

SEQ ID NO: 15926 - DNA, 21 bp, Artificial Sequence
  Description of Artificial Sequence: Synthetic oligonucleotide
gagaaggttccgaagttgctg

SEQ ID NO: 15927 - DNA, 21 bp, Artificial Sequence
  Description of Artificial Sequence: Synthetic oligonucleotide
gagctggctgcggaggctcgt

SEQ ID NO: 15928 - DNA, 21 bp, Artificial Sequence
  Description of Artificial Sequence: Synthetic oligonucleotide
gagctggagagtgctgagatt

SEQ ID NO: 15929 - DNA, 21 bp, Artificial Sequence
  Description of Artificial Sequence: Synthetic oligonucleotide
gagcttgagacggcgaagctg

SEQ ID NO: 15930 - DNA, 21 bp, Artificial Sequence
  Description of Artificial Sequence: Synthetic oligonucleotide
gagctgttttctgataagttt

SEQ ID NO: 15931 - DNA, 21 bp, Artificial Sequence
  Description of Artificial Sequence: Synthetic oligonucleotide
gagctgggtcctccgcgtgcg

SEQ ID NO: 15932 - DNA, 21 bp, Artificial Sequence
  Description of Artificial Sequence: Synthetic oligonucleotide
gagctggggccgcggacttcg

SEQ ID NO: 15933 - DNA, 21 bp, Artificial Sequence
  Description of Artificial Sequence: Synthetic oligonucleotide
gagttgattctgaattcgtcg

SEQ ID NO: 15934 - DNA, 21 bp, Artificial Sequence
  Description of Artificial Sequence: Synthetic oligonucleotide
gagctgaaggctgttgctagg

SEQ ID NO: 15935 - DNA, 21 bp, Artificial Sequence
  Description of Artificial Sequence: Synthetic oligonucleotide
gagcttaagtttccggataag

SEQ ID NO: 15936 - DNA, 21 bp, Artificial Sequence
  Description of Artificial Sequence: Synthetic oligonucleotide
gagttgaagcaggcgagtggt

SEQ ID NO: 15937 - DNA, 21 bp, Artificial Sequence
  Description of Artificial Sequence: Synthetic oligonucleotide
gagttgaagaggtatgttggg

SEQ ID NO: 15938 - DNA, 21 bp, Artificial Sequence
  Description of Artificial Sequence: Synthetic oligonucleotide
gagttgcttgagccggatgat

SEQ ID NO: 15939 - DNA, 21 bp, Artificial Sequence
  Description of Artificial Sequence: Synthetic oligonucleotide
gagcttatggttaatgggggg

SEQ ID NO: 15940 - DNA, 21 bp, Artificial Sequence
  Description of Artificial Sequence: Synthetic oligonucleotide
gagcttaataatctgcttcgg

SEQ ID NO: 15941 - DNA, 21 bp, Artificial Sequence
  Description of Artificial Sequence: Synthetic oligonucleotide
gagttgaatgtgcataggggt

SEQ ID NO: 15942 - DNA, 21 bp, Artificial Sequence
  Description of Artificial Sequence: Synthetic oligonucleotide
gagttgccggctaagagtatg

SEQ ID NO: 15943 - DNA, 21 bp, Artificial Sequence
  Description of Artificial Sequence: Synthetic oligonucleotide
gagcttccggcgacttatggg

SEQ ID NO: 15944 - DNA, 21 bp, Artificial Sequence
  Description of Artificial Sequence: Synthetic oligonucleotide
gagctgcctgggacgccgtgt

SEQ ID NO: 15945 - DNA, 21 bp, Artificial Sequence
  Description of Artificial Sequence: Synthetic oligonucleotide
gagcttccgcttgattgggat

SEQ ID NO: 15946 - DNA, 21 bp, Artificial Sequence
  Description of Artificial Sequence: Synthetic oligonucleotide
gagttgccttctaagcagggt

SEQ ID NO: 15947 - DNA, 21 bp, Artificial Sequence
  Description of Artificial Sequence: Synthetic oligonucleotide
gagctgcaggggcggattaat

SEQ ID NO: 15948 - DNA, 21 bp, Artificial Sequence
  Description of Artificial Sequence: Synthetic oligonucleotide
gagttgcagttgccgaagagt

SEQ ID NO: 15949 - DNA, 21 bp, Artificial Sequence
  Description of Artificial Sequence: Synthetic oligonucleotide
gagcttcaggttcagatggcg

SEQ ID NO: 15950 - DNA, 21 bp, Artificial Sequence
  Description of Artificial Sequence: Synthetic oligonucleotide
gagctgcggggttcggttaat

SEQ ID NO: 15951 - DNA, 21 bp, Artificial Sequence
  Description of Artificial Sequence: Synthetic oligonucleotide
gagcttcgggttgttcattct

SEQ ID NO: 15952 - DNA, 21 bp, Artificial Sequence
  Description of Artificial Sequence: Synthetic oligonucleotide
gagttgtcggcgcgggcgact

SEQ ID NO: 15953 - DNA, 21 bp, Artificial Sequence
  Description of Artificial Sequence: Synthetic oligonucleotide
gagctgagtgatgggagtggg

SEQ ID NO: 15954 - DNA, 21 bp, Artificial Sequence
  Description of Artificial Sequence: Synthetic oligonucleotide
gagcttagttttcagtttgat

SEQ ID NO: 15955 - DNA, 21 bp, Artificial Sequence
  Description of Artificial Sequence: Synthetic oligonucleotide
gagctgtctatgggtagttat

SEQ ID NO: 15956 - DNA, 21 bp, Artificial Sequence
  Description of Artificial Sequence: Synthetic oligonucleotide
gagttgtcgcgtaataatgtt

SEQ ID NO: 15957 - DNA, 21 bp, Artificial Sequence
  Description of Artificial Sequence: Synthetic oligonucleotide
gagctttcggttaatggtttg

SEQ ID NO: 15958 - DNA, 21 bp, Artificial Sequence
  Description of Artificial Sequence: Synthetic oligonucleotide
gagctgagttatcgtcctacg

SEQ ID NO: 15959 - DNA, 21 bp, Artificial Sequence
  Description of Artificial Sequence: Synthetic oligonucleotide
gagcttacgactggtaagtct

SEQ ID NO: 15960 - DNA, 21 bp, Artificial Sequence
  Description of Artificial Sequence: Synthetic oligonucleotide
gagctgactgtgcggcttgct

SEQ ID NO: 15961 - DNA, 21 bp, Artificial Sequence
  Description of Artificial Sequence: Synthetic oligonucleotide
gagctgacttatccgggtcgg

SEQ ID NO: 15962 - DNA, 21 bp, Artificial Sequence
  Description of Artificial Sequence: Synthetic oligonucleotide
gagcttgttatgtcggtgcgt

SEQ ID NO: 15963 - DNA, 21 bp, Artificial Sequence
  Description of Artificial Sequence: Synthetic oligonucleotide
gagttgtattcgcggcctgct

SEQ ID NO: 15964 - DNA, 21 bp, Artificial Sequence
  Description of Artificial Sequence: Synthetic oligonucleotide
gagatggctgcgcatcttgag

SEQ ID NO: 15965 - DNA, 21 bp, Artificial Sequence
  Description of Artificial Sequence: Synthetic oligonucleotide
gagatggcgccgtattcgaag

SEQ ID NO: 15966 - DNA, 21 bp, Artificial Sequence
  Description of Artificial Sequence: Synthetic oligonucleotide
gagatggatgggaatgcttat

SEQ ID NO: 15967 - DNA, 21 bp, Artificial Sequence
  Description of Artificial Sequence: Synthetic oligonucleotide
gagatggagatgcttagtgat

SEQ ID NO: 15968 - DNA, 21 bp, Artificial Sequence
  Description of Artificial Sequence: Synthetic oligonucleotide
gagatgggtcagttgccggat

SEQ ID NO: 15969 - DNA, 21 bp, Artificial Sequence
  Description of Artificial Sequence: Synthetic oligonucleotide
gagatgggtcagacgttggag

SEQ ID NO: 15970 - DNA, 21 bp, Artificial Sequence
  Description of Artificial Sequence: Synthetic oligonucleotide
gagatgcatgaggatgagaag

SEQ ID NO: 15971 - DNA, 21 bp, Artificial Sequence
  Description of Artificial Sequence: Synthetic oligonucleotide
gagatgctggagcgttttgat

SEQ ID NO: 15972 - DNA, 21 bp, Artificial Sequence
  Description of Artificial Sequence: Synthetic oligonucleotide
gagatgcttcgtgctgggttt

SEQ ID NO: 15973 - DNA, 21 bp, Artificial Sequence
  Description of Artificial Sequence: Synthetic oligonucleotide
gagatgatggctaattcgacg

SEQ ID NO: 15974 - DNA, 21 bp, Artificial Sequence
  Description of Artificial Sequence: Synthetic oligonucleotide
gagatgcctaagacgccgaag

SEQ ID NO: 15975 - DNA, 21 bp, Artificial Sequence
  Description of Artificial Sequence: Synthetic oligonucleotide
gagatgcctacgcggcagcct

SEQ ID NO: 15976 - DNA, 21 bp, Artificial Sequence
  Description of Artificial Sequence: Synthetic oligonucleotide
gagatgccgacttataatgat

SEQ ID NO: 15977 - DNA, 21 bp, Artificial Sequence
  Description of Artificial Sequence: Synthetic oligonucleotide
gagatgcggcagcagtcgatt

SEQ ID NO: 15978 - DNA, 21 bp, Artificial Sequence
  Description of Artificial Sequence: Synthetic oligonucleotide
gagatgaggtctagtacttct

SEQ ID NO: 15979 - DNA, 21 bp, Artificial Sequence
  Description of Artificial Sequence: Synthetic oligonucleotide
gagatgacgcagcttccggct

SEQ ID NO: 15980 - DNA, 21 bp, Artificial Sequence
  Description of Artificial Sequence: Synthetic oligonucleotide
gagatgtatttgacgcgtgtg

SEQ ID NO: 15981 - DNA, 21 bp, Artificial Sequence
  Description of Artificial Sequence: Synthetic oligonucleotide
gagaatgcggttcctggtgtg

SEQ ID NO: 15982 - DNA, 21 bp, Artificial Sequence
  Description of Artificial Sequence: Synthetic oligonucleotide
gagaatgatcgtagttctacg

SEQ ID NO: 15983 - DNA, 21 bp, Artificial Sequence
  Description of Artificial Sequence: Synthetic oligonucleotide
gagaatgagggtactggtact

SEQ ID NO: 15984 - DNA, 21 bp, Artificial Sequence
  Description of Artificial Sequence: Synthetic oligonucleotide
gagaatgagtcgcatcatttg

SEQ ID NO: 15985 - DNA, 21 bp, Artificial Sequence
  Description of Artificial Sequence: Synthetic oligonucleotide
gagaatgggcattcttttacg

SEQ ID NO: 15986 - DNA, 21 bp, Artificial Sequence
  Description of Artificial Sequence: Synthetic oligonucleotide
gagaatgggcgtacggagatt

SEQ ID NO: 15987 - DNA, 21 bp, Artificial Sequence
  Description of Artificial Sequence: Synthetic oligonucleotide
gagaataagccggggtctcct

SEQ ID NO: 15988 - DNA, 21 bp, Artificial Sequence
  Description of Artificial Sequence: Synthetic oligonucleotide
gagaatatggcttatctgagt

SEQ ID NO: 15989 - DNA, 21 bp, Artificial Sequence
  Description of Artificial Sequence: Synthetic oligonucleotide
gagaatccgggtagtgcttct

SEQ ID NO: 15990 - DNA, 21 bp, Artificial Sequence
  Description of Artificial Sequence: Synthetic oligonucleotide
gagaatccgcctcgtgagcct

SEQ ID NO: 15991 - DNA, 21 bp, Artificial Sequence
  Description of Artificial Sequence: Synthetic oligonucleotide
gagaatccgcgtggtagtgtt

SEQ ID NO: 15992 - DNA, 21 bp, Artificial Sequence
  Description of Artificial Sequence: Synthetic oligonucleotide
gagaatcctacgatgtatagt

SEQ ID NO: 15993 - DNA, 21 bp, Artificial Sequence
  Description of Artificial Sequence: Synthetic oligonucleotide
gagaatcagtatcaggatagt

SEQ ID NO: 15994 - DNA, 21 bp, Artificial Sequence
  Description of Artificial Sequence: Synthetic oligonucleotide
gagaatcgtctgaagaatttt

SEQ ID NO: 15995 - DNA, 21 bp, Artificial Sequence
  Description of Artificial Sequence: Synthetic oligonucleotide
gagaataggtcgggtgaggat

SEQ ID NO: 15996 - DNA, 21 bp, Artificial Sequence
  Description of Artificial Sequence: Synthetic oligonucleotide
gagaatagttcgctggttgat

SEQ ID NO: 15997 - DNA, 21 bp, Artificial Sequence
  Description of Artificial Sequence: Synthetic oligonucleotide
gagaatacgtttagttctcgg

SEQ ID NO: 15998 - DNA, 21 bp, Artificial Sequence
  Description of Artificial Sequence: Synthetic oligonucleotide
gagaatactattacgagtctt

SEQ ID NO: 15999 - DNA, 21 bp, Artificial Sequence
  Description of Artificial Sequence: Synthetic oligonucleotide
gagaatactttgcgtctggat

SEQ ID NO: 16000 - DNA, 21 bp, Artificial Sequence
  Description of Artificial Sequence: Synthetic oligonucleotide
gagaatgttaagcctgggtgg

SEQ ID NO: 16001 - DNA, 21 bp, Artificial Sequence
  Description of Artificial Sequence: Synthetic oligonucleotide
gagcctgctgcgcgtgctgtt

SEQ ID NO: 16002 - DNA, 21 bp, Artificial Sequence
  Description of Artificial Sequence: Synthetic oligonucleotide
gagccggctgatcgtactcag

SEQ ID NO: 16003 - DNA, 21 bp, Artificial Sequence
  Description of Artificial Sequence: Synthetic oligonucleotide
gagccggcggggcctcggctt

SEQ ID NO: 16004 - DNA, 21 bp, Artificial Sequence
  Description of Artificial Sequence: Synthetic oligonucleotide
gagcctgcgctgccgtatgct

SEQ ID NO: 16005 - DNA, 21 bp, Artificial Sequence
  Description of Artificial Sequence: Synthetic oligonucleotide
gagccggcgacggggtcgtct

SEQ ID NO: 16006 - DNA, 21 bp, Artificial Sequence
  Description of Artificial Sequence: Synthetic oligonucleotide
gagccggattcggcttattcg

SEQ ID NO: 16007 - DNA, 21 bp, Artificial Sequence
  Description of Artificial Sequence: Synthetic oligonucleotide
gagccgtttgatgctaagact

SEQ ID NO: 16008 - DNA, 21 bp, Artificial Sequence
  Description of Artificial Sequence: Synthetic oligonucleotide
gagcctttttcgaatagtcct

SEQ ID NO: 16009 - DNA, 21 bp, Artificial Sequence
  Description of Artificial Sequence: Synthetic oligonucleotide
gagccgggtgggaatcatctt

SEQ ID NO: 16010 - DNA, 21 bp, Artificial Sequence
  Description of Artificial Sequence: Synthetic oligonucleotide
gagcctgggcatgctcgggcg

SEQ ID NO: 16011 - DNA, 21 bp, Artificial Sequence
  Description of Artificial Sequence: Synthetic oligonucleotide
gagcctggtcggactgggttt

SEQ ID NO: 16012 - DNA, 21 bp, Artificial Sequence
  Description of Artificial Sequence: Synthetic oligonucleotide
gagccgggtgtggttgggtgt

SEQ ID NO: 16013 - DNA, 21 bp, Artificial Sequence
  Description of Artificial Sequence: Synthetic oligonucleotide
gagccgcatgctcctgagcgt

SEQ ID NO: 16014 - DNA, 21 bp, Artificial Sequence
  Description of Artificial Sequence: Synthetic oligonucleotide
gagccgcatgttccgggggct

SEQ ID NO: 16015 - DNA, 21 bp, Artificial Sequence
  Description of Artificial Sequence: Synthetic oligonucleotide
gagcctaagcatcagttttcg

SEQ ID NO: 16016 - DNA, 21 bp, Artificial Sequence
  Description of Artificial Sequence: Synthetic oligonucleotide
gagcctaagagggggtggtct

SEQ ID NO: 16017 - DNA, 21 bp, Artificial Sequence
  Description of Artificial Sequence: Synthetic oligonucleotide
gagcctaagtctgcttctatt

SEQ ID NO: 16018 - DNA, 21 bp, Artificial Sequence
  Description of Artificial Sequence: Synthetic oligonucleotide
gagcctcttaatagtagtggt

SEQ ID NO: 16019 - DNA, 21 bp, Artificial Sequence
  Description of Artificial Sequence: Synthetic oligonucleotide
gagccgctgtcggctaatagg

SEQ ID NO: 16020 - DNA, 21 bp, Artificial Sequence
  Description of Artificial Sequence: Synthetic oligonucleotide
gagccgaatgctactagtgtt

SEQ ID NO: 16021 - DNA, 21 bp, Artificial Sequence
  Description of Artificial Sequence: Synthetic oligonucleotide
gagcctaatcatccggtgtcg

SEQ ID NO: 16022 - DNA, 21 bp, Artificial Sequence
  Description of Artificial Sequence: Synthetic oligonucleotide
gagcctccgtcgtctctgaag

SEQ ID NO: 16023 - DNA, 21 bp, Artificial Sequence
  Description of Artificial Sequence: Synthetic oligonucleotide
gagcctcagcgtcctttgcgt

SEQ ID NO: 16024 - DNA, 21 bp, Artificial Sequence
  Description of Artificial Sequence: Synthetic oligonucleotide
gagccttctaatgagtcggct

SEQ ID NO: 16025 - DNA, 21 bp, Artificial Sequence
  Description of Artificial Sequence: Synthetic oligonucleotide
gagccgagtaattcgcatgcg

SEQ ID NO: 16026 - DNA, 21 bp, Artificial Sequence
  Description of Artificial Sequence: Synthetic oligonucleotide
gagccgtcttatctgccgtcg

SEQ ID NO: 16027 - DNA, 21 bp, Artificial Sequence
  Description of Artificial Sequence: Synthetic oligonucleotide
gagcctactgagcggattagt

SEQ ID NO: 16028 - DNA, 21 bp, Artificial Sequence
  Description of Artificial Sequence: Synthetic oligonucleotide
gagcctacgatttatttgact

SEQ ID NO: 16029 - DNA, 21 bp, Artificial Sequence
  Description of Artificial Sequence: Synthetic oligonucleotide
gagccgactatgaggagtatt

SEQ ID NO: 16030 - DNA, 21 bp, Artificial Sequence
  Description of Artificial Sequence: Synthetic oligonucleotide
gagcctactaggccggcgacg

SEQ ID NO: 16031 - DNA, 21 bp, Artificial Sequence
  Description of Artificial Sequence: Synthetic oligonucleotide
gagccgactaggtctagtagt

SEQ ID NO: 16032 - DNA, 21 bp, Artificial Sequence
  Description of Artificial Sequence: Synthetic oligonucleotide
gagcctactcggactaagatg

SEQ ID NO: 16033 - DNA, 21 bp, Artificial Sequence
  Description of Artificial Sequence: Synthetic oligonucleotide
gagccggttattgggtttcct

SEQ ID NO: 16034 - DNA, 21 bp, Artificial Sequence
  Description of Artificial Sequence: Synthetic oligonucleotide
gagcctgtgtcgactgcggcg

SEQ ID NO: 16035 - DNA, 21 bp, Artificial Sequence
  Description of Artificial Sequence: Synthetic oligonucleotide
gagccttatctgagtgcgaag

SEQ ID NO: 16036 - DNA, 21 bp, Artificial Sequence
  Description of Artificial Sequence: Synthetic oligonucleotide
gagccttattcgccggctatt

SEQ ID NO: 16037 - DNA, 21 bp, Artificial Sequence
  Description of Artificial Sequence: Synthetic oligonucleotide
gagcaggctgctctttcgttt

SEQ ID NO: 16038 - DNA, 21 bp, Artificial Sequence
  Description of Artificial Sequence: Synthetic oligonucleotide
gagcaggctctgaagccggag

SEQ ID NO: 16039 - DNA, 21 bp, Artificial Sequence
  Description of Artificial Sequence: Synthetic oligonucleotide
gagcaggcgcgtctggatgtg

SEQ ID NO: 16040 - DNA, 21 bp, Artificial Sequence
  Description of Artificial Sequence: Synthetic oligonucleotide
gagcaggcttcttttaagatt

SEQ ID NO: 16041 - DNA, 21 bp, Artificial Sequence
  Description of Artificial Sequence: Synthetic oligonucleotide
gagcagtttgcggcgccggtg

SEQ ID NO: 16042 - DNA, 21 bp, Artificial Sequence
  Description of Artificial Sequence: Synthetic oligonucleotide
gagcagggtacgcctagtgcg

SEQ ID NO: 16043 - DNA, 21 bp, Artificial Sequence
  Description of Artificial Sequence: Synthetic oligonucleotide
gagcagaagccgctgactcgt

SEQ ID NO: 16044 - DNA, 21 bp, Artificial Sequence
  Description of Artificial Sequence: Synthetic oligonucleotide
gagcagttgaaggattatgag

SEQ ID NO: 16045 - DNA, 21 bp, Artificial Sequence
  Description of Artificial Sequence: Synthetic oligonucleotide
gagcagaattcgaggggtctt

SEQ ID NO: 16046 - DNA, 21 bp, Artificial Sequence
  Description of Artificial Sequence: Synthetic oligonucleotide
gagcagcctaagtatagtaag

SEQ ID NO: 16047 - DNA, 21 bp, Artificial Sequence
  Description of Artificial Sequence: Synthetic oligonucleotide
gagcagcagtgtcctcggtct

SEQ ID NO: 16048 - DNA, 21 bp, Artificial Sequence
  Description of Artificial Sequence: Synthetic oligonucleotide
gagcagagggatcgtaatggt

SEQ ID NO: 16049 - DNA, 21 bp, Artificial Sequence
  Description of Artificial Sequence: Synthetic oligonucleotide
gagcagcgtggtacgattctg

SEQ ID NO: 16050 - DNA, 21 bp, Artificial Sequence
  Description of Artificial Sequence: Synthetic oligonucleotide
gagcagaggttgtctcagtct

SEQ ID NO: 16051 - DNA, 21 bp, Artificial Sequence
  Description of Artificial Sequence: Synthetic oligonucleotide
gagcagaggcgttcggagact

SEQ ID NO: 16052 - DNA, 21 bp, Artificial Sequence
  Description of Artificial Sequence: Synthetic oligonucleotide
gagcagtcttatcgggattct

SEQ ID NO: 16053 - DNA, 21 bp, Artificial Sequence
  Description of Artificial Sequence: Synthetic oligonucleotide
gagcagactggtcatcgtgct

SEQ ID NO: 16054 - DNA, 21 bp, Artificial Sequence
  Description of Artificial Sequence: Synthetic oligonucleotide
gagcagtatcgtgataatagt

SEQ ID NO: 16055 - DNA, 21 bp, Artificial Sequence
  Description of Artificial Sequence: Synthetic oligonucleotide
gagcgtgctgctgggctgcgt

SEQ ID NO: 16056 - DNA, 21 bp, Artificial Sequence
  Description of Artificial Sequence: Synthetic oligonucleotide
gagcgtgcggggcctcatgat

SEQ ID NO: 16057 - DNA, 21 bp, Artificial Sequence
  Description of Artificial Sequence: Synthetic oligonucleotide
gagcgggcgcctccgggtctt

SEQ ID NO: 16058 - DNA, 21 bp, Artificial Sequence
  Description of Artificial Sequence: Synthetic oligonucleotide
gagcgggattcgaggaaggct

SEQ ID NO: 16059 - DNA, 21 bp, Artificial Sequence
  Description of Artificial Sequence: Synthetic oligonucleotide
gagcggtttgagggtttgcgg

SEQ ID NO: 16060 - DNA, 21 bp, Artificial Sequence
  Description of Artificial Sequence: Synthetic oligonucleotide
gagcggtttttgccggagctt

SEQ ID NO: 16061 - DNA, 21 bp, Artificial Sequence
  Description of Artificial Sequence: Synthetic oligonucleotide
gagcgttttacgtctgttcct

SEQ ID NO: 16062 - DNA, 21 bp, Artificial Sequence
  Description of Artificial Sequence: Synthetic oligonucleotide
gagcgtgggatgactactccg

SEQ ID NO: 16063 - DNA, 21 bp, Artificial Sequence
  Description of Artificial Sequence: Synthetic oligonucleotide
gagcgtggtgtgattcatccg

SEQ ID NO: 16064 - DNA, 21 bp, Artificial Sequence
  Description of Artificial Sequence: Synthetic oligonucleotide
gagcgtcatgctgatatgact

SEQ ID NO: 16065 - DNA, 21 bp, Artificial Sequence
  Description of Artificial Sequence: Synthetic oligonucleotide
gagcgtcatgatcttccgcgg

SEQ ID NO: 16066 - DNA, 21 bp, Artificial Sequence
  Description of Artificial Sequence: Synthetic oligonucleotide
gagcggcatgatgtgggtccg

SEQ ID NO: 16067 - DNA, 21 bp, Artificial Sequence
  Description of Artificial Sequence: Synthetic oligonucleotide
gagcggcatattaggatggag

SEQ ID NO: 16068 - DNA, 21 bp, Artificial Sequence
  Description of Artificial Sequence: Synthetic oligonucleotide
gagcggcatagggttattgat

SEQ ID NO: 16069 - DNA, 21 bp, Artificial Sequence
  Description of Artificial Sequence: Synthetic oligonucleotide
gagcggattaggactcctgag

SEQ ID NO: 16070 - DNA, 21 bp, Artificial Sequence
  Description of Artificial Sequence: Synthetic oligonucleotide
gagcggatttcgccttcgatt

SEQ ID NO: 16071 - DNA, 21 bp, Artificial Sequence
  Description of Artificial Sequence: Synthetic oligonucleotide
gagcggaaggggcttgggttg

SEQ ID NO: 16072 - DNA, 21 bp, Artificial Sequence
  Description of Artificial Sequence: Synthetic oligonucleotide
gagcgtaagaatcagagtcct

SEQ ID NO: 16073 - DNA, 21 bp, Artificial Sequence
  Description of Artificial Sequence: Synthetic oligonucleotide
gagaggaagactccgtcggat

SEQ ID NO: 16074 - DNA, 21 bp, Artificial Sequence
  Description of Artificial Sequence: Synthetic oligonucleotide
gagaggcttgagagttctctg

SEQ ID NO: 16075 - DNA, 21 bp, Artificial Sequence
  Description of Artificial Sequence: Synthetic oligonucleotide
gagcgtttgtcgcctgtggcg

SEQ ID NO: 16076 - DNA, 21 bp, Artificial Sequence
  Description of Artificial Sequence: Synthetic oligonucleotide
gagcgtttgagttcggagccg

SEQ ID NO: 16077 - DNA, 21 bp, Artificial Sequence
  Description of Artificial Sequence: Synthetic oligonucleotide
gagcggatggctgcgcctttt

SEQ ID NO: 16078 - DNA, 21 bp, Artificial Sequence
  Description of Artificial Sequence: Synthetic oligonucleotide
gagaggaattttgagtcgggg

SEQ ID NO: 16079 - DNA, 21 bp, Artificial Sequence
  Description of Artificial Sequence: Synthetic oligonucleotide
gagcggaatggtcttccggcg

SEQ ID NO: 16080 - DNA, 21 bp, Artificial Sequence
  Description of Artificial Sequence: Synthetic oligonucleotide
gagaggaatcgggtggattct

SEQ ID NO: 16081 - DNA, 21 bp, Artificial Sequence
  Description of Artificial Sequence: Synthetic oligonucleotide
gagcgtaattctcctgttgcg

SEQ ID NO: 16082 - DNA, 21 bp, Artificial Sequence
  Description of Artificial Sequence: Synthetic oligonucleotide
gagcgtcctgatggtccttcg

SEQ ID NO: 16083 - DNA, 21 bp, Artificial Sequence
  Description of Artificial Sequence: Synthetic oligonucleotide
gagcggcctcctcttgtgatg

SEQ ID NO: 16084 - DNA, 21 bp, Artificial Sequence
  Description of Artificial Sequence: Synthetic oligonucleotide
gagaggccttatgctacggtg

SEQ ID NO: 16085 - DNA, 21 bp, Artificial Sequence
  Description of Artificial Sequence: Synthetic oligonucleotide
gagcggcaggcgtttcatgag

SEQ ID NO: 16086 - DNA, 21 bp, Artificial Sequence
  Description of Artificial Sequence: Synthetic oligonucleotide
gagcggcagccgatgattaag

SEQ ID NO: 16087 - DNA, 21 bp, Artificial Sequence
  Description of Artificial Sequence: Synthetic oligonucleotide
gagcggcagcgtgattctgct

SEQ ID NO: 16088 - DNA, 21 bp, Artificial Sequence
  Description of Artificial Sequence: Synthetic oligonucleotide
gagcggcagactacgttggct

SEQ ID NO: 16089 - DNA, 21 bp, Artificial Sequence
  Description of Artificial Sequence: Synthetic oligonucleotide
gagcgtcgtattggggcgtct

SEQ ID NO: 16090 - DNA, 21 bp, Artificial Sequence
  Description of Artificial Sequence: Synthetic oligonucleotide
gagaggaggccgggtacgtct

SEQ ID NO: 16091 - DNA, 21 bp, Artificial Sequence
  Description of Artificial Sequence: Synthetic oligonucleotide
gagcggtcgaagccggttgcg

SEQ ID NO: 16092 - DNA, 21 bp, Artificial Sequence
  Description of Artificial Sequence: Synthetic oligonucleotide
gagaggtctcgtggtcagcag

SEQ ID NO: 16093 - DNA, 21 bp, Artificial Sequence
  Description of Artificial Sequence: Synthetic oligonucleotide
gagaggtcgtctcctcagcct

SEQ ID NO: 16094 - DNA, 21 bp, Artificial Sequence
  Description of Artificial Sequence: Synthetic oligonucleotide
gagcgttcttctcgggagacg

SEQ ID NO: 16095 - DNA, 21 bp, Artificial Sequence
  Description of Artificial Sequence: Synthetic oligonucleotide
gagcggacggctgtgggtgtg

SEQ ID NO: 16096 - DNA, 21 bp, Artificial Sequence
  Description of Artificial Sequence: Synthetic oligonucleotide
gagaggactaagcctcctact

SEQ ID NO: 16097 - DNA, 21 bp, Artificial Sequence
  Description of Artificial Sequence: Synthetic oligonucleotide
gagcggtatccgtctatttcg

SEQ ID NO: 16098 - DNA, 21 bp, Artificial Sequence
  Description of Artificial Sequence: Synthetic oligonucleotide
gagtctgcttttaagcgttgt

SEQ ID NO: 16099 - DNA, 21 bp, Artificial Sequence
  Description of Artificial Sequence: Synthetic oligonucleotide
gagtcggcgtggatgcaggat

SEQ ID NO: 16100 - DNA, 21 bp, Artificial Sequence
  Description of Artificial Sequence: Synthetic oligonucleotide
gagtcgtttactggggtgcat

SEQ ID NO: 16101 - DNA, 21 bp, Artificial Sequence
  Description of Artificial Sequence: Synthetic oligonucleotide
gagtctggtgataagttgagg

SEQ ID NO: 16102 - DNA, 21 bp, Artificial Sequence
  Description of Artificial Sequence: Synthetic oligonucleotide
gagtctgggattttgcagctt

SEQ ID NO: 16103 - DNA, 21 bp, Artificial Sequence
  Description of Artificial Sequence: Synthetic oligonucleotide
gagtctggtcttactcagact

SEQ ID NO: 16104 - DNA, 21 bp, Artificial Sequence
  Description of Artificial Sequence: Synthetic oligonucleotide
gagagtggtcggcctatggtt

SEQ ID NO: 16105 - DNA, 21 bp, Artificial Sequence
  Description of Artificial Sequence: Synthetic oligonucleotide
gagtcgattacgcggtctgtt

SEQ ID NO: 16106 - DNA, 21 bp, Artificial Sequence
  Description of Artificial Sequence: Synthetic oligonucleotide
gagtcgattgtgggtaggagg

SEQ ID NO: 16107 - DNA, 21 bp, Artificial Sequence
  Description of Artificial Sequence: Synthetic oligonucleotide
gagtcgaaggagctgacttct

SEQ ID NO: 16108 - DNA, 21 bp, Artificial Sequence
  Description of Artificial Sequence: Synthetic oligonucleotide
gagtctaagggtgcgcatgcg

SEQ ID NO: 16109 - DNA, 21 bp, Artificial Sequence
  Description of Artificial Sequence: Synthetic oligonucleotide
gagtcgaagcattttagtccg

SEQ ID NO: 16110 - DNA, 21 bp, Artificial Sequence
  Description of Artificial Sequence: Synthetic oligonucleotide
gagtctaagattggtcggcct

SEQ ID NO: 16111 - DNA, 21 bp, Artificial Sequence
  Description of Artificial Sequence: Synthetic oligonucleotide
gagtcgaagcctaattcgcgt

SEQ ID NO: 16112 - DNA, 21 bp, Artificial Sequence
  Description of Artificial Sequence: Synthetic oligonucleotide
gagtcgcctgatcggtctact

SEQ ID NO: 16113 - DNA, 21 bp, Artificial Sequence
  Description of Artificial Sequence: Synthetic oligonucleotide
gagtcgccgttttctgtgccg

SEQ ID NO: 16114 - DNA, 21 bp, Artificial Sequence
  Description of Artificial Sequence: Synthetic oligonucleotide
gagtctcctaaggcggatccg

SEQ ID NO: 16115 - DNA, 21 bp, Artificial Sequence
  Description of Artificial Sequence: Synthetic oligonucleotide
gagagtccgatggttagtccg

SEQ ID NO: 16116 - DNA, 21 bp, Artificial Sequence
  Description of Artificial Sequence: Synthetic oligonucleotide
gagtctcaggtgctggtttat

SEQ ID NO: 16117 - DNA, 21 bp, Artificial Sequence
  Description of Artificial Sequence: Synthetic oligonucleotide
gagtcgcggcaggcgtttcct

SEQ ID NO: 16118 - DNA, 21 bp, Artificial Sequence
  Description of Artificial Sequence: Synthetic oligonucleotide
gagtctcgttcggcggcttat

SEQ ID NO: 16119 - DNA, 21 bp, Artificial Sequence
  Description of Artificial Sequence: Synthetic oligonucleotide
gagtctcgttcggctttgccg

SEQ ID NO: 16120 - DNA, 21 bp, Artificial Sequence
  Description of Artificial Sequence: Synthetic oligonucleotide
gagagtcgtgttgggtatatt

SEQ ID NO: 16121 - DNA, 21 bp, Artificial Sequence
  Description of Artificial Sequence: Synthetic oligonucleotide
gagtcgcgggtgtcgttgggg

SEQ ID NO: 16122 - DNA, 21 bp, Artificial Sequence
  Description of Artificial Sequence: Synthetic oligonucleotide
gagtcttctcagcatttggat

SEQ ID NO: 16123 - DNA, 21 bp, Artificial Sequence
  Description of Artificial Sequence: Synthetic oligonucleotide
gagtcgtctcgtgagtttcat

SEQ ID NO: 16124 - DNA, 21 bp, Artificial Sequence
  Description of Artificial Sequence: Synthetic oligonucleotide
gagtcgtctcgtgagttgcat

SEQ ID NO: 16125 - DNA, 21 bp, Artificial Sequence
  Description of Artificial Sequence: Synthetic oligonucleotide
gagtcgtctagtgagttgcat

SEQ ID NO: 16126 - DNA, 21 bp, Artificial Sequence
  Description of Artificial Sequence: Synthetic oligonucleotide
gagtctagttcgcggatgttg

SEQ ID NO: 16127 - DNA, 21 bp, Artificial Sequence
  Description of Artificial Sequence: Synthetic oligonucleotide
gagtcgactgctcttaagagg

SEQ ID NO: 16128 - DNA, 21 bp, Artificial Sequence
  Description of Artificial Sequence: Synthetic oligonucleotide
gagtcgacgtcgagtaggtct

SEQ ID NO: 16129 - DNA, 21 bp, Artificial Sequence
  Description of Artificial Sequence: Synthetic oligonucleotide
gagtcggttgagaatgatagt

SEQ ID NO: 16130 - DNA, 21 bp, Artificial Sequence
  Description of Artificial Sequence: Synthetic oligonucleotide
gagtctgtttttaaggcggct

SEQ ID NO: 16131 - DNA, 21 bp, Artificial Sequence
  Description of Artificial Sequence: Synthetic oligonucleotide
gagtcggtgggttatgctgat

SEQ ID NO: 16132 - DNA, 21 bp, Artificial Sequence
  Description of Artificial Sequence: Synthetic oligonucleotide
gagtctgtgaggcttcagaat

SEQ ID NO: 16133 - DNA, 21 bp, Artificial Sequence
  Description of Artificial Sequence: Synthetic oligonucleotide
gagagttatactgagagtctt

SEQ ID NO: 16134 - DNA, 21 bp, Artificial Sequence
  Description of Artificial Sequence: Synthetic oligonucleotide
gagactgctaagtctggtcag

SEQ ID NO: 16135 - DNA, 21 bp, Artificial Sequence
  Description of Artificial Sequence: Synthetic oligonucleotide
gagacggatcggaagttgtcg

SEQ ID NO: 16136 - DNA, 21 bp, Artificial Sequence
  Description of Artificial Sequence: Synthetic oligonucleotide
gagactgatcgtaatgctagt

SEQ ID NO: 16137 - DNA, 21 bp, Artificial Sequence
  Description of Artificial Sequence: Synthetic oligonucleotide
gagacggagcatacggtggtg

SEQ ID NO: 16138 - DNA, 21 bp, Artificial Sequence
  Description of Artificial Sequence: Synthetic oligonucleotide
gagacgtttacgcgttctgtt

SEQ ID NO: 16139 - DNA, 21 bp, Artificial Sequence
  Description of Artificial Sequence: Synthetic oligonucleotide
gagacgggtaaggatcggatg

SEQ ID NO: 16140 - DNA, 21 bp, Artificial Sequence
  Description of Artificial Sequence: Synthetic oligonucleotide
gagacggggtctcatacgact

SEQ ID NO: 16141 - DNA, 21 bp, Artificial Sequence
  Description of Artificial Sequence: Synthetic oligonucleotide
gagactggttcgcgggcggtt

SEQ ID NO: 16142 - DNA, 21 bp, Artificial Sequence
  Description of Artificial Sequence: Synthetic oligonucleotide
gagacgaagttttctatgggg

SEQ ID NO: 16143 - DNA, 21 bp, Artificial Sequence
  Description of Artificial Sequence: Synthetic oligonucleotide
gagactaagggttctgttgcg

SEQ ID NO: 16144 - DNA, 21 bp, Artificial Sequence
  Description of Artificial Sequence: Synthetic oligonucleotide
gagactaagaaggattatagt

SEQ ID NO: 16145 - DNA, 21 bp, Artificial Sequence
  Description of Artificial Sequence: Synthetic oligonucleotide
gagacgcttgaggttagtttg

SEQ ID NO: 16146 - DNA, 21 bp, Artificial Sequence
  Description of Artificial Sequence: Synthetic oligonucleotide
gagacgttgtctggtaatgag

SEQ ID NO: 16147 - DNA, 21 bp, Artificial Sequence
  Description of Artificial Sequence: Synthetic oligonucleotide
gagacgatgcgtaaggatcct

SEQ ID NO: 16148 - DNA, 21 bp, Artificial Sequence
  Description of Artificial Sequence: Synthetic oligonucleotide
gagacgaatttttcgggtgct

SEQ ID NO: 16149 - DNA, 21 bp, Artificial Sequence
  Description of Artificial Sequence: Synthetic oligonucleotide
gagactaatccgcgttgttcg

SEQ ID NO: 16150 - DNA, 21 bp, Artificial Sequence
  Description of Artificial Sequence: Synthetic oligonucleotide
gagacgccttttaagccgtct

SEQ ID NO: 16151 - DNA, 21 bp, Artificial Sequence
  Description of Artificial Sequence: Synthetic oligonucleotide
gagacgcctattgattctgat

SEQ ID NO: 16152 - DNA, 21 bp, Artificial Sequence
  Description of Artificial Sequence: Synthetic oligonucleotide
gagactccgaatcattcgcgg

SEQ ID NO: 16153 - DNA, 21 bp, Artificial Sequence
  Description of Artificial Sequence: Synthetic oligonucleotide
gagactcgtggtcatctgatt

SEQ ID NO: 16154 - DNA, 21 bp, Artificial Sequence
  Description of Artificial Sequence: Synthetic oligonucleotide
gagactcggctggtgcctacg

SEQ ID NO: 16155 - DNA, 21 bp, Artificial Sequence
  Description of Artificial Sequence: Synthetic oligonucleotide
gagacgcgtaatctgcatggg

SEQ ID NO: 16156 - DNA, 21 bp, Artificial Sequence
  Description of Artificial Sequence: Synthetic oligonucleotide
gagactaggaatcagtttggg

SEQ ID NO: 16157 - DNA, 21 bp, Artificial Sequence
  Description of Artificial Sequence: Synthetic oligonucleotide
gagactcgtagtactcgtgag

SEQ ID NO: 16158 - DNA, 21 bp, Artificial Sequence
  Description of Artificial Sequence: Synthetic oligonucleotide
gagacgcggtatccggatatg

SEQ ID NO: 16159 - DNA, 21 bp, Artificial Sequence
  Description of Artificial Sequence: Synthetic oligonucleotide
gagacgtctcattcggtgtct

SEQ ID NO: 16160 - DNA, 21 bp, Artificial Sequence
  Description of Artificial Sequence: Synthetic oligonucleotide
gagactagtcgggcgagtact

SEQ ID NO: 16161 - DNA, 21 bp, Artificial Sequence
  Description of Artificial Sequence: Synthetic oligonucleotide
gagacgtcgaggcctactgtt

SEQ ID NO: 16162 - DNA, 21 bp, Artificial Sequence
  Description of Artificial Sequence: Synthetic oligonucleotide
gagacgtcttcggcttatttg

SEQ ID NO: 16163 - DNA, 21 bp, Artificial Sequence
  Description of Artificial Sequence: Synthetic oligonucleotide
gagacgactcagaattatatt

SEQ ID NO: 16164 - DNA, 21 bp, Artificial Sequence
  Description of Artificial Sequence: Synthetic oligonucleotide
gagacgacgtctcttcctcgg

SEQ ID NO: 16165 - DNA, 21 bp, Artificial Sequence
  Description of Artificial Sequence: Synthetic oligonucleotide
gagactactgttcaggcttct

SEQ ID NO: 16166 - DNA, 21 bp, Artificial Sequence
  Description of Artificial Sequence: Synthetic oligonucleotide
gagacggtgtttcatgtggct

SEQ ID NO: 16167 - DNA, 21 bp, Artificial Sequence
  Description of Artificial Sequence: Synthetic oligonucleotide
gaggtggctgtgcagccgatg

SEQ ID NO: 16168 - DNA, 21 bp, Artificial Sequence
  Description of Artificial Sequence: Synthetic oligonucleotide
gaggtggggaggaattctact

SEQ ID NO: 16169 - DNA, 21 bp, Artificial Sequence
  Description of Artificial Sequence: Synthetic oligonucleotide
gaggttcatccgggtcaggct

SEQ ID NO: 16170 - DNA, 21 bp, Artificial Sequence
  Description of Artificial Sequence: Synthetic oligonucleotide
gaggttaaggagcagactgtg

SEQ ID NO: 16171 - DNA, 21 bp, Artificial Sequence
  Description of Artificial Sequence: Synthetic oligonucleotide
gaggttaagagttttagtagt

SEQ ID NO: 16172 - DNA, 21 bp, Artificial Sequence
  Description of Artificial Sequence: Synthetic oligonucleotide
gaggtgccggcggcgaggtcg

SEQ ID NO: 16173 - DNA, 21 bp, Artificial Sequence
  Description of Artificial Sequence: Synthetic oligonucleotide
gaggttccgaatagtagtgct

SEQ ID NO: 16174 - DNA, 21 bp, Artificial Sequence
  Description of Artificial Sequence: Synthetic oligonucleotide
gaggttcagctgcctgcgcgg

SEQ ID NO: 16175 - DNA, 21 bp, Artificial Sequence
  Description of Artificial Sequence: Synthetic oligonucleotide
gaggttcgtaagggtgcgcag

SEQ ID NO: 16176 - DNA, 21 bp, Artificial Sequence
  Description of Artificial Sequence: Synthetic oligonucleotide
gaggtgcgtctgtctaatgct

SEQ ID NO: 16177 - DNA, 21 bp, Artificial Sequence
  Description of Artificial Sequence: Synthetic oligonucleotide
gaggtttcgtttttgcctcct

SEQ ID NO: 16178 - DNA, 21 bp, Artificial Sequence
  Description of Artificial Sequence: Synthetic oligonucleotide
gaggtgagtctgtcgacgcgt

SEQ ID NO: 16179 - DNA, 21 bp, Artificial Sequence
  Description of Artificial Sequence: Synthetic oligonucleotide
gaggtgagtatgctgagtaag

SEQ ID NO: 16180 - DNA, 21 bp, Artificial Sequence
  Description of Artificial Sequence: Synthetic oligonucleotide
gaggtgactgggagggcgggt

SEQ ID NO: 16181 - DNA, 21 bp, Artificial Sequence
  Description of Artificial Sequence: Synthetic oligonucleotide
gaggtgacgatgaagcatacg

SEQ ID NO: 16182 - DNA, 21 bp, Artificial Sequence
  Description of Artificial Sequence: Synthetic oligonucleotide
gaggtgactaatccttctgct

SEQ ID NO: 16183 - DNA, 21 bp, Artificial Sequence
  Description of Artificial Sequence: Synthetic oligonucleotide
gaggttactgtgggtttgcct

SEQ ID NO: 16184 - DNA, 21 bp, Artificial Sequence
  Description of Artificial Sequence: Synthetic oligonucleotide
gagtgggcggattcttcgggt

SEQ ID NO: 16185 - DNA, 21 bp, Artificial Sequence
  Description of Artificial Sequence: Synthetic oligonucleotide
gagtggaatcgtcaggctaat

SEQ ID NO: 16186 - DNA, 21 bp, Artificial Sequence
  Description of Artificial Sequence: Synthetic oligonucleotide
gagtatgcgtcgctggggctt

SEQ ID NO: 16187 - DNA, 21 bp, Artificial Sequence
  Description of Artificial Sequence: Synthetic oligonucleotide
gagtatgatcattcgatgctg

SEQ ID NO: 16188 - DNA, 21 bp, Artificial Sequence
  Description of Artificial Sequence: Synthetic oligonucleotide
gagtatattcgtggtaaggag

SEQ ID NO: 16189 - DNA, 21 bp, Artificial Sequence
  Description of Artificial Sequence: Synthetic oligonucleotide
gagtatttggatgagtctggt

SEQ ID NO: 16190 - DNA, 21 bp, Artificial Sequence
  Description of Artificial Sequence: Synthetic oligonucleotide
gagtatctgccgaattcggct

SEQ ID NO: 16191 - DNA, 21 bp, Artificial Sequence
  Description of Artificial Sequence: Synthetic oligonucleotide
gagtatccggcgcatctgact

SEQ ID NO: 16192 - DNA, 21 bp, Artificial Sequence
  Description of Artificial Sequence: Synthetic oligonucleotide
gagtatccgcttaatactggg

SEQ ID NO: 16193 - DNA, 21 bp, Artificial Sequence
  Description of Artificial Sequence: Synthetic oligonucleotide
gagtatcagcggccggatccg

SEQ ID NO: 16194 - DNA, 21 bp, Artificial Sequence
  Description of Artificial Sequence: Synthetic oligonucleotide
gagtattcttttccgaaggag

SEQ ID NO: 16195 - DNA, 21 bp, Artificial Sequence
  Description of Artificial Sequence: Synthetic oligonucleotide
gagtatactccgatttctggt

SEQ ID NO: 16196 - DNA, 21 bp, Artificial Sequence
  Description of Artificial Sequence: Synthetic oligonucleotide
gagtatgttggggttcagagg

SEQ ID NO: 16197 - DNA, 21 bp, Artificial Sequence
  Description of Artificial Sequence: Synthetic oligonucleotide
tttgctgcgaaggatgttact

SEQ ID NO: 16198 - DNA, 21 bp, Artificial Sequence
  Description of Artificial Sequence: Synthetic oligonucleotide
tttgctgcgaagatgccttcg

SEQ ID NO: 16199 - DNA, 21 bp, Artificial Sequence
  Description of Artificial Sequence: Synthetic oligonucleotide
tttgctgcgctgcgggttgat

SEQ ID NO: 16200 - DNA, 21 bp, Artificial Sequence
  Description of Artificial Sequence: Synthetic oligonucleotide
tttgcggctcaggttgaggat

SEQ ID NO: 16201 - DNA, 21 bp, Artificial Sequence
  Description of Artificial Sequence: Synthetic oligonucleotide
tttgcggcttcttctcaggat

SEQ ID NO: 16202 - DNA, 21 bp, Artificial Sequence
  Description of Artificial Sequence: Synthetic oligonucleotide
tttgctgatgctatggttatg

SEQ ID NO: 16203 - DNA, 21 bp, Artificial Sequence
  Description of Artificial Sequence: Synthetic oligonucleotide
tttgctgagaagtctcggggg

SEQ ID NO: 16204 - DNA, 21 bp, Artificial Sequence
  Description of Artificial Sequence: Synthetic oligonucleotide
tttgcggggattgcgcagtat

SEQ ID NO: 16205 - DNA, 21 bp, Artificial Sequence
  Description of Artificial Sequence: Synthetic oligonucleotide
tttgcggggaagcatcagaat

SEQ ID NO: 16206 - DNA, 21 bp, Artificial Sequence
  Description of Artificial Sequence: Synthetic oligonucleotide
tttgcggggctgactcctgtt

SEQ ID NO: 16207 - DNA, 21 bp, Artificial Sequence
  Description of Artificial Sequence: Synthetic oligonucleotide
tttgcggggaattctccgtcg

SEQ ID NO: 16208 - DNA, 21 bp, Artificial Sequence
  Description of Artificial Sequence: Synthetic oligonucleotide
tttgctcatactgcgaggccg

SEQ ID NO: 16209 - DNA, 21 bp, Artificial Sequence
  Description of Artificial Sequence: Synthetic oligonucleotide
tttgctaagcatggtgggccg

SEQ ID NO: 16210 - DNA, 21 bp, Artificial Sequence
  Description of Artificial Sequence: Synthetic oligonucleotide
tttgcgaagccggctagtctt

SEQ ID NO: 16211 - DNA, 21 bp, Artificial Sequence
  Description of Artificial Sequence: Synthetic oligonucleotide
tttgctctggagggtcgttct

SEQ ID NO: 16212 - DNA, 21 bp, Artificial Sequence
  Description of Artificial Sequence: Synthetic oligonucleotide
tttgctctgtcggcttctctt

SEQ ID NO: 16213 - DNA, 21 bp, Artificial Sequence
  Description of Artificial Sequence: Synthetic oligonucleotide
tttgcgatggcgaatgataag

SEQ ID NO: 16214 - DNA, 21 bp, Artificial Sequence
  Description of Artificial Sequence: Synthetic oligonucleotide
tttgcgaatcgggctacgatt

SEQ ID NO: 16215 - DNA, 21 bp, Artificial Sequence
  Description of Artificial Sequence: Synthetic oligonucleotide
tttgctaattctgcggttgag

SEQ ID NO: 16216 - DNA, 21 bp, Artificial Sequence
  Description of Artificial Sequence: Synthetic oligonucleotide
tttgcgccgggtcatgcgatt

SEQ ID NO: 16217 - DNA, 21 bp, Artificial Sequence
  Description of Artificial Sequence: Synthetic oligonucleotide
tttgctccgctgagtcctcat

SEQ ID NO: 16218 - DNA, 21 bp, Artificial Sequence
  Description of Artificial Sequence: Synthetic oligonucleotide
tttgctccgccgccggctttt

SEQ ID NO: 16219 - DNA, 21 bp, Artificial Sequence
  Description of Artificial Sequence: Synthetic oligonucleotide
tttgctccgtctcggaatgat

SEQ ID NO: 16220 - DNA, 21 bp, Artificial Sequence
  Description of Artificial Sequence: Synthetic oligonucleotide
tttgcgcagaagttgagtcct

SEQ ID NO: 16221 - DNA, 21 bp, Artificial Sequence
  Description of Artificial Sequence: Synthetic oligonucleotide
tttgcgcagaagaatctgtcg

SEQ ID NO: 16222 - DNA, 21 bp, Artificial Sequence
  Description of Artificial Sequence: Synthetic oligonucleotide
tttgcgaggaatcctgatgct

SEQ ID NO: 16223 - DNA, 21 bp, Artificial Sequence
  Description of Artificial Sequence: Synthetic oligonucleotide
tttgctcgtcctgattcgatg

SEQ ID NO: 16224 - DNA, 21 bp, Artificial Sequence
  Description of Artificial Sequence: Synthetic oligonucleotide
tttgcgcggagtagtattcct

SEQ ID NO: 16225 - DNA, 21 bp, Artificial Sequence
  Description of Artificial Sequence: Synthetic oligonucleotide
tttgcgagtgctgcgccgagg

SEQ ID NO: 16226 - DNA, 21 bp, Artificial Sequence
  Description of Artificial Sequence: Synthetic oligonucleotide
tttgcgagtgcgcgtgctcag

SEQ ID NO: 16227 - DNA, 21 bp, Artificial Sequence
  Description of Artificial Sequence: Synthetic oligonucleotide
tttgcgtcggggcattttaat

SEQ ID NO: 16228 - DNA, 21 bp, Artificial Sequence
  Description of Artificial Sequence: Synthetic oligonucleotide
tttgcgtctcttgttacgaat

SEQ ID NO: 16229 - DNA, 21 bp, Artificial Sequence
  Description of Artificial Sequence: Synthetic oligonucleotide
tttgcgagttcgcgtaataat

SEQ ID NO: 16230 - DNA, 21 bp, Artificial Sequence
  Description of Artificial Sequence: Synthetic oligonucleotide
tttgcttcttcgagttcgcat

SEQ ID NO: 16231 - DNA, 21 bp, Artificial Sequence
  Description of Artificial Sequence: Synthetic oligonucleotide
tttgcttctgttcgtacggtt

SEQ ID NO: 16232 - DNA, 21 bp, Artificial Sequence
  Description of Artificial Sequence: Synthetic oligonucleotide
tttgcgtcgtatggttcgccg

SEQ ID NO: 16233 - DNA, 21 bp, Artificial Sequence
  Description of Artificial Sequence: Synthetic oligonucleotide
tttgcgacgtcggggtatgct

SEQ ID NO: 16234 - DNA, 21 bp, Artificial Sequence
  Description of Artificial Sequence: Synthetic oligonucleotide
tttgctacttcgactactccg

SEQ ID NO: 16235 - DNA, 21 bp, Artificial Sequence
  Description of Artificial Sequence: Synthetic oligonucleotide
tttgctactactaagcttgat

SEQ ID NO: 16236 - DNA, 21 bp, Artificial Sequence
  Description of Artificial Sequence: Synthetic oligonucleotide
ttttgttctgagcagcatagt

SEQ ID NO: 16237 - DNA, 21 bp, Artificial Sequence
  Description of Artificial Sequence: Synthetic oligonucleotide
tttgatgcgccgcagactagg

SEQ ID NO: 16238 - DNA, 21 bp, Artificial Sequence
  Description of Artificial Sequence: Synthetic oligonucleotide
tttgatgcgtatcataggctt

SEQ ID NO: 16239 - DNA, 21 bp, Artificial Sequence
  Description of Artificial Sequence: Synthetic oligonucleotide
tttgatgattttgctcttgat

SEQ ID NO: 16240 - DNA, 21 bp, Artificial Sequence
  Description of Artificial Sequence: Synthetic oligonucleotide
tttgatgaggctcatgcgcct

SEQ ID NO: 16241 - DNA, 21 bp, Artificial Sequence
  Description of Artificial Sequence: Synthetic oligonucleotide
tttgatgaggatgatcttgct

SEQ ID NO: 16242 - DNA, 21 bp, Artificial Sequence
  Description of Artificial Sequence: Synthetic oligonucleotide
tttgatggtgctaggagtgag

SEQ ID NO: 16243 - DNA, 21 bp, Artificial Sequence
  Description of Artificial Sequence: Synthetic oligonucleotide
tttgatgggattcggccgacg

SEQ ID NO: 16244 - DNA, 21 bp, Artificial Sequence
  Description of Artificial Sequence: Synthetic oligonucleotide
tttgatcatccgtcgtttccg

SEQ ID NO: 16245 - DNA, 21 bp, Artificial Sequence
  Description of Artificial Sequence: Synthetic oligonucleotide
tttgatcatcctgttcgtatg

SEQ ID NO: 16246 - DNA, 21 bp, Artificial Sequence
  Description of Artificial Sequence: Synthetic oligonucleotide
tttgatcatacgaaggcgtgg

SEQ ID NO: 16247 - DNA, 21 bp, Artificial Sequence
  Description of Artificial Sequence: Synthetic oligonucleotide
tttgataagagtactaagtat

SEQ ID NO: 16248 - DNA, 21 bp, Artificial Sequence
  Description of Artificial Sequence: Synthetic oligonucleotide
tttgatcagcatacgcggtct

SEQ ID NO: 16249 - DNA, 21 bp, Artificial Sequence
  Description of Artificial Sequence: Synthetic oligonucleotide
tttgatcgggcgatgcagcgt

SEQ ID NO: 16250 - DNA, 21 bp, Artificial Sequence
  Description of Artificial Sequence: Synthetic oligonucleotide
tttgatcgtcagacgcagatt

SEQ ID NO: 16251 - DNA, 21 bp, Artificial Sequence
  Description of Artificial Sequence: Synthetic oligonucleotide
tttgattcggtgaggctgtct

SEQ ID NO: 16252 - DNA, 21 bp, Artificial Sequence
  Description of Artificial Sequence: Synthetic oligonucleotide
tttgatacggctgtgaatgct

SEQ ID NO: 16253 - DNA, 21 bp, Artificial Sequence
  Description of Artificial Sequence: Synthetic oligonucleotide
tttgatacgggtaagtttgcg

SEQ ID NO: 16254 - DNA, 21 bp, Artificial Sequence
  Description of Artificial Sequence: Synthetic oligonucleotide
tttgattatggtcctatggat

SEQ ID NO: 16255 - DNA, 21 bp, Artificial Sequence
  Description of Artificial Sequence: Synthetic oligonucleotide
tttgaggcgaagtcgtcgctt

SEQ ID NO: 16256 - DNA, 21 bp, Artificial Sequence
  Description of Artificial Sequence: Synthetic oligonucleotide
tttgaggcgaaggttacgcgt

SEQ ID NO: 16257 - DNA, 21 bp, Artificial Sequence
  Description of Artificial Sequence: Synthetic oligonucleotide
tttgaggcgcggttgggtacg

SEQ ID NO: 16258 - DNA, 21 bp, Artificial Sequence
  Description of Artificial Sequence: Synthetic oligonucleotide
tttgaggatggttcgctggct

SEQ ID NO: 16259 - DNA, 21 bp, Artificial Sequence
  Description of Artificial Sequence: Synthetic oligonucleotide
tttgaggggtcgcagccgccg

SEQ ID NO: 16260 - DNA, 21 bp, Artificial Sequence
  Description of Artificial Sequence: Synthetic oligonucleotide
tttgagggggtgcagtcgtcg

SEQ ID NO: 16261 - DNA, 21 bp, Artificial Sequence
  Description of Artificial Sequence: Synthetic oligonucleotide
tttgagcatcattatacgcct

SEQ ID NO: 16262 - DNA, 21 bp, Artificial Sequence
  Description of Artificial Sequence: Synthetic oligonucleotide
tttgagaagaggcttacgatt

SEQ ID NO: 16263 - DNA, 21 bp, Artificial Sequence
  Description of Artificial Sequence: Synthetic oligonucleotide
tttgagaagagtcttcctgat

SEQ ID NO: 16264 - DNA, 21 bp, Artificial Sequence
  Description of Artificial Sequence: Synthetic oligonucleotide
tttgagatggtgagttctctt

SEQ ID NO: 16265 - DNA, 21 bp, Artificial Sequence
  Description of Artificial Sequence: Synthetic oligonucleotide
tttgagaataagtatcatgtg

SEQ ID NO: 16266 - DNA, 21 bp, Artificial Sequence
  Description of Artificial Sequence: Synthetic oligonucleotide
tttgagccggctcatgctagt

SEQ ID NO: 16267 - DNA, 21 bp, Artificial Sequence
  Description of Artificial Sequence: Synthetic oligonucleotide
tttgagccttcgcagcttcgg

SEQ ID NO: 16268 - DNA, 21 bp, Artificial Sequence
  Description of Artificial Sequence: Synthetic oligonucleotide
tttgagcctgtgcagaatact

SEQ ID NO: 16269 - DNA, 21 bp, Artificial Sequence
  Description of Artificial Sequence: Synthetic oligonucleotide
tttgagcagctgttggatttt

SEQ ID NO: 16270 - DNA, 21 bp, Artificial Sequence
  Description of Artificial Sequence: Synthetic oligonucleotide
tttgagcggaatcgtacttct

SEQ ID NO: 16271 - DNA, 21 bp, Artificial Sequence
  Description of Artificial Sequence: Synthetic oligonucleotide
tttgagaggccgacggtgatt

SEQ ID NO: 16272 - DNA, 21 bp, Artificial Sequence
  Description of Artificial Sequence: Synthetic oligonucleotide
tttgagcggtcttctggtacg

SEQ ID NO: 16273 - DNA, 21 bp, Artificial Sequence
  Description of Artificial Sequence: Synthetic oligonucleotide
tttgagcgtgtgcctttggat

SEQ ID NO: 16274 - DNA, 21 bp, Artificial Sequence
  Description of Artificial Sequence: Synthetic oligonucleotide
tttgagtctaattcggttttg

SEQ ID NO: 16275 - DNA, 21 bp, Artificial Sequence
  Description of Artificial Sequence: Synthetic oligonucleotide
tttgagtctactacgagtgtg

SEQ ID NO: 16276 - DNA, 21 bp, Artificial Sequence
  Description of Artificial Sequence: Synthetic oligonucleotide
tttgagacgcgttatgaggcg

SEQ ID NO: 16277 - DNA, 21 bp, Artificial Sequence
  Description of Artificial Sequence: Synthetic oligonucleotide
tttgagactactattcgtctg

SEQ ID NO: 16278 - DNA, 21 bp, Artificial Sequence
  Description of Artificial Sequence: Synthetic oligonucleotide
tttgaggttccgtcgactcgg

SEQ ID NO: 16279 - DNA, 21 bp, Artificial Sequence
  Description of Artificial Sequence: Synthetic oligonucleotide
tttgagtatcatgcgtcgggt

SEQ ID NO: 16280 - DNA, 21 bp, Artificial Sequence
  Description of Artificial Sequence: Synthetic oligonucleotide
ttttttgggccggggcctacg

SEQ ID NO: 16281 - DNA, 21 bp, Artificial Sequence
  Description of Artificial Sequence: Synthetic oligonucleotide
ttttttccgattacttctgct

SEQ ID NO: 16282 - DNA, 21 bp, Artificial Sequence
  Description of Artificial Sequence: Synthetic oligonucleotide
tttttttctgatgggcgtgtt

SEQ ID NO: 16283 - DNA, 21 bp, Artificial Sequence
  Description of Artificial Sequence: Synthetic oligonucleotide
tttggtgcttgtcgggtttcg

SEQ ID NO: 16284 - DNA, 21 bp, Artificial Sequence
  Description of Artificial Sequence: Synthetic oligonucleotide
tttggggcggagcctgatgcg

SEQ ID NO: 16285 - DNA, 21 bp, Artificial Sequence
  Description of Artificial Sequence: Synthetic oligonucleotide
tttggtgataggccgtttccg

SEQ ID NO: 16286 - DNA, 21 bp, Artificial Sequence
  Description of Artificial Sequence: Synthetic oligonucleotide
tttggtggggggcgtccggag

SEQ ID NO: 16287 - DNA, 21 bp, Artificial Sequence
  Description of Artificial Sequence: Synthetic oligonucleotide
tttggtgggcagggtggtcag

SEQ ID NO: 16288 - DNA, 21 bp, Artificial Sequence
  Description of Artificial Sequence: Synthetic oligonucleotide
tttggtgggactggtcagttt

SEQ ID NO: 16289 - DNA, 21 bp, Artificial Sequence
  Description of Artificial Sequence: Synthetic oligonucleotide
tttggtcatatgaagactcct

SEQ ID NO: 16290 - DNA, 21 bp, Artificial Sequence
  Description of Artificial Sequence: Synthetic oligonucleotide
tttgggcatcctattgcttcg

SEQ ID NO: 16291 - DNA, 21 bp, Artificial Sequence
  Description of Artificial Sequence: Synthetic oligonucleotide
tttgggcatgtgcatctgaat

SEQ ID NO: 16292 - DNA, 21 bp, Artificial Sequence
  Description of Artificial Sequence: Synthetic oligonucleotide
tttggtattgctggttctcct

SEQ ID NO: 16293 - DNA, 21 bp, Artificial Sequence
  Description of Artificial Sequence: Synthetic oligonucleotide
tttgggaagatttctatgact

SEQ ID NO: 16294 - DNA, 21 bp, Artificial Sequence
  Description of Artificial Sequence: Synthetic oligonucleotide
tttgggctttcgcctcttcct

SEQ ID NO: 16295 - DNA, 21 bp, Artificial Sequence
  Description of Artificial Sequence: Synthetic oligonucleotide
tttgggctgagttcggctgct

SEQ ID NO: 16296 - DNA, 21 bp, Artificial Sequence
  Description of Artificial Sequence: Synthetic oligonucleotide
tttgggctgactcgtcctgag

SEQ ID NO: 16297 - DNA, 21 bp, Artificial Sequence
  Description of Artificial Sequence: Synthetic oligonucleotide
tttgggaataggctgtcgaat

SEQ ID NO: 16298 - DNA, 21 bp, Artificial Sequence
  Description of Artificial Sequence: Synthetic oligonucleotide
tttggtccgatgcttctgggt

SEQ ID NO: 16299 - DNA, 21 bp, Artificial Sequence
  Description of Artificial Sequence: Synthetic oligonucleotide
tttgggcctaataaggcggat

SEQ ID NO: 16300 - DNA, 21 bp, Artificial Sequence
  Description of Artificial Sequence: Synthetic oligonucleotide
tttgggccgccgtcgggtttt

SEQ ID NO: 16301 - DNA, 21 bp, Artificial Sequence
  Description of Artificial Sequence: Synthetic oligonucleotide
tttggtcagcatgctgtgctg

SEQ ID NO: 16302 - DNA, 21 bp, Artificial Sequence
  Description of Artificial Sequence: Synthetic oligonucleotide
tttggtcagaagcatactgag

SEQ ID NO: 16303 - DNA, 21 bp, Artificial Sequence
  Description of Artificial Sequence: Synthetic oligonucleotide
tttgggcagaatcgggtgact

SEQ ID NO: 16304 - DNA, 21 bp, Artificial Sequence
  Description of Artificial Sequence: Synthetic oligonucleotide
tttggtcagacggctcttggg

SEQ ID NO: 16305 - DNA, 21 bp, Artificial Sequence
  Description of Artificial Sequence: Synthetic oligonucleotide
tttgggcgttttccgactgag

SEQ ID NO: 16306 - DNA, 21 bp, Artificial Sequence
  Description of Artificial Sequence: Synthetic oligonucleotide
tttggtcggacgccttatagt

SEQ ID NO: 16307 - DNA, 21 bp, Artificial Sequence
  Description of Artificial Sequence: Synthetic oligonucleotide
tttggttctgatactctgatt

SEQ ID NO: 16308 - DNA, 21 bp, Artificial Sequence
  Description of Artificial Sequence: Synthetic oligonucleotide
tttggttcgcatggtgagagg

SEQ ID NO: 16309 - DNA, 21 bp, Artificial Sequence
  Description of Artificial Sequence: Synthetic oligonucleotide
tttgggacggggtatgcgggt

SEQ ID NO: 16310 - DNA, 21 bp, Artificial Sequence
  Description of Artificial Sequence: Synthetic oligonucleotide
tttggtacgcgtatggagccg

SEQ ID NO: 16311 - DNA, 21 bp, Artificial Sequence
  Description of Artificial Sequence: Synthetic oligonucleotide
tttgggacgtcggaggatgtg

SEQ ID NO: 16312 - DNA, 21 bp, Artificial Sequence
  Description of Artificial Sequence: Synthetic oligonucleotide
tttgggactactaggatggct

SEQ ID NO: 16313 - DNA, 21 bp, Artificial Sequence
  Description of Artificial Sequence: Synthetic oligonucleotide
tttgggacggtgcgtccgtct

SEQ ID NO: 16314 - DNA, 21 bp, Artificial Sequence
  Description of Artificial Sequence: Synthetic oligonucleotide
tttggggtgcagaagattacg

SEQ ID NO: 16315 - DNA, 21 bp, Artificial Sequence
  Description of Artificial Sequence: Synthetic oligonucleotide
tttcatgcttctcatttgggg

SEQ ID NO: 16316 - DNA, 21 bp, Artificial Sequence
  Description of Artificial Sequence: Synthetic oligonucleotide
tttcatgatccttatatttgg

SEQ ID NO: 16317 - DNA, 21 bp, Artificial Sequence
  Description of Artificial Sequence: Synthetic oligonucleotide
tttcatgggttgactgttgcg

SEQ ID NO: 16318 - DNA, 21 bp, Artificial Sequence
  Description of Artificial Sequence: Synthetic oligonucleotide
tttcatgggacttcgctgggg

SEQ ID NO: 16319 - DNA, 21 bp, Artificial Sequence
  Description of Artificial Sequence: Synthetic oligonucleotide
tttcatcttcctcctgagctt

SEQ ID NO: 16320 - DNA, 21 bp, Artificial Sequence
  Description of Artificial Sequence: Synthetic oligonucleotide
tttcatctgtcgagtgcgtct

SEQ ID NO: 16321 - DNA, 21 bp, Artificial Sequence
  Description of Artificial Sequence: Synthetic oligonucleotide
tttcatccggcgtctgtgaat

SEQ ID NO: 16322 - DNA, 21 bp, Artificial Sequence
  Description of Artificial Sequence: Synthetic oligonucleotide
tttcatccgcatagtccgccg

SEQ ID NO: 16323 - DNA, 21 bp, Artificial Sequence
  Description of Artificial Sequence: Synthetic oligonucleotide
tttcatcagaggagtcagtcg

SEQ ID NO: 16324 - DNA, 21 bp, Artificial Sequence
  Description of Artificial Sequence: Synthetic oligonucleotide
tttcatcggaatgtggcgaat

SEQ ID NO: 16325 - DNA, 21 bp, Artificial Sequence
  Description of Artificial Sequence: Synthetic oligonucleotide
tttcatactgcgaatactgag

SEQ ID NO: 16326 - DNA, 21 bp, Artificial Sequence
  Description of Artificial Sequence: Synthetic oligonucleotide
tttattgatcatagtattgct

SEQ ID NO: 16327 - DNA, 21 bp, Artificial Sequence
  Description of Artificial Sequence: Synthetic oligonucleotide
tttattgggaatgcgacgcag

SEQ ID NO: 16328 - DNA, 21 bp, Artificial Sequence
  Description of Artificial Sequence: Synthetic oligonucleotide
tttattggtactgcttctcag

SEQ ID NO: 16329 - DNA, 21 bp, Artificial Sequence
  Description of Artificial Sequence: Synthetic oligonucleotide
tttattggttatcctcagggt

SEQ ID NO: 16330 - DNA, 21 bp, Artificial Sequence
  Description of Artificial Sequence: Synthetic oligonucleotide
tttattccttcggtttctgtt

SEQ ID NO: 16331 - DNA, 21 bp, Artificial Sequence
  Description of Artificial Sequence: Synthetic oligonucleotide
tttattcaggataagcatgtt

SEQ ID NO: 16332 - DNA, 21 bp, Artificial Sequence
  Description of Artificial Sequence: Synthetic oligonucleotide
tttattaggcatgagtctgtt

SEQ ID NO: 16333 - DNA, 21 bp, Artificial Sequence
  Description of Artificial Sequence: Synthetic oligonucleotide
tttattaggccggatcttgat

SEQ ID NO: 16334 - DNA, 21 bp, Artificial Sequence
  Description of Artificial Sequence: Synthetic oligonucleotide
tttattactggggcgctgggg

SEQ ID NO: 16335 - DNA, 21 bp, Artificial Sequence
  Description of Artificial Sequence: Synthetic oligonucleotide
tttaaggcgtatgataatatt

SEQ ID NO: 16336 - DNA, 21 bp, Artificial Sequence
  Description of Artificial Sequence: Synthetic oligonucleotide
tttaaggattggtttgaggat

SEQ ID NO: 16337 - DNA, 21 bp, Artificial Sequence
  Description of Artificial Sequence: Synthetic oligonucleotide
tttaaggagtcttggcctgcg

SEQ ID NO: 16338 - DNA, 21 bp, Artificial Sequence
  Description of Artificial Sequence: Synthetic oligonucleotide
tttaaggagactagtaatcat

SEQ ID NO: 16339 - DNA, 21 bp, Artificial Sequence
  Description of Artificial Sequence: Synthetic oligonucleotide
tttaagggtatgggggtgggt

SEQ ID NO: 16340 - DNA, 21 bp, Artificial Sequence
  Description of Artificial Sequence: Synthetic oligonucleotide
tttaagcatcctatggatggt

SEQ ID NO: 16341 - DNA, 21 bp, Artificial Sequence
  Description of Artificial Sequence: Synthetic oligonucleotide
tttaagcttggtcctcctgag

SEQ ID NO: 16342 - DNA, 21 bp, Artificial Sequence
  Description of Artificial Sequence: Synthetic oligonucleotide
tttaagcttgtgacgcgtgag

SEQ ID NO: 16343 - DNA, 21 bp, Artificial Sequence
  Description of Artificial Sequence: Synthetic oligonucleotide
tttaagaatggtacgccgcct

SEQ ID NO: 16344 - DNA, 21 bp, Artificial Sequence
  Description of Artificial Sequence: Synthetic oligonucleotide
tttaagaatgttctggggact

SEQ ID NO: 16345 - DNA, 21 bp, Artificial Sequence
  Description of Artificial Sequence: Synthetic oligonucleotide
tttaagccggctaataatgtt

SEQ ID NO: 16346 - DNA, 21 bp, Artificial Sequence
  Description of Artificial Sequence: Synthetic oligonucleotide
tttaagccgcctccgatgtcg

SEQ ID NO: 16347 - DNA, 21 bp, Artificial Sequence
  Description of Artificial Sequence: Synthetic oligonucleotide
tttaagcagcctccttatgtg

SEQ ID NO: 16348 - DNA, 21 bp, Artificial Sequence
  Description of Artificial Sequence: Synthetic oligonucleotide
tttaagcagccgtatgctagg

SEQ ID NO: 16349 - DNA, 21 bp, Artificial Sequence
  Description of Artificial Sequence: Synthetic oligonucleotide
tttaagagtgtggggactatt

SEQ ID NO: 16350 - DNA, 21 bp, Artificial Sequence
  Description of Artificial Sequence: Synthetic oligonucleotide
tttaagactatggagcgtctg

SEQ ID NO: 16351 - DNA, 21 bp, Artificial Sequence
  Description of Artificial Sequence: Synthetic oligonucleotide
tttaaggtgcatgcgtctagt

SEQ ID NO: 16352 - DNA, 21 bp, Artificial Sequence
  Description of Artificial Sequence: Synthetic oligonucleotide
tttctggcgaagctgcagccg

SEQ ID NO: 16353 - DNA, 21 bp, Artificial Sequence
  Description of Artificial Sequence: Synthetic oligonucleotide
tttctggcgttggagcggcag

SEQ ID NO: 16354 - DNA, 21 bp, Artificial Sequence
  Description of Artificial Sequence: Synthetic oligonucleotide
tttcttgctagtcttaatgat

SEQ ID NO: 16355 - DNA, 21 bp, Artificial Sequence
  Description of Artificial Sequence: Synthetic oligonucleotide
tttttggataatagggctgtg

SEQ ID NO: 16356 - DNA, 21 bp, Artificial Sequence
  Description of Artificial Sequence: Synthetic oligonucleotide
tttcttggtgctgcggggcag

SEQ ID NO: 16357 - DNA, 21 bp, Artificial Sequence
  Description of Artificial Sequence: Synthetic oligonucleotide
tttcttggtgcgcattcggct

SEQ ID NO: 16358 - DNA, 21 bp, Artificial Sequence
  Description of Artificial Sequence: Synthetic oligonucleotide
tttttgcatgctatggatctg

SEQ ID NO: 16359 - DNA, 21 bp, Artificial Sequence
  Description of Artificial Sequence: Synthetic oligonucleotide
tttcttcatggggagactggg

SEQ ID NO: 16360 - DNA, 21 bp, Artificial Sequence
  Description of Artificial Sequence: Synthetic oligonucleotide
tttctgaagtcgaatattgct

SEQ ID NO: 16361 - DNA, 21 bp, Artificial Sequence
  Description of Artificial Sequence: Synthetic oligonucleotide
tttctgaagactgctgttcct

SEQ ID NO: 16362 - DNA, 21 bp, Artificial Sequence
  Description of Artificial Sequence: Synthetic oligonucleotide
tttctgaagactgatacgggg

SEQ ID NO: 16363 - DNA, 21 bp, Artificial Sequence
  Description of Artificial Sequence: Synthetic oligonucleotide
tttctgcctgagcgtggttct

SEQ ID NO: 16364 - DNA, 21 bp, Artificial Sequence
  Description of Artificial Sequence: Synthetic oligonucleotide
tttcttccgcagcattctcct

SEQ ID NO: 16365 - DNA, 21 bp, Artificial Sequence
  Description of Artificial Sequence: Synthetic oligonucleotide
tttctgccgagtgggggtgcg

SEQ ID NO: 16366 - DNA, 21 bp, Artificial Sequence
  Description of Artificial Sequence: Synthetic oligonucleotide
tttctgcgtgagaatgcttct

SEQ ID NO: 16367 - DNA, 21 bp, Artificial Sequence
  Description of Artificial Sequence: Synthetic oligonucleotide
tttctgcgtattccggatgat

SEQ ID NO: 16368 - DNA, 21 bp, Artificial Sequence
  Description of Artificial Sequence: Synthetic oligonucleotide
tttttgtctaagcctctgtct

SEQ ID NO: 16369 - DNA, 21 bp, Artificial Sequence
  Description of Artificial Sequence: Synthetic oligonucleotide
tttctgtctaattctaatgct

SEQ ID NO: 16370 - DNA, 21 bp, Artificial Sequence
  Description of Artificial Sequence: Synthetic oligonucleotide
tttctttcgccgaatctgatt

SEQ ID NO: 16371 - DNA, 21 bp, Artificial Sequence
  Description of Artificial Sequence: Synthetic oligonucleotide
tttttgagttcggatggtcgt

SEQ ID NO: 16372 - DNA, 21 bp, Artificial Sequence
  Description of Artificial Sequence: Synthetic oligonucleotide
tttctgagtgttccggagact

SEQ ID NO: 16373 - DNA, 21 bp, Artificial Sequence
  Description of Artificial Sequence: Synthetic oligonucleotide
tttctgacggcggggatgcct

SEQ ID NO: 16374 - DNA, 21 bp, Artificial Sequence
  Description of Artificial Sequence: Synthetic oligonucleotide
tttctgacttcggctaagtct

SEQ ID NO: 16375 - DNA, 21 bp, Artificial Sequence
  Description of Artificial Sequence: Synthetic oligonucleotide
tttctgacgactggggtggat

SEQ ID NO: 16376 - DNA, 21 bp, Artificial Sequence
  Description of Artificial Sequence: Synthetic oligonucleotide
tttatgtttaatgatagtccg

SEQ ID NO: 16377 - DNA, 21 bp, Artificial Sequence
  Description of Artificial Sequence: Synthetic oligonucleotide
tttatggggactgtggttaat

SEQ ID NO: 16378 - DNA, 21 bp, Artificial Sequence
  Description of Artificial Sequence: Synthetic oligonucleotide
tttatgcatcagcagggtctg

SEQ ID NO: 16379 - DNA, 21 bp, Artificial Sequence
  Description of Artificial Sequence: Synthetic oligonucleotide
tttatgcttagggatgctact

SEQ ID NO: 16380 - DNA, 21 bp, Artificial Sequence
  Description of Artificial Sequence: Synthetic oligonucleotide
tttatgatgactggtacggct

SEQ ID NO: 16381 - DNA, 21 bp, Artificial Sequence
  Description of Artificial Sequence: Synthetic oligonucleotide
tttatgcctaagacttctccg

SEQ ID NO: 16382 - DNA, 21 bp, Artificial Sequence
  Description of Artificial Sequence: Synthetic oligonucleotide
tttatgcggagtactcagtcg

SEQ ID NO: 16383 - DNA, 21 bp, Artificial Sequence
  Description of Artificial Sequence: Synthetic oligonucleotide
tttatgtctagggggctggcg

SEQ ID NO: 16384 - DNA, 21 bp, Artificial Sequence
  Description of Artificial Sequence: Synthetic oligonucleotide
tttatgactgagcgtgcggct

SEQ ID NO: 16385 - DNA, 21 bp, Artificial Sequence
  Description of Artificial Sequence: Synthetic oligonucleotide
tttatgactaatctttctggg

SEQ ID NO: 16386 - DNA, 21 bp, Artificial Sequence
  Description of Artificial Sequence: Synthetic oligonucleotide
tttatgacgtctggggatttg

SEQ ID NO: 16387 - DNA, 21 bp, Artificial Sequence
  Description of Artificial Sequence: Synthetic oligonucleotide
tttatggttgatccggtgaat

SEQ ID NO: 16388 - DNA, 21 bp, Artificial Sequence
  Description of Artificial Sequence: Synthetic oligonucleotide
tttatggtttctgcgccgctt

SEQ ID NO: 16389 - DNA, 21 bp, Artificial Sequence
  Description of Artificial Sequence: Synthetic oligonucleotide
tttatgtatgggaatggtgtt

SEQ ID NO: 16390 - DNA, 21 bp, Artificial Sequence
  Description of Artificial Sequence: Synthetic oligonucleotide
tttaatgctattcatgtgagt

SEQ ID NO: 16391 - DNA, 21 bp, Artificial Sequence
  Description of Artificial Sequence: Synthetic oligonucleotide
tttaatgagcttagtggtttg

SEQ ID NO: 16392 - DNA, 21 bp, Artificial Sequence
  Description of Artificial Sequence: Synthetic oligonucleotide
tttaattttaataagatggat

SEQ ID NO: 16393 - DNA, 21 bp, Artificial Sequence
  Description of Artificial Sequence: Synthetic oligonucleotide
tttaatggtgatagtcctgct

SEQ ID NO: 16394 - DNA, 21 bp, Artificial Sequence
  Description of Artificial Sequence: Synthetic oligonucleotide
tttaatggtccttatgagctg

SEQ ID NO: 16395 - DNA, 21 bp, Artificial Sequence
  Description of Artificial Sequence: Synthetic oligonucleotide
tttaatttgtctacgtctgcg

SEQ ID NO: 16396 - DNA, 21 bp, Artificial Sequence
  Description of Artificial Sequence: Synthetic oligonucleotide
tttaatccgacggttagggag

SEQ ID NO: 16397 - DNA, 21 bp, Artificial Sequence
  Description of Artificial Sequence: Synthetic oligonucleotide
tttaataggcctgtgactacg

SEQ ID NO: 16398 - DNA, 21 bp, Artificial Sequence
  Description of Artificial Sequence: Synthetic oligonucleotide
tttaattctgattctaatagt

SEQ ID NO: 16399 - DNA, 21 bp, Artificial Sequence
  Description of Artificial Sequence: Synthetic oligonucleotide
tttaattctagtccggatctt

SEQ ID NO: 16400 - DNA, 21 bp, Artificial Sequence
  Description of Artificial Sequence: Synthetic oligonucleotide
tttaatacgcctacgaaggtt

SEQ ID NO: 16401 - DNA, 21 bp, Artificial Sequence
  Description of Artificial Sequence: Synthetic oligonucleotide
tttaatgttatgcaggagagg

SEQ ID NO: 16402 - DNA, 21 bp, Artificial Sequence
  Description of Artificial Sequence: Synthetic oligonucleotide
tttccggctttgtctggtggg

SEQ ID NO: 16403 - DNA, 21 bp, Artificial Sequence
  Description of Artificial Sequence: Synthetic oligonucleotide
tttccggctgttaatgttccg

SEQ ID NO: 16404 - DNA, 21 bp, Artificial Sequence
  Description of Artificial Sequence: Synthetic oligonucleotide
tttcctgagcgtggtatggtt

SEQ ID NO: 16405 - DNA, 21 bp, Artificial Sequence
  Description of Artificial Sequence: Synthetic oligonucleotide
tttccgtttaatagtggttct

SEQ ID NO: 16406 - DNA, 21 bp, Artificial Sequence
  Description of Artificial Sequence: Synthetic oligonucleotide
tttcctggttttccttcgaag

SEQ ID NO: 16407 - DNA, 21 bp, Artificial Sequence
  Description of Artificial Sequence: Synthetic oligonucleotide
tttccgggtagtgattcgctg

SEQ ID NO: 16408 - DNA, 21 bp, Artificial Sequence
  Description of Artificial Sequence: Synthetic oligonucleotide
tttcctcatacgttgtctgag

SEQ ID NO: 16409 - DNA, 21 bp, Artificial Sequence
  Description of Artificial Sequence: Synthetic oligonucleotide
tttcctaaggggtctacgccg

SEQ ID NO: 16410 - DNA, 21 bp, Artificial Sequence
  Description of Artificial Sequence: Synthetic oligonucleotide
tttcctaagactgatgatacg

SEQ ID NO: 16411 - DNA, 21 bp, Artificial Sequence
  Description of Artificial Sequence: Synthetic oligonucleotide
tttccgaagtatgctattgcg

SEQ ID NO: 16412 - DNA, 21 bp, Artificial Sequence
  Description of Artificial Sequence: Synthetic oligonucleotide
tttcctttgatgtcttcgaat

SEQ ID NO: 16413 - DNA, 21 bp, Artificial Sequence
  Description of Artificial Sequence: Synthetic oligonucleotide
tttcctctttcggatccgtat

SEQ ID NO: 16414 - DNA, 21 bp, Artificial Sequence
  Description of Artificial Sequence: Synthetic oligonucleotide
tttccgttgtcgcagcaggct

SEQ ID NO: 16415 - DNA, 21 bp, Artificial Sequence
  Description of Artificial Sequence: Synthetic oligonucleotide
tttccgatggcgaagccgtat

SEQ ID NO: 16416 - DNA, 21 bp, Artificial Sequence
  Description of Artificial Sequence: Synthetic oligonucleotide
tttccgatgcgtggtgctcct

SEQ ID NO: 16417 - DNA, 21 bp, Artificial Sequence
  Description of Artificial Sequence: Synthetic oligonucleotide
tttcctatgacgaatcctgcg

SEQ ID NO: 16418 - DNA, 21 bp, Artificial Sequence
  Description of Artificial Sequence: Synthetic oligonucleotide
tttcctaatgcgcagctggtt

SEQ ID NO: 16419 - DNA, 21 bp, Artificial Sequence
  Description of Artificial Sequence: Synthetic oligonucleotide
tttccgaatgatcttcctctt

SEQ ID NO: 16420 - DNA, 21 bp, Artificial Sequence
  Description of Artificial Sequence: Synthetic oligonucleotide
tttcctaatatgagttcggtt

SEQ ID NO: 16421 - DNA, 21 bp, Artificial Sequence
  Description of Artificial Sequence: Synthetic oligonucleotide
tttcctaatcggtttgaggct

SEQ ID NO: 16422 - DNA, 21 bp, Artificial Sequence
  Description of Artificial Sequence: Synthetic oligonucleotide
tttccgcctggtgttcgtcct

SEQ ID NO: 16423 - DNA, 21 bp, Artificial Sequence
  Description of Artificial Sequence: Synthetic oligonucleotide
tttcctccgagggatacgccg

SEQ ID NO: 16424 - DNA, 21 bp, Artificial Sequence
  Description of Artificial Sequence: Synthetic oligonucleotide
tttccgcctagttgtgcgaat

SEQ ID NO: 16425 - DNA, 21 bp, Artificial Sequence
  Description of Artificial Sequence: Synthetic oligonucleotide
tttccgccttcgctgtctgct

SEQ ID NO: 16426 - DNA, 21 bp, Artificial Sequence
  Description of Artificial Sequence: Synthetic oligonucleotide
tttccgccgagttctttgcct

SEQ ID NO: 16427 - DNA, 21 bp, Artificial Sequence
  Description of Artificial Sequence: Synthetic oligonucleotide
tttccgccgactaattcgttt

SEQ ID NO: 16428 - DNA, 21 bp, Artificial Sequence
  Description of Artificial Sequence: Synthetic oligonucleotide
tttcctcagattactttgaat

SEQ ID NO: 16429 - DNA, 21 bp, Artificial Sequence
  Description of Artificial Sequence: Synthetic oligonucleotide
tttccgcagaaggaggggacg

SEQ ID NO: 16430 - DNA, 21 bp, Artificial Sequence
  Description of Artificial Sequence: Synthetic oligonucleotide
tttcctcagccggctgatatg

SEQ ID NO: 16431 - DNA, 21 bp, Artificial Sequence
  Description of Artificial Sequence: Synthetic oligonucleotide
tttcctagggctattgatgcg

SEQ ID NO: 16432 - DNA, 21 bp, Artificial Sequence
  Description of Artificial Sequence: Synthetic oligonucleotide
tttccgcggggggctgtgctt

SEQ ID NO: 16433 - DNA, 21 bp, Artificial Sequence
  Description of Artificial Sequence: Synthetic oligonucleotide
tttccgaggccgcagcttggt

SEQ ID NO: 16434 - DNA, 21 bp, Artificial Sequence
  Description of Artificial Sequence: Synthetic oligonucleotide
tttccgtcgaatcctgcgcat

SEQ ID NO: 16435 - DNA, 21 bp, Artificial Sequence
  Description of Artificial Sequence: Synthetic oligonucleotide
tttcctagttctcagcagact

SEQ ID NO: 16436 - DNA, 21 bp, Artificial Sequence
  Description of Artificial Sequence: Synthetic oligonucleotide
tttccttcgtctcgtctttcg

SEQ ID NO: 16437 - DNA, 21 bp, Artificial Sequence
  Description of Artificial Sequence: Synthetic oligonucleotide
tttcctagtacgactctgccg

SEQ ID NO: 16438 - DNA, 21 bp, Artificial Sequence
  Description of Artificial Sequence: Synthetic oligonucleotide
tttccgactgattatgtgcct

SEQ ID NO: 16439 - DNA, 21 bp, Artificial Sequence
  Description of Artificial Sequence: Synthetic oligonucleotide
tttccgacgaagggttttgtg

SEQ ID NO: 16440 - DNA, 21 bp, Artificial Sequence
  Description of Artificial Sequence: Synthetic oligonucleotide
tttccgacttcgacgagtagt

SEQ ID NO: 16441 - DNA, 21 bp, Artificial Sequence
  Description of Artificial Sequence: Synthetic oligonucleotide
tttccgacttctactacgccg

SEQ ID NO: 16442 - DNA, 21 bp, Artificial Sequence
  Description of Artificial Sequence: Synthetic oligonucleotide
tttcctgttgcgcagcatgat

SEQ ID NO: 16443 - DNA, 21 bp, Artificial Sequence
  Description of Artificial Sequence: Synthetic oligonucleotide
tttccggtggatgggcggcag

SEQ ID NO: 16444 - DNA, 21 bp, Artificial Sequence
  Description of Artificial Sequence: Synthetic oligonucleotide
tttcctgttggtaatcggctg

SEQ ID NO: 16445 - DNA, 21 bp, Artificial Sequence
  Description of Artificial Sequence: Synthetic oligonucleotide
tttcctgtggggcagcttgct

SEQ ID NO: 16446 - DNA, 21 bp, Artificial Sequence
  Description of Artificial Sequence: Synthetic oligonucleotide
tttccggttaagacgatggtt

SEQ ID NO: 16447 - DNA, 21 bp, Artificial Sequence
  Description of Artificial Sequence: Synthetic oligonucleotide
tttcctgtttcggcgcgggat

SEQ ID NO: 16448 - DNA, 21 bp, Artificial Sequence
  Description of Artificial Sequence: Synthetic oligonucleotide
tttcaggctgctccggatcat

SEQ ID NO: 16449 - DNA, 21 bp, Artificial Sequence
  Description of Artificial Sequence: Synthetic oligonucleotide
tttcaggctgggaaggcggtt

SEQ ID NO: 16450 - DNA, 21 bp, Artificial Sequence
  Description of Artificial Sequence: Synthetic oligonucleotide
tttcagggggcgatttcgcgg

SEQ ID NO: 16451 - DNA, 21 bp, Artificial Sequence
  Description of Artificial Sequence: Synthetic oligonucleotide
tttcaggggttgcggttgggt

SEQ ID NO: 16452 - DNA, 21 bp, Artificial Sequence
  Description of Artificial Sequence: Synthetic oligonucleotide
tttcagggtagtgtgccggag

SEQ ID NO: 16453 - DNA, 21 bp, Artificial Sequence
  Description of Artificial Sequence: Synthetic oligonucleotide
tttcagattactgcgcagggg

SEQ ID NO: 16454 - DNA, 21 bp, Artificial Sequence
  Description of Artificial Sequence: Synthetic oligonucleotide
tttcagaagtcgcatgctggg

SEQ ID NO: 16455 - DNA, 21 bp, Artificial Sequence
  Description of Artificial Sequence: Synthetic oligonucleotide
tttcagaatcctcagtcttct

SEQ ID NO: 16456 - DNA, 21 bp, Artificial Sequence
  Description of Artificial Sequence: Synthetic oligonucleotide
tttcagaatcaggggcctctt

SEQ ID NO: 16457 - DNA, 21 bp, Artificial Sequence
  Description of Artificial Sequence: Synthetic oligonucleotide
tttcagcagactgggcctcgt

SEQ ID NO: 16458 - DNA, 21 bp, Artificial Sequence
  Description of Artificial Sequence: Synthetic oligonucleotide
tttcagagggctacgctgcag

SEQ ID NO: 16459 - DNA, 21 bp, Artificial Sequence
  Description of Artificial Sequence: Synthetic oligonucleotide
tttcagtctgcgacggtggct

SEQ ID NO: 16460 - DNA, 21 bp, Artificial Sequence
  Description of Artificial Sequence: Synthetic oligonucleotide
tttcagactccgagtggggat

SEQ ID NO: 16461 - DNA, 21 bp, Artificial Sequence
  Description of Artificial Sequence: Synthetic oligonucleotide
tttcaggtggttgggtcgcct

SEQ ID NO: 16462 - DNA, 21 bp, Artificial Sequence
  Description of Artificial Sequence: Synthetic oligonucleotide
tttcagtatgagcctgcgatt

SEQ ID NO: 16463 - DNA, 21 bp, Artificial Sequence
  Description of Artificial Sequence: Synthetic oligonucleotide
tttagggcggatcttttgaat

SEQ ID NO: 16464 - DNA, 21 bp, Artificial Sequence
  Description of Artificial Sequence: Synthetic oligonucleotide
tttcgggctattgggtcgggg

SEQ ID NO: 16465 - DNA, 21 bp, Artificial Sequence
  Description of Artificial Sequence: Synthetic oligonucleotide
tttagggctcttgtggagcct

SEQ ID NO: 16466 - DNA, 21 bp, Artificial Sequence
  Description of Artificial Sequence: Synthetic oligonucleotide
tttagggatgagcagccgtcg

SEQ ID NO: 16467 - DNA, 21 bp, Artificial Sequence
  Description of Artificial Sequence: Synthetic oligonucleotide
tttagggatcaggctgatggt

SEQ ID NO: 16468 - DNA, 21 bp, Artificial Sequence
  Description of Artificial Sequence: Synthetic oligonucleotide
tttcgggatagtcctccttcg

SEQ ID NO: 16469 - DNA, 21 bp, Artificial Sequence
  Description of Artificial Sequence: Synthetic oligonucleotide
tttcgggaggagcctcagact

SEQ ID NO: 16470 - DNA, 21 bp, Artificial Sequence
  Description of Artificial Sequence: Synthetic oligonucleotide
tttcggggtccgagttcttcg

SEQ ID NO: 16471 - DNA, 21 bp, Artificial Sequence
  Description of Artificial Sequence: Synthetic oligonucleotide
tttcgtcatgctgatgcggtg

SEQ ID NO: 16472 - DNA, 21 bp, Artificial Sequence
  Description of Artificial Sequence: Synthetic oligonucleotide
tttcggcatgatcattcggtt

SEQ ID NO: 16473 - DNA, 21 bp, Artificial Sequence
  Description of Artificial Sequence: Synthetic oligonucleotide
tttaggctgcattctacgtcg

SEQ ID NO: 16474 - DNA, 21 bp, Artificial Sequence
  Description of Artificial Sequence: Synthetic oligonucleotide
tttaggctgccgcatgagact

SEQ ID NO: 16475 - DNA, 21 bp, Artificial Sequence
  Description of Artificial Sequence: Synthetic oligonucleotide
tttaggatgggggaggctcct

SEQ ID NO: 16476 - DNA, 21 bp, Artificial Sequence
  Description of Artificial Sequence: Synthetic oligonucleotide
tttcggatgcagaatgctgcg

SEQ ID NO: 16477 - DNA, 21 bp, Artificial Sequence
  Description of Artificial Sequence: Synthetic oligonucleotide
tttaggaatgggcctgagccg

SEQ ID NO: 16478 - DNA, 21 bp, Artificial Sequence
  Description of Artificial Sequence: Synthetic oligonucleotide
tttcggaataatgttagtctt

SEQ ID NO: 16479 - DNA, 21 bp, Artificial Sequence
  Description of Artificial Sequence: Synthetic oligonucleotide
tttaggccgttggcgctggag

SEQ ID NO: 16480 - DNA, 21 bp, Artificial Sequence
  Description of Artificial Sequence: Synthetic oligonucleotide
tttcgtccgttgagtacgccg

SEQ ID NO: 16481 - DNA, 21 bp, Artificial Sequence
  Description of Artificial Sequence: Synthetic oligonucleotide
tttcgtcctcctgctctttct

SEQ ID NO: 16482 - DNA, 21 bp, Artificial Sequence
  Description of Artificial Sequence: Synthetic oligonucleotide
tttcgtccgcaggatacgatg

SEQ ID NO: 16483 - DNA, 21 bp, Artificial Sequence
  Description of Artificial Sequence: Synthetic oligonucleotide
tttcggcagacgccgaatcat

SEQ ID NO: 16484 - DNA, 21 bp, Artificial Sequence
  Description of Artificial Sequence: Synthetic oligonucleotide
tttcgttctgattctcataat

SEQ ID NO: 16485 - DNA, 21 bp, Artificial Sequence
  Description of Artificial Sequence: Synthetic oligonucleotide
tttaggtctgggcttgcgatt

SEQ ID NO: 16486 - DNA, 21 bp, Artificial Sequence
  Description of Artificial Sequence: Synthetic oligonucleotide
tttcgttctgggttggagtat

SEQ ID NO: 16487 - DNA, 21 bp, Artificial Sequence
  Description of Artificial Sequence: Synthetic oligonucleotide
tttcggtcgggtatggttgcg

SEQ ID NO: 16488 - DNA, 21 bp, Artificial Sequence
  Description of Artificial Sequence: Synthetic oligonucleotide
tttcgttcgaagattgatgct

SEQ ID NO: 16489 - DNA, 21 bp, Artificial Sequence
  Description of Artificial Sequence: Synthetic oligonucleotide
tttcggtcgcctgcgggtctg

SEQ ID NO: 16490 - DNA, 21 bp, Artificial Sequence
  Description of Artificial Sequence: Synthetic oligonucleotide
tttcggagtacggagaataat

SEQ ID NO: 16491 - DNA, 21 bp, Artificial Sequence
  Description of Artificial Sequence: Synthetic oligonucleotide
tttcggacgcctcattcggag

SEQ ID NO: 16492 - DNA, 21 bp, Artificial Sequence
  Description of Artificial Sequence: Synthetic oligonucleotide
tttaggacgagtacggagggt

SEQ ID NO: 16493 - DNA, 21 bp, Artificial Sequence
  Description of Artificial Sequence: Synthetic oligonucleotide
tttcgggttcctgatgctgat

SEQ ID NO: 16494 - DNA, 21 bp, Artificial Sequence
  Description of Artificial Sequence: Synthetic oligonucleotide
ttttcggcggatgttgatggg

SEQ ID NO: 16495 - DNA, 21 bp, Artificial Sequence
  Description of Artificial Sequence: Synthetic oligonucleotide
tttagtgctcggggttctggg

SEQ ID NO: 16496 - DNA, 21 bp, Artificial Sequence
  Description of Artificial Sequence: Synthetic oligonucleotide
ttttcggatggtgagagtctt

SEQ ID NO: 16497 - DNA, 21 bp, Artificial Sequence
  Description of Artificial Sequence: Synthetic oligonucleotide
ttttcggatcatactgctcat

SEQ ID NO: 16498 - DNA, 21 bp, Artificial Sequence
  Description of Artificial Sequence: Synthetic oligonucleotide
ttttcggataatgcgctggat

SEQ ID NO: 16499 - DNA, 21 bp, Artificial Sequence
  Description of Artificial Sequence: Synthetic oligonucleotide
ttttcggataggcctggtgat

SEQ ID NO: 16500 - DNA, 21 bp, Artificial Sequence
  Description of Artificial Sequence: Synthetic oligonucleotide
ttttcggagcatgtttctaag

SEQ ID NO: 16501 - DNA, 21 bp, Artificial Sequence
  Description of Artificial Sequence: Synthetic oligonucleotide
ttttcggagcgtcattctgag

SEQ ID NO: 16502 - DNA, 21 bp, Artificial Sequence
  Description of Artificial Sequence: Synthetic oligonucleotide
ttttctgagtcgaagacgccg

SEQ ID NO: 16503 - DNA, 21 bp, Artificial Sequence
  Description of Artificial Sequence: Synthetic oligonucleotide
ttttctgagacgagtaatatg

SEQ ID NO: 16504 - DNA, 21 bp, Artificial Sequence
  Description of Artificial Sequence: Synthetic oligonucleotide
ttttctggtgagcctctgagt

SEQ ID NO: 16505 - DNA, 21 bp, Artificial Sequence
  Description of Artificial Sequence: Synthetic oligonucleotide
ttttctggtcataatactatt

SEQ ID NO: 16506 - DNA, 21 bp, Artificial Sequence
  Description of Artificial Sequence: Synthetic oligonucleotide
ttttcgcatcctggggcggct

SEQ ID NO: 16507 - DNA, 21 bp, Artificial Sequence
  Description of Artificial Sequence: Synthetic oligonucleotide
tttagtcatccgcatcctgct

SEQ ID NO: 16508 - DNA, 21 bp, Artificial Sequence
  Description of Artificial Sequence: Synthetic oligonucleotide
ttttctcatagtcagtctacg

SEQ ID NO: 16509 - DNA, 21 bp, Artificial Sequence
  Description of Artificial Sequence: Synthetic oligonucleotide
ttttcgcattcttcgggtaag

SEQ ID NO: 16510 - DNA, 21 bp, Artificial Sequence
  Description of Artificial Sequence: Synthetic oligonucleotide
ttttctattactccgattaag

SEQ ID NO: 16511 - DNA, 21 bp, Artificial Sequence
  Description of Artificial Sequence: Synthetic oligonucleotide
tttagtcttatgcctcgggag

SEQ ID NO: 16512 - DNA, 21 bp, Artificial Sequence
  Description of Artificial Sequence: Synthetic oligonucleotide
ttttctttgactgcggataag

SEQ ID NO: 16513 - DNA, 21 bp, Artificial Sequence
  Description of Artificial Sequence: Synthetic oligonucleotide
ttttctatgactgctcaggat

SEQ ID NO: 16514 - DNA, 21 bp, Artificial Sequence
  Description of Artificial Sequence: Synthetic oligonucleotide
ttttctatgacggtgcatcat

SEQ ID NO: 16515 - DNA, 21 bp, Artificial Sequence
  Description of Artificial Sequence: Synthetic oligonucleotide
tttagtaatcagatgcctatt

SEQ ID NO: 16516 - DNA, 21 bp, Artificial Sequence
  Description of Artificial Sequence: Synthetic oligonucleotide
ttttcgaattctgggcctttt

SEQ ID NO: 16517 - DNA, 21 bp, Artificial Sequence
  Description of Artificial Sequence: Synthetic oligonucleotide
ttttctaatactacgtctctg

SEQ ID NO: 16518 - DNA, 21 bp, Artificial Sequence
  Description of Artificial Sequence: Synthetic oligonucleotide
ttttctaatactactactacg

SEQ ID NO: 16519 - DNA, 21 bp, Artificial Sequence
  Description of Artificial Sequence: Synthetic oligonucleotide
ttttctcctgggtcgttggct

SEQ ID NO: 16520 - DNA, 21 bp, Artificial Sequence
  Description of Artificial Sequence: Synthetic oligonucleotide
tttagtccgcatacgctgcct

SEQ ID NO: 16521 - DNA, 21 bp, Artificial Sequence
  Description of Artificial Sequence: Synthetic oligonucleotide
ttttctcctatggaggcttcg

SEQ ID NO: 16522 - DNA, 21 bp, Artificial Sequence
  Description of Artificial Sequence: Synthetic oligonucleotide
tttagtccgaatattatgcgg

SEQ ID NO: 16523 - DNA, 21 bp, Artificial Sequence
  Description of Artificial Sequence: Synthetic oligonucleotide
tttagtccgaggtcgattggg

SEQ ID NO: 16524 - DNA, 21 bp, Artificial Sequence
  Description of Artificial Sequence: Synthetic oligonucleotide
tttagtccgtatgcggatgag

SEQ ID NO: 16525 - DNA, 21 bp, Artificial Sequence
  Description of Artificial Sequence: Synthetic oligonucleotide
tttagtcagccgctgaggaat

SEQ ID NO: 16526 - DNA, 21 bp, Artificial Sequence
  Description of Artificial Sequence: Synthetic oligonucleotide
ttttcgcagagtcttcctact

SEQ ID NO: 16527 - DNA, 21 bp, Artificial Sequence
  Description of Artificial Sequence: Synthetic oligonucleotide
ttttctcgtggttcgggtccg

SEQ ID NO: 16528 - DNA, 21 bp, Artificial Sequence
  Description of Artificial Sequence: Synthetic oligonucleotide
ttttcgcggttgaatcctagt

SEQ ID NO: 16529 - DNA, 21 bp, Artificial Sequence
  Description of Artificial Sequence: Synthetic oligonucleotide
ttttctcggagtcatattcct

SEQ ID NO: 16530 - DNA, 21 bp, Artificial Sequence
  Description of Artificial Sequence: Synthetic oligonucleotide
ttttctcgtacgctgacttcg

SEQ ID NO: 16531 - DNA, 21 bp, Artificial Sequence
  Description of Artificial Sequence: Synthetic oligonucleotide
ttttcttcgcatgagagttct

SEQ ID NO: 16532 - DNA, 21 bp, Artificial Sequence
  Description of Artificial Sequence: Synthetic oligonucleotide
ttttctagtcatggtgagtct

SEQ ID NO: 16533 - DNA, 21 bp, Artificial Sequence
  Description of Artificial Sequence: Synthetic oligonucleotide
ttttctagtaatacggagttg

SEQ ID NO: 16534 - DNA, 21 bp, Artificial Sequence
  Description of Artificial Sequence: Synthetic oligonucleotide
ttttcgtctaatacttttgat

SEQ ID NO: 16535 - DNA, 21 bp, Artificial Sequence
  Description of Artificial Sequence: Synthetic oligonucleotide
ttttcgtcgaatacgagtgcg

SEQ ID NO: 16536 - DNA, 21 bp, Artificial Sequence
  Description of Artificial Sequence: Synthetic oligonucleotide
ttttcgtcgaatacgagtgag

SEQ ID NO: 16537 - DNA, 21 bp, Artificial Sequence
  Description of Artificial Sequence: Synthetic oligonucleotide
ttttcttctccgagtgggtat

SEQ ID NO: 16538 - DNA, 21 bp, Artificial Sequence
  Description of Artificial Sequence: Synthetic oligonucleotide
ttttcgtcgcggactcaggcg

SEQ ID NO: 16539 - DNA, 21 bp, Artificial Sequence
  Description of Artificial Sequence: Synthetic oligonucleotide
tttagtagttcgatggcggct

SEQ ID NO: 16540 - DNA, 21 bp, Artificial Sequence
  Description of Artificial Sequence: Synthetic oligonucleotide
tttagtagttcgacgcttaag

SEQ ID NO: 16541 - DNA, 21 bp, Artificial Sequence
  Description of Artificial Sequence: Synthetic oligonucleotide
ttttcgagtagtgtgacgtcg

SEQ ID NO: 16542 - DNA, 21 bp, Artificial Sequence
  Description of Artificial Sequence: Synthetic oligonucleotide
tttagttctacgaatcttgcg

SEQ ID NO: 16543 - DNA, 21 bp, Artificial Sequence
  Description of Artificial Sequence: Synthetic oligonucleotide
ttttctagtactccggggcat

SEQ ID NO: 16544 - DNA, 21 bp, Artificial Sequence
  Description of Artificial Sequence: Synthetic oligonucleotide
tttagttcgacgtctccggat

SEQ ID NO: 16545 - DNA, 21 bp, Artificial Sequence
  Description of Artificial Sequence: Synthetic oligonucleotide
ttttcttctacgagtcctatg

SEQ ID NO: 16546 - DNA, 21 bp, Artificial Sequence
  Description of Artificial Sequence: Synthetic oligonucleotide
ttttcgtcgacgtcttcggct

SEQ ID NO: 16547 - DNA, 21 bp, Artificial Sequence
  Description of Artificial Sequence: Synthetic oligonucleotide
ttttcgtcggtgattccgagt

SEQ ID NO: 16548 - DNA, 21 bp, Artificial Sequence
  Description of Artificial Sequence: Synthetic oligonucleotide
ttttcgtcggttcgtaatgag

SEQ ID NO: 16549 - DNA, 21 bp, Artificial Sequence
  Description of Artificial Sequence: Synthetic oligonucleotide
ttttcttcggttagtacgacg

SEQ ID NO: 16550 - DNA, 21 bp, Artificial Sequence
  Description of Artificial Sequence: Synthetic oligonucleotide
ttttcgtcttatgcttctatg

SEQ ID NO: 16551 - DNA, 21 bp, Artificial Sequence
  Description of Artificial Sequence: Synthetic oligonucleotide
tttagttcttataataatgcg

SEQ ID NO: 16552 - DNA, 21 bp, Artificial Sequence
  Description of Artificial Sequence: Synthetic oligonucleotide
ttttctactcttagtattcct

SEQ ID NO: 16553 - DNA, 21 bp, Artificial Sequence
  Description of Artificial Sequence: Synthetic oligonucleotide
tttagtacgatgccggcgaag

SEQ ID NO: 16554 - DNA, 21 bp, Artificial Sequence
  Description of Artificial Sequence: Synthetic oligonucleotide
ttttcgacgatgcctcgtgat

SEQ ID NO: 16555 - DNA, 21 bp, Artificial Sequence
  Description of Artificial Sequence: Synthetic oligonucleotide
ttttcgactcgtacgcagccg

SEQ ID NO: 16556 - DNA, 21 bp, Artificial Sequence
  Description of Artificial Sequence: Synthetic oligonucleotide
ttttcgactagtggtcaggag

SEQ ID NO: 16557 - DNA, 21 bp, Artificial Sequence
  Description of Artificial Sequence: Synthetic oligonucleotide
ttttctacggttcatcaggct

SEQ ID NO: 16558 - DNA, 21 bp, Artificial Sequence
  Description of Artificial Sequence: Synthetic oligonucleotide
ttttctactgttaaggctgat

SEQ ID NO: 16559 - DNA, 21 bp, Artificial Sequence
  Description of Artificial Sequence: Synthetic oligonucleotide
ttttctacgtatagtcatcat

SEQ ID NO: 16560 - DNA, 21 bp, Artificial Sequence
  Description of Artificial Sequence: Synthetic oligonucleotide
ttttcggttgcgcgtattggt

SEQ ID NO: 16561 - DNA, 21 bp, Artificial Sequence
  Description of Artificial Sequence: Synthetic oligonucleotide
ttttcggtgccttcggcgggt

SEQ ID NO: 16562 - DNA, 21 bp, Artificial Sequence
  Description of Artificial Sequence: Synthetic oligonucleotide
tttactgcgaagggtattact

SEQ ID NO: 16563 - DNA, 21 bp, Artificial Sequence
  Description of Artificial Sequence: Synthetic oligonucleotide
tttacggctcgtactacggct

SEQ ID NO: 16564 - DNA, 21 bp, Artificial Sequence
  Description of Artificial Sequence: Synthetic oligonucleotide
tttactgcgtcgggtgtttcg

SEQ ID NO: 16565 - DNA, 21 bp, Artificial Sequence
  Description of Artificial Sequence: Synthetic oligonucleotide
tttacggcgactgtggctatt

SEQ ID NO: 16566 - DNA, 21 bp, Artificial Sequence
  Description of Artificial Sequence: Synthetic oligonucleotide
tttacgtgtccggcggtgtct

SEQ ID NO: 16567 - DNA, 21 bp, Artificial Sequence
  Description of Artificial Sequence: Synthetic oligonucleotide
tttactgatattgatgatcgg

SEQ ID NO: 16568 - DNA, 21 bp, Artificial Sequence
  Description of Artificial Sequence: Synthetic oligonucleotide
tttactgatcggcagggttat

SEQ ID NO: 16569 - DNA, 21 bp, Artificial Sequence
  Description of Artificial Sequence: Synthetic oligonucleotide
tttacggattcgtcgccttat

SEQ ID NO: 16570 - DNA, 21 bp, Artificial Sequence
  Description of Artificial Sequence: Synthetic oligonucleotide
tttactgagcatgggtatagt

SEQ ID NO: 16571 - DNA, 21 bp, Artificial Sequence
  Description of Artificial Sequence: Synthetic oligonucleotide
tttacggagccttctacgtct

SEQ ID NO: 16572 - DNA, 21 bp, Artificial Sequence
  Description of Artificial Sequence: Synthetic oligonucleotide
tttactgggaagggggatgtt

SEQ ID NO: 16573 - DNA, 21 bp, Artificial Sequence
  Description of Artificial Sequence: Synthetic oligonucleotide
tttacgggtactcatagtgcg

SEQ ID NO: 16574 - DNA, 21 bp, Artificial Sequence
  Description of Artificial Sequence: Synthetic oligonucleotide
tttactcatcgtgtgcctgat

SEQ ID NO: 16575 - DNA, 21 bp, Artificial Sequence
  Description of Artificial Sequence: Synthetic oligonucleotide
tttactattaagacgattctt

SEQ ID NO: 16576 - DNA, 21 bp, Artificial Sequence
  Description of Artificial Sequence: Synthetic oligonucleotide
tttactaagatgcagctttct

SEQ ID NO: 16577 - DNA, 21 bp, Artificial Sequence
  Description of Artificial Sequence: Synthetic oligonucleotide
tttacgaagccgagtacgacg

SEQ ID NO: 16578 - DNA, 21 bp, Artificial Sequence
  Description of Artificial Sequence: Synthetic oligonucleotide
tttactaagtctaaggctgat

SEQ ID NO: 16579 - DNA, 21 bp, Artificial Sequence
  Description of Artificial Sequence: Synthetic oligonucleotide
tttactttggagtctaagctt

SEQ ID NO: 16580 - DNA, 21 bp, Artificial Sequence
  Description of Artificial Sequence: Synthetic oligonucleotide
tttactcttgttactctggag

SEQ ID NO: 16581 - DNA, 21 bp, Artificial Sequence
  Description of Artificial Sequence: Synthetic oligonucleotide
tttactatggctcctattgtg

SEQ ID NO: 16582 - DNA, 21 bp, Artificial Sequence
  Description of Artificial Sequence: Synthetic oligonucleotide
tttacgaatgatccgtcttct

SEQ ID NO: 16583 - DNA, 21 bp, Artificial Sequence
  Description of Artificial Sequence: Synthetic oligonucleotide
tttactaatcgtgatgtggct

SEQ ID NO: 16584 - DNA, 21 bp, Artificial Sequence
  Description of Artificial Sequence: Synthetic oligonucleotide
tttactaattcgagtagtccg

SEQ ID NO: 16585 - DNA, 21 bp, Artificial Sequence
  Description of Artificial Sequence: Synthetic oligonucleotide
tttactccgctgatttctcat

SEQ ID NO: 16586 - DNA, 21 bp, Artificial Sequence
  Description of Artificial Sequence: Synthetic oligonucleotide
tttactcaggcgctgtttcct

SEQ ID NO: 16587 - DNA, 21 bp, Artificial Sequence
  Description of Artificial Sequence: Synthetic oligonucleotide
tttactcagttgcctagtctt

SEQ ID NO: 16588 - DNA, 21 bp, Artificial Sequence
  Description of Artificial Sequence: Synthetic oligonucleotide
tttactcagatgtctctgtct

SEQ ID NO: 16589 - DNA, 21 bp, Artificial Sequence
  Description of Artificial Sequence: Synthetic oligonucleotide
tttacgcagaataagccgatg

SEQ ID NO: 16590 - DNA, 21 bp, Artificial Sequence
  Description of Artificial Sequence: Synthetic oligonucleotide
tttacgcagtcgttgccgact

SEQ ID NO: 16591 - DNA, 21 bp, Artificial Sequence
  Description of Artificial Sequence: Synthetic oligonucleotide
tttactaggcttgagcctcag

SEQ ID NO: 16592 - DNA, 21 bp, Artificial Sequence
  Description of Artificial Sequence: Synthetic oligonucleotide
tttacgcgtccgagtttggct

SEQ ID NO: 16593 - DNA, 21 bp, Artificial Sequence
  Description of Artificial Sequence: Synthetic oligonucleotide
tttacgcggtctgtggcggcg

SEQ ID NO: 16594 - DNA, 21 bp, Artificial Sequence
  Description of Artificial Sequence: Synthetic oligonucleotide
tttacgagtgcgccgctgctt

SEQ ID NO: 16595 - DNA, 21 bp, Artificial Sequence
  Description of Artificial Sequence: Synthetic oligonucleotide
tttacttctgctcctaatatg

SEQ ID NO: 16596 - DNA, 21 bp, Artificial Sequence
  Description of Artificial Sequence: Synthetic oligonucleotide
tttacgagtgatggtacggag

SEQ ID NO: 16597 - DNA, 21 bp, Artificial Sequence
  Description of Artificial Sequence: Synthetic oligonucleotide
tttacgtcgaaggggccgttt

SEQ ID NO: 16598 - DNA, 21 bp, Artificial Sequence
  Description of Artificial Sequence: Synthetic oligonucleotide
tttacttcgaagcatcttggg

SEQ ID NO: 16599 - DNA, 21 bp, Artificial Sequence
  Description of Artificial Sequence: Synthetic oligonucleotide
tttacgagtagggaggatgcg

SEQ ID NO: 16600 - DNA, 21 bp, Artificial Sequence
  Description of Artificial Sequence: Synthetic oligonucleotide
tttacttcgacgtttcctagt

SEQ ID NO: 16601 - DNA, 21 bp, Artificial Sequence
  Description of Artificial Sequence: Synthetic oligonucleotide
tttacgactgcgccgattctg

SEQ ID NO: 16602 - DNA, 21 bp, Artificial Sequence
  Description of Artificial Sequence: Synthetic oligonucleotide
tttacgactgatagggtgtcg

SEQ ID NO: 16603 - DNA, 21 bp, Artificial Sequence
  Description of Artificial Sequence: Synthetic oligonucleotide
tttacgacgaaggcggcgttt

SEQ ID NO: 16604 - DNA, 21 bp, Artificial Sequence
  Description of Artificial Sequence: Synthetic oligonucleotide
tttacggttaatcttcttggg

SEQ ID NO: 16605 - DNA, 21 bp, Artificial Sequence
  Description of Artificial Sequence: Synthetic oligonucleotide
tttgttgcgaatgttaggcct

SEQ ID NO: 16606 - DNA, 21 bp, Artificial Sequence
  Description of Artificial Sequence: Synthetic oligonucleotide
tttgttgctagtgcgtctcat

SEQ ID NO: 16607 - DNA, 21 bp, Artificial Sequence
  Description of Artificial Sequence: Synthetic oligonucleotide
tttgtggataataatctttct

SEQ ID NO: 16608 - DNA, 21 bp, Artificial Sequence
  Description of Artificial Sequence: Synthetic oligonucleotide
tttgtggatccgtattatgag

SEQ ID NO: 16609 - DNA, 21 bp, Artificial Sequence
  Description of Artificial Sequence: Synthetic oligonucleotide
tttgttgagcggtcgtcgagt

SEQ ID NO: 16610 - DNA, 21 bp, Artificial Sequence
  Description of Artificial Sequence: Synthetic oligonucleotide
tttgttggtgcgactatgagt

SEQ ID NO: 16611 - DNA, 21 bp, Artificial Sequence
  Description of Artificial Sequence: Synthetic oligonucleotide
tttgtggggaagccggagtct

SEQ ID NO: 16612 - DNA, 21 bp, Artificial Sequence
  Description of Artificial Sequence: Synthetic oligonucleotide
tttgttgggaattctcgtttg

SEQ ID NO: 16613 - DNA, 21 bp, Artificial Sequence
  Description of Artificial Sequence: Synthetic oligonucleotide
tttgtgcatagtgggcggcag

SEQ ID NO: 16614 - DNA, 21 bp, Artificial Sequence
  Description of Artificial Sequence: Synthetic oligonucleotide
tttgttatgcatacgcgtgat

SEQ ID NO: 16615 - DNA, 21 bp, Artificial Sequence
  Description of Artificial Sequence: Synthetic oligonucleotide
tttgttaatgcgcgggtgccg

SEQ ID NO: 16616 - DNA, 21 bp, Artificial Sequence
  Description of Artificial Sequence: Synthetic oligonucleotide
tttgttaatccgcatccttct

SEQ ID NO: 16617 - DNA, 21 bp, Artificial Sequence
  Description of Artificial Sequence: Synthetic oligonucleotide
tttgtgaatcagacgactgtg

SEQ ID NO: 16618 - DNA, 21 bp, Artificial Sequence
  Description of Artificial Sequence: Synthetic oligonucleotide
tttgtgccgcatgctaatcag

SEQ ID NO: 16619 - DNA, 21 bp, Artificial Sequence
  Description of Artificial Sequence: Synthetic oligonucleotide
tttgtgcagcagtctaagcct

SEQ ID NO: 16620 - DNA, 21 bp, Artificial Sequence
  Description of Artificial Sequence: Synthetic oligonucleotide
tttgtttcgcatagtcagtct

SEQ ID NO: 16621 - DNA, 21 bp, Artificial Sequence
  Description of Artificial Sequence: Synthetic oligonucleotide
tttgttagtcgggatcgggcg

SEQ ID NO: 16622 - DNA, 21 bp, Artificial Sequence
  Description of Artificial Sequence: Synthetic oligonucleotide
tttgtttcttcgattcatgcg

SEQ ID NO: 16623 - DNA, 21 bp, Artificial Sequence
  Description of Artificial Sequence: Synthetic oligonucleotide
tttgttagtacgccggggatg

SEQ ID NO: 16624 - DNA, 21 bp, Artificial Sequence
  Description of Artificial Sequence: Synthetic oligonucleotide
tttgtttcgactactagtcct

SEQ ID NO: 16625 - DNA, 21 bp, Artificial Sequence
  Description of Artificial Sequence: Synthetic oligonucleotide
tttgttagtactgttgctcct

SEQ ID NO: 16626 - DNA, 21 bp, Artificial Sequence
  Description of Artificial Sequence: Synthetic oligonucleotide
tttgttactgctactttgcct

SEQ ID NO: 16627 - DNA, 21 bp, Artificial Sequence
  Description of Artificial Sequence: Synthetic oligonucleotide
tttgttacggagtctatgctg

SEQ ID NO: 16628 - DNA, 21 bp, Artificial Sequence
  Description of Artificial Sequence: Synthetic oligonucleotide
tttgtggttgggtctgatggt

SEQ ID NO: 16629 - DNA, 21 bp, Artificial Sequence
  Description of Artificial Sequence: Synthetic oligonucleotide
ttttggaaggagggttcgccg

SEQ ID NO: 16630 - DNA, 21 bp, Artificial Sequence
  Description of Artificial Sequence: Synthetic oligonucleotide
ttttatccgggtccgaagatt

SEQ ID NO: 16631 - DNA, 21 bp, Artificial Sequence
  Description of Artificial Sequence: Synthetic oligonucleotide
ttttatccgtcgatgaaggat

SEQ ID NO: 16632 - DNA, 21 bp, Artificial Sequence
  Description of Artificial Sequence: Synthetic oligonucleotide
ttttatccgactgagctgaag

SEQ ID NO: 16633 - DNA, 21 bp, Artificial Sequence
  Description of Artificial Sequence: Synthetic oligonucleotide
ttttattcggctactatgcct

SEQ ID NO: 16634 - DNA, 21 bp, Artificial Sequence
  Description of Artificial Sequence: Synthetic oligonucleotide
ggggcggctgcgcagtatacg

SEQ ID NO: 16635 - DNA, 21 bp, Artificial Sequence
  Description of Artificial Sequence: Synthetic oligonucleotide
ggggcggctccgcagtctatt

SEQ ID NO: 16636 - DNA, 21 bp, Artificial Sequence
  Description of Artificial Sequence: Synthetic oligonucleotide
ggggcggctagtggtcttggt

SEQ ID NO: 16637 - DNA, 21 bp, Artificial Sequence
  Description of Artificial Sequence: Synthetic oligonucleotide
ggggctgctactcttatttcg

SEQ ID NO: 16638 - DNA, 21 bp, Artificial Sequence
  Description of Artificial Sequence: Synthetic oligonucleotide
ggtgctgcgacgcggaatccg

SEQ ID NO: 16639 - DNA, 21 bp, Artificial Sequence
  Description of Artificial Sequence: Synthetic oligonucleotide
ggtgctgatgagcctgggggt

SEQ ID NO: 16640 - DNA, 21 bp, Artificial Sequence
  Description of Artificial Sequence: Synthetic oligonucleotide
ggtgctgatctgagtgggcgg

SEQ ID NO: 16641 - DNA, 21 bp, Artificial Sequence
  Description of Artificial Sequence: Synthetic oligonucleotide
ggggcggatcgtaatgttccg

SEQ ID NO: 16642 - DNA, 21 bp, Artificial Sequence
  Description of Artificial Sequence: Synthetic oligonucleotide
ggggctgattcgagtcggtat

SEQ ID NO: 16643 - DNA, 21 bp, Artificial Sequence
  Description of Artificial Sequence: Synthetic oligonucleotide
ggggctgaggggggtggtaat

SEQ ID NO: 16644 - DNA, 21 bp, Artificial Sequence
  Description of Artificial Sequence: Synthetic oligonucleotide
ggtgctgagaagcatttgcct

SEQ ID NO: 16645 - DNA, 21 bp, Artificial Sequence
  Description of Artificial Sequence: Synthetic oligonucleotide
ggggctgagccgatgttggcg

SEQ ID NO: 16646 - DNA, 21 bp, Artificial Sequence
  Description of Artificial Sequence: Synthetic oligonucleotide
ggtgctgagtcgctgtctgtg

SEQ ID NO: 16647 - DNA, 21 bp, Artificial Sequence
  Description of Artificial Sequence: Synthetic oligonucleotide
ggggcttttgctttgagtggt

SEQ ID NO: 16648 - DNA, 21 bp, Artificial Sequence
  Description of Artificial Sequence: Synthetic oligonucleotide
ggtgcttttggtcctacgtcg

SEQ ID NO: 16649 - DNA, 21 bp, Artificial Sequence
  Description of Artificial Sequence: Synthetic oligonucleotide
ggtgcgggtgctgggtcgcgt

SEQ ID NO: 16650 - DNA, 21 bp, Artificial Sequence
  Description of Artificial Sequence: Synthetic oligonucleotide
ggtgctggtgagctgcctccg

SEQ ID NO: 16651 - DNA, 21 bp, Artificial Sequence
  Description of Artificial Sequence: Synthetic oligonucleotide
ggtgctggtcttaagggtagt

SEQ ID NO: 16652 - DNA, 21 bp, Artificial Sequence
  Description of Artificial Sequence: Synthetic oligonucleotide
ggtgcggggttgccggtgact

SEQ ID NO: 16653 - DNA, 21 bp, Artificial Sequence
  Description of Artificial Sequence: Synthetic oligonucleotide
ggggcgggtatgaatactgct

SEQ ID NO: 16654 - DNA, 21 bp, Artificial Sequence
  Description of Artificial Sequence: Synthetic oligonucleotide
ggggctggtactgctatgctt

SEQ ID NO: 16655 - DNA, 21 bp, Artificial Sequence
  Description of Artificial Sequence: Synthetic oligonucleotide
ggggcgcatgatactgtgact

SEQ ID NO: 16656 - DNA, 21 bp, Artificial Sequence
  Description of Artificial Sequence: Synthetic oligonucleotide
ggggctcatgagtgtcttagt

SEQ ID NO: 16657 - DNA, 21 bp, Artificial Sequence
  Description of Artificial Sequence: Synthetic oligonucleotide
ggggcgcatggtgcttatcag

SEQ ID NO: 16658 - DNA, 21 bp, Artificial Sequence
  Description of Artificial Sequence: Synthetic oligonucleotide
ggggctcattcttataatgtg

SEQ ID NO: 16659 - DNA, 21 bp, Artificial Sequence
  Description of Artificial Sequence: Synthetic oligonucleotide
ggtgcgcatactgggttgtct

SEQ ID NO: 16660 - DNA, 21 bp, Artificial Sequence
  Description of Artificial Sequence: Synthetic oligonucleotide
ggtgcgcatactgttcggctt

SEQ ID NO: 16661 - DNA, 21 bp, Artificial Sequence
  Description of Artificial Sequence: Synthetic oligonucleotide
ggggcgcatgtggcgccggtt

SEQ ID NO: 16662 - DNA, 21 bp, Artificial Sequence
  Description of Artificial Sequence: Synthetic oligonucleotide
ggggctttggctactgctacg

SEQ ID NO: 16663 - DNA, 21 bp, Artificial Sequence
  Description of Artificial Sequence: Synthetic oligonucleotide
ggggctttggatggtactgct

SEQ ID NO: 16664 - DNA, 21 bp, Artificial Sequence
  Description of Artificial Sequence: Synthetic oligonucleotide
ggtgctcttgggtttcctcag

SEQ ID NO: 16665 - DNA, 21 bp, Artificial Sequence
  Description of Artificial Sequence: Synthetic oligonucleotide
ggtgcgctgggggtggctcat

SEQ ID NO: 16666 - DNA, 21 bp, Artificial Sequence
  Description of Artificial Sequence: Synthetic oligonucleotide
ggtgcgctgatgcagaagaat

SEQ ID NO: 16667 - DNA, 21 bp, Artificial Sequence
  Description of Artificial Sequence: Synthetic oligonucleotide
ggtgcgctgatggtgtcgcgg

SEQ ID NO: 16668 - DNA, 21 bp, Artificial Sequence
  Description of Artificial Sequence: Synthetic oligonucleotide
ggggcgcttagtgctaatcag

SEQ ID NO: 16669 - DNA, 21 bp, Artificial Sequence
  Description of Artificial Sequence: Synthetic oligonucleotide
ggggctcttgttattacgtct

SEQ ID NO: 16670 - DNA, 21 bp, Artificial Sequence
  Description of Artificial Sequence: Synthetic oligonucleotide
ggtgcgatgtctattaatgcg

SEQ ID NO: 16671 - DNA, 21 bp, Artificial Sequence
  Description of Artificial Sequence: Synthetic oligonucleotide
ggggctaatggtgcgctgagg

SEQ ID NO: 16672 - DNA, 21 bp, Artificial Sequence
  Description of Artificial Sequence: Synthetic oligonucleotide
ggtgctaatattcgtattgct

SEQ ID NO: 16673 - DNA, 21 bp, Artificial Sequence
  Description of Artificial Sequence: Synthetic oligonucleotide
ggtgcgaatcggttggataat

SEQ ID NO: 16674 - DNA, 21 bp, Artificial Sequence
  Description of Artificial Sequence: Synthetic oligonucleotide
ggtgctcctcctctgccgcgt

SEQ ID NO: 16675 - DNA, 21 bp, Artificial Sequence
  Description of Artificial Sequence: Synthetic oligonucleotide
ggggcgcagttgacgcgtatg

SEQ ID NO: 16676 - DNA, 21 bp, Artificial Sequence
  Description of Artificial Sequence: Synthetic oligonucleotide
ggtgcgcagcgtcagcttaat

SEQ ID NO: 16677 - DNA, 21 bp, Artificial Sequence
  Description of Artificial Sequence: Synthetic oligonucleotide
ggggctcgggcgcttggtctt

SEQ ID NO: 16678 - DNA, 21 bp, Artificial Sequence
  Description of Artificial Sequence: Synthetic oligonucleotide
ggtgctcgtgcgaatggtggt

SEQ ID NO: 16679 - DNA, 21 bp, Artificial Sequence
  Description of Artificial Sequence: Synthetic oligonucleotide
ggggcgagggagattccgagt

SEQ ID NO: 16680 - DNA, 21 bp, Artificial Sequence
  Description of Artificial Sequence: Synthetic oligonucleotide
ggtgctcgtcctgatctgggt

SEQ ID NO: 16681 - DNA, 21 bp, Artificial Sequence
  Description of Artificial Sequence: Synthetic oligonucleotide
ggtgctcgggttcttggttct

SEQ ID NO: 16682 - DNA, 21 bp, Artificial Sequence
  Description of Artificial Sequence: Synthetic oligonucleotide
ggggcgtcggatactgattgg

SEQ ID NO: 16683 - DNA, 21 bp, Artificial Sequence
  Description of Artificial Sequence: Synthetic oligonucleotide
ggtgcttctgggactagtact

SEQ ID NO: 16684 - DNA, 21 bp, Artificial Sequence
  Description of Artificial Sequence: Synthetic oligonucleotide
ggggctagtattaagtcttct

SEQ ID NO: 16685 - DNA, 21 bp, Artificial Sequence
  Description of Artificial Sequence: Synthetic oligonucleotide
ggtgctagtaagaatcctacg

SEQ ID NO: 16686 - DNA, 21 bp, Artificial Sequence
  Description of Artificial Sequence: Synthetic oligonucleotide
ggtgcttctttggctgatgat

SEQ ID NO: 16687 - DNA, 21 bp, Artificial Sequence
  Description of Artificial Sequence: Synthetic oligonucleotide
ggtgcgtcgttgaagccggtg

SEQ ID NO: 16688 - DNA, 21 bp, Artificial Sequence
  Description of Artificial Sequence: Synthetic oligonucleotide
ggtgcgtcgagtgctagtggt

SEQ ID NO: 16689 - DNA, 21 bp, Artificial Sequence
  Description of Artificial Sequence: Synthetic oligonucleotide
ggtgcgtcgagtttgaagccg

SEQ ID NO: 16690 - DNA, 21 bp, Artificial Sequence
  Description of Artificial Sequence: Synthetic oligonucleotide
ggggcttctagtcgtcctgtt

SEQ ID NO: 16691 - DNA, 21 bp, Artificial Sequence
  Description of Artificial Sequence: Synthetic oligonucleotide
ggggctagtacgcgtaatatt

SEQ ID NO: 16692 - DNA, 21 bp, Artificial Sequence
  Description of Artificial Sequence: Synthetic oligonucleotide
ggtgcttcggtgaatcctacg

SEQ ID NO: 16693 - DNA, 21 bp, Artificial Sequence
  Description of Artificial Sequence: Synthetic oligonucleotide
ggtgctactccgaagactttg

SEQ ID NO: 16694 - DNA, 21 bp, Artificial Sequence
  Description of Artificial Sequence: Synthetic oligonucleotide
ggggctacgccgccttcgacg

SEQ ID NO: 16695 - DNA, 21 bp, Artificial Sequence
  Description of Artificial Sequence: Synthetic oligonucleotide
ggggctacgcagtttagggag

SEQ ID NO: 16696 - DNA, 21 bp, Artificial Sequence
  Description of Artificial Sequence: Synthetic oligonucleotide
ggggcgactagtcagattatg

SEQ ID NO: 16697 - DNA, 21 bp, Artificial Sequence
  Description of Artificial Sequence: Synthetic oligonucleotide
ggggctgttaggccgctgatg

SEQ ID NO: 16698 - DNA, 21 bp, Artificial Sequence
  Description of Artificial Sequence: Synthetic oligonucleotide
ggggcttggaaggctgagact

SEQ ID NO: 16699 - DNA, 21 bp, Artificial Sequence
  Description of Artificial Sequence: Synthetic oligonucleotide
ggggcttggctgccgaatgct

SEQ ID NO: 16700 - DNA, 21 bp, Artificial Sequence
  Description of Artificial Sequence: Synthetic oligonucleotide
ggtgcttggtctttgccggat

SEQ ID NO: 16701 - DNA, 21 bp, Artificial Sequence
  Description of Artificial Sequence: Synthetic oligonucleotide
ggggcttatgcgagggctacg

SEQ ID NO: 16702 - DNA, 21 bp, Artificial Sequence
  Description of Artificial Sequence: Synthetic oligonucleotide
ggggcgtatgcttataatggg

SEQ ID NO: 16703 - DNA, 21 bp, Artificial Sequence
  Description of Artificial Sequence: Synthetic oligonucleotide
ggtgcgtatggtatgtctgag

SEQ ID NO: 16704 - DNA, 21 bp, Artificial Sequence
  Description of Artificial Sequence: Synthetic oligonucleotide
ggtgcttatcggccggatctg

SEQ ID NO: 16705 - DNA, 21 bp, Artificial Sequence
  Description of Artificial Sequence: Synthetic oligonucleotide
ggttgttcggggcagcagtcg

SEQ ID NO: 16706 - DNA, 21 bp, Artificial Sequence
  Description of Artificial Sequence: Synthetic oligonucleotide
ggttgttcgtctcttccggag

SEQ ID NO: 16707 - DNA, 21 bp, Artificial Sequence
  Description of Artificial Sequence: Synthetic oligonucleotide
gggtgtacggggtatcaggcg

SEQ ID NO: 16708 - DNA, 21 bp, Artificial Sequence
  Description of Artificial Sequence: Synthetic oligonucleotide
gggtgtgttggtccttttagt

SEQ ID NO: 16709 - DNA, 21 bp, Artificial Sequence
  Description of Artificial Sequence: Synthetic oligonucleotide
ggtgatgcggcgtataagaat

SEQ ID NO: 16710 - DNA, 21 bp, Artificial Sequence
  Description of Artificial Sequence: Synthetic oligonucleotide
ggtgatgcgtttgtggtgggt

SEQ ID NO: 16711 - DNA, 21 bp, Artificial Sequence
  Description of Artificial Sequence: Synthetic oligonucleotide
ggggatgctactgatcggatg

SEQ ID NO: 16712 - DNA, 21 bp, Artificial Sequence
  Description of Artificial Sequence: Synthetic oligonucleotide
ggtgattttggtatgaagttg

SEQ ID NO: 16713 - DNA, 21 bp, Artificial Sequence
  Description of Artificial Sequence: Synthetic oligonucleotide
ggtgatggtacgcggggtgcg

SEQ ID NO: 16714 - DNA, 21 bp, Artificial Sequence
  Description of Artificial Sequence: Synthetic oligonucleotide
ggtgatggtgtttatccggct

SEQ ID NO: 16715 - DNA, 21 bp, Artificial Sequence
  Description of Artificial Sequence: Synthetic oligonucleotide
ggtgatcataagagtggtgcg

SEQ ID NO: 16716 - DNA, 21 bp, Artificial Sequence
  Description of Artificial Sequence: Synthetic oligonucleotide
ggggataaggttaggacgctt

SEQ ID NO: 16717 - DNA, 21 bp, Artificial Sequence
  Description of Artificial Sequence: Synthetic oligonucleotide
ggtgatcttcatattccggtg

SEQ ID NO: 16718 - DNA, 21 bp, Artificial Sequence
  Description of Artificial Sequence: Synthetic oligonucleotide
ggggatttgaatccggtgccg

SEQ ID NO: 16719 - DNA, 21 bp, Artificial Sequence
  Description of Artificial Sequence: Synthetic oligonucleotide
ggtgatctttattataaggcg

SEQ ID NO: 16720 - DNA, 21 bp, Artificial Sequence
  Description of Artificial Sequence: Synthetic oligonucleotide
ggtgatatgcttaatgtgatt

SEQ ID NO: 16721 - DNA, 21 bp, Artificial Sequence
  Description of Artificial Sequence: Synthetic oligonucleotide
ggggatccgaatcctgctgag

SEQ ID NO: 16722 - DNA, 21 bp, Artificial Sequence
  Description of Artificial Sequence: Synthetic oligonucleotide
ggtgatcctgttcatcagtcg

SEQ ID NO: 16723 - DNA, 21 bp, Artificial Sequence
  Description of Artificial Sequence: Synthetic oligonucleotide
ggtgatcgtgatggttcttgg

SEQ ID NO: 16724 - DNA, 21 bp, Artificial Sequence
  Description of Artificial Sequence: Synthetic oligonucleotide
ggtgataggatgccgaggtcg

SEQ ID NO: 16725 - DNA, 21 bp, Artificial Sequence
  Description of Artificial Sequence: Synthetic oligonucleotide
ggggataggagtacttcgcat

SEQ ID NO: 16726 - DNA, 21 bp, Artificial Sequence
  Description of Artificial Sequence: Synthetic oligonucleotide
ggggatcgtacgtcgctgcgt

SEQ ID NO: 16727 - DNA, 21 bp, Artificial Sequence
  Description of Artificial Sequence: Synthetic oligonucleotide
ggtgatcgggttgttggtgtg

SEQ ID NO: 16728 - DNA, 21 bp, Artificial Sequence
  Description of Artificial Sequence: Synthetic oligonucleotide
ggggattcttttccgatgagt

SEQ ID NO: 16729 - DNA, 21 bp, Artificial Sequence
  Description of Artificial Sequence: Synthetic oligonucleotide
ggtgattctcagctgtattat

SEQ ID NO: 16730 - DNA, 21 bp, Artificial Sequence
  Description of Artificial Sequence: Synthetic oligonucleotide
ggtgattcgtcgcttcatagt

SEQ ID NO: 16731 - DNA, 21 bp, Artificial Sequence
  Description of Artificial Sequence: Synthetic oligonucleotide
ggtgatacgcatctgattggt

SEQ ID NO: 16732 - DNA, 21 bp, Artificial Sequence
  Description of Artificial Sequence: Synthetic oligonucleotide
ggtgatacgctgaaggctcct

SEQ ID NO: 16733 - DNA, 21 bp, Artificial Sequence
  Description of Artificial Sequence: Synthetic oligonucleotide
ggggatactcgtcctagtttg

SEQ ID NO: 16734 - DNA, 21 bp, Artificial Sequence
  Description of Artificial Sequence: Synthetic oligonucleotide
ggggatgtgattacgactcat

SEQ ID NO: 16735 - DNA, 21 bp, Artificial Sequence
  Description of Artificial Sequence: Synthetic oligonucleotide
ggtgatgtgtcggtttatgat

SEQ ID NO: 16736 - DNA, 21 bp, Artificial Sequence
  Description of Artificial Sequence: Synthetic oligonucleotide
ggtgaggatgcttttttgcgt

SEQ ID NO: 16737 - DNA, 21 bp, Artificial Sequence
  Description of Artificial Sequence: Synthetic oligonucleotide
ggtgaggatggtttttcttat

SEQ ID NO: 16738 - DNA, 21 bp, Artificial Sequence
  Description of Artificial Sequence: Synthetic oligonucleotide
ggggaggatcattcgccgcat

SEQ ID NO: 16739 - DNA, 21 bp, Artificial Sequence
  Description of Artificial Sequence: Synthetic oligonucleotide
ggggaggggtcttatcctcgg

SEQ ID NO: 16740 - DNA, 21 bp, Artificial Sequence
  Description of Artificial Sequence: Synthetic oligonucleotide
ggtgagggtacttatcaggcg

SEQ ID NO: 16741 - DNA, 21 bp, Artificial Sequence
  Description of Artificial Sequence: Synthetic oligonucleotide
ggtgagcataaggcgaattct

SEQ ID NO: 16742 - DNA, 21 bp, Artificial Sequence
  Description of Artificial Sequence: Synthetic oligonucleotide
ggggagaagcttcgtgcgtat

SEQ ID NO: 16743 - DNA, 21 bp, Artificial Sequence
  Description of Artificial Sequence: Synthetic oligonucleotide
ggggagaagtctattccgcct

SEQ ID NO: 16744 - DNA, 21 bp, Artificial Sequence
  Description of Artificial Sequence: Synthetic oligonucleotide
ggtgagaagagtctggttgtt

SEQ ID NO: 16745 - DNA, 21 bp, Artificial Sequence
  Description of Artificial Sequence: Synthetic oligonucleotide
ggtgagctgtttctgtcgtcg

SEQ ID NO: 16746 - DNA, 21 bp, Artificial Sequence
  Description of Artificial Sequence: Synthetic oligonucleotide
ggtgagaatccgctgccggtt

SEQ ID NO: 16747 - DNA, 21 bp, Artificial Sequence
  Description of Artificial Sequence: Synthetic oligonucleotide
ggggagccgtttatgcgggcg

SEQ ID NO: 16748 - DNA, 21 bp, Artificial Sequence
  Description of Artificial Sequence: Synthetic oligonucleotide
ggggagcctaagcatcattct

SEQ ID NO: 16749 - DNA, 21 bp, Artificial Sequence
  Description of Artificial Sequence: Synthetic oligonucleotide
ggggagcctgtggatacttgg

SEQ ID NO: 16750 - DNA, 21 bp, Artificial Sequence
  Description of Artificial Sequence: Synthetic oligonucleotide
ggtgagccggtgctgggggcg

SEQ ID NO: 16751 - DNA, 21 bp, Artificial Sequence
  Description of Artificial Sequence: Synthetic oligonucleotide
ggggagcgttttcgtgagtgg

SEQ ID NO: 16752 - DNA, 21 bp, Artificial Sequence
  Description of Artificial Sequence: Synthetic oligonucleotide
ggtgagcggatgaagattgat

SEQ ID NO: 16753 - DNA, 21 bp, Artificial Sequence
  Description of Artificial Sequence: Synthetic oligonucleotide
ggggagaggtcgttgaatatg

SEQ ID NO: 16754 - DNA, 21 bp, Artificial Sequence
  Description of Artificial Sequence: Synthetic oligonucleotide
ggggagcggtcgcctcctgag

SEQ ID NO: 16755 - DNA, 21 bp, Artificial Sequence
  Description of Artificial Sequence: Synthetic oligonucleotide
ggggagtcgcctgcgaatctg

SEQ ID NO: 16756 - DNA, 21 bp, Artificial Sequence
  Description of Artificial Sequence: Synthetic oligonucleotide
ggggagacgcctgctcatgct

SEQ ID NO: 16757 - DNA, 21 bp, Artificial Sequence
  Description of Artificial Sequence: Synthetic oligonucleotide
ggggagactaggcatgtgggg

SEQ ID NO: 16758 - DNA, 21 bp, Artificial Sequence
  Description of Artificial Sequence: Synthetic oligonucleotide
ggtgagactagtgcgatgcag

SEQ ID NO: 16759 - DNA, 21 bp, Artificial Sequence
  Description of Artificial Sequence: Synthetic oligonucleotide
ggggagacgacgaagatgcgt

SEQ ID NO: 16760 - DNA, 21 bp, Artificial Sequence
  Description of Artificial Sequence: Synthetic oligonucleotide
ggtgaggttgcgatgctgtat

SEQ ID NO: 16761 - DNA, 21 bp, Artificial Sequence
  Description of Artificial Sequence: Synthetic oligonucleotide
ggtgaggtgacgattatgtct

SEQ ID NO: 16762 - DNA, 21 bp, Artificial Sequence
  Description of Artificial Sequence: Synthetic oligonucleotide
ggtgaggttgttaatacgatg

SEQ ID NO: 16763 - DNA, 21 bp, Artificial Sequence
  Description of Artificial Sequence: Synthetic oligonucleotide
ggttttgatgctggtaagtcg

SEQ ID NO: 16764 - DNA, 21 bp, Artificial Sequence
  Description of Artificial Sequence: Synthetic oligonucleotide
gggtttgatattgcgagtggg

SEQ ID NO: 16765 - DNA, 21 bp, Artificial Sequence
  Description of Artificial Sequence: Synthetic oligonucleotide
gggtttgatgtgaagatgagt

SEQ ID NO: 16766 - DNA, 21 bp, Artificial Sequence
  Description of Artificial Sequence: Synthetic oligonucleotide
gggtttgaggtgcagttgatt

SEQ ID NO: 16767 - DNA, 21 bp, Artificial Sequence
  Description of Artificial Sequence: Synthetic oligonucleotide
ggtttttttgcgcaggtgccg

SEQ ID NO: 16768 - DNA, 21 bp, Artificial Sequence
  Description of Artificial Sequence: Synthetic oligonucleotide
gggtttcataatgcggcgcct

SEQ ID NO: 16769 - DNA, 21 bp, Artificial Sequence
  Description of Artificial Sequence: Synthetic oligonucleotide
ggttttattagtccttctgct

SEQ ID NO: 16770 - DNA, 21 bp, Artificial Sequence
  Description of Artificial Sequence: Synthetic oligonucleotide
gggtttaagaatgctcttccg

SEQ ID NO: 16771 - DNA, 21 bp, Artificial Sequence
  Description of Artificial Sequence: Synthetic oligonucleotide
gggtttaatgcgttgactggt

SEQ ID NO: 16772 - DNA, 21 bp, Artificial Sequence
  Description of Artificial Sequence: Synthetic oligonucleotide
gggtttaatcctagtttggtt

SEQ ID NO: 16773 - DNA, 21 bp, Artificial Sequence
  Description of Artificial Sequence: Synthetic oligonucleotide
gggtttaatgtggctagtggg

SEQ ID NO: 16774 - DNA, 21 bp, Artificial Sequence
  Description of Artificial Sequence: Synthetic oligonucleotide
ggttttaatgtgggtgggcct

SEQ ID NO: 16775 - DNA, 21 bp, Artificial Sequence
  Description of Artificial Sequence: Synthetic oligonucleotide
gggtttcctggtcctcagttt

SEQ ID NO: 16776 - DNA, 21 bp, Artificial Sequence
  Description of Artificial Sequence: Synthetic oligonucleotide
ggttttagtgggactccgtat

SEQ ID NO: 16777 - DNA, 21 bp, Artificial Sequence
  Description of Artificial Sequence: Synthetic oligonucleotide
gggttttcgcatatttcgttg

SEQ ID NO: 16778 - DNA, 21 bp, Artificial Sequence
  Description of Artificial Sequence: Synthetic oligonucleotide
ggtttttctattcgttcgacg

SEQ ID NO: 16779 - DNA, 21 bp, Artificial Sequence
  Description of Artificial Sequence: Synthetic oligonucleotide
ggtttttcttcgcttagtagt

SEQ ID NO: 16780 - DNA, 21 bp, Artificial Sequence
  Description of Artificial Sequence: Synthetic oligonucleotide
ggttttactcagtcgcagatg

SEQ ID NO: 16781 - DNA, 21 bp, Artificial Sequence
  Description of Artificial Sequence: Synthetic oligonucleotide
gggggtgcggctcgggagctg

SEQ ID NO: 16782 - DNA, 21 bp, Artificial Sequence
  Description of Artificial Sequence: Synthetic oligonucleotide
gggggtgcggctacttcggtg

SEQ ID NO: 16783 - DNA, 21 bp, Artificial Sequence
  Description of Artificial Sequence: Synthetic oligonucleotide
gggggtgctggtgctcgtact

SEQ ID NO: 16784 - DNA, 21 bp, Artificial Sequence
  Description of Artificial Sequence: Synthetic oligonucleotide
ggtggtgctcggtctagtatg

SEQ ID NO: 16785 - DNA, 21 bp, Artificial Sequence
  Description of Artificial Sequence: Synthetic oligonucleotide
ggtggggctgttcatacggtt

SEQ ID NO: 16786 - DNA, 21 bp, Artificial Sequence
  Description of Artificial Sequence: Synthetic oligonucleotide
gggggtgatagtggtgcggag

SEQ ID NO: 16787 - DNA, 21 bp, Artificial Sequence
  Description of Artificial Sequence: Synthetic oligonucleotide
ggtggggagaatgtgtatatt

SEQ ID NO: 16788 - DNA, 21 bp, Artificial Sequence
  Description of Artificial Sequence: Synthetic oligonucleotide
gggggttttgctcatcagtct

SEQ ID NO: 16789 - DNA, 21 bp, Artificial Sequence
  Description of Artificial Sequence: Synthetic oligonucleotide
ggtgggtttaatggggcgaat

SEQ ID NO: 16790 - DNA, 21 bp, Artificial Sequence
  Description of Artificial Sequence: Synthetic oligonucleotide
ggtggtgggcttactatgacg

SEQ ID NO: 16791 - DNA, 21 bp, Artificial Sequence
  Description of Artificial Sequence: Synthetic oligonucleotide
gggggtggtcctgctttgcct

SEQ ID NO: 16792 - DNA, 21 bp, Artificial Sequence
  Description of Artificial Sequence: Synthetic oligonucleotide
ggtggtggtgtgaataagccg

SEQ ID NO: 16793 - DNA, 21 bp, Artificial Sequence
  Description of Artificial Sequence: Synthetic oligonucleotide
ggtgggcatatgagggatggt

SEQ ID NO: 16794 - DNA, 21 bp, Artificial Sequence
  Description of Artificial Sequence: Synthetic oligonucleotide
gggggtattgagagtgctgtg

SEQ ID NO: 16795 - DNA, 21 bp, Artificial Sequence
  Description of Artificial Sequence: Synthetic oligonucleotide
ggtgggattcagtcgacgggt

SEQ ID NO: 16796 - DNA, 21 bp, Artificial Sequence
  Description of Artificial Sequence: Synthetic oligonucleotide
ggtggtaaggatcggcctgag

SEQ ID NO: 16797 - DNA, 21 bp, Artificial Sequence
  Description of Artificial Sequence: Synthetic oligonucleotide
ggtgggaagcagcctcaggct

SEQ ID NO: 16798 - DNA, 21 bp, Artificial Sequence
  Description of Artificial Sequence: Synthetic oligonucleotide
ggtgggaaggttgctacgggg

SEQ ID NO: 16799 - DNA, 21 bp, Artificial Sequence
  Description of Artificial Sequence: Synthetic oligonucleotide
gggggtctgaatcggaatccg

SEQ ID NO: 16800 - DNA, 21 bp, Artificial Sequence
  Description of Artificial Sequence: Synthetic oligonucleotide
ggggggttgccgagtcctgcg

SEQ ID NO: 16801 - DNA, 21 bp, Artificial Sequence
  Description of Artificial Sequence: Synthetic oligonucleotide
ggtggtctttctaagtctttg

SEQ ID NO: 16802 - DNA, 21 bp, Artificial Sequence
  Description of Artificial Sequence: Synthetic oligonucleotide
ggtggtatggcgcctgggcct

SEQ ID NO: 16803 - DNA, 21 bp, Artificial Sequence
  Description of Artificial Sequence: Synthetic oligonucleotide
ggtgggcctgcttatgtgggg

SEQ ID NO: 16804 - DNA, 21 bp, Artificial Sequence
  Description of Artificial Sequence: Synthetic oligonucleotide
ggtggtccgggtaataatccg

SEQ ID NO: 16805 - DNA, 21 bp, Artificial Sequence
  Description of Artificial Sequence: Synthetic oligonucleotide
ggtgggccgttgcctaagtct

SEQ ID NO: 16806 - DNA, 21 bp, Artificial Sequence
  Description of Artificial Sequence: Synthetic oligonucleotide
gggggtccgcttactggtccg

SEQ ID NO: 16807 - DNA, 21 bp, Artificial Sequence
  Description of Artificial Sequence: Synthetic oligonucleotide
ggtggtccgagggttgctcct

SEQ ID NO: 16808 - DNA, 21 bp, Artificial Sequence
  Description of Artificial Sequence: Synthetic oligonucleotide
ggtggtccgtatggtccggcg

SEQ ID NO: 16809 - DNA, 21 bp, Artificial Sequence
  Description of Artificial Sequence: Synthetic oligonucleotide
ggtgggcaggctggtaagacg

SEQ ID NO: 16810 - DNA, 21 bp, Artificial Sequence
  Description of Artificial Sequence: Synthetic oligonucleotide
gggggtcagcatctggcgccg

SEQ ID NO: 16811 - DNA, 21 bp, Artificial Sequence
  Description of Artificial Sequence: Synthetic oligonucleotide
ggggggcagtcgtgtagggag

SEQ ID NO: 16812 - DNA, 21 bp, Artificial Sequence
  Description of Artificial Sequence: Synthetic oligonucleotide
ggtggtcgtttggcggttgag

SEQ ID NO: 16813 - DNA, 21 bp, Artificial Sequence
  Description of Artificial Sequence: Synthetic oligonucleotide
ggggggcggttgcagcagggt

SEQ ID NO: 16814 - DNA, 21 bp, Artificial Sequence
  Description of Artificial Sequence: Synthetic oligonucleotide
ggtggtcggccggatcctgag

SEQ ID NO: 16815 - DNA, 21 bp, Artificial Sequence
  Description of Artificial Sequence: Synthetic oligonucleotide
ggtggtaggcctacgattact

SEQ ID NO: 16816 - DNA, 21 bp, Artificial Sequence
  Description of Artificial Sequence: Synthetic oligonucleotide
ggtggtcgggtggtgtattcg

SEQ ID NO: 16817 - DNA, 21 bp, Artificial Sequence
  Description of Artificial Sequence: Synthetic oligonucleotide
ggtggtcgttatagtgagctg

SEQ ID NO: 16818 - DNA, 21 bp, Artificial Sequence
  Description of Artificial Sequence: Synthetic oligonucleotide
ggtggttcggggttggcgggg

SEQ ID NO: 16819 - DNA, 21 bp, Artificial Sequence
  Description of Artificial Sequence: Synthetic oligonucleotide
gggggttcgatggattcgctt

SEQ ID NO: 16820 - DNA, 21 bp, Artificial Sequence
  Description of Artificial Sequence: Synthetic oligonucleotide
ggtggttcggtgaggactctg

SEQ ID NO: 16821 - DNA, 21 bp, Artificial Sequence
  Description of Artificial Sequence: Synthetic oligonucleotide
ggtgggacgagtcggagtccg

SEQ ID NO: 16822 - DNA, 21 bp, Artificial Sequence
  Description of Artificial Sequence: Synthetic oligonucleotide
ggtgggactacgaatctgttt

SEQ ID NO: 16823 - DNA, 21 bp, Artificial Sequence
  Description of Artificial Sequence: Synthetic oligonucleotide
gggggtgttgcgtatattgcg

SEQ ID NO: 16824 - DNA, 21 bp, Artificial Sequence
  Description of Artificial Sequence: Synthetic oligonucleotide
gggggggttggtaagcctgcg

SEQ ID NO: 16825 - DNA, 21 bp, Artificial Sequence
  Description of Artificial Sequence: Synthetic oligonucleotide
ggtggtgttaatgctatgagg

SEQ ID NO: 16826 - DNA, 21 bp, Artificial Sequence
  Description of Artificial Sequence: Synthetic oligonucleotide
gggggttggagttctgcgccg

SEQ ID NO: 16827 - DNA, 21 bp, Artificial Sequence
  Description of Artificial Sequence: Synthetic oligonucleotide
gggggttatgagtctaataat

SEQ ID NO: 16828 - DNA, 21 bp, Artificial Sequence
  Description of Artificial Sequence: Synthetic oligonucleotide
ggtggttattcgatgggtcat

SEQ ID NO: 16829 - DNA, 21 bp, Artificial Sequence
  Description of Artificial Sequence: Synthetic oligonucleotide
gggcatgctattcagctgctg

SEQ ID NO: 16830 - DNA, 21 bp, Artificial Sequence
  Description of Artificial Sequence: Synthetic oligonucleotide
ggtcatgcgaagcataatgtg

SEQ ID NO: 16831 - DNA, 21 bp, Artificial Sequence
  Description of Artificial Sequence: Synthetic oligonucleotide
ggtcatgctccgcatatgatt

SEQ ID NO: 16832 - DNA, 21 bp, Artificial Sequence
  Description of Artificial Sequence: Synthetic oligonucleotide
gggcattgtacgagtaagaat

SEQ ID NO: 16833 - DNA, 21 bp, Artificial Sequence
  Description of Artificial Sequence: Synthetic oligonucleotide
ggtcatgatcttaagccggtg

SEQ ID NO: 16834 - DNA, 21 bp, Artificial Sequence
  Description of Artificial Sequence: Synthetic oligonucleotide
ggtcatgagactcgtcaggag

SEQ ID NO: 16835 - DNA, 21 bp, Artificial Sequence
  Description of Artificial Sequence: Synthetic oligonucleotide
gggcatgggcttcctaggctg

SEQ ID NO: 16836 - DNA, 21 bp, Artificial Sequence
  Description of Artificial Sequence: Synthetic oligonucleotide
gggcatgggccttttgttggg

SEQ ID NO: 16837 - DNA, 21 bp, Artificial Sequence
  Description of Artificial Sequence: Synthetic oligonucleotide
gggcatggtcagaatcctggg

SEQ ID NO: 16838 - DNA, 21 bp, Artificial Sequence
  Description of Artificial Sequence: Synthetic oligonucleotide
ggtcatcatcagccggatcag

SEQ ID NO: 16839 - DNA, 21 bp, Artificial Sequence
  Description of Artificial Sequence: Synthetic oligonucleotide
ggtcataaggctaggcctgat

SEQ ID NO: 16840 - DNA, 21 bp, Artificial Sequence
  Description of Artificial Sequence: Synthetic oligonucleotide
ggtcataaggatgagtctctg

SEQ ID NO: 16841 - DNA, 21 bp, Artificial Sequence
  Description of Artificial Sequence: Synthetic oligonucleotide
gggcatttggctctgcattct

SEQ ID NO: 16842 - DNA, 21 bp, Artificial Sequence
  Description of Artificial Sequence: Synthetic oligonucleotide
ggtcatttgcaggtgaatact

SEQ ID NO: 16843 - DNA, 21 bp, Artificial Sequence
  Description of Artificial Sequence: Synthetic oligonucleotide
gggcatctttcgcctagtatg

SEQ ID NO: 16844 - DNA, 21 bp, Artificial Sequence
  Description of Artificial Sequence: Synthetic oligonucleotide
ggtcatatggctcctgtgcat

SEQ ID NO: 16845 - DNA, 21 bp, Artificial Sequence
  Description of Artificial Sequence: Synthetic oligonucleotide
gggcatatgtctaagacggcg

SEQ ID NO: 16846 - DNA, 21 bp, Artificial Sequence
  Description of Artificial Sequence: Synthetic oligonucleotide
gggcatcaggggtctgatcat

SEQ ID NO: 16847 - DNA, 21 bp, Artificial Sequence
  Description of Artificial Sequence: Synthetic oligonucleotide
gggcatcagggggttcttctg

SEQ ID NO: 16848 - DNA, 21 bp, Artificial Sequence
  Description of Artificial Sequence: Synthetic oligonucleotide
gggcatcagacgtatccttct

SEQ ID NO: 16849 - DNA, 21 bp, Artificial Sequence
  Description of Artificial Sequence: Synthetic oligonucleotide
gggcatcgttcggatcagtct

SEQ ID NO: 16850 - DNA, 21 bp, Artificial Sequence
  Description of Artificial Sequence: Synthetic oligonucleotide
ggtcattcggctggggcgtct

SEQ ID NO: 16851 - DNA, 21 bp, Artificial Sequence
  Description of Artificial Sequence: Synthetic oligonucleotide
ggtcattcgggggatcgggct

SEQ ID NO: 16852 - DNA, 21 bp, Artificial Sequence
  Description of Artificial Sequence: Synthetic oligonucleotide
ggtcattctcataatgcgtat

SEQ ID NO: 16853 - DNA, 21 bp, Artificial Sequence
  Description of Artificial Sequence: Synthetic oligonucleotide
ggtcatagttctgcttctaat

SEQ ID NO: 16854 - DNA, 21 bp, Artificial Sequence
  Description of Artificial Sequence: Synthetic oligonucleotide
gggcattcggttactcatccg

SEQ ID NO: 16855 - DNA, 21 bp, Artificial Sequence
  Description of Artificial Sequence: Synthetic oligonucleotide
ggtcattctgttgtgaagtcg

SEQ ID NO: 16856 - DNA, 21 bp, Artificial Sequence
  Description of Artificial Sequence: Synthetic oligonucleotide
ggtcattcgtatccgcaggcg

SEQ ID NO: 16857 - DNA, 21 bp, Artificial Sequence
  Description of Artificial Sequence: Synthetic oligonucleotide
ggtcatactctgaagcctcct

SEQ ID NO: 16858 - DNA, 21 bp, Artificial Sequence
  Description of Artificial Sequence: Synthetic oligonucleotide
ggtcatgttgagcctcggtat

SEQ ID NO: 16859 - DNA, 21 bp, Artificial Sequence
  Description of Artificial Sequence: Synthetic oligonucleotide
ggtcatgtgggtagtcgtgtt

SEQ ID NO: 16860 - DNA, 21 bp, Artificial Sequence
  Description of Artificial Sequence: Synthetic oligonucleotide
ggtcatgttcttgttactccg

SEQ ID NO: 16861 - DNA, 21 bp, Artificial Sequence
  Description of Artificial Sequence: Synthetic oligonucleotide
gggcatgtttctgttaatact

SEQ ID NO: 16862 - DNA, 21 bp, Artificial Sequence
  Description of Artificial Sequence: Synthetic oligonucleotide
ggtattgcggatttggctgtt

SEQ ID NO: 16863 - DNA, 21 bp, Artificial Sequence
  Description of Artificial Sequence: Synthetic oligonucleotide
ggtattgctggggggaggcct

SEQ ID NO: 16864 - DNA, 21 bp, Artificial Sequence
  Description of Artificial Sequence: Synthetic oligonucleotide
gggattgctgggcgtgcgacg

SEQ ID NO: 16865 - DNA, 21 bp, Artificial Sequence
  Description of Artificial Sequence: Synthetic oligonucleotide
gggattgctagtgagctgccg

SEQ ID NO: 16866 - DNA, 21 bp, Artificial Sequence
  Description of Artificial Sequence: Synthetic oligonucleotide
ggtattgcttatatgacgcct

SEQ ID NO: 16867 - DNA, 21 bp, Artificial Sequence
  Description of Artificial Sequence: Synthetic oligonucleotide
ggtattgatcttcatactgcg

SEQ ID NO: 16868 - DNA, 21 bp, Artificial Sequence
  Description of Artificial Sequence: Synthetic oligonucleotide
ggtattgataatgggactgtt

SEQ ID NO: 16869 - DNA, 21 bp, Artificial Sequence
  Description of Artificial Sequence: Synthetic oligonucleotide
gggattgagattgatacgcag

SEQ ID NO: 16870 - DNA, 21 bp, Artificial Sequence
  Description of Artificial Sequence: Synthetic oligonucleotide
ggtattgagaggaattctatt

SEQ ID NO: 16871 - DNA, 21 bp, Artificial Sequence
  Description of Artificial Sequence: Synthetic oligonucleotide
gggatttttgctgctacttct

SEQ ID NO: 16872 - DNA, 21 bp, Artificial Sequence
  Description of Artificial Sequence: Synthetic oligonucleotide
ggtattggttcggatcgtgat

SEQ ID NO: 16873 - DNA, 21 bp, Artificial Sequence
  Description of Artificial Sequence: Synthetic oligonucleotide
ggtattggtacgcataatccg

SEQ ID NO: 16874 - DNA, 21 bp, Artificial Sequence
  Description of Artificial Sequence: Synthetic oligonucleotide
ggtattcatattaagtatgcg

SEQ ID NO: 16875 - DNA, 21 bp, Artificial Sequence
  Description of Artificial Sequence: Synthetic oligonucleotide
gggattaagatgactattagt

SEQ ID NO: 16876 - DNA, 21 bp, Artificial Sequence
  Description of Artificial Sequence: Synthetic oligonucleotide
ggtattaattggcagtctcct

SEQ ID NO: 16877 - DNA, 21 bp, Artificial Sequence
  Description of Artificial Sequence: Synthetic oligonucleotide
ggtattcctaggggggcgact

SEQ ID NO: 16878 - DNA, 21 bp, Artificial Sequence
  Description of Artificial Sequence: Synthetic oligonucleotide
gggattccttctaattctcgt

SEQ ID NO: 16879 - DNA, 21 bp, Artificial Sequence
  Description of Artificial Sequence: Synthetic oligonucleotide
gggattccggttaggggggag

SEQ ID NO: 16880 - DNA, 21 bp, Artificial Sequence
  Description of Artificial Sequence: Synthetic oligonucleotide
gggattcagacgtttgcgcct

SEQ ID NO: 16881 - DNA, 21 bp, Artificial Sequence
  Description of Artificial Sequence: Synthetic oligonucleotide
ggtattcagactgtgatgtcg

SEQ ID NO: 16882 - DNA, 21 bp, Artificial Sequence
  Description of Artificial Sequence: Synthetic oligonucleotide
ggtattcgtgagcatccgtat

SEQ ID NO: 16883 - DNA, 21 bp, Artificial Sequence
  Description of Artificial Sequence: Synthetic oligonucleotide
ggtattcggattctggaggcg

SEQ ID NO: 16884 - DNA, 21 bp, Artificial Sequence
  Description of Artificial Sequence: Synthetic oligonucleotide
ggtattcgtatgccggctaat

SEQ ID NO: 16885 - DNA, 21 bp, Artificial Sequence
  Description of Artificial Sequence: Synthetic oligonucleotide
gggatttctgctggtattctg

SEQ ID NO: 16886 - DNA, 21 bp, Artificial Sequence
  Description of Artificial Sequence: Synthetic oligonucleotide
gggatttctgggtcgacggtg

SEQ ID NO: 16887 - DNA, 21 bp, Artificial Sequence
  Description of Artificial Sequence: Synthetic oligonucleotide
gggatttctttgtcgagtgct

SEQ ID NO: 16888 - DNA, 21 bp, Artificial Sequence
  Description of Artificial Sequence: Synthetic oligonucleotide
gggatttctcggacggttgat

SEQ ID NO: 16889 - DNA, 21 bp, Artificial Sequence
  Description of Artificial Sequence: Synthetic oligonucleotide
ggtatttctgttgatgcgctt

SEQ ID NO: 16890 - DNA, 21 bp, Artificial Sequence
  Description of Artificial Sequence: Synthetic oligonucleotide
gggattactacgagtcagcgt

SEQ ID NO: 16891 - DNA, 21 bp, Artificial Sequence
  Description of Artificial Sequence: Synthetic oligonucleotide
ggtattgtgactaataatact

SEQ ID NO: 16892 - DNA, 21 bp, Artificial Sequence
  Description of Artificial Sequence: Synthetic oligonucleotide
ggtattgtggttacgggtccg

SEQ ID NO: 16893 - DNA, 21 bp, Artificial Sequence
  Description of Artificial Sequence: Synthetic oligonucleotide
gggaaggataggttgttggct

SEQ ID NO: 16894 - DNA, 21 bp, Artificial Sequence
  Description of Artificial Sequence: Synthetic oligonucleotide
ggtaaggagttttcttatacg

SEQ ID NO: 16895 - DNA, 21 bp, Artificial Sequence
  Description of Artificial Sequence: Synthetic oligonucleotide
ggtaagtttttgcctcagact

SEQ ID NO: 16896 - DNA, 21 bp, Artificial Sequence
  Description of Artificial Sequence: Synthetic oligonucleotide
ggtaaggggtttgatagtccg

SEQ ID NO: 16897 - DNA, 21 bp, Artificial Sequence
  Description of Artificial Sequence: Synthetic oligonucleotide
gggaagggtctgactgctact

SEQ ID NO: 16898 - DNA, 21 bp, Artificial Sequence
  Description of Artificial Sequence: Synthetic oligonucleotide
gggaagcatgtgaaggagatg

SEQ ID NO: 16899 - DNA, 21 bp, Artificial Sequence
  Description of Artificial Sequence: Synthetic oligonucleotide
ggtaagatttcgtcgagtctg

SEQ ID NO: 16900 - DNA, 21 bp, Artificial Sequence
  Description of Artificial Sequence: Synthetic oligonucleotide
ggtaagcttgagcttgcgccg

SEQ ID NO: 16901 - DNA, 21 bp, Artificial Sequence
  Description of Artificial Sequence: Synthetic oligonucleotide
gggaagctgcttatgcctcag

SEQ ID NO: 16902 - DNA, 21 bp, Artificial Sequence
  Description of Artificial Sequence: Synthetic oligonucleotide
gggaagctgacgtcgactctt

SEQ ID NO: 16903 - DNA, 21 bp, Artificial Sequence
  Description of Artificial Sequence: Synthetic oligonucleotide
gggaagttggtttcttatgat

SEQ ID NO: 16904 - DNA, 21 bp, Artificial Sequence
  Description of Artificial Sequence: Synthetic oligonucleotide
gggaagatgtcggttgggaat

SEQ ID NO: 16905 - DNA, 21 bp, Artificial Sequence
  Description of Artificial Sequence: Synthetic oligonucleotide
ggtaagaatgcgacttttcct

SEQ ID NO: 16906 - DNA, 21 bp, Artificial Sequence
  Description of Artificial Sequence: Synthetic oligonucleotide
ggtaagaatggggatcgtact

SEQ ID NO: 16907 - DNA, 21 bp, Artificial Sequence
  Description of Artificial Sequence: Synthetic oligonucleotide
ggtaagcctgctggtgctatt

SEQ ID NO: 16908 - DNA, 21 bp, Artificial Sequence
  Description of Artificial Sequence: Synthetic oligonucleotide
ggtaagcctgcttctccttat

SEQ ID NO: 16909 - DNA, 21 bp, Artificial Sequence
  Description of Artificial Sequence: Synthetic oligonucleotide
ggtaagcagaatcagtatact

SEQ ID NO: 16910 - DNA, 21 bp, Artificial Sequence
  Description of Artificial Sequence: Synthetic oligonucleotide
ggtaagcagacgcctccgtct

SEQ ID NO: 16911 - DNA, 21 bp, Artificial Sequence
  Description of Artificial Sequence: Synthetic oligonucleotide
gggaagcgtgctcctgttgat

SEQ ID NO: 16912 - DNA, 21 bp, Artificial Sequence
  Description of Artificial Sequence: Synthetic oligonucleotide
ggtaagtcgcctgggccgttg

SEQ ID NO: 16913 - DNA, 21 bp, Artificial Sequence
  Description of Artificial Sequence: Synthetic oligonucleotide
gggaagtctcagtctggtctg

SEQ ID NO: 16914 - DNA, 21 bp, Artificial Sequence
  Description of Artificial Sequence: Synthetic oligonucleotide
ggtaagtctgttacggtgtcg

SEQ ID NO: 16915 - DNA, 21 bp, Artificial Sequence
  Description of Artificial Sequence: Synthetic oligonucleotide
gggaagactgaggagcgtccg

SEQ ID NO: 16916 - DNA, 21 bp, Artificial Sequence
  Description of Artificial Sequence: Synthetic oligonucleotide
gggaagactaagccggattat

SEQ ID NO: 16917 - DNA, 21 bp, Artificial Sequence
  Description of Artificial Sequence: Synthetic oligonucleotide
gggaagactgttgattggggt

SEQ ID NO: 16918 - DNA, 21 bp, Artificial Sequence
  Description of Artificial Sequence: Synthetic oligonucleotide
ggtaagactgtgaatattgtt

SEQ ID NO: 16919 - DNA, 21 bp, Artificial Sequence
  Description of Artificial Sequence: Synthetic oligonucleotide
ggtaagacggtggtgagtgtg

SEQ ID NO: 16920 - DNA, 21 bp, Artificial Sequence
  Description of Artificial Sequence: Synthetic oligonucleotide
ggtaaggttgagtttgcgatt

SEQ ID NO: 16921 - DNA, 21 bp, Artificial Sequence
  Description of Artificial Sequence: Synthetic oligonucleotide
ggtaaggtgcatgagggtatg

SEQ ID NO: 16922 - DNA, 21 bp, Artificial Sequence
  Description of Artificial Sequence: Synthetic oligonucleotide
gggaaggtgccgacgattagt

SEQ ID NO: 16923 - DNA, 21 bp, Artificial Sequence
  Description of Artificial Sequence: Synthetic oligonucleotide
ggtaaggttgttcagacgccg

SEQ ID NO: 16924 - DNA, 21 bp, Artificial Sequence
  Description of Artificial Sequence: Synthetic oligonucleotide
ggtcttgcggctaaggcggat

SEQ ID NO: 16925 - DNA, 21 bp, Artificial Sequence
  Description of Artificial Sequence: Synthetic oligonucleotide
gggttggctgcgactgttccg

SEQ ID NO: 16926 - DNA, 21 bp, Artificial Sequence
  Description of Artificial Sequence: Synthetic oligonucleotide
gggcttgctcatcagggtact

SEQ ID NO: 16927 - DNA, 21 bp, Artificial Sequence
  Description of Artificial Sequence: Synthetic oligonucleotide
ggtttggctaagtatgcggag

SEQ ID NO: 16928 - DNA, 21 bp, Artificial Sequence
  Description of Artificial Sequence: Synthetic oligonucleotide
gggcttgctctttcttctccg

SEQ ID NO: 16929 - DNA, 21 bp, Artificial Sequence
  Description of Artificial Sequence: Synthetic oligonucleotide
ggtctggcgaattctccgtct

SEQ ID NO: 16930 - DNA, 21 bp, Artificial Sequence
  Description of Artificial Sequence: Synthetic oligonucleotide
gggttggcggttggtacgcgt

SEQ ID NO: 16931 - DNA, 21 bp, Artificial Sequence
  Description of Artificial Sequence: Synthetic oligonucleotide
ggtcttgagcatcatgttacg

SEQ ID NO: 16932 - DNA, 21 bp, Artificial Sequence
  Description of Artificial Sequence: Synthetic oligonucleotide
ggtttgggtgctcctgagcgt

SEQ ID NO: 16933 - DNA, 21 bp, Artificial Sequence
  Description of Artificial Sequence: Synthetic oligonucleotide
gggctgggtcttgtgacgggg

SEQ ID NO: 16934 - DNA, 21 bp, Artificial Sequence
  Description of Artificial Sequence: Synthetic oligonucleotide
ggtttgggtatgccgcagtct

SEQ ID NO: 16935 - DNA, 21 bp, Artificial Sequence
  Description of Artificial Sequence: Synthetic oligonucleotide
gggttgggttctactctgggt

SEQ ID NO: 16936 - DNA, 21 bp, Artificial Sequence
  Description of Artificial Sequence: Synthetic oligonucleotide
gggttgggtacggcttcggcg

SEQ ID NO: 16937 - DNA, 21 bp, Artificial Sequence
  Description of Artificial Sequence: Synthetic oligonucleotide
ggtctggggactatggttatt

SEQ ID NO: 16938 - DNA, 21 bp, Artificial Sequence
  Description of Artificial Sequence: Synthetic oligonucleotide
ggtttgggtacgccgagtccg

SEQ ID NO: 16939 - DNA, 21 bp, Artificial Sequence
  Description of Artificial Sequence: Synthetic oligonucleotide
gggctggggacgacgggtcgg

SEQ ID NO: 16940 - DNA, 21 bp, Artificial Sequence
  Description of Artificial Sequence: Synthetic oligonucleotide
ggtcttcatgatccgcctgtg

SEQ ID NO: 16941 - DNA, 21 bp, Artificial Sequence
  Description of Artificial Sequence: Synthetic oligonucleotide
ggtcttcatctgatggatgtg

SEQ ID NO: 16942 - DNA, 21 bp, Artificial Sequence
  Description of Artificial Sequence: Synthetic oligonucleotide
ggtcttatttcgcagactgat

SEQ ID NO: 16943 - DNA, 21 bp, Artificial Sequence
  Description of Artificial Sequence: Synthetic oligonucleotide
ggtcttaaggctgttgatggg

SEQ ID NO: 16944 - DNA, 21 bp, Artificial Sequence
  Description of Artificial Sequence: Synthetic oligonucleotide
gggctgaagattactacggag

SEQ ID NO: 16945 - DNA, 21 bp, Artificial Sequence
  Description of Artificial Sequence: Synthetic oligonucleotide
gggttgaagaatcctcagatg

SEQ ID NO: 16946 - DNA, 21 bp, Artificial Sequence
  Description of Artificial Sequence: Synthetic oligonucleotide
ggtctgaagagtactattaat

SEQ ID NO: 16947 - DNA, 21 bp, Artificial Sequence
  Description of Artificial Sequence: Synthetic oligonucleotide
ggtttgctgggtgagaagtct

SEQ ID NO: 16948 - DNA, 21 bp, Artificial Sequence
  Description of Artificial Sequence: Synthetic oligonucleotide
gggctgcttggtaggtatgag

SEQ ID NO: 16949 - DNA, 21 bp, Artificial Sequence
  Description of Artificial Sequence: Synthetic oligonucleotide
gggcttcttgggacgaagctg

SEQ ID NO: 16950 - DNA, 21 bp, Artificial Sequence
  Description of Artificial Sequence: Synthetic oligonucleotide
gggttgctgtcgcgggcggag

SEQ ID NO: 16951 - DNA, 21 bp, Artificial Sequence
  Description of Artificial Sequence: Synthetic oligonucleotide
ggtcttttggttctttatcct

SEQ ID NO: 16952 - DNA, 21 bp, Artificial Sequence
  Description of Artificial Sequence: Synthetic oligonucleotide
ggtttgatggctcatcgtaat

SEQ ID NO: 16953 - DNA, 21 bp, Artificial Sequence
  Description of Artificial Sequence: Synthetic oligonucleotide
gggcttatgctgatgaatggt

SEQ ID NO: 16954 - DNA, 21 bp, Artificial Sequence
  Description of Artificial Sequence: Synthetic oligonucleotide
gggcttaatccggggacgcat

SEQ ID NO: 16955 - DNA, 21 bp, Artificial Sequence
  Description of Artificial Sequence: Synthetic oligonucleotide
gggttgaatcggttttctggt

SEQ ID NO: 16956 - DNA, 21 bp, Artificial Sequence
  Description of Artificial Sequence: Synthetic oligonucleotide
gggttgaatgttacgaagttt

SEQ ID NO: 16957 - DNA, 21 bp, Artificial Sequence
  Description of Artificial Sequence: Synthetic oligonucleotide
ggtcttcctggggagcttgcg

SEQ ID NO: 16958 - DNA, 21 bp, Artificial Sequence
  Description of Artificial Sequence: Synthetic oligonucleotide
gggctgccgggtgggcggtcg

SEQ ID NO: 16959 - DNA, 21 bp, Artificial Sequence
  Description of Artificial Sequence: Synthetic oligonucleotide
ggtttgcctgggcggcatgcg

SEQ ID NO: 16960 - DNA, 21 bp, Artificial Sequence
  Description of Artificial Sequence: Synthetic oligonucleotide
ggtttgcctcataggtatgag

SEQ ID NO: 16961 - DNA, 21 bp, Artificial Sequence
  Description of Artificial Sequence: Synthetic oligonucleotide
gggttgcctattccgagtctt

SEQ ID NO: 16962 - DNA, 21 bp, Artificial Sequence
  Description of Artificial Sequence: Synthetic oligonucleotide
gggttgccgaagcatcctcct

SEQ ID NO: 16963 - DNA, 21 bp, Artificial Sequence
  Description of Artificial Sequence: Synthetic oligonucleotide
gggttgccgatggctacggcg

SEQ ID NO: 16964 - DNA, 21 bp, Artificial Sequence
  Description of Artificial Sequence: Synthetic oligonucleotide
ggtttgcctaatcgggagccg

SEQ ID NO: 16965 - DNA, 21 bp, Artificial Sequence
  Description of Artificial Sequence: Synthetic oligonucleotide
gggttgcctcctgcgtctaag

SEQ ID NO: 16966 - DNA, 21 bp, Artificial Sequence
  Description of Artificial Sequence: Synthetic oligonucleotide
ggtcttccgcaggcgtctcat

SEQ ID NO: 16967 - DNA, 21 bp, Artificial Sequence
  Description of Artificial Sequence: Synthetic oligonucleotide
ggtttgccgcagcataagcag

SEQ ID NO: 16968 - DNA, 21 bp, Artificial Sequence
  Description of Artificial Sequence: Synthetic oligonucleotide
ggtctgccgagtaatttgacg

SEQ ID NO: 16969 - DNA, 21 bp, Artificial Sequence
  Description of Artificial Sequence: Synthetic oligonucleotide
gggttgccgactgaggatcgg

SEQ ID NO: 16970 - DNA, 21 bp, Artificial Sequence
  Description of Artificial Sequence: Synthetic oligonucleotide
gggcttccttatgggaatagt

SEQ ID NO: 16971 - DNA, 21 bp, Artificial Sequence
  Description of Artificial Sequence: Synthetic oligonucleotide
ggtttgcagcaggaggttcgt

SEQ ID NO: 16972 - DNA, 21 bp, Artificial Sequence
  Description of Artificial Sequence: Synthetic oligonucleotide
gggctgcagtctacggggctt

SEQ ID NO: 16973 - DNA, 21 bp, Artificial Sequence
  Description of Artificial Sequence: Synthetic oligonucleotide
ggtttgagggagccggttgct

SEQ ID NO: 16974 - DNA, 21 bp, Artificial Sequence
  Description of Artificial Sequence: Synthetic oligonucleotide
ggtctgaggtttactgttgag

SEQ ID NO: 16975 - DNA, 21 bp, Artificial Sequence
  Description of Artificial Sequence: Synthetic oligonucleotide
gggttgcgtaatttggggtct

SEQ ID NO: 16976 - DNA, 21 bp, Artificial Sequence
  Description of Artificial Sequence: Synthetic oligonucleotide
gggttgaggaatcaggagttg

SEQ ID NO: 16977 - DNA, 21 bp, Artificial Sequence
  Description of Artificial Sequence: Synthetic oligonucleotide
ggtctgcgtcctggtcaggat

SEQ ID NO: 16978 - DNA, 21 bp, Artificial Sequence
  Description of Artificial Sequence: Synthetic oligonucleotide
gggcttcgttctctgtcggcg

SEQ ID NO: 16979 - DNA, 21 bp, Artificial Sequence
  Description of Artificial Sequence: Synthetic oligonucleotide
gggcttcgttcgatgccggag

SEQ ID NO: 16980 - DNA, 21 bp, Artificial Sequence
  Description of Artificial Sequence: Synthetic oligonucleotide
ggtttgcggtcgagttatgct

SEQ ID NO: 16981 - DNA, 21 bp, Artificial Sequence
  Description of Artificial Sequence: Synthetic oligonucleotide
gggttgcggactgcgtcgaat

SEQ ID NO: 16982 - DNA, 21 bp, Artificial Sequence
  Description of Artificial Sequence: Synthetic oligonucleotide
gggttgcggacggatatgctt

SEQ ID NO: 16983 - DNA, 21 bp, Artificial Sequence
  Description of Artificial Sequence: Synthetic oligonucleotide
gggcttagtgctgcggcgacg

SEQ ID NO: 16984 - DNA, 21 bp, Artificial Sequence
  Description of Artificial Sequence: Synthetic oligonucleotide
gggctgtcggcgttggcgtcg

SEQ ID NO: 16985 - DNA, 21 bp, Artificial Sequence
  Description of Artificial Sequence: Synthetic oligonucleotide
gggctttcggcgtatattcct

SEQ ID NO: 16986 - DNA, 21 bp, Artificial Sequence
  Description of Artificial Sequence: Synthetic oligonucleotide
gggctttcgcattctgcgttg

SEQ ID NO: 16987 - DNA, 21 bp, Artificial Sequence
  Description of Artificial Sequence: Synthetic oligonucleotide
gggttgtctcttgatgattat

SEQ ID NO: 16988 - DNA, 21 bp, Artificial Sequence
  Description of Artificial Sequence: Synthetic oligonucleotide
gggctgtctcttaagtatggg

SEQ ID NO: 16989 - DNA, 21 bp, Artificial Sequence
  Description of Artificial Sequence: Synthetic oligonucleotide
ggtctttcgctgctgcgtaat

SEQ ID NO: 16990 - DNA, 21 bp, Artificial Sequence
  Description of Artificial Sequence: Synthetic oligonucleotide
gggctgtctatgccgctgcct

SEQ ID NO: 16991 - DNA, 21 bp, Artificial Sequence
  Description of Artificial Sequence: Synthetic oligonucleotide
ggtcttagtcctcgtcagacg

SEQ ID NO: 16992 - DNA, 21 bp, Artificial Sequence
  Description of Artificial Sequence: Synthetic oligonucleotide
ggtctttcgcgtgctcctcct

SEQ ID NO: 16993 - DNA, 21 bp, Artificial Sequence
  Description of Artificial Sequence: Synthetic oligonucleotide
ggtttgagttcgcatcatcct

SEQ ID NO: 16994 - DNA, 21 bp, Artificial Sequence
  Description of Artificial Sequence: Synthetic oligonucleotide
gggctttctacgaagacgtcg

SEQ ID NO: 16995 - DNA, 21 bp, Artificial Sequence
  Description of Artificial Sequence: Synthetic oligonucleotide
ggtttgtctacggtgcttatg

SEQ ID NO: 16996 - DNA, 21 bp, Artificial Sequence
  Description of Artificial Sequence: Synthetic oligonucleotide
ggtctgtctgttacgcgtgtt

SEQ ID NO: 16997 - DNA, 21 bp, Artificial Sequence
  Description of Artificial Sequence: Synthetic oligonucleotide
ggtttgactcatgttgtgcag

SEQ ID NO: 16998 - DNA, 21 bp, Artificial Sequence
  Description of Artificial Sequence: Synthetic oligonucleotide
gggctgactttggatttgagg

SEQ ID NO: 16999 - DNA, 21 bp, Artificial Sequence
  Description of Artificial Sequence: Synthetic oligonucleotide
ggtttgactttggttccggct

SEQ ID NO: 17000 - DNA, 21 bp, Artificial Sequence
  Description of Artificial Sequence: Synthetic oligonucleotide
ggtcttactaatacggggagt

SEQ ID NO: 17001 - DNA, 21 bp, Artificial Sequence
  Description of Artificial Sequence: Synthetic oligonucleotide
ggtctgactccggatcatggg

SEQ ID NO: 17002 - DNA, 21 bp, Artificial Sequence
  Description of Artificial Sequence: Synthetic oligonucleotide
gggcttactcagcctgggcct

SEQ ID NO: 17003 - DNA, 21 bp, Artificial Sequence
  Description of Artificial Sequence: Synthetic oligonucleotide
ggtttgacgtcgcatcctatt

SEQ ID NO: 17004 - DNA, 21 bp, Artificial Sequence
  Description of Artificial Sequence: Synthetic oligonucleotide
ggtctgacttatgctttgacg

SEQ ID NO: 17005 - DNA, 21 bp, Artificial Sequence
  Description of Artificial Sequence: Synthetic oligonucleotide
ggtctggttgcgcatactatt

SEQ ID NO: 17006 - DNA, 21 bp, Artificial Sequence
  Description of Artificial Sequence: Synthetic oligonucleotide
ggtctggtgggtagggtgcag

SEQ ID NO: 17007 - DNA, 21 bp, Artificial Sequence
  Description of Artificial Sequence: Synthetic oligonucleotide
ggtttggttattggtgtggct

SEQ ID NO: 17008 - DNA, 21 bp, Artificial Sequence
  Description of Artificial Sequence: Synthetic oligonucleotide
gggttggtgcctacggatgcg

SEQ ID NO: 17009 - DNA, 21 bp, Artificial Sequence
  Description of Artificial Sequence: Synthetic oligonucleotide
gggcttgtttctactcatgat

SEQ ID NO: 17010 - DNA, 21 bp, Artificial Sequence
  Description of Artificial Sequence: Synthetic oligonucleotide
ggtttgtatgatactcggtcg

SEQ ID NO: 17011 - DNA, 21 bp, Artificial Sequence
  Description of Artificial Sequence: Synthetic oligonucleotide
gggttgtatcatcttaatgcg

SEQ ID NO: 17012 - DNA, 21 bp, Artificial Sequence
  Description of Artificial Sequence: Synthetic oligonucleotide
gggctttataatacgagtact

SEQ ID NO: 17013 - DNA, 21 bp, Artificial Sequence
  Description of Artificial Sequence: Synthetic oligonucleotide
ggtctttatccgaattttact

SEQ ID NO: 17014 - DNA, 21 bp, Artificial Sequence
  Description of Artificial Sequence: Synthetic oligonucleotide
ggtatggctgcgggtcattct

SEQ ID NO: 17015 - DNA, 21 bp, Artificial Sequence
  Description of Artificial Sequence: Synthetic oligonucleotide
gggatggcggctactgctagt

SEQ ID NO: 17016 - DNA, 21 bp, Artificial Sequence
  Description of Artificial Sequence: Synthetic oligonucleotide
gggatggctggtattcgtgat

SEQ ID NO: 17017 - DNA, 21 bp, Artificial Sequence
  Description of Artificial Sequence: Synthetic oligonucleotide
gggatggctatgactttgtct

SEQ ID NO: 17018 - DNA, 21 bp, Artificial Sequence
  Description of Artificial Sequence: Synthetic oligonucleotide
gggatggcgactggtgttgat

SEQ ID NO: 17019 - DNA, 21 bp, Artificial Sequence
  Description of Artificial Sequence: Synthetic oligonucleotide
ggtatggatcaggttttgagg

SEQ ID NO: 17020 - DNA, 21 bp, Artificial Sequence
  Description of Artificial Sequence: Synthetic oligonucleotide
gggatgggtactgcttatggt

SEQ ID NO: 17021 - DNA, 21 bp, Artificial Sequence
  Description of Artificial Sequence: Synthetic oligonucleotide
ggtatgaagcctcctgttgat

SEQ ID NO: 17022 - DNA, 21 bp, Artificial Sequence
  Description of Artificial Sequence: Synthetic oligonucleotide
gggatgcttcgggcggtttcg

SEQ ID NO: 17023 - DNA, 21 bp, Artificial Sequence
  Description of Artificial Sequence: Synthetic oligonucleotide
ggtatgaataatactgtgcgt

SEQ ID NO: 17024 - DNA, 21 bp, Artificial Sequence
  Description of Artificial Sequence: Synthetic oligonucleotide
ggtatgaattcgtcgttggtt

SEQ ID NO: 17025 - DNA, 21 bp, Artificial Sequence
  Description of Artificial Sequence: Synthetic oligonucleotide
gggatgccgcatctgcctcct

SEQ ID NO: 17026 - DNA, 21 bp, Artificial Sequence
  Description of Artificial Sequence: Synthetic oligonucleotide
gggatgcctattcctagtaat

SEQ ID NO: 17027 - DNA, 21 bp, Artificial Sequence
  Description of Artificial Sequence: Synthetic oligonucleotide
ggtatgagggatctgcagcct

SEQ ID NO: 17028 - DNA, 21 bp, Artificial Sequence
  Description of Artificial Sequence: Synthetic oligonucleotide
ggtatgaggcagactcaggcg

SEQ ID NO: 17029 - DNA, 21 bp, Artificial Sequence
  Description of Artificial Sequence: Synthetic oligonucleotide
ggtatgtctatgattacgcgg

SEQ ID NO: 17030 - DNA, 21 bp, Artificial Sequence
  Description of Artificial Sequence: Synthetic oligonucleotide
gggatgtctcagggttcttat

SEQ ID NO: 17031 - DNA, 21 bp, Artificial Sequence
  Description of Artificial Sequence: Synthetic oligonucleotide
gggatgtctaggtcgtttagt

SEQ ID NO: 17032 - DNA, 21 bp, Artificial Sequence
  Description of Artificial Sequence: Synthetic oligonucleotide
ggtatgagttcggcgctgtcg

SEQ ID NO: 17033 - DNA, 21 bp, Artificial Sequence
  Description of Artificial Sequence: Synthetic oligonucleotide
ggtatgtcggttccgatggat

SEQ ID NO: 17034 - DNA, 21 bp, Artificial Sequence
  Description of Artificial Sequence: Synthetic oligonucleotide
gggatgactcgtcctcaggtt

SEQ ID NO: 17035 - DNA, 21 bp, Artificial Sequence
  Description of Artificial Sequence: Synthetic oligonucleotide
gggaatgctgctactcttagg

SEQ ID NO: 17036 - DNA, 21 bp, Artificial Sequence
  Description of Artificial Sequence: Synthetic oligonucleotide
gggaatgcgcggcctattact

SEQ ID NO: 17037 - DNA, 21 bp, Artificial Sequence
  Description of Artificial Sequence: Synthetic oligonucleotide
ggtaatgctagtcctcagatg

SEQ ID NO: 17038 - DNA, 21 bp, Artificial Sequence
  Description of Artificial Sequence: Synthetic oligonucleotide
gggaatgctgttgggggtgat

SEQ ID NO: 17039 - DNA, 21 bp, Artificial Sequence
  Description of Artificial Sequence: Synthetic oligonucleotide
ggtaatgatgattctaagtat

SEQ ID NO: 17040 - DNA, 21 bp, Artificial Sequence
  Description of Artificial Sequence: Synthetic oligonucleotide
gggaattttcagaagaatgcg

SEQ ID NO: 17041 - DNA, 21 bp, Artificial Sequence
  Description of Artificial Sequence: Synthetic oligonucleotide
gggaatgggcgtggttttcag

SEQ ID NO: 17042 - DNA, 21 bp, Artificial Sequence
  Description of Artificial Sequence: Synthetic oligonucleotide
ggtaatgggactcctgagcat

SEQ ID NO: 17043 - DNA, 21 bp, Artificial Sequence
  Description of Artificial Sequence: Synthetic oligonucleotide
ggtaatcatgcttttcatgct

SEQ ID NO: 17044 - DNA, 21 bp, Artificial Sequence
  Description of Artificial Sequence: Synthetic oligonucleotide
gggaatcatcttcatctgtgt

SEQ ID NO: 17045 - DNA, 21 bp, Artificial Sequence
  Description of Artificial Sequence: Synthetic oligonucleotide
gggaatcatgtgcttcagccg

SEQ ID NO: 17046 - DNA, 21 bp, Artificial Sequence
  Description of Artificial Sequence: Synthetic oligonucleotide
gggaatcttcttactatttcg

SEQ ID NO: 17047 - DNA, 21 bp, Artificial Sequence
  Description of Artificial Sequence: Synthetic oligonucleotide
ggtaatctttcgcagcgtttt

SEQ ID NO: 17048 - DNA, 21 bp, Artificial Sequence
  Description of Artificial Sequence: Synthetic oligonucleotide
ggtaatatgcatacgttgact

SEQ ID NO: 17049 - DNA, 21 bp, Artificial Sequence
  Description of Artificial Sequence: Synthetic oligonucleotide
gggaatcctttgaagcctcag

SEQ ID NO: 17050 - DNA, 21 bp, Artificial Sequence
  Description of Artificial Sequence: Synthetic oligonucleotide
ggtaatagggaggctcttgcg

SEQ ID NO: 17051 - DNA, 21 bp, Artificial Sequence
  Description of Artificial Sequence: Synthetic oligonucleotide
ggtaatcggaattctaatgtt

SEQ ID NO: 17052 - DNA, 21 bp, Artificial Sequence
  Description of Artificial Sequence: Synthetic oligonucleotide
gggaatagtgcgatgaattcg

SEQ ID NO: 17053 - DNA, 21 bp, Artificial Sequence
  Description of Artificial Sequence: Synthetic oligonucleotide
gggaattctgatcagacgcgt

SEQ ID NO: 17054 - DNA, 21 bp, Artificial Sequence
  Description of Artificial Sequence: Synthetic oligonucleotide
gggaattctttggctccgcag

SEQ ID NO: 17055 - DNA, 21 bp, Artificial Sequence
  Description of Artificial Sequence: Synthetic oligonucleotide
ggtaatagttcggcggggaat

SEQ ID NO: 17056 - DNA, 21 bp, Artificial Sequence
  Description of Artificial Sequence: Synthetic oligonucleotide
gggaattcgtcgcatagtgat

SEQ ID NO: 17057 - DNA, 21 bp, Artificial Sequence
  Description of Artificial Sequence: Synthetic oligonucleotide
gggaatagtacggtggatccg

SEQ ID NO: 17058 - DNA, 21 bp, Artificial Sequence
  Description of Artificial Sequence: Synthetic oligonucleotide
ggtaattcggttcctcataat

SEQ ID NO: 17059 - DNA, 21 bp, Artificial Sequence
  Description of Artificial Sequence: Synthetic oligonucleotide
gggaattctgttcagcatcgt

SEQ ID NO: 17060 - DNA, 21 bp, Artificial Sequence
  Description of Artificial Sequence: Synthetic oligonucleotide
gggaatactgcgcctcagtct

SEQ ID NO: 17061 - DNA, 21 bp, Artificial Sequence
  Description of Artificial Sequence: Synthetic oligonucleotide
ggtaatactcataatatgcag

SEQ ID NO: 17062 - DNA, 21 bp, Artificial Sequence
  Description of Artificial Sequence: Synthetic oligonucleotide
gggaatactaagtctcctggg

SEQ ID NO: 17063 - DNA, 21 bp, Artificial Sequence
  Description of Artificial Sequence: Synthetic oligonucleotide
gggaatactaatcggaatggt

SEQ ID NO: 17064 - DNA, 21 bp, Artificial Sequence
  Description of Artificial Sequence: Synthetic oligonucleotide
gggaatacgtcgtctcgggct

SEQ ID NO: 17065 - DNA, 21 bp, Artificial Sequence
  Description of Artificial Sequence: Synthetic oligonucleotide
ggtaatactgtgcggattccg

SEQ ID NO: 17066 - DNA, 21 bp, Artificial Sequence
  Description of Artificial Sequence: Synthetic oligonucleotide
ggtaatgttcttagggttgtt

SEQ ID NO: 17067 - DNA, 21 bp, Artificial Sequence
  Description of Artificial Sequence: Synthetic oligonucleotide
gggaatgttactaaggggctt

SEQ ID NO: 17068 - DNA, 21 bp, Artificial Sequence
  Description of Artificial Sequence: Synthetic oligonucleotide
ggtaattatattttgaagcct

SEQ ID NO: 17069 - DNA, 21 bp, Artificial Sequence
  Description of Artificial Sequence: Synthetic oligonucleotide
ggtaattatatttcggcttct

SEQ ID NO: 17070 - DNA, 21 bp, Artificial Sequence
  Description of Artificial Sequence: Synthetic oligonucleotide
ggtaattataatttggatctg

SEQ ID NO: 17071 - DNA, 21 bp, Artificial Sequence
  Description of Artificial Sequence: Synthetic oligonucleotide
gggaattattcgtcggaggtg

SEQ ID NO: 17072 - DNA, 21 bp, Artificial Sequence
  Description of Artificial Sequence: Synthetic oligonucleotide
ggtccggctgcggatgtgcgg

SEQ ID NO: 17073 - DNA, 21 bp, Artificial Sequence
  Description of Artificial Sequence: Synthetic oligonucleotide
gggccggcgcttcttatggat

SEQ ID NO: 17074 - DNA, 21 bp, Artificial Sequence
  Description of Artificial Sequence: Synthetic oligonucleotide
gggcctgctttgccgattgcg

SEQ ID NO: 17075 - DNA, 21 bp, Artificial Sequence
  Description of Artificial Sequence: Synthetic oligonucleotide
gggccggcgatggggagtctt

SEQ ID NO: 17076 - DNA, 21 bp, Artificial Sequence
  Description of Artificial Sequence: Synthetic oligonucleotide
gggccggcgccttctatttct

SEQ ID NO: 17077 - DNA, 21 bp, Artificial Sequence
  Description of Artificial Sequence: Synthetic oligonucleotide
gggccggctcagcgtcttcag

SEQ ID NO: 17078 - DNA, 21 bp, Artificial Sequence
  Description of Artificial Sequence: Synthetic oligonucleotide
gggcctgcttctattgtttct

SEQ ID NO: 17079 - DNA, 21 bp, Artificial Sequence
  Description of Artificial Sequence: Synthetic oligonucleotide
gggccggcgacgcatcttacg

SEQ ID NO: 17080 - DNA, 21 bp, Artificial Sequence
  Description of Artificial Sequence: Synthetic oligonucleotide
ggtcctgatttgacgacgggt

SEQ ID NO: 17081 - DNA, 21 bp, Artificial Sequence
  Description of Artificial Sequence: Synthetic oligonucleotide
gggcctgatcaggaggagcat

SEQ ID NO: 17082 - DNA, 21 bp, Artificial Sequence
  Description of Artificial Sequence: Synthetic oligonucleotide
ggtccggaggcgatgtataag

SEQ ID NO: 17083 - DNA, 21 bp, Artificial Sequence
  Description of Artificial Sequence: Synthetic oligonucleotide
ggtcctgagcaggatattatg

SEQ ID NO: 17084 - DNA, 21 bp, Artificial Sequence
  Description of Artificial Sequence: Synthetic oligonucleotide
gggccggagtgggtgacgggt

SEQ ID NO: 17085 - DNA, 21 bp, Artificial Sequence
  Description of Artificial Sequence: Synthetic oligonucleotide
gggccttttgagcagacggat

SEQ ID NO: 17086 - DNA, 21 bp, Artificial Sequence
  Description of Artificial Sequence: Synthetic oligonucleotide
ggtccgggggcgattcattat

SEQ ID NO: 17087 - DNA, 21 bp, Artificial Sequence
  Description of Artificial Sequence: Synthetic oligonucleotide
ggtccggggattgctagtttt

SEQ ID NO: 17088 - DNA, 21 bp, Artificial Sequence
  Description of Artificial Sequence: Synthetic oligonucleotide
gggccggggaaggagacgcgt

SEQ ID NO: 17089 - DNA, 21 bp, Artificial Sequence
  Description of Artificial Sequence: Synthetic oligonucleotide
ggtcctggtatgctgtgtgcg

SEQ ID NO: 17090 - DNA, 21 bp, Artificial Sequence
  Description of Artificial Sequence: Synthetic oligonucleotide
ggtcctggtcctattgggtct

SEQ ID NO: 17091 - DNA, 21 bp, Artificial Sequence
  Description of Artificial Sequence: Synthetic oligonucleotide
ggtccgggttcgtttcgtcct

SEQ ID NO: 17092 - DNA, 21 bp, Artificial Sequence
  Description of Artificial Sequence: Synthetic oligonucleotide
gggcctgggtcgtcgtctatg

SEQ ID NO: 17093 - DNA, 21 bp, Artificial Sequence
  Description of Artificial Sequence: Synthetic oligonucleotide
ggtccgcatattcggattgct

SEQ ID NO: 17094 - DNA, 21 bp, Artificial Sequence
  Description of Artificial Sequence: Synthetic oligonucleotide
gggcctcatcttgtgcagcat

SEQ ID NO: 17095 - DNA, 21 bp, Artificial Sequence
  Description of Artificial Sequence: Synthetic oligonucleotide
gggccgcatactagtatgatt

SEQ ID NO: 17096 - DNA, 21 bp, Artificial Sequence
  Description of Artificial Sequence: Synthetic oligonucleotide
gggccgcattataatgatcct

SEQ ID NO: 17097 - DNA, 21 bp, Artificial Sequence
  Description of Artificial Sequence: Synthetic oligonucleotide
gggccgattgagcttacgttg

SEQ ID NO: 17098 - DNA, 21 bp, Artificial Sequence
  Description of Artificial Sequence: Synthetic oligonucleotide
gggcctaagcttacgccggtg

SEQ ID NO: 17099 - DNA, 21 bp, Artificial Sequence
  Description of Artificial Sequence: Synthetic oligonucleotide
gggcctaagatggagccgcat

SEQ ID NO: 17100 - DNA, 21 bp, Artificial Sequence
  Description of Artificial Sequence: Synthetic oligonucleotide
ggtcctttgctggtgcgtggt

SEQ ID NO: 17101 - DNA, 21 bp, Artificial Sequence
  Description of Artificial Sequence: Synthetic oligonucleotide
gggccgcttaattctgtgatg

SEQ ID NO: 17102 - DNA, 21 bp, Artificial Sequence
  Description of Artificial Sequence: Synthetic oligonucleotide
gggcctttgcctgagggtcat

SEQ ID NO: 17103 - DNA, 21 bp, Artificial Sequence
  Description of Artificial Sequence: Synthetic oligonucleotide
ggtccgcttccgcctacgacg

SEQ ID NO: 17104 - DNA, 21 bp, Artificial Sequence
  Description of Artificial Sequence: Synthetic oligonucleotide
ggtccgctgccggtggcgact

SEQ ID NO: 17105 - DNA, 21 bp, Artificial Sequence
  Description of Artificial Sequence: Synthetic oligonucleotide
ggtccgttgtctgcgatgcct

SEQ ID NO: 17106 - DNA, 21 bp, Artificial Sequence
  Description of Artificial Sequence: Synthetic oligonucleotide
gggccgttgagtaatgtgaag

SEQ ID NO: 17107 - DNA, 21 bp, Artificial Sequence
  Description of Artificial Sequence: Synthetic oligonucleotide
ggtcctttggtttatgctgat

SEQ ID NO: 17108 - DNA, 21 bp, Artificial Sequence
  Description of Artificial Sequence: Synthetic oligonucleotide
gggcctatgcagatgccgagt

SEQ ID NO: 17109 - DNA, 21 bp, Artificial Sequence
  Description of Artificial Sequence: Synthetic oligonucleotide
gggccgatgcgggagatggag

SEQ ID NO: 17110 - DNA, 21 bp, Artificial Sequence
  Description of Artificial Sequence: Synthetic oligonucleotide
ggtcctatgtatgcgaatcct

SEQ ID NO: 17111 - DNA, 21 bp, Artificial Sequence
  Description of Artificial Sequence: Synthetic oligonucleotide
ggtccgaatgatgtgcagaag

SEQ ID NO: 17112 - DNA, 21 bp, Artificial Sequence
  Description of Artificial Sequence: Synthetic oligonucleotide
ggtcctaattttcttttgcct

SEQ ID NO: 17113 - DNA, 21 bp, Artificial Sequence
  Description of Artificial Sequence: Synthetic oligonucleotide
ggtccgaatggtgctgttggg

SEQ ID NO: 17114 - DNA, 21 bp, Artificial Sequence
  Description of Artificial Sequence: Synthetic oligonucleotide
ggtccgaatatgcgtaatggt

SEQ ID NO: 17115 - DNA, 21 bp, Artificial Sequence
  Description of Artificial Sequence: Synthetic oligonucleotide
gggccgaatcgtgggtcgttg

SEQ ID NO: 17116 - DNA, 21 bp, Artificial Sequence
  Description of Artificial Sequence: Synthetic oligonucleotide
ggtccgaatcggctgactgtg

SEQ ID NO: 17117 - DNA, 21 bp, Artificial Sequence
  Description of Artificial Sequence: Synthetic oligonucleotide
ggtcctaatgttctttcgcct

SEQ ID NO: 17118 - DNA, 21 bp, Artificial Sequence
  Description of Artificial Sequence: Synthetic oligonucleotide
gggcctccggctgttaaggtg

SEQ ID NO: 17119 - DNA, 21 bp, Artificial Sequence
  Description of Artificial Sequence: Synthetic oligonucleotide
gggcctcctcatggtcattcg

SEQ ID NO: 17120 - DNA, 21 bp, Artificial Sequence
  Description of Artificial Sequence: Synthetic oligonucleotide
ggtccgcctaaggctaatcct

SEQ ID NO: 17121 - DNA, 21 bp, Artificial Sequence
  Description of Artificial Sequence: Synthetic oligonucleotide
ggtcctccgcttcttgcgccg

SEQ ID NO: 17122 - DNA, 21 bp, Artificial Sequence
  Description of Artificial Sequence: Synthetic oligonucleotide
gggcctcctatgaggccttct

SEQ ID NO: 17123 - DNA, 21 bp, Artificial Sequence
  Description of Artificial Sequence: Synthetic oligonucleotide
gggccgccgccgcagccgtct

SEQ ID NO: 17124 - DNA, 21 bp, Artificial Sequence
  Description of Artificial Sequence: Synthetic oligonucleotide
ggtcctcctccgactaattgg

SEQ ID NO: 17125 - DNA, 21 bp, Artificial Sequence
  Description of Artificial Sequence: Synthetic oligonucleotide
gggccgcagacggttacgggt

SEQ ID NO: 17126 - DNA, 21 bp, Artificial Sequence
  Description of Artificial Sequence: Synthetic oligonucleotide
ggtcctagggatcctcgtaat

SEQ ID NO: 17127 - DNA, 21 bp, Artificial Sequence
  Description of Artificial Sequence: Synthetic oligonucleotide
gggcctcgtgggtttttgaat

SEQ ID NO: 17128 - DNA, 21 bp, Artificial Sequence
  Description of Artificial Sequence: Synthetic oligonucleotide
ggtcctcggccgcagcatttg

SEQ ID NO: 17129 - DNA, 21 bp, Artificial Sequence
  Description of Artificial Sequence: Synthetic oligonucleotide
gggccgagggttactaatgat

SEQ ID NO: 17130 - DNA, 21 bp, Artificial Sequence
  Description of Artificial Sequence: Synthetic oligonucleotide
ggtccgagtgatcatgggtcg

SEQ ID NO: 17131 - DNA, 21 bp, Artificial Sequence
  Description of Artificial Sequence: Synthetic oligonucleotide
ggtccgtctaaggcgttggct

SEQ ID NO: 17132 - DNA, 21 bp, Artificial Sequence
  Description of Artificial Sequence: Synthetic oligonucleotide
ggtccgagtttgaatacgacg

SEQ ID NO: 17133 - DNA, 21 bp, Artificial Sequence
  Description of Artificial Sequence: Synthetic oligonucleotide
gggccttctcctgagtcttct

SEQ ID NO: 17134 - DNA, 21 bp, Artificial Sequence
  Description of Artificial Sequence: Synthetic oligonucleotide
ggtcctagtcggaatgctccg

SEQ ID NO: 17135 - DNA, 21 bp, Artificial Sequence
  Description of Artificial Sequence: Synthetic oligonucleotide
gggcctagttcggcgaagctg

SEQ ID NO: 17136 - DNA, 21 bp, Artificial Sequence
  Description of Artificial Sequence: Synthetic oligonucleotide
ggtccttcgagttctgcgtat

SEQ ID NO: 17137 - DNA, 21 bp, Artificial Sequence
  Description of Artificial Sequence: Synthetic oligonucleotide
ggtccttcttctgtgcctgat

SEQ ID NO: 17138 - DNA, 21 bp, Artificial Sequence
  Description of Artificial Sequence: Synthetic oligonucleotide
gggccgagtacttctctgatt

SEQ ID NO: 17139 - DNA, 21 bp, Artificial Sequence
  Description of Artificial Sequence: Synthetic oligonucleotide
ggtccgagtgtgcatccggcg

SEQ ID NO: 17140 - DNA, 21 bp, Artificial Sequence
  Description of Artificial Sequence: Synthetic oligonucleotide
ggtcctagtgtgcatactgat

SEQ ID NO: 17141 - DNA, 21 bp, Artificial Sequence
  Description of Artificial Sequence: Synthetic oligonucleotide
ggtccgtcttatattgatagt

SEQ ID NO: 17142 - DNA, 21 bp, Artificial Sequence
  Description of Artificial Sequence: Synthetic oligonucleotide
ggtcctacggagacgcctttg

SEQ ID NO: 17143 - DNA, 21 bp, Artificial Sequence
  Description of Artificial Sequence: Synthetic oligonucleotide
gggccgactggtgatcttgtt

SEQ ID NO: 17144 - DNA, 21 bp, Artificial Sequence
  Description of Artificial Sequence: Synthetic oligonucleotide
gggccgacggggtcgtcggag

SEQ ID NO: 17145 - DNA, 21 bp, Artificial Sequence
  Description of Artificial Sequence: Synthetic oligonucleotide
ggtccgacgcatccgcggatt

SEQ ID NO: 17146 - DNA, 21 bp, Artificial Sequence
  Description of Artificial Sequence: Synthetic oligonucleotide
gggcctactatgtctatgacg

SEQ ID NO: 17147 - DNA, 21 bp, Artificial Sequence
  Description of Artificial Sequence: Synthetic oligonucleotide
gggcctacgagtcttgctatt

SEQ ID NO: 17148 - DNA, 21 bp, Artificial Sequence
  Description of Artificial Sequence: Synthetic oligonucleotide
gggccgacgtatccgcatgcg

SEQ ID NO: 17149 - DNA, 21 bp, Artificial Sequence
  Description of Artificial Sequence: Synthetic oligonucleotide
gggccggttaagcctcgtgat

SEQ ID NO: 17150 - DNA, 21 bp, Artificial Sequence
  Description of Artificial Sequence: Synthetic oligonucleotide
gggccggttaatgcgcctgat

SEQ ID NO: 17151 - DNA, 21 bp, Artificial Sequence
  Description of Artificial Sequence: Synthetic oligonucleotide
gggccggtttcgggtgtttcg

SEQ ID NO: 17152 - DNA, 21 bp, Artificial Sequence
  Description of Artificial Sequence: Synthetic oligonucleotide
gggccttataatgttgatgtg

SEQ ID NO: 17153 - DNA, 21 bp, Artificial Sequence
  Description of Artificial Sequence: Synthetic oligonucleotide
gggccgtattcggctcctggt

SEQ ID NO: 17154 - DNA, 21 bp, Artificial Sequence
  Description of Artificial Sequence: Synthetic oligonucleotide
ggtcaggcgattgggcatccg

SEQ ID NO: 17155 - DNA, 21 bp, Artificial Sequence
  Description of Artificial Sequence: Synthetic oligonucleotide
gggcaggctcgtaatgagact

SEQ ID NO: 17156 - DNA, 21 bp, Artificial Sequence
  Description of Artificial Sequence: Synthetic oligonucleotide
gggcaggcgtcggctcctttt

SEQ ID NO: 17157 - DNA, 21 bp, Artificial Sequence
  Description of Artificial Sequence: Synthetic oligonucleotide
ggtcaggctagtattagttct

SEQ ID NO: 17158 - DNA, 21 bp, Artificial Sequence
  Description of Artificial Sequence: Synthetic oligonucleotide
gggcaggcgtcgcgtcagtct

SEQ ID NO: 17159 - DNA, 21 bp, Artificial Sequence
  Description of Artificial Sequence: Synthetic oligonucleotide
ggtcaggcggtgaaggttaat

SEQ ID NO: 17160 - DNA, 21 bp, Artificial Sequence
  Description of Artificial Sequence: Synthetic oligonucleotide
gggcaggatgatgtgaatatt

SEQ ID NO: 17161 - DNA, 21 bp, Artificial Sequence
  Description of Artificial Sequence: Synthetic oligonucleotide
gggcaggatatgcatgattct

SEQ ID NO: 17162 - DNA, 21 bp, Artificial Sequence
  Description of Artificial Sequence: Synthetic oligonucleotide
gggcaggagtggcaggctggg

SEQ ID NO: 17163 - DNA, 21 bp, Artificial Sequence
  Description of Artificial Sequence: Synthetic oligonucleotide
ggtcagtttgtggtgcggcag

SEQ ID NO: 17164 - DNA, 21 bp, Artificial Sequence
  Description of Artificial Sequence: Synthetic oligonucleotide
ggtcaggggcatccgcctaat

SEQ ID NO: 17165 - DNA, 21 bp, Artificial Sequence
  Description of Artificial Sequence: Synthetic oligonucleotide
ggtcagggttcgactcctttg

SEQ ID NO: 17166 - DNA, 21 bp, Artificial Sequence
  Description of Artificial Sequence: Synthetic oligonucleotide
ggtcagcatgctcggctgcag

SEQ ID NO: 17167 - DNA, 21 bp, Artificial Sequence
  Description of Artificial Sequence: Synthetic oligonucleotide
ggtcagcatgggaagcctgct

SEQ ID NO: 17168 - DNA, 21 bp, Artificial Sequence
  Description of Artificial Sequence: Synthetic oligonucleotide
ggtcagcatttgtctcctaat

SEQ ID NO: 17169 - DNA, 21 bp, Artificial Sequence
  Description of Artificial Sequence: Synthetic oligonucleotide
ggtcagattgtggctcctact

SEQ ID NO: 17170 - DNA, 21 bp, Artificial Sequence
  Description of Artificial Sequence: Synthetic oligonucleotide
ggtcagattgttacgtcgggt

SEQ ID NO: 17171 - DNA, 21 bp, Artificial Sequence
  Description of Artificial Sequence: Synthetic oligonucleotide
gggcagcttgatatgactact

SEQ ID NO: 17172 - DNA, 21 bp, Artificial Sequence
  Description of Artificial Sequence: Synthetic oligonucleotide
gggcagctgaatcttaggccg

SEQ ID NO: 17173 - DNA, 21 bp, Artificial Sequence
  Description of Artificial Sequence: Synthetic oligonucleotide
gggcagctgcagagtggttcg

SEQ ID NO: 17174 - DNA, 21 bp, Artificial Sequence
  Description of Artificial Sequence: Synthetic oligonucleotide
gggcagatggcgcgtcctgat

SEQ ID NO: 17175 - DNA, 21 bp, Artificial Sequence
  Description of Artificial Sequence: Synthetic oligonucleotide
ggtcagatgatttctgctcag

SEQ ID NO: 17176 - DNA, 21 bp, Artificial Sequence
  Description of Artificial Sequence: Synthetic oligonucleotide
ggtcagcctagtccgtggccg

SEQ ID NO: 17177 - DNA, 21 bp, Artificial Sequence
  Description of Artificial Sequence: Synthetic oligonucleotide
ggtcagcaggataatcgggat

SEQ ID NO: 17178 - DNA, 21 bp, Artificial Sequence
  Description of Artificial Sequence: Synthetic oligonucleotide
gggcagcagcagggttttatt

SEQ ID NO: 17179 - DNA, 21 bp, Artificial Sequence
  Description of Artificial Sequence: Synthetic oligonucleotide
ggtcagaggaagcttgagggg

SEQ ID NO: 17180 - DNA, 21 bp, Artificial Sequence
  Description of Artificial Sequence: Synthetic oligonucleotide
gggcagaggatgtcgatgacg

SEQ ID NO: 17181 - DNA, 21 bp, Artificial Sequence
  Description of Artificial Sequence: Synthetic oligonucleotide
gggcagaggactacttatgtt

SEQ ID NO: 17182 - DNA, 21 bp, Artificial Sequence
  Description of Artificial Sequence: Synthetic oligonucleotide
gggcagtcttttgagcggacg

SEQ ID NO: 17183 - DNA, 21 bp, Artificial Sequence
  Description of Artificial Sequence: Synthetic oligonucleotide
ggtcagtctcttgctattcgg

SEQ ID NO: 17184 - DNA, 21 bp, Artificial Sequence
  Description of Artificial Sequence: Synthetic oligonucleotide
gggcagtctttgacgcatccg

SEQ ID NO: 17185 - DNA, 21 bp, Artificial Sequence
  Description of Artificial Sequence: Synthetic oligonucleotide
ggtcagtctactcggcaggat

SEQ ID NO: 17186 - DNA, 21 bp, Artificial Sequence
  Description of Artificial Sequence: Synthetic oligonucleotide
gggcagacttgtacgtcgctg

SEQ ID NO: 17187 - DNA, 21 bp, Artificial Sequence
  Description of Artificial Sequence: Synthetic oligonucleotide
gggcagacgttggctcttgat

SEQ ID NO: 17188 - DNA, 21 bp, Artificial Sequence
  Description of Artificial Sequence: Synthetic oligonucleotide
ggtcagacgtatccgactctg

SEQ ID NO: 17189 - DNA, 21 bp, Artificial Sequence
  Description of Artificial Sequence: Synthetic oligonucleotide
ggtcaggttcatcttaatccg

SEQ ID NO: 17190 - DNA, 21 bp, Artificial Sequence
  Description of Artificial Sequence: Synthetic oligonucleotide
gggcagtatgggcgtcagcct

SEQ ID NO: 17191 - DNA, 21 bp, Artificial Sequence
  Description of Artificial Sequence: Synthetic oligonucleotide
gggcagtatcatagggatact

SEQ ID NO: 17192 - DNA, 21 bp, Artificial Sequence
  Description of Artificial Sequence: Synthetic oligonucleotide
ggtcagtattctgcttctact

SEQ ID NO: 17193 - DNA, 21 bp, Artificial Sequence
  Description of Artificial Sequence: Synthetic oligonucleotide
ggtcgtgctgctcctatttcg

SEQ ID NO: 17194 - DNA, 21 bp, Artificial Sequence
  Description of Artificial Sequence: Synthetic oligonucleotide
gggagggctaatactggtttt

SEQ ID NO: 17195 - DNA, 21 bp, Artificial Sequence
  Description of Artificial Sequence: Synthetic oligonucleotide
gggcgtgctcgtccgctgccg

SEQ ID NO: 17196 - DNA, 21 bp, Artificial Sequence
  Description of Artificial Sequence: Synthetic oligonucleotide
ggtcgggcttctacttatgtt

SEQ ID NO: 17197 - DNA, 21 bp, Artificial Sequence
  Description of Artificial Sequence: Synthetic oligonucleotide
ggtcgggatgaggttccgctg

SEQ ID NO: 17198 - DNA, 21 bp, Artificial Sequence
  Description of Artificial Sequence: Synthetic oligonucleotide
gggagggatgggatgccttct

SEQ ID NO: 17199 - DNA, 21 bp, Artificial Sequence
  Description of Artificial Sequence: Synthetic oligonucleotide
gggagggatccgactccggtt

SEQ ID NO: 17200 - DNA, 21 bp, Artificial Sequence
  Description of Artificial Sequence: Synthetic oligonucleotide
gggagggatcctgttcgtcat

SEQ ID NO: 17201 - DNA, 21 bp, Artificial Sequence
  Description of Artificial Sequence: Synthetic oligonucleotide
gggcgtgagcatatgcatacg

SEQ ID NO: 17202 - DNA, 21 bp, Artificial Sequence
  Description of Artificial Sequence: Synthetic oligonucleotide
gggagggagcttttgcattct

SEQ ID NO: 17203 - DNA, 21 bp, Artificial Sequence
  Description of Artificial Sequence: Synthetic oligonucleotide
ggtcgtgagtcgcagattccg

SEQ ID NO: 17204 - DNA, 21 bp, Artificial Sequence
  Description of Artificial Sequence: Synthetic oligonucleotide
gggcgtgagtctgtgacgtct

SEQ ID NO: 17205 - DNA, 21 bp, Artificial Sequence
  Description of Artificial Sequence: Synthetic oligonucleotide
ggtcgtgagtatgttggtaat

SEQ ID NO: 17206 - DNA, 21 bp, Artificial Sequence
  Description of Artificial Sequence: Synthetic oligonucleotide
gggcgttttgggactagtgat

SEQ ID NO: 17207 - DNA, 21 bp, Artificial Sequence
  Description of Artificial Sequence: Synthetic oligonucleotide
gggcggggtgctcagcctggg

SEQ ID NO: 17208 - DNA, 21 bp, Artificial Sequence
  Description of Artificial Sequence: Synthetic oligonucleotide
ggtaggggtgataatccggct

SEQ ID NO: 17209 - DNA, 21 bp, Artificial Sequence
  Description of Artificial Sequence: Synthetic oligonucleotide
ggtcggggtgaggctggtctt

SEQ ID NO: 17210 - DNA, 21 bp, Artificial Sequence
  Description of Artificial Sequence: Synthetic oligonucleotide
ggtagggggggggagagtgtg

SEQ ID NO: 17211 - DNA, 21 bp, Artificial Sequence
  Description of Artificial Sequence: Synthetic oligonucleotide
ggtcgtggtctgcctatgagt

SEQ ID NO: 17212 - DNA, 21 bp, Artificial Sequence
  Description of Artificial Sequence: Synthetic oligonucleotide
ggtcgggggcctcctccgcct

SEQ ID NO: 17213 - DNA, 21 bp, Artificial Sequence
  Description of Artificial Sequence: Synthetic oligonucleotide
gggcgtgggcagtctgcttct

SEQ ID NO: 17214 - DNA, 21 bp, Artificial Sequence
  Description of Artificial Sequence: Synthetic oligonucleotide
gggaggggtactcctccggat

SEQ ID NO: 17215 - DNA, 21 bp, Artificial Sequence
  Description of Artificial Sequence: Synthetic oligonucleotide
gggcgtattgcgcctgttcct

SEQ ID NO: 17216 - DNA, 21 bp, Artificial Sequence
  Description of Artificial Sequence: Synthetic oligonucleotide
ggtcgtatttatacggcggag

SEQ ID NO: 17217 - DNA, 21 bp, Artificial Sequence
  Description of Artificial Sequence: Synthetic oligonucleotide
ggtcgtttgttgccggaggtg

SEQ ID NO: 17218 - DNA, 21 bp, Artificial Sequence
  Description of Artificial Sequence: Synthetic oligonucleotide
ggtaggcttcctgcgtcgttg

SEQ ID NO: 17219 - DNA, 21 bp, Artificial Sequence
  Description of Artificial Sequence: Synthetic oligonucleotide
ggtaggatggagggtgggggt

SEQ ID NO: 17220 - DNA, 21 bp, Artificial Sequence
  Description of Artificial Sequence: Synthetic oligonucleotide
ggtcgtatggagaatactgtt

SEQ ID NO: 17221 - DNA, 21 bp, Artificial Sequence
  Description of Artificial Sequence: Synthetic oligonucleotide
gggcggatgatgaatagtagt

SEQ ID NO: 17222 - DNA, 21 bp, Artificial Sequence
  Description of Artificial Sequence: Synthetic oligonucleotide
ggtaggatggttactggtgag

SEQ ID NO: 17223 - DNA, 21 bp, Artificial Sequence
  Description of Artificial Sequence: Synthetic oligonucleotide
ggtaggaatgatgcttatgcg

SEQ ID NO: 17224 - DNA, 21 bp, Artificial Sequence
  Description of Artificial Sequence: Synthetic oligonucleotide
ggtcggaatgagccttggtcg

SEQ ID NO: 17225 - DNA, 21 bp, Artificial Sequence
  Description of Artificial Sequence: Synthetic oligonucleotide
gggcggaatccgcctctgtat

SEQ ID NO: 17226 - DNA, 21 bp, Artificial Sequence
  Description of Artificial Sequence: Synthetic oligonucleotide
ggtcggaatccgccgagtgcg

SEQ ID NO: 17227 - DNA, 21 bp, Artificial Sequence
  Description of Artificial Sequence: Synthetic oligonucleotide
gggaggaattcgaattatgat

SEQ ID NO: 17228 - DNA, 21 bp, Artificial Sequence
  Description of Artificial Sequence: Synthetic oligonucleotide
gggaggaatgttgcgggtctt

SEQ ID NO: 17229 - DNA, 21 bp, Artificial Sequence
  Description of Artificial Sequence: Synthetic oligonucleotide
ggtcggcctgatacggagcat

SEQ ID NO: 17230 - DNA, 21 bp, Artificial Sequence
  Description of Artificial Sequence: Synthetic oligonucleotide
gggcgtcctcttcctacgagt

SEQ ID NO: 17231 - DNA, 21 bp, Artificial Sequence
  Description of Artificial Sequence: Synthetic oligonucleotide
ggtaggcctttgcaggctcct

SEQ ID NO: 17232 - DNA, 21 bp, Artificial Sequence
  Description of Artificial Sequence: Synthetic oligonucleotide
ggtaggccgcctcttcttcct

SEQ ID NO: 17233 - DNA, 21 bp, Artificial Sequence
  Description of Artificial Sequence: Synthetic oligonucleotide
gggaggcctcctagtatgtcg

SEQ ID NO: 17234 - DNA, 21 bp, Artificial Sequence
  Description of Artificial Sequence: Synthetic oligonucleotide
ggtcggccgcctactgataag

SEQ ID NO: 17235 - DNA, 21 bp, Artificial Sequence
  Description of Artificial Sequence: Synthetic oligonucleotide
ggtaggcaggatcatccgggt

SEQ ID NO: 17236 - DNA, 21 bp, Artificial Sequence
  Description of Artificial Sequence: Synthetic oligonucleotide
ggtcggcagcttgcgtgtaat

SEQ ID NO: 17237 - DNA, 21 bp, Artificial Sequence
  Description of Artificial Sequence: Synthetic oligonucleotide
ggtcggcagatgggtattacg

SEQ ID NO: 17238 - DNA, 21 bp, Artificial Sequence
  Description of Artificial Sequence: Synthetic oligonucleotide
gggcggcagccgagtggggag

SEQ ID NO: 17239 - DNA, 21 bp, Artificial Sequence
  Description of Artificial Sequence: Synthetic oligonucleotide
ggtaggcagagtgtttcgaat

SEQ ID NO: 17240 - DNA, 21 bp, Artificial Sequence
  Description of Artificial Sequence: Synthetic oligonucleotide
gggcgtcaggttgattttgtt

SEQ ID NO: 17241 - DNA, 21 bp, Artificial Sequence
  Description of Artificial Sequence: Synthetic oligonucleotide
gggcgttcggatttgagtaat

SEQ ID NO: 17242 - DNA, 21 bp, Artificial Sequence
  Description of Artificial Sequence: Synthetic oligonucleotide
ggtaggtctgagtataatcag

SEQ ID NO: 17243 - DNA, 21 bp, Artificial Sequence
  Description of Artificial Sequence: Synthetic oligonucleotide
gggaggagtattatgtctgag

SEQ ID NO: 17244 - DNA, 21 bp, Artificial Sequence
  Description of Artificial Sequence: Synthetic oligonucleotide
ggtaggagtctgttgcgtgag

SEQ ID NO: 17245 - DNA, 21 bp, Artificial Sequence
  Description of Artificial Sequence: Synthetic oligonucleotide
ggtcggtctcctattcagagt

SEQ ID NO: 17246 - DNA, 21 bp, Artificial Sequence
  Description of Artificial Sequence: Synthetic oligonucleotide
ggtcgttcgtctgtggcgact

SEQ ID NO: 17247 - DNA, 21 bp, Artificial Sequence
  Description of Artificial Sequence: Synthetic oligonucleotide
ggtcgtagtgtgcagcatctg

SEQ ID NO: 17248 - DNA, 21 bp, Artificial Sequence
  Description of Artificial Sequence: Synthetic oligonucleotide
ggtcgtactggttcgcctggg

SEQ ID NO: 17249 - DNA, 21 bp, Artificial Sequence
  Description of Artificial Sequence: Synthetic oligonucleotide
gggcgtacttctggttcgtcg

SEQ ID NO: 17250 - DNA, 21 bp, Artificial Sequence
  Description of Artificial Sequence: Synthetic oligonucleotide
ggtcggactagtatggcgact

SEQ ID NO: 17251 - DNA, 21 bp, Artificial Sequence
  Description of Artificial Sequence: Synthetic oligonucleotide
ggtcggacgtctcgtgctgag

SEQ ID NO: 17252 - DNA, 21 bp, Artificial Sequence
  Description of Artificial Sequence: Synthetic oligonucleotide
ggtaggacgtatcagattcct

SEQ ID NO: 17253 - DNA, 21 bp, Artificial Sequence
  Description of Artificial Sequence: Synthetic oligonucleotide
ggtcgggttctgctgttggat

SEQ ID NO: 17254 - DNA, 21 bp, Artificial Sequence
  Description of Artificial Sequence: Synthetic oligonucleotide
ggtcgggttcaggttcctcct

SEQ ID NO: 17255 - DNA, 21 bp, Artificial Sequence
  Description of Artificial Sequence: Synthetic oligonucleotide
ggtcgtgttgtttatattgat

SEQ ID NO: 17256 - DNA, 21 bp, Artificial Sequence
  Description of Artificial Sequence: Synthetic oligonucleotide
gggcgttatatggctccgctg

SEQ ID NO: 17257 - DNA, 21 bp, Artificial Sequence
  Description of Artificial Sequence: Synthetic oligonucleotide
ggtcgttatagggcgggtcag

SEQ ID NO: 17258 - DNA, 21 bp, Artificial Sequence
  Description of Artificial Sequence: Synthetic oligonucleotide
ggttcggcgattagtgagctt

SEQ ID NO: 17259 - DNA, 21 bp, Artificial Sequence
  Description of Artificial Sequence: Synthetic oligonucleotide
gggagtgctctgcctacgcgt

SEQ ID NO: 17260 - DNA, 21 bp, Artificial Sequence
  Description of Artificial Sequence: Synthetic oligonucleotide
ggtagtgcgcctgtggtgctt

SEQ ID NO: 17261 - DNA, 21 bp, Artificial Sequence
  Description of Artificial Sequence: Synthetic oligonucleotide
gggtcggcgcagggtgctcgg

SEQ ID NO: 17262 - DNA, 21 bp, Artificial Sequence
  Description of Artificial Sequence: Synthetic oligonucleotide
gggtctgcgcggactcatcct

SEQ ID NO: 17263 - DNA, 21 bp, Artificial Sequence
  Description of Artificial Sequence: Synthetic oligonucleotide
gggtcggcgagtcctatgatg

SEQ ID NO: 17264 - DNA, 21 bp, Artificial Sequence
  Description of Artificial Sequence: Synthetic oligonucleotide
ggttcggcttctagtgggttt

SEQ ID NO: 17265 - DNA, 21 bp, Artificial Sequence
  Description of Artificial Sequence: Synthetic oligonucleotide
gggtctgatgggttttctaat

SEQ ID NO: 17266 - DNA, 21 bp, Artificial Sequence
  Description of Artificial Sequence: Synthetic oligonucleotide
ggttctgatgggcagaagggt

SEQ ID NO: 17267 - DNA, 21 bp, Artificial Sequence
  Description of Artificial Sequence: Synthetic oligonucleotide
gggtctgatcggattgtttcg

SEQ ID NO: 17268 - DNA, 21 bp, Artificial Sequence
  Description of Artificial Sequence: Synthetic oligonucleotide
gggtcggatactccttcgcct

SEQ ID NO: 17269 - DNA, 21 bp, Artificial Sequence
  Description of Artificial Sequence: Synthetic oligonucleotide
gggtctgatactactgagatt

SEQ ID NO: 17270 - DNA, 21 bp, Artificial Sequence
  Description of Artificial Sequence: Synthetic oligonucleotide
ggtagtgatgttattcatgag

SEQ ID NO: 17271 - DNA, 21 bp, Artificial Sequence
  Description of Artificial Sequence: Synthetic oligonucleotide
ggttcggaggttgtggcgtgt

SEQ ID NO: 17272 - DNA, 21 bp, Artificial Sequence
  Description of Artificial Sequence: Synthetic oligonucleotide
gggtcttttacttctcagatt

SEQ ID NO: 17273 - DNA, 21 bp, Artificial Sequence
  Description of Artificial Sequence: Synthetic oligonucleotide
ggtagtgggcttattaggggg

SEQ ID NO: 17274 - DNA, 21 bp, Artificial Sequence
  Description of Artificial Sequence: Synthetic oligonucleotide
ggttcggggaatgatgtgctg

SEQ ID NO: 17275 - DNA, 21 bp, Artificial Sequence
  Description of Artificial Sequence: Synthetic oligonucleotide
ggttcgggtccgaataagtct

SEQ ID NO: 17276 - DNA, 21 bp, Artificial Sequence
  Description of Artificial Sequence: Synthetic oligonucleotide
gggtctggtccgactattcgt

SEQ ID NO: 17277 - DNA, 21 bp, Artificial Sequence
  Description of Artificial Sequence: Synthetic oligonucleotide
gggtctggtccggttgagcat

SEQ ID NO: 17278 - DNA, 21 bp, Artificial Sequence
  Description of Artificial Sequence: Synthetic oligonucleotide
gggtctgggtcttcgcagact

SEQ ID NO: 17279 - DNA, 21 bp, Artificial Sequence
  Description of Artificial Sequence: Synthetic oligonucleotide
ggttctggttcgacgtcgggg

SEQ ID NO: 17280 - DNA, 21 bp, Artificial Sequence
  Description of Artificial Sequence: Synthetic oligonucleotide
ggtagtggtacgtatactgtg

SEQ ID NO: 17281 - DNA, 21 bp, Artificial Sequence
  Description of Artificial Sequence: Synthetic oligonucleotide
gggagtcatgcggttacttct

SEQ ID NO: 17282 - DNA, 21 bp, Artificial Sequence
  Description of Artificial Sequence: Synthetic oligonucleotide
gggtctcatcattctcctcat

SEQ ID NO: 17283 - DNA, 21 bp, Artificial Sequence
  Description of Artificial Sequence: Synthetic oligonucleotide
ggtagtcatattacgccgctg

SEQ ID NO: 17284 - DNA, 21 bp, Artificial Sequence
  Description of Artificial Sequence: Synthetic oligonucleotide
ggttctcatcctattgtgcgt

SEQ ID NO: 17285 - DNA, 21 bp, Artificial Sequence
  Description of Artificial Sequence: Synthetic oligonucleotide
gggtctcatcctaggggggag

SEQ ID NO: 17286 - DNA, 21 bp, Artificial Sequence
  Description of Artificial Sequence: Synthetic oligonucleotide
ggttcgcatcagggtcagtct

SEQ ID NO: 17287 - DNA, 21 bp, Artificial Sequence
  Description of Artificial Sequence: Synthetic oligonucleotide
ggttcgcattctgggggtcct

SEQ ID NO: 17288 - DNA, 21 bp, Artificial Sequence
  Description of Artificial Sequence: Synthetic oligonucleotide
ggttcgcattcgcctgctatg

SEQ ID NO: 17289 - DNA, 21 bp, Artificial Sequence
  Description of Artificial Sequence: Synthetic oligonucleotide
ggttctcatacgtggacggag

SEQ ID NO: 17290 - DNA, 21 bp, Artificial Sequence
  Description of Artificial Sequence: Synthetic oligonucleotide
gggtcgattggggagcaggtt

SEQ ID NO: 17291 - DNA, 21 bp, Artificial Sequence
  Description of Artificial Sequence: Synthetic oligonucleotide
gggagtattcaggttacggct

SEQ ID NO: 17292 - DNA, 21 bp, Artificial Sequence
  Description of Artificial Sequence: Synthetic oligonucleotide
ggttcgattgttcttcatgag

SEQ ID NO: 17293 - DNA, 21 bp, Artificial Sequence
  Description of Artificial Sequence: Synthetic oligonucleotide
gggtctaagaatcaggagaag

SEQ ID NO: 17294 - DNA, 21 bp, Artificial Sequence
  Description of Artificial Sequence: Synthetic oligonucleotide
gggtcgaagccttttttgtcg

SEQ ID NO: 17295 - DNA, 21 bp, Artificial Sequence
  Description of Artificial Sequence: Synthetic oligonucleotide
gggtcgaagcgtcaggatcag

SEQ ID NO: 17296 - DNA, 21 bp, Artificial Sequence
  Description of Artificial Sequence: Synthetic oligonucleotide
ggttctaagtcttttgggtcg

SEQ ID NO: 17297 - DNA, 21 bp, Artificial Sequence
  Description of Artificial Sequence: Synthetic oligonucleotide
ggttcgaagacgtttttgtct

SEQ ID NO: 17298 - DNA, 21 bp, Artificial Sequence
  Description of Artificial Sequence: Synthetic oligonucleotide
ggttcgaaggtggctggtctg

SEQ ID NO: 17299 - DNA, 21 bp, Artificial Sequence
  Description of Artificial Sequence: Synthetic oligonucleotide
ggttctaaggttgggcctttg

SEQ ID NO: 17300 - DNA, 21 bp, Artificial Sequence
  Description of Artificial Sequence: Synthetic oligonucleotide
ggtagtttggagcagcgttat

SEQ ID NO: 17301 - DNA, 21 bp, Artificial Sequence
  Description of Artificial Sequence: Synthetic oligonucleotide
ggtagtttgggtcatatgagg

SEQ ID NO: 17302 - DNA, 21 bp, Artificial Sequence
  Description of Artificial Sequence: Synthetic oligonucleotide
ggttcgcttggtactcattct

SEQ ID NO: 17303 - DNA, 21 bp, Artificial Sequence
  Description of Artificial Sequence: Synthetic oligonucleotide
gggtcgttgattgctgcgcag

SEQ ID NO: 17304 - DNA, 21 bp, Artificial Sequence
  Description of Artificial Sequence: Synthetic oligonucleotide
gggtcgctgaatcctgttccg

SEQ ID NO: 17305 - DNA, 21 bp, Artificial Sequence
  Description of Artificial Sequence: Synthetic oligonucleotide
gggtctttgccttattcgtct

SEQ ID NO: 17306 - DNA, 21 bp, Artificial Sequence
  Description of Artificial Sequence: Synthetic oligonucleotide
gggtcgttgtataggacggag

SEQ ID NO: 17307 - DNA, 21 bp, Artificial Sequence
  Description of Artificial Sequence: Synthetic oligonucleotide
ggttcgatggcttatcttggt

SEQ ID NO: 17308 - DNA, 21 bp, Artificial Sequence
  Description of Artificial Sequence: Synthetic oligonucleotide
gggtcgatgcttgctcatcct

SEQ ID NO: 17309 - DNA, 21 bp, Artificial Sequence
  Description of Artificial Sequence: Synthetic oligonucleotide
gggtcgatgaatcctccttct

SEQ ID NO: 17310 - DNA, 21 bp, Artificial Sequence
  Description of Artificial Sequence: Synthetic oligonucleotide
gggagtatgccggttattgtt

SEQ ID NO: 17311 - DNA, 21 bp, Artificial Sequence
  Description of Artificial Sequence: Synthetic oligonucleotide
ggtagtatgcggcctggtgag

SEQ ID NO: 17312 - DNA, 21 bp, Artificial Sequence
  Description of Artificial Sequence: Synthetic oligonucleotide
ggttcgatgtctagtgctaat

SEQ ID NO: 17313 - DNA, 21 bp, Artificial Sequence
  Description of Artificial Sequence: Synthetic oligonucleotide
ggttctatgacttctttgatt

SEQ ID NO: 17314 - DNA, 21 bp, Artificial Sequence
  Description of Artificial Sequence: Synthetic oligonucleotide
gggagtatgtatgctgttccg

SEQ ID NO: 17315 - DNA, 21 bp, Artificial Sequence
  Description of Artificial Sequence: Synthetic oligonucleotide
ggttctaatggtggtattagt

SEQ ID NO: 17316 - DNA, 21 bp, Artificial Sequence
  Description of Artificial Sequence: Synthetic oligonucleotide
gggtcgaatcctatgtcgttg

SEQ ID NO: 17317 - DNA, 21 bp, Artificial Sequence
  Description of Artificial Sequence: Synthetic oligonucleotide
ggtagtcctgcgatggctcat

SEQ ID NO: 17318 - DNA, 21 bp, Artificial Sequence
  Description of Artificial Sequence: Synthetic oligonucleotide
ggtagtcctgggagggtggcg

SEQ ID NO: 17319 - DNA, 21 bp, Artificial Sequence
  Description of Artificial Sequence: Synthetic oligonucleotide
ggttctccgattggggggatg

SEQ ID NO: 17320 - DNA, 21 bp, Artificial Sequence
  Description of Artificial Sequence: Synthetic oligonucleotide
gggtctcctaagccgcatgtt

SEQ ID NO: 17321 - DNA, 21 bp, Artificial Sequence
  Description of Artificial Sequence: Synthetic oligonucleotide
gggagtccgatgggttatacg

SEQ ID NO: 17322 - DNA, 21 bp, Artificial Sequence
  Description of Artificial Sequence: Synthetic oligonucleotide
gggagtccgatgcctattatt

SEQ ID NO: 17323 - DNA, 21 bp, Artificial Sequence
  Description of Artificial Sequence: Synthetic oligonucleotide
ggttctcctaattcttgtatg

SEQ ID NO: 17324 - DNA, 21 bp, Artificial Sequence
  Description of Artificial Sequence: Synthetic oligonucleotide
ggttctccgcctacgctgagg

SEQ ID NO: 17325 - DNA, 21 bp, Artificial Sequence
  Description of Artificial Sequence: Synthetic oligonucleotide
gggtcgccgcggtcgctttct

SEQ ID NO: 17326 - DNA, 21 bp, Artificial Sequence
  Description of Artificial Sequence: Synthetic oligonucleotide
gggtctccgcgggtggggact

SEQ ID NO: 17327 - DNA, 21 bp, Artificial Sequence
  Description of Artificial Sequence: Synthetic oligonucleotide
ggttcgccttcgccgatgcgg

SEQ ID NO: 17328 - DNA, 21 bp, Artificial Sequence
  Description of Artificial Sequence: Synthetic oligonucleotide
ggttctcctactacgggtagt

SEQ ID NO: 17329 - DNA, 21 bp, Artificial Sequence
  Description of Artificial Sequence: Synthetic oligonucleotide
ggttcgccgtattctcaggct

SEQ ID NO: 17330 - DNA, 21 bp, Artificial Sequence
  Description of Artificial Sequence: Synthetic oligonucleotide
gggtctcagcttcatccggtt

SEQ ID NO: 17331 - DNA, 21 bp, Artificial Sequence
  Description of Artificial Sequence: Synthetic oligonucleotide
gggtctcagcctattcggacg

SEQ ID NO: 17332 - DNA, 21 bp, Artificial Sequence
  Description of Artificial Sequence: Synthetic oligonucleotide
ggtagtcagcagttggcggcg

SEQ ID NO: 17333 - DNA, 21 bp, Artificial Sequence
  Description of Artificial Sequence: Synthetic oligonucleotide
gggtctcgggcgtctgatcct

SEQ ID NO: 17334 - DNA, 21 bp, Artificial Sequence
  Description of Artificial Sequence: Synthetic oligonucleotide
ggtagtcgtctgcagcatgat

SEQ ID NO: 17335 - DNA, 21 bp, Artificial Sequence
  Description of Artificial Sequence: Synthetic oligonucleotide
gggagtaggaattttcctact

SEQ ID NO: 17336 - DNA, 21 bp, Artificial Sequence
  Description of Artificial Sequence: Synthetic oligonucleotide
gggagtcgtaattatattgct

SEQ ID NO: 17337 - DNA, 21 bp, Artificial Sequence
  Description of Artificial Sequence: Synthetic oligonucleotide
ggttcgcgtcctgggagtttg

SEQ ID NO: 17338 - DNA, 21 bp, Artificial Sequence
  Description of Artificial Sequence: Synthetic oligonucleotide
ggttcgaggcagcctgctgat

SEQ ID NO: 17339 - DNA, 21 bp, Artificial Sequence
  Description of Artificial Sequence: Synthetic oligonucleotide
gggagtcgtacgtttactggg

SEQ ID NO: 17340 - DNA, 21 bp, Artificial Sequence
  Description of Artificial Sequence: Synthetic oligonucleotide
ggttctcggactgggccgact

SEQ ID NO: 17341 - DNA, 21 bp, Artificial Sequence
  Description of Artificial Sequence: Synthetic oligonucleotide
gggtcgcgtgttagtggggag

SEQ ID NO: 17342 - DNA, 21 bp, Artificial Sequence
  Description of Artificial Sequence: Synthetic oligonucleotide
gggtcgtcggcgacggtgttt

SEQ ID NO: 17343 - DNA, 21 bp, Artificial Sequence
  Description of Artificial Sequence: Synthetic oligonucleotide
ggtagttcggatacttgtgtt

SEQ ID NO: 17344 - DNA, 21 bp, Artificial Sequence
  Description of Artificial Sequence: Synthetic oligonucleotide
gggagttcgggtattgcgcgg

SEQ ID NO: 17345 - DNA, 21 bp, Artificial Sequence
  Description of Artificial Sequence: Synthetic oligonucleotide
gggtcttctcatgggattctt

SEQ ID NO: 17346 - DNA, 21 bp, Artificial Sequence
  Description of Artificial Sequence: Synthetic oligonucleotide
gggtcttctatgcctccgccg

SEQ ID NO: 17347 - DNA, 21 bp, Artificial Sequence
  Description of Artificial Sequence: Synthetic oligonucleotide
gggagtagtcctgctcggacg

SEQ ID NO: 17348 - DNA, 21 bp, Artificial Sequence
  Description of Artificial Sequence: Synthetic oligonucleotide
ggttcgtcgcctctgcataag

SEQ ID NO: 17349 - DNA, 21 bp, Artificial Sequence
  Description of Artificial Sequence: Synthetic oligonucleotide
ggttctagtcctgtgggtgct

SEQ ID NO: 17350 - DNA, 21 bp, Artificial Sequence
  Description of Artificial Sequence: Synthetic oligonucleotide
gggagttctcagttgtttctt

SEQ ID NO: 17351 - DNA, 21 bp, Artificial Sequence
  Description of Artificial Sequence: Synthetic oligonucleotide
ggttctagtagggctgatgcg

SEQ ID NO: 17352 - DNA, 21 bp, Artificial Sequence
  Description of Artificial Sequence: Synthetic oligonucleotide
gggtcttcttctcatgtgtcg

SEQ ID NO: 17353 - DNA, 21 bp, Artificial Sequence
  Description of Artificial Sequence: Synthetic oligonucleotide
ggtagttcgtctattgcgtct

SEQ ID NO: 17354 - DNA, 21 bp, Artificial Sequence
  Description of Artificial Sequence: Synthetic oligonucleotide
gggtcgtcgtctttgcattcg

SEQ ID NO: 17355 - DNA, 21 bp, Artificial Sequence
  Description of Artificial Sequence: Synthetic oligonucleotide
ggttctagttcgaatgctcgg

SEQ ID NO: 17356 - DNA, 21 bp, Artificial Sequence
  Description of Artificial Sequence: Synthetic oligonucleotide
ggtagttcttatcattcgcct

SEQ ID NO: 17357 - DNA, 21 bp, Artificial Sequence
  Description of Artificial Sequence: Synthetic oligonucleotide
gggagtacgggtgataggcag

SEQ ID NO: 17358 - DNA, 21 bp, Artificial Sequence
  Description of Artificial Sequence: Synthetic oligonucleotide
gggtctacgggtaatactgtg

SEQ ID NO: 17359 - DNA, 21 bp, Artificial Sequence
  Description of Artificial Sequence: Synthetic oligonucleotide
ggtagtactggtagtgctgct

SEQ ID NO: 17360 - DNA, 21 bp, Artificial Sequence
  Description of Artificial Sequence: Synthetic oligonucleotide
ggttcgacgggttctgggcat

SEQ ID NO: 17361 - DNA, 21 bp, Artificial Sequence
  Description of Artificial Sequence: Synthetic oligonucleotide
ggtagtacgatgacgattgcg

SEQ ID NO: 17362 - DNA, 21 bp, Artificial Sequence
  Description of Artificial Sequence: Synthetic oligonucleotide
ggttcgacgaatgagttggtg

SEQ ID NO: 17363 - DNA, 21 bp, Artificial Sequence
  Description of Artificial Sequence: Synthetic oligonucleotide
ggttcgactaatcctctggct

SEQ ID NO: 17364 - DNA, 21 bp, Artificial Sequence
  Description of Artificial Sequence: Synthetic oligonucleotide
ggtagtactaatcggctggcg

SEQ ID NO: 17365 - DNA, 21 bp, Artificial Sequence
  Description of Artificial Sequence: Synthetic oligonucleotide
gggtctactaattcgcctgcg

SEQ ID NO: 17366 - DNA, 21 bp, Artificial Sequence
  Description of Artificial Sequence: Synthetic oligonucleotide
gggtcgactccgcttccgctg

SEQ ID NO: 17367 - DNA, 21 bp, Artificial Sequence
  Description of Artificial Sequence: Synthetic oligonucleotide
ggtagtactcaggggtctggt

SEQ ID NO: 17368 - DNA, 21 bp, Artificial Sequence
  Description of Artificial Sequence: Synthetic oligonucleotide
ggttcgacgtctaaggatagg

SEQ ID NO: 17369 - DNA, 21 bp, Artificial Sequence
  Description of Artificial Sequence: Synthetic oligonucleotide
ggttctacttcttctcgtacg

SEQ ID NO: 17370 - DNA, 21 bp, Artificial Sequence
  Description of Artificial Sequence: Synthetic oligonucleotide
ggttcgactacgcggccgcag

SEQ ID NO: 17371 - DNA, 21 bp, Artificial Sequence
  Description of Artificial Sequence: Synthetic oligonucleotide
ggttcgacgtggtcgagtccg

SEQ ID NO: 17372 - DNA, 21 bp, Artificial Sequence
  Description of Artificial Sequence: Synthetic oligonucleotide
ggttctacgtatgcttctatg

SEQ ID NO: 17373 - DNA, 21 bp, Artificial Sequence
  Description of Artificial Sequence: Synthetic oligonucleotide
gggtctgtggcggatcgggtg

SEQ ID NO: 17374 - DNA, 21 bp, Artificial Sequence
  Description of Artificial Sequence: Synthetic oligonucleotide
ggttctgttgcgactaatccg

SEQ ID NO: 17375 - DNA, 21 bp, Artificial Sequence
  Description of Artificial Sequence: Synthetic oligonucleotide
gggagtgttgaggagtctcgg

SEQ ID NO: 17376 - DNA, 21 bp, Artificial Sequence
  Description of Artificial Sequence: Synthetic oligonucleotide
gggtctgtgaatccgaggtcg

SEQ ID NO: 17377 - DNA, 21 bp, Artificial Sequence
  Description of Artificial Sequence: Synthetic oligonucleotide
gggagtgttccggatagtcgg

SEQ ID NO: 17378 - DNA, 21 bp, Artificial Sequence
  Description of Artificial Sequence: Synthetic oligonucleotide
gggagtgtgccgaatgtgatt

SEQ ID NO: 17379 - DNA, 21 bp, Artificial Sequence
  Description of Artificial Sequence: Synthetic oligonucleotide
ggttctgtgcagattcggcct

SEQ ID NO: 17380 - DNA, 21 bp, Artificial Sequence
  Description of Artificial Sequence: Synthetic oligonucleotide
ggttcttatgctaatgctgcg

SEQ ID NO: 17381 - DNA, 21 bp, Artificial Sequence
  Description of Artificial Sequence: Synthetic oligonucleotide
ggtactgctgatctggttccg

SEQ ID NO: 17382 - DNA, 21 bp, Artificial Sequence
  Description of Artificial Sequence: Synthetic oligonucleotide
ggtacggctcatctgaagcct

SEQ ID NO: 17383 - DNA, 21 bp, Artificial Sequence
  Description of Artificial Sequence: Synthetic oligonucleotide
gggacggcgaatcgtaatgct

SEQ ID NO: 17384 - DNA, 21 bp, Artificial Sequence
  Description of Artificial Sequence: Synthetic oligonucleotide
ggtactgctccttctgttatg

SEQ ID NO: 17385 - DNA, 21 bp, Artificial Sequence
  Description of Artificial Sequence: Synthetic oligonucleotide
ggtactgcggttcagcgtctt

SEQ ID NO: 17386 - DNA, 21 bp, Artificial Sequence
  Description of Artificial Sequence: Synthetic oligonucleotide
gggactgattttgtgccgagt

SEQ ID NO: 17387 - DNA, 21 bp, Artificial Sequence
  Description of Artificial Sequence: Synthetic oligonucleotide
gggacggatattcggatgcct

SEQ ID NO: 17388 - DNA, 21 bp, Artificial Sequence
  Description of Artificial Sequence: Synthetic oligonucleotide
ggtactgaggagtttgggtat

SEQ ID NO: 17389 - DNA, 21 bp, Artificial Sequence
  Description of Artificial Sequence: Synthetic oligonucleotide
ggtactgagcatactacggcg

SEQ ID NO: 17390 - DNA, 21 bp, Artificial Sequence
  Description of Artificial Sequence: Synthetic oligonucleotide
gggacggagtcgaatgggcgg

SEQ ID NO: 17391 - DNA, 21 bp, Artificial Sequence
  Description of Artificial Sequence: Synthetic oligonucleotide
gggacggagtataatacttgt

SEQ ID NO: 17392 - DNA, 21 bp, Artificial Sequence
  Description of Artificial Sequence: Synthetic oligonucleotide
ggtacgtttggtacgacggcg

SEQ ID NO: 17393 - DNA, 21 bp, Artificial Sequence
  Description of Artificial Sequence: Synthetic oligonucleotide
ggtacttttaaggctagtcat

SEQ ID NO: 17394 - DNA, 21 bp, Artificial Sequence
  Description of Artificial Sequence: Synthetic oligonucleotide
ggtactgggggggtgaagatt

SEQ ID NO: 17395 - DNA, 21 bp, Artificial Sequence
  Description of Artificial Sequence: Synthetic oligonucleotide
gggacgggtattaatcatttg

SEQ ID NO: 17396 - DNA, 21 bp, Artificial Sequence
  Description of Artificial Sequence: Synthetic oligonucleotide
ggtactggtaagcctatgggt

SEQ ID NO: 17397 - DNA, 21 bp, Artificial Sequence
  Description of Artificial Sequence: Synthetic oligonucleotide
ggtacggggaatgttggtgct

SEQ ID NO: 17398 - DNA, 21 bp, Artificial Sequence
  Description of Artificial Sequence: Synthetic oligonucleotide
gggactggtccgtctgttcct

SEQ ID NO: 17399 - DNA, 21 bp, Artificial Sequence
  Description of Artificial Sequence: Synthetic oligonucleotide
ggtacgggtcgggatggtagt

SEQ ID NO: 17400 - DNA, 21 bp, Artificial Sequence
  Description of Artificial Sequence: Synthetic oligonucleotide
ggtacgggttcgagggtggtg

SEQ ID NO: 17401 - DNA, 21 bp, Artificial Sequence
  Description of Artificial Sequence: Synthetic oligonucleotide
ggtacgatttatgggccggtg

SEQ ID NO: 17402 - DNA, 21 bp, Artificial Sequence
  Description of Artificial Sequence: Synthetic oligonucleotide
gggactaagctttatactact

SEQ ID NO: 17403 - DNA, 21 bp, Artificial Sequence
  Description of Artificial Sequence: Synthetic oligonucleotide
ggtactaagtatgctgcttct

SEQ ID NO: 17404 - DNA, 21 bp, Artificial Sequence
  Description of Artificial Sequence: Synthetic oligonucleotide
gggacgctggatactgtgatt

SEQ ID NO: 17405 - DNA, 21 bp, Artificial Sequence
  Description of Artificial Sequence: Synthetic oligonucleotide
gggactcttgagtattctatg

SEQ ID NO: 17406 - DNA, 21 bp, Artificial Sequence
  Description of Artificial Sequence: Synthetic oligonucleotide
ggtacgcttggttgtcgggag

SEQ ID NO: 17407 - DNA, 21 bp, Artificial Sequence
  Description of Artificial Sequence: Synthetic oligonucleotide
gggacgctgggtcttcgtcag

SEQ ID NO: 17408 - DNA, 21 bp, Artificial Sequence
  Description of Artificial Sequence: Synthetic oligonucleotide
ggtacgttgcatgggagtgag

SEQ ID NO: 17409 - DNA, 21 bp, Artificial Sequence
  Description of Artificial Sequence: Synthetic oligonucleotide
ggtactcttaattatgcttcg

SEQ ID NO: 17410 - DNA, 21 bp, Artificial Sequence
  Description of Artificial Sequence: Synthetic oligonucleotide
ggtactttgtctggtcttgag

SEQ ID NO: 17411 - DNA, 21 bp, Artificial Sequence
  Description of Artificial Sequence: Synthetic oligonucleotide
gggacgcttactcctactatg

SEQ ID NO: 17412 - DNA, 21 bp, Artificial Sequence
  Description of Artificial Sequence: Synthetic oligonucleotide
gggacgatgaatgtggttatt

SEQ ID NO: 17413 - DNA, 21 bp, Artificial Sequence
  Description of Artificial Sequence: Synthetic oligonucleotide
gggactatgagtcttggtccg

SEQ ID NO: 17414 - DNA, 21 bp, Artificial Sequence
  Description of Artificial Sequence: Synthetic oligonucleotide
gggacgatgactaattctgcg

SEQ ID NO: 17415 - DNA, 21 bp, Artificial Sequence
  Description of Artificial Sequence: Synthetic oligonucleotide
ggtacgaatggtctgatgctg

SEQ ID NO: 17416 - DNA, 21 bp, Artificial Sequence
  Description of Artificial Sequence: Synthetic oligonucleotide
ggtacgaatgggctgccggcg

SEQ ID NO: 17417 - DNA, 21 bp, Artificial Sequence
  Description of Artificial Sequence: Synthetic oligonucleotide
ggtacgaatcatgcgcagaag

SEQ ID NO: 17418 - DNA, 21 bp, Artificial Sequence
  Description of Artificial Sequence: Synthetic oligonucleotide
gggacgaatccggttcttact

SEQ ID NO: 17419 - DNA, 21 bp, Artificial Sequence
  Description of Artificial Sequence: Synthetic oligonucleotide
ggtactccggctcatgctgcg

SEQ ID NO: 17420 - DNA, 21 bp, Artificial Sequence
  Description of Artificial Sequence: Synthetic oligonucleotide
gggactccggagaggcttccg

SEQ ID NO: 17421 - DNA, 21 bp, Artificial Sequence
  Description of Artificial Sequence: Synthetic oligonucleotide
gggacgcctatgactcagggg

SEQ ID NO: 17422 - DNA, 21 bp, Artificial Sequence
  Description of Artificial Sequence: Synthetic oligonucleotide
ggtactccgaataatcgtaat

SEQ ID NO: 17423 - DNA, 21 bp, Artificial Sequence
  Description of Artificial Sequence: Synthetic oligonucleotide
ggtacgccgaatgttcatggg

SEQ ID NO: 17424 - DNA, 21 bp, Artificial Sequence
  Description of Artificial Sequence: Synthetic oligonucleotide
ggtactccgccgggtccttct

SEQ ID NO: 17425 - DNA, 21 bp, Artificial Sequence
  Description of Artificial Sequence: Synthetic oligonucleotide
ggtacgccgcctacgcgtttg

SEQ ID NO: 17426 - DNA, 21 bp, Artificial Sequence
  Description of Artificial Sequence: Synthetic oligonucleotide
gggactcctgttgttgattgt

SEQ ID NO: 17427 - DNA, 21 bp, Artificial Sequence
  Description of Artificial Sequence: Synthetic oligonucleotide
gggactcaggcggagaggcag

SEQ ID NO: 17428 - DNA, 21 bp, Artificial Sequence
  Description of Artificial Sequence: Synthetic oligonucleotide
gggactcaggctcgtatttgt

SEQ ID NO: 17429 - DNA, 21 bp, Artificial Sequence
  Description of Artificial Sequence: Synthetic oligonucleotide
ggtacgcagatggcgagggct

SEQ ID NO: 17430 - DNA, 21 bp, Artificial Sequence
  Description of Artificial Sequence: Synthetic oligonucleotide
ggtacgcagagtacttatgat

SEQ ID NO: 17431 - DNA, 21 bp, Artificial Sequence
  Description of Artificial Sequence: Synthetic oligonucleotide
ggtacgcgtccggcgcatgtg

SEQ ID NO: 17432 - DNA, 21 bp, Artificial Sequence
  Description of Artificial Sequence: Synthetic oligonucleotide
gggacgaggagtacttttgcg

SEQ ID NO: 17433 - DNA, 21 bp, Artificial Sequence
  Description of Artificial Sequence: Synthetic oligonucleotide
gggactcgtactgttgttctg

SEQ ID NO: 17434 - DNA, 21 bp, Artificial Sequence
  Description of Artificial Sequence: Synthetic oligonucleotide
ggtactcgtgttcttagttat

SEQ ID NO: 17435 - DNA, 21 bp, Artificial Sequence
  Description of Artificial Sequence: Synthetic oligonucleotide
ggtacttctgggtattcgcct

SEQ ID NO: 17436 - DNA, 21 bp, Artificial Sequence
  Description of Artificial Sequence: Synthetic oligonucleotide
gggacttcgaatttgagtccg

SEQ ID NO: 17437 - DNA, 21 bp, Artificial Sequence
  Description of Artificial Sequence: Synthetic oligonucleotide
ggtacgtctccggatcagaag

SEQ ID NO: 17438 - DNA, 21 bp, Artificial Sequence
  Description of Artificial Sequence: Synthetic oligonucleotide
ggtactagtccggtgatgtgt

SEQ ID NO: 17439 - DNA, 21 bp, Artificial Sequence
  Description of Artificial Sequence: Synthetic oligonucleotide
ggtactagtcagaagctgcct

SEQ ID NO: 17440 - DNA, 21 bp, Artificial Sequence
  Description of Artificial Sequence: Synthetic oligonucleotide
gggacgtctcagaagacgagt

SEQ ID NO: 17441 - DNA, 21 bp, Artificial Sequence
  Description of Artificial Sequence: Synthetic oligonucleotide
gggacttcgtcgcgtgctcct

SEQ ID NO: 17442 - DNA, 21 bp, Artificial Sequence
  Description of Artificial Sequence: Synthetic oligonucleotide
gggactagttcgtcggggctg

SEQ ID NO: 17443 - DNA, 21 bp, Artificial Sequence
  Description of Artificial Sequence: Synthetic oligonucleotide
gggacgacggagattcattcg

SEQ ID NO: 17444 - DNA, 21 bp, Artificial Sequence
  Description of Artificial Sequence: Synthetic oligonucleotide
ggtacgactcatactaatatt

SEQ ID NO: 17445 - DNA, 21 bp, Artificial Sequence
  Description of Artificial Sequence: Synthetic oligonucleotide
ggtactactaagctggggcct

SEQ ID NO: 17446 - DNA, 21 bp, Artificial Sequence
  Description of Artificial Sequence: Synthetic oligonucleotide
gggactactatggtgcctgct

SEQ ID NO: 17447 - DNA, 21 bp, Artificial Sequence
  Description of Artificial Sequence: Synthetic oligonucleotide
ggtacgactaatcttgcgggt

SEQ ID NO: 17448 - DNA, 21 bp, Artificial Sequence
  Description of Artificial Sequence: Synthetic oligonucleotide
ggtacgacgaataatatgttt

SEQ ID NO: 17449 - DNA, 21 bp, Artificial Sequence
  Description of Artificial Sequence: Synthetic oligonucleotide
ggtacgactaataataatgct

SEQ ID NO: 17450 - DNA, 21 bp, Artificial Sequence
  Description of Artificial Sequence: Synthetic oligonucleotide
ggtacgacttctgctgagagt

SEQ ID NO: 17451 - DNA, 21 bp, Artificial Sequence
  Description of Artificial Sequence: Synthetic oligonucleotide
gggactactagtcctaagtcg

SEQ ID NO: 17452 - DNA, 21 bp, Artificial Sequence
  Description of Artificial Sequence: Synthetic oligonucleotide
gggactacgtcttcgcatgag

SEQ ID NO: 17453 - DNA, 21 bp, Artificial Sequence
  Description of Artificial Sequence: Synthetic oligonucleotide
ggtacgactactgggcattct

SEQ ID NO: 17454 - DNA, 21 bp, Artificial Sequence
  Description of Artificial Sequence: Synthetic oligonucleotide
ggtactgttgatcgggggcag

SEQ ID NO: 17455 - DNA, 21 bp, Artificial Sequence
  Description of Artificial Sequence: Synthetic oligonucleotide
ggtacggtgggtcttaatgtg

SEQ ID NO: 17456 - DNA, 21 bp, Artificial Sequence
  Description of Artificial Sequence: Synthetic oligonucleotide
ggtacggtggggtctgatcgt

SEQ ID NO: 17457 - DNA, 21 bp, Artificial Sequence
  Description of Artificial Sequence: Synthetic oligonucleotide
gggactgttcataataatttg

SEQ ID NO: 17458 - DNA, 21 bp, Artificial Sequence
  Description of Artificial Sequence: Synthetic oligonucleotide
ggtactgtgcatacgaatgct

SEQ ID NO: 17459 - DNA, 21 bp, Artificial Sequence
  Description of Artificial Sequence: Synthetic oligonucleotide
ggtactgttccggagggtccg

SEQ ID NO: 17460 - DNA, 21 bp, Artificial Sequence
  Description of Artificial Sequence: Synthetic oligonucleotide
gggacggttcagaagtcggat

SEQ ID NO: 17461 - DNA, 21 bp, Artificial Sequence
  Description of Artificial Sequence: Synthetic oligonucleotide
gggactgttaggagtgctgtg

SEQ ID NO: 17462 - DNA, 21 bp, Artificial Sequence
  Description of Artificial Sequence: Synthetic oligonucleotide
gggacttatgcgaatgctgtt

SEQ ID NO: 17463 - DNA, 21 bp, Artificial Sequence
  Description of Artificial Sequence: Synthetic oligonucleotide
ggtacgtatgtggagtctact

SEQ ID NO: 17464 - DNA, 21 bp, Artificial Sequence
  Description of Artificial Sequence: Synthetic oligonucleotide
ggggtggctcatgagaagaat

SEQ ID NO: 17465 - DNA, 21 bp, Artificial Sequence
  Description of Artificial Sequence: Synthetic oligonucleotide
ggggttgcgaagttgctggcg

SEQ ID NO: 17466 - DNA, 21 bp, Artificial Sequence
  Description of Artificial Sequence: Synthetic oligonucleotide
ggtgtggcgtcgtctcctggg

SEQ ID NO: 17467 - DNA, 21 bp, Artificial Sequence
  Description of Artificial Sequence: Synthetic oligonucleotide
ggggtggcttctactcgtgct

SEQ ID NO: 17468 - DNA, 21 bp, Artificial Sequence
  Description of Artificial Sequence: Synthetic oligonucleotide
ggtgttgcgacgcttacgctg

SEQ ID NO: 17469 - DNA, 21 bp, Artificial Sequence
  Description of Artificial Sequence: Synthetic oligonucleotide
ggtgtggctgttacggagcgg

SEQ ID NO: 17470 - DNA, 21 bp, Artificial Sequence
  Description of Artificial Sequence: Synthetic oligonucleotide
ggtgtttgtgctgagtcttgg

SEQ ID NO: 17471 - DNA, 21 bp, Artificial Sequence
  Description of Artificial Sequence: Synthetic oligonucleotide
ggtgttgatgtgaagtggagt

SEQ ID NO: 17472 - DNA, 21 bp, Artificial Sequence
  Description of Artificial Sequence: Synthetic oligonucleotide
ggggtggaggctatgcgtgcg

SEQ ID NO: 17473 - DNA, 21 bp, Artificial Sequence
  Description of Artificial Sequence: Synthetic oligonucleotide
ggggttgagcataatgattcg

SEQ ID NO: 17474 - DNA, 21 bp, Artificial Sequence
  Description of Artificial Sequence: Synthetic oligonucleotide
ggggtttttaaggagactggt

SEQ ID NO: 17475 - DNA, 21 bp, Artificial Sequence
  Description of Artificial Sequence: Synthetic oligonucleotide
ggggtgggtgctagtcatatt

SEQ ID NO: 17476 - DNA, 21 bp, Artificial Sequence
  Description of Artificial Sequence: Synthetic oligonucleotide
ggtgtgggggcttcgcgtagt

SEQ ID NO: 17477 - DNA, 21 bp, Artificial Sequence
  Description of Artificial Sequence: Synthetic oligonucleotide
ggggtgggtaatatgcctgat

SEQ ID NO: 17478 - DNA, 21 bp, Artificial Sequence
  Description of Artificial Sequence: Synthetic oligonucleotide
ggggtgggtcaggtgcggtct

SEQ ID NO: 17479 - DNA, 21 bp, Artificial Sequence
  Description of Artificial Sequence: Synthetic oligonucleotide
ggtgtgcatttgagttctcct

SEQ ID NO: 17480 - DNA, 21 bp, Artificial Sequence
  Description of Artificial Sequence: Synthetic oligonucleotide
ggtgtgcattcgatggttgag

SEQ ID NO: 17481 - DNA, 21 bp, Artificial Sequence
  Description of Artificial Sequence: Synthetic oligonucleotide
ggggtgcatgttaagccggag

SEQ ID NO: 17482 - DNA, 21 bp, Artificial Sequence
  Description of Artificial Sequence: Synthetic oligonucleotide
ggtgtgattgctcatcattcg

SEQ ID NO: 17483 - DNA, 21 bp, Artificial Sequence
  Description of Artificial Sequence: Synthetic oligonucleotide
ggggtgattcttgctcggatg

SEQ ID NO: 17484 - DNA, 21 bp, Artificial Sequence
  Description of Artificial Sequence: Synthetic oligonucleotide
ggggtgattaatccgacgctg

SEQ ID NO: 17485 - DNA, 21 bp, Artificial Sequence
  Description of Artificial Sequence: Synthetic oligonucleotide
ggtgttaaggcttcgattctg

SEQ ID NO: 17486 - DNA, 21 bp, Artificial Sequence
  Description of Artificial Sequence: Synthetic oligonucleotide
ggtgttaagtttgggggttct

SEQ ID NO: 17487 - DNA, 21 bp, Artificial Sequence
  Description of Artificial Sequence: Synthetic oligonucleotide
ggggtgaagcatgggcattat

SEQ ID NO: 17488 - DNA, 21 bp, Artificial Sequence
  Description of Artificial Sequence: Synthetic oligonucleotide
ggggttaagctgtcgccgtct

SEQ ID NO: 17489 - DNA, 21 bp, Artificial Sequence
  Description of Artificial Sequence: Synthetic oligonucleotide
ggtgttaagcctgatcctgtt

SEQ ID NO: 17490 - DNA, 21 bp, Artificial Sequence
  Description of Artificial Sequence: Synthetic oligonucleotide
ggtgtgcttggtccgcctctg

SEQ ID NO: 17491 - DNA, 21 bp, Artificial Sequence
  Description of Artificial Sequence: Synthetic oligonucleotide
ggtgtgcttcggatgtcgagt

SEQ ID NO: 17492 - DNA, 21 bp, Artificial Sequence
  Description of Artificial Sequence: Synthetic oligonucleotide
ggtgtgctgactaatattttg

SEQ ID NO: 17493 - DNA, 21 bp, Artificial Sequence
  Description of Artificial Sequence: Synthetic oligonucleotide
ggggttaatgagcggaatgtg

SEQ ID NO: 17494 - DNA, 21 bp, Artificial Sequence
  Description of Artificial Sequence: Synthetic oligonucleotide
ggtgtgaatattacgagtttg

SEQ ID NO: 17495 - DNA, 21 bp, Artificial Sequence
  Description of Artificial Sequence: Synthetic oligonucleotide
ggggtgaatccttctcgtctt

SEQ ID NO: 17496 - DNA, 21 bp, Artificial Sequence
  Description of Artificial Sequence: Synthetic oligonucleotide
ggtgtgccggctacttcgtat

SEQ ID NO: 17497 - DNA, 21 bp, Artificial Sequence
  Description of Artificial Sequence: Synthetic oligonucleotide
ggtgttccgggtatttcggcg

SEQ ID NO: 17498 - DNA, 21 bp, Artificial Sequence
  Description of Artificial Sequence: Synthetic oligonucleotide
ggtgttccgattcagactcct

SEQ ID NO: 17499 - DNA, 21 bp, Artificial Sequence
  Description of Artificial Sequence: Synthetic oligonucleotide
ggggtgcgtgatatgggtctt

SEQ ID NO: 17500 - DNA, 21 bp, Artificial Sequence
  Description of Artificial Sequence: Synthetic oligonucleotide
ggtgtgaggggggcgcctctg

SEQ ID NO: 17501 - DNA, 21 bp, Artificial Sequence
  Description of Artificial Sequence: Synthetic oligonucleotide
ggtgtgcggttggatgctact

SEQ ID NO: 17502 - DNA, 21 bp, Artificial Sequence
  Description of Artificial Sequence: Synthetic oligonucleotide
ggggttaggctgaatgagact

SEQ ID NO: 17503 - DNA, 21 bp, Artificial Sequence
  Description of Artificial Sequence: Synthetic oligonucleotide
ggtgtgaggttgcagaatgcg

SEQ ID NO: 17504 - DNA, 21 bp, Artificial Sequence
  Description of Artificial Sequence: Synthetic oligonucleotide
ggtgttcgtagtcatactatg

SEQ ID NO: 17505 - DNA, 21 bp, Artificial Sequence
  Description of Artificial Sequence: Synthetic oligonucleotide
ggggtttcgtttcagtctatg

SEQ ID NO: 17506 - DNA, 21 bp, Artificial Sequence
  Description of Artificial Sequence: Synthetic oligonucleotide
ggggtttctaagattgattcg

SEQ ID NO: 17507 - DNA, 21 bp, Artificial Sequence
  Description of Artificial Sequence: Synthetic oligonucleotide
ggggttagtaggtctgctaat

SEQ ID NO: 17508 - DNA, 21 bp, Artificial Sequence
  Description of Artificial Sequence: Synthetic oligonucleotide
ggtgtttcgtcttctcagcgg

SEQ ID NO: 17509 - DNA, 21 bp, Artificial Sequence
  Description of Artificial Sequence: Synthetic oligonucleotide
ggtgtgtcttctgtgcagagt

SEQ ID NO: 17510 - DNA, 21 bp, Artificial Sequence
  Description of Artificial Sequence: Synthetic oligonucleotide
ggtgttagtactgcgaggatt

SEQ ID NO: 17511 - DNA, 21 bp, Artificial Sequence
  Description of Artificial Sequence: Synthetic oligonucleotide
ggtgttagtgtttcgcgtccg

SEQ ID NO: 17512 - DNA, 21 bp, Artificial Sequence
  Description of Artificial Sequence: Synthetic oligonucleotide
ggggttactaaggctgtgtcg

SEQ ID NO: 17513 - DNA, 21 bp, Artificial Sequence
  Description of Artificial Sequence: Synthetic oligonucleotide
ggtgtgactccttcttatagt

SEQ ID NO: 17514 - DNA, 21 bp, Artificial Sequence
  Description of Artificial Sequence: Synthetic oligonucleotide
ggggtgactcaggctacggcg

SEQ ID NO: 17515 - DNA, 21 bp, Artificial Sequence
  Description of Artificial Sequence: Synthetic oligonucleotide
ggggtgacgagtggtgggggt

SEQ ID NO: 17516 - DNA, 21 bp, Artificial Sequence
  Description of Artificial Sequence: Synthetic oligonucleotide
ggtgttactagtacgtctagt

SEQ ID NO: 17517 - DNA, 21 bp, Artificial Sequence
  Description of Artificial Sequence: Synthetic oligonucleotide
ggggttacgacgtctattcat

SEQ ID NO: 17518 - DNA, 21 bp, Artificial Sequence
  Description of Artificial Sequence: Synthetic oligonucleotide
ggtgtgacgacttattctgcg

SEQ ID NO: 17519 - DNA, 21 bp, Artificial Sequence
  Description of Artificial Sequence: Synthetic oligonucleotide
ggggttgtgggttctcatcat

SEQ ID NO: 17520 - DNA, 21 bp, Artificial Sequence
  Description of Artificial Sequence: Synthetic oligonucleotide
ggggtggtgcatactcgtact

SEQ ID NO: 17521 - DNA, 21 bp, Artificial Sequence
  Description of Artificial Sequence: Synthetic oligonucleotide
gggtgggctttgacgaatggg

SEQ ID NO: 17522 - DNA, 21 bp, Artificial Sequence
  Description of Artificial Sequence: Synthetic oligonucleotide
ggttgggagccgacgagtgat

SEQ ID NO: 17523 - DNA, 21 bp, Artificial Sequence
  Description of Artificial Sequence: Synthetic oligonucleotide
gggtggggtgcggagactatt

SEQ ID NO: 17524 - DNA, 21 bp, Artificial Sequence
  Description of Artificial Sequence: Synthetic oligonucleotide
ggttggggtcttgtgaatgat

SEQ ID NO: 17525 - DNA, 21 bp, Artificial Sequence
  Description of Artificial Sequence: Synthetic oligonucleotide
ggttggcatcctgcgctgccg

SEQ ID NO: 17526 - DNA, 21 bp, Artificial Sequence
  Description of Artificial Sequence: Synthetic oligonucleotide
gggtggaagggtcatgctgat

SEQ ID NO: 17527 - DNA, 21 bp, Artificial Sequence
  Description of Artificial Sequence: Synthetic oligonucleotide
gggtggaatgctgatgcttcg

SEQ ID NO: 17528 - DNA, 21 bp, Artificial Sequence
  Description of Artificial Sequence: Synthetic oligonucleotide
gggtggaatgtggatggtctg

SEQ ID NO: 17529 - DNA, 21 bp, Artificial Sequence
  Description of Artificial Sequence: Synthetic oligonucleotide
gggtggccgccgaagtatgag

SEQ ID NO: 17530 - DNA, 21 bp, Artificial Sequence
  Description of Artificial Sequence: Synthetic oligonucleotide
gggtggcagggtcataatctg

SEQ ID NO: 17531 - DNA, 21 bp, Artificial Sequence
  Description of Artificial Sequence: Synthetic oligonucleotide
ggttggcgtgaggttgtggat

SEQ ID NO: 17532 - DNA, 21 bp, Artificial Sequence
  Description of Artificial Sequence: Synthetic oligonucleotide
gggtggcgttctgagcttgag

SEQ ID NO: 17533 - DNA, 21 bp, Artificial Sequence
  Description of Artificial Sequence: Synthetic oligonucleotide
gggtggtctagtgcgggtcat

SEQ ID NO: 17534 - DNA, 21 bp, Artificial Sequence
  Description of Artificial Sequence: Synthetic oligonucleotide
gggtatgcgatgcctgttcct

SEQ ID NO: 17535 - DNA, 21 bp, Artificial Sequence
  Description of Artificial Sequence: Synthetic oligonucleotide
gggtatgctatgtcttctagt

SEQ ID NO: 17536 - DNA, 21 bp, Artificial Sequence
  Description of Artificial Sequence: Synthetic oligonucleotide
gggtatgctactactgttcat

SEQ ID NO: 17537 - DNA, 21 bp, Artificial Sequence
  Description of Artificial Sequence: Synthetic oligonucleotide
ggttatgattttaatccgggg

SEQ ID NO: 17538 - DNA, 21 bp, Artificial Sequence
  Description of Artificial Sequence: Synthetic oligonucleotide
gggtatggtcctatgcgtcag

SEQ ID NO: 17539 - DNA, 21 bp, Artificial Sequence
  Description of Artificial Sequence: Synthetic oligonucleotide
ggttatgggcaggcgtatact

SEQ ID NO: 17540 - DNA, 21 bp, Artificial Sequence
  Description of Artificial Sequence: Synthetic oligonucleotide
ggttatattcatgtgtctggt

SEQ ID NO: 17541 - DNA, 21 bp, Artificial Sequence
  Description of Artificial Sequence: Synthetic oligonucleotide
ggttataagacggcgacgcag

SEQ ID NO: 17542 - DNA, 21 bp, Artificial Sequence
  Description of Artificial Sequence: Synthetic oligonucleotide
gggtatttgcctgtggatcat

SEQ ID NO: 17543 - DNA, 21 bp, Artificial Sequence
  Description of Artificial Sequence: Synthetic oligonucleotide
ggttatctgtcggagactcat

SEQ ID NO: 17544 - DNA, 21 bp, Artificial Sequence
  Description of Artificial Sequence: Synthetic oligonucleotide
gggtatctttctaagatgcct

SEQ ID NO: 17545 - DNA, 21 bp, Artificial Sequence
  Description of Artificial Sequence: Synthetic oligonucleotide
gggtatctgactgagaggctg

SEQ ID NO: 17546 - DNA, 21 bp, Artificial Sequence
  Description of Artificial Sequence: Synthetic oligonucleotide
gggtatatgattaagatgcct

SEQ ID NO: 17547 - DNA, 21 bp, Artificial Sequence
  Description of Artificial Sequence: Synthetic oligonucleotide
gggtatccttctcatgctgcg

SEQ ID NO: 17548 - DNA, 21 bp, Artificial Sequence
  Description of Artificial Sequence: Synthetic oligonucleotide
gggtatcctagtaaggggcct

SEQ ID NO: 17549 - DNA, 21 bp, Artificial Sequence
  Description of Artificial Sequence: Synthetic oligonucleotide
gggtatccgactgcgtcggcg

SEQ ID NO: 17550 - DNA, 21 bp, Artificial Sequence
  Description of Artificial Sequence: Synthetic oligonucleotide
ggttatccggttgggccggcg

SEQ ID NO: 17551 - DNA, 21 bp, Artificial Sequence
  Description of Artificial Sequence: Synthetic oligonucleotide
gggtatcagtcgcgttgtgcg

SEQ ID NO: 17552 - DNA, 21 bp, Artificial Sequence
  Description of Artificial Sequence: Synthetic oligonucleotide
ggttatcgggctacggagacg

SEQ ID NO: 17553 - DNA, 21 bp, Artificial Sequence
  Description of Artificial Sequence: Synthetic oligonucleotide
ggttatcgtttgatgcctgag

SEQ ID NO: 17554 - DNA, 21 bp, Artificial Sequence
  Description of Artificial Sequence: Synthetic oligonucleotide
gggtatcgttcgaatgagacg

SEQ ID NO: 17555 - DNA, 21 bp, Artificial Sequence
  Description of Artificial Sequence: Synthetic oligonucleotide
ggttattctctgccggttact

SEQ ID NO: 17556 - DNA, 21 bp, Artificial Sequence
  Description of Artificial Sequence: Synthetic oligonucleotide
ggttattcgaataataagcct

SEQ ID NO: 17557 - DNA, 21 bp, Artificial Sequence
  Description of Artificial Sequence: Synthetic oligonucleotide
gggtatacttcggggcagccg

SEQ ID NO: 17558 - DNA, 21 bp, Artificial Sequence
  Description of Artificial Sequence: Synthetic oligonucleotide
ggttatgttccggtttcgcag

SEQ ID NO: 17559 - DNA, 21 bp, Artificial Sequence
  Description of Artificial Sequence: Synthetic oligonucleotide
gggtattgggcttcgtctaat

SEQ ID NO: 17560 - DNA, 21 bp, Artificial Sequence
  Description of Artificial Sequence: Synthetic oligonucleotide
catgctgcggctcagccgtcg

SEQ ID NO: 17561 - DNA, 21 bp, Artificial Sequence
  Description of Artificial Sequence: Synthetic oligonucleotide
catgcggctcatcagagtctg

SEQ ID NO: 17562 - DNA, 21 bp, Artificial Sequence
  Description of Artificial Sequence: Synthetic oligonucleotide
catgctgcgtcgcctatggtt

SEQ ID NO: 17563 - DNA, 21 bp, Artificial Sequence
  Description of Artificial Sequence: Synthetic oligonucleotide
catgcggcgtcttctgtgccg

SEQ ID NO: 17564 - DNA, 21 bp, Artificial Sequence
  Description of Artificial Sequence: Synthetic oligonucleotide
catgctgagtctgcgcatccg

SEQ ID NO: 17565 - DNA, 21 bp, Artificial Sequence
  Description of Artificial Sequence: Synthetic oligonucleotide
catgctgggactgtgaagatg

SEQ ID NO: 17566 - DNA, 21 bp, Artificial Sequence
  Description of Artificial Sequence: Synthetic oligonucleotide
catgcgcatttgacgccttcg

SEQ ID NO: 17567 - DNA, 21 bp, Artificial Sequence
  Description of Artificial Sequence: Synthetic oligonucleotide
catgcgattcctactctgctt

SEQ ID NO: 17568 - DNA, 21 bp, Artificial Sequence
  Description of Artificial Sequence: Synthetic oligonucleotide
catgcgaagtcgcggaatgag

SEQ ID NO: 17569 - DNA, 21 bp, Artificial Sequence
  Description of Artificial Sequence: Synthetic oligonucleotide
catgcgaagtctgtttctgct

SEQ ID NO: 17570 - DNA, 21 bp, Artificial Sequence
  Description of Artificial Sequence: Synthetic oligonucleotide
catgcgaagactgctctgacg

SEQ ID NO: 17571 - DNA, 21 bp, Artificial Sequence
  Description of Artificial Sequence: Synthetic oligonucleotide
catgcgaaggttatgcgtgat

SEQ ID NO: 17572 - DNA, 21 bp, Artificial Sequence
  Description of Artificial Sequence: Synthetic oligonucleotide
catgctcttgagcattttccg

SEQ ID NO: 17573 - DNA, 21 bp, Artificial Sequence
  Description of Artificial Sequence: Synthetic oligonucleotide
catgctctgaggaatacgatg

SEQ ID NO: 17574 - DNA, 21 bp, Artificial Sequence
  Description of Artificial Sequence: Synthetic oligonucleotide
catgcgctgtctgattcgcct

SEQ ID NO: 17575 - DNA, 21 bp, Artificial Sequence
  Description of Artificial Sequence: Synthetic oligonucleotide
catgcgatgagttcgaatgtg

SEQ ID NO: 17576 - DNA, 21 bp, Artificial Sequence
  Description of Artificial Sequence: Synthetic oligonucleotide
catgcgaataagcatacgcag

SEQ ID NO: 17577 - DNA, 21 bp, Artificial Sequence
  Description of Artificial Sequence: Synthetic oligonucleotide
catgcgaataatgatccgcat

SEQ ID NO: 17578 - DNA, 21 bp, Artificial Sequence
  Description of Artificial Sequence: Synthetic oligonucleotide
catgctaatcctttgaatggt

SEQ ID NO: 17579 - DNA, 21 bp, Artificial Sequence
  Description of Artificial Sequence: Synthetic oligonucleotide
catgctaatcctgtggttggg

SEQ ID NO: 17580 - DNA, 21 bp, Artificial Sequence
  Description of Artificial Sequence: Synthetic oligonucleotide
catgctaatagtactactagg

SEQ ID NO: 17581 - DNA, 21 bp, Artificial Sequence
  Description of Artificial Sequence: Synthetic oligonucleotide
catgctaatactacgaatact

SEQ ID NO: 17582 - DNA, 21 bp, Artificial Sequence
  Description of Artificial Sequence: Synthetic oligonucleotide
catgctccgcctaattatgcg

SEQ ID NO: 17583 - DNA, 21 bp, Artificial Sequence
  Description of Artificial Sequence: Synthetic oligonucleotide
catgctcagctttctgggacg

SEQ ID NO: 17584 - DNA, 21 bp, Artificial Sequence
  Description of Artificial Sequence: Synthetic oligonucleotide
catgcgcagcagggtgggttg

SEQ ID NO: 17585 - DNA, 21 bp, Artificial Sequence
  Description of Artificial Sequence: Synthetic oligonucleotide
catgctcaggtggagactctg

SEQ ID NO: 17586 - DNA, 21 bp, Artificial Sequence
  Description of Artificial Sequence: Synthetic oligonucleotide
catgcgcgtgatagttcgcct

SEQ ID NO: 17587 - DNA, 21 bp, Artificial Sequence
  Description of Artificial Sequence: Synthetic oligonucleotide
catgctcgggatacttttcct

SEQ ID NO: 17588 - DNA, 21 bp, Artificial Sequence
  Description of Artificial Sequence: Synthetic oligonucleotide
catgcgcgtattgattcgtct

SEQ ID NO: 17589 - DNA, 21 bp, Artificial Sequence
  Description of Artificial Sequence: Synthetic oligonucleotide
catgctcggcctgggggtctg

SEQ ID NO: 17590 - DNA, 21 bp, Artificial Sequence
  Description of Artificial Sequence: Synthetic oligonucleotide
catgctcgggtggaggctact

SEQ ID NO: 17591 - DNA, 21 bp, Artificial Sequence
  Description of Artificial Sequence: Synthetic oligonucleotide
catgcttcgggtcctgatcat

SEQ ID NO: 17592 - DNA, 21 bp, Artificial Sequence
  Description of Artificial Sequence: Synthetic oligonucleotide
catgcttcgctttcgctttct

SEQ ID NO: 17593 - DNA, 21 bp, Artificial Sequence
  Description of Artificial Sequence: Synthetic oligonucleotide
catgcttctaattcgcagcat

SEQ ID NO: 17594 - DNA, 21 bp, Artificial Sequence
  Description of Artificial Sequence: Synthetic oligonucleotide
catgcttcgccgggtcagacg

SEQ ID NO: 17595 - DNA, 21 bp, Artificial Sequence
  Description of Artificial Sequence: Synthetic oligonucleotide
catgctagtcgtattggggtg

SEQ ID NO: 17596 - DNA, 21 bp, Artificial Sequence
  Description of Artificial Sequence: Synthetic oligonucleotide
catgcgtctagtaagcctgat

SEQ ID NO: 17597 - DNA, 21 bp, Artificial Sequence
  Description of Artificial Sequence: Synthetic oligonucleotide
catgcttcttcgacgcgtcag

SEQ ID NO: 17598 - DNA, 21 bp, Artificial Sequence
  Description of Artificial Sequence: Synthetic oligonucleotide
catgcttctacggtgcggact

SEQ ID NO: 17599 - DNA, 21 bp, Artificial Sequence
  Description of Artificial Sequence: Synthetic oligonucleotide
catgctactgatcagccgcat

SEQ ID NO: 17600 - DNA, 21 bp, Artificial Sequence
  Description of Artificial Sequence: Synthetic oligonucleotide
catgcgactgagatggttagg

SEQ ID NO: 17601 - DNA, 21 bp, Artificial Sequence
  Description of Artificial Sequence: Synthetic oligonucleotide
catgcgactattcggacgcat

SEQ ID NO: 17602 - DNA, 21 bp, Artificial Sequence
  Description of Artificial Sequence: Synthetic oligonucleotide
catgctacgtctaagctgacg

SEQ ID NO: 17603 - DNA, 21 bp, Artificial Sequence
  Description of Artificial Sequence: Synthetic oligonucleotide
catgctgttgatcataagtcg

SEQ ID NO: 17604 - DNA, 21 bp, Artificial Sequence
  Description of Artificial Sequence: Synthetic oligonucleotide
catgctgtggagcttgctgat

SEQ ID NO: 17605 - DNA, 21 bp, Artificial Sequence
  Description of Artificial Sequence: Synthetic oligonucleotide
catgcttatactttggatggt

SEQ ID NO: 17606 - DNA, 21 bp, Artificial Sequence
  Description of Artificial Sequence: Synthetic oligonucleotide
catgatgcgagtgtgcatagg

SEQ ID NO: 17607 - DNA, 21 bp, Artificial Sequence
  Description of Artificial Sequence: Synthetic oligonucleotide
catgatgatgcttggacggct

SEQ ID NO: 17608 - DNA, 21 bp, Artificial Sequence
  Description of Artificial Sequence: Synthetic oligonucleotide
catgatggtcgtgtgaatctt

SEQ ID NO: 17609 - DNA, 21 bp, Artificial Sequence
  Description of Artificial Sequence: Synthetic oligonucleotide
catgatgggagtcgttctacg

SEQ ID NO: 17610 - DNA, 21 bp, Artificial Sequence
  Description of Artificial Sequence: Synthetic oligonucleotide
catgatcatctggggacgcct

SEQ ID NO: 17611 - DNA, 21 bp, Artificial Sequence
  Description of Artificial Sequence: Synthetic oligonucleotide
catgatattgcgaagactaat

SEQ ID NO: 17612 - DNA, 21 bp, Artificial Sequence
  Description of Artificial Sequence: Synthetic oligonucleotide
catgatattgagtttaatact

SEQ ID NO: 17613 - DNA, 21 bp, Artificial Sequence
  Description of Artificial Sequence: Synthetic oligonucleotide
catgatctggcttataggcct

SEQ ID NO: 17614 - DNA, 21 bp, Artificial Sequence
  Description of Artificial Sequence: Synthetic oligonucleotide
catgatcttaatcctgagaat

SEQ ID NO: 17615 - DNA, 21 bp, Artificial Sequence
  Description of Artificial Sequence: Synthetic oligonucleotide
catgataatcggattaatgat

SEQ ID NO: 17616 - DNA, 21 bp, Artificial Sequence
  Description of Artificial Sequence: Synthetic oligonucleotide
catgatcctcatgcggttact

SEQ ID NO: 17617 - DNA, 21 bp, Artificial Sequence
  Description of Artificial Sequence: Synthetic oligonucleotide
catgatccgattcgtcttggt

SEQ ID NO: 17618 - DNA, 21 bp, Artificial Sequence
  Description of Artificial Sequence: Synthetic oligonucleotide
catgatccgatgatgttgttg

SEQ ID NO: 17619 - DNA, 21 bp, Artificial Sequence
  Description of Artificial Sequence: Synthetic oligonucleotide
catgatccttcggatggggcg

SEQ ID NO: 17620 - DNA, 21 bp, Artificial Sequence
  Description of Artificial Sequence: Synthetic oligonucleotide
catgatcgtattgctgggctt

SEQ ID NO: 17621 - DNA, 21 bp, Artificial Sequence
  Description of Artificial Sequence: Synthetic oligonucleotide
catgatcgggttagttctggt

SEQ ID NO: 17622 - DNA, 21 bp, Artificial Sequence
  Description of Artificial Sequence: Synthetic oligonucleotide
catgattctgcgaggcatccg

SEQ ID NO: 17623 - DNA, 21 bp, Artificial Sequence
  Description of Artificial Sequence: Synthetic oligonucleotide
catgattcgttgtcggagaag

SEQ ID NO: 17624 - DNA, 21 bp, Artificial Sequence
  Description of Artificial Sequence: Synthetic oligonucleotide
catgattctcggtttgctaat

SEQ ID NO: 17625 - DNA, 21 bp, Artificial Sequence
  Description of Artificial Sequence: Synthetic oligonucleotide
catgattcgactttgggttcg

SEQ ID NO: 17626 - DNA, 21 bp, Artificial Sequence
  Description of Artificial Sequence: Synthetic oligonucleotide
catgatactattcatgggatt

SEQ ID NO: 17627 - DNA, 21 bp, Artificial Sequence
  Description of Artificial Sequence: Synthetic oligonucleotide
catgatgtgccgaagaatccg

SEQ ID NO: 17628 - DNA, 21 bp, Artificial Sequence
  Description of Artificial Sequence: Synthetic oligonucleotide
catgattatccgcgtcagctt

SEQ ID NO: 17629 - DNA, 21 bp, Artificial Sequence
  Description of Artificial Sequence: Synthetic oligonucleotide
catgaggcgcttcttccgaat

SEQ ID NO: 17630 - DNA, 21 bp, Artificial Sequence
  Description of Artificial Sequence: Synthetic oligonucleotide
catgaggcgcttacgggtctg

SEQ ID NO: 17631 - DNA, 21 bp, Artificial Sequence
  Description of Artificial Sequence: Synthetic oligonucleotide
catgaggatggtagtgctatg

SEQ ID NO: 17632 - DNA, 21 bp, Artificial Sequence
  Description of Artificial Sequence: Synthetic oligonucleotide
catgagtttggtgtggcgttt

SEQ ID NO: 17633 - DNA, 21 bp, Artificial Sequence
  Description of Artificial Sequence: Synthetic oligonucleotide
catgagggggggcatccgtat

SEQ ID NO: 17634 - DNA, 21 bp, Artificial Sequence
  Description of Artificial Sequence: Synthetic oligonucleotide
catgagggtcatcgtggggtg

SEQ ID NO: 17635 - DNA, 21 bp, Artificial Sequence
  Description of Artificial Sequence: Synthetic oligonucleotide
catgagaaggtgcgggttcat

SEQ ID NO: 17636 - DNA, 21 bp, Artificial Sequence
  Description of Artificial Sequence: Synthetic oligonucleotide
catgagcaggctcggtctatt

SEQ ID NO: 17637 - DNA, 21 bp, Artificial Sequence
  Description of Artificial Sequence: Synthetic oligonucleotide
catgagcagtgtgaggcttat

SEQ ID NO: 17638 - DNA, 21 bp, Artificial Sequence
  Description of Artificial Sequence: Synthetic oligonucleotide
catgagcaggttgagaggcct

SEQ ID NO: 17639 - DNA, 21 bp, Artificial Sequence
  Description of Artificial Sequence: Synthetic oligonucleotide
catgagtctgatcagtttccg

SEQ ID NO: 17640 - DNA, 21 bp, Artificial Sequence
  Description of Artificial Sequence: Synthetic oligonucleotide
catgagacgagggttatgtcg

SEQ ID NO: 17641 - DNA, 21 bp, Artificial Sequence
  Description of Artificial Sequence: Synthetic oligonucleotide
catgaggttgggtttatgggt

SEQ ID NO: 17642 - DNA, 21 bp, Artificial Sequence
  Description of Artificial Sequence: Synthetic oligonucleotide
catgaggttaatcataatacg

SEQ ID NO: 17643 - DNA, 21 bp, Artificial Sequence
  Description of Artificial Sequence: Synthetic oligonucleotide
catgaggtgaggttttcgcag

SEQ ID NO: 17644 - DNA, 21 bp, Artificial Sequence
  Description of Artificial Sequence: Synthetic oligonucleotide
catgaggtttcggtgaagtgt

SEQ ID NO: 17645 - DNA, 21 bp, Artificial Sequence
  Description of Artificial Sequence: Synthetic oligonucleotide
catgaggtgtatcggaatatg

SEQ ID NO: 17646 - DNA, 21 bp, Artificial Sequence
  Description of Artificial Sequence: Synthetic oligonucleotide
cattttgcgcaggcgccttcg

SEQ ID NO: 17647 - DNA, 21 bp, Artificial Sequence
  Description of Artificial Sequence: Synthetic oligonucleotide
cattttggtagtagtattccg

SEQ ID NO: 17648 - DNA, 21 bp, Artificial Sequence
  Description of Artificial Sequence: Synthetic oligonucleotide
cattttgggactaatggtgat

SEQ ID NO: 17649 - DNA, 21 bp, Artificial Sequence
  Description of Artificial Sequence: Synthetic oligonucleotide
cattttaatgatgctacggtg

SEQ ID NO: 17650 - DNA, 21 bp, Artificial Sequence
  Description of Artificial Sequence: Synthetic oligonucleotide
cattttaatagttcgtctcgt

SEQ ID NO: 17651 - DNA, 21 bp, Artificial Sequence
  Description of Artificial Sequence: Synthetic oligonucleotide
cattttaggggtgcgatgttg

SEQ ID NO: 17652 - DNA, 21 bp, Artificial Sequence
  Description of Artificial Sequence: Synthetic oligonucleotide
catttttctcatgagaggtct

SEQ ID NO: 17653 - DNA, 21 bp, Artificial Sequence
  Description of Artificial Sequence: Synthetic oligonucleotide
catttttcgccgaaggggact

SEQ ID NO: 17654 - DNA, 21 bp, Artificial Sequence
  Description of Artificial Sequence: Synthetic oligonucleotide
catttttcgtcgactacgatt

SEQ ID NO: 17655 - DNA, 21 bp, Artificial Sequence
  Description of Artificial Sequence: Synthetic oligonucleotide
cattttacgtctcgtgagctt

SEQ ID NO: 17656 - DNA, 21 bp, Artificial Sequence
  Description of Artificial Sequence: Synthetic oligonucleotide
cattttacgtctacgccgtct

SEQ ID NO: 17657 - DNA, 21 bp, Artificial Sequence
  Description of Artificial Sequence: Synthetic oligonucleotide
cattttgttccgtcttctgct

SEQ ID NO: 17658 - DNA, 21 bp, Artificial Sequence
  Description of Artificial Sequence: Synthetic oligonucleotide
catggtgctgcggctcttgtt

SEQ ID NO: 17659 - DNA, 21 bp, Artificial Sequence
  Description of Artificial Sequence: Synthetic oligonucleotide
catggtgctaagctgcttagt

SEQ ID NO: 17660 - DNA, 21 bp, Artificial Sequence
  Description of Artificial Sequence: Synthetic oligonucleotide
catggtgctctgtcggaggct

SEQ ID NO: 17661 - DNA, 21 bp, Artificial Sequence
  Description of Artificial Sequence: Synthetic oligonucleotide
catggtgctaatcggctgacg

SEQ ID NO: 17662 - DNA, 21 bp, Artificial Sequence
  Description of Artificial Sequence: Synthetic oligonucleotide
catggtgatgggcattcgact

SEQ ID NO: 17663 - DNA, 21 bp, Artificial Sequence
  Description of Artificial Sequence: Synthetic oligonucleotide
catggggatcgtgctctgatg

SEQ ID NO: 17664 - DNA, 21 bp, Artificial Sequence
  Description of Artificial Sequence: Synthetic oligonucleotide
catggggatgtgaatcggacg

SEQ ID NO: 17665 - DNA, 21 bp, Artificial Sequence
  Description of Artificial Sequence: Synthetic oligonucleotide
catggtgagatgatggagtcg

SEQ ID NO: 17666 - DNA, 21 bp, Artificial Sequence
  Description of Artificial Sequence: Synthetic oligonucleotide
catggttttcatactggtagt

SEQ ID NO: 17667 - DNA, 21 bp, Artificial Sequence
  Description of Artificial Sequence: Synthetic oligonucleotide
catgggtttcagaatgtggat

SEQ ID NO: 17668 - DNA, 21 bp, Artificial Sequence
  Description of Artificial Sequence: Synthetic oligonucleotide
catggtggggaggtgacgttt

SEQ ID NO: 17669 - DNA, 21 bp, Artificial Sequence
  Description of Artificial Sequence: Synthetic oligonucleotide
catggtgggtttcggggtgag

SEQ ID NO: 17670 - DNA, 21 bp, Artificial Sequence
  Description of Artificial Sequence: Synthetic oligonucleotide
catggtcatttttctatggct

SEQ ID NO: 17671 - DNA, 21 bp, Artificial Sequence
  Description of Artificial Sequence: Synthetic oligonucleotide
catgggaagcatgtttttgtt

SEQ ID NO: 17672 - DNA, 21 bp, Artificial Sequence
  Description of Artificial Sequence: Synthetic oligonucleotide
catggtcttattgcggttgcg

SEQ ID NO: 17673 - DNA, 21 bp, Artificial Sequence
  Description of Artificial Sequence: Synthetic oligonucleotide
catggtcttaattcgatgcct

SEQ ID NO: 17674 - DNA, 21 bp, Artificial Sequence
  Description of Artificial Sequence: Synthetic oligonucleotide
catggtctgagtgaggattat

SEQ ID NO: 17675 - DNA, 21 bp, Artificial Sequence
  Description of Artificial Sequence: Synthetic oligonucleotide
catgggttgtcgttgaaggat

SEQ ID NO: 17676 - DNA, 21 bp, Artificial Sequence
  Description of Artificial Sequence: Synthetic oligonucleotide
catggtatggaggatgggctt

SEQ ID NO: 17677 - DNA, 21 bp, Artificial Sequence
  Description of Artificial Sequence: Synthetic oligonucleotide
catgggaatttgaattatcat

SEQ ID NO: 17678 - DNA, 21 bp, Artificial Sequence
  Description of Artificial Sequence: Synthetic oligonucleotide
catggtccgaatgcgtctgat

SEQ ID NO: 17679 - DNA, 21 bp, Artificial Sequence
  Description of Artificial Sequence: Synthetic oligonucleotide
catggtagggaggttcatcag

SEQ ID NO: 17680 - DNA, 21 bp, Artificial Sequence
  Description of Artificial Sequence: Synthetic oligonucleotide
catggtagtggtagttgttgt

SEQ ID NO: 17681 - DNA, 21 bp, Artificial Sequence
  Description of Artificial Sequence: Synthetic oligonucleotide
catggttcgattgagtcgcag

SEQ ID NO: 17682 - DNA, 21 bp, Artificial Sequence
  Description of Artificial Sequence: Synthetic oligonucleotide
catgggtcgaagacgatgtct

SEQ ID NO: 17683 - DNA, 21 bp, Artificial Sequence
  Description of Artificial Sequence: Synthetic oligonucleotide
catggttcgatgtggcctgag

SEQ ID NO: 17684 - DNA, 21 bp, Artificial Sequence
  Description of Artificial Sequence: Synthetic oligonucleotide
catggttctagtactcgtaat

SEQ ID NO: 17685 - DNA, 21 bp, Artificial Sequence
  Description of Artificial Sequence: Synthetic oligonucleotide
catggtagtacggagaattct

SEQ ID NO: 17686 - DNA, 21 bp, Artificial Sequence
  Description of Artificial Sequence: Synthetic oligonucleotide
catgggagtactaagttgccg

SEQ ID NO: 17687 - DNA, 21 bp, Artificial Sequence
  Description of Artificial Sequence: Synthetic oligonucleotide
catggtacgggggtttttggt

SEQ ID NO: 17688 - DNA, 21 bp, Artificial Sequence
  Description of Artificial Sequence: Synthetic oligonucleotide
catggtacgaatcggacgcat

SEQ ID NO: 17689 - DNA, 21 bp, Artificial Sequence
  Description of Artificial Sequence: Synthetic oligonucleotide
catggtacgtcgaagcatagt

SEQ ID NO: 17690 - DNA, 21 bp, Artificial Sequence
  Description of Artificial Sequence: Synthetic oligonucleotide
catggtacttcgtcgcggcct

SEQ ID NO: 17691 - DNA, 21 bp, Artificial Sequence
  Description of Artificial Sequence: Synthetic oligonucleotide
catggtgtgcatcatcaggtt

SEQ ID NO: 17692 - DNA, 21 bp, Artificial Sequence
  Description of Artificial Sequence: Synthetic oligonucleotide
catggggtttatcctcatctt

SEQ ID NO: 17693 - DNA, 21 bp, Artificial Sequence
  Description of Artificial Sequence: Synthetic oligonucleotide
catcatgcggctggtgctgtt

SEQ ID NO: 17694 - DNA, 21 bp, Artificial Sequence
  Description of Artificial Sequence: Synthetic oligonucleotide
catcatgctaaggctaatctt

SEQ ID NO: 17695 - DNA, 21 bp, Artificial Sequence
  Description of Artificial Sequence: Synthetic oligonucleotide
catcatgctcttccgcctgat

SEQ ID NO: 17696 - DNA, 21 bp, Artificial Sequence
  Description of Artificial Sequence: Synthetic oligonucleotide
catcatgcgcctaatactccg

SEQ ID NO: 17697 - DNA, 21 bp, Artificial Sequence
  Description of Artificial Sequence: Synthetic oligonucleotide
catcatgctcagggggaggct

SEQ ID NO: 17698 - DNA, 21 bp, Artificial Sequence
  Description of Artificial Sequence: Synthetic oligonucleotide
catcatgatgatcgtttgcag

SEQ ID NO: 17699 - DNA, 21 bp, Artificial Sequence
  Description of Artificial Sequence: Synthetic oligonucleotide
catcatgatctgtctattcct

SEQ ID NO: 17700 - DNA, 21 bp, Artificial Sequence
  Description of Artificial Sequence: Synthetic oligonucleotide
catcatgatccgacgactcgt

SEQ ID NO: 17701 - DNA, 21 bp, Artificial Sequence
  Description of Artificial Sequence: Synthetic oligonucleotide
catcatggtactgatcgtccg

SEQ ID NO: 17702 - DNA, 21 bp, Artificial Sequence
  Description of Artificial Sequence: Synthetic oligonucleotide
catcatctggcgtttttggat

SEQ ID NO: 17703 - DNA, 21 bp, Artificial Sequence
  Description of Artificial Sequence: Synthetic oligonucleotide
catcatatgtcgacggcttct

SEQ ID NO: 17704 - DNA, 21 bp, Artificial Sequence
  Description of Artificial Sequence: Synthetic oligonucleotide
catcataatgttaatagtctt

SEQ ID NO: 17705 - DNA, 21 bp, Artificial Sequence
  Description of Artificial Sequence: Synthetic oligonucleotide
catcatcctaggctggatact

SEQ ID NO: 17706 - DNA, 21 bp, Artificial Sequence
  Description of Artificial Sequence: Synthetic oligonucleotide
catcatagggttgagactggt

SEQ ID NO: 17707 - DNA, 21 bp, Artificial Sequence
  Description of Artificial Sequence: Synthetic oligonucleotide
catcatagtcctgctattacg

SEQ ID NO: 17708 - DNA, 21 bp, Artificial Sequence
  Description of Artificial Sequence: Synthetic oligonucleotide
catcatacgaatcctgatccg

SEQ ID NO: 17709 - DNA, 21 bp, Artificial Sequence
  Description of Artificial Sequence: Synthetic oligonucleotide
catattgcgcttacgagtcct

SEQ ID NO: 17710 - DNA, 21 bp, Artificial Sequence
  Description of Artificial Sequence: Synthetic oligonucleotide
catattctgacttctgcgccg

SEQ ID NO: 17711 - DNA, 21 bp, Artificial Sequence
  Description of Artificial Sequence: Synthetic oligonucleotide
catattcctttgaagcaggct

SEQ ID NO: 17712 - DNA, 21 bp, Artificial Sequence
  Description of Artificial Sequence: Synthetic oligonucleotide
catattccgagtagttctggg

SEQ ID NO: 17713 - DNA, 21 bp, Artificial Sequence
  Description of Artificial Sequence: Synthetic oligonucleotide
catattcctgtgatgactcct

SEQ ID NO: 17714 - DNA, 21 bp, Artificial Sequence
  Description of Artificial Sequence: Synthetic oligonucleotide
catattaggcatgatccgaag

SEQ ID NO: 17715 - DNA, 21 bp, Artificial Sequence
  Description of Artificial Sequence: Synthetic oligonucleotide
catattcggacgggtatgcct

SEQ ID NO: 17716 - DNA, 21 bp, Artificial Sequence
  Description of Artificial Sequence: Synthetic oligonucleotide
catatttctccgatgccggtg

SEQ ID NO: 17717 - DNA, 21 bp, Artificial Sequence
  Description of Artificial Sequence: Synthetic oligonucleotide
catatttcgagtagtactgtg

SEQ ID NO: 17718 - DNA, 21 bp, Artificial Sequence
  Description of Artificial Sequence: Synthetic oligonucleotide
catattactcagcagcttact

SEQ ID NO: 17719 - DNA, 21 bp, Artificial Sequence
  Description of Artificial Sequence: Synthetic oligonucleotide
cataaggcggattctgtttct

SEQ ID NO: 17720 - DNA, 21 bp, Artificial Sequence
  Description of Artificial Sequence: Synthetic oligonucleotide
cataagttttctagtccgctg

SEQ ID NO: 17721 - DNA, 21 bp, Artificial Sequence
  Description of Artificial Sequence: Synthetic oligonucleotide
cataaggggctttcgcctctt

SEQ ID NO: 17722 - DNA, 21 bp, Artificial Sequence
  Description of Artificial Sequence: Synthetic oligonucleotide
cataagctgggtgggtctttt

SEQ ID NO: 17723 - DNA, 21 bp, Artificial Sequence
  Description of Artificial Sequence: Synthetic oligonucleotide
cataagctgcctggtcatcat

SEQ ID NO: 17724 - DNA, 21 bp, Artificial Sequence
  Description of Artificial Sequence: Synthetic oligonucleotide
cataagctgacttcgaatggt

SEQ ID NO: 17725 - DNA, 21 bp, Artificial Sequence
  Description of Artificial Sequence: Synthetic oligonucleotide
cataagaatattggggtggtg

SEQ ID NO: 17726 - DNA, 21 bp, Artificial Sequence
  Description of Artificial Sequence: Synthetic oligonucleotide
cataagcctccgattgttcct

SEQ ID NO: 17727 - DNA, 21 bp, Artificial Sequence
  Description of Artificial Sequence: Synthetic oligonucleotide
cataagccgcaggttggtgtg

SEQ ID NO: 17728 - DNA, 21 bp, Artificial Sequence
  Description of Artificial Sequence: Synthetic oligonucleotide
cataagccgcgtccggaggtg

SEQ ID NO: 17729 - DNA, 21 bp, Artificial Sequence
  Description of Artificial Sequence: Synthetic oligonucleotide
cataagcagtctcaggctggg

SEQ ID NO: 17730 - DNA, 21 bp, Artificial Sequence
  Description of Artificial Sequence: Synthetic oligonucleotide
cataagcagacgatggagcgg

SEQ ID NO: 17731 - DNA, 21 bp, Artificial Sequence
  Description of Artificial Sequence: Synthetic oligonucleotide
cataagtcttcggataggctg

SEQ ID NO: 17732 - DNA, 21 bp, Artificial Sequence
  Description of Artificial Sequence: Synthetic oligonucleotide
cataagagtgtgctggttcct

SEQ ID NO: 17733 - DNA, 21 bp, Artificial Sequence
  Description of Artificial Sequence: Synthetic oligonucleotide
cataagacttcggtgccgatt

SEQ ID NO: 17734 - DNA, 21 bp, Artificial Sequence
  Description of Artificial Sequence: Synthetic oligonucleotide
cataaggttcctgcgcagaat

SEQ ID NO: 17735 - DNA, 21 bp, Artificial Sequence
  Description of Artificial Sequence: Synthetic oligonucleotide
cataaggtgcctggtctgggt

SEQ ID NO: 17736 - DNA, 21 bp, Artificial Sequence
  Description of Artificial Sequence: Synthetic oligonucleotide
cataagtataatctgggtgct

SEQ ID NO: 17737 - DNA, 21 bp, Artificial Sequence
  Description of Artificial Sequence: Synthetic oligonucleotide
catcttgcggcgctttctcat

SEQ ID NO: 17738 - DNA, 21 bp, Artificial Sequence
  Description of Artificial Sequence: Synthetic oligonucleotide
catttggctgaggttagggag

SEQ ID NO: 17739 - DNA, 21 bp, Artificial Sequence
  Description of Artificial Sequence: Synthetic oligonucleotide
catttggctggtactggtgct

SEQ ID NO: 17740 - DNA, 21 bp, Artificial Sequence
  Description of Artificial Sequence: Synthetic oligonucleotide
catttggctctggctccgtct

SEQ ID NO: 17741 - DNA, 21 bp, Artificial Sequence
  Description of Artificial Sequence: Synthetic oligonucleotide
catctggcgccggctattaat

SEQ ID NO: 17742 - DNA, 21 bp, Artificial Sequence
  Description of Artificial Sequence: Synthetic oligonucleotide
catttggagcttggtactcgg

SEQ ID NO: 17743 - DNA, 21 bp, Artificial Sequence
  Description of Artificial Sequence: Synthetic oligonucleotide
catctggagcggcctttgtcg

SEQ ID NO: 17744 - DNA, 21 bp, Artificial Sequence
  Description of Artificial Sequence: Synthetic oligonucleotide
catttggggccggatgctatt

SEQ ID NO: 17745 - DNA, 21 bp, Artificial Sequence
  Description of Artificial Sequence: Synthetic oligonucleotide
catcttggtagttcgaattgg

SEQ ID NO: 17746 - DNA, 21 bp, Artificial Sequence
  Description of Artificial Sequence: Synthetic oligonucleotide
catttgcattcggattctggg

SEQ ID NO: 17747 - DNA, 21 bp, Artificial Sequence
  Description of Artificial Sequence: Synthetic oligonucleotide
catttgcattcgcatgagagt

SEQ ID NO: 17748 - DNA, 21 bp, Artificial Sequence
  Description of Artificial Sequence: Synthetic oligonucleotide
catcttcattatccggtggcg

SEQ ID NO: 17749 - DNA, 21 bp, Artificial Sequence
  Description of Artificial Sequence: Synthetic oligonucleotide
catctgaatgcgaagtttgct

SEQ ID NO: 17750 - DNA, 21 bp, Artificial Sequence
  Description of Artificial Sequence: Synthetic oligonucleotide
catcttaatgctcctgcgacg

SEQ ID NO: 17751 - DNA, 21 bp, Artificial Sequence
  Description of Artificial Sequence: Synthetic oligonucleotide
catctgaatcttgaggggcgt

SEQ ID NO: 17752 - DNA, 21 bp, Artificial Sequence
  Description of Artificial Sequence: Synthetic oligonucleotide
catttgcctgcgcatccgctg

SEQ ID NO: 17753 - DNA, 21 bp, Artificial Sequence
  Description of Artificial Sequence: Synthetic oligonucleotide
catctgccgaagaatccttcg

SEQ ID NO: 17754 - DNA, 21 bp, Artificial Sequence
  Description of Artificial Sequence: Synthetic oligonucleotide
catttgcctagtggtcttact

SEQ ID NO: 17755 - DNA, 21 bp, Artificial Sequence
  Description of Artificial Sequence: Synthetic oligonucleotide
catttgcctactagtgatgcg

SEQ ID NO: 17756 - DNA, 21 bp, Artificial Sequence
  Description of Artificial Sequence: Synthetic oligonucleotide
catttgccgtataatgtgcct

SEQ ID NO: 17757 - DNA, 21 bp, Artificial Sequence
  Description of Artificial Sequence: Synthetic oligonucleotide
catcttcagattcttgaggcg

SEQ ID NO: 17758 - DNA, 21 bp, Artificial Sequence
  Description of Artificial Sequence: Synthetic oligonucleotide
catctgagggagctgatttcg

SEQ ID NO: 17759 - DNA, 21 bp, Artificial Sequence
  Description of Artificial Sequence: Synthetic oligonucleotide
catcttaggtctggtgttggt

SEQ ID NO: 17760 - DNA, 21 bp, Artificial Sequence
  Description of Artificial Sequence: Synthetic oligonucleotide
catttgtctgattggccgatt

SEQ ID NO: 17761 - DNA, 21 bp, Artificial Sequence
  Description of Artificial Sequence: Synthetic oligonucleotide
catctgtctggtatgcatgct

SEQ ID NO: 17762 - DNA, 21 bp, Artificial Sequence
  Description of Artificial Sequence: Synthetic oligonucleotide
catctgtctattgctgcttct

SEQ ID NO: 17763 - DNA, 21 bp, Artificial Sequence
  Description of Artificial Sequence: Synthetic oligonucleotide
catctgtcgccttttactgat

SEQ ID NO: 17764 - DNA, 21 bp, Artificial Sequence
  Description of Artificial Sequence: Synthetic oligonucleotide
catctgagtcctttggttcgt

SEQ ID NO: 17765 - DNA, 21 bp, Artificial Sequence
  Description of Artificial Sequence: Synthetic oligonucleotide
catttgtctcctcgtcctcct

SEQ ID NO: 17766 - DNA, 21 bp, Artificial Sequence
  Description of Artificial Sequence: Synthetic oligonucleotide
catctttctgtgcgtttgagt

SEQ ID NO: 17767 - DNA, 21 bp, Artificial Sequence
  Description of Artificial Sequence: Synthetic oligonucleotide
catctttctgtttctgggtct

SEQ ID NO: 17768 - DNA, 21 bp, Artificial Sequence
  Description of Artificial Sequence: Synthetic oligonucleotide
catttgactgctttgactggt

SEQ ID NO: 17769 - DNA, 21 bp, Artificial Sequence
  Description of Artificial Sequence: Synthetic oligonucleotide
catttgacggatacgcgtcgg

SEQ ID NO: 17770 - DNA, 21 bp, Artificial Sequence
  Description of Artificial Sequence: Synthetic oligonucleotide
catcttacgtctggtgctgct

SEQ ID NO: 17771 - DNA, 21 bp, Artificial Sequence
  Description of Artificial Sequence: Synthetic oligonucleotide
catttgacgtcgaattcgctt

SEQ ID NO: 17772 - DNA, 21 bp, Artificial Sequence
  Description of Artificial Sequence: Synthetic oligonucleotide
catctgacgtcgcgggcgggt

SEQ ID NO: 17773 - DNA, 21 bp, Artificial Sequence
  Description of Artificial Sequence: Synthetic oligonucleotide
catcttgttaggggtgagccg

SEQ ID NO: 17774 - DNA, 21 bp, Artificial Sequence
  Description of Artificial Sequence: Synthetic oligonucleotide
catcttgttagtaatcggtcg

SEQ ID NO: 17775 - DNA, 21 bp, Artificial Sequence
  Description of Artificial Sequence: Synthetic oligonucleotide
catttggtgtctacgacttcg

SEQ ID NO: 17776 - DNA, 21 bp, Artificial Sequence
  Description of Artificial Sequence: Synthetic oligonucleotide
catctggtgtctacggtggct

SEQ ID NO: 17777 - DNA, 21 bp, Artificial Sequence
  Description of Artificial Sequence: Synthetic oligonucleotide
catatggctgggggtgattat

SEQ ID NO: 17778 - DNA, 21 bp, Artificial Sequence
  Description of Artificial Sequence: Synthetic oligonucleotide
catatggattcgacgatttcg

SEQ ID NO: 17779 - DNA, 21 bp, Artificial Sequence
  Description of Artificial Sequence: Synthetic oligonucleotide
catatgggtgatatgaatcgt

SEQ ID NO: 17780 - DNA, 21 bp, Artificial Sequence
  Description of Artificial Sequence: Synthetic oligonucleotide
catatgattattgtggatagt

SEQ ID NO: 17781 - DNA, 21 bp, Artificial Sequence
  Description of Artificial Sequence: Synthetic oligonucleotide
catatgaagccgcagtcggat

SEQ ID NO: 17782 - DNA, 21 bp, Artificial Sequence
  Description of Artificial Sequence: Synthetic oligonucleotide
catatgttgacgcatactcat

SEQ ID NO: 17783 - DNA, 21 bp, Artificial Sequence
  Description of Artificial Sequence: Synthetic oligonucleotide
catatgatgaagttggggagt

SEQ ID NO: 17784 - DNA, 21 bp, Artificial Sequence
  Description of Artificial Sequence: Synthetic oligonucleotide
catatgatgtcgcatggtccg

SEQ ID NO: 17785 - DNA, 21 bp, Artificial Sequence
  Description of Artificial Sequence: Synthetic oligonucleotide
catatgaatgctgatcataag

SEQ ID NO: 17786 - DNA, 21 bp, Artificial Sequence
  Description of Artificial Sequence: Synthetic oligonucleotide
catatgaatcttaaggatgcg

SEQ ID NO: 17787 - DNA, 21 bp, Artificial Sequence
  Description of Artificial Sequence: Synthetic oligonucleotide
catatgcctgatgatccgagt

SEQ ID NO: 17788 - DNA, 21 bp, Artificial Sequence
  Description of Artificial Sequence: Synthetic oligonucleotide
catatgcctaatatgtattcg

SEQ ID NO: 17789 - DNA, 21 bp, Artificial Sequence
  Description of Artificial Sequence: Synthetic oligonucleotide
catatgtctaatcctagtttt

SEQ ID NO: 17790 - DNA, 21 bp, Artificial Sequence
  Description of Artificial Sequence: Synthetic oligonucleotide
catatgagtgtgctgcagaag

SEQ ID NO: 17791 - DNA, 21 bp, Artificial Sequence
  Description of Artificial Sequence: Synthetic oligonucleotide
catatgtctgttcgtgatcct

SEQ ID NO: 17792 - DNA, 21 bp, Artificial Sequence
  Description of Artificial Sequence: Synthetic oligonucleotide
catatgactggtactaatctt

SEQ ID NO: 17793 - DNA, 21 bp, Artificial Sequence
  Description of Artificial Sequence: Synthetic oligonucleotide
catatggttgctaatcctgct

SEQ ID NO: 17794 - DNA, 21 bp, Artificial Sequence
  Description of Artificial Sequence: Synthetic oligonucleotide
cataatgcggctcagaatcag

SEQ ID NO: 17795 - DNA, 21 bp, Artificial Sequence
  Description of Artificial Sequence: Synthetic oligonucleotide
cataatgctggttatatgccg

SEQ ID NO: 17796 - DNA, 21 bp, Artificial Sequence
  Description of Artificial Sequence: Synthetic oligonucleotide
cataatgcttcggctgtgaat

SEQ ID NO: 17797 - DNA, 21 bp, Artificial Sequence
  Description of Artificial Sequence: Synthetic oligonucleotide
cataatgagttgccgcctccg

SEQ ID NO: 17798 - DNA, 21 bp, Artificial Sequence
  Description of Artificial Sequence: Synthetic oligonucleotide
cataatgagcctgataagggt

SEQ ID NO: 17799 - DNA, 21 bp, Artificial Sequence
  Description of Artificial Sequence: Synthetic oligonucleotide
cataatcatgatacggtgctt

SEQ ID NO: 17800 - DNA, 21 bp, Artificial Sequence
  Description of Artificial Sequence: Synthetic oligonucleotide
cataatcatattgtgcatgcg

SEQ ID NO: 17801 - DNA, 21 bp, Artificial Sequence
  Description of Artificial Sequence: Synthetic oligonucleotide
cataataagtcgtcttatgtt

SEQ ID NO: 17802 - DNA, 21 bp, Artificial Sequence
  Description of Artificial Sequence: Synthetic oligonucleotide
cataatatgcggattccttct

SEQ ID NO: 17803 - DNA, 21 bp, Artificial Sequence
  Description of Artificial Sequence: Synthetic oligonucleotide
cataataatactgtgaatcag

SEQ ID NO: 17804 - DNA, 21 bp, Artificial Sequence
  Description of Artificial Sequence: Synthetic oligonucleotide
cataatccgcctaagctgact

SEQ ID NO: 17805 - DNA, 21 bp, Artificial Sequence
  Description of Artificial Sequence: Synthetic oligonucleotide
cataatcctcgggagttgggg

SEQ ID NO: 17806 - DNA, 21 bp, Artificial Sequence
  Description of Artificial Sequence: Synthetic oligonucleotide
cataatccgtctcttcgtact

SEQ ID NO: 17807 - DNA, 21 bp, Artificial Sequence
  Description of Artificial Sequence: Synthetic oligonucleotide
cataatcagactctggggtct

SEQ ID NO: 17808 - DNA, 21 bp, Artificial Sequence
  Description of Artificial Sequence: Synthetic oligonucleotide
cataataggaatgatggtttt

SEQ ID NO: 17809 - DNA, 21 bp, Artificial Sequence
  Description of Artificial Sequence: Synthetic oligonucleotide
cataatagtcatcattatgct

SEQ ID NO: 17810 - DNA, 21 bp, Artificial Sequence
  Description of Artificial Sequence: Synthetic oligonucleotide
cataattctcatagtatgagg

SEQ ID NO: 17811 - DNA, 21 bp, Artificial Sequence
  Description of Artificial Sequence: Synthetic oligonucleotide
cataattcgcctggtgttggg

SEQ ID NO: 17812 - DNA, 21 bp, Artificial Sequence
  Description of Artificial Sequence: Synthetic oligonucleotide
cataattcgtcttttgatatg

SEQ ID NO: 17813 - DNA, 21 bp, Artificial Sequence
  Description of Artificial Sequence: Synthetic oligonucleotide
catcctgctattctgcagctg

SEQ ID NO: 17814 - DNA, 21 bp, Artificial Sequence
  Description of Artificial Sequence: Synthetic oligonucleotide
catcctgcgacgaagcttggg

SEQ ID NO: 17815 - DNA, 21 bp, Artificial Sequence
  Description of Artificial Sequence: Synthetic oligonucleotide
catcctgatccgcattctacg

SEQ ID NO: 17816 - DNA, 21 bp, Artificial Sequence
  Description of Artificial Sequence: Synthetic oligonucleotide
catccggagaagcggaatccg

SEQ ID NO: 17817 - DNA, 21 bp, Artificial Sequence
  Description of Artificial Sequence: Synthetic oligonucleotide
catcctgagctgccgctgcat

SEQ ID NO: 17818 - DNA, 21 bp, Artificial Sequence
  Description of Artificial Sequence: Synthetic oligonucleotide
catcctgagatgcttgttacg

SEQ ID NO: 17819 - DNA, 21 bp, Artificial Sequence
  Description of Artificial Sequence: Synthetic oligonucleotide
catccgtttggtacggcgtct

SEQ ID NO: 17820 - DNA, 21 bp, Artificial Sequence
  Description of Artificial Sequence: Synthetic oligonucleotide
catccggggtttaatcatgat

SEQ ID NO: 17821 - DNA, 21 bp, Artificial Sequence
  Description of Artificial Sequence: Synthetic oligonucleotide
catccggggccgttggtggct

SEQ ID NO: 17822 - DNA, 21 bp, Artificial Sequence
  Description of Artificial Sequence: Synthetic oligonucleotide
catcctggtcagagtccggtt

SEQ ID NO: 17823 - DNA, 21 bp, Artificial Sequence
  Description of Artificial Sequence: Synthetic oligonucleotide
catcctggttatagttctaat

SEQ ID NO: 17824 - DNA, 21 bp, Artificial Sequence
  Description of Artificial Sequence: Synthetic oligonucleotide
catccgattattcctatttcg

SEQ ID NO: 17825 - DNA, 21 bp, Artificial Sequence
  Description of Artificial Sequence: Synthetic oligonucleotide
catccgattaatactaggtct

SEQ ID NO: 17826 - DNA, 21 bp, Artificial Sequence
  Description of Artificial Sequence: Synthetic oligonucleotide
catcctattccgtttcctggt

SEQ ID NO: 17827 - DNA, 21 bp, Artificial Sequence
  Description of Artificial Sequence: Synthetic oligonucleotide
catcctaagggggagccgccg

SEQ ID NO: 17828 - DNA, 21 bp, Artificial Sequence
  Description of Artificial Sequence: Synthetic oligonucleotide
catcctaagttggtttcggtt

SEQ ID NO: 17829 - DNA, 21 bp, Artificial Sequence
  Description of Artificial Sequence: Synthetic oligonucleotide
catcctttggaggatcagctt

SEQ ID NO: 17830 - DNA, 21 bp, Artificial Sequence
  Description of Artificial Sequence: Synthetic oligonucleotide
catcctcttaatgcgcggccg

SEQ ID NO: 17831 - DNA, 21 bp, Artificial Sequence
  Description of Artificial Sequence: Synthetic oligonucleotide
catcctatgacgtcgaattct

SEQ ID NO: 17832 - DNA, 21 bp, Artificial Sequence
  Description of Artificial Sequence: Synthetic oligonucleotide
catcctcctaagtatgtgacg

SEQ ID NO: 17833 - DNA, 21 bp, Artificial Sequence
  Description of Artificial Sequence: Synthetic oligonucleotide
catcctcctccgtctcatatg

SEQ ID NO: 17834 - DNA, 21 bp, Artificial Sequence
  Description of Artificial Sequence: Synthetic oligonucleotide
catccgccgcctactgattct

SEQ ID NO: 17835 - DNA, 21 bp, Artificial Sequence
  Description of Artificial Sequence: Synthetic oligonucleotide
catcctccgaggactcctgcg

SEQ ID NO: 17836 - DNA, 21 bp, Artificial Sequence
  Description of Artificial Sequence: Synthetic oligonucleotide
catcctcagcggcaggcttct

SEQ ID NO: 17837 - DNA, 21 bp, Artificial Sequence
  Description of Artificial Sequence: Synthetic oligonucleotide
catcctcagtcgagtcattgg

SEQ ID NO: 17838 - DNA, 21 bp, Artificial Sequence
  Description of Artificial Sequence: Synthetic oligonucleotide
catccgtctttttcgcctctt

SEQ ID NO: 17839 - DNA, 21 bp, Artificial Sequence
  Description of Artificial Sequence: Synthetic oligonucleotide
catcctagtggttattctaat

SEQ ID NO: 17840 - DNA, 21 bp, Artificial Sequence
  Description of Artificial Sequence: Synthetic oligonucleotide
catccgagtattgctgggatg

SEQ ID NO: 17841 - DNA, 21 bp, Artificial Sequence
  Description of Artificial Sequence: Synthetic oligonucleotide
catccttctattgtgcgtgat

SEQ ID NO: 17842 - DNA, 21 bp, Artificial Sequence
  Description of Artificial Sequence: Synthetic oligonucleotide
catccgagtcttgcgattggt

SEQ ID NO: 17843 - DNA, 21 bp, Artificial Sequence
  Description of Artificial Sequence: Synthetic oligonucleotide
catccttctcgggtgattatg

SEQ ID NO: 17844 - DNA, 21 bp, Artificial Sequence
  Description of Artificial Sequence: Synthetic oligonucleotide
catccttcttctcagttgcat

SEQ ID NO: 17845 - DNA, 21 bp, Artificial Sequence
  Description of Artificial Sequence: Synthetic oligonucleotide
catccgtcgtattcgtcgggg

SEQ ID NO: 17846 - DNA, 21 bp, Artificial Sequence
  Description of Artificial Sequence: Synthetic oligonucleotide
catcctacggctaagctgccg

SEQ ID NO: 17847 - DNA, 21 bp, Artificial Sequence
  Description of Artificial Sequence: Synthetic oligonucleotide
catcctactgagactactgag

SEQ ID NO: 17848 - DNA, 21 bp, Artificial Sequence
  Description of Artificial Sequence: Synthetic oligonucleotide
catccgacgggtacgaaggat

SEQ ID NO: 17849 - DNA, 21 bp, Artificial Sequence
  Description of Artificial Sequence: Synthetic oligonucleotide
catcctacgctgtctcattat

SEQ ID NO: 17850 - DNA, 21 bp, Artificial Sequence
  Description of Artificial Sequence: Synthetic oligonucleotide
catccgacgaataatagtaat

SEQ ID NO: 17851 - DNA, 21 bp, Artificial Sequence
  Description of Artificial Sequence: Synthetic oligonucleotide
catccgacgtcgattattctg

SEQ ID NO: 17852 - DNA, 21 bp, Artificial Sequence
  Description of Artificial Sequence: Synthetic oligonucleotide
catcctactactcggtttggt

SEQ ID NO: 17853 - DNA, 21 bp, Artificial Sequence
  Description of Artificial Sequence: Synthetic oligonucleotide
catcctgtttcgagtcggcag

SEQ ID NO: 17854 - DNA, 21 bp, Artificial Sequence
  Description of Artificial Sequence: Synthetic oligonucleotide
catccgtatcagaattcgctg

SEQ ID NO: 17855 - DNA, 21 bp, Artificial Sequence
  Description of Artificial Sequence: Synthetic oligonucleotide
catcaggcggaggcttattcg

SEQ ID NO: 17856 - DNA, 21 bp, Artificial Sequence
  Description of Artificial Sequence: Synthetic oligonucleotide
catcaggctcctggtcttcag

SEQ ID NO: 17857 - DNA, 21 bp, Artificial Sequence
  Description of Artificial Sequence: Synthetic oligonucleotide
catcaggatattgctcatttg

SEQ ID NO: 17858 - DNA, 21 bp, Artificial Sequence
  Description of Artificial Sequence: Synthetic oligonucleotide
catcagtttaatagggagcct

SEQ ID NO: 17859 - DNA, 21 bp, Artificial Sequence
  Description of Artificial Sequence: Synthetic oligonucleotide
catcagggtgatcagaatatt

SEQ ID NO: 17860 - DNA, 21 bp, Artificial Sequence
  Description of Artificial Sequence: Synthetic oligonucleotide
catcagggtcatcctcgtgat

SEQ ID NO: 17861 - DNA, 21 bp, Artificial Sequence
  Description of Artificial Sequence: Synthetic oligonucleotide
catcaggggtctcctacgttt

SEQ ID NO: 17862 - DNA, 21 bp, Artificial Sequence
  Description of Artificial Sequence: Synthetic oligonucleotide
catcagttgggttcgcagatg

SEQ ID NO: 17863 - DNA, 21 bp, Artificial Sequence
  Description of Artificial Sequence: Synthetic oligonucleotide
catcagccgcatattgtgcag

SEQ ID NO: 17864 - DNA, 21 bp, Artificial Sequence
  Description of Artificial Sequence: Synthetic oligonucleotide
catcagccgcattcttcgttg

SEQ ID NO: 17865 - DNA, 21 bp, Artificial Sequence
  Description of Artificial Sequence: Synthetic oligonucleotide
catcagcagtcgacgaataat

SEQ ID NO: 17866 - DNA, 21 bp, Artificial Sequence
  Description of Artificial Sequence: Synthetic oligonucleotide
catcagaggactgttggtgtg

SEQ ID NO: 17867 - DNA, 21 bp, Artificial Sequence
  Description of Artificial Sequence: Synthetic oligonucleotide
catcagagtccttcggatagg

SEQ ID NO: 17868 - DNA, 21 bp, Artificial Sequence
  Description of Artificial Sequence: Synthetic oligonucleotide
catcagactgcttctgttttg

SEQ ID NO: 17869 - DNA, 21 bp, Artificial Sequence
  Description of Artificial Sequence: Synthetic oligonucleotide
catcagacggtgggtcagaat

SEQ ID NO: 17870 - DNA, 21 bp, Artificial Sequence
  Description of Artificial Sequence: Synthetic oligonucleotide
catcgggctagttatgtggat

SEQ ID NO: 17871 - DNA, 21 bp, Artificial Sequence
  Description of Artificial Sequence: Synthetic oligonucleotide
catagggatgctttgcagcag

SEQ ID NO: 17872 - DNA, 21 bp, Artificial Sequence
  Description of Artificial Sequence: Synthetic oligonucleotide
catagggatatttcgacgggt

SEQ ID NO: 17873 - DNA, 21 bp, Artificial Sequence
  Description of Artificial Sequence: Synthetic oligonucleotide
catcgggaggagaaggcttcg

SEQ ID NO: 17874 - DNA, 21 bp, Artificial Sequence
  Description of Artificial Sequence: Synthetic oligonucleotide
catcgtgagggtttggagcat

SEQ ID NO: 17875 - DNA, 21 bp, Artificial Sequence
  Description of Artificial Sequence: Synthetic oligonucleotide
catcgtgagcatggttatcct

SEQ ID NO: 17876 - DNA, 21 bp, Artificial Sequence
  Description of Artificial Sequence: Synthetic oligonucleotide
catcgtgagaataaggtggcg

SEQ ID NO: 17877 - DNA, 21 bp, Artificial Sequence
  Description of Artificial Sequence: Synthetic oligonucleotide
catcggattggggatgtgccg

SEQ ID NO: 17878 - DNA, 21 bp, Artificial Sequence
  Description of Artificial Sequence: Synthetic oligonucleotide
catcggttgccgaatgtggcg

SEQ ID NO: 17879 - DNA, 21 bp, Artificial Sequence
  Description of Artificial Sequence: Synthetic oligonucleotide
catcgtccggagatgctgtct

SEQ ID NO: 17880 - DNA, 21 bp, Artificial Sequence
  Description of Artificial Sequence: Synthetic oligonucleotide
catcggcctattgctacgtat

SEQ ID NO: 17881 - DNA, 21 bp, Artificial Sequence
  Description of Artificial Sequence: Synthetic oligonucleotide
catcgtactggtcttccggag

SEQ ID NO: 17882 - DNA, 21 bp, Artificial Sequence
  Description of Artificial Sequence: Synthetic oligonucleotide
catcgtacgtctatgcctctt

SEQ ID NO: 17883 - DNA, 21 bp, Artificial Sequence
  Description of Artificial Sequence: Synthetic oligonucleotide
cataggactacgaataatttt

SEQ ID NO: 17884 - DNA, 21 bp, Artificial Sequence
  Description of Artificial Sequence: Synthetic oligonucleotide
catcgggtggggggtctgtct

SEQ ID NO: 17885 - DNA, 21 bp, Artificial Sequence
  Description of Artificial Sequence: Synthetic oligonucleotide
catcgtgttgttgctattccg

SEQ ID NO: 17886 - DNA, 21 bp, Artificial Sequence
  Description of Artificial Sequence: Synthetic oligonucleotide
catagtgctgctctttgtatg

SEQ ID NO: 17887 - DNA, 21 bp, Artificial Sequence
  Description of Artificial Sequence: Synthetic oligonucleotide
cattcggctgcgatgccttct

SEQ ID NO: 17888 - DNA, 21 bp, Artificial Sequence
  Description of Artificial Sequence: Synthetic oligonucleotide
cattcggcggggacggagact

SEQ ID NO: 17889 - DNA, 21 bp, Artificial Sequence
  Description of Artificial Sequence: Synthetic oligonucleotide
cattcggctaagatgtctggg

SEQ ID NO: 17890 - DNA, 21 bp, Artificial Sequence
  Description of Artificial Sequence: Synthetic oligonucleotide
catagtgctaagtctatgcat

SEQ ID NO: 17891 - DNA, 21 bp, Artificial Sequence
  Description of Artificial Sequence: Synthetic oligonucleotide
cattcggcgttgttgcatatg

SEQ ID NO: 17892 - DNA, 21 bp, Artificial Sequence
  Description of Artificial Sequence: Synthetic oligonucleotide
catagtgctcagattactatt

SEQ ID NO: 17893 - DNA, 21 bp, Artificial Sequence
  Description of Artificial Sequence: Synthetic oligonucleotide
cattcggctactatgtgtagt

SEQ ID NO: 17894 - DNA, 21 bp, Artificial Sequence
  Description of Artificial Sequence: Synthetic oligonucleotide
catagtgatcgttcttctgct

SEQ ID NO: 17895 - DNA, 21 bp, Artificial Sequence
  Description of Artificial Sequence: Synthetic oligonucleotide
catagtgagaagtctggtttt

SEQ ID NO: 17896 - DNA, 21 bp, Artificial Sequence
  Description of Artificial Sequence: Synthetic oligonucleotide
catagtgagtatcctacgaag

SEQ ID NO: 17897 - DNA, 21 bp, Artificial Sequence
  Description of Artificial Sequence: Synthetic oligonucleotide
catagttttcttgatttggag

SEQ ID NO: 17898 - DNA, 21 bp, Artificial Sequence
  Description of Artificial Sequence: Synthetic oligonucleotide
cattctttttctatgatggag

SEQ ID NO: 17899 - DNA, 21 bp, Artificial Sequence
  Description of Artificial Sequence: Synthetic oligonucleotide
catagtggtcatagtcagggt

SEQ ID NO: 17900 - DNA, 21 bp, Artificial Sequence
  Description of Artificial Sequence: Synthetic oligonucleotide
cattctggtaagattttgcat

SEQ ID NO: 17901 - DNA, 21 bp, Artificial Sequence
  Description of Artificial Sequence: Synthetic oligonucleotide
catagtggtcgtgcttattct

SEQ ID NO: 17902 - DNA, 21 bp, Artificial Sequence
  Description of Artificial Sequence: Synthetic oligonucleotide
catagtgggtcttcggagact

SEQ ID NO: 17903 - DNA, 21 bp, Artificial Sequence
  Description of Artificial Sequence: Synthetic oligonucleotide
cattcgcatggggtgccttct

SEQ ID NO: 17904 - DNA, 21 bp, Artificial Sequence
  Description of Artificial Sequence: Synthetic oligonucleotide
catagtcatgttaatagttcg

SEQ ID NO: 17905 - DNA, 21 bp, Artificial Sequence
  Description of Artificial Sequence: Synthetic oligonucleotide
cattctattcatagtagggag

SEQ ID NO: 17906 - DNA, 21 bp, Artificial Sequence
  Description of Artificial Sequence: Synthetic oligonucleotide
catagtattcagcatattcct

SEQ ID NO: 17907 - DNA, 21 bp, Artificial Sequence
  Description of Artificial Sequence: Synthetic oligonucleotide
cattctaaggcgtctgtgatt

SEQ ID NO: 17908 - DNA, 21 bp, Artificial Sequence
  Description of Artificial Sequence: Synthetic oligonucleotide
cattctaagcctgcgcagatt

SEQ ID NO: 17909 - DNA, 21 bp, Artificial Sequence
  Description of Artificial Sequence: Synthetic oligonucleotide
cattcgaagagtgttgtgact

SEQ ID NO: 17910 - DNA, 21 bp, Artificial Sequence
  Description of Artificial Sequence: Synthetic oligonucleotide
cattctctgggtgcgattcct

SEQ ID NO: 17911 - DNA, 21 bp, Artificial Sequence
  Description of Artificial Sequence: Synthetic oligonucleotide
cattcgttgggtacgagtggg

SEQ ID NO: 17912 - DNA, 21 bp, Artificial Sequence
  Description of Artificial Sequence: Synthetic oligonucleotide
catagtcttttgaatagtact

SEQ ID NO: 17913 - DNA, 21 bp, Artificial Sequence
  Description of Artificial Sequence: Synthetic oligonucleotide
cattcgcttcctgggctgaag

SEQ ID NO: 17914 - DNA, 21 bp, Artificial Sequence
  Description of Artificial Sequence: Synthetic oligonucleotide
cattctcttcgtacgcctcag

SEQ ID NO: 17915 - DNA, 21 bp, Artificial Sequence
  Description of Artificial Sequence: Synthetic oligonucleotide
catagtatggaggaggcgctg

SEQ ID NO: 17916 - DNA, 21 bp, Artificial Sequence
  Description of Artificial Sequence: Synthetic oligonucleotide
cattcgatgccggatcagatt

SEQ ID NO: 17917 - DNA, 21 bp, Artificial Sequence
  Description of Artificial Sequence: Synthetic oligonucleotide
cattctatgtcggaggctaag

SEQ ID NO: 17918 - DNA, 21 bp, Artificial Sequence
  Description of Artificial Sequence: Synthetic oligonucleotide
cattctaataagcagccgaat

SEQ ID NO: 17919 - DNA, 21 bp, Artificial Sequence
  Description of Artificial Sequence: Synthetic oligonucleotide
cattcgaataagacgtcgctg

SEQ ID NO: 17920 - DNA, 21 bp, Artificial Sequence
  Description of Artificial Sequence: Synthetic oligonucleotide
catagtaatcttagggcgatg

SEQ ID NO: 17921 - DNA, 21 bp, Artificial Sequence
  Description of Artificial Sequence: Synthetic oligonucleotide
cattctaatacgatttcttct

SEQ ID NO: 17922 - DNA, 21 bp, Artificial Sequence
  Description of Artificial Sequence: Synthetic oligonucleotide
cattctccggctcggactgct

SEQ ID NO: 17923 - DNA, 21 bp, Artificial Sequence
  Description of Artificial Sequence: Synthetic oligonucleotide
cattcgcctgctagtcctccg

SEQ ID NO: 17924 - DNA, 21 bp, Artificial Sequence
  Description of Artificial Sequence: Synthetic oligonucleotide
cattctccgggtcagatttcg

SEQ ID NO: 17925 - DNA, 21 bp, Artificial Sequence
  Description of Artificial Sequence: Synthetic oligonucleotide
catagtccgatggcggttcct

SEQ ID NO: 17926 - DNA, 21 bp, Artificial Sequence
  Description of Artificial Sequence: Synthetic oligonucleotide
cattctcctaatggttatgct

SEQ ID NO: 17927 - DNA, 21 bp, Artificial Sequence
  Description of Artificial Sequence: Synthetic oligonucleotide
cattcgcaggcgcagatgtcg

SEQ ID NO: 17928 - DNA, 21 bp, Artificial Sequence
  Description of Artificial Sequence: Synthetic oligonucleotide
cattcgcagaatcagtatagt

SEQ ID NO: 17929 - DNA, 21 bp, Artificial Sequence
  Description of Artificial Sequence: Synthetic oligonucleotide
catagtcagagggctgttcct

SEQ ID NO: 17930 - DNA, 21 bp, Artificial Sequence
  Description of Artificial Sequence: Synthetic oligonucleotide
catagtagggcgagtccggag

SEQ ID NO: 17931 - DNA, 21 bp, Artificial Sequence
  Description of Artificial Sequence: Synthetic oligonucleotide
cattctagggataatcggaat

SEQ ID NO: 17932 - DNA, 21 bp, Artificial Sequence
  Description of Artificial Sequence: Synthetic oligonucleotide
cattctagggagcttagtccg

SEQ ID NO: 17933 - DNA, 21 bp, Artificial Sequence
  Description of Artificial Sequence: Synthetic oligonucleotide
cattcgcggggtactatgctt

SEQ ID NO: 17934 - DNA, 21 bp, Artificial Sequence
  Description of Artificial Sequence: Synthetic oligonucleotide
cattcgaggcatgatatgttg

SEQ ID NO: 17935 - DNA, 21 bp, Artificial Sequence
  Description of Artificial Sequence: Synthetic oligonucleotide
catagtaggcctcagcctcag

SEQ ID NO: 17936 - DNA, 21 bp, Artificial Sequence
  Description of Artificial Sequence: Synthetic oligonucleotide
cattctcggccgagtggttgt

SEQ ID NO: 17937 - DNA, 21 bp, Artificial Sequence
  Description of Artificial Sequence: Synthetic oligonucleotide
cattctcggtctacgtttgct

SEQ ID NO: 17938 - DNA, 21 bp, Artificial Sequence
  Description of Artificial Sequence: Synthetic oligonucleotide
catagttctattcctggtcct

SEQ ID NO: 17939 - DNA, 21 bp, Artificial Sequence
  Description of Artificial Sequence: Synthetic oligonucleotide
cattcttctatggctacgatg

SEQ ID NO: 17940 - DNA, 21 bp, Artificial Sequence
  Description of Artificial Sequence: Synthetic oligonucleotide
cattcttcgaatcttggtgtt

SEQ ID NO: 17941 - DNA, 21 bp, Artificial Sequence
  Description of Artificial Sequence: Synthetic oligonucleotide
cattcttcgtcggtgaatcct

SEQ ID NO: 17942 - DNA, 21 bp, Artificial Sequence
  Description of Artificial Sequence: Synthetic oligonucleotide
cattcgagtacgggtgcgaat

SEQ ID NO: 17943 - DNA, 21 bp, Artificial Sequence
  Description of Artificial Sequence: Synthetic oligonucleotide
cattcttcggttcctggtgcg

SEQ ID NO: 17944 - DNA, 21 bp, Artificial Sequence
  Description of Artificial Sequence: Synthetic oligonucleotide
cattctacggattcgttgccg

SEQ ID NO: 17945 - DNA, 21 bp, Artificial Sequence
  Description of Artificial Sequence: Synthetic oligonucleotide
cattctactcatagggagctg

SEQ ID NO: 17946 - DNA, 21 bp, Artificial Sequence
  Description of Artificial Sequence: Synthetic oligonucleotide
cattctactctgatttcgcat

SEQ ID NO: 17947 - DNA, 21 bp, Artificial Sequence
  Description of Artificial Sequence: Synthetic oligonucleotide
catagtacgccgttgaattct

SEQ ID NO: 17948 - DNA, 21 bp, Artificial Sequence
  Description of Artificial Sequence: Synthetic oligonucleotide
cattctactcgtgagggtttt

SEQ ID NO: 17949 - DNA, 21 bp, Artificial Sequence
  Description of Artificial Sequence: Synthetic oligonucleotide
cattctactacggatcctctg

SEQ ID NO: 17950 - DNA, 21 bp, Artificial Sequence
  Description of Artificial Sequence: Synthetic oligonucleotide
catagtgttgcgtctgtgact

SEQ ID NO: 17951 - DNA, 21 bp, Artificial Sequence
  Description of Artificial Sequence: Synthetic oligonucleotide
catagtgtggattcgcggggg

SEQ ID NO: 17952 - DNA, 21 bp, Artificial Sequence
  Description of Artificial Sequence: Synthetic oligonucleotide
cattcggtggagcgggatcat

SEQ ID NO: 17953 - DNA, 21 bp, Artificial Sequence
  Description of Artificial Sequence: Synthetic oligonucleotide
cattcttatgtggatagtttt

SEQ ID NO: 17954 - DNA, 21 bp, Artificial Sequence
  Description of Artificial Sequence: Synthetic oligonucleotide
catacggcgggtgatgcggag

SEQ ID NO: 17955 - DNA, 21 bp, Artificial Sequence
  Description of Artificial Sequence: Synthetic oligonucleotide
catacggcgcttttgtctaat

SEQ ID NO: 17956 - DNA, 21 bp, Artificial Sequence
  Description of Artificial Sequence: Synthetic oligonucleotide
catacggctcggactactccg

SEQ ID NO: 17957 - DNA, 21 bp, Artificial Sequence
  Description of Artificial Sequence: Synthetic oligonucleotide
catactgcttcgttgccggcg

SEQ ID NO: 17958 - DNA, 21 bp, Artificial Sequence
  Description of Artificial Sequence: Synthetic oligonucleotide
catacggatcggtatgcggtt

SEQ ID NO: 17959 - DNA, 21 bp, Artificial Sequence
  Description of Artificial Sequence: Synthetic oligonucleotide
catactgaggctgggagggtg

SEQ ID NO: 17960 - DNA, 21 bp, Artificial Sequence
  Description of Artificial Sequence: Synthetic oligonucleotide
catacggagacgtttggggag

SEQ ID NO: 17961 - DNA, 21 bp, Artificial Sequence
  Description of Artificial Sequence: Synthetic oligonucleotide
catacgggtcttgttcggggg

SEQ ID NO: 17962 - DNA, 21 bp, Artificial Sequence
  Description of Artificial Sequence: Synthetic oligonucleotide
catacggggtctctgtcttct

SEQ ID NO: 17963 - DNA, 21 bp, Artificial Sequence
  Description of Artificial Sequence: Synthetic oligonucleotide
catacgcatctggctagtctt

SEQ ID NO: 17964 - DNA, 21 bp, Artificial Sequence
  Description of Artificial Sequence: Synthetic oligonucleotide
catactattaaggatgcttat

SEQ ID NO: 17965 - DNA, 21 bp, Artificial Sequence
  Description of Artificial Sequence: Synthetic oligonucleotide
catactaagtctcctcatccg

SEQ ID NO: 17966 - DNA, 21 bp, Artificial Sequence
  Description of Artificial Sequence: Synthetic oligonucleotide
catactcttaagccggatgtg

SEQ ID NO: 17967 - DNA, 21 bp, Artificial Sequence
  Description of Artificial Sequence: Synthetic oligonucleotide
catactttgccgagtacgtcg

SEQ ID NO: 17968 - DNA, 21 bp, Artificial Sequence
  Description of Artificial Sequence: Synthetic oligonucleotide
catacgttgcctactacggct

SEQ ID NO: 17969 - DNA, 21 bp, Artificial Sequence
  Description of Artificial Sequence: Synthetic oligonucleotide
catacgatggcttcggggtcg

SEQ ID NO: 17970 - DNA, 21 bp, Artificial Sequence
  Description of Artificial Sequence: Synthetic oligonucleotide
catacgaattctaatacgggg

SEQ ID NO: 17971 - DNA, 21 bp, Artificial Sequence
  Description of Artificial Sequence: Synthetic oligonucleotide
catactcctgctgtgaatttt

SEQ ID NO: 17972 - DNA, 21 bp, Artificial Sequence
  Description of Artificial Sequence: Synthetic oligonucleotide
catacgcctgggttgcatact

SEQ ID NO: 17973 - DNA, 21 bp, Artificial Sequence
  Description of Artificial Sequence: Synthetic oligonucleotide
catactcctttgacgtcgcat

SEQ ID NO: 17974 - DNA, 21 bp, Artificial Sequence
  Description of Artificial Sequence: Synthetic oligonucleotide
catacgccgaatattctttat

SEQ ID NO: 17975 - DNA, 21 bp, Artificial Sequence
  Description of Artificial Sequence: Synthetic oligonucleotide
catacgccgcagcctaatgct

SEQ ID NO: 17976 - DNA, 21 bp, Artificial Sequence
  Description of Artificial Sequence: Synthetic oligonucleotide
catacgcagttgaggactccg

SEQ ID NO: 17977 - DNA, 21 bp, Artificial Sequence
  Description of Artificial Sequence: Synthetic oligonucleotide
catactcagcggctgagttcg

SEQ ID NO: 17978 - DNA, 21 bp, Artificial Sequence
  Description of Artificial Sequence: Synthetic oligonucleotide
catacgcaggtgacgcgttgt

SEQ ID NO: 17979 - DNA, 21 bp, Artificial Sequence
  Description of Artificial Sequence: Synthetic oligonucleotide
catactagggattctgatcct

SEQ ID NO: 17980 - DNA, 21 bp, Artificial Sequence
  Description of Artificial Sequence: Synthetic oligonucleotide
catacgcgtgggaaggcggag

SEQ ID NO: 17981 - DNA, 21 bp, Artificial Sequence
  Description of Artificial Sequence: Synthetic oligonucleotide
catacgagtggtgagtcgtat

SEQ ID NO: 17982 - DNA, 21 bp, Artificial Sequence
  Description of Artificial Sequence: Synthetic oligonucleotide
catactagtcatcagttgccg

SEQ ID NO: 17983 - DNA, 21 bp, Artificial Sequence
  Description of Artificial Sequence: Synthetic oligonucleotide
catacttctattgattatgtt

SEQ ID NO: 17984 - DNA, 21 bp, Artificial Sequence
  Description of Artificial Sequence: Synthetic oligonucleotide
catacgtctaagtctgctctg

SEQ ID NO: 17985 - DNA, 21 bp, Artificial Sequence
  Description of Artificial Sequence: Synthetic oligonucleotide
catacttcgcctccgatttcg

SEQ ID NO: 17986 - DNA, 21 bp, Artificial Sequence
  Description of Artificial Sequence: Synthetic oligonucleotide
catacgagtcctgtttatgat

SEQ ID NO: 17987 - DNA, 21 bp, Artificial Sequence
  Description of Artificial Sequence: Synthetic oligonucleotide
catacgtctcagcagaggcag

SEQ ID NO: 17988 - DNA, 21 bp, Artificial Sequence
  Description of Artificial Sequence: Synthetic oligonucleotide
catacgtcgactacgaagtgg

SEQ ID NO: 17989 - DNA, 21 bp, Artificial Sequence
  Description of Artificial Sequence: Synthetic oligonucleotide
catacgtcttgggatggtctg

SEQ ID NO: 17990 - DNA, 21 bp, Artificial Sequence
  Description of Artificial Sequence: Synthetic oligonucleotide
catactactgcggcgcctcct

SEQ ID NO: 17991 - DNA, 21 bp, Artificial Sequence
  Description of Artificial Sequence: Synthetic oligonucleotide
catacgacgaaggtggatccg

SEQ ID NO: 17992 - DNA, 21 bp, Artificial Sequence
  Description of Artificial Sequence: Synthetic oligonucleotide
catacgactccgactcatacg

SEQ ID NO: 17993 - DNA, 21 bp, Artificial Sequence
  Description of Artificial Sequence: Synthetic oligonucleotide
catacgacgcagtgtacgatg

SEQ ID NO: 17994 - DNA, 21 bp, Artificial Sequence
  Description of Artificial Sequence: Synthetic oligonucleotide
catactacgactattcatggg

SEQ ID NO: 17995 - DNA, 21 bp, Artificial Sequence
  Description of Artificial Sequence: Synthetic oligonucleotide
catacggtgaggtctgggctt

SEQ ID NO: 17996 - DNA, 21 bp, Artificial Sequence
  Description of Artificial Sequence: Synthetic oligonucleotide
catactgttacgtcggcgggg

SEQ ID NO: 17997 - DNA, 21 bp, Artificial Sequence
  Description of Artificial Sequence: Synthetic oligonucleotide
catacggtggttcagagttct

SEQ ID NO: 17998 - DNA, 21 bp, Artificial Sequence
  Description of Artificial Sequence: Synthetic oligonucleotide
catacttattcttctgaggat

SEQ ID NO: 17999 - DNA, 21 bp, Artificial Sequence
  Description of Artificial Sequence: Synthetic oligonucleotide
catgtggatcggagtggggcg

SEQ ID NO: 18000 - DNA, 21 bp, Artificial Sequence
  Description of Artificial Sequence: Synthetic oligonucleotide
catgttgataggacgcagttt

SEQ ID NO: 18001 - DNA, 21 bp, Artificial Sequence
  Description of Artificial Sequence: Synthetic oligonucleotide
catgtggggattacttcggcg

SEQ ID NO: 18002 - DNA, 21 bp, Artificial Sequence
  Description of Artificial Sequence: Synthetic oligonucleotide
catgtggggtatggtccttcg

SEQ ID NO: 18003 - DNA, 21 bp, Artificial Sequence
  Description of Artificial Sequence: Synthetic oligonucleotide
catgttgggtataaggcggat

SEQ ID NO: 18004 - DNA, 21 bp, Artificial Sequence
  Description of Artificial Sequence: Synthetic oligonucleotide
catgtgcatactaattcttcg

SEQ ID NO: 18005 - DNA, 21 bp, Artificial Sequence
  Description of Artificial Sequence: Synthetic oligonucleotide
catgtgattgattctgcgggg

SEQ ID NO: 18006 - DNA, 21 bp, Artificial Sequence
  Description of Artificial Sequence: Synthetic oligonucleotide
catgtgaaggcgcttgggtct

SEQ ID NO: 18007 - DNA, 21 bp, Artificial Sequence
  Description of Artificial Sequence: Synthetic oligonucleotide
catgtgaagctgagtagtaat

SEQ ID NO: 18008 - DNA, 21 bp, Artificial Sequence
  Description of Artificial Sequence: Synthetic oligonucleotide
catgttcttaagaatcctacg

SEQ ID NO: 18009 - DNA, 21 bp, Artificial Sequence
  Description of Artificial Sequence: Synthetic oligonucleotide
catgtgcttcctactcgtcct

SEQ ID NO: 18010 - DNA, 21 bp, Artificial Sequence
  Description of Artificial Sequence: Synthetic oligonucleotide
catgttttgtcgccgactcgg

SEQ ID NO: 18011 - DNA, 21 bp, Artificial Sequence
  Description of Artificial Sequence: Synthetic oligonucleotide
catgttatggaggcgtcgtct

SEQ ID NO: 18012 - DNA, 21 bp, Artificial Sequence
  Description of Artificial Sequence: Synthetic oligonucleotide
catgtgccgatgtcgatgcct

SEQ ID NO: 18013 - DNA, 21 bp, Artificial Sequence
  Description of Artificial Sequence: Synthetic oligonucleotide
catgttcagaattcgcagacg

SEQ ID NO: 18014 - DNA, 21 bp, Artificial Sequence
  Description of Artificial Sequence: Synthetic oligonucleotide
catgtgcgtgggacgggttct

SEQ ID NO: 18015 - DNA, 21 bp, Artificial Sequence
  Description of Artificial Sequence: Synthetic oligonucleotide
catgttcgtcctgggtttacg

SEQ ID NO: 18016 - DNA, 21 bp, Artificial Sequence
  Description of Artificial Sequence: Synthetic oligonucleotide
catgttagtgagcatacgtat

SEQ ID NO: 18017 - DNA, 21 bp, Artificial Sequence
  Description of Artificial Sequence: Synthetic oligonucleotide
catgtttcggggccgcgtgcg

SEQ ID NO: 18018 - DNA, 21 bp, Artificial Sequence
  Description of Artificial Sequence: Synthetic oligonucleotide
catgtgagtcatgctatgcag

SEQ ID NO: 18019 - DNA, 21 bp, Artificial Sequence
  Description of Artificial Sequence: Synthetic oligonucleotide
catgtttctcattcggtgatt

SEQ ID NO: 18020 - DNA, 21 bp, Artificial Sequence
  Description of Artificial Sequence: Synthetic oligonucleotide
catgtgagtaagctggatact

SEQ ID NO: 18021 - DNA, 21 bp, Artificial Sequence
  Description of Artificial Sequence: Synthetic oligonucleotide
catgtgagtatgtctgttcct

SEQ ID NO: 18022 - DNA, 21 bp, Artificial Sequence
  Description of Artificial Sequence: Synthetic oligonucleotide
catgtttcgaatattatttct

SEQ ID NO: 18023 - DNA, 21 bp, Artificial Sequence
  Description of Artificial Sequence: Synthetic oligonucleotide
catgtgtcgaatcagcttaat

SEQ ID NO: 18024 - DNA, 21 bp, Artificial Sequence
  Description of Artificial Sequence: Synthetic oligonucleotide
catgtgtctcctcctgcgaat

SEQ ID NO: 18025 - DNA, 21 bp, Artificial Sequence
  Description of Artificial Sequence: Synthetic oligonucleotide
catgtgtcgtctgcttctttg

SEQ ID NO: 18026 - DNA, 21 bp, Artificial Sequence
  Description of Artificial Sequence: Synthetic oligonucleotide
catgtgagttctgattctcgt

SEQ ID NO: 18027 - DNA, 21 bp, Artificial Sequence
  Description of Artificial Sequence: Synthetic oligonucleotide
catgtttcttctccgtcgctg

SEQ ID NO: 18028 - DNA, 21 bp, Artificial Sequence
  Description of Artificial Sequence: Synthetic oligonucleotide
catgtgagtactgagccgagt

SEQ ID NO: 18029 - DNA, 21 bp, Artificial Sequence
  Description of Artificial Sequence: Synthetic oligonucleotide
catgtttcttatgatcttact

SEQ ID NO: 18030 - DNA, 21 bp, Artificial Sequence
  Description of Artificial Sequence: Synthetic oligonucleotide
catgttacgcctggttttgag

SEQ ID NO: 18031 - DNA, 21 bp, Artificial Sequence
  Description of Artificial Sequence: Synthetic oligonucleotide
catgttacttcgccttatctg

SEQ ID NO: 18032 - DNA, 21 bp, Artificial Sequence
  Description of Artificial Sequence: Synthetic oligonucleotide
catgttgttggtgggtcttct

SEQ ID NO: 18033 - DNA, 21 bp, Artificial Sequence
  Description of Artificial Sequence: Synthetic oligonucleotide
catgttgtgtcgcgttttgtg

SEQ ID NO: 18034 - DNA, 21 bp, Artificial Sequence
  Description of Artificial Sequence: Synthetic oligonucleotide
cattatgctcctatttgtgag

SEQ ID NO: 18035 - DNA, 21 bp, Artificial Sequence
  Description of Artificial Sequence: Synthetic oligonucleotide
cattatgatagtaatgcgccg

SEQ ID NO: 18036 - DNA, 21 bp, Artificial Sequence
  Description of Artificial Sequence: Synthetic oligonucleotide
cattatgagtttgtggataag

SEQ ID NO: 18037 - DNA, 21 bp, Artificial Sequence
  Description of Artificial Sequence: Synthetic oligonucleotide
cattatgagagttgtaatccg

SEQ ID NO: 18038 - DNA, 21 bp, Artificial Sequence
  Description of Artificial Sequence: Synthetic oligonucleotide
cattatgagtcgaatgatgtg

SEQ ID NO: 18039 - DNA, 21 bp, Artificial Sequence
  Description of Artificial Sequence: Synthetic oligonucleotide
cattattttgatatgggtcct

SEQ ID NO: 18040 - DNA, 21 bp, Artificial Sequence
  Description of Artificial Sequence: Synthetic oligonucleotide
cattatggtatggtgtcggct

SEQ ID NO: 18041 - DNA, 21 bp, Artificial Sequence
  Description of Artificial Sequence: Synthetic oligonucleotide
cattatggtagtacgagggag

SEQ ID NO: 18042 - DNA, 21 bp, Artificial Sequence
  Description of Artificial Sequence: Synthetic oligonucleotide
cattatattaatcctactaat

SEQ ID NO: 18043 - DNA, 21 bp, Artificial Sequence
  Description of Artificial Sequence: Synthetic oligonucleotide
cattatccgccgacttatgat

SEQ ID NO: 18044 - DNA, 21 bp, Artificial Sequence
  Description of Artificial Sequence: Synthetic oligonucleotide
cattatccttctacttctagt

SEQ ID NO: 18045 - DNA, 21 bp, Artificial Sequence
  Description of Artificial Sequence: Synthetic oligonucleotide
cattatcagatttcgacgact

SEQ ID NO: 18046 - DNA, 21 bp, Artificial Sequence
  Description of Artificial Sequence: Synthetic oligonucleotide
cattatagtatttcgggggct

SEQ ID NO: 18047 - DNA, 21 bp, Artificial Sequence
  Description of Artificial Sequence: Synthetic oligonucleotide
cattatagtcctaagccgagt

SEQ ID NO: 18048 - DNA, 21 bp, Artificial Sequence
  Description of Artificial Sequence: Synthetic oligonucleotide
cattatgttgagcatcgtcag

SEQ ID NO: 18049 - DNA, 21 bp, Artificial Sequence
  Description of Artificial Sequence: Synthetic oligonucleotide
attgcggcggctgctatgacg

SEQ ID NO: 18050 - DNA, 21 bp, Artificial Sequence
  Description of Artificial Sequence: Synthetic oligonucleotide
attgcggcgaatatgcataat

SEQ ID NO: 18051 - DNA, 21 bp, Artificial Sequence
  Description of Artificial Sequence: Synthetic oligonucleotide
attgcggctactcctgagcag

SEQ ID NO: 18052 - DNA, 21 bp, Artificial Sequence
  Description of Artificial Sequence: Synthetic oligonucleotide
attgcttgttcgagtgagctg

SEQ ID NO: 18053 - DNA, 21 bp, Artificial Sequence
  Description of Artificial Sequence: Synthetic oligonucleotide
attgctgatgttttggggtat

SEQ ID NO: 18054 - DNA, 21 bp, Artificial Sequence
  Description of Artificial Sequence: Synthetic oligonucleotide
attgctgggatttcggatatt

SEQ ID NO: 18055 - DNA, 21 bp, Artificial Sequence
  Description of Artificial Sequence: Synthetic oligonucleotide
attgctcatgagaggagtgat

SEQ ID NO: 18056 - DNA, 21 bp, Artificial Sequence
  Description of Artificial Sequence: Synthetic oligonucleotide
attgctcatagggctagtgcg

SEQ ID NO: 18057 - DNA, 21 bp, Artificial Sequence
  Description of Artificial Sequence: Synthetic oligonucleotide
attgctttgcctaaggttgcg

SEQ ID NO: 18058 - DNA, 21 bp, Artificial Sequence
  Description of Artificial Sequence: Synthetic oligonucleotide
attgctaatttgacgcagtcg

SEQ ID NO: 18059 - DNA, 21 bp, Artificial Sequence
  Description of Artificial Sequence: Synthetic oligonucleotide
attgcgcctggtgtgtctagt

SEQ ID NO: 18060 - DNA, 21 bp, Artificial Sequence
  Description of Artificial Sequence: Synthetic oligonucleotide
attgcgcctctgactgtgtct

SEQ ID NO: 18061 - DNA, 21 bp, Artificial Sequence
  Description of Artificial Sequence: Synthetic oligonucleotide
attgcgcctaataagcttacg

SEQ ID NO: 18062 - DNA, 21 bp, Artificial Sequence
  Description of Artificial Sequence: Synthetic oligonucleotide
attgcgcagcagcatcagatt

SEQ ID NO: 18063 - DNA, 21 bp, Artificial Sequence
  Description of Artificial Sequence: Synthetic oligonucleotide
attgctcgtgcggctaatttt

SEQ ID NO: 18064 - DNA, 21 bp, Artificial Sequence
  Description of Artificial Sequence: Synthetic oligonucleotide
attgcgcgtgggcagcctttt

SEQ ID NO: 18065 - DNA, 21 bp, Artificial Sequence
  Description of Artificial Sequence: Synthetic oligonucleotide
attgctcggggttatgataat

SEQ ID NO: 18066 - DNA, 21 bp, Artificial Sequence
  Description of Artificial Sequence: Synthetic oligonucleotide
attgcgcgtcatccgacgcag

SEQ ID NO: 18067 - DNA, 21 bp, Artificial Sequence
  Description of Artificial Sequence: Synthetic oligonucleotide
attgcgtcggagtatcgtcag

SEQ ID NO: 18068 - DNA, 21 bp, Artificial Sequence
  Description of Artificial Sequence: Synthetic oligonucleotide
attgctagttctcagctgcgt

SEQ ID NO: 18069 - DNA, 21 bp, Artificial Sequence
  Description of Artificial Sequence: Synthetic oligonucleotide
attgctactcctgagtcgctg

SEQ ID NO: 18070 - DNA, 21 bp, Artificial Sequence
  Description of Artificial Sequence: Synthetic oligonucleotide
attgcggttcatgggcgtggt

SEQ ID NO: 18071 - DNA, 21 bp, Artificial Sequence
  Description of Artificial Sequence: Synthetic oligonucleotide
attgatgcgagtaagcgtttt

SEQ ID NO: 18072 - DNA, 21 bp, Artificial Sequence
  Description of Artificial Sequence: Synthetic oligonucleotide
attgatggtgggagttctgat

SEQ ID NO: 18073 - DNA, 21 bp, Artificial Sequence
  Description of Artificial Sequence: Synthetic oligonucleotide
attgatggtcgtgtgattggt

SEQ ID NO: 18074 - DNA, 21 bp, Artificial Sequence
  Description of Artificial Sequence: Synthetic oligonucleotide
attgataagcttctgacgttt

SEQ ID NO: 18075 - DNA, 21 bp, Artificial Sequence
  Description of Artificial Sequence: Synthetic oligonucleotide
attgatctgttggttcggtcg

SEQ ID NO: 18076 - DNA, 21 bp, Artificial Sequence
  Description of Artificial Sequence: Synthetic oligonucleotide
attgataatcttcatgcgggt

SEQ ID NO: 18077 - DNA, 21 bp, Artificial Sequence
  Description of Artificial Sequence: Synthetic oligonucleotide
attgataatccggtgcgtcct

SEQ ID NO: 18078 - DNA, 21 bp, Artificial Sequence
  Description of Artificial Sequence: Synthetic oligonucleotide
attgataatgttaagcctgtg

SEQ ID NO: 18079 - DNA, 21 bp, Artificial Sequence
  Description of Artificial Sequence: Synthetic oligonucleotide
attgatagtgcgactacggat

SEQ ID NO: 18080 - DNA, 21 bp, Artificial Sequence
  Description of Artificial Sequence: Synthetic oligonucleotide
attgatagtcatccgtcttct

SEQ ID NO: 18081 - DNA, 21 bp, Artificial Sequence
  Description of Artificial Sequence: Synthetic oligonucleotide
attgatagttcgacgaattgt

SEQ ID NO: 18082 - DNA, 21 bp, Artificial Sequence
  Description of Artificial Sequence: Synthetic oligonucleotide
attgattcttatacgcctccg

SEQ ID NO: 18083 - DNA, 21 bp, Artificial Sequence
  Description of Artificial Sequence: Synthetic oligonucleotide
attgatacgatttcgactagt

SEQ ID NO: 18084 - DNA, 21 bp, Artificial Sequence
  Description of Artificial Sequence: Synthetic oligonucleotide
attgatactcctcgtgggact

SEQ ID NO: 18085 - DNA, 21 bp, Artificial Sequence
  Description of Artificial Sequence: Synthetic oligonucleotide
attgatactgttcctagtcgt

SEQ ID NO: 18086 - DNA, 21 bp, Artificial Sequence
  Description of Artificial Sequence: Synthetic oligonucleotide
attgatgtttttactaatgcg

SEQ ID NO: 18087 - DNA, 21 bp, Artificial Sequence
  Description of Artificial Sequence: Synthetic oligonucleotide
attgattataagtctagttcg

SEQ ID NO: 18088 - DNA, 21 bp, Artificial Sequence
  Description of Artificial Sequence: Synthetic oligonucleotide
attgattatcgggctgctgcg

SEQ ID NO: 18089 - DNA, 21 bp, Artificial Sequence
  Description of Artificial Sequence: Synthetic oligonucleotide
attgaggcgagtcgggtgcag

SEQ ID NO: 18090 - DNA, 21 bp, Artificial Sequence
  Description of Artificial Sequence: Synthetic oligonucleotide
attgagaagaatctgacgctg

SEQ ID NO: 18091 - DNA, 21 bp, Artificial Sequence
  Description of Artificial Sequence: Synthetic oligonucleotide
attgagaaggtgaatagggtt

SEQ ID NO: 18092 - DNA, 21 bp, Artificial Sequence
  Description of Artificial Sequence: Synthetic oligonucleotide
attgagctggcttcttcgtgt

SEQ ID NO: 18093 - DNA, 21 bp, Artificial Sequence
  Description of Artificial Sequence: Synthetic oligonucleotide
attgagcttaagatgacgtct

SEQ ID NO: 18094 - DNA, 21 bp, Artificial Sequence
  Description of Artificial Sequence: Synthetic oligonucleotide
attgagatgcttaagactgcg

SEQ ID NO: 18095 - DNA, 21 bp, Artificial Sequence
  Description of Artificial Sequence: Synthetic oligonucleotide
attgagccgaagacgcatctt

SEQ ID NO: 18096 - DNA, 21 bp, Artificial Sequence
  Description of Artificial Sequence: Synthetic oligonucleotide
attgagccgtctcattatcct

SEQ ID NO: 18097 - DNA, 21 bp, Artificial Sequence
  Description of Artificial Sequence: Synthetic oligonucleotide
attgagaggccgacgtcgcct

SEQ ID NO: 18098 - DNA, 21 bp, Artificial Sequence
  Description of Artificial Sequence: Synthetic oligonucleotide
attgagcgtacgtcgagtatg

SEQ ID NO: 18099 - DNA, 21 bp, Artificial Sequence
  Description of Artificial Sequence: Synthetic oligonucleotide
attgagtctgctaatctgaat

SEQ ID NO: 18100 - DNA, 21 bp, Artificial Sequence
  Description of Artificial Sequence: Synthetic oligonucleotide
attgagtctcatttgcctagg

SEQ ID NO: 18101 - DNA, 21 bp, Artificial Sequence
  Description of Artificial Sequence: Synthetic oligonucleotide
attgagacggcgccggatcat

SEQ ID NO: 18102 - DNA, 21 bp, Artificial Sequence
  Description of Artificial Sequence: Synthetic oligonucleotide
attgagacggtgaataagact

SEQ ID NO: 18103 - DNA, 21 bp, Artificial Sequence
  Description of Artificial Sequence: Synthetic oligonucleotide
attgaggtgcggacgtcgatt

SEQ ID NO: 18104 - DNA, 21 bp, Artificial Sequence
  Description of Artificial Sequence: Synthetic oligonucleotide
attgagtggggttgggaggat

SEQ ID NO: 18105 - DNA, 21 bp, Artificial Sequence
  Description of Artificial Sequence: Synthetic oligonucleotide
atttttgcggggactggtgag

SEQ ID NO: 18106 - DNA, 21 bp, Artificial Sequence
  Description of Artificial Sequence: Synthetic oligonucleotide
atttttgctggggttcttcat

SEQ ID NO: 18107 - DNA, 21 bp, Artificial Sequence
  Description of Artificial Sequence: Synthetic oligonucleotide
atttttgctgttgcggctgag

SEQ ID NO: 18108 - DNA, 21 bp, Artificial Sequence
  Description of Artificial Sequence: Synthetic oligonucleotide
atttttaagcctgcgatgact

SEQ ID NO: 18109 - DNA, 21 bp, Artificial Sequence
  Description of Artificial Sequence: Synthetic oligonucleotide
atttttaataatgctgctcct

SEQ ID NO: 18110 - DNA, 21 bp, Artificial Sequence
  Description of Artificial Sequence: Synthetic oligonucleotide
atttttccgctgacggggtcg

SEQ ID NO: 18111 - DNA, 21 bp, Artificial Sequence
  Description of Artificial Sequence: Synthetic oligonucleotide
atttttcgtgatggtgtttct

SEQ ID NO: 18112 - DNA, 21 bp, Artificial Sequence
  Description of Artificial Sequence: Synthetic oligonucleotide
attttttctgctgggccgttg

SEQ ID NO: 18113 - DNA, 21 bp, Artificial Sequence
  Description of Artificial Sequence: Synthetic oligonucleotide
attttttctcatgttgggtcg

SEQ ID NO: 18114 - DNA, 21 bp, Artificial Sequence
  Description of Artificial Sequence: Synthetic oligonucleotide
atttttgttcctgagcctggt

SEQ ID NO: 18115 - DNA, 21 bp, Artificial Sequence
  Description of Artificial Sequence: Synthetic oligonucleotide
attggggctggggcgtctatg

SEQ ID NO: 18116 - DNA, 21 bp, Artificial Sequence
  Description of Artificial Sequence: Synthetic oligonucleotide
attggtgctattgcggatgtg

SEQ ID NO: 18117 - DNA, 21 bp, Artificial Sequence
  Description of Artificial Sequence: Synthetic oligonucleotide
attggggcgttggtgtctcct

SEQ ID NO: 18118 - DNA, 21 bp, Artificial Sequence
  Description of Artificial Sequence: Synthetic oligonucleotide
attggtgcgatgtcttctgct

SEQ ID NO: 18119 - DNA, 21 bp, Artificial Sequence
  Description of Artificial Sequence: Synthetic oligonucleotide
attggtgctccttataatagt

SEQ ID NO: 18120 - DNA, 21 bp, Artificial Sequence
  Description of Artificial Sequence: Synthetic oligonucleotide
attggggcgagtttgctgggt

SEQ ID NO: 18121 - DNA, 21 bp, Artificial Sequence
  Description of Artificial Sequence: Synthetic oligonucleotide
attggtgagcgtaggccggtg

SEQ ID NO: 18122 - DNA, 21 bp, Artificial Sequence
  Description of Artificial Sequence: Synthetic oligonucleotide
attggtgggtttgtgaaggcg

SEQ ID NO: 18123 - DNA, 21 bp, Artificial Sequence
  Description of Artificial Sequence: Synthetic oligonucleotide
attgggggtactatgactcat

SEQ ID NO: 18124 - DNA, 21 bp, Artificial Sequence
  Description of Artificial Sequence: Synthetic oligonucleotide
attgggcatgggcatcctaat

SEQ ID NO: 18125 - DNA, 21 bp, Artificial Sequence
  Description of Artificial Sequence: Synthetic oligonucleotide
attggtcattctgataatacg

SEQ ID NO: 18126 - DNA, 21 bp, Artificial Sequence
  Description of Artificial Sequence: Synthetic oligonucleotide
attgggaagctgcttaatact

SEQ ID NO: 18127 - DNA, 21 bp, Artificial Sequence
  Description of Artificial Sequence: Synthetic oligonucleotide
attggtaagaatcattcgtcg

SEQ ID NO: 18128 - DNA, 21 bp, Artificial Sequence
  Description of Artificial Sequence: Synthetic oligonucleotide
attggtaagccgggttatttg

SEQ ID NO: 18129 - DNA, 21 bp, Artificial Sequence
  Description of Artificial Sequence: Synthetic oligonucleotide
attggtcttgcgaagactttg

SEQ ID NO: 18130 - DNA, 21 bp, Artificial Sequence
  Description of Artificial Sequence: Synthetic oligonucleotide
attggtcttactagtcaggtt

SEQ ID NO: 18131 - DNA, 21 bp, Artificial Sequence
  Description of Artificial Sequence: Synthetic oligonucleotide
attggtatgcattctcagtct

SEQ ID NO: 18132 - DNA, 21 bp, Artificial Sequence
  Description of Artificial Sequence: Synthetic oligonucleotide
attggtaattcgcggcttggg

SEQ ID NO: 18133 - DNA, 21 bp, Artificial Sequence
  Description of Artificial Sequence: Synthetic oligonucleotide
attgggcagttttcgcgtgtt

SEQ ID NO: 18134 - DNA, 21 bp, Artificial Sequence
  Description of Artificial Sequence: Synthetic oligonucleotide
attgggagggatatgcatgct

SEQ ID NO: 18135 - DNA, 21 bp, Artificial Sequence
  Description of Artificial Sequence: Synthetic oligonucleotide
attgggcggcctagttatgag

SEQ ID NO: 18136 - DNA, 21 bp, Artificial Sequence
  Description of Artificial Sequence: Synthetic oligonucleotide
attggtcgtcagactgggatt

SEQ ID NO: 18137 - DNA, 21 bp, Artificial Sequence
  Description of Artificial Sequence: Synthetic oligonucleotide
attggtcggtctgagggtact

SEQ ID NO: 18138 - DNA, 21 bp, Artificial Sequence
  Description of Artificial Sequence: Synthetic oligonucleotide
attgggaggtcgcctagtccg

SEQ ID NO: 18139 - DNA, 21 bp, Artificial Sequence
  Description of Artificial Sequence: Synthetic oligonucleotide
attgggtctcatcattcgaat

SEQ ID NO: 18140 - DNA, 21 bp, Artificial Sequence
  Description of Artificial Sequence: Synthetic oligonucleotide
attggttcgaatgctttgtcg

SEQ ID NO: 18141 - DNA, 21 bp, Artificial Sequence
  Description of Artificial Sequence: Synthetic oligonucleotide
attgggtcgacgatgtatcag

SEQ ID NO: 18142 - DNA, 21 bp, Artificial Sequence
  Description of Artificial Sequence: Synthetic oligonucleotide
attgggacgagtacttatgtt

SEQ ID NO: 18143 - DNA, 21 bp, Artificial Sequence
  Description of Artificial Sequence: Synthetic oligonucleotide
attgggacgactatgaagggt

SEQ ID NO: 18144 - DNA, 21 bp, Artificial Sequence
  Description of Artificial Sequence: Synthetic oligonucleotide
attggtgtgaagactctgccg

SEQ ID NO: 18145 - DNA, 21 bp, Artificial Sequence
  Description of Artificial Sequence: Synthetic oligonucleotide
attggtgtgctgcatctgccg

SEQ ID NO: 18146 - DNA, 21 bp, Artificial Sequence
  Description of Artificial Sequence: Synthetic oligonucleotide
attcatgctgctagtactgat

SEQ ID NO: 18147 - DNA, 21 bp, Artificial Sequence
  Description of Artificial Sequence: Synthetic oligonucleotide
attcatgcgaattggattgat

SEQ ID NO: 18148 - DNA, 21 bp, Artificial Sequence
  Description of Artificial Sequence: Synthetic oligonucleotide
attcatgattttacttctgtg

SEQ ID NO: 18149 - DNA, 21 bp, Artificial Sequence
  Description of Artificial Sequence: Synthetic oligonucleotide
attcatgagctgtcggggctg

SEQ ID NO: 18150 - DNA, 21 bp, Artificial Sequence
  Description of Artificial Sequence: Synthetic oligonucleotide
attcattttcagtcttctcag

SEQ ID NO: 18151 - DNA, 21 bp, Artificial Sequence
  Description of Artificial Sequence: Synthetic oligonucleotide
attcatggtggttcgtatact

SEQ ID NO: 18152 - DNA, 21 bp, Artificial Sequence
  Description of Artificial Sequence: Synthetic oligonucleotide
attcatgggagtacggatagg

SEQ ID NO: 18153 - DNA, 21 bp, Artificial Sequence
  Description of Artificial Sequence: Synthetic oligonucleotide
attcatcatgatccggcgtct

SEQ ID NO: 18154 - DNA, 21 bp, Artificial Sequence
  Description of Artificial Sequence: Synthetic oligonucleotide
attcatcttccgacttcgttg

SEQ ID NO: 18155 - DNA, 21 bp, Artificial Sequence
  Description of Artificial Sequence: Synthetic oligonucleotide
attcataataggccgttgatg

SEQ ID NO: 18156 - DNA, 21 bp, Artificial Sequence
  Description of Artificial Sequence: Synthetic oligonucleotide
attcataatactttggcggct

SEQ ID NO: 18157 - DNA, 21 bp, Artificial Sequence
  Description of Artificial Sequence: Synthetic oligonucleotide
attcataatgttgttgttcag

SEQ ID NO: 18158 - DNA, 21 bp, Artificial Sequence
  Description of Artificial Sequence: Synthetic oligonucleotide
attcatccgggtcgtgttgct

SEQ ID NO: 18159 - DNA, 21 bp, Artificial Sequence
  Description of Artificial Sequence: Synthetic oligonucleotide
attcatcctacgaggcagggg

SEQ ID NO: 18160 - DNA, 21 bp, Artificial Sequence
  Description of Artificial Sequence: Synthetic oligonucleotide
attcatcaggctgggcagccg

SEQ ID NO: 18161 - DNA, 21 bp, Artificial Sequence
  Description of Artificial Sequence: Synthetic oligonucleotide
attcatcagtcgtcggagtct

SEQ ID NO: 18162 - DNA, 21 bp, Artificial Sequence
  Description of Artificial Sequence: Synthetic oligonucleotide
attcatcgggtgattacttct

SEQ ID NO: 18163 - DNA, 21 bp, Artificial Sequence
  Description of Artificial Sequence: Synthetic oligonucleotide
attcattcggagggttctctt

SEQ ID NO: 18164 - DNA, 21 bp, Artificial Sequence
  Description of Artificial Sequence: Synthetic oligonucleotide
attcattctctgcagcaggag

SEQ ID NO: 18165 - DNA, 21 bp, Artificial Sequence
  Description of Artificial Sequence: Synthetic oligonucleotide
attcatagttcgattgatttt

SEQ ID NO: 18166 - DNA, 21 bp, Artificial Sequence
  Description of Artificial Sequence: Synthetic oligonucleotide
attcatagttcgcctgctgcg

SEQ ID NO: 18167 - DNA, 21 bp, Artificial Sequence
  Description of Artificial Sequence: Synthetic oligonucleotide
attcatagttatgatcggagt

SEQ ID NO: 18168 - DNA, 21 bp, Artificial Sequence
  Description of Artificial Sequence: Synthetic oligonucleotide
attcatactgcggttgagttg

SEQ ID NO: 18169 - DNA, 21 bp, Artificial Sequence
  Description of Artificial Sequence: Synthetic oligonucleotide
attcatactgggaattatatg

SEQ ID NO: 18170 - DNA, 21 bp, Artificial Sequence
  Description of Artificial Sequence: Synthetic oligonucleotide
attcatacgaatgcgccgcct

SEQ ID NO: 18171 - DNA, 21 bp, Artificial Sequence
  Description of Artificial Sequence: Synthetic oligonucleotide
attcatactacgcagcggact

SEQ ID NO: 18172 - DNA, 21 bp, Artificial Sequence
  Description of Artificial Sequence: Synthetic oligonucleotide
attattgcggagcatccggcg

SEQ ID NO: 18173 - DNA, 21 bp, Artificial Sequence
  Description of Artificial Sequence: Synthetic oligonucleotide
attattgctaggcttcctccg

SEQ ID NO: 18174 - DNA, 21 bp, Artificial Sequence
  Description of Artificial Sequence: Synthetic oligonucleotide
attattgataatcatattcgt

SEQ ID NO: 18175 - DNA, 21 bp, Artificial Sequence
  Description of Artificial Sequence: Synthetic oligonucleotide
attatttttcaggatatgcct

SEQ ID NO: 18176 - DNA, 21 bp, Artificial Sequence
  Description of Artificial Sequence: Synthetic oligonucleotide
attattggtgctaatgagcct

SEQ ID NO: 18177 - DNA, 21 bp, Artificial Sequence
  Description of Artificial Sequence: Synthetic oligonucleotide
attattgggaaggggactggg

SEQ ID NO: 18178 - DNA, 21 bp, Artificial Sequence
  Description of Artificial Sequence: Synthetic oligonucleotide
attattcatgatactcataat

SEQ ID NO: 18179 - DNA, 21 bp, Artificial Sequence
  Description of Artificial Sequence: Synthetic oligonucleotide
attattcatgaggcgcgtcct

SEQ ID NO: 18180 - DNA, 21 bp, Artificial Sequence
  Description of Artificial Sequence: Synthetic oligonucleotide
attattcgtgatagtcagctg

SEQ ID NO: 18181 - DNA, 21 bp, Artificial Sequence
  Description of Artificial Sequence: Synthetic oligonucleotide
attatttctcttacgacttct

SEQ ID NO: 18182 - DNA, 21 bp, Artificial Sequence
  Description of Artificial Sequence: Synthetic oligonucleotide
attaaggatgcgggttctcct

SEQ ID NO: 18183 - DNA, 21 bp, Artificial Sequence
  Description of Artificial Sequence: Synthetic oligonucleotide
attaaggatgcgcagccttgg

SEQ ID NO: 18184 - DNA, 21 bp, Artificial Sequence
  Description of Artificial Sequence: Synthetic oligonucleotide
attaaggatcagtggaatatg

SEQ ID NO: 18185 - DNA, 21 bp, Artificial Sequence
  Description of Artificial Sequence: Synthetic oligonucleotide
attaagtttcctactgcggat

SEQ ID NO: 18186 - DNA, 21 bp, Artificial Sequence
  Description of Artificial Sequence: Synthetic oligonucleotide
attaagattgaggatcctcgg

SEQ ID NO: 18187 - DNA, 21 bp, Artificial Sequence
  Description of Artificial Sequence: Synthetic oligonucleotide
attaagatggcgcagggtttt

SEQ ID NO: 18188 - DNA, 21 bp, Artificial Sequence
  Description of Artificial Sequence: Synthetic oligonucleotide
attaagaatctggcgtctcat

SEQ ID NO: 18189 - DNA, 21 bp, Artificial Sequence
  Description of Artificial Sequence: Synthetic oligonucleotide
attaagcctattggtggggtg

SEQ ID NO: 18190 - DNA, 21 bp, Artificial Sequence
  Description of Artificial Sequence: Synthetic oligonucleotide
attaagcctatgtctgggacg

SEQ ID NO: 18191 - DNA, 21 bp, Artificial Sequence
  Description of Artificial Sequence: Synthetic oligonucleotide
attaagcagccgcttcataat

SEQ ID NO: 18192 - DNA, 21 bp, Artificial Sequence
  Description of Artificial Sequence: Synthetic oligonucleotide
attaagcgtactctgagtgat

SEQ ID NO: 18193 - DNA, 21 bp, Artificial Sequence
  Description of Artificial Sequence: Synthetic oligonucleotide
attaagtctgatgatggttct

SEQ ID NO: 18194 - DNA, 21 bp, Artificial Sequence
  Description of Artificial Sequence: Synthetic oligonucleotide
attaagagtgagggtagtctg

SEQ ID NO: 18195 - DNA, 21 bp, Artificial Sequence
  Description of Artificial Sequence: Synthetic oligonucleotide
attaagacggagtggtcgcat

SEQ ID NO: 18196 - DNA, 21 bp, Artificial Sequence
  Description of Artificial Sequence: Synthetic oligonucleotide
attaagacgtttacgtcgtcg

SEQ ID NO: 18197 - DNA, 21 bp, Artificial Sequence
  Description of Artificial Sequence: Synthetic oligonucleotide
attctggattttctgcctgat

SEQ ID NO: 18198 - DNA, 21 bp, Artificial Sequence
  Description of Artificial Sequence: Synthetic oligonucleotide
attctggggggtcttgatcgg

SEQ ID NO: 18199 - DNA, 21 bp, Artificial Sequence
  Description of Artificial Sequence: Synthetic oligonucleotide
attctggggaatacgcgggag

SEQ ID NO: 18200 - DNA, 21 bp, Artificial Sequence
  Description of Artificial Sequence: Synthetic oligonucleotide
attttgggtcgttcggcggcg

SEQ ID NO: 18201 - DNA, 21 bp, Artificial Sequence
  Description of Artificial Sequence: Synthetic oligonucleotide
attctgggtacgcgtccgttg

SEQ ID NO: 18202 - DNA, 21 bp, Artificial Sequence
  Description of Artificial Sequence: Synthetic oligonucleotide
attctggggacgtctgtgcag

SEQ ID NO: 18203 - DNA, 21 bp, Artificial Sequence
  Description of Artificial Sequence: Synthetic oligonucleotide
attttgcatggtcggggggcg

SEQ ID NO: 18204 - DNA, 21 bp, Artificial Sequence
  Description of Artificial Sequence: Synthetic oligonucleotide
attcttcatctggtgcgtctt

SEQ ID NO: 18205 - DNA, 21 bp, Artificial Sequence
  Description of Artificial Sequence: Synthetic oligonucleotide
attcttcattctcctacggtt

SEQ ID NO: 18206 - DNA, 21 bp, Artificial Sequence
  Description of Artificial Sequence: Synthetic oligonucleotide
attttgcatgttgagatgagg

SEQ ID NO: 18207 - DNA, 21 bp, Artificial Sequence
  Description of Artificial Sequence: Synthetic oligonucleotide
attcttaagcatattgggctt

SEQ ID NO: 18208 - DNA, 21 bp, Artificial Sequence
  Description of Artificial Sequence: Synthetic oligonucleotide
attttgaagcagcaggctaat

SEQ ID NO: 18209 - DNA, 21 bp, Artificial Sequence
  Description of Artificial Sequence: Synthetic oligonucleotide
attctgttggatgatgagagt

SEQ ID NO: 18210 - DNA, 21 bp, Artificial Sequence
  Description of Artificial Sequence: Synthetic oligonucleotide
attttgctgcatccgcgtggg

SEQ ID NO: 18211 - DNA, 21 bp, Artificial Sequence
  Description of Artificial Sequence: Synthetic oligonucleotide
attttgctgatgggtacttct

SEQ ID NO: 18212 - DNA, 21 bp, Artificial Sequence
  Description of Artificial Sequence: Synthetic oligonucleotide
attcttcttcggaaggatcct

SEQ ID NO: 18213 - DNA, 21 bp, Artificial Sequence
  Description of Artificial Sequence: Synthetic oligonucleotide
attcttctgtcggaggggcat

SEQ ID NO: 18214 - DNA, 21 bp, Artificial Sequence
  Description of Artificial Sequence: Synthetic oligonucleotide
attttgcttagtattcgggat

SEQ ID NO: 18215 - DNA, 21 bp, Artificial Sequence
  Description of Artificial Sequence: Synthetic oligonucleotide
attcttatgtctgcgcagtct

SEQ ID NO: 18216 - DNA, 21 bp, Artificial Sequence
  Description of Artificial Sequence: Synthetic oligonucleotide
attcttatggtggatgatact

SEQ ID NO: 18217 - DNA, 21 bp, Artificial Sequence
  Description of Artificial Sequence: Synthetic oligonucleotide
attctgaatgatcgtagtgct

SEQ ID NO: 18218 - DNA, 21 bp, Artificial Sequence
  Description of Artificial Sequence: Synthetic oligonucleotide
attcttaatcatggtaagggg

SEQ ID NO: 18219 - DNA, 21 bp, Artificial Sequence
  Description of Artificial Sequence: Synthetic oligonucleotide
attcttaataagccgttgtcg

SEQ ID NO: 18220 - DNA, 21 bp, Artificial Sequence
  Description of Artificial Sequence: Synthetic oligonucleotide
attctgccgcatacgactact

SEQ ID NO: 18221 - DNA, 21 bp, Artificial Sequence
  Description of Artificial Sequence: Synthetic oligonucleotide
attcttcctaattctatgcct

SEQ ID NO: 18222 - DNA, 21 bp, Artificial Sequence
  Description of Artificial Sequence: Synthetic oligonucleotide
attctgcctaatacggggccg

SEQ ID NO: 18223 - DNA, 21 bp, Artificial Sequence
  Description of Artificial Sequence: Synthetic oligonucleotide
attttgccgccgattacggat

SEQ ID NO: 18224 - DNA, 21 bp, Artificial Sequence
  Description of Artificial Sequence: Synthetic oligonucleotide
attctgccttcgcttactgct

SEQ ID NO: 18225 - DNA, 21 bp, Artificial Sequence
  Description of Artificial Sequence: Synthetic oligonucleotide
attcttccgtcttcgttttcg

SEQ ID NO: 18226 - DNA, 21 bp, Artificial Sequence
  Description of Artificial Sequence: Synthetic oligonucleotide
attcttccttattcttctccg

SEQ ID NO: 18227 - DNA, 21 bp, Artificial Sequence
  Description of Artificial Sequence: Synthetic oligonucleotide
attttgcaggcgcatcagact

SEQ ID NO: 18228 - DNA, 21 bp, Artificial Sequence
  Description of Artificial Sequence: Synthetic oligonucleotide
attcttcagtcggagtttacg

SEQ ID NO: 18229 - DNA, 21 bp, Artificial Sequence
  Description of Artificial Sequence: Synthetic oligonucleotide
attctgaggggggatggtccg

SEQ ID NO: 18230 - DNA, 21 bp, Artificial Sequence
  Description of Artificial Sequence: Synthetic oligonucleotide
attctgaggggtaatgggagt

SEQ ID NO: 18231 - DNA, 21 bp, Artificial Sequence
  Description of Artificial Sequence: Synthetic oligonucleotide
attcttcgtactgagtataag

SEQ ID NO: 18232 - DNA, 21 bp, Artificial Sequence
  Description of Artificial Sequence: Synthetic oligonucleotide
attctgcgggtgcatactcct

SEQ ID NO: 18233 - DNA, 21 bp, Artificial Sequence
  Description of Artificial Sequence: Synthetic oligonucleotide
attttgagtgagaggactcct

SEQ ID NO: 18234 - DNA, 21 bp, Artificial Sequence
  Description of Artificial Sequence: Synthetic oligonucleotide
attctttctatggatacggct

SEQ ID NO: 18235 - DNA, 21 bp, Artificial Sequence
  Description of Artificial Sequence: Synthetic oligonucleotide
attctgactggttctcatgct

SEQ ID NO: 18236 - DNA, 21 bp, Artificial Sequence
  Description of Artificial Sequence: Synthetic oligonucleotide
attctgactaaggatgtgagt

SEQ ID NO: 18237 - DNA, 21 bp, Artificial Sequence
  Description of Artificial Sequence: Synthetic oligonucleotide
attcttacgaagtcgccgacg

SEQ ID NO: 18238 - DNA, 21 bp, Artificial Sequence
  Description of Artificial Sequence: Synthetic oligonucleotide
attttgactcgtgttagtcct

SEQ ID NO: 18239 - DNA, 21 bp, Artificial Sequence
  Description of Artificial Sequence: Synthetic oligonucleotide
attctgacgtctgtgacgaag

SEQ ID NO: 18240 - DNA, 21 bp, Artificial Sequence
  Description of Artificial Sequence: Synthetic oligonucleotide
attttggtttcggagctgcgg

SEQ ID NO: 18241 - DNA, 21 bp, Artificial Sequence
  Description of Artificial Sequence: Synthetic oligonucleotide
attatggcgccgactacgcag

SEQ ID NO: 18242 - DNA, 21 bp, Artificial Sequence
  Description of Artificial Sequence: Synthetic oligonucleotide
attatggatgcgcatattgcg

SEQ ID NO: 18243 - DNA, 21 bp, Artificial Sequence
  Description of Artificial Sequence: Synthetic oligonucleotide
attatggatgttaagtttcat

SEQ ID NO: 18244 - DNA, 21 bp, Artificial Sequence
  Description of Artificial Sequence: Synthetic oligonucleotide
attatggaggtgcgggggccg

SEQ ID NO: 18245 - DNA, 21 bp, Artificial Sequence
  Description of Artificial Sequence: Synthetic oligonucleotide
attatgggtgagcctcgtaag

SEQ ID NO: 18246 - DNA, 21 bp, Artificial Sequence
  Description of Artificial Sequence: Synthetic oligonucleotide
attatggggtctgctccttct

SEQ ID NO: 18247 - DNA, 21 bp, Artificial Sequence
  Description of Artificial Sequence: Synthetic oligonucleotide
attatgggtagtgcgccttat

SEQ ID NO: 18248 - DNA, 21 bp, Artificial Sequence
  Description of Artificial Sequence: Synthetic oligonucleotide
attatgttgcctgatgctgat

SEQ ID NO: 18249 - DNA, 21 bp, Artificial Sequence
  Description of Artificial Sequence: Synthetic oligonucleotide
attatgaatgctaatcgtgct

SEQ ID NO: 18250 - DNA, 21 bp, Artificial Sequence
  Description of Artificial Sequence: Synthetic oligonucleotide
attatgaatcggatttctgcg

SEQ ID NO: 18251 - DNA, 21 bp, Artificial Sequence
  Description of Artificial Sequence: Synthetic oligonucleotide
attatgcctaatagttcggat

SEQ ID NO: 18252 - DNA, 21 bp, Artificial Sequence
  Description of Artificial Sequence: Synthetic oligonucleotide
attatgcctagttcgactaat

SEQ ID NO: 18253 - DNA, 21 bp, Artificial Sequence
  Description of Artificial Sequence: Synthetic oligonucleotide
attatgcggccttctgatcct

SEQ ID NO: 18254 - DNA, 21 bp, Artificial Sequence
  Description of Artificial Sequence: Synthetic oligonucleotide
attatgtctactactactctg

SEQ ID NO: 18255 - DNA, 21 bp, Artificial Sequence
  Description of Artificial Sequence: Synthetic oligonucleotide
attatgactatgactccgagt

SEQ ID NO: 18256 - DNA, 21 bp, Artificial Sequence
  Description of Artificial Sequence: Synthetic oligonucleotide
attaatgcgcagactcatctt

SEQ ID NO: 18257 - DNA, 21 bp, Artificial Sequence
  Description of Artificial Sequence: Synthetic oligonucleotide
attaatgcgtatcatgttccg

SEQ ID NO: 18258 - DNA, 21 bp, Artificial Sequence
  Description of Artificial Sequence: Synthetic oligonucleotide
attaatgagcatgtgcgtttg

SEQ ID NO: 18259 - DNA, 21 bp, Artificial Sequence
  Description of Artificial Sequence: Synthetic oligonucleotide
attaatgagtctaatcggggt

SEQ ID NO: 18260 - DNA, 21 bp, Artificial Sequence
  Description of Artificial Sequence: Synthetic oligonucleotide
attaatggttcggatcggcag

SEQ ID NO: 18261 - DNA, 21 bp, Artificial Sequence
  Description of Artificial Sequence: Synthetic oligonucleotide
attaatgggacggctaagcat

SEQ ID NO: 18262 - DNA, 21 bp, Artificial Sequence
  Description of Artificial Sequence: Synthetic oligonucleotide
attaatcatagttctatgggt

SEQ ID NO: 18263 - DNA, 21 bp, Artificial Sequence
  Description of Artificial Sequence: Synthetic oligonucleotide
attaatattgcgagtgcgggt

SEQ ID NO: 18264 - DNA, 21 bp, Artificial Sequence
  Description of Artificial Sequence: Synthetic oligonucleotide
attaataagccgtcgaatggg

SEQ ID NO: 18265 - DNA, 21 bp, Artificial Sequence
  Description of Artificial Sequence: Synthetic oligonucleotide
attaatctgcatgttaagagt

SEQ ID NO: 18266 - DNA, 21 bp, Artificial Sequence
  Description of Artificial Sequence: Synthetic oligonucleotide
attaatttgcgtccggctgcg

SEQ ID NO: 18267 - DNA, 21 bp, Artificial Sequence
  Description of Artificial Sequence: Synthetic oligonucleotide
attaatctgacgcctcgtttt

SEQ ID NO: 18268 - DNA, 21 bp, Artificial Sequence
  Description of Artificial Sequence: Synthetic oligonucleotide
attaatatggctggggtgcat

SEQ ID NO: 18269 - DNA, 21 bp, Artificial Sequence
  Description of Artificial Sequence: Synthetic oligonucleotide
attaatatgagtactgggtct

SEQ ID NO: 18270 - DNA, 21 bp, Artificial Sequence
  Description of Artificial Sequence: Synthetic oligonucleotide
attaatcctcagaatcgtacg

SEQ ID NO: 18271 - DNA, 21 bp, Artificial Sequence
  Description of Artificial Sequence: Synthetic oligonucleotide
attaataggggggtgaatagt

SEQ ID NO: 18272 - DNA, 21 bp, Artificial Sequence
  Description of Artificial Sequence: Synthetic oligonucleotide
attaatcgtactacgatggag

SEQ ID NO: 18273 - DNA, 21 bp, Artificial Sequence
  Description of Artificial Sequence: Synthetic oligonucleotide
attaatcgtgtgactgcggag

SEQ ID NO: 18274 - DNA, 21 bp, Artificial Sequence
  Description of Artificial Sequence: Synthetic oligonucleotide
attaattcggcggctgttctt

SEQ ID NO: 18275 - DNA, 21 bp, Artificial Sequence
  Description of Artificial Sequence: Synthetic oligonucleotide
attaatagtgggaggtctaat

SEQ ID NO: 18276 - DNA, 21 bp, Artificial Sequence
  Description of Artificial Sequence: Synthetic oligonucleotide
attaattcgcatactcttcag

SEQ ID NO: 18277 - DNA, 21 bp, Artificial Sequence
  Description of Artificial Sequence: Synthetic oligonucleotide
attaattcgcagaagcctccg

SEQ ID NO: 18278 - DNA, 21 bp, Artificial Sequence
  Description of Artificial Sequence: Synthetic oligonucleotide
attaattctcggaatggtgtt

SEQ ID NO: 18279 - DNA, 21 bp, Artificial Sequence
  Description of Artificial Sequence: Synthetic oligonucleotide
attaatactcttggtaattcg

SEQ ID NO: 18280 - DNA, 21 bp, Artificial Sequence
  Description of Artificial Sequence: Synthetic oligonucleotide
attaatacgccggggtatacg

SEQ ID NO: 18281 - DNA, 21 bp, Artificial Sequence
  Description of Artificial Sequence: Synthetic oligonucleotide
attaatgttcttcgttcggcg

SEQ ID NO: 18282 - DNA, 21 bp, Artificial Sequence
  Description of Artificial Sequence: Synthetic oligonucleotide
attccggctaattctcaggtt

SEQ ID NO: 18283 - DNA, 21 bp, Artificial Sequence
  Description of Artificial Sequence: Synthetic oligonucleotide
attcctgcttcgtctagttgg

SEQ ID NO: 18284 - DNA, 21 bp, Artificial Sequence
  Description of Artificial Sequence: Synthetic oligonucleotide
attccggatttgaagcgtacg

SEQ ID NO: 18285 - DNA, 21 bp, Artificial Sequence
  Description of Artificial Sequence: Synthetic oligonucleotide
attcctgaggggctgccgctg

SEQ ID NO: 18286 - DNA, 21 bp, Artificial Sequence
  Description of Artificial Sequence: Synthetic oligonucleotide
attccggggtttccgaagagt

SEQ ID NO: 18287 - DNA, 21 bp, Artificial Sequence
  Description of Artificial Sequence: Synthetic oligonucleotide
attcctgggacggagctgcag

SEQ ID NO: 18288 - DNA, 21 bp, Artificial Sequence
  Description of Artificial Sequence: Synthetic oligonucleotide
attcctcataatcaggcttat

SEQ ID NO: 18289 - DNA, 21 bp, Artificial Sequence
  Description of Artificial Sequence: Synthetic oligonucleotide
attccgcatccggctaattct

SEQ ID NO: 18290 - DNA, 21 bp, Artificial Sequence
  Description of Artificial Sequence: Synthetic oligonucleotide
attcctcatactcagactcag

SEQ ID NO: 18291 - DNA, 21 bp, Artificial Sequence
  Description of Artificial Sequence: Synthetic oligonucleotide
attcctattggttataagacg

SEQ ID NO: 18292 - DNA, 21 bp, Artificial Sequence
  Description of Artificial Sequence: Synthetic oligonucleotide
attccgattaagaatgggatg

SEQ ID NO: 18293 - DNA, 21 bp, Artificial Sequence
  Description of Artificial Sequence: Synthetic oligonucleotide
attcctattcctgttgcgatg

SEQ ID NO: 18294 - DNA, 21 bp, Artificial Sequence
  Description of Artificial Sequence: Synthetic oligonucleotide
attcctaagacgcggccggag

SEQ ID NO: 18295 - DNA, 21 bp, Artificial Sequence
  Description of Artificial Sequence: Synthetic oligonucleotide
attccgcttaaggcttatggt

SEQ ID NO: 18296 - DNA, 21 bp, Artificial Sequence
  Description of Artificial Sequence: Synthetic oligonucleotide
attcctcttcctaatgatggt

SEQ ID NO: 18297 - DNA, 21 bp, Artificial Sequence
  Description of Artificial Sequence: Synthetic oligonucleotide
attcctctgacgagtcatact

SEQ ID NO: 18298 - DNA, 21 bp, Artificial Sequence
  Description of Artificial Sequence: Synthetic oligonucleotide
attccgatgagtgctgctaag

SEQ ID NO: 18299 - DNA, 21 bp, Artificial Sequence
  Description of Artificial Sequence: Synthetic oligonucleotide
attcctaattttgtgcattct

SEQ ID NO: 18300 - DNA, 21 bp, Artificial Sequence
  Description of Artificial Sequence: Synthetic oligonucleotide
attcctaatcataagagtatt

SEQ ID NO: 18301 - DNA, 21 bp, Artificial Sequence
  Description of Artificial Sequence: Synthetic oligonucleotide
attccgaataagacgccgttt

SEQ ID NO: 18302 - DNA, 21 bp, Artificial Sequence
  Description of Artificial Sequence: Synthetic oligonucleotide
attcctaatctgaagatttcg

SEQ ID NO: 18303 - DNA, 21 bp, Artificial Sequence
  Description of Artificial Sequence: Synthetic oligonucleotide
attcctaatcctcctatggct

SEQ ID NO: 18304 - DNA, 21 bp, Artificial Sequence
  Description of Artificial Sequence: Synthetic oligonucleotide
attccgaatcggcatctgtcg

SEQ ID NO: 18305 - DNA, 21 bp, Artificial Sequence
  Description of Artificial Sequence: Synthetic oligonucleotide
attcctaatgtttcgcatcag

SEQ ID NO: 18306 - DNA, 21 bp, Artificial Sequence
  Description of Artificial Sequence: Synthetic oligonucleotide
attcctaattatgcggttagt

SEQ ID NO: 18307 - DNA, 21 bp, Artificial Sequence
  Description of Artificial Sequence: Synthetic oligonucleotide
attcctccgaggtcgaattct

SEQ ID NO: 18308 - DNA, 21 bp, Artificial Sequence
  Description of Artificial Sequence: Synthetic oligonucleotide
attccgcaggcgagtcttatg

SEQ ID NO: 18309 - DNA, 21 bp, Artificial Sequence
  Description of Artificial Sequence: Synthetic oligonucleotide
attccgcagaatcgtattttg

SEQ ID NO: 18310 - DNA, 21 bp, Artificial Sequence
  Description of Artificial Sequence: Synthetic oligonucleotide
attccgcagccggttcatttg

SEQ ID NO: 18311 - DNA, 21 bp, Artificial Sequence
  Description of Artificial Sequence: Synthetic oligonucleotide
attccgcgtgcggatgctcgg

SEQ ID NO: 18312 - DNA, 21 bp, Artificial Sequence
  Description of Artificial Sequence: Synthetic oligonucleotide
attcctcggttttcgacgatg

SEQ ID NO: 18313 - DNA, 21 bp, Artificial Sequence
  Description of Artificial Sequence: Synthetic oligonucleotide
attccgcggccgtctgtgcat

SEQ ID NO: 18314 - DNA, 21 bp, Artificial Sequence
  Description of Artificial Sequence: Synthetic oligonucleotide
attcctaggtcgaatatttct

SEQ ID NO: 18315 - DNA, 21 bp, Artificial Sequence
  Description of Artificial Sequence: Synthetic oligonucleotide
attcctcggactgctttgcag

SEQ ID NO: 18316 - DNA, 21 bp, Artificial Sequence
  Description of Artificial Sequence: Synthetic oligonucleotide
attccgagttttaagcgtgag

SEQ ID NO: 18317 - DNA, 21 bp, Artificial Sequence
  Description of Artificial Sequence: Synthetic oligonucleotide
attccttcgttttctaagcct

SEQ ID NO: 18318 - DNA, 21 bp, Artificial Sequence
  Description of Artificial Sequence: Synthetic oligonucleotide
attccttctaattgtaagcct

SEQ ID NO: 18319 - DNA, 21 bp, Artificial Sequence
  Description of Artificial Sequence: Synthetic oligonucleotide
attccgagtccttctcatgag

SEQ ID NO: 18320 - DNA, 21 bp, Artificial Sequence
  Description of Artificial Sequence: Synthetic oligonucleotide
attccgtctcgttatgctatg

SEQ ID NO: 18321 - DNA, 21 bp, Artificial Sequence
  Description of Artificial Sequence: Synthetic oligonucleotide
attccgtctgtgccggtgtct

SEQ ID NO: 18322 - DNA, 21 bp, Artificial Sequence
  Description of Artificial Sequence: Synthetic oligonucleotide
attccgactatttcgcatggg

SEQ ID NO: 18323 - DNA, 21 bp, Artificial Sequence
  Description of Artificial Sequence: Synthetic oligonucleotide
attcctactctgcctgctatg

SEQ ID NO: 18324 - DNA, 21 bp, Artificial Sequence
  Description of Artificial Sequence: Synthetic oligonucleotide
attccgacgcctaataatgtt

SEQ ID NO: 18325 - DNA, 21 bp, Artificial Sequence
  Description of Artificial Sequence: Synthetic oligonucleotide
attcctactactgctttgggg

SEQ ID NO: 18326 - DNA, 21 bp, Artificial Sequence
  Description of Artificial Sequence: Synthetic oligonucleotide
attccggtttttcgttctgag

SEQ ID NO: 18327 - DNA, 21 bp, Artificial Sequence
  Description of Artificial Sequence: Synthetic oligonucleotide
attccggttggtcagtataat

SEQ ID NO: 18328 - DNA, 21 bp, Artificial Sequence
  Description of Artificial Sequence: Synthetic oligonucleotide
attcctgttaggctgacgcag

SEQ ID NO: 18329 - DNA, 21 bp, Artificial Sequence
  Description of Artificial Sequence: Synthetic oligonucleotide
attccttatatgcttgatcct

SEQ ID NO: 18330 - DNA, 21 bp, Artificial Sequence
  Description of Artificial Sequence: Synthetic oligonucleotide
attcaggctgtgtcgagtttg

SEQ ID NO: 18331 - DNA, 21 bp, Artificial Sequence
  Description of Artificial Sequence: Synthetic oligonucleotide
attcaggatgagacggtgtct

SEQ ID NO: 18332 - DNA, 21 bp, Artificial Sequence
  Description of Artificial Sequence: Synthetic oligonucleotide
attcaggagtcggctaggatg

SEQ ID NO: 18333 - DNA, 21 bp, Artificial Sequence
  Description of Artificial Sequence: Synthetic oligonucleotide
attcagtttaggtcggctacg

SEQ ID NO: 18334 - DNA, 21 bp, Artificial Sequence
  Description of Artificial Sequence: Synthetic oligonucleotide
attcagtttgtgcctgttgat

SEQ ID NO: 18335 - DNA, 21 bp, Artificial Sequence
  Description of Artificial Sequence: Synthetic oligonucleotide
attcagggtttgagtgcgctg

SEQ ID NO: 18336 - DNA, 21 bp, Artificial Sequence
  Description of Artificial Sequence: Synthetic oligonucleotide
attcaggggcgtcttacgact

SEQ ID NO: 18337 - DNA, 21 bp, Artificial Sequence
  Description of Artificial Sequence: Synthetic oligonucleotide
attcagcatcagccgctgact

SEQ ID NO: 18338 - DNA, 21 bp, Artificial Sequence
  Description of Artificial Sequence: Synthetic oligonucleotide
attcagattaagtctcttaat

SEQ ID NO: 18339 - DNA, 21 bp, Artificial Sequence
  Description of Artificial Sequence: Synthetic oligonucleotide
attcagattcaggagaggcgt

SEQ ID NO: 18340 - DNA, 21 bp, Artificial Sequence
  Description of Artificial Sequence: Synthetic oligonucleotide
attcagttgaagagtactgtt

SEQ ID NO: 18341 - DNA, 21 bp, Artificial Sequence
  Description of Artificial Sequence: Synthetic oligonucleotide
attcagcttaggattaatgct

SEQ ID NO: 18342 - DNA, 21 bp, Artificial Sequence
  Description of Artificial Sequence: Synthetic oligonucleotide
attcagctttcggctgcttcg

SEQ ID NO: 18343 - DNA, 21 bp, Artificial Sequence
  Description of Artificial Sequence: Synthetic oligonucleotide
attcagaatggttatcagttt

SEQ ID NO: 18344 - DNA, 21 bp, Artificial Sequence
  Description of Artificial Sequence: Synthetic oligonucleotide
attcagaatcatcatcagttg

SEQ ID NO: 18345 - DNA, 21 bp, Artificial Sequence
  Description of Artificial Sequence: Synthetic oligonucleotide
attcagaatactcctccgact

SEQ ID NO: 18346 - DNA, 21 bp, Artificial Sequence
  Description of Artificial Sequence: Synthetic oligonucleotide
attcagaatgtgcctttgcat

SEQ ID NO: 18347 - DNA, 21 bp, Artificial Sequence
  Description of Artificial Sequence: Synthetic oligonucleotide
attcagcggccgagtgatatt

SEQ ID NO: 18348 - DNA, 21 bp, Artificial Sequence
  Description of Artificial Sequence: Synthetic oligonucleotide
attcagcgttcggttgaggcg

SEQ ID NO: 18349 - DNA, 21 bp, Artificial Sequence
  Description of Artificial Sequence: Synthetic oligonucleotide
attcagcgggtggctcagggg

SEQ ID NO: 18350 - DNA, 21 bp, Artificial Sequence
  Description of Artificial Sequence: Synthetic oligonucleotide
attcagagtattaatcttccg

SEQ ID NO: 18351 - DNA, 21 bp, Artificial Sequence
  Description of Artificial Sequence: Synthetic oligonucleotide
attcagagtccgctgttggcg

SEQ ID NO: 18352 - DNA, 21 bp, Artificial Sequence
  Description of Artificial Sequence: Synthetic oligonucleotide
attcagtctactaggctggtg

SEQ ID NO: 18353 - DNA, 21 bp, Artificial Sequence
  Description of Artificial Sequence: Synthetic oligonucleotide
attcagtcgtataatactttg

SEQ ID NO: 18354 - DNA, 21 bp, Artificial Sequence
  Description of Artificial Sequence: Synthetic oligonucleotide
attcagactcgtagtgatatg

SEQ ID NO: 18355 - DNA, 21 bp, Artificial Sequence
  Description of Artificial Sequence: Synthetic oligonucleotide
attcagacggtttcggctgtg

SEQ ID NO: 18356 - DNA, 21 bp, Artificial Sequence
  Description of Artificial Sequence: Synthetic oligonucleotide
attcgtgctctggctgggcat

SEQ ID NO: 18357 - DNA, 21 bp, Artificial Sequence
  Description of Artificial Sequence: Synthetic oligonucleotide
attagggcttctcagactatt

SEQ ID NO: 18358 - DNA, 21 bp, Artificial Sequence
  Description of Artificial Sequence: Synthetic oligonucleotide
attcgggcgacgtcttcggag

SEQ ID NO: 18359 - DNA, 21 bp, Artificial Sequence
  Description of Artificial Sequence: Synthetic oligonucleotide
attcgggatgtgcatgtggtt

SEQ ID NO: 18360 - DNA, 21 bp, Artificial Sequence
  Description of Artificial Sequence: Synthetic oligonucleotide
attagggagccgacggctatg

SEQ ID NO: 18361 - DNA, 21 bp, Artificial Sequence
  Description of Artificial Sequence: Synthetic oligonucleotide
attaggggggcgttgggtatt

SEQ ID NO: 18362 - DNA, 21 bp, Artificial Sequence
  Description of Artificial Sequence: Synthetic oligonucleotide
attcggggtaattttctgtct

SEQ ID NO: 18363 - DNA, 21 bp, Artificial Sequence
  Description of Artificial Sequence: Synthetic oligonucleotide
attcgtggtactcctgcgttt

SEQ ID NO: 18364 - DNA, 21 bp, Artificial Sequence
  Description of Artificial Sequence: Synthetic oligonucleotide
attaggcatgggattgctgct

SEQ ID NO: 18365 - DNA, 21 bp, Artificial Sequence
  Description of Artificial Sequence: Synthetic oligonucleotide
attaggattcctgagctgccg

SEQ ID NO: 18366 - DNA, 21 bp, Artificial Sequence
  Description of Artificial Sequence: Synthetic oligonucleotide
attcgtattccgatgactcct

SEQ ID NO: 18367 - DNA, 21 bp, Artificial Sequence
  Description of Artificial Sequence: Synthetic oligonucleotide
attaggaagtcgccgaatgag

SEQ ID NO: 18368 - DNA, 21 bp, Artificial Sequence
  Description of Artificial Sequence: Synthetic oligonucleotide
attcgtctggagtattcggcg

SEQ ID NO: 18369 - DNA, 21 bp, Artificial Sequence
  Description of Artificial Sequence: Synthetic oligonucleotide
attcgtttggggtcttttgct

SEQ ID NO: 18370 - DNA, 21 bp, Artificial Sequence
  Description of Artificial Sequence: Synthetic oligonucleotide
attcggcttcagaattctatt

SEQ ID NO: 18371 - DNA, 21 bp, Artificial Sequence
  Description of Artificial Sequence: Synthetic oligonucleotide
attcgtctttctgataaggct

SEQ ID NO: 18372 - DNA, 21 bp, Artificial Sequence
  Description of Artificial Sequence: Synthetic oligonucleotide
attcggatgagtacgcagctt

SEQ ID NO: 18373 - DNA, 21 bp, Artificial Sequence
  Description of Artificial Sequence: Synthetic oligonucleotide
attcggaatggtagtgatgat

SEQ ID NO: 18374 - DNA, 21 bp, Artificial Sequence
  Description of Artificial Sequence: Synthetic oligonucleotide
attcgtaatattattgatttt

SEQ ID NO: 18375 - DNA, 21 bp, Artificial Sequence
  Description of Artificial Sequence: Synthetic oligonucleotide
attaggcctctgaatatgcct

SEQ ID NO: 18376 - DNA, 21 bp, Artificial Sequence
  Description of Artificial Sequence: Synthetic oligonucleotide
attcgtcctactgaggggatg

SEQ ID NO: 18377 - DNA, 21 bp, Artificial Sequence
  Description of Artificial Sequence: Synthetic oligonucleotide
attaggcaggagtgtcgtatt

SEQ ID NO: 18378 - DNA, 21 bp, Artificial Sequence
  Description of Artificial Sequence: Synthetic oligonucleotide
attaggcagattccgtatgct

SEQ ID NO: 18379 - DNA, 21 bp, Artificial Sequence
  Description of Artificial Sequence: Synthetic oligonucleotide
attcgtcagagttcggttaat

SEQ ID NO: 18380 - DNA, 21 bp, Artificial Sequence
  Description of Artificial Sequence: Synthetic oligonucleotide
attcggagtggtcagccgctg

SEQ ID NO: 18381 - DNA, 21 bp, Artificial Sequence
  Description of Artificial Sequence: Synthetic oligonucleotide
attcgttctattactgatacg

SEQ ID NO: 18382 - DNA, 21 bp, Artificial Sequence
  Description of Artificial Sequence: Synthetic oligonucleotide
attcggagtcttgcgactgcg

SEQ ID NO: 18383 - DNA, 21 bp, Artificial Sequence
  Description of Artificial Sequence: Synthetic oligonucleotide
attcggagtcctcttcctagt

SEQ ID NO: 18384 - DNA, 21 bp, Artificial Sequence
  Description of Artificial Sequence: Synthetic oligonucleotide
attcgtagtagtggtatgatg

SEQ ID NO: 18385 - DNA, 21 bp, Artificial Sequence
  Description of Artificial Sequence: Synthetic oligonucleotide
attaggtcttctcctccgacg

SEQ ID NO: 18386 - DNA, 21 bp, Artificial Sequence
  Description of Artificial Sequence: Synthetic oligonucleotide
attaggtcggttagtgaggtt

SEQ ID NO: 18387 - DNA, 21 bp, Artificial Sequence
  Description of Artificial Sequence: Synthetic oligonucleotide
attaggacgcttggtagtact

SEQ ID NO: 18388 - DNA, 21 bp, Artificial Sequence
  Description of Artificial Sequence: Synthetic oligonucleotide
attcgtacgacggcggctttt

SEQ ID NO: 18389 - DNA, 21 bp, Artificial Sequence
  Description of Artificial Sequence: Synthetic oligonucleotide
attagggtggagaatgagctg

SEQ ID NO: 18390 - DNA, 21 bp, Artificial Sequence
  Description of Artificial Sequence: Synthetic oligonucleotide
attcgggttaatgatactggg

SEQ ID NO: 18391 - DNA, 21 bp, Artificial Sequence
  Description of Artificial Sequence: Synthetic oligonucleotide
attcgggtgccgacgagttcg

SEQ ID NO: 18392 - DNA, 21 bp, Artificial Sequence
  Description of Artificial Sequence: Synthetic oligonucleotide
attcgggtttctgcgattcat

SEQ ID NO: 18393 - DNA, 21 bp, Artificial Sequence
  Description of Artificial Sequence: Synthetic oligonucleotide
atttctgctgctagtcgtgcg

SEQ ID NO: 18394 - DNA, 21 bp, Artificial Sequence
  Description of Artificial Sequence: Synthetic oligonucleotide
attagtgctgcggttatggct

SEQ ID NO: 18395 - DNA, 21 bp, Artificial Sequence
  Description of Artificial Sequence: Synthetic oligonucleotide
attagtgctgggccgatgccg

SEQ ID NO: 18396 - DNA, 21 bp, Artificial Sequence
  Description of Artificial Sequence: Synthetic oligonucleotide
atttctgcgatttctgctcag

SEQ ID NO: 18397 - DNA, 21 bp, Artificial Sequence
  Description of Artificial Sequence: Synthetic oligonucleotide
atttctgctaatatgtttagt

SEQ ID NO: 18398 - DNA, 21 bp, Artificial Sequence
  Description of Artificial Sequence: Synthetic oligonucleotide
atttctgctcgtcctacgatt

SEQ ID NO: 18399 - DNA, 21 bp, Artificial Sequence
  Description of Artificial Sequence: Synthetic oligonucleotide
attagtgcgtcgcatagtagt

SEQ ID NO: 18400 - DNA, 21 bp, Artificial Sequence
  Description of Artificial Sequence: Synthetic oligonucleotide
atttctgctactacgtcgtct

SEQ ID NO: 18401 - DNA, 21 bp, Artificial Sequence
  Description of Artificial Sequence: Synthetic oligonucleotide
atttcggatcagcagtatacg

SEQ ID NO: 18402 - DNA, 21 bp, Artificial Sequence
  Description of Artificial Sequence: Synthetic oligonucleotide
atttcggagtgtgttgggggt

SEQ ID NO: 18403 - DNA, 21 bp, Artificial Sequence
  Description of Artificial Sequence: Synthetic oligonucleotide
atttctgagcatattatgagt

SEQ ID NO: 18404 - DNA, 21 bp, Artificial Sequence
  Description of Artificial Sequence: Synthetic oligonucleotide
attagtgagcctactagtgtg

SEQ ID NO: 18405 - DNA, 21 bp, Artificial Sequence
  Description of Artificial Sequence: Synthetic oligonucleotide
attagtgagagttctcgttat

SEQ ID NO: 18406 - DNA, 21 bp, Artificial Sequence
  Description of Artificial Sequence: Synthetic oligonucleotide
atttcttttcggattgagaat

SEQ ID NO: 18407 - DNA, 21 bp, Artificial Sequence
  Description of Artificial Sequence: Synthetic oligonucleotide
atttctggtgcggttgatcgt

SEQ ID NO: 18408 - DNA, 21 bp, Artificial Sequence
  Description of Artificial Sequence: Synthetic oligonucleotide
attagtggtaagttggcgact

SEQ ID NO: 18409 - DNA, 21 bp, Artificial Sequence
  Description of Artificial Sequence: Synthetic oligonucleotide
attagtggtaatccgaatgct

SEQ ID NO: 18410 - DNA, 21 bp, Artificial Sequence
  Description of Artificial Sequence: Synthetic oligonucleotide
atttctgggccgcctactccg

SEQ ID NO: 18411 - DNA, 21 bp, Artificial Sequence
  Description of Artificial Sequence: Synthetic oligonucleotide
atttcgggtcggaatgcgact

SEQ ID NO: 18412 - DNA, 21 bp, Artificial Sequence
  Description of Artificial Sequence: Synthetic oligonucleotide
atttcgcattcggataatgcg

SEQ ID NO: 18413 - DNA, 21 bp, Artificial Sequence
  Description of Artificial Sequence: Synthetic oligonucleotide
atttctattcagctgcgtgat

SEQ ID NO: 18414 - DNA, 21 bp, Artificial Sequence
  Description of Artificial Sequence: Synthetic oligonucleotide
attagtattaggacggggcct

SEQ ID NO: 18415 - DNA, 21 bp, Artificial Sequence
  Description of Artificial Sequence: Synthetic oligonucleotide
attagtaaggcggaggcgatt

SEQ ID NO: 18416 - DNA, 21 bp, Artificial Sequence
  Description of Artificial Sequence: Synthetic oligonucleotide
atttcgaaggcgtatcctaat

SEQ ID NO: 18417 - DNA, 21 bp, Artificial Sequence
  Description of Artificial Sequence: Synthetic oligonucleotide
attagtaaggatggtgctgtg

SEQ ID NO: 18418 - DNA, 21 bp, Artificial Sequence
  Description of Artificial Sequence: Synthetic oligonucleotide
atttcgaaggataatgctctg

SEQ ID NO: 18419 - DNA, 21 bp, Artificial Sequence
  Description of Artificial Sequence: Synthetic oligonucleotide
atttctaagcttaatggtccg

SEQ ID NO: 18420 - DNA, 21 bp, Artificial Sequence
  Description of Artificial Sequence: Synthetic oligonucleotide
atttcgaagtcttataatggg

SEQ ID NO: 18421 - DNA, 21 bp, Artificial Sequence
  Description of Artificial Sequence: Synthetic oligonucleotide
atttcgttggatcggcattct

SEQ ID NO: 18422 - DNA, 21 bp, Artificial Sequence
  Description of Artificial Sequence: Synthetic oligonucleotide
attagtcttttgcgtaatact

SEQ ID NO: 18423 - DNA, 21 bp, Artificial Sequence
  Description of Artificial Sequence: Synthetic oligonucleotide
atttctttgcagacttcgctg

SEQ ID NO: 18424 - DNA, 21 bp, Artificial Sequence
  Description of Artificial Sequence: Synthetic oligonucleotide
attagtcttcggtttaatgat

SEQ ID NO: 18425 - DNA, 21 bp, Artificial Sequence
  Description of Artificial Sequence: Synthetic oligonucleotide
attagtctgtctgctctggct

SEQ ID NO: 18426 - DNA, 21 bp, Artificial Sequence
  Description of Artificial Sequence: Synthetic oligonucleotide
atttcgatgaagccgatttct

SEQ ID NO: 18427 - DNA, 21 bp, Artificial Sequence
  Description of Artificial Sequence: Synthetic oligonucleotide
atttctatgcttcgtccgact

SEQ ID NO: 18428 - DNA, 21 bp, Artificial Sequence
  Description of Artificial Sequence: Synthetic oligonucleotide
attagtatgactgttcattct

SEQ ID NO: 18429 - DNA, 21 bp, Artificial Sequence
  Description of Artificial Sequence: Synthetic oligonucleotide
atttcgatggttcggcagggg

SEQ ID NO: 18430 - DNA, 21 bp, Artificial Sequence
  Description of Artificial Sequence: Synthetic oligonucleotide
atttctaatgcgatgactcag

SEQ ID NO: 18431 - DNA, 21 bp, Artificial Sequence
  Description of Artificial Sequence: Synthetic oligonucleotide
atttcgaatgggcgtgctgtt

SEQ ID NO: 18432 - DNA, 21 bp, Artificial Sequence
  Description of Artificial Sequence: Synthetic oligonucleotide
attagtaatagtcggtcgacg

SEQ ID NO: 18433 - DNA, 21 bp, Artificial Sequence
  Description of Artificial Sequence: Synthetic oligonucleotide
atttcgaattcgagtccgtct

SEQ ID NO: 18434 - DNA, 21 bp, Artificial Sequence
  Description of Artificial Sequence: Synthetic oligonucleotide
attagtaatgtgcagcttgcg

SEQ ID NO: 18435 - DNA, 21 bp, Artificial Sequence
  Description of Artificial Sequence: Synthetic oligonucleotide
atttctccggcgccttttccg

SEQ ID NO: 18436 - DNA, 21 bp, Artificial Sequence
  Description of Artificial Sequence: Synthetic oligonucleotide
attagtccggatccgatgttg

SEQ ID NO: 18437 - DNA, 21 bp, Artificial Sequence
  Description of Artificial Sequence: Synthetic oligonucleotide
atttcgccgtttacggttgag

SEQ ID NO: 18438 - DNA, 21 bp, Artificial Sequence
  Description of Artificial Sequence: Synthetic oligonucleotide
atttctccgcgtgatgttagt

SEQ ID NO: 18439 - DNA, 21 bp, Artificial Sequence
  Description of Artificial Sequence: Synthetic oligonucleotide
atttctcctaggaaggctacg

SEQ ID NO: 18440 - DNA, 21 bp, Artificial Sequence
  Description of Artificial Sequence: Synthetic oligonucleotide
attagtccgaggaataattct

SEQ ID NO: 18441 - DNA, 21 bp, Artificial Sequence
  Description of Artificial Sequence: Synthetic oligonucleotide
attagtcctcggtatcctcat

SEQ ID NO: 18442 - DNA, 21 bp, Artificial Sequence
  Description of Artificial Sequence: Synthetic oligonucleotide
atttcgccgtctggtccggct

SEQ ID NO: 18443 - DNA, 21 bp, Artificial Sequence
  Description of Artificial Sequence: Synthetic oligonucleotide
atttcgccggtgcggaatgtg

SEQ ID NO: 18444 - DNA, 21 bp, Artificial Sequence
  Description of Artificial Sequence: Synthetic oligonucleotide
attagtccttatgagaatgcg

SEQ ID NO: 18445 - DNA, 21 bp, Artificial Sequence
  Description of Artificial Sequence: Synthetic oligonucleotide
atttcgccttatcgggttagt

SEQ ID NO: 18446 - DNA, 21 bp, Artificial Sequence
  Description of Artificial Sequence: Synthetic oligonucleotide
atttctcagcagcggcttaag

SEQ ID NO: 18447 - DNA, 21 bp, Artificial Sequence
  Description of Artificial Sequence: Synthetic oligonucleotide
atttcgcagcgttggcctgat

SEQ ID NO: 18448 - DNA, 21 bp, Artificial Sequence
  Description of Artificial Sequence: Synthetic oligonucleotide
attagtcagacgaggtatgat

SEQ ID NO: 18449 - DNA, 21 bp, Artificial Sequence
  Description of Artificial Sequence: Synthetic oligonucleotide
atttctcgtgatactgttatg

SEQ ID NO: 18450 - DNA, 21 bp, Artificial Sequence
  Description of Artificial Sequence: Synthetic oligonucleotide
attagtaggctggtttcttcg

SEQ ID NO: 18451 - DNA, 21 bp, Artificial Sequence
  Description of Artificial Sequence: Synthetic oligonucleotide
attagtcgtagtaatattatt

SEQ ID NO: 18452 - DNA, 21 bp, Artificial Sequence
  Description of Artificial Sequence: Synthetic oligonucleotide
atttcgcgggtggttacgatg

SEQ ID NO: 18453 - DNA, 21 bp, Artificial Sequence
  Description of Artificial Sequence: Synthetic oligonucleotide
atttcgtcggcttttgctccg

SEQ ID NO: 18454 - DNA, 21 bp, Artificial Sequence
  Description of Artificial Sequence: Synthetic oligonucleotide
atttctagtcattgtatggct

SEQ ID NO: 18455 - DNA, 21 bp, Artificial Sequence
  Description of Artificial Sequence: Synthetic oligonucleotide
atttctagtaagcttgttagt

SEQ ID NO: 18456 - DNA, 21 bp, Artificial Sequence
  Description of Artificial Sequence: Synthetic oligonucleotide
atttcgtcgaatccgactgtt

SEQ ID NO: 18457 - DNA, 21 bp, Artificial Sequence
  Description of Artificial Sequence: Synthetic oligonucleotide
atttcgtcttcggctactttg

SEQ ID NO: 18458 - DNA, 21 bp, Artificial Sequence
  Description of Artificial Sequence: Synthetic oligonucleotide
attagttctactaatacggct

SEQ ID NO: 18459 - DNA, 21 bp, Artificial Sequence
  Description of Artificial Sequence: Synthetic oligonucleotide
attagtagtacggttgagatt

SEQ ID NO: 18460 - DNA, 21 bp, Artificial Sequence
  Description of Artificial Sequence: Synthetic oligonucleotide
atttcgtcggtgcagaatcct

SEQ ID NO: 18461 - DNA, 21 bp, Artificial Sequence
  Description of Artificial Sequence: Synthetic oligonucleotide
atttcgacgcatctgaagagt

SEQ ID NO: 18462 - DNA, 21 bp, Artificial Sequence
  Description of Artificial Sequence: Synthetic oligonucleotide
atttctactcatacgaagagt

SEQ ID NO: 18463 - DNA, 21 bp, Artificial Sequence
  Description of Artificial Sequence: Synthetic oligonucleotide
atttctactaatgtgaggtct

SEQ ID NO: 18464 - DNA, 21 bp, Artificial Sequence
  Description of Artificial Sequence: Synthetic oligonucleotide
atttcgacgcgtaatcctgag

SEQ ID NO: 18465 - DNA, 21 bp, Artificial Sequence
  Description of Artificial Sequence: Synthetic oligonucleotide
atttctacgagtcagcagcat

SEQ ID NO: 18466 - DNA, 21 bp, Artificial Sequence
  Description of Artificial Sequence: Synthetic oligonucleotide
atttctacgacgacggtgccg

SEQ ID NO: 18467 - DNA, 21 bp, Artificial Sequence
  Description of Artificial Sequence: Synthetic oligonucleotide
atttctacggttttggtggat

SEQ ID NO: 18468 - DNA, 21 bp, Artificial Sequence
  Description of Artificial Sequence: Synthetic oligonucleotide
attagtacgtgggagtatgag

SEQ ID NO: 18469 - DNA, 21 bp, Artificial Sequence
  Description of Artificial Sequence: Synthetic oligonucleotide
atttctacgtggcgtcctact

SEQ ID NO: 18470 - DNA, 21 bp, Artificial Sequence
  Description of Artificial Sequence: Synthetic oligonucleotide
atttcggttaagggtcagcct

SEQ ID NO: 18471 - DNA, 21 bp, Artificial Sequence
  Description of Artificial Sequence: Synthetic oligonucleotide
atttcggtgtcgcagacggat

SEQ ID NO: 18472 - DNA, 21 bp, Artificial Sequence
  Description of Artificial Sequence: Synthetic oligonucleotide
atttcggttacttcttctagt

SEQ ID NO: 18473 - DNA, 21 bp, Artificial Sequence
  Description of Artificial Sequence: Synthetic oligonucleotide
atttcgtatggtacgaggagt

SEQ ID NO: 18474 - DNA, 21 bp, Artificial Sequence
  Description of Artificial Sequence: Synthetic oligonucleotide
atttcttataatgctaaggtt

SEQ ID NO: 18475 - DNA, 21 bp, Artificial Sequence
  Description of Artificial Sequence: Synthetic oligonucleotide
attagttatccgaagccggtt

SEQ ID NO: 18476 - DNA, 21 bp, Artificial Sequence
  Description of Artificial Sequence: Synthetic oligonucleotide
attactgctcctcattcgatg

SEQ ID NO: 18477 - DNA, 21 bp, Artificial Sequence
  Description of Artificial Sequence: Synthetic oligonucleotide
attactgctcgtgtgaatgct

SEQ ID NO: 18478 - DNA, 21 bp, Artificial Sequence
  Description of Artificial Sequence: Synthetic oligonucleotide
attacggctcgttatccgacg

SEQ ID NO: 18479 - DNA, 21 bp, Artificial Sequence
  Description of Artificial Sequence: Synthetic oligonucleotide
attacggcgtcgggtttggtt

SEQ ID NO: 18480 - DNA, 21 bp, Artificial Sequence
  Description of Artificial Sequence: Synthetic oligonucleotide
attactgctactcagcgtatg

SEQ ID NO: 18481 - DNA, 21 bp, Artificial Sequence
  Description of Artificial Sequence: Synthetic oligonucleotide
attacggatgctgcgaatcct

SEQ ID NO: 18482 - DNA, 21 bp, Artificial Sequence
  Description of Artificial Sequence: Synthetic oligonucleotide
attactgatagggttgcgatt

SEQ ID NO: 18483 - DNA, 21 bp, Artificial Sequence
  Description of Artificial Sequence: Synthetic oligonucleotide
attactgagaggtcttgtact

SEQ ID NO: 18484 - DNA, 21 bp, Artificial Sequence
  Description of Artificial Sequence: Synthetic oligonucleotide
attacggaggttaagcgtggg

SEQ ID NO: 18485 - DNA, 21 bp, Artificial Sequence
  Description of Artificial Sequence: Synthetic oligonucleotide
attacgtttgatcatgttact

SEQ ID NO: 18486 - DNA, 21 bp, Artificial Sequence
  Description of Artificial Sequence: Synthetic oligonucleotide
attactttttctggttcttcg

SEQ ID NO: 18487 - DNA, 21 bp, Artificial Sequence
  Description of Artificial Sequence: Synthetic oligonucleotide
attactggtgatcttaatggg

SEQ ID NO: 18488 - DNA, 21 bp, Artificial Sequence
  Description of Artificial Sequence: Synthetic oligonucleotide
attacgggtgggcggccgggt

SEQ ID NO: 18489 - DNA, 21 bp, Artificial Sequence
  Description of Artificial Sequence: Synthetic oligonucleotide
attactggtaatcggactcct

SEQ ID NO: 18490 - DNA, 21 bp, Artificial Sequence
  Description of Artificial Sequence: Synthetic oligonucleotide
attactgggtctaatcgtgat

SEQ ID NO: 18491 - DNA, 21 bp, Artificial Sequence
  Description of Artificial Sequence: Synthetic oligonucleotide
attacgcatgcgtcgtcggat

SEQ ID NO: 18492 - DNA, 21 bp, Artificial Sequence
  Description of Artificial Sequence: Synthetic oligonucleotide
attactcatattcgtcttgat

SEQ ID NO: 18493 - DNA, 21 bp, Artificial Sequence
  Description of Artificial Sequence: Synthetic oligonucleotide
attacgcatagtattcagcgg

SEQ ID NO: 18494 - DNA, 21 bp, Artificial Sequence
  Description of Artificial Sequence: Synthetic oligonucleotide
attactcttgggtctactggg

SEQ ID NO: 18495 - DNA, 21 bp, Artificial Sequence
  Description of Artificial Sequence: Synthetic oligonucleotide
attactcttagtagtcagggg

SEQ ID NO: 18496 - DNA, 21 bp, Artificial Sequence
  Description of Artificial Sequence: Synthetic oligonucleotide
attactctgtatcctaatagt

SEQ ID NO: 18497 - DNA, 21 bp, Artificial Sequence
  Description of Artificial Sequence: Synthetic oligonucleotide
attactatgttggctggtgat

SEQ ID NO: 18498 - DNA, 21 bp, Artificial Sequence
  Description of Artificial Sequence: Synthetic oligonucleotide
attactaatgatcgtacggtg

SEQ ID NO: 18499 - DNA, 21 bp, Artificial Sequence
  Description of Artificial Sequence: Synthetic oligonucleotide
attacgaatgagcctcctcgt

SEQ ID NO: 18500 - DNA, 21 bp, Artificial Sequence
  Description of Artificial Sequence: Synthetic oligonucleotide
attactcctcttacggcgggt

SEQ ID NO: 18501 - DNA, 21 bp, Artificial Sequence
  Description of Artificial Sequence: Synthetic oligonucleotide
attactcctatgtctattgtg

SEQ ID NO: 18502 - DNA, 21 bp, Artificial Sequence
  Description of Artificial Sequence: Synthetic oligonucleotide
attacgccgtcgcatgggtct

SEQ ID NO: 18503 - DNA, 21 bp, Artificial Sequence
  Description of Artificial Sequence: Synthetic oligonucleotide
attactcctgttcatgcggag

SEQ ID NO: 18504 - DNA, 21 bp, Artificial Sequence
  Description of Artificial Sequence: Synthetic oligonucleotide
attacgccgtatgtgaggggg

SEQ ID NO: 18505 - DNA, 21 bp, Artificial Sequence
  Description of Artificial Sequence: Synthetic oligonucleotide
attactcagcctcatgcgaag

SEQ ID NO: 18506 - DNA, 21 bp, Artificial Sequence
  Description of Artificial Sequence: Synthetic oligonucleotide
attactaggctgaagcttgat

SEQ ID NO: 18507 - DNA, 21 bp, Artificial Sequence
  Description of Artificial Sequence: Synthetic oligonucleotide
attacgcggtcggtggctcct

SEQ ID NO: 18508 - DNA, 21 bp, Artificial Sequence
  Description of Artificial Sequence: Synthetic oligonucleotide
attacgagtgcggatcctcag

SEQ ID NO: 18509 - DNA, 21 bp, Artificial Sequence
  Description of Artificial Sequence: Synthetic oligonucleotide
attacttctaagactcaggct

SEQ ID NO: 18510 - DNA, 21 bp, Artificial Sequence
  Description of Artificial Sequence: Synthetic oligonucleotide
attacgtctcctaggttgcag

SEQ ID NO: 18511 - DNA, 21 bp, Artificial Sequence
  Description of Artificial Sequence: Synthetic oligonucleotide
attacttcgacgctgccgccg

SEQ ID NO: 18512 - DNA, 21 bp, Artificial Sequence
  Description of Artificial Sequence: Synthetic oligonucleotide
attacttctacgcgtgcgtcg

SEQ ID NO: 18513 - DNA, 21 bp, Artificial Sequence
  Description of Artificial Sequence: Synthetic oligonucleotide
attactagtgtggataggctt

SEQ ID NO: 18514 - DNA, 21 bp, Artificial Sequence
  Description of Artificial Sequence: Synthetic oligonucleotide
attacgagtgttcctgtttct

SEQ ID NO: 18515 - DNA, 21 bp, Artificial Sequence
  Description of Artificial Sequence: Synthetic oligonucleotide
attacgactaagtattctcag

SEQ ID NO: 18516 - DNA, 21 bp, Artificial Sequence
  Description of Artificial Sequence: Synthetic oligonucleotide
attacgactctggggcctact

SEQ ID NO: 18517 - DNA, 21 bp, Artificial Sequence
  Description of Artificial Sequence: Synthetic oligonucleotide
attacgacgaattctgggagg

SEQ ID NO: 18518 - DNA, 21 bp, Artificial Sequence
  Description of Artificial Sequence: Synthetic oligonucleotide
attactactcctgcggagcag

SEQ ID NO: 18519 - DNA, 21 bp, Artificial Sequence
  Description of Artificial Sequence: Synthetic oligonucleotide
attacgactcgtgagactacg

SEQ ID NO: 18520 - DNA, 21 bp, Artificial Sequence
  Description of Artificial Sequence: Synthetic oligonucleotide
attactacttctgatagggcg

SEQ ID NO: 18521 - DNA, 21 bp, Artificial Sequence
  Description of Artificial Sequence: Synthetic oligonucleotide
attacgacttataatgagaat

SEQ ID NO: 18522 - DNA, 21 bp, Artificial Sequence
  Description of Artificial Sequence: Synthetic oligonucleotide
attactgtgccgcatcattat

SEQ ID NO: 18523 - DNA, 21 bp, Artificial Sequence
  Description of Artificial Sequence: Synthetic oligonucleotide
attactgtttctcgggcggat

SEQ ID NO: 18524 - DNA, 21 bp, Artificial Sequence
  Description of Artificial Sequence: Synthetic oligonucleotide
attacgtatcagaatgcggag

SEQ ID NO: 18525 - DNA, 21 bp, Artificial Sequence
  Description of Artificial Sequence: Synthetic oligonucleotide
attgttgctacttgtactgcg

SEQ ID NO: 18526 - DNA, 21 bp, Artificial Sequence
  Description of Artificial Sequence: Synthetic oligonucleotide
attgttgaggctagtattatt

SEQ ID NO: 18527 - DNA, 21 bp, Artificial Sequence
  Description of Artificial Sequence: Synthetic oligonucleotide
attgttgaggggcttggggat

SEQ ID NO: 18528 - DNA, 21 bp, Artificial Sequence
  Description of Artificial Sequence: Synthetic oligonucleotide
attgttgagacttatcttacg

SEQ ID NO: 18529 - DNA, 21 bp, Artificial Sequence
  Description of Artificial Sequence: Synthetic oligonucleotide
attgttggttcgaagttggat

SEQ ID NO: 18530 - DNA, 21 bp, Artificial Sequence
  Description of Artificial Sequence: Synthetic oligonucleotide
attgttaaggggattcctatg

SEQ ID NO: 18531 - DNA, 21 bp, Artificial Sequence
  Description of Artificial Sequence: Synthetic oligonucleotide
attgttttggagtctatgtct

SEQ ID NO: 18532 - DNA, 21 bp, Artificial Sequence
  Description of Artificial Sequence: Synthetic oligonucleotide
attgtgttgcatttggatggg

SEQ ID NO: 18533 - DNA, 21 bp, Artificial Sequence
  Description of Artificial Sequence: Synthetic oligonucleotide
attgtgaatctttctacgtat

SEQ ID NO: 18534 - DNA, 21 bp, Artificial Sequence
  Description of Artificial Sequence: Synthetic oligonucleotide
attgttcaggtggcgacgtct

SEQ ID NO: 18535 - DNA, 21 bp, Artificial Sequence
  Description of Artificial Sequence: Synthetic oligonucleotide
attgtgaggcagacgattagt

SEQ ID NO: 18536 - DNA, 21 bp, Artificial Sequence
  Description of Artificial Sequence: Synthetic oligonucleotide
attgttcggtctcggcctgag

SEQ ID NO: 18537 - DNA, 21 bp, Artificial Sequence
  Description of Artificial Sequence: Synthetic oligonucleotide
attgtttcgcatgattttgag

SEQ ID NO: 18538 - DNA, 21 bp, Artificial Sequence
  Description of Artificial Sequence: Synthetic oligonucleotide
attgtgtctcggattaattcg

SEQ ID NO: 18539 - DNA, 21 bp, Artificial Sequence
  Description of Artificial Sequence: Synthetic oligonucleotide
attgtgtcgtcgtatactgat

SEQ ID NO: 18540 - DNA, 21 bp, Artificial Sequence
  Description of Artificial Sequence: Synthetic oligonucleotide
attgttactgggtcgggtggg

SEQ ID NO: 18541 - DNA, 21 bp, Artificial Sequence
  Description of Artificial Sequence: Synthetic oligonucleotide
attgtgactggtagtcgtgag

SEQ ID NO: 18542 - DNA, 21 bp, Artificial Sequence
  Description of Artificial Sequence: Synthetic oligonucleotide
attgtgactaagtgtccgggg

SEQ ID NO: 18543 - DNA, 21 bp, Artificial Sequence
  Description of Artificial Sequence: Synthetic oligonucleotide
attgtgacttcgaatgttact

SEQ ID NO: 18544 - DNA, 21 bp, Artificial Sequence
  Description of Artificial Sequence: Synthetic oligonucleotide
attgttacgtctacgcagcct

SEQ ID NO: 18545 - DNA, 21 bp, Artificial Sequence
  Description of Artificial Sequence: Synthetic oligonucleotide
atttgggattcttgtagggat

SEQ ID NO: 18546 - DNA, 21 bp, Artificial Sequence
  Description of Artificial Sequence: Synthetic oligonucleotide
atttataaggttgattcgtct

SEQ ID NO: 18547 - DNA, 21 bp, Artificial Sequence
  Description of Artificial Sequence: Synthetic oligonucleotide
atttatcttcggaatgatcag

SEQ ID NO: 18548 - DNA, 21 bp, Artificial Sequence
  Description of Artificial Sequence: Synthetic oligonucleotide
atttatcagtctgagagtcat

SEQ ID NO: 18549 - DNA, 21 bp, Artificial Sequence
  Description of Artificial Sequence: Synthetic oligonucleotide
atttatcagtcgcagcatcat

SEQ ID NO: 18550 - DNA, 21 bp, Artificial Sequence
  Description of Artificial Sequence: Synthetic oligonucleotide
atttatagtgctaagcagcct

SEQ ID NO: 18551 - DNA, 21 bp, Artificial Sequence
  Description of Artificial Sequence: Synthetic oligonucleotide
atttatagtgtgggggctact

SEQ ID NO: 18552 - DNA, 21 bp, Artificial Sequence
  Description of Artificial Sequence: Synthetic oligonucleotide
atttatactgggcaggttcat

SEQ ID NO: 18553 - DNA, 21 bp, Artificial Sequence
  Description of Artificial Sequence: Synthetic oligonucleotide
aaggcggctaagctgttggat

SEQ ID NO: 18554 - DNA, 21 bp, Artificial Sequence
  Description of Artificial Sequence: Synthetic oligonucleotide
aaggcggctaatcagagttct

SEQ ID NO: 18555 - DNA, 21 bp, Artificial Sequence
  Description of Artificial Sequence: Synthetic oligonucleotide
aaggctgatcattctaaggag

SEQ ID NO: 18556 - DNA, 21 bp, Artificial Sequence
  Description of Artificial Sequence: Synthetic oligonucleotide
aaggctgatattcaggtgcgt

SEQ ID NO: 18557 - DNA, 21 bp, Artificial Sequence
  Description of Artificial Sequence: Synthetic oligonucleotide
aaggcggagactgtggcgcct

SEQ ID NO: 18558 - DNA, 21 bp, Artificial Sequence
  Description of Artificial Sequence: Synthetic oligonucleotide
aaggcttttattgggattgat

SEQ ID NO: 18559 - DNA, 21 bp, Artificial Sequence
  Description of Artificial Sequence: Synthetic oligonucleotide
aaggcttttagtccggcgctt

SEQ ID NO: 18560 - DNA, 21 bp, Artificial Sequence
  Description of Artificial Sequence: Synthetic oligonucleotide
aaggcgggttgttcgattagt

SEQ ID NO: 18561 - DNA, 21 bp, Artificial Sequence
  Description of Artificial Sequence: Synthetic oligonucleotide
aaggctggtgttcctgttccg

SEQ ID NO: 18562 - DNA, 21 bp, Artificial Sequence
  Description of Artificial Sequence: Synthetic oligonucleotide
aaggctcattctactcagact

SEQ ID NO: 18563 - DNA, 21 bp, Artificial Sequence
  Description of Artificial Sequence: Synthetic oligonucleotide
aaggcgatttctcagcctttt

SEQ ID NO: 18564 - DNA, 21 bp, Artificial Sequence
  Description of Artificial Sequence: Synthetic oligonucleotide
aaggctcttcctaattatagt

SEQ ID NO: 18565 - DNA, 21 bp, Artificial Sequence
  Description of Artificial Sequence: Synthetic oligonucleotide
aaggctttgcagaggtatgat

SEQ ID NO: 18566 - DNA, 21 bp, Artificial Sequence
  Description of Artificial Sequence: Synthetic oligonucleotide
aaggcgatgtcgatggattcg

SEQ ID NO: 18567 - DNA, 21 bp, Artificial Sequence
  Description of Artificial Sequence: Synthetic oligonucleotide
aaggcgaatcagcttgatact

SEQ ID NO: 18568 - DNA, 21 bp, Artificial Sequence
  Description of Artificial Sequence: Synthetic oligonucleotide
aaggcgccgcttccggatttt

SEQ ID NO: 18569 - DNA, 21 bp, Artificial Sequence
  Description of Artificial Sequence: Synthetic oligonucleotide
aaggctcctacgccgtctgtg

SEQ ID NO: 18570 - DNA, 21 bp, Artificial Sequence
  Description of Artificial Sequence: Synthetic oligonucleotide
aaggctcaggagcgggcgact

SEQ ID NO: 18571 - DNA, 21 bp, Artificial Sequence
  Description of Artificial Sequence: Synthetic oligonucleotide
aaggctcagtcggctaatttt

SEQ ID NO: 18572 - DNA, 21 bp, Artificial Sequence
  Description of Artificial Sequence: Synthetic oligonucleotide
aaggcgagtgcgagtattgcg

SEQ ID NO: 18573 - DNA, 21 bp, Artificial Sequence
  Description of Artificial Sequence: Synthetic oligonucleotide
aaggcgagtttttcgcctgat

SEQ ID NO: 18574 - DNA, 21 bp, Artificial Sequence
  Description of Artificial Sequence: Synthetic oligonucleotide
aaggcgtctcaggcttgtatg

SEQ ID NO: 18575 - DNA, 21 bp, Artificial Sequence
  Description of Artificial Sequence: Synthetic oligonucleotide
aaggcgtcgcagttttctccg

SEQ ID NO: 18576 - DNA, 21 bp, Artificial Sequence
  Description of Artificial Sequence: Synthetic oligonucleotide
aaggcgtcgcagtctggtacg

SEQ ID NO: 18577 - DNA, 21 bp, Artificial Sequence
  Description of Artificial Sequence: Synthetic oligonucleotide
aaggctactcctggggttcat

SEQ ID NO: 18578 - DNA, 21 bp, Artificial Sequence
  Description of Artificial Sequence: Synthetic oligonucleotide
aaggctactccgaatgttggt

SEQ ID NO: 18579 - DNA, 21 bp, Artificial Sequence
  Description of Artificial Sequence: Synthetic oligonucleotide
aaggctgtggcgtctactttt

SEQ ID NO: 18580 - DNA, 21 bp, Artificial Sequence
  Description of Artificial Sequence: Synthetic oligonucleotide
aaggcggttatttctcctact

SEQ ID NO: 18581 - DNA, 21 bp, Artificial Sequence
  Description of Artificial Sequence: Synthetic oligonucleotide
aaggctgtgaatggtctgtcg

SEQ ID NO: 18582 - DNA, 21 bp, Artificial Sequence
  Description of Artificial Sequence: Synthetic oligonucleotide
aaggctgtgtcttgggggcct

SEQ ID NO: 18583 - DNA, 21 bp, Artificial Sequence
  Description of Artificial Sequence: Synthetic oligonucleotide
aagtgtcggacgtgtagtgtt

SEQ ID NO: 18584 - DNA, 21 bp, Artificial Sequence
  Description of Artificial Sequence: Synthetic oligonucleotide
aaggatgagcctaattatggg

SEQ ID NO: 18585 - DNA, 21 bp, Artificial Sequence
  Description of Artificial Sequence: Synthetic oligonucleotide
aaggatttttcgaatactttg

SEQ ID NO: 18586 - DNA, 21 bp, Artificial Sequence
  Description of Artificial Sequence: Synthetic oligonucleotide
aaggatgggccttttcctatg

SEQ ID NO: 18587 - DNA, 21 bp, Artificial Sequence
  Description of Artificial Sequence: Synthetic oligonucleotide
aaggataagaatccttcggat

SEQ ID NO: 18588 - DNA, 21 bp, Artificial Sequence
  Description of Artificial Sequence: Synthetic oligonucleotide
aaggataaggttgagatgaat

SEQ ID NO: 18589 - DNA, 21 bp, Artificial Sequence
  Description of Artificial Sequence: Synthetic oligonucleotide
aaggatttgacgcgtcatgcg

SEQ ID NO: 18590 - DNA, 21 bp, Artificial Sequence
  Description of Artificial Sequence: Synthetic oligonucleotide
aaggatatgcggtctaaggat

SEQ ID NO: 18591 - DNA, 21 bp, Artificial Sequence
  Description of Artificial Sequence: Synthetic oligonucleotide
aaggataataagattcagagt

SEQ ID NO: 18592 - DNA, 21 bp, Artificial Sequence
  Description of Artificial Sequence: Synthetic oligonucleotide
aaggatcctggtcgtatttcg

SEQ ID NO: 18593 - DNA, 21 bp, Artificial Sequence
  Description of Artificial Sequence: Synthetic oligonucleotide
aaggatcctatttcttcggtt

SEQ ID NO: 18594 - DNA, 21 bp, Artificial Sequence
  Description of Artificial Sequence: Synthetic oligonucleotide
aaggatcctcttaattgtgcg

SEQ ID NO: 18595 - DNA, 21 bp, Artificial Sequence
  Description of Artificial Sequence: Synthetic oligonucleotide
aaggatcctccgcagctgcat

SEQ ID NO: 18596 - DNA, 21 bp, Artificial Sequence
  Description of Artificial Sequence: Synthetic oligonucleotide
aaggatcctcagactactgat

SEQ ID NO: 18597 - DNA, 21 bp, Artificial Sequence
  Description of Artificial Sequence: Synthetic oligonucleotide
aaggataggtcggctcctcct

SEQ ID NO: 18598 - DNA, 21 bp, Artificial Sequence
  Description of Artificial Sequence: Synthetic oligonucleotide
aaggatcggtcgctggatccg

SEQ ID NO: 18599 - DNA, 21 bp, Artificial Sequence
  Description of Artificial Sequence: Synthetic oligonucleotide
aaggattctgctgcgaatttt

SEQ ID NO: 18600 - DNA, 21 bp, Artificial Sequence
  Description of Artificial Sequence: Synthetic oligonucleotide
aaggattcgacgttgctgagt

SEQ ID NO: 18601 - DNA, 21 bp, Artificial Sequence
  Description of Artificial Sequence: Synthetic oligonucleotide
aaggatacggatcctttgtcg

SEQ ID NO: 18602 - DNA, 21 bp, Artificial Sequence
  Description of Artificial Sequence: Synthetic oligonucleotide
aaggatacgattcatgttagt

SEQ ID NO: 18603 - DNA, 21 bp, Artificial Sequence
  Description of Artificial Sequence: Synthetic oligonucleotide
aaggatacgcttacttttagg

SEQ ID NO: 18604 - DNA, 21 bp, Artificial Sequence
  Description of Artificial Sequence: Synthetic oligonucleotide
aaggatactccgaatacggtt

SEQ ID NO: 18605 - DNA, 21 bp, Artificial Sequence
  Description of Artificial Sequence: Synthetic oligonucleotide
aaggatactgtgttttatcct

SEQ ID NO: 18606 - DNA, 21 bp, Artificial Sequence
  Description of Artificial Sequence: Synthetic oligonucleotide
aaggaggattcgtatcatccg

SEQ ID NO: 18607 - DNA, 21 bp, Artificial Sequence
  Description of Artificial Sequence: Synthetic oligonucleotide
aaggaggatactaatcggacg

SEQ ID NO: 18608 - DNA, 21 bp, Artificial Sequence
  Description of Artificial Sequence: Synthetic oligonucleotide
aaggagggtggggagcctcgg

SEQ ID NO: 18609 - DNA, 21 bp, Artificial Sequence
  Description of Artificial Sequence: Synthetic oligonucleotide
aaggagggttctaatcggggt

SEQ ID NO: 18610 - DNA, 21 bp, Artificial Sequence
  Description of Artificial Sequence: Synthetic oligonucleotide
aaggagcatggtgttattttt

SEQ ID NO: 18611 - DNA, 21 bp, Artificial Sequence
  Description of Artificial Sequence: Synthetic oligonucleotide
aaggagattggttttgcgact

SEQ ID NO: 18612 - DNA, 21 bp, Artificial Sequence
  Description of Artificial Sequence: Synthetic oligonucleotide
aaggagaagccgttgaattct

SEQ ID NO: 18613 - DNA, 21 bp, Artificial Sequence
  Description of Artificial Sequence: Synthetic oligonucleotide
aaggagttggcggttgggttg

SEQ ID NO: 18614 - DNA, 21 bp, Artificial Sequence
  Description of Artificial Sequence: Synthetic oligonucleotide
aaggagcttgagttgcatcct

SEQ ID NO: 18615 - DNA, 21 bp, Artificial Sequence
  Description of Artificial Sequence: Synthetic oligonucleotide
aaggagatggatattcattgg

SEQ ID NO: 18616 - DNA, 21 bp, Artificial Sequence
  Description of Artificial Sequence: Synthetic oligonucleotide
aaggagatgtctccgactcgg

SEQ ID NO: 18617 - DNA, 21 bp, Artificial Sequence
  Description of Artificial Sequence: Synthetic oligonucleotide
aaggagaatcctgctattgtt

SEQ ID NO: 18618 - DNA, 21 bp, Artificial Sequence
  Description of Artificial Sequence: Synthetic oligonucleotide
aaggagccgaaggtttggctg

SEQ ID NO: 18619 - DNA, 21 bp, Artificial Sequence
  Description of Artificial Sequence: Synthetic oligonucleotide
aaggagccgtcgacgacgagt

SEQ ID NO: 18620 - DNA, 21 bp, Artificial Sequence
  Description of Artificial Sequence: Synthetic oligonucleotide
aaggagtctattcggcagagt

SEQ ID NO: 18621 - DNA, 21 bp, Artificial Sequence
  Description of Artificial Sequence: Synthetic oligonucleotide
aaggagtcttcttcttatctg

SEQ ID NO: 18622 - DNA, 21 bp, Artificial Sequence
  Description of Artificial Sequence: Synthetic oligonucleotide
aaggagacgcagaatatgccg

SEQ ID NO: 18623 - DNA, 21 bp, Artificial Sequence
  Description of Artificial Sequence: Synthetic oligonucleotide
aaggaggttaagacttctggt

SEQ ID NO: 18624 - DNA, 21 bp, Artificial Sequence
  Description of Artificial Sequence: Synthetic oligonucleotide
aaggagtggactaattcgggt

SEQ ID NO: 18625 - DNA, 21 bp, Artificial Sequence
  Description of Artificial Sequence: Synthetic oligonucleotide
aagtttgcggcgatgcttaat

SEQ ID NO: 18626 - DNA, 21 bp, Artificial Sequence
  Description of Artificial Sequence: Synthetic oligonucleotide
aagtttgatttggcgtcggat

SEQ ID NO: 18627 - DNA, 21 bp, Artificial Sequence
  Description of Artificial Sequence: Synthetic oligonucleotide
aagtttgatagtgagttgtct

SEQ ID NO: 18628 - DNA, 21 bp, Artificial Sequence
  Description of Artificial Sequence: Synthetic oligonucleotide
aagtttggggataatgtgctt

SEQ ID NO: 18629 - DNA, 21 bp, Artificial Sequence
  Description of Artificial Sequence: Synthetic oligonucleotide
aagtttaattctgcgtctgat

SEQ ID NO: 18630 - DNA, 21 bp, Artificial Sequence
  Description of Artificial Sequence: Synthetic oligonucleotide
aagtttccggaggctcagggt

SEQ ID NO: 18631 - DNA, 21 bp, Artificial Sequence
  Description of Artificial Sequence: Synthetic oligonucleotide
aagtttcctcatccgcctgcg

SEQ ID NO: 18632 - DNA, 21 bp, Artificial Sequence
  Description of Artificial Sequence: Synthetic oligonucleotide
aagtttcagcgtgatcaggtt

SEQ ID NO: 18633 - DNA, 21 bp, Artificial Sequence
  Description of Artificial Sequence: Synthetic oligonucleotide
aagtttcagtcggtggggatt

SEQ ID NO: 18634 - DNA, 21 bp, Artificial Sequence
  Description of Artificial Sequence: Synthetic oligonucleotide
aagttttctcagacggtgccg

SEQ ID NO: 18635 - DNA, 21 bp, Artificial Sequence
  Description of Artificial Sequence: Synthetic oligonucleotide
aagttttcgtctaatattgat

SEQ ID NO: 18636 - DNA, 21 bp, Artificial Sequence
  Description of Artificial Sequence: Synthetic oligonucleotide
aagggtgctttgggtgttcct

SEQ ID NO: 18637 - DNA, 21 bp, Artificial Sequence
  Description of Artificial Sequence: Synthetic oligonucleotide
aagggggatcatgttacggat

SEQ ID NO: 18638 - DNA, 21 bp, Artificial Sequence
  Description of Artificial Sequence: Synthetic oligonucleotide
aagggtgatattatttcggag

SEQ ID NO: 18639 - DNA, 21 bp, Artificial Sequence
  Description of Artificial Sequence: Synthetic oligonucleotide
aagggtgatattcaggtgtcg

SEQ ID NO: 18640 - DNA, 21 bp, Artificial Sequence
  Description of Artificial Sequence: Synthetic oligonucleotide
aagggggagattcctattgag

SEQ ID NO: 18641 - DNA, 21 bp, Artificial Sequence
  Description of Artificial Sequence: Synthetic oligonucleotide
aagggtgaggtgcagagtatg

SEQ ID NO: 18642 - DNA, 21 bp, Artificial Sequence
  Description of Artificial Sequence: Synthetic oligonucleotide
aagggggagtggcctcgggag

SEQ ID NO: 18643 - DNA, 21 bp, Artificial Sequence
  Description of Artificial Sequence: Synthetic oligonucleotide
aagggttttgatgagaggagt

SEQ ID NO: 18644 - DNA, 21 bp, Artificial Sequence
  Description of Artificial Sequence: Synthetic oligonucleotide
aaggggggtgttgcgcagtat

SEQ ID NO: 18645 - DNA, 21 bp, Artificial Sequence
  Description of Artificial Sequence: Synthetic oligonucleotide
aagggtttgggtgtggtgccg

SEQ ID NO: 18646 - DNA, 21 bp, Artificial Sequence
  Description of Artificial Sequence: Synthetic oligonucleotide
aaggggcctagtattgcttgg

SEQ ID NO: 18647 - DNA, 21 bp, Artificial Sequence
  Description of Artificial Sequence: Synthetic oligonucleotide
aagggtccttctccggggttg

SEQ ID NO: 18648 - DNA, 21 bp, Artificial Sequence
  Description of Artificial Sequence: Synthetic oligonucleotide
aagggtcaggggcagttgaat

SEQ ID NO: 18649 - DNA, 21 bp, Artificial Sequence
  Description of Artificial Sequence: Synthetic oligonucleotide
aaggggcagtcgtcgaattcg

SEQ ID NO: 18650 - DNA, 21 bp, Artificial Sequence
  Description of Artificial Sequence: Synthetic oligonucleotide
aagggtcgtgatgcgacgtcg

SEQ ID NO: 18651 - DNA, 21 bp, Artificial Sequence
  Description of Artificial Sequence: Synthetic oligonucleotide
aagggttcgggggtgattgtg

SEQ ID NO: 18652 - DNA, 21 bp, Artificial Sequence
  Description of Artificial Sequence: Synthetic oligonucleotide
aagggttcgtcttctatgcat

SEQ ID NO: 18653 - DNA, 21 bp, Artificial Sequence
  Description of Artificial Sequence: Synthetic oligonucleotide
aaggggactgatttgcttgct

SEQ ID NO: 18654 - DNA, 21 bp, Artificial Sequence
  Description of Artificial Sequence: Synthetic oligonucleotide
aaggggactactgtgtcgaat

SEQ ID NO: 18655 - DNA, 21 bp, Artificial Sequence
  Description of Artificial Sequence: Synthetic oligonucleotide
aaggggacgacggttgttgtt

SEQ ID NO: 18656 - DNA, 21 bp, Artificial Sequence
  Description of Artificial Sequence: Synthetic oligonucleotide
aagggtacttatgctaatacg

SEQ ID NO: 18657 - DNA, 21 bp, Artificial Sequence
  Description of Artificial Sequence: Synthetic oligonucleotide
aagggtacttataatgctcat

SEQ ID NO: 18658 - DNA, 21 bp, Artificial Sequence
  Description of Artificial Sequence: Synthetic oligonucleotide
aagggtgtgattcctgagaag

SEQ ID NO: 18659 - DNA, 21 bp, Artificial Sequence
  Description of Artificial Sequence: Synthetic oligonucleotide
aagggggttctgacggctgtt

SEQ ID NO: 18660 - DNA, 21 bp, Artificial Sequence
  Description of Artificial Sequence: Synthetic oligonucleotide
aagggggttaattttctggat

SEQ ID NO: 18661 - DNA, 21 bp, Artificial Sequence
  Description of Artificial Sequence: Synthetic oligonucleotide
aagcatgctcagactattcct

SEQ ID NO: 18662 - DNA, 21 bp, Artificial Sequence
  Description of Artificial Sequence: Synthetic oligonucleotide
aagcatgatgattctgggatg

SEQ ID NO: 18663 - DNA, 21 bp, Artificial Sequence
  Description of Artificial Sequence: Synthetic oligonucleotide
aagcatgagaattggatgact

SEQ ID NO: 18664 - DNA, 21 bp, Artificial Sequence
  Description of Artificial Sequence: Synthetic oligonucleotide
aagcatgagcctcatgggtcg

SEQ ID NO: 18665 - DNA, 21 bp, Artificial Sequence
  Description of Artificial Sequence: Synthetic oligonucleotide
aagcatggggttgagattctt

SEQ ID NO: 18666 - DNA, 21 bp, Artificial Sequence
  Description of Artificial Sequence: Synthetic oligonucleotide
aagcatcatactgtggagatg

SEQ ID NO: 18667 - DNA, 21 bp, Artificial Sequence
  Description of Artificial Sequence: Synthetic oligonucleotide
aagcatattccggggcctgat

SEQ ID NO: 18668 - DNA, 21 bp, Artificial Sequence
  Description of Artificial Sequence: Synthetic oligonucleotide
aagcatattccttcggatagg

SEQ ID NO: 18669 - DNA, 21 bp, Artificial Sequence
  Description of Artificial Sequence: Synthetic oligonucleotide
aagcatcctaatgttccgacg

SEQ ID NO: 18670 - DNA, 21 bp, Artificial Sequence
  Description of Artificial Sequence: Synthetic oligonucleotide
aagcatcctcctgcgttgact

SEQ ID NO: 18671 - DNA, 21 bp, Artificial Sequence
  Description of Artificial Sequence: Synthetic oligonucleotide
aagcatcctcctgctgttctt

SEQ ID NO: 18672 - DNA, 21 bp, Artificial Sequence
  Description of Artificial Sequence: Synthetic oligonucleotide
aagcatcagagtacgattatt

SEQ ID NO: 18673 - DNA, 21 bp, Artificial Sequence
  Description of Artificial Sequence: Synthetic oligonucleotide
aagcattctgctgagctgggg

SEQ ID NO: 18674 - DNA, 21 bp, Artificial Sequence
  Description of Artificial Sequence: Synthetic oligonucleotide
aagcattctatggcgactaat

SEQ ID NO: 18675 - DNA, 21 bp, Artificial Sequence
  Description of Artificial Sequence: Synthetic oligonucleotide
aagcattcgaatactccgaat

SEQ ID NO: 18676 - DNA, 21 bp, Artificial Sequence
  Description of Artificial Sequence: Synthetic oligonucleotide
aagcattcttatatggagact

SEQ ID NO: 18677 - DNA, 21 bp, Artificial Sequence
  Description of Artificial Sequence: Synthetic oligonucleotide
aagcatacggcgttggtgcct

SEQ ID NO: 18678 - DNA, 21 bp, Artificial Sequence
  Description of Artificial Sequence: Synthetic oligonucleotide
aagcatactgcttcgatggcg

SEQ ID NO: 18679 - DNA, 21 bp, Artificial Sequence
  Description of Artificial Sequence: Synthetic oligonucleotide
aagcatactcagaatgatggg

SEQ ID NO: 18680 - DNA, 21 bp, Artificial Sequence
  Description of Artificial Sequence: Synthetic oligonucleotide
aagcatactagttttgctcag

SEQ ID NO: 18681 - DNA, 21 bp, Artificial Sequence
  Description of Artificial Sequence: Synthetic oligonucleotide
aagcatacgacgacgatgttt

SEQ ID NO: 18682 - DNA, 21 bp, Artificial Sequence
  Description of Artificial Sequence: Synthetic oligonucleotide
aagattgctcctatgcctcat

SEQ ID NO: 18683 - DNA, 21 bp, Artificial Sequence
  Description of Artificial Sequence: Synthetic oligonucleotide
aagattgctcgttctgagggg

SEQ ID NO: 18684 - DNA, 21 bp, Artificial Sequence
  Description of Artificial Sequence: Synthetic oligonucleotide
aagattgcttcttcgcttggt

SEQ ID NO: 18685 - DNA, 21 bp, Artificial Sequence
  Description of Artificial Sequence: Synthetic oligonucleotide
aagattgcgacgacgccgctg

SEQ ID NO: 18686 - DNA, 21 bp, Artificial Sequence
  Description of Artificial Sequence: Synthetic oligonucleotide
aagattcataatttgaattcg

SEQ ID NO: 18687 - DNA, 21 bp, Artificial Sequence
  Description of Artificial Sequence: Synthetic oligonucleotide
aagattaatactgctcttact

SEQ ID NO: 18688 - DNA, 21 bp, Artificial Sequence
  Description of Artificial Sequence: Synthetic oligonucleotide
aagattccgatgcagtcggcg

SEQ ID NO: 18689 - DNA, 21 bp, Artificial Sequence
  Description of Artificial Sequence: Synthetic oligonucleotide
aagattacggcgactgttacg

SEQ ID NO: 18690 - DNA, 21 bp, Artificial Sequence
  Description of Artificial Sequence: Synthetic oligonucleotide
aagaaggatctttctatgtat

SEQ ID NO: 18691 - DNA, 21 bp, Artificial Sequence
  Description of Artificial Sequence: Synthetic oligonucleotide
aagaaggatacgggtattaat

SEQ ID NO: 18692 - DNA, 21 bp, Artificial Sequence
  Description of Artificial Sequence: Synthetic oligonucleotide
aagaagcctgaggattggagg

SEQ ID NO: 18693 - DNA, 21 bp, Artificial Sequence
  Description of Artificial Sequence: Synthetic oligonucleotide
aagaagcagagtgttgagccg

SEQ ID NO: 18694 - DNA, 21 bp, Artificial Sequence
  Description of Artificial Sequence: Synthetic oligonucleotide
aagaaggtgtcggatgctttg

SEQ ID NO: 18695 - DNA, 21 bp, Artificial Sequence
  Description of Artificial Sequence: Synthetic oligonucleotide
aagctggcgggtaagagtgat

SEQ ID NO: 18696 - DNA, 21 bp, Artificial Sequence
  Description of Artificial Sequence: Synthetic oligonucleotide
aagttggcgcctagtgttacg

SEQ ID NO: 18697 - DNA, 21 bp, Artificial Sequence
  Description of Artificial Sequence: Synthetic oligonucleotide
aagttggcgtctgggttgcct

SEQ ID NO: 18698 - DNA, 21 bp, Artificial Sequence
  Description of Artificial Sequence: Synthetic oligonucleotide
aagcttgctagtccttctccg

SEQ ID NO: 18699 - DNA, 21 bp, Artificial Sequence
  Description of Artificial Sequence: Synthetic oligonucleotide
aagctggcgtctgtgagtgtt

SEQ ID NO: 18700 - DNA, 21 bp, Artificial Sequence
  Description of Artificial Sequence: Synthetic oligonucleotide
aagttggcgactacgcgggat

SEQ ID NO: 18701 - DNA, 21 bp, Artificial Sequence
  Description of Artificial Sequence: Synthetic oligonucleotide
aagcttgatattaattatccg

SEQ ID NO: 18702 - DNA, 21 bp, Artificial Sequence
  Description of Artificial Sequence: Synthetic oligonucleotide
aagctggagaatggttcgtgg

SEQ ID NO: 18703 - DNA, 21 bp, Artificial Sequence
  Description of Artificial Sequence: Synthetic oligonucleotide
aagttgggtgctgtttcgctt

SEQ ID NO: 18704 - DNA, 21 bp, Artificial Sequence
  Description of Artificial Sequence: Synthetic oligonucleotide
aagctgggtgagaatacggat

SEQ ID NO: 18705 - DNA, 21 bp, Artificial Sequence
  Description of Artificial Sequence: Synthetic oligonucleotide
aagttggggcatcttcattct

SEQ ID NO: 18706 - DNA, 21 bp, Artificial Sequence
  Description of Artificial Sequence: Synthetic oligonucleotide
aagttggggactacgtcgtcg

SEQ ID NO: 18707 - DNA, 21 bp, Artificial Sequence
  Description of Artificial Sequence: Synthetic oligonucleotide
aagcttcatgtgaatacgccg

SEQ ID NO: 18708 - DNA, 21 bp, Artificial Sequence
  Description of Artificial Sequence: Synthetic oligonucleotide
aagttgctgggtgctgtgggg

SEQ ID NO: 18709 - DNA, 21 bp, Artificial Sequence
  Description of Artificial Sequence: Synthetic oligonucleotide
aagcttctgaaggcgcctctg

SEQ ID NO: 18710 - DNA, 21 bp, Artificial Sequence
  Description of Artificial Sequence: Synthetic oligonucleotide
aagttgcttccggagccgggg

SEQ ID NO: 18711 - DNA, 21 bp, Artificial Sequence
  Description of Artificial Sequence: Synthetic oligonucleotide
aagcttcttccggggcagcct

SEQ ID NO: 18712 - DNA, 21 bp, Artificial Sequence
  Description of Artificial Sequence: Synthetic oligonucleotide
aagctgctgccgaatcctcct

SEQ ID NO: 18713 - DNA, 21 bp, Artificial Sequence
  Description of Artificial Sequence: Synthetic oligonucleotide
aagcttctttcgattatgggg

SEQ ID NO: 18714 - DNA, 21 bp, Artificial Sequence
  Description of Artificial Sequence: Synthetic oligonucleotide
aagctgttgtctactggtacg

SEQ ID NO: 18715 - DNA, 21 bp, Artificial Sequence
  Description of Artificial Sequence: Synthetic oligonucleotide
aagctgaatagtccggatgat

SEQ ID NO: 18716 - DNA, 21 bp, Artificial Sequence
  Description of Artificial Sequence: Synthetic oligonucleotide
aagcttcctaatgttactcct

SEQ ID NO: 18717 - DNA, 21 bp, Artificial Sequence
  Description of Artificial Sequence: Synthetic oligonucleotide
aagcttccttcggagttgatt

SEQ ID NO: 18718 - DNA, 21 bp, Artificial Sequence
  Description of Artificial Sequence: Synthetic oligonucleotide
aagcttcaggttcctttttct

SEQ ID NO: 18719 - DNA, 21 bp, Artificial Sequence
  Description of Artificial Sequence: Synthetic oligonucleotide
aagttgcgggatatttatcct

SEQ ID NO: 18720 - DNA, 21 bp, Artificial Sequence
  Description of Artificial Sequence: Synthetic oligonucleotide
aagctgtctggtgagattgtg

SEQ ID NO: 18721 - DNA, 21 bp, Artificial Sequence
  Description of Artificial Sequence: Synthetic oligonucleotide
aagcttagtcatcagcagttt

SEQ ID NO: 18722 - DNA, 21 bp, Artificial Sequence
  Description of Artificial Sequence: Synthetic oligonucleotide
aagcttagtccgactctgtct

SEQ ID NO: 18723 - DNA, 21 bp, Artificial Sequence
  Description of Artificial Sequence: Synthetic oligonucleotide
aagcttagttctcctgcgctg

SEQ ID NO: 18724 - DNA, 21 bp, Artificial Sequence
  Description of Artificial Sequence: Synthetic oligonucleotide
aagttgtcttcttcgtcttgg

SEQ ID NO: 18725 - DNA, 21 bp, Artificial Sequence
  Description of Artificial Sequence: Synthetic oligonucleotide
aagctttcgactgagtcttgg

SEQ ID NO: 18726 - DNA, 21 bp, Artificial Sequence
  Description of Artificial Sequence: Synthetic oligonucleotide
aagcttagttattcgacgctg

SEQ ID NO: 18727 - DNA, 21 bp, Artificial Sequence
  Description of Artificial Sequence: Synthetic oligonucleotide
aagcttactgagattgttgcg

SEQ ID NO: 18728 - DNA, 21 bp, Artificial Sequence
  Description of Artificial Sequence: Synthetic oligonucleotide
aagttgacgggttgtaatgat

SEQ ID NO: 18729 - DNA, 21 bp, Artificial Sequence
  Description of Artificial Sequence: Synthetic oligonucleotide
aagctgacgatgacggctcct

SEQ ID NO: 18730 - DNA, 21 bp, Artificial Sequence
  Description of Artificial Sequence: Synthetic oligonucleotide
aagcttacttcgccttatgcg

SEQ ID NO: 18731 - DNA, 21 bp, Artificial Sequence
  Description of Artificial Sequence: Synthetic oligonucleotide
aagctgacgtcttctcctact

SEQ ID NO: 18732 - DNA, 21 bp, Artificial Sequence
  Description of Artificial Sequence: Synthetic oligonucleotide
aagcttacttcgagtacggtt

SEQ ID NO: 18733 - DNA, 21 bp, Artificial Sequence
  Description of Artificial Sequence: Synthetic oligonucleotide
aagatggctgaggataaggtt

SEQ ID NO: 18734 - DNA, 21 bp, Artificial Sequence
  Description of Artificial Sequence: Synthetic oligonucleotide
aagatggatagtgtgcttccg

SEQ ID NO: 18735 - DNA, 21 bp, Artificial Sequence
  Description of Artificial Sequence: Synthetic oligonucleotide
aagatggagcatcggatgctg

SEQ ID NO: 18736 - DNA, 21 bp, Artificial Sequence
  Description of Artificial Sequence: Synthetic oligonucleotide
aagatggggactactcttggg

SEQ ID NO: 18737 - DNA, 21 bp, Artificial Sequence
  Description of Artificial Sequence: Synthetic oligonucleotide
aagatgctttctccgcaggtg

SEQ ID NO: 18738 - DNA, 21 bp, Artificial Sequence
  Description of Artificial Sequence: Synthetic oligonucleotide
aagatgaatagtgctgcgggt

SEQ ID NO: 18739 - DNA, 21 bp, Artificial Sequence
  Description of Artificial Sequence: Synthetic oligonucleotide
aagatgcctgaggcgttgcgg

SEQ ID NO: 18740 - DNA, 21 bp, Artificial Sequence
  Description of Artificial Sequence: Synthetic oligonucleotide
aagatgcctattccggtgccg

SEQ ID NO: 18741 - DNA, 21 bp, Artificial Sequence
  Description of Artificial Sequence: Synthetic oligonucleotide
aagatgtctcattctttggat

SEQ ID NO: 18742 - DNA, 21 bp, Artificial Sequence
  Description of Artificial Sequence: Synthetic oligonucleotide
aagaatgcgattaatatgatt

SEQ ID NO: 18743 - DNA, 21 bp, Artificial Sequence
  Description of Artificial Sequence: Synthetic oligonucleotide
aagaatgcgaagactattcct

SEQ ID NO: 18744 - DNA, 21 bp, Artificial Sequence
  Description of Artificial Sequence: Synthetic oligonucleotide
aagaatgctctgccgacgagt

SEQ ID NO: 18745 - DNA, 21 bp, Artificial Sequence
  Description of Artificial Sequence: Synthetic oligonucleotide
aagaatgcggtgtctggttct

SEQ ID NO: 18746 - DNA, 21 bp, Artificial Sequence
  Description of Artificial Sequence: Synthetic oligonucleotide
aagaatgctgtgactagtgtt

SEQ ID NO: 18747 - DNA, 21 bp, Artificial Sequence
  Description of Artificial Sequence: Synthetic oligonucleotide
aagaatgagcgtctgccgatg

SEQ ID NO: 18748 - DNA, 21 bp, Artificial Sequence
  Description of Artificial Sequence: Synthetic oligonucleotide
aagaatgagacttcgtctcct

SEQ ID NO: 18749 - DNA, 21 bp, Artificial Sequence
  Description of Artificial Sequence: Synthetic oligonucleotide
aagaatggggatattcattgt

SEQ ID NO: 18750 - DNA, 21 bp, Artificial Sequence
  Description of Artificial Sequence: Synthetic oligonucleotide
aagaatggtattactcctaat

SEQ ID NO: 18751 - DNA, 21 bp, Artificial Sequence
  Description of Artificial Sequence: Synthetic oligonucleotide
aagaatggtctgagtcctgcg

SEQ ID NO: 18752 - DNA, 21 bp, Artificial Sequence
  Description of Artificial Sequence: Synthetic oligonucleotide
aagaatggtacggctcagtct

SEQ ID NO: 18753 - DNA, 21 bp, Artificial Sequence
  Description of Artificial Sequence: Synthetic oligonucleotide
aagaatcatcagtatgcggcg

SEQ ID NO: 18754 - DNA, 21 bp, Artificial Sequence
  Description of Artificial Sequence: Synthetic oligonucleotide
aagaatctgccgttggtttcg

SEQ ID NO: 18755 - DNA, 21 bp, Artificial Sequence
  Description of Artificial Sequence: Synthetic oligonucleotide
aagaatctgtctttgggtggt

SEQ ID NO: 18756 - DNA, 21 bp, Artificial Sequence
  Description of Artificial Sequence: Synthetic oligonucleotide
aagaatcctctgttgtcgccg

SEQ ID NO: 18757 - DNA, 21 bp, Artificial Sequence
  Description of Artificial Sequence: Synthetic oligonucleotide
aagaatcctatgactgcgccg

SEQ ID NO: 18758 - DNA, 21 bp, Artificial Sequence
  Description of Artificial Sequence: Synthetic oligonucleotide
aagaatcctcaggagccgact

SEQ ID NO: 18759 - DNA, 21 bp, Artificial Sequence
  Description of Artificial Sequence: Synthetic oligonucleotide
aagaatcctagggatttgggg

SEQ ID NO: 18760 - DNA, 21 bp, Artificial Sequence
  Description of Artificial Sequence: Synthetic oligonucleotide
aagaatcagcctctgggttat

SEQ ID NO: 18761 - DNA, 21 bp, Artificial Sequence
  Description of Artificial Sequence: Synthetic oligonucleotide
aagaattctacgagtcagctg

SEQ ID NO: 18762 - DNA, 21 bp, Artificial Sequence
  Description of Artificial Sequence: Synthetic oligonucleotide
aagaatgttatgtctggtgct

SEQ ID NO: 18763 - DNA, 21 bp, Artificial Sequence
  Description of Artificial Sequence: Synthetic oligonucleotide
aagaattatagtgcggctgtt

SEQ ID NO: 18764 - DNA, 21 bp, Artificial Sequence
  Description of Artificial Sequence: Synthetic oligonucleotide
aagcctgctggtacggatagt

SEQ ID NO: 18765 - DNA, 21 bp, Artificial Sequence
  Description of Artificial Sequence: Synthetic oligonucleotide
aagcctgcgtctaattatgat

SEQ ID NO: 18766 - DNA, 21 bp, Artificial Sequence
  Description of Artificial Sequence: Synthetic oligonucleotide
aagcctgctacgagtccgggt

SEQ ID NO: 18767 - DNA, 21 bp, Artificial Sequence
  Description of Artificial Sequence: Synthetic oligonucleotide
aagccggctgtgcctgtttat

SEQ ID NO: 18768 - DNA, 21 bp, Artificial Sequence
  Description of Artificial Sequence: Synthetic oligonucleotide
aagcctgatcggcctcctgat

SEQ ID NO: 18769 - DNA, 21 bp, Artificial Sequence
  Description of Artificial Sequence: Synthetic oligonucleotide
aagccggagaatagtcatagt

SEQ ID NO: 18770 - DNA, 21 bp, Artificial Sequence
  Description of Artificial Sequence: Synthetic oligonucleotide
aagccgtttgagactgggcgt

SEQ ID NO: 18771 - DNA, 21 bp, Artificial Sequence
  Description of Artificial Sequence: Synthetic oligonucleotide
aagcctcatccgccgtctttt

SEQ ID NO: 18772 - DNA, 21 bp, Artificial Sequence
  Description of Artificial Sequence: Synthetic oligonucleotide
aagccgattctgcagagttcg

SEQ ID NO: 18773 - DNA, 21 bp, Artificial Sequence
  Description of Artificial Sequence: Synthetic oligonucleotide
aagccgttggcgcagctttct

SEQ ID NO: 18774 - DNA, 21 bp, Artificial Sequence
  Description of Artificial Sequence: Synthetic oligonucleotide
aagccgttggatcatcttacg

SEQ ID NO: 18775 - DNA, 21 bp, Artificial Sequence
  Description of Artificial Sequence: Synthetic oligonucleotide
aagcctttggaggttgagggg

SEQ ID NO: 18776 - DNA, 21 bp, Artificial Sequence
  Description of Artificial Sequence: Synthetic oligonucleotide
aagcctttgcaggtggatcct

SEQ ID NO: 18777 - DNA, 21 bp, Artificial Sequence
  Description of Artificial Sequence: Synthetic oligonucleotide
aagccgatggcgcatcttgag

SEQ ID NO: 18778 - DNA, 21 bp, Artificial Sequence
  Description of Artificial Sequence: Synthetic oligonucleotide
aagccgatggatcctactctt

SEQ ID NO: 18779 - DNA, 21 bp, Artificial Sequence
  Description of Artificial Sequence: Synthetic oligonucleotide
aagccgatgtcgattactcct

SEQ ID NO: 18780 - DNA, 21 bp, Artificial Sequence
  Description of Artificial Sequence: Synthetic oligonucleotide
aagcctaatgcggtgagtatg

SEQ ID NO: 18781 - DNA, 21 bp, Artificial Sequence
  Description of Artificial Sequence: Synthetic oligonucleotide
aagccgcctattcttactagt

SEQ ID NO: 18782 - DNA, 21 bp, Artificial Sequence
  Description of Artificial Sequence: Synthetic oligonucleotide
aagccgccgttggcgcaggat

SEQ ID NO: 18783 - DNA, 21 bp, Artificial Sequence
  Description of Artificial Sequence: Synthetic oligonucleotide
aagcctccgcgggaggctgat

SEQ ID NO: 18784 - DNA, 21 bp, Artificial Sequence
  Description of Artificial Sequence: Synthetic oligonucleotide
aagcctagggcgccttctgat

SEQ ID NO: 18785 - DNA, 21 bp, Artificial Sequence
  Description of Artificial Sequence: Synthetic oligonucleotide
aagccttcgggtcattcgtct

SEQ ID NO: 18786 - DNA, 21 bp, Artificial Sequence
  Description of Artificial Sequence: Synthetic oligonucleotide
aagccgtctgggccgccgact

SEQ ID NO: 18787 - DNA, 21 bp, Artificial Sequence
  Description of Artificial Sequence: Synthetic oligonucleotide
aagccgagtgtgccgactgtt

SEQ ID NO: 18788 - DNA, 21 bp, Artificial Sequence
  Description of Artificial Sequence: Synthetic oligonucleotide
aagccgacgggtatgcatctt

SEQ ID NO: 18789 - DNA, 21 bp, Artificial Sequence
  Description of Artificial Sequence: Synthetic oligonucleotide
aagccgactccgacgctgatg

SEQ ID NO: 18790 - DNA, 21 bp, Artificial Sequence
  Description of Artificial Sequence: Synthetic oligonucleotide
aagccgacggtgattccggct

SEQ ID NO: 18791 - DNA, 21 bp, Artificial Sequence
  Description of Artificial Sequence: Synthetic oligonucleotide
aagcctgttggtgagtttacg

SEQ ID NO: 18792 - DNA, 21 bp, Artificial Sequence
  Description of Artificial Sequence: Synthetic oligonucleotide
aagccggttcctcagcctgat

SEQ ID NO: 18793 - DNA, 21 bp, Artificial Sequence
  Description of Artificial Sequence: Synthetic oligonucleotide
aagcctgtgacgcttgataat

SEQ ID NO: 18794 - DNA, 21 bp, Artificial Sequence
  Description of Artificial Sequence: Synthetic oligonucleotide
aagcctgtgacgcctcattcg

SEQ ID NO: 18795 - DNA, 21 bp, Artificial Sequence
  Description of Artificial Sequence: Synthetic oligonucleotide
aagccttatttgccggagaat

SEQ ID NO: 18796 - DNA, 21 bp, Artificial Sequence
  Description of Artificial Sequence: Synthetic oligonucleotide
aagcaggcggatattccgcgt

SEQ ID NO: 18797 - DNA, 21 bp, Artificial Sequence
  Description of Artificial Sequence: Synthetic oligonucleotide
aagcaggcgctgacgatgact

SEQ ID NO: 18798 - DNA, 21 bp, Artificial Sequence
  Description of Artificial Sequence: Synthetic oligonucleotide
aagcaggatagggatcgtctt

SEQ ID NO: 18799 - DNA, 21 bp, Artificial Sequence
  Description of Artificial Sequence: Synthetic oligonucleotide
aagcagggtctgacgccgtct

SEQ ID NO: 18800 - DNA, 21 bp, Artificial Sequence
  Description of Artificial Sequence: Synthetic oligonucleotide
aagcagggtgtttggccgaat

SEQ ID NO: 18801 - DNA, 21 bp, Artificial Sequence
  Description of Artificial Sequence: Synthetic oligonucleotide
aagcagattcagcctaagaat

SEQ ID NO: 18802 - DNA, 21 bp, Artificial Sequence
  Description of Artificial Sequence: Synthetic oligonucleotide
aagcagaagcatcagtttgag

SEQ ID NO: 18803 - DNA, 21 bp, Artificial Sequence
  Description of Artificial Sequence: Synthetic oligonucleotide
aagcagctgccgattaatgtg

SEQ ID NO: 18804 - DNA, 21 bp, Artificial Sequence
  Description of Artificial Sequence: Synthetic oligonucleotide
aagcagatgcttgatccgacg

SEQ ID NO: 18805 - DNA, 21 bp, Artificial Sequence
  Description of Artificial Sequence: Synthetic oligonucleotide
aagcagatgaatgatctggct

SEQ ID NO: 18806 - DNA, 21 bp, Artificial Sequence
  Description of Artificial Sequence: Synthetic oligonucleotide
aagcagaatgttattaatact

SEQ ID NO: 18807 - DNA, 21 bp, Artificial Sequence
  Description of Artificial Sequence: Synthetic oligonucleotide
aagcagccgccgcagccgcct

SEQ ID NO: 18808 - DNA, 21 bp, Artificial Sequence
  Description of Artificial Sequence: Synthetic oligonucleotide
aagcagagggagcagcctatg

SEQ ID NO: 18809 - DNA, 21 bp, Artificial Sequence
  Description of Artificial Sequence: Synthetic oligonucleotide
aagcagagttctcatactacg

SEQ ID NO: 18810 - DNA, 21 bp, Artificial Sequence
  Description of Artificial Sequence: Synthetic oligonucleotide
aagcagtcttcgacgtcgatt

SEQ ID NO: 18811 - DNA, 21 bp, Artificial Sequence
  Description of Artificial Sequence: Synthetic oligonucleotide
aagcagactagtgttactggt

SEQ ID NO: 18812 - DNA, 21 bp, Artificial Sequence
  Description of Artificial Sequence: Synthetic oligonucleotide
aagcagacgactcctgtgttg

SEQ ID NO: 18813 - DNA, 21 bp, Artificial Sequence
  Description of Artificial Sequence: Synthetic oligonucleotide
aagcaggtgggttctatgcct

SEQ ID NO: 18814 - DNA, 21 bp, Artificial Sequence
  Description of Artificial Sequence: Synthetic oligonucleotide
aagcaggtttcttcggagagg

SEQ ID NO: 18815 - DNA, 21 bp, Artificial Sequence
  Description of Artificial Sequence: Synthetic oligonucleotide
aagcaggttgtttcggtgact

SEQ ID NO: 18816 - DNA, 21 bp, Artificial Sequence
  Description of Artificial Sequence: Synthetic oligonucleotide
aagcagtattcgtctagtgtt

SEQ ID NO: 18817 - DNA, 21 bp, Artificial Sequence
  Description of Artificial Sequence: Synthetic oligonucleotide
aagagggctaatgctattcct

SEQ ID NO: 18818 - DNA, 21 bp, Artificial Sequence
  Description of Artificial Sequence: Synthetic oligonucleotide
aagagggcggtggctgcggag

SEQ ID NO: 18819 - DNA, 21 bp, Artificial Sequence
  Description of Artificial Sequence: Synthetic oligonucleotide
aagagggatgctgctatgcct

SEQ ID NO: 18820 - DNA, 21 bp, Artificial Sequence
  Description of Artificial Sequence: Synthetic oligonucleotide
aagcgtgatgatatgaatgtg

SEQ ID NO: 18821 - DNA, 21 bp, Artificial Sequence
  Description of Artificial Sequence: Synthetic oligonucleotide
aagagggatatgggtgctggt

SEQ ID NO: 18822 - DNA, 21 bp, Artificial Sequence
  Description of Artificial Sequence: Synthetic oligonucleotide
aagcgggattcgacttctcct

SEQ ID NO: 18823 - DNA, 21 bp, Artificial Sequence
  Description of Artificial Sequence: Synthetic oligonucleotide
aagcgggagtttgagaatatt

SEQ ID NO: 18824 - DNA, 21 bp, Artificial Sequence
  Description of Artificial Sequence: Synthetic oligonucleotide
aagagggagtcgatgcctatt

SEQ ID NO: 18825 - DNA, 21 bp, Artificial Sequence
  Description of Artificial Sequence: Synthetic oligonucleotide
aagcgtgaggttcttcctacg

SEQ ID NO: 18826 - DNA, 21 bp, Artificial Sequence
  Description of Artificial Sequence: Synthetic oligonucleotide
aagcgtttttcgggtgtggag

SEQ ID NO: 18827 - DNA, 21 bp, Artificial Sequence
  Description of Artificial Sequence: Synthetic oligonucleotide
aagcgtcatgagtctatgtct

SEQ ID NO: 18828 - DNA, 21 bp, Artificial Sequence
  Description of Artificial Sequence: Synthetic oligonucleotide
aagaggaatagtctgaatgag

SEQ ID NO: 18829 - DNA, 21 bp, Artificial Sequence
  Description of Artificial Sequence: Synthetic oligonucleotide
aagaggccggcggagcatgat

SEQ ID NO: 18830 - DNA, 21 bp, Artificial Sequence
  Description of Artificial Sequence: Synthetic oligonucleotide
aagaggcagcatcctgagatt

SEQ ID NO: 18831 - DNA, 21 bp, Artificial Sequence
  Description of Artificial Sequence: Synthetic oligonucleotide
aagaggtctctggatagtccg

SEQ ID NO: 18832 - DNA, 21 bp, Artificial Sequence
  Description of Artificial Sequence: Synthetic oligonucleotide
aagcgttctctgactgagacg

SEQ ID NO: 18833 - DNA, 21 bp, Artificial Sequence
  Description of Artificial Sequence: Synthetic oligonucleotide
aagaggacggatgggttgggt

SEQ ID NO: 18834 - DNA, 21 bp, Artificial Sequence
  Description of Artificial Sequence: Synthetic oligonucleotide
aagcgtacgagtgagggggtg

SEQ ID NO: 18835 - DNA, 21 bp, Artificial Sequence
  Description of Artificial Sequence: Synthetic oligonucleotide
aagagtgcggcgattgcttat

SEQ ID NO: 18836 - DNA, 21 bp, Artificial Sequence
  Description of Artificial Sequence: Synthetic oligonucleotide
aagtctgctgaggagacgtcg

SEQ ID NO: 18837 - DNA, 21 bp, Artificial Sequence
  Description of Artificial Sequence: Synthetic oligonucleotide
aagtctgctcttatgggtccg

SEQ ID NO: 18838 - DNA, 21 bp, Artificial Sequence
  Description of Artificial Sequence: Synthetic oligonucleotide
aagtctgcgtctctttctatg

SEQ ID NO: 18839 - DNA, 21 bp, Artificial Sequence
  Description of Artificial Sequence: Synthetic oligonucleotide
aagagtgctagttggagtgag

SEQ ID NO: 18840 - DNA, 21 bp, Artificial Sequence
  Description of Artificial Sequence: Synthetic oligonucleotide
aagtcggatatgccttttaat

SEQ ID NO: 18841 - DNA, 21 bp, Artificial Sequence
  Description of Artificial Sequence: Synthetic oligonucleotide
aagagtgatccggagtggccg

SEQ ID NO: 18842 - DNA, 21 bp, Artificial Sequence
  Description of Artificial Sequence: Synthetic oligonucleotide
aagtctgatgtgatgtttcag

SEQ ID NO: 18843 - DNA, 21 bp, Artificial Sequence
  Description of Artificial Sequence: Synthetic oligonucleotide
aagtctgagcgttatgctgtg

SEQ ID NO: 18844 - DNA, 21 bp, Artificial Sequence
  Description of Artificial Sequence: Synthetic oligonucleotide
aagtcgtttccggttgttcag

SEQ ID NO: 18845 - DNA, 21 bp, Artificial Sequence
  Description of Artificial Sequence: Synthetic oligonucleotide
aagagttttcagtctactcct

SEQ ID NO: 18846 - DNA, 21 bp, Artificial Sequence
  Description of Artificial Sequence: Synthetic oligonucleotide
aagtctggtcctgttactctt

SEQ ID NO: 18847 - DNA, 21 bp, Artificial Sequence
  Description of Artificial Sequence: Synthetic oligonucleotide
aagagtggtacggcgttttcg

SEQ ID NO: 18848 - DNA, 21 bp, Artificial Sequence
  Description of Artificial Sequence: Synthetic oligonucleotide
aagagtggtgttcagtcgccg

SEQ ID NO: 18849 - DNA, 21 bp, Artificial Sequence
  Description of Artificial Sequence: Synthetic oligonucleotide
aagtcgattgctactagtggt

SEQ ID NO: 18850 - DNA, 21 bp, Artificial Sequence
  Description of Artificial Sequence: Synthetic oligonucleotide
aagtctattgagttttttgcg

SEQ ID NO: 18851 - DNA, 21 bp, Artificial Sequence
  Description of Artificial Sequence: Synthetic oligonucleotide
aagagtattcgtgaggatcct

SEQ ID NO: 18852 - DNA, 21 bp, Artificial Sequence
  Description of Artificial Sequence: Synthetic oligonucleotide
aagtcgaaggatgtgaggtat

SEQ ID NO: 18853 - DNA, 21 bp, Artificial Sequence
  Description of Artificial Sequence: Synthetic oligonucleotide
aagtcgatggatactacgggt

SEQ ID NO: 18854 - DNA, 21 bp, Artificial Sequence
  Description of Artificial Sequence: Synthetic oligonucleotide
aagtcgaatgcttgtttgcat

SEQ ID NO: 18855 - DNA, 21 bp, Artificial Sequence
  Description of Artificial Sequence: Synthetic oligonucleotide
aagagtaatgatcgtacggat

SEQ ID NO: 18856 - DNA, 21 bp, Artificial Sequence
  Description of Artificial Sequence: Synthetic oligonucleotide
aagtctaatactcctgcggcg

SEQ ID NO: 18857 - DNA, 21 bp, Artificial Sequence
  Description of Artificial Sequence: Synthetic oligonucleotide
aagtcgaatacgactgctgat

SEQ ID NO: 18858 - DNA, 21 bp, Artificial Sequence
  Description of Artificial Sequence: Synthetic oligonucleotide
aagagtcctgctgagattgcg

SEQ ID NO: 18859 - DNA, 21 bp, Artificial Sequence
  Description of Artificial Sequence: Synthetic oligonucleotide
aagagtccggatggtatggtg

SEQ ID NO: 18860 - DNA, 21 bp, Artificial Sequence
  Description of Artificial Sequence: Synthetic oligonucleotide
aagtcgcctgataggtatcat

SEQ ID NO: 18861 - DNA, 21 bp, Artificial Sequence
  Description of Artificial Sequence: Synthetic oligonucleotide
aagtctccgggtgtgatggtg

SEQ ID NO: 18862 - DNA, 21 bp, Artificial Sequence
  Description of Artificial Sequence: Synthetic oligonucleotide
aagtcgccgcggactccggag

SEQ ID NO: 18863 - DNA, 21 bp, Artificial Sequence
  Description of Artificial Sequence: Synthetic oligonucleotide
aagtctccttcgcatgcggcg

SEQ ID NO: 18864 - DNA, 21 bp, Artificial Sequence
  Description of Artificial Sequence: Synthetic oligonucleotide
aagtctccgtctacttttcat

SEQ ID NO: 18865 - DNA, 21 bp, Artificial Sequence
  Description of Artificial Sequence: Synthetic oligonucleotide
aagtctcctactctggcgtct

SEQ ID NO: 18866 - DNA, 21 bp, Artificial Sequence
  Description of Artificial Sequence: Synthetic oligonucleotide
aagtcgcctgttcgtgatacg

SEQ ID NO: 18867 - DNA, 21 bp, Artificial Sequence
  Description of Artificial Sequence: Synthetic oligonucleotide
aagtctcctgttagtggtaat

SEQ ID NO: 18868 - DNA, 21 bp, Artificial Sequence
  Description of Artificial Sequence: Synthetic oligonucleotide
aagtctcctgtttcgtcgtat

SEQ ID NO: 18869 - DNA, 21 bp, Artificial Sequence
  Description of Artificial Sequence: Synthetic oligonucleotide
aagtctcaggctgagtttggg

SEQ ID NO: 18870 - DNA, 21 bp, Artificial Sequence
  Description of Artificial Sequence: Synthetic oligonucleotide
aagtcgcaggctctgactgat

SEQ ID NO: 18871 - DNA, 21 bp, Artificial Sequence
  Description of Artificial Sequence: Synthetic oligonucleotide
aagagtcaggggagtcattat

SEQ ID NO: 18872 - DNA, 21 bp, Artificial Sequence
  Description of Artificial Sequence: Synthetic oligonucleotide
aagagtcagcattatccgtct

SEQ ID NO: 18873 - DNA, 21 bp, Artificial Sequence
  Description of Artificial Sequence: Synthetic oligonucleotide
aagtcgcagtcggataaggtt

SEQ ID NO: 18874 - DNA, 21 bp, Artificial Sequence
  Description of Artificial Sequence: Synthetic oligonucleotide
aagagtcagtcgggtaatatg

SEQ ID NO: 18875 - DNA, 21 bp, Artificial Sequence
  Description of Artificial Sequence: Synthetic oligonucleotide
aagtctcgggataatttgaat

SEQ ID NO: 18876 - DNA, 21 bp, Artificial Sequence
  Description of Artificial Sequence: Synthetic oligonucleotide
aagtctcggaatcttgagcct

SEQ ID NO: 18877 - DNA, 21 bp, Artificial Sequence
  Description of Artificial Sequence: Synthetic oligonucleotide
aagagtcggactgggacggag

SEQ ID NO: 18878 - DNA, 21 bp, Artificial Sequence
  Description of Artificial Sequence: Synthetic oligonucleotide
aagtcttctgcgcatgcttgg

SEQ ID NO: 18879 - DNA, 21 bp, Artificial Sequence
  Description of Artificial Sequence: Synthetic oligonucleotide
aagtcgtcggatatggttgtg

SEQ ID NO: 18880 - DNA, 21 bp, Artificial Sequence
  Description of Artificial Sequence: Synthetic oligonucleotide
aagtcgagtcatcctcctgtt

SEQ ID NO: 18881 - DNA, 21 bp, Artificial Sequence
  Description of Artificial Sequence: Synthetic oligonucleotide
aagagtagtccgttgacttcg

SEQ ID NO: 18882 - DNA, 21 bp, Artificial Sequence
  Description of Artificial Sequence: Synthetic oligonucleotide
aagtcgagtcagcagtctatt

SEQ ID NO: 18883 - DNA, 21 bp, Artificial Sequence
  Description of Artificial Sequence: Synthetic oligonucleotide
aagtcttcgtcgggtgataag

SEQ ID NO: 18884 - DNA, 21 bp, Artificial Sequence
  Description of Artificial Sequence: Synthetic oligonucleotide
aagtctagttctggtttggag

SEQ ID NO: 18885 - DNA, 21 bp, Artificial Sequence
  Description of Artificial Sequence: Synthetic oligonucleotide
aagagttcgacggcgggtgtt

SEQ ID NO: 18886 - DNA, 21 bp, Artificial Sequence
  Description of Artificial Sequence: Synthetic oligonucleotide
aagtcttcgacgtcgggtaat

SEQ ID NO: 18887 - DNA, 21 bp, Artificial Sequence
  Description of Artificial Sequence: Synthetic oligonucleotide
aagtcgtcttattatcctgcg

SEQ ID NO: 18888 - DNA, 21 bp, Artificial Sequence
  Description of Artificial Sequence: Synthetic oligonucleotide
aagtcgacgcatgatgtgcct

SEQ ID NO: 18889 - DNA, 21 bp, Artificial Sequence
  Description of Artificial Sequence: Synthetic oligonucleotide
aagagtacgccgcgggagggt

SEQ ID NO: 18890 - DNA, 21 bp, Artificial Sequence
  Description of Artificial Sequence: Synthetic oligonucleotide
aagagtacttcggggatgcct

SEQ ID NO: 18891 - DNA, 21 bp, Artificial Sequence
  Description of Artificial Sequence: Synthetic oligonucleotide
aagagtactgttcctgatctt

SEQ ID NO: 18892 - DNA, 21 bp, Artificial Sequence
  Description of Artificial Sequence: Synthetic oligonucleotide
aagtctactgtgactcatttt

SEQ ID NO: 18893 - DNA, 21 bp, Artificial Sequence
  Description of Artificial Sequence: Synthetic oligonucleotide
aagtctgtggcgatttcggtt

SEQ ID NO: 18894 - DNA, 21 bp, Artificial Sequence
  Description of Artificial Sequence: Synthetic oligonucleotide
aagtctgttggtctgtctagt

SEQ ID NO: 18895 - DNA, 21 bp, Artificial Sequence
  Description of Artificial Sequence: Synthetic oligonucleotide
aagagtgtgctggtggagagt

SEQ ID NO: 18896 - DNA, 21 bp, Artificial Sequence
  Description of Artificial Sequence: Synthetic oligonucleotide
aagtcgtataattctccttat

SEQ ID NO: 18897 - DNA, 21 bp, Artificial Sequence
  Description of Artificial Sequence: Synthetic oligonucleotide
aagtcttatccgaatgatcat

SEQ ID NO: 18898 - DNA, 21 bp, Artificial Sequence
  Description of Artificial Sequence: Synthetic oligonucleotide
aagagttatcctccggcgctt

SEQ ID NO: 18899 - DNA, 21 bp, Artificial Sequence
  Description of Artificial Sequence: Synthetic oligonucleotide
aagacggcggatgcgcctcgt

SEQ ID NO: 18900 - DNA, 21 bp, Artificial Sequence
  Description of Artificial Sequence: Synthetic oligonucleotide
aagacggcgtcgttgggtccg

SEQ ID NO: 18901 - DNA, 21 bp, Artificial Sequence
  Description of Artificial Sequence: Synthetic oligonucleotide
aagactgcgtctatgcctacg

SEQ ID NO: 18902 - DNA, 21 bp, Artificial Sequence
  Description of Artificial Sequence: Synthetic oligonucleotide
aagacggatcgtactcttcag

SEQ ID NO: 18903 - DNA, 21 bp, Artificial Sequence
  Description of Artificial Sequence: Synthetic oligonucleotide
aagacggatagtagggtgccg

SEQ ID NO: 18904 - DNA, 21 bp, Artificial Sequence
  Description of Artificial Sequence: Synthetic oligonucleotide
aagacggagtttcggaatccg

SEQ ID NO: 18905 - DNA, 21 bp, Artificial Sequence
  Description of Artificial Sequence: Synthetic oligonucleotide
aagacggagggttctgggtgg

SEQ ID NO: 18906 - DNA, 21 bp, Artificial Sequence
  Description of Artificial Sequence: Synthetic oligonucleotide
aagactgagaggacgcttatt

SEQ ID NO: 18907 - DNA, 21 bp, Artificial Sequence
  Description of Artificial Sequence: Synthetic oligonucleotide
aagacgtttactgagaagacg

SEQ ID NO: 18908 - DNA, 21 bp, Artificial Sequence
  Description of Artificial Sequence: Synthetic oligonucleotide
aagacggggccgcctccggtt

SEQ ID NO: 18909 - DNA, 21 bp, Artificial Sequence
  Description of Artificial Sequence: Synthetic oligonucleotide
aagactggtgtttcttcggat

SEQ ID NO: 18910 - DNA, 21 bp, Artificial Sequence
  Description of Artificial Sequence: Synthetic oligonucleotide
aagacgcatgggctttgtctt

SEQ ID NO: 18911 - DNA, 21 bp, Artificial Sequence
  Description of Artificial Sequence: Synthetic oligonucleotide
aagacgattattactgatttg

SEQ ID NO: 18912 - DNA, 21 bp, Artificial Sequence
  Description of Artificial Sequence: Synthetic oligonucleotide
aagacgcttcctcttcctgag

SEQ ID NO: 18913 - DNA, 21 bp, Artificial Sequence
  Description of Artificial Sequence: Synthetic oligonucleotide
aagacgatgacgacggttcct

SEQ ID NO: 18914 - DNA, 21 bp, Artificial Sequence
  Description of Artificial Sequence: Synthetic oligonucleotide
aagacgatggtgcctgttgtt

SEQ ID NO: 18915 - DNA, 21 bp, Artificial Sequence
  Description of Artificial Sequence: Synthetic oligonucleotide
aagactaatggtcataattat

SEQ ID NO: 18916 - DNA, 21 bp, Artificial Sequence
  Description of Artificial Sequence: Synthetic oligonucleotide
aagactaatcctctggcgcag

SEQ ID NO: 18917 - DNA, 21 bp, Artificial Sequence
  Description of Artificial Sequence: Synthetic oligonucleotide
aagacgaattctgagattatt

SEQ ID NO: 18918 - DNA, 21 bp, Artificial Sequence
  Description of Artificial Sequence: Synthetic oligonucleotide
aagactcctgatccgaagaag

SEQ ID NO: 18919 - DNA, 21 bp, Artificial Sequence
  Description of Artificial Sequence: Synthetic oligonucleotide
aagacgcctatggttgagctg

SEQ ID NO: 18920 - DNA, 21 bp, Artificial Sequence
  Description of Artificial Sequence: Synthetic oligonucleotide
aagactcagctgatgacttcg

SEQ ID NO: 18921 - DNA, 21 bp, Artificial Sequence
  Description of Artificial Sequence: Synthetic oligonucleotide
aagactcagcctgggtcggtg

SEQ ID NO: 18922 - DNA, 21 bp, Artificial Sequence
  Description of Artificial Sequence: Synthetic oligonucleotide
aagacgcagagtattctttcg

SEQ ID NO: 18923 - DNA, 21 bp, Artificial Sequence
  Description of Artificial Sequence: Synthetic oligonucleotide
aagacgtctgaggtgaggtgg

SEQ ID NO: 18924 - DNA, 21 bp, Artificial Sequence
  Description of Artificial Sequence: Synthetic oligonucleotide
aagacttcgcagagtcatacg

SEQ ID NO: 18925 - DNA, 21 bp, Artificial Sequence
  Description of Artificial Sequence: Synthetic oligonucleotide
aagacttctgttacgcgtgat

SEQ ID NO: 18926 - DNA, 21 bp, Artificial Sequence
  Description of Artificial Sequence: Synthetic oligonucleotide
aagactactgctccgcatatt

SEQ ID NO: 18927 - DNA, 21 bp, Artificial Sequence
  Description of Artificial Sequence: Synthetic oligonucleotide
aagacgacggataggattccg

SEQ ID NO: 18928 - DNA, 21 bp, Artificial Sequence
  Description of Artificial Sequence: Synthetic oligonucleotide
aagacgactcttatgacttct

SEQ ID NO: 18929 - DNA, 21 bp, Artificial Sequence
  Description of Artificial Sequence: Synthetic oligonucleotide
aagacgacgccggttttggtg

SEQ ID NO: 18930 - DNA, 21 bp, Artificial Sequence
  Description of Artificial Sequence: Synthetic oligonucleotide
aagactacgcagaattctaat

SEQ ID NO: 18931 - DNA, 21 bp, Artificial Sequence
  Description of Artificial Sequence: Synthetic oligonucleotide
aagactacgtctaagcctcct

SEQ ID NO: 18932 - DNA, 21 bp, Artificial Sequence
  Description of Artificial Sequence: Synthetic oligonucleotide
aagactgtggctatggagagg

SEQ ID NO: 18933 - DNA, 21 bp, Artificial Sequence
  Description of Artificial Sequence: Synthetic oligonucleotide
aagacggttcgggagactagt

SEQ ID NO: 18934 - DNA, 21 bp, Artificial Sequence
  Description of Artificial Sequence: Synthetic oligonucleotide
aagactgtgacgaatgttctg

SEQ ID NO: 18935 - DNA, 21 bp, Artificial Sequence
  Description of Artificial Sequence: Synthetic oligonucleotide
aagactgtggtggctaatccg

SEQ ID NO: 18936 - DNA, 21 bp, Artificial Sequence
  Description of Artificial Sequence: Synthetic oligonucleotide
aagacttatgggacgcatgct

SEQ ID NO: 18937 - DNA, 21 bp, Artificial Sequence
  Description of Artificial Sequence: Synthetic oligonucleotide
aaggttgctcttgcgacgctt

SEQ ID NO: 18938 - DNA, 21 bp, Artificial Sequence
  Description of Artificial Sequence: Synthetic oligonucleotide
aaggttgcgatgccggttctt

SEQ ID NO: 18939 - DNA, 21 bp, Artificial Sequence
  Description of Artificial Sequence: Synthetic oligonucleotide
aaggttgctacttctacgatt

SEQ ID NO: 18940 - DNA, 21 bp, Artificial Sequence
  Description of Artificial Sequence: Synthetic oligonucleotide
aaggtggattctcgggagccg

SEQ ID NO: 18941 - DNA, 21 bp, Artificial Sequence
  Description of Artificial Sequence: Synthetic oligonucleotide
aaggttgatgttttgtataat

SEQ ID NO: 18942 - DNA, 21 bp, Artificial Sequence
  Description of Artificial Sequence: Synthetic oligonucleotide
aaggtggagtcgatggatagt

SEQ ID NO: 18943 - DNA, 21 bp, Artificial Sequence
  Description of Artificial Sequence: Synthetic oligonucleotide
aaggttggggcgggtaatact

SEQ ID NO: 18944 - DNA, 21 bp, Artificial Sequence
  Description of Artificial Sequence: Synthetic oligonucleotide
aaggtgggtaataatgcgtat

SEQ ID NO: 18945 - DNA, 21 bp, Artificial Sequence
  Description of Artificial Sequence: Synthetic oligonucleotide
aaggttgggtcggtttatact

SEQ ID NO: 18946 - DNA, 21 bp, Artificial Sequence
  Description of Artificial Sequence: Synthetic oligonucleotide
aaggtgcttcagccgcatcct

SEQ ID NO: 18947 - DNA, 21 bp, Artificial Sequence
  Description of Artificial Sequence: Synthetic oligonucleotide
aaggttaatattactgcgttt

SEQ ID NO: 18948 - DNA, 21 bp, Artificial Sequence
  Description of Artificial Sequence: Synthetic oligonucleotide
aaggtgaatttgtttgctggg

SEQ ID NO: 18949 - DNA, 21 bp, Artificial Sequence
  Description of Artificial Sequence: Synthetic oligonucleotide
aaggtgaattctgtggcgttt

SEQ ID NO: 18950 - DNA, 21 bp, Artificial Sequence
  Description of Artificial Sequence: Synthetic oligonucleotide
aaggttcaggagcgtagtcag

SEQ ID NO: 18951 - DNA, 21 bp, Artificial Sequence
  Description of Artificial Sequence: Synthetic oligonucleotide
aaggtgtctgctgcgctgtct

SEQ ID NO: 18952 - DNA, 21 bp, Artificial Sequence
  Description of Artificial Sequence: Synthetic oligonucleotide
aaggtgtcgggtttgtctatg

SEQ ID NO: 18953 - DNA, 21 bp, Artificial Sequence
  Description of Artificial Sequence: Synthetic oligonucleotide
aaggtgtcgaggattagtgat

SEQ ID NO: 18954 - DNA, 21 bp, Artificial Sequence
  Description of Artificial Sequence: Synthetic oligonucleotide
aaggtttcttctacggttgag

SEQ ID NO: 18955 - DNA, 21 bp, Artificial Sequence
  Description of Artificial Sequence: Synthetic oligonucleotide
aaggttactgcgcctaatgct

SEQ ID NO: 18956 - DNA, 21 bp, Artificial Sequence
  Description of Artificial Sequence: Synthetic oligonucleotide
aaggtgactgggatgccggtt

SEQ ID NO: 18957 - DNA, 21 bp, Artificial Sequence
  Description of Artificial Sequence: Synthetic oligonucleotide
aaggttactgggtattctgag

SEQ ID NO: 18958 - DNA, 21 bp, Artificial Sequence
  Description of Artificial Sequence: Synthetic oligonucleotide
aaggttacgacgccgcttcct

SEQ ID NO: 18959 - DNA, 21 bp, Artificial Sequence
  Description of Artificial Sequence: Synthetic oligonucleotide
aaggttgtggcgccggctttg

SEQ ID NO: 18960 - DNA, 21 bp, Artificial Sequence
  Description of Artificial Sequence: Synthetic oligonucleotide
aaggtggtgttgcgtgagggt

SEQ ID NO: 18961 - DNA, 21 bp, Artificial Sequence
  Description of Artificial Sequence: Synthetic oligonucleotide
aaggtggttacggcgccggag

SEQ ID NO: 18962 - DNA, 21 bp, Artificial Sequence
  Description of Artificial Sequence: Synthetic oligonucleotide
aagtggactgatggtccggct

SEQ ID NO: 18963 - DNA, 21 bp, Artificial Sequence
  Description of Artificial Sequence: Synthetic oligonucleotide
aagtgggttccggagtctcct

SEQ ID NO: 18964 - DNA, 21 bp, Artificial Sequence
  Description of Artificial Sequence: Synthetic oligonucleotide
aagtatgctcatagtcctact

SEQ ID NO: 18965 - DNA, 21 bp, Artificial Sequence
  Description of Artificial Sequence: Synthetic oligonucleotide
aagtatgcgacgaatgcggcg

SEQ ID NO: 18966 - DNA, 21 bp, Artificial Sequence
  Description of Artificial Sequence: Synthetic oligonucleotide
aagtatgatggggggcagcat

SEQ ID NO: 18967 - DNA, 21 bp, Artificial Sequence
  Description of Artificial Sequence: Synthetic oligonucleotide
aagtatggttcgacggtggtg

SEQ ID NO: 18968 - DNA, 21 bp, Artificial Sequence
  Description of Artificial Sequence: Synthetic oligonucleotide
aagtataaggatttgcctgcg

SEQ ID NO: 18969 - DNA, 21 bp, Artificial Sequence
  Description of Artificial Sequence: Synthetic oligonucleotide
aagtatccggctttgtctgct

SEQ ID NO: 18970 - DNA, 21 bp, Artificial Sequence
  Description of Artificial Sequence: Synthetic oligonucleotide
aagtatcgtgagaataatgtt

SEQ ID NO: 18971 - DNA, 21 bp, Artificial Sequence
  Description of Artificial Sequence: Synthetic oligonucleotide
aagtatagtaagccggatacg

SEQ ID NO: 18972 - DNA, 21 bp, Artificial Sequence
  Description of Artificial Sequence: Synthetic oligonucleotide
aagtatactgggcgtcaggag

SEQ ID NO: 18973 - DNA, 21 bp, Artificial Sequence
  Description of Artificial Sequence: Synthetic oligonucleotide
aagtatactctgacgcctaat

SEQ ID NO: 18974 - DNA, 21 bp, Artificial Sequence
  Description of Artificial Sequence: Synthetic oligonucleotide
aagtatgtttgtggtcctaat

SEQ ID NO: 18975 - DNA, 21 bp, Artificial Sequence
  Description of Artificial Sequence: Synthetic oligonucleotide
aagtatgttggtggtcctaat

SEQ ID NO: 18976 - DNA, 21 bp, Artificial Sequence
  Description of Artificial Sequence: Synthetic oligonucleotide
aagtatgtgaatggtgttgat

SEQ ID NO: 18977 - DNA, 21 bp, Artificial Sequence
  Description of Artificial Sequence: Synthetic oligonucleotide
aagtatgttactacttctccg

SEQ ID NO: 18978 - DNA, 21 bp, Artificial Sequence
  Description of Artificial Sequence: Synthetic oligonucleotide
ttggctgctgatgttcgtttt

SEQ ID NO: 18979 - DNA, 21 bp, Artificial Sequence
  Description of Artificial Sequence: Synthetic oligonucleotide
ttggcggcgggttgtcctgtt

SEQ ID NO: 18980 - DNA, 21 bp, Artificial Sequence
  Description of Artificial Sequence: Synthetic oligonucleotide
ctggctgcggggattcgtttt

SEQ ID NO: 18981 - DNA, 21 bp, Artificial Sequence
  Description of Artificial Sequence: Synthetic oligonucleotide
ctggcggcgaagcctcttatt

SEQ ID NO: 18982 - DNA, 21 bp, Artificial Sequence
  Description of Artificial Sequence: Synthetic oligonucleotide
cttgcggcgaatggggctcat

SEQ ID NO: 18983 - DNA, 21 bp, Artificial Sequence
  Description of Artificial Sequence: Synthetic oligonucleotide
ctggctgctccgacttcgtct

SEQ ID NO: 18984 - DNA, 21 bp, Artificial Sequence
  Description of Artificial Sequence: Synthetic oligonucleotide
ctggcggcgcaggataaggag

SEQ ID NO: 18985 - DNA, 21 bp, Artificial Sequence
  Description of Artificial Sequence: Synthetic oligonucleotide
ttggctgcgcggatgcagcct

SEQ ID NO: 18986 - DNA, 21 bp, Artificial Sequence
  Description of Artificial Sequence: Synthetic oligonucleotide
ctggcggcgcgtaggccggat

SEQ ID NO: 18987 - DNA, 21 bp, Artificial Sequence
  Description of Artificial Sequence: Synthetic oligonucleotide
cttgctgcgagtagtaggcct

SEQ ID NO: 18988 - DNA, 21 bp, Artificial Sequence
  Description of Artificial Sequence: Synthetic oligonucleotide
cttgcggataagccggctatg

SEQ ID NO: 18989 - DNA, 21 bp, Artificial Sequence
  Description of Artificial Sequence: Synthetic oligonucleotide
ctggcggatatgctgaagtct

SEQ ID NO: 18990 - DNA, 21 bp, Artificial Sequence
  Description of Artificial Sequence: Synthetic oligonucleotide
ctggcggatagggagaatacg

SEQ ID NO: 18991 - DNA, 21 bp, Artificial Sequence
  Description of Artificial Sequence: Synthetic oligonucleotide
cttgctgatcggaggattgag

SEQ ID NO: 18992 - DNA, 21 bp, Artificial Sequence
  Description of Artificial Sequence: Synthetic oligonucleotide
cttgctgaggctgtgacttcg

SEQ ID NO: 18993 - DNA, 21 bp, Artificial Sequence
  Description of Artificial Sequence: Synthetic oligonucleotide
ctggctgaggagttgggtcgg

SEQ ID NO: 18994 - DNA, 21 bp, Artificial Sequence
  Description of Artificial Sequence: Synthetic oligonucleotide
ctggctgagaattcgaggacg

SEQ ID NO: 18995 - DNA, 21 bp, Artificial Sequence
  Description of Artificial Sequence: Synthetic oligonucleotide
cttgctgagtcgaggggttat

SEQ ID NO: 18996 - DNA, 21 bp, Artificial Sequence
  Description of Artificial Sequence: Synthetic oligonucleotide
ttggctgaggttatttatgat

SEQ ID NO: 18997 - DNA, 21 bp, Artificial Sequence
  Description of Artificial Sequence: Synthetic oligonucleotide
ttggctggggcgctgcaggag

SEQ ID NO: 18998 - DNA, 21 bp, Artificial Sequence
  Description of Artificial Sequence: Synthetic oligonucleotide
cttgcgggtgataggcagtgg

SEQ ID NO: 18999 - DNA, 21 bp, Artificial Sequence
  Description of Artificial Sequence: Synthetic oligonucleotide
cttgcgggtcatttgatgccg

SEQ ID NO: 19000 - DNA, 21 bp, Artificial Sequence
  Description of Artificial Sequence: Synthetic oligonucleotide
cttgcgggtaagggtctgttg

SEQ ID NO: 19001 - DNA, 21 bp, Artificial Sequence
  Description of Artificial Sequence: Synthetic oligonucleotide
ttggcggggaagaatattgct

SEQ ID NO: 19002 - DNA, 21 bp, Artificial Sequence
  Description of Artificial Sequence: Synthetic oligonucleotide
ctggcgggtctgggtcatctt

SEQ ID NO: 19003 - DNA, 21 bp, Artificial Sequence
  Description of Artificial Sequence: Synthetic oligonucleotide
ttggcgggtctggttcggaat

SEQ ID NO: 19004 - DNA, 21 bp, Artificial Sequence
  Description of Artificial Sequence: Synthetic oligonucleotide
cttgcgcatggtactggtctg

SEQ ID NO: 19005 - DNA, 21 bp, Artificial Sequence
  Description of Artificial Sequence: Synthetic oligonucleotide
ttggctcataaggctaattct

SEQ ID NO: 19006 - DNA, 21 bp, Artificial Sequence
  Description of Artificial Sequence: Synthetic oligonucleotide
ctggctcataaggggattgtt

SEQ ID NO: 19007 - DNA, 21 bp, Artificial Sequence
  Description of Artificial Sequence: Synthetic oligonucleotide
ttggcgcatcctgtgcagttt

SEQ ID NO: 19008 - DNA, 21 bp, Artificial Sequence
  Description of Artificial Sequence: Synthetic oligonucleotide
cttgctcatagtacttctgtg

SEQ ID NO: 19009 - DNA, 21 bp, Artificial Sequence
  Description of Artificial Sequence: Synthetic oligonucleotide
ttggctattgatcctgctgat

SEQ ID NO: 19010 - DNA, 21 bp, Artificial Sequence
  Description of Artificial Sequence: Synthetic oligonucleotide
cttgctattggtcctcttcgg

SEQ ID NO: 19011 - DNA, 21 bp, Artificial Sequence
  Description of Artificial Sequence: Synthetic oligonucleotide
ttggcgaagtttgctccggat

SEQ ID NO: 19012 - DNA, 21 bp, Artificial Sequence
  Description of Artificial Sequence: Synthetic oligonucleotide
ctggcgaagtcgttgcaggcg

SEQ ID NO: 19013 - DNA, 21 bp, Artificial Sequence
  Description of Artificial Sequence: Synthetic oligonucleotide
ttggcgcttgcgggttctgat

SEQ ID NO: 19014 - DNA, 21 bp, Artificial Sequence
  Description of Artificial Sequence: Synthetic oligonucleotide
cttgcgctgggggttcttcgt

SEQ ID NO: 19015 - DNA, 21 bp, Artificial Sequence
  Description of Artificial Sequence: Synthetic oligonucleotide
ctggcgctgggtgtgccgtat

SEQ ID NO: 19016 - DNA, 21 bp, Artificial Sequence
  Description of Artificial Sequence: Synthetic oligonucleotide
ctggcgctgaagatttcgagt

SEQ ID NO: 19017 - DNA, 21 bp, Artificial Sequence
  Description of Artificial Sequence: Synthetic oligonucleotide
ttggcgcttaagtcgcatcct

SEQ ID NO: 19018 - DNA, 21 bp, Artificial Sequence
  Description of Artificial Sequence: Synthetic oligonucleotide
cttgcgcttaagagtcgggat

SEQ ID NO: 19019 - DNA, 21 bp, Artificial Sequence
  Description of Artificial Sequence: Synthetic oligonucleotide
ttggctttgcctgcgcatgct

SEQ ID NO: 19020 - DNA, 21 bp, Artificial Sequence
  Description of Artificial Sequence: Synthetic oligonucleotide
cttgctttgcgggggccgggg

SEQ ID NO: 19021 - DNA, 21 bp, Artificial Sequence
  Description of Artificial Sequence: Synthetic oligonucleotide
cttgctttgtctgggaatact

SEQ ID NO: 19022 - DNA, 21 bp, Artificial Sequence
  Description of Artificial Sequence: Synthetic oligonucleotide
ttggctttggttactgatagg

SEQ ID NO: 19023 - DNA, 21 bp, Artificial Sequence
  Description of Artificial Sequence: Synthetic oligonucleotide
ttggcgatgggtggtattagg

SEQ ID NO: 19024 - DNA, 21 bp, Artificial Sequence
  Description of Artificial Sequence: Synthetic oligonucleotide
ctggcgatgcagtcgcgtaat

SEQ ID NO: 19025 - DNA, 21 bp, Artificial Sequence
  Description of Artificial Sequence: Synthetic oligonucleotide
ctggcgaatggtaatcctgcg

SEQ ID NO: 19026 - DNA, 21 bp, Artificial Sequence
  Description of Artificial Sequence: Synthetic oligonucleotide
cttgcgaatattgcgacgaag

SEQ ID NO: 19027 - DNA, 21 bp, Artificial Sequence
  Description of Artificial Sequence: Synthetic oligonucleotide
cttgctaataagattccgcct

SEQ ID NO: 19028 - DNA, 21 bp, Artificial Sequence
  Description of Artificial Sequence: Synthetic oligonucleotide
ttggctaataagtctatgagt

SEQ ID NO: 19029 - DNA, 21 bp, Artificial Sequence
  Description of Artificial Sequence: Synthetic oligonucleotide
ttggctaatcctgcgaatggt

SEQ ID NO: 19030 - DNA, 21 bp, Artificial Sequence
  Description of Artificial Sequence: Synthetic oligonucleotide
cttgctaatccgcttgggagg

SEQ ID NO: 19031 - DNA, 21 bp, Artificial Sequence
  Description of Artificial Sequence: Synthetic oligonucleotide
ctggctaatcctatgagtgct

SEQ ID NO: 19032 - DNA, 21 bp, Artificial Sequence
  Description of Artificial Sequence: Synthetic oligonucleotide
cttgctaattcttttgttgcg

SEQ ID NO: 19033 - DNA, 21 bp, Artificial Sequence
  Description of Artificial Sequence: Synthetic oligonucleotide
cttgctaattcgaagtctttg

SEQ ID NO: 19034 - DNA, 21 bp, Artificial Sequence
  Description of Artificial Sequence: Synthetic oligonucleotide
cttgctaatgttagggcgagt

SEQ ID NO: 19035 - DNA, 21 bp, Artificial Sequence
  Description of Artificial Sequence: Synthetic oligonucleotide
ttggctccggggctggcgatg

SEQ ID NO: 19036 - DNA, 21 bp, Artificial Sequence
  Description of Artificial Sequence: Synthetic oligonucleotide
ttggcgccgcatacttcgagt

SEQ ID NO: 19037 - DNA, 21 bp, Artificial Sequence
  Description of Artificial Sequence: Synthetic oligonucleotide
ttggctcctttgtcgaaggtg

SEQ ID NO: 19038 - DNA, 21 bp, Artificial Sequence
  Description of Artificial Sequence: Synthetic oligonucleotide
ctggcgcctcctctgaggcag

SEQ ID NO: 19039 - DNA, 21 bp, Artificial Sequence
  Description of Artificial Sequence: Synthetic oligonucleotide
cttgcgccgtcgtatttgccg

SEQ ID NO: 19040 - DNA, 21 bp, Artificial Sequence
  Description of Artificial Sequence: Synthetic oligonucleotide
ttggcgccgactcttacgccg

SEQ ID NO: 19041 - DNA, 21 bp, Artificial Sequence
  Description of Artificial Sequence: Synthetic oligonucleotide
ctggcgcaggggtctatttcg

SEQ ID NO: 19042 - DNA, 21 bp, Artificial Sequence
  Description of Artificial Sequence: Synthetic oligonucleotide
ctggcgcagcagaaggatacg

SEQ ID NO: 19043 - DNA, 21 bp, Artificial Sequence
  Description of Artificial Sequence: Synthetic oligonucleotide
cttgcgcagaggcctcatcag

SEQ ID NO: 19044 - DNA, 21 bp, Artificial Sequence
  Description of Artificial Sequence: Synthetic oligonucleotide
ctggcgcagagtagttctcgt

SEQ ID NO: 19045 - DNA, 21 bp, Artificial Sequence
  Description of Artificial Sequence: Synthetic oligonucleotide
ctggctcaggtttcggctagt

SEQ ID NO: 19046 - DNA, 21 bp, Artificial Sequence
  Description of Artificial Sequence: Synthetic oligonucleotide
cttgctcgtggtccgggtgat

SEQ ID NO: 19047 - DNA, 21 bp, Artificial Sequence
  Description of Artificial Sequence: Synthetic oligonucleotide
cttgcgcgtcttagtcctact

SEQ ID NO: 19048 - DNA, 21 bp, Artificial Sequence
  Description of Artificial Sequence: Synthetic oligonucleotide
ttggctcggcagtcgccggag

SEQ ID NO: 19049 - DNA, 21 bp, Artificial Sequence
  Description of Artificial Sequence: Synthetic oligonucleotide
ctggcgcggcagacgtcgtct

SEQ ID NO: 19050 - DNA, 21 bp, Artificial Sequence
  Description of Artificial Sequence: Synthetic oligonucleotide
ttggcgaggtctcctacgctt

SEQ ID NO: 19051 - DNA, 21 bp, Artificial Sequence
  Description of Artificial Sequence: Synthetic oligonucleotide
ctggctcgtgtgaattctagt

SEQ ID NO: 19052 - DNA, 21 bp, Artificial Sequence
  Description of Artificial Sequence: Synthetic oligonucleotide
ttggcgagggtttctcagacg

SEQ ID NO: 19053 - DNA, 21 bp, Artificial Sequence
  Description of Artificial Sequence: Synthetic oligonucleotide
cttgcgtctgcgatgaagact

SEQ ID NO: 19054 - DNA, 21 bp, Artificial Sequence
  Description of Artificial Sequence: Synthetic oligonucleotide
ttggcgtctgctgttcagagt

SEQ ID NO: 19055 - DNA, 21 bp, Artificial Sequence
  Description of Artificial Sequence: Synthetic oligonucleotide
ttggcgtcggattctagggct

SEQ ID NO: 19056 - DNA, 21 bp, Artificial Sequence
  Description of Artificial Sequence: Synthetic oligonucleotide
cttgcgtctgagtttattgcg

SEQ ID NO: 19057 - DNA, 21 bp, Artificial Sequence
  Description of Artificial Sequence: Synthetic oligonucleotide
ctggcgtctgagaaggttagt

SEQ ID NO: 19058 - DNA, 21 bp, Artificial Sequence
  Description of Artificial Sequence: Synthetic oligonucleotide
cttgctagtttggtttctgtt

SEQ ID NO: 19059 - DNA, 21 bp, Artificial Sequence
  Description of Artificial Sequence: Synthetic oligonucleotide
cttgcttctcctactgattat

SEQ ID NO: 19060 - DNA, 21 bp, Artificial Sequence
  Description of Artificial Sequence: Synthetic oligonucleotide
ttggcttcgcagggttttaat

SEQ ID NO: 19061 - DNA, 21 bp, Artificial Sequence
  Description of Artificial Sequence: Synthetic oligonucleotide
ctggcgtctcaggggcctggt

SEQ ID NO: 19062 - DNA, 21 bp, Artificial Sequence
  Description of Artificial Sequence: Synthetic oligonucleotide
ctggcttcgaggccggctcat

SEQ ID NO: 19063 - DNA, 21 bp, Artificial Sequence
  Description of Artificial Sequence: Synthetic oligonucleotide
ttggcgtctgtgaatacgtcg

SEQ ID NO: 19064 - DNA, 21 bp, Artificial Sequence
  Description of Artificial Sequence: Synthetic oligonucleotide
cttgcgacggcgcatcgtcct

SEQ ID NO: 19065 - DNA, 21 bp, Artificial Sequence
  Description of Artificial Sequence: Synthetic oligonucleotide
ctggctactgcggttgttgat

SEQ ID NO: 19066 - DNA, 21 bp, Artificial Sequence
  Description of Artificial Sequence: Synthetic oligonucleotide
ttggctactaagtcttatacg

SEQ ID NO: 19067 - DNA, 21 bp, Artificial Sequence
  Description of Artificial Sequence: Synthetic oligonucleotide
ttggcgactcctccgattatt

SEQ ID NO: 19068 - DNA, 21 bp, Artificial Sequence
  Description of Artificial Sequence: Synthetic oligonucleotide
ttggcgactcggcaggttggg

SEQ ID NO: 19069 - DNA, 21 bp, Artificial Sequence
  Description of Artificial Sequence: Synthetic oligonucleotide
cttgcgacgcgggttcgtgag

SEQ ID NO: 19070 - DNA, 21 bp, Artificial Sequence
  Description of Artificial Sequence: Synthetic oligonucleotide
cttgcgacttctccgttgcat

SEQ ID NO: 19071 - DNA, 21 bp, Artificial Sequence
  Description of Artificial Sequence: Synthetic oligonucleotide
ctggctacgagtcctaatcat

SEQ ID NO: 19072 - DNA, 21 bp, Artificial Sequence
  Description of Artificial Sequence: Synthetic oligonucleotide
ctggcgacgagtcggagtctg

SEQ ID NO: 19073 - DNA, 21 bp, Artificial Sequence
  Description of Artificial Sequence: Synthetic oligonucleotide
ttggcgacgacttctggggct

SEQ ID NO: 19074 - DNA, 21 bp, Artificial Sequence
  Description of Artificial Sequence: Synthetic oligonucleotide
cttgctgtggagaagttgcct

SEQ ID NO: 19075 - DNA, 21 bp, Artificial Sequence
  Description of Artificial Sequence: Synthetic oligonucleotide
cttgcggttgggactaagggg

SEQ ID NO: 19076 - DNA, 21 bp, Artificial Sequence
  Description of Artificial Sequence: Synthetic oligonucleotide
ctggcggtgagtccgatgcct

SEQ ID NO: 19077 - DNA, 21 bp, Artificial Sequence
  Description of Artificial Sequence: Synthetic oligonucleotide
ttggcggtggtggagagtctg

SEQ ID NO: 19078 - DNA, 21 bp, Artificial Sequence
  Description of Artificial Sequence: Synthetic oligonucleotide
ctttgtaggaattcgcattct

SEQ ID NO: 19079 - DNA, 21 bp, Artificial Sequence
  Description of Artificial Sequence: Synthetic oligonucleotide
ctggatgctaggcgttttttt

SEQ ID NO: 19080 - DNA, 21 bp, Artificial Sequence
  Description of Artificial Sequence: Synthetic oligonucleotide
cttgatgatccgggtggttgt

SEQ ID NO: 19081 - DNA, 21 bp, Artificial Sequence
  Description of Artificial Sequence: Synthetic oligonucleotide
ctggatgattcttcgctgttg

SEQ ID NO: 19082 - DNA, 21 bp, Artificial Sequence
  Description of Artificial Sequence: Synthetic oligonucleotide
ttggatgatgttatgccgggt

SEQ ID NO: 19083 - DNA, 21 bp, Artificial Sequence
  Description of Artificial Sequence: Synthetic oligonucleotide
ctggatgagaggtggccgacg

SEQ ID NO: 19084 - DNA, 21 bp, Artificial Sequence
  Description of Artificial Sequence: Synthetic oligonucleotide
cttgattttcctgcgtcttct

SEQ ID NO: 19085 - DNA, 21 bp, Artificial Sequence
  Description of Artificial Sequence: Synthetic oligonucleotide
cttgattttagggaggattct

SEQ ID NO: 19086 - DNA, 21 bp, Artificial Sequence
  Description of Artificial Sequence: Synthetic oligonucleotide
ctggatggtgggagtactcgg

SEQ ID NO: 19087 - DNA, 21 bp, Artificial Sequence
  Description of Artificial Sequence: Synthetic oligonucleotide
cttgatgggcagatgcttgct

SEQ ID NO: 19088 - DNA, 21 bp, Artificial Sequence
  Description of Artificial Sequence: Synthetic oligonucleotide
ctggatggtaggcctttggtt

SEQ ID NO: 19089 - DNA, 21 bp, Artificial Sequence
  Description of Artificial Sequence: Synthetic oligonucleotide
ttggatattgagcggcattcg

SEQ ID NO: 19090 - DNA, 21 bp, Artificial Sequence
  Description of Artificial Sequence: Synthetic oligonucleotide
ttggatattacgaatgttaag

SEQ ID NO: 19091 - DNA, 21 bp, Artificial Sequence
  Description of Artificial Sequence: Synthetic oligonucleotide
ctggataagtttaattcgaag

SEQ ID NO: 19092 - DNA, 21 bp, Artificial Sequence
  Description of Artificial Sequence: Synthetic oligonucleotide
ttggataagaagcatcagtct

SEQ ID NO: 19093 - DNA, 21 bp, Artificial Sequence
  Description of Artificial Sequence: Synthetic oligonucleotide
cttgataagatgcggactact

SEQ ID NO: 19094 - DNA, 21 bp, Artificial Sequence
  Description of Artificial Sequence: Synthetic oligonucleotide
cttgataagagggatattctg

SEQ ID NO: 19095 - DNA, 21 bp, Artificial Sequence
  Description of Artificial Sequence: Synthetic oligonucleotide
ctggataagacgtctcgtttg

SEQ ID NO: 19096 - DNA, 21 bp, Artificial Sequence
  Description of Artificial Sequence: Synthetic oligonucleotide
cttgatttggcgaatagtatg

SEQ ID NO: 19097 - DNA, 21 bp, Artificial Sequence
  Description of Artificial Sequence: Synthetic oligonucleotide
ttggatctgcatttgcaggcg

SEQ ID NO: 19098 - DNA, 21 bp, Artificial Sequence
  Description of Artificial Sequence: Synthetic oligonucleotide
ttggatcttaagagtgtgatg

SEQ ID NO: 19099 - DNA, 21 bp, Artificial Sequence
  Description of Artificial Sequence: Synthetic oligonucleotide
ctggatttgcagacgactaag

SEQ ID NO: 19100 - DNA, 21 bp, Artificial Sequence
  Description of Artificial Sequence: Synthetic oligonucleotide
ttggatttggtggcttttgag

SEQ ID NO: 19101 - DNA, 21 bp, Artificial Sequence
  Description of Artificial Sequence: Synthetic oligonucleotide
cttgatatgcgtgattcgggg

SEQ ID NO: 19102 - DNA, 21 bp, Artificial Sequence
  Description of Artificial Sequence: Synthetic oligonucleotide
cttgatatgcgtactcagggg

SEQ ID NO: 19103 - DNA, 21 bp, Artificial Sequence
  Description of Artificial Sequence: Synthetic oligonucleotide
cttgataatcctcatcatgtt

SEQ ID NO: 19104 - DNA, 21 bp, Artificial Sequence
  Description of Artificial Sequence: Synthetic oligonucleotide
cttgataatcctgtttcggct

SEQ ID NO: 19105 - DNA, 21 bp, Artificial Sequence
  Description of Artificial Sequence: Synthetic oligonucleotide
ctggatcctgatgctcgtcgg

SEQ ID NO: 19106 - DNA, 21 bp, Artificial Sequence
  Description of Artificial Sequence: Synthetic oligonucleotide
ctggatccggggcttaagagt

SEQ ID NO: 19107 - DNA, 21 bp, Artificial Sequence
  Description of Artificial Sequence: Synthetic oligonucleotide
ttggatcgtcttagttctatt

SEQ ID NO: 19108 - DNA, 21 bp, Artificial Sequence
  Description of Artificial Sequence: Synthetic oligonucleotide
cttgatcggcttgttacgggt

SEQ ID NO: 19109 - DNA, 21 bp, Artificial Sequence
  Description of Artificial Sequence: Synthetic oligonucleotide
ctggatcgtatggttgttggt

SEQ ID NO: 19110 - DNA, 21 bp, Artificial Sequence
  Description of Artificial Sequence: Synthetic oligonucleotide
ctggatcggccgtcggcttgg

SEQ ID NO: 19111 - DNA, 21 bp, Artificial Sequence
  Description of Artificial Sequence: Synthetic oligonucleotide
ttggatcgtaggcctattcag

SEQ ID NO: 19112 - DNA, 21 bp, Artificial Sequence
  Description of Artificial Sequence: Synthetic oligonucleotide
cttgatcgtcgtccgatgctt

SEQ ID NO: 19113 - DNA, 21 bp, Artificial Sequence
  Description of Artificial Sequence: Synthetic oligonucleotide
ctggatcgttatactcctccg

SEQ ID NO: 19114 - DNA, 21 bp, Artificial Sequence
  Description of Artificial Sequence: Synthetic oligonucleotide
ttggatagtggtcggcctagt

SEQ ID NO: 19115 - DNA, 21 bp, Artificial Sequence
  Description of Artificial Sequence: Synthetic oligonucleotide
ttggatagtctgcatattcct

SEQ ID NO: 19116 - DNA, 21 bp, Artificial Sequence
  Description of Artificial Sequence: Synthetic oligonucleotide
ttggatagtaatgttacttcg

SEQ ID NO: 19117 - DNA, 21 bp, Artificial Sequence
  Description of Artificial Sequence: Synthetic oligonucleotide
ctggatagtccggctatggcg

SEQ ID NO: 19118 - DNA, 21 bp, Artificial Sequence
  Description of Artificial Sequence: Synthetic oligonucleotide
ttggattcgcctcctaataat

SEQ ID NO: 19119 - DNA, 21 bp, Artificial Sequence
  Description of Artificial Sequence: Synthetic oligonucleotide
ttggattcgtctcatggtcat

SEQ ID NO: 19120 - DNA, 21 bp, Artificial Sequence
  Description of Artificial Sequence: Synthetic oligonucleotide
ttggattcgagtcgttctagt

SEQ ID NO: 19121 - DNA, 21 bp, Artificial Sequence
  Description of Artificial Sequence: Synthetic oligonucleotide
ttggattcttcttggacgccg

SEQ ID NO: 19122 - DNA, 21 bp, Artificial Sequence
  Description of Artificial Sequence: Synthetic oligonucleotide
ttggatagtactccgcggcct

SEQ ID NO: 19123 - DNA, 21 bp, Artificial Sequence
  Description of Artificial Sequence: Synthetic oligonucleotide
cttgatacgcaggcgggtcgt

SEQ ID NO: 19124 - DNA, 21 bp, Artificial Sequence
  Description of Artificial Sequence: Synthetic oligonucleotide
ttggatactcagtctaggctg

SEQ ID NO: 19125 - DNA, 21 bp, Artificial Sequence
  Description of Artificial Sequence: Synthetic oligonucleotide
ctggatactaggggtattagt

SEQ ID NO: 19126 - DNA, 21 bp, Artificial Sequence
  Description of Artificial Sequence: Synthetic oligonucleotide
ttggatacgcgttatcgttat

SEQ ID NO: 19127 - DNA, 21 bp, Artificial Sequence
  Description of Artificial Sequence: Synthetic oligonucleotide
ctggatactgttcagtcgaag

SEQ ID NO: 19128 - DNA, 21 bp, Artificial Sequence
  Description of Artificial Sequence: Synthetic oligonucleotide
ctggatgttgcgactagtagg

SEQ ID NO: 19129 - DNA, 21 bp, Artificial Sequence
  Description of Artificial Sequence: Synthetic oligonucleotide
ctggatgtgaagtgtgatcct

SEQ ID NO: 19130 - DNA, 21 bp, Artificial Sequence
  Description of Artificial Sequence: Synthetic oligonucleotide
ttggatgttcttgattgtaag

SEQ ID NO: 19131 - DNA, 21 bp, Artificial Sequence
  Description of Artificial Sequence: Synthetic oligonucleotide
ctggatgttaatggtttgcgt

SEQ ID NO: 19132 - DNA, 21 bp, Artificial Sequence
  Description of Artificial Sequence: Synthetic oligonucleotide
cttgatgtgtcgcagcggctt

SEQ ID NO: 19133 - DNA, 21 bp, Artificial Sequence
  Description of Artificial Sequence: Synthetic oligonucleotide
ctggatgtggttacgcgtgtt

SEQ ID NO: 19134 - DNA, 21 bp, Artificial Sequence
  Description of Artificial Sequence: Synthetic oligonucleotide
ctggatgtgtatagtcgggag

SEQ ID NO: 19135 - DNA, 21 bp, Artificial Sequence
  Description of Artificial Sequence: Synthetic oligonucleotide
cttgaggctaatctgaaggtt

SEQ ID NO: 19136 - DNA, 21 bp, Artificial Sequence
  Description of Artificial Sequence: Synthetic oligonucleotide
cttgaggctccgagggctact

SEQ ID NO: 19137 - DNA, 21 bp, Artificial Sequence
  Description of Artificial Sequence: Synthetic oligonucleotide
ttggaggaggataaggttaag

SEQ ID NO: 19138 - DNA, 21 bp, Artificial Sequence
  Description of Artificial Sequence: Synthetic oligonucleotide
ctggagtttgatagtaaggag

SEQ ID NO: 19139 - DNA, 21 bp, Artificial Sequence
  Description of Artificial Sequence: Synthetic oligonucleotide
cttgagtttggttctgatcag

SEQ ID NO: 19140 - DNA, 21 bp, Artificial Sequence
  Description of Artificial Sequence: Synthetic oligonucleotide
cttgagtttactcggattggt

SEQ ID NO: 19141 - DNA, 21 bp, Artificial Sequence
  Description of Artificial Sequence: Synthetic oligonucleotide
cttgagggtacgaggcgggat

SEQ ID NO: 19142 - DNA, 21 bp, Artificial Sequence
  Description of Artificial Sequence: Synthetic oligonucleotide
cttgagggtgttaggggttcg

SEQ ID NO: 19143 - DNA, 21 bp, Artificial Sequence
  Description of Artificial Sequence: Synthetic oligonucleotide
ctggagcatcttcgttctgcg

SEQ ID NO: 19144 - DNA, 21 bp, Artificial Sequence
  Description of Artificial Sequence: Synthetic oligonucleotide
ttggagcatagtgcgcatgtt

SEQ ID NO: 19145 - DNA, 21 bp, Artificial Sequence
  Description of Artificial Sequence: Synthetic oligonucleotide
ctggagcatagtgtgagtctt

SEQ ID NO: 19146 - DNA, 21 bp, Artificial Sequence
  Description of Artificial Sequence: Synthetic oligonucleotide
ctggagattacgggtccgggt

SEQ ID NO: 19147 - DNA, 21 bp, Artificial Sequence
  Description of Artificial Sequence: Synthetic oligonucleotide
ctggagaagatggggctttat

SEQ ID NO: 19148 - DNA, 21 bp, Artificial Sequence
  Description of Artificial Sequence: Synthetic oligonucleotide
ctggagaagcagactggtgat

SEQ ID NO: 19149 - DNA, 21 bp, Artificial Sequence
  Description of Artificial Sequence: Synthetic oligonucleotide
ttggagcttaagcctgcgaat

SEQ ID NO: 19150 - DNA, 21 bp, Artificial Sequence
  Description of Artificial Sequence: Synthetic oligonucleotide
cttgagatgagggggctggct

SEQ ID NO: 19151 - DNA, 21 bp, Artificial Sequence
  Description of Artificial Sequence: Synthetic oligonucleotide
ctggagaatgctcagactcct

SEQ ID NO: 19152 - DNA, 21 bp, Artificial Sequence
  Description of Artificial Sequence: Synthetic oligonucleotide
ctggagaatgattggcgtgtt

SEQ ID NO: 19153 - DNA, 21 bp, Artificial Sequence
  Description of Artificial Sequence: Synthetic oligonucleotide
ttggagaatcatccggatagg

SEQ ID NO: 19154 - DNA, 21 bp, Artificial Sequence
  Description of Artificial Sequence: Synthetic oligonucleotide
ttggagaataatcctgctttg

SEQ ID NO: 19155 - DNA, 21 bp, Artificial Sequence
  Description of Artificial Sequence: Synthetic oligonucleotide
ctggagaatagtcatttggtg

SEQ ID NO: 19156 - DNA, 21 bp, Artificial Sequence
  Description of Artificial Sequence: Synthetic oligonucleotide
cttgagccgattgttcgtaat

SEQ ID NO: 19157 - DNA, 21 bp, Artificial Sequence
  Description of Artificial Sequence: Synthetic oligonucleotide
ttggagccgcagacgcattcg

SEQ ID NO: 19158 - DNA, 21 bp, Artificial Sequence
  Description of Artificial Sequence: Synthetic oligonucleotide
ctggagccgtcgcatacgatt

SEQ ID NO: 19159 - DNA, 21 bp, Artificial Sequence
  Description of Artificial Sequence: Synthetic oligonucleotide
ctggagccgtataagcatttt

SEQ ID NO: 19160 - DNA, 21 bp, Artificial Sequence
  Description of Artificial Sequence: Synthetic oligonucleotide
cttgagcagttttcgacggcg

SEQ ID NO: 19161 - DNA, 21 bp, Artificial Sequence
  Description of Artificial Sequence: Synthetic oligonucleotide
ttggagcagcctcctgagcat

SEQ ID NO: 19162 - DNA, 21 bp, Artificial Sequence
  Description of Artificial Sequence: Synthetic oligonucleotide
cttgagcagtataataaggag

SEQ ID NO: 19163 - DNA, 21 bp, Artificial Sequence
  Description of Artificial Sequence: Synthetic oligonucleotide
ttggagcggggttcgagtgag

SEQ ID NO: 19164 - DNA, 21 bp, Artificial Sequence
  Description of Artificial Sequence: Synthetic oligonucleotide
ttggagaggattagttcggtg

SEQ ID NO: 19165 - DNA, 21 bp, Artificial Sequence
  Description of Artificial Sequence: Synthetic oligonucleotide
ttggagtcggctctgtcttct

SEQ ID NO: 19166 - DNA, 21 bp, Artificial Sequence
  Description of Artificial Sequence: Synthetic oligonucleotide
ctggagtcggcgtggattggg

SEQ ID NO: 19167 - DNA, 21 bp, Artificial Sequence
  Description of Artificial Sequence: Synthetic oligonucleotide
ctggagtcgaagcctagtccg

SEQ ID NO: 19168 - DNA, 21 bp, Artificial Sequence
  Description of Artificial Sequence: Synthetic oligonucleotide
ctggagagtaataattatctg

SEQ ID NO: 19169 - DNA, 21 bp, Artificial Sequence
  Description of Artificial Sequence: Synthetic oligonucleotide
ttggagtctcagactaggaat

SEQ ID NO: 19170 - DNA, 21 bp, Artificial Sequence
  Description of Artificial Sequence: Synthetic oligonucleotide
ctggagtcgaggtctggtatg

SEQ ID NO: 19171 - DNA, 21 bp, Artificial Sequence
  Description of Artificial Sequence: Synthetic oligonucleotide
cttgagtcttctcatacgcgg

SEQ ID NO: 19172 - DNA, 21 bp, Artificial Sequence
  Description of Artificial Sequence: Synthetic oligonucleotide
cttgagtcgagtgtgcgtgtt

SEQ ID NO: 19173 - DNA, 21 bp, Artificial Sequence
  Description of Artificial Sequence: Synthetic oligonucleotide
ttggagacggcttcgacgaag

SEQ ID NO: 19174 - DNA, 21 bp, Artificial Sequence
  Description of Artificial Sequence: Synthetic oligonucleotide
cttgagactcggcagattggg

SEQ ID NO: 19175 - DNA, 21 bp, Artificial Sequence
  Description of Artificial Sequence: Synthetic oligonucleotide
ttggagacttcggattctgtt

SEQ ID NO: 19176 - DNA, 21 bp, Artificial Sequence
  Description of Artificial Sequence: Synthetic oligonucleotide
ttggaggtggcgttgaggact

SEQ ID NO: 19177 - DNA, 21 bp, Artificial Sequence
  Description of Artificial Sequence: Synthetic oligonucleotide
cttgaggtggctagtaatcct

SEQ ID NO: 19178 - DNA, 21 bp, Artificial Sequence
  Description of Artificial Sequence: Synthetic oligonucleotide
cttgaggtgacggagccgtgg

SEQ ID NO: 19179 - DNA, 21 bp, Artificial Sequence
  Description of Artificial Sequence: Synthetic oligonucleotide
ctttttgctatttcggtgccg

SEQ ID NO: 19180 - DNA, 21 bp, Artificial Sequence
  Description of Artificial Sequence: Synthetic oligonucleotide
ctgtttgctaatacgattagt

SEQ ID NO: 19181 - DNA, 21 bp, Artificial Sequence
  Description of Artificial Sequence: Synthetic oligonucleotide
ttgtttgatgcggcgcttccg

SEQ ID NO: 19182 - DNA, 21 bp, Artificial Sequence
  Description of Artificial Sequence: Synthetic oligonucleotide
ctgtttgattttacgaaggag

SEQ ID NO: 19183 - DNA, 21 bp, Artificial Sequence
  Description of Artificial Sequence: Synthetic oligonucleotide
ctttttgatccgaatcggggg

SEQ ID NO: 19184 - DNA, 21 bp, Artificial Sequence
  Description of Artificial Sequence: Synthetic oligonucleotide
ctgtttgataggacggctttg

SEQ ID NO: 19185 - DNA, 21 bp, Artificial Sequence
  Description of Artificial Sequence: Synthetic oligonucleotide
ctttttgattcgtctactacg

SEQ ID NO: 19186 - DNA, 21 bp, Artificial Sequence
  Description of Artificial Sequence: Synthetic oligonucleotide
ttgtttgagctgcagcatcgg

SEQ ID NO: 19187 - DNA, 21 bp, Artificial Sequence
  Description of Artificial Sequence: Synthetic oligonucleotide
cttttttttacggcggctccg

SEQ ID NO: 19188 - DNA, 21 bp, Artificial Sequence
  Description of Artificial Sequence: Synthetic oligonucleotide
ctgtttggtaaggtgagtggt

SEQ ID NO: 19189 - DNA, 21 bp, Artificial Sequence
  Description of Artificial Sequence: Synthetic oligonucleotide
ttgtttgggtcgcgtccgact

SEQ ID NO: 19190 - DNA, 21 bp, Artificial Sequence
  Description of Artificial Sequence: Synthetic oligonucleotide
ttgtttgggacgaatcggagt

SEQ ID NO: 19191 - DNA, 21 bp, Artificial Sequence
  Description of Artificial Sequence: Synthetic oligonucleotide
ttgtttcatgagtcgacttat

SEQ ID NO: 19192 - DNA, 21 bp, Artificial Sequence
  Description of Artificial Sequence: Synthetic oligonucleotide
ctgtttcattcgaatgatgat

SEQ ID NO: 19193 - DNA, 21 bp, Artificial Sequence
  Description of Artificial Sequence: Synthetic oligonucleotide
ctttttattaatcatgggtct

SEQ ID NO: 19194 - DNA, 21 bp, Artificial Sequence
  Description of Artificial Sequence: Synthetic oligonucleotide
ctgtttattactacgactagt

SEQ ID NO: 19195 - DNA, 21 bp, Artificial Sequence
  Description of Artificial Sequence: Synthetic oligonucleotide
ctttttaagcatagtcgtgag

SEQ ID NO: 19196 - DNA, 21 bp, Artificial Sequence
  Description of Artificial Sequence: Synthetic oligonucleotide
ctgtttctgtcgcaggtgcct

SEQ ID NO: 19197 - DNA, 21 bp, Artificial Sequence
  Description of Artificial Sequence: Synthetic oligonucleotide
ttgtttaatcagcaggttctt

SEQ ID NO: 19198 - DNA, 21 bp, Artificial Sequence
  Description of Artificial Sequence: Synthetic oligonucleotide
ctttttaattcttcgcctgag

SEQ ID NO: 19199 - DNA, 21 bp, Artificial Sequence
  Description of Artificial Sequence: Synthetic oligonucleotide
ctttttccggggtcgattgat

SEQ ID NO: 19200 - DNA, 21 bp, Artificial Sequence
  Description of Artificial Sequence: Synthetic oligonucleotide
ttgtttccgactggttctctt

SEQ ID NO: 19201 - DNA, 21 bp, Artificial Sequence
  Description of Artificial Sequence: Synthetic oligonucleotide
ttgtttcgtgcttcggatagg

SEQ ID NO: 19202 - DNA, 21 bp, Artificial Sequence
  Description of Artificial Sequence: Synthetic oligonucleotide
ctgtttagtgagtctaggtcg

SEQ ID NO: 19203 - DNA, 21 bp, Artificial Sequence
  Description of Artificial Sequence: Synthetic oligonucleotide
ttgttttcgggtgctgagagt

SEQ ID NO: 19204 - DNA, 21 bp, Artificial Sequence
  Description of Artificial Sequence: Synthetic oligonucleotide
cttttttcgatgccggtgtct

SEQ ID NO: 19205 - DNA, 21 bp, Artificial Sequence
  Description of Artificial Sequence: Synthetic oligonucleotide
ttgtttacttcggctgatctt

SEQ ID NO: 19206 - DNA, 21 bp, Artificial Sequence
  Description of Artificial Sequence: Synthetic oligonucleotide
ttgtttacttctgagtcgatt

SEQ ID NO: 19207 - DNA, 21 bp, Artificial Sequence
  Description of Artificial Sequence: Synthetic oligonucleotide
ctttttacttctcctagtatg

SEQ ID NO: 19208 - DNA, 21 bp, Artificial Sequence
  Description of Artificial Sequence: Synthetic oligonucleotide
ctgtttactacgatggtgcct

SEQ ID NO: 19209 - DNA, 21 bp, Artificial Sequence
  Description of Artificial Sequence: Synthetic oligonucleotide
ttgggggctgctgtgaatttg

SEQ ID NO: 19210 - DNA, 21 bp, Artificial Sequence
  Description of Artificial Sequence: Synthetic oligonucleotide
cttggtgctggtagtagtgtg

SEQ ID NO: 19211 - DNA, 21 bp, Artificial Sequence
  Description of Artificial Sequence: Synthetic oligonucleotide
cttggtgcgttgtctggtcct

SEQ ID NO: 19212 - DNA, 21 bp, Artificial Sequence
  Description of Artificial Sequence: Synthetic oligonucleotide
ttgggggctctgactcatgct

SEQ ID NO: 19213 - DNA, 21 bp, Artificial Sequence
  Description of Artificial Sequence: Synthetic oligonucleotide
ctgggtgctaggattcagttg

SEQ ID NO: 19214 - DNA, 21 bp, Artificial Sequence
  Description of Artificial Sequence: Synthetic oligonucleotide
ttgggtgcgcggacggctgct

SEQ ID NO: 19215 - DNA, 21 bp, Artificial Sequence
  Description of Artificial Sequence: Synthetic oligonucleotide
cttggtgcttcttcgtctttg

SEQ ID NO: 19216 - DNA, 21 bp, Artificial Sequence
  Description of Artificial Sequence: Synthetic oligonucleotide
ttgggggcttatttggggccg

SEQ ID NO: 19217 - DNA, 21 bp, Artificial Sequence
  Description of Artificial Sequence: Synthetic oligonucleotide
ttgggtgcttataatgctcag

SEQ ID NO: 19218 - DNA, 21 bp, Artificial Sequence
  Description of Artificial Sequence: Synthetic oligonucleotide
cttggtgatgctgggttttcg

SEQ ID NO: 19219 - DNA, 21 bp, Artificial Sequence
  Description of Artificial Sequence: Synthetic oligonucleotide
ttgggtgatcattataggcat

SEQ ID NO: 19220 - DNA, 21 bp, Artificial Sequence
  Description of Artificial Sequence: Synthetic oligonucleotide
cttggggatccttttcctcct

SEQ ID NO: 19221 - DNA, 21 bp, Artificial Sequence
  Description of Artificial Sequence: Synthetic oligonucleotide
cttggtgataggactgatttt

SEQ ID NO: 19222 - DNA, 21 bp, Artificial Sequence
  Description of Artificial Sequence: Synthetic oligonucleotide
cttggtgataggacgcatatt

SEQ ID NO: 19223 - DNA, 21 bp, Artificial Sequence
  Description of Artificial Sequence: Synthetic oligonucleotide
cttggggatactgctcatcat

SEQ ID NO: 19224 - DNA, 21 bp, Artificial Sequence
  Description of Artificial Sequence: Synthetic oligonucleotide
cttggttttggggcgacgcag

SEQ ID NO: 19225 - DNA, 21 bp, Artificial Sequence
  Description of Artificial Sequence: Synthetic oligonucleotide
ctgggttttaatgttgtggtt

SEQ ID NO: 19226 - DNA, 21 bp, Artificial Sequence
  Description of Artificial Sequence: Synthetic oligonucleotide
ttggggtttaattatcaggat

SEQ ID NO: 19227 - DNA, 21 bp, Artificial Sequence
  Description of Artificial Sequence: Synthetic oligonucleotide
ctggggtttccttctactgag

SEQ ID NO: 19228 - DNA, 21 bp, Artificial Sequence
  Description of Artificial Sequence: Synthetic oligonucleotide
ctgggtggtgatgctcagatt

SEQ ID NO: 19229 - DNA, 21 bp, Artificial Sequence
  Description of Artificial Sequence: Synthetic oligonucleotide
ttggggggggggaggtcgctg

SEQ ID NO: 19230 - DNA, 21 bp, Artificial Sequence
  Description of Artificial Sequence: Synthetic oligonucleotide
ctggggggttcgctgtcgatg

SEQ ID NO: 19231 - DNA, 21 bp, Artificial Sequence
  Description of Artificial Sequence: Synthetic oligonucleotide
ctgggggggtcttatccgctt

SEQ ID NO: 19232 - DNA, 21 bp, Artificial Sequence
  Description of Artificial Sequence: Synthetic oligonucleotide
ttggggcatgcgacttcggcg

SEQ ID NO: 19233 - DNA, 21 bp, Artificial Sequence
  Description of Artificial Sequence: Synthetic oligonucleotide
ttggggcatgggccggggcat

SEQ ID NO: 19234 - DNA, 21 bp, Artificial Sequence
  Description of Artificial Sequence: Synthetic oligonucleotide
ttggggcatagtaagcctcct

SEQ ID NO: 19235 - DNA, 21 bp, Artificial Sequence
  Description of Artificial Sequence: Synthetic oligonucleotide
ctgggtattattacgcatgct

SEQ ID NO: 19236 - DNA, 21 bp, Artificial Sequence
  Description of Artificial Sequence: Synthetic oligonucleotide
cttggtattatgaagactgct

SEQ ID NO: 19237 - DNA, 21 bp, Artificial Sequence
  Description of Artificial Sequence: Synthetic oligonucleotide
ttgggtaagcttacgactgtg

SEQ ID NO: 19238 - DNA, 21 bp, Artificial Sequence
  Description of Artificial Sequence: Synthetic oligonucleotide
ttgggtaagagtcttctgact

SEQ ID NO: 19239 - DNA, 21 bp, Artificial Sequence
  Description of Artificial Sequence: Synthetic oligonucleotide
ttggggaagtatgggattgtg

SEQ ID NO: 19240 - DNA, 21 bp, Artificial Sequence
  Description of Artificial Sequence: Synthetic oligonucleotide
cttgggttgaatcatcagact

SEQ ID NO: 19241 - DNA, 21 bp, Artificial Sequence
  Description of Artificial Sequence: Synthetic oligonucleotide
cttggtttgccgtcgaagggt

SEQ ID NO: 19242 - DNA, 21 bp, Artificial Sequence
  Description of Artificial Sequence: Synthetic oligonucleotide
cttggtcttagggataaggat

SEQ ID NO: 19243 - DNA, 21 bp, Artificial Sequence
  Description of Artificial Sequence: Synthetic oligonucleotide
ttgggtcttagggagtcttcg

SEQ ID NO: 19244 - DNA, 21 bp, Artificial Sequence
  Description of Artificial Sequence: Synthetic oligonucleotide
cttgggctttcgacggttcat

SEQ ID NO: 19245 - DNA, 21 bp, Artificial Sequence
  Description of Artificial Sequence: Synthetic oligonucleotide
ctgggtcttgttcttaatcag

SEQ ID NO: 19246 - DNA, 21 bp, Artificial Sequence
  Description of Artificial Sequence: Synthetic oligonucleotide
cttgggatgttgaagactgag

SEQ ID NO: 19247 - DNA, 21 bp, Artificial Sequence
  Description of Artificial Sequence: Synthetic oligonucleotide
ttggggatgatgcctgcttct

SEQ ID NO: 19248 - DNA, 21 bp, Artificial Sequence
  Description of Artificial Sequence: Synthetic oligonucleotide
cttgggaatcatccgagtgtg

SEQ ID NO: 19249 - DNA, 21 bp, Artificial Sequence
  Description of Artificial Sequence: Synthetic oligonucleotide
ctgggtaatccggataagatg

SEQ ID NO: 19250 - DNA, 21 bp, Artificial Sequence
  Description of Artificial Sequence: Synthetic oligonucleotide
ctggggaatccgtcgccttgt

SEQ ID NO: 19251 - DNA, 21 bp, Artificial Sequence
  Description of Artificial Sequence: Synthetic oligonucleotide
ttgggtaatccggtgactgtt

SEQ ID NO: 19252 - DNA, 21 bp, Artificial Sequence
  Description of Artificial Sequence: Synthetic oligonucleotide
ttgggtaatcagcggtcggat

SEQ ID NO: 19253 - DNA, 21 bp, Artificial Sequence
  Description of Artificial Sequence: Synthetic oligonucleotide
cttggtccggcggggatgcct

SEQ ID NO: 19254 - DNA, 21 bp, Artificial Sequence
  Description of Artificial Sequence: Synthetic oligonucleotide
ttgggtcctgcggggccttat

SEQ ID NO: 19255 - DNA, 21 bp, Artificial Sequence
  Description of Artificial Sequence: Synthetic oligonucleotide
cttgggccttttcatggtgag

SEQ ID NO: 19256 - DNA, 21 bp, Artificial Sequence
  Description of Artificial Sequence: Synthetic oligonucleotide
cttgggccgggttcttatccg

SEQ ID NO: 19257 - DNA, 21 bp, Artificial Sequence
  Description of Artificial Sequence: Synthetic oligonucleotide
ctgggtccttcttctaaggtt

SEQ ID NO: 19258 - DNA, 21 bp, Artificial Sequence
  Description of Artificial Sequence: Synthetic oligonucleotide
cttgggcctagttatacgaat

SEQ ID NO: 19259 - DNA, 21 bp, Artificial Sequence
  Description of Artificial Sequence: Synthetic oligonucleotide
cttggtcctactattaggtcg

SEQ ID NO: 19260 - DNA, 21 bp, Artificial Sequence
  Description of Artificial Sequence: Synthetic oligonucleotide
ctgggtccgactaagctgccg

SEQ ID NO: 19261 - DNA, 21 bp, Artificial Sequence
  Description of Artificial Sequence: Synthetic oligonucleotide
ttggggcaggcgctgcgggtt

SEQ ID NO: 19262 - DNA, 21 bp, Artificial Sequence
  Description of Artificial Sequence: Synthetic oligonucleotide
cttgggcagaagcctaatgag

SEQ ID NO: 19263 - DNA, 21 bp, Artificial Sequence
  Description of Artificial Sequence: Synthetic oligonucleotide
ttgggtcagtctggttgtcgt

SEQ ID NO: 19264 - DNA, 21 bp, Artificial Sequence
  Description of Artificial Sequence: Synthetic oligonucleotide
cttggtcagtctggtacgaag

SEQ ID NO: 19265 - DNA, 21 bp, Artificial Sequence
  Description of Artificial Sequence: Synthetic oligonucleotide
ttgggtcgtgcgctggagcat

SEQ ID NO: 19266 - DNA, 21 bp, Artificial Sequence
  Description of Artificial Sequence: Synthetic oligonucleotide
ttggggcgggcgtatagtcag

SEQ ID NO: 19267 - DNA, 21 bp, Artificial Sequence
  Description of Artificial Sequence: Synthetic oligonucleotide
cttggtagggagaggcctact

SEQ ID NO: 19268 - DNA, 21 bp, Artificial Sequence
  Description of Artificial Sequence: Synthetic oligonucleotide
cttggtcgtattgcggtgaat

SEQ ID NO: 19269 - DNA, 21 bp, Artificial Sequence
  Description of Artificial Sequence: Synthetic oligonucleotide
cttggtcggctgaattctggg

SEQ ID NO: 19270 - DNA, 21 bp, Artificial Sequence
  Description of Artificial Sequence: Synthetic oligonucleotide
cttggtcggcctcagatggat

SEQ ID NO: 19271 - DNA, 21 bp, Artificial Sequence
  Description of Artificial Sequence: Synthetic oligonucleotide
ttggggaggtcgggtgcgctg

SEQ ID NO: 19272 - DNA, 21 bp, Artificial Sequence
  Description of Artificial Sequence: Synthetic oligonucleotide
cttggttctgctggtccgcct

SEQ ID NO: 19273 - DNA, 21 bp, Artificial Sequence
  Description of Artificial Sequence: Synthetic oligonucleotide
ctgggtagtgcggggtattct

SEQ ID NO: 19274 - DNA, 21 bp, Artificial Sequence
  Description of Artificial Sequence: Synthetic oligonucleotide
cttgggtctgcgcattctcct

SEQ ID NO: 19275 - DNA, 21 bp, Artificial Sequence
  Description of Artificial Sequence: Synthetic oligonucleotide
ctggggtcggcgacttctggg

SEQ ID NO: 19276 - DNA, 21 bp, Artificial Sequence
  Description of Artificial Sequence: Synthetic oligonucleotide
cttggttctcattatagtaat

SEQ ID NO: 19277 - DNA, 21 bp, Artificial Sequence
  Description of Artificial Sequence: Synthetic oligonucleotide
cttggttctcttactgtggct

SEQ ID NO: 19278 - DNA, 21 bp, Artificial Sequence
  Description of Artificial Sequence: Synthetic oligonucleotide
ttgggttcgatgcctcttctt

SEQ ID NO: 19279 - DNA, 21 bp, Artificial Sequence
  Description of Artificial Sequence: Synthetic oligonucleotide
ttggggtctaatcataagccg

SEQ ID NO: 19280 - DNA, 21 bp, Artificial Sequence
  Description of Artificial Sequence: Synthetic oligonucleotide
cttggttctccttctccggat

SEQ ID NO: 19281 - DNA, 21 bp, Artificial Sequence
  Description of Artificial Sequence: Synthetic oligonucleotide
ttgggtagtcaggttattgcg

SEQ ID NO: 19282 - DNA, 21 bp, Artificial Sequence
  Description of Artificial Sequence: Synthetic oligonucleotide
ttgggttctcagtatgctgtt

SEQ ID NO: 19283 - DNA, 21 bp, Artificial Sequence
  Description of Artificial Sequence: Synthetic oligonucleotide
ttggggagtcggtcggatctt

SEQ ID NO: 19284 - DNA, 21 bp, Artificial Sequence
  Description of Artificial Sequence: Synthetic oligonucleotide
cttgggtcttcgttgcgggct

SEQ ID NO: 19285 - DNA, 21 bp, Artificial Sequence
  Description of Artificial Sequence: Synthetic oligonucleotide
ttgggttcttcgctgcggaat

SEQ ID NO: 19286 - DNA, 21 bp, Artificial Sequence
  Description of Artificial Sequence: Synthetic oligonucleotide
ttggggtcttctcagtctagg

SEQ ID NO: 19287 - DNA, 21 bp, Artificial Sequence
  Description of Artificial Sequence: Synthetic oligonucleotide
cttggttcgacgagtgctgtt

SEQ ID NO: 19288 - DNA, 21 bp, Artificial Sequence
  Description of Artificial Sequence: Synthetic oligonucleotide
ctgggttcggttaagttttct

SEQ ID NO: 19289 - DNA, 21 bp, Artificial Sequence
  Description of Artificial Sequence: Synthetic oligonucleotide
ttggggacggctttgcatctt

SEQ ID NO: 19290 - DNA, 21 bp, Artificial Sequence
  Description of Artificial Sequence: Synthetic oligonucleotide
ttggggacggggaggttgtat

SEQ ID NO: 19291 - DNA, 21 bp, Artificial Sequence
  Description of Artificial Sequence: Synthetic oligonucleotide
ctgggtactcttaatactgtg

SEQ ID NO: 19292 - DNA, 21 bp, Artificial Sequence
  Description of Artificial Sequence: Synthetic oligonucleotide
ctggggacgagggcttctggg

SEQ ID NO: 19293 - DNA, 21 bp, Artificial Sequence
  Description of Artificial Sequence: Synthetic oligonucleotide
ctgggtacgcggccgatgttg

SEQ ID NO: 19294 - DNA, 21 bp, Artificial Sequence
  Description of Artificial Sequence: Synthetic oligonucleotide
cttggtacttcggatgtgctt

SEQ ID NO: 19295 - DNA, 21 bp, Artificial Sequence
  Description of Artificial Sequence: Synthetic oligonucleotide
ttgggtacgagtcatgtggct

SEQ ID NO: 19296 - DNA, 21 bp, Artificial Sequence
  Description of Artificial Sequence: Synthetic oligonucleotide
ttgggtacgtctcagacgggt

SEQ ID NO: 19297 - DNA, 21 bp, Artificial Sequence
  Description of Artificial Sequence: Synthetic oligonucleotide
cttggtacggttcgtgtgtat

SEQ ID NO: 19298 - DNA, 21 bp, Artificial Sequence
  Description of Artificial Sequence: Synthetic oligonucleotide
ttgggggtggcgaagcctgcg

SEQ ID NO: 19299 - DNA, 21 bp, Artificial Sequence
  Description of Artificial Sequence: Synthetic oligonucleotide
ttgggtgtggataagaatgcg

SEQ ID NO: 19300 - DNA, 21 bp, Artificial Sequence
  Description of Artificial Sequence: Synthetic oligonucleotide
ctgggtgttgaggtgttgaag

SEQ ID NO: 19301 - DNA, 21 bp, Artificial Sequence
  Description of Artificial Sequence: Synthetic oligonucleotide
cttggtgtgaaggctgcgggg

SEQ ID NO: 19302 - DNA, 21 bp, Artificial Sequence
  Description of Artificial Sequence: Synthetic oligonucleotide
cttggggtgaagtctgttgat

SEQ ID NO: 19303 - DNA, 21 bp, Artificial Sequence
  Description of Artificial Sequence: Synthetic oligonucleotide
ctgggggttctgcggagtagt

SEQ ID NO: 19304 - DNA, 21 bp, Artificial Sequence
  Description of Artificial Sequence: Synthetic oligonucleotide
ttgggggttaatacttcgcag

SEQ ID NO: 19305 - DNA, 21 bp, Artificial Sequence
  Description of Artificial Sequence: Synthetic oligonucleotide
cttggggtgccgcctcagagt

SEQ ID NO: 19306 - DNA, 21 bp, Artificial Sequence
  Description of Artificial Sequence: Synthetic oligonucleotide
ctgggggtttcgagggagctt

SEQ ID NO: 19307 - DNA, 21 bp, Artificial Sequence
  Description of Artificial Sequence: Synthetic oligonucleotide
ttgggtgtgagtacgcatatg

SEQ ID NO: 19308 - DNA, 21 bp, Artificial Sequence
  Description of Artificial Sequence: Synthetic oligonucleotide
ttggggtataatttgggggag

SEQ ID NO: 19309 - DNA, 21 bp, Artificial Sequence
  Description of Artificial Sequence: Synthetic oligonucleotide
cttgggtatccgccgcgggag

SEQ ID NO: 19310 - DNA, 21 bp, Artificial Sequence
  Description of Artificial Sequence: Synthetic oligonucleotide
cttgggtattcgactggtgcg

SEQ ID NO: 19311 - DNA, 21 bp, Artificial Sequence
  Description of Artificial Sequence: Synthetic oligonucleotide
cttcatgctgctccggcgtct

SEQ ID NO: 19312 - DNA, 21 bp, Artificial Sequence
  Description of Artificial Sequence: Synthetic oligonucleotide
cttcatgcgaatcggactgag

SEQ ID NO: 19313 - DNA, 21 bp, Artificial Sequence
  Description of Artificial Sequence: Synthetic oligonucleotide
ctgcatgcgccggaggttgct

SEQ ID NO: 19314 - DNA, 21 bp, Artificial Sequence
  Description of Artificial Sequence: Synthetic oligonucleotide
ttgcatgcgacttcttctacg

SEQ ID NO: 19315 - DNA, 21 bp, Artificial Sequence
  Description of Artificial Sequence: Synthetic oligonucleotide
cttcatgcgacgactgggcct

SEQ ID NO: 19316 - DNA, 21 bp, Artificial Sequence
  Description of Artificial Sequence: Synthetic oligonucleotide
ttgcatgagtatcgttctcct

SEQ ID NO: 19317 - DNA, 21 bp, Artificial Sequence
  Description of Artificial Sequence: Synthetic oligonucleotide
ttgcattttggtcctgagggg

SEQ ID NO: 19318 - DNA, 21 bp, Artificial Sequence
  Description of Artificial Sequence: Synthetic oligonucleotide
ttgcatgggttggggtctggg

SEQ ID NO: 19319 - DNA, 21 bp, Artificial Sequence
  Description of Artificial Sequence: Synthetic oligonucleotide
cttcatgggatgccggagcgg

SEQ ID NO: 19320 - DNA, 21 bp, Artificial Sequence
  Description of Artificial Sequence: Synthetic oligonucleotide
cttcatattcgggagatggct

SEQ ID NO: 19321 - DNA, 21 bp, Artificial Sequence
  Description of Artificial Sequence: Synthetic oligonucleotide
ctgcataagtcgggttttaat

SEQ ID NO: 19322 - DNA, 21 bp, Artificial Sequence
  Description of Artificial Sequence: Synthetic oligonucleotide
ctgcatcttcagggtaatagt

SEQ ID NO: 19323 - DNA, 21 bp, Artificial Sequence
  Description of Artificial Sequence: Synthetic oligonucleotide
cttcatttgtcgcggcctttg

SEQ ID NO: 19324 - DNA, 21 bp, Artificial Sequence
  Description of Artificial Sequence: Synthetic oligonucleotide
ttgcatctgtctactgctccg

SEQ ID NO: 19325 - DNA, 21 bp, Artificial Sequence
  Description of Artificial Sequence: Synthetic oligonucleotide
ttgcatatgactactactcgt

SEQ ID NO: 19326 - DNA, 21 bp, Artificial Sequence
  Description of Artificial Sequence: Synthetic oligonucleotide
ttgcataatgatctgattcgt

SEQ ID NO: 19327 - DNA, 21 bp, Artificial Sequence
  Description of Artificial Sequence: Synthetic oligonucleotide
ttgcataatattcgtcagcag

SEQ ID NO: 19328 - DNA, 21 bp, Artificial Sequence
  Description of Artificial Sequence: Synthetic oligonucleotide
ttgcataataagatgtatgat

SEQ ID NO: 19329 - DNA, 21 bp, Artificial Sequence
  Description of Artificial Sequence: Synthetic oligonucleotide
ctgcataatcaggcggctagg

SEQ ID NO: 19330 - DNA, 21 bp, Artificial Sequence
  Description of Artificial Sequence: Synthetic oligonucleotide
ctgcataatactgctgctgct

SEQ ID NO: 19331 - DNA, 21 bp, Artificial Sequence
  Description of Artificial Sequence: Synthetic oligonucleotide
cttcataatacgcggaatatg

SEQ ID NO: 19332 - DNA, 21 bp, Artificial Sequence
  Description of Artificial Sequence: Synthetic oligonucleotide
ctgcataatacgcggactgtg

SEQ ID NO: 19333 - DNA, 21 bp, Artificial Sequence
  Description of Artificial Sequence: Synthetic oligonucleotide
ctgcatcctgggtcgactgct

SEQ ID NO: 19334 - DNA, 21 bp, Artificial Sequence
  Description of Artificial Sequence: Synthetic oligonucleotide
cttcatccgctttcgccgcgg

SEQ ID NO: 19335 - DNA, 21 bp, Artificial Sequence
  Description of Artificial Sequence: Synthetic oligonucleotide
cttcatccggtgcatgcgcct

SEQ ID NO: 19336 - DNA, 21 bp, Artificial Sequence
  Description of Artificial Sequence: Synthetic oligonucleotide
ttgcatcaggataggcttgct

SEQ ID NO: 19337 - DNA, 21 bp, Artificial Sequence
  Description of Artificial Sequence: Synthetic oligonucleotide
cttcatcagatggggaattcg

SEQ ID NO: 19338 - DNA, 21 bp, Artificial Sequence
  Description of Artificial Sequence: Synthetic oligonucleotide
ctgcatcagtcgtataatcag

SEQ ID NO: 19339 - DNA, 21 bp, Artificial Sequence
  Description of Artificial Sequence: Synthetic oligonucleotide
cttcatcgggatcttcctgtg

SEQ ID NO: 19340 - DNA, 21 bp, Artificial Sequence
  Description of Artificial Sequence: Synthetic oligonucleotide
ttgcataggcgtccgtctgag

SEQ ID NO: 19341 - DNA, 21 bp, Artificial Sequence
  Description of Artificial Sequence: Synthetic oligonucleotide
ttgcattctgctctgacgcgt

SEQ ID NO: 19342 - DNA, 21 bp, Artificial Sequence
  Description of Artificial Sequence: Synthetic oligonucleotide
ttgcattctgctagtcctcag

SEQ ID NO: 19343 - DNA, 21 bp, Artificial Sequence
  Description of Artificial Sequence: Synthetic oligonucleotide
ctgcattcggatactcgtggt

SEQ ID NO: 19344 - DNA, 21 bp, Artificial Sequence
  Description of Artificial Sequence: Synthetic oligonucleotide
ttgcattctgagttgacttcg

SEQ ID NO: 19345 - DNA, 21 bp, Artificial Sequence
  Description of Artificial Sequence: Synthetic oligonucleotide
ctgcattctggggagcgtcag

SEQ ID NO: 19346 - DNA, 21 bp, Artificial Sequence
  Description of Artificial Sequence: Synthetic oligonucleotide
ttgcattcgaatgtgacgaag

SEQ ID NO: 19347 - DNA, 21 bp, Artificial Sequence
  Description of Artificial Sequence: Synthetic oligonucleotide
ctgcattcgagggcggattcg

SEQ ID NO: 19348 - DNA, 21 bp, Artificial Sequence
  Description of Artificial Sequence: Synthetic oligonucleotide
cttcattctagggctattagt

SEQ ID NO: 19349 - DNA, 21 bp, Artificial Sequence
  Description of Artificial Sequence: Synthetic oligonucleotide
ttgcattctcgtgggactgct

SEQ ID NO: 19350 - DNA, 21 bp, Artificial Sequence
  Description of Artificial Sequence: Synthetic oligonucleotide
ctgcattctagtccgcaggat

SEQ ID NO: 19351 - DNA, 21 bp, Artificial Sequence
  Description of Artificial Sequence: Synthetic oligonucleotide
cttcatacggctaaggcgggt

SEQ ID NO: 19352 - DNA, 21 bp, Artificial Sequence
  Description of Artificial Sequence: Synthetic oligonucleotide
cttcatacggattggcttcgg

SEQ ID NO: 19353 - DNA, 21 bp, Artificial Sequence
  Description of Artificial Sequence: Synthetic oligonucleotide
ttgcatacgccgcagctgagt

SEQ ID NO: 19354 - DNA, 21 bp, Artificial Sequence
  Description of Artificial Sequence: Synthetic oligonucleotide
ctgcatacttcggctcggcct

SEQ ID NO: 19355 - DNA, 21 bp, Artificial Sequence
  Description of Artificial Sequence: Synthetic oligonucleotide
ttgcatgttcctcagcctccg

SEQ ID NO: 19356 - DNA, 21 bp, Artificial Sequence
  Description of Artificial Sequence: Synthetic oligonucleotide
cttattgcgagtcatcgtctg

SEQ ID NO: 19357 - DNA, 21 bp, Artificial Sequence
  Description of Artificial Sequence: Synthetic oligonucleotide
cttattgcttcgtctggtgtg

SEQ ID NO: 19358 - DNA, 21 bp, Artificial Sequence
  Description of Artificial Sequence: Synthetic oligonucleotide
ctgattgctagtactacgtcg

SEQ ID NO: 19359 - DNA, 21 bp, Artificial Sequence
  Description of Artificial Sequence: Synthetic oligonucleotide
ttgattgggaatgttgtgatg

SEQ ID NO: 19360 - DNA, 21 bp, Artificial Sequence
  Description of Artificial Sequence: Synthetic oligonucleotide
cttattgggcggcctatggag

SEQ ID NO: 19361 - DNA, 21 bp, Artificial Sequence
  Description of Artificial Sequence: Synthetic oligonucleotide
cttattgggcggactatttct

SEQ ID NO: 19362 - DNA, 21 bp, Artificial Sequence
  Description of Artificial Sequence: Synthetic oligonucleotide
ttgattggtacggcgtcgctg

SEQ ID NO: 19363 - DNA, 21 bp, Artificial Sequence
  Description of Artificial Sequence: Synthetic oligonucleotide
cttattgggacgcctgttgtg

SEQ ID NO: 19364 - DNA, 21 bp, Artificial Sequence
  Description of Artificial Sequence: Synthetic oligonucleotide
ttgattcatgctagtgggggt

SEQ ID NO: 19365 - DNA, 21 bp, Artificial Sequence
  Description of Artificial Sequence: Synthetic oligonucleotide
ctgattcatctgtcgggtgcg

SEQ ID NO: 19366 - DNA, 21 bp, Artificial Sequence
  Description of Artificial Sequence: Synthetic oligonucleotide
ctgattaaggagaatgttctg

SEQ ID NO: 19367 - DNA, 21 bp, Artificial Sequence
  Description of Artificial Sequence: Synthetic oligonucleotide
ttgattaagggggcggctagt

SEQ ID NO: 19368 - DNA, 21 bp, Artificial Sequence
  Description of Artificial Sequence: Synthetic oligonucleotide
ctgattaaggggtctctggat

SEQ ID NO: 19369 - DNA, 21 bp, Artificial Sequence
  Description of Artificial Sequence: Synthetic oligonucleotide
ttgattaagccgtctgttccg

SEQ ID NO: 19370 - DNA, 21 bp, Artificial Sequence
  Description of Artificial Sequence: Synthetic oligonucleotide
cttattaagtcttcggagcct

SEQ ID NO: 19371 - DNA, 21 bp, Artificial Sequence
  Description of Artificial Sequence: Synthetic oligonucleotide
cttattaagagtacgcttgtt

SEQ ID NO: 19372 - DNA, 21 bp, Artificial Sequence
  Description of Artificial Sequence: Synthetic oligonucleotide
cttattaagactacgcatggt

SEQ ID NO: 19373 - DNA, 21 bp, Artificial Sequence
  Description of Artificial Sequence: Synthetic oligonucleotide
ctgattctgcctaatcattcg

SEQ ID NO: 19374 - DNA, 21 bp, Artificial Sequence
  Description of Artificial Sequence: Synthetic oligonucleotide
ttgattatgcggcatgattgt

SEQ ID NO: 19375 - DNA, 21 bp, Artificial Sequence
  Description of Artificial Sequence: Synthetic oligonucleotide
ttgattaatgagaatccgcat

SEQ ID NO: 19376 - DNA, 21 bp, Artificial Sequence
  Description of Artificial Sequence: Synthetic oligonucleotide
ttgattaataagatttctccg

SEQ ID NO: 19377 - DNA, 21 bp, Artificial Sequence
  Description of Artificial Sequence: Synthetic oligonucleotide
cttattaatccggagatgtat

SEQ ID NO: 19378 - DNA, 21 bp, Artificial Sequence
  Description of Artificial Sequence: Synthetic oligonucleotide
cttattccgcctcatcatgat

SEQ ID NO: 19379 - DNA, 21 bp, Artificial Sequence
  Description of Artificial Sequence: Synthetic oligonucleotide
ctgattccgactgtgatgaat

SEQ ID NO: 19380 - DNA, 21 bp, Artificial Sequence
  Description of Artificial Sequence: Synthetic oligonucleotide
ctgattcaggaggttcttcag

SEQ ID NO: 19381 - DNA, 21 bp, Artificial Sequence
  Description of Artificial Sequence: Synthetic oligonucleotide
cttattcagattagtcagcag

SEQ ID NO: 19382 - DNA, 21 bp, Artificial Sequence
  Description of Artificial Sequence: Synthetic oligonucleotide
ctgattcagaatcagggtacg

SEQ ID NO: 19383 - DNA, 21 bp, Artificial Sequence
  Description of Artificial Sequence: Synthetic oligonucleotide
ttgattcgggagcagaatcct

SEQ ID NO: 19384 - DNA, 21 bp, Artificial Sequence
  Description of Artificial Sequence: Synthetic oligonucleotide
ctgattcgtttgagtgataat

SEQ ID NO: 19385 - DNA, 21 bp, Artificial Sequence
  Description of Artificial Sequence: Synthetic oligonucleotide
ttgattcggtctgatactatt

SEQ ID NO: 19386 - DNA, 21 bp, Artificial Sequence
  Description of Artificial Sequence: Synthetic oligonucleotide
ttgattcgttcgattccgccg

SEQ ID NO: 19387 - DNA, 21 bp, Artificial Sequence
  Description of Artificial Sequence: Synthetic oligonucleotide
ttgatttcggctagtcatatt

SEQ ID NO: 19388 - DNA, 21 bp, Artificial Sequence
  Description of Artificial Sequence: Synthetic oligonucleotide
cttatttcggatgcgagttct

SEQ ID NO: 19389 - DNA, 21 bp, Artificial Sequence
  Description of Artificial Sequence: Synthetic oligonucleotide
ttgatttcgccgactgttacg

SEQ ID NO: 19390 - DNA, 21 bp, Artificial Sequence
  Description of Artificial Sequence: Synthetic oligonucleotide
ctgatttcgcgtgaggttact

SEQ ID NO: 19391 - DNA, 21 bp, Artificial Sequence
  Description of Artificial Sequence: Synthetic oligonucleotide
ctgatttctcgtgtgccggat

SEQ ID NO: 19392 - DNA, 21 bp, Artificial Sequence
  Description of Artificial Sequence: Synthetic oligonucleotide
ttgattactgctgcgctggcg

SEQ ID NO: 19393 - DNA, 21 bp, Artificial Sequence
  Description of Artificial Sequence: Synthetic oligonucleotide
ctgattacggggcatagtact

SEQ ID NO: 19394 - DNA, 21 bp, Artificial Sequence
  Description of Artificial Sequence: Synthetic oligonucleotide
ttgattacgcctggtgcgagt

SEQ ID NO: 19395 - DNA, 21 bp, Artificial Sequence
  Description of Artificial Sequence: Synthetic oligonucleotide
ttgattacgcctctgcctagt

SEQ ID NO: 19396 - DNA, 21 bp, Artificial Sequence
  Description of Artificial Sequence: Synthetic oligonucleotide
ttgattacgtctgcggctggt

SEQ ID NO: 19397 - DNA, 21 bp, Artificial Sequence
  Description of Artificial Sequence: Synthetic oligonucleotide
ctgattgtggctttgaagggt

SEQ ID NO: 19398 - DNA, 21 bp, Artificial Sequence
  Description of Artificial Sequence: Synthetic oligonucleotide
ttgattgttgagcaggcgcgg

SEQ ID NO: 19399 - DNA, 21 bp, Artificial Sequence
  Description of Artificial Sequence: Synthetic oligonucleotide
ctgattgtgactgagaataag

SEQ ID NO: 19400 - DNA, 21 bp, Artificial Sequence
  Description of Artificial Sequence: Synthetic oligonucleotide
ctgaaggctggtagttcgtct

SEQ ID NO: 19401 - DNA, 21 bp, Artificial Sequence
  Description of Artificial Sequence: Synthetic oligonucleotide
ttgaaggctggtacgtatggg

SEQ ID NO: 19402 - DNA, 21 bp, Artificial Sequence
  Description of Artificial Sequence: Synthetic oligonucleotide
ctgaaggcgattccttatggg

SEQ ID NO: 19403 - DNA, 21 bp, Artificial Sequence
  Description of Artificial Sequence: Synthetic oligonucleotide
cttaaggcgcaggttgagctt

SEQ ID NO: 19404 - DNA, 21 bp, Artificial Sequence
  Description of Artificial Sequence: Synthetic oligonucleotide
ttgaaggcgactattacgtct

SEQ ID NO: 19405 - DNA, 21 bp, Artificial Sequence
  Description of Artificial Sequence: Synthetic oligonucleotide
ctgaaggatggtagggcttcg

SEQ ID NO: 19406 - DNA, 21 bp, Artificial Sequence
  Description of Artificial Sequence: Synthetic oligonucleotide
cttaaggatatgcgtttgacg

SEQ ID NO: 19407 - DNA, 21 bp, Artificial Sequence
  Description of Artificial Sequence: Synthetic oligonucleotide
ctgaaggatccggcgcgtctt

SEQ ID NO: 19408 - DNA, 21 bp, Artificial Sequence
  Description of Artificial Sequence: Synthetic oligonucleotide
ttgaaggatccgactgcttgg

SEQ ID NO: 19409 - DNA, 21 bp, Artificial Sequence
  Description of Artificial Sequence: Synthetic oligonucleotide
ctgaaggattctctgacttgt

SEQ ID NO: 19410 - DNA, 21 bp, Artificial Sequence
  Description of Artificial Sequence: Synthetic oligonucleotide
ctgaaggattatgggggtgct

SEQ ID NO: 19411 - DNA, 21 bp, Artificial Sequence
  Description of Artificial Sequence: Synthetic oligonucleotide
ctgaaggagattgctggtctg

SEQ ID NO: 19412 - DNA, 21 bp, Artificial Sequence
  Description of Artificial Sequence: Synthetic oligonucleotide
ctgaagttttctgagtctaag

SEQ ID NO: 19413 - DNA, 21 bp, Artificial Sequence
  Description of Artificial Sequence: Synthetic oligonucleotide
ctgaagggggctgtggttgtt

SEQ ID NO: 19414 - DNA, 21 bp, Artificial Sequence
  Description of Artificial Sequence: Synthetic oligonucleotide
cttaagggtgatgctgggtat

SEQ ID NO: 19415 - DNA, 21 bp, Artificial Sequence
  Description of Artificial Sequence: Synthetic oligonucleotide
cttaaggggggtgctgatacg

SEQ ID NO: 19416 - DNA, 21 bp, Artificial Sequence
  Description of Artificial Sequence: Synthetic oligonucleotide
ctgaagggtatgactgggctg

SEQ ID NO: 19417 - DNA, 21 bp, Artificial Sequence
  Description of Artificial Sequence: Synthetic oligonucleotide
ctgaagggtccgaatgctgtt

SEQ ID NO: 19418 - DNA, 21 bp, Artificial Sequence
  Description of Artificial Sequence: Synthetic oligonucleotide
ctgaaggggtatattgattct

SEQ ID NO: 19419 - DNA, 21 bp, Artificial Sequence
  Description of Artificial Sequence: Synthetic oligonucleotide
ctgaagcatcagctgcttgct

SEQ ID NO: 19420 - DNA, 21 bp, Artificial Sequence
  Description of Artificial Sequence: Synthetic oligonucleotide
cttaagcattctctgcctgat

SEQ ID NO: 19421 - DNA, 21 bp, Artificial Sequence
  Description of Artificial Sequence: Synthetic oligonucleotide
ttgaagattggtactgttacg

SEQ ID NO: 19422 - DNA, 21 bp, Artificial Sequence
  Description of Artificial Sequence: Synthetic oligonucleotide
ttgaagcttgctcctaatgtg

SEQ ID NO: 19423 - DNA, 21 bp, Artificial Sequence
  Description of Artificial Sequence: Synthetic oligonucleotide
ctgaagttggatgagggtctg

SEQ ID NO: 19424 - DNA, 21 bp, Artificial Sequence
  Description of Artificial Sequence: Synthetic oligonucleotide
cttaagttgcgtgcgtcggag

SEQ ID NO: 19425 - DNA, 21 bp, Artificial Sequence
  Description of Artificial Sequence: Synthetic oligonucleotide
ttgaagatgtcgtctacgccg

SEQ ID NO: 19426 - DNA, 21 bp, Artificial Sequence
  Description of Artificial Sequence: Synthetic oligonucleotide
ctgaagatggttgataatgtt

SEQ ID NO: 19427 - DNA, 21 bp, Artificial Sequence
  Description of Artificial Sequence: Synthetic oligonucleotide
cttaagaatggtagtatggtg

SEQ ID NO: 19428 - DNA, 21 bp, Artificial Sequence
  Description of Artificial Sequence: Synthetic oligonucleotide
ttgaagaatcctcttccgtct

SEQ ID NO: 19429 - DNA, 21 bp, Artificial Sequence
  Description of Artificial Sequence: Synthetic oligonucleotide
ttgaagaatcctagtaatgtt

SEQ ID NO: 19430 - DNA, 21 bp, Artificial Sequence
  Description of Artificial Sequence: Synthetic oligonucleotide
ctgaagcctgatatgacgcgg

SEQ ID NO: 19431 - DNA, 21 bp, Artificial Sequence
  Description of Artificial Sequence: Synthetic oligonucleotide
ttgaagcctgatcgtcctgat

SEQ ID NO: 19432 - DNA, 21 bp, Artificial Sequence
  Description of Artificial Sequence: Synthetic oligonucleotide
ctgaagccgaatgagatttct

SEQ ID NO: 19433 - DNA, 21 bp, Artificial Sequence
  Description of Artificial Sequence: Synthetic oligonucleotide
ctgaagccttcgcctattcct

SEQ ID NO: 19434 - DNA, 21 bp, Artificial Sequence
  Description of Artificial Sequence: Synthetic oligonucleotide
ctgaagccgagttcgtatgtt

SEQ ID NO: 19435 - DNA, 21 bp, Artificial Sequence
  Description of Artificial Sequence: Synthetic oligonucleotide
cttaagccggtgcctagtctg

SEQ ID NO: 19436 - DNA, 21 bp, Artificial Sequence
  Description of Artificial Sequence: Synthetic oligonucleotide
ctgaagcagattgatcttggg

SEQ ID NO: 19437 - DNA, 21 bp, Artificial Sequence
  Description of Artificial Sequence: Synthetic oligonucleotide
ttgaagcagcctacgcagtgt

SEQ ID NO: 19438 - DNA, 21 bp, Artificial Sequence
  Description of Artificial Sequence: Synthetic oligonucleotide
ttgaagcgggagtttgattat

SEQ ID NO: 19439 - DNA, 21 bp, Artificial Sequence
  Description of Artificial Sequence: Synthetic oligonucleotide
cttaagtctgcgacgactatt

SEQ ID NO: 19440 - DNA, 21 bp, Artificial Sequence
  Description of Artificial Sequence: Synthetic oligonucleotide
ctgaagtctggtgtgtcgccg

SEQ ID NO: 19441 - DNA, 21 bp, Artificial Sequence
  Description of Artificial Sequence: Synthetic oligonucleotide
ctgaagtctccgagtacgcct

SEQ ID NO: 19442 - DNA, 21 bp, Artificial Sequence
  Description of Artificial Sequence: Synthetic oligonucleotide
ctgaagtcgcagctgagtgat

SEQ ID NO: 19443 - DNA, 21 bp, Artificial Sequence
  Description of Artificial Sequence: Synthetic oligonucleotide
ttgaagtcgcagtcgtttact

SEQ ID NO: 19444 - DNA, 21 bp, Artificial Sequence
  Description of Artificial Sequence: Synthetic oligonucleotide
cttaagtctacgcttatgcct

SEQ ID NO: 19445 - DNA, 21 bp, Artificial Sequence
  Description of Artificial Sequence: Synthetic oligonucleotide
ctgaagtcgactcctccgggg

SEQ ID NO: 19446 - DNA, 21 bp, Artificial Sequence
  Description of Artificial Sequence: Synthetic oligonucleotide
ctgaagagtacgagtcaggtt

SEQ ID NO: 19447 - DNA, 21 bp, Artificial Sequence
  Description of Artificial Sequence: Synthetic oligonucleotide
cttaagacggggcgtgattct

SEQ ID NO: 19448 - DNA, 21 bp, Artificial Sequence
  Description of Artificial Sequence: Synthetic oligonucleotide
ctgaagacgggttatatgccg

SEQ ID NO: 19449 - DNA, 21 bp, Artificial Sequence
  Description of Artificial Sequence: Synthetic oligonucleotide
ctgaagacgctgcttaagacg

SEQ ID NO: 19450 - DNA, 21 bp, Artificial Sequence
  Description of Artificial Sequence: Synthetic oligonucleotide
ctgaagacgaatgagcgggtt

SEQ ID NO: 19451 - DNA, 21 bp, Artificial Sequence
  Description of Artificial Sequence: Synthetic oligonucleotide
cttaagactagtggtgtgatt

SEQ ID NO: 19452 - DNA, 21 bp, Artificial Sequence
  Description of Artificial Sequence: Synthetic oligonucleotide
cttaagactagtaatcgtgat

SEQ ID NO: 19453 - DNA, 21 bp, Artificial Sequence
  Description of Artificial Sequence: Synthetic oligonucleotide
ttgaagacgactaatcctccg

SEQ ID NO: 19454 - DNA, 21 bp, Artificial Sequence
  Description of Artificial Sequence: Synthetic oligonucleotide
cttaagactgttcattcggat

SEQ ID NO: 19455 - DNA, 21 bp, Artificial Sequence
  Description of Artificial Sequence: Synthetic oligonucleotide
ctgaaggtggagatgagtccg

SEQ ID NO: 19456 - DNA, 21 bp, Artificial Sequence
  Description of Artificial Sequence: Synthetic oligonucleotide
ttgaagtgggagcatacttct

SEQ ID NO: 19457 - DNA, 21 bp, Artificial Sequence
  Description of Artificial Sequence: Synthetic oligonucleotide
ctgaagtggggtccgcctgat

SEQ ID NO: 19458 - DNA, 21 bp, Artificial Sequence
  Description of Artificial Sequence: Synthetic oligonucleotide
ctgaagtataatattcctgtt

SEQ ID NO: 19459 - DNA, 21 bp, Artificial Sequence
  Description of Artificial Sequence: Synthetic oligonucleotide
ttgcttgctgcgatgggtccg

SEQ ID NO: 19460 - DNA, 21 bp, Artificial Sequence
  Description of Artificial Sequence: Synthetic oligonucleotide
ttgttggcttttgagaagcag

SEQ ID NO: 19461 - DNA, 21 bp, Artificial Sequence
  Description of Artificial Sequence: Synthetic oligonucleotide
cttctggcgggtcatcatggt

SEQ ID NO: 19462 - DNA, 21 bp, Artificial Sequence
  Description of Artificial Sequence: Synthetic oligonucleotide
ctgctggctcgtggtgttaat

SEQ ID NO: 19463 - DNA, 21 bp, Artificial Sequence
  Description of Artificial Sequence: Synthetic oligonucleotide
ttgcttgcgacttcgctgact

SEQ ID NO: 19464 - DNA, 21 bp, Artificial Sequence
  Description of Artificial Sequence: Synthetic oligonucleotide
ctgcttgatggtcgtgcgagg

SEQ ID NO: 19465 - DNA, 21 bp, Artificial Sequence
  Description of Artificial Sequence: Synthetic oligonucleotide
cttttggataaggagcgtgag

SEQ ID NO: 19466 - DNA, 21 bp, Artificial Sequence
  Description of Artificial Sequence: Synthetic oligonucleotide
cttttggatcaggattttttt

SEQ ID NO: 19467 - DNA, 21 bp, Artificial Sequence
  Description of Artificial Sequence: Synthetic oligonucleotide
ctgctggatacgggtgttcct

SEQ ID NO: 19468 - DNA, 21 bp, Artificial Sequence
  Description of Artificial Sequence: Synthetic oligonucleotide
ttgctggagaagggtcagagt

SEQ ID NO: 19469 - DNA, 21 bp, Artificial Sequence
  Description of Artificial Sequence: Synthetic oligonucleotide
cttttggagcgtagttatccg

SEQ ID NO: 19470 - DNA, 21 bp, Artificial Sequence
  Description of Artificial Sequence: Synthetic oligonucleotide
ctgctggaggtgccgattcgg

SEQ ID NO: 19471 - DNA, 21 bp, Artificial Sequence
  Description of Artificial Sequence: Synthetic oligonucleotide
ctgttgtttaagtcttcgtcg

SEQ ID NO: 19472 - DNA, 21 bp, Artificial Sequence
  Description of Artificial Sequence: Synthetic oligonucleotide
cttctgggggctcggcatctt

SEQ ID NO: 19473 - DNA, 21 bp, Artificial Sequence
  Description of Artificial Sequence: Synthetic oligonucleotide
ctgcttggtgcgagttctgcg

SEQ ID NO: 19474 - DNA, 21 bp, Artificial Sequence
  Description of Artificial Sequence: Synthetic oligonucleotide
cttcttggtcatgcggcgagt

SEQ ID NO: 19475 - DNA, 21 bp, Artificial Sequence
  Description of Artificial Sequence: Synthetic oligonucleotide
ctgttgggtcctgatccgtct

SEQ ID NO: 19476 - DNA, 21 bp, Artificial Sequence
  Description of Artificial Sequence: Synthetic oligonucleotide
ctgctggggcctttgcagggg

SEQ ID NO: 19477 - DNA, 21 bp, Artificial Sequence
  Description of Artificial Sequence: Synthetic oligonucleotide
ttgttgggtcgtctgcagcct

SEQ ID NO: 19478 - DNA, 21 bp, Artificial Sequence
  Description of Artificial Sequence: Synthetic oligonucleotide
ctgttgggtcgttctacgggg

SEQ ID NO: 19479 - DNA, 21 bp, Artificial Sequence
  Description of Artificial Sequence: Synthetic oligonucleotide
ttgcttggtagtcgtccgagt

SEQ ID NO: 19480 - DNA, 21 bp, Artificial Sequence
  Description of Artificial Sequence: Synthetic oligonucleotide
cttctgggggttttgcatccg

SEQ ID NO: 19481 - DNA, 21 bp, Artificial Sequence
  Description of Artificial Sequence: Synthetic oligonucleotide
ttgcttggggtgactaatcct

SEQ ID NO: 19482 - DNA, 21 bp, Artificial Sequence
  Description of Artificial Sequence: Synthetic oligonucleotide
cttcttcatctgggtcagacg

SEQ ID NO: 19483 - DNA, 21 bp, Artificial Sequence
  Description of Artificial Sequence: Synthetic oligonucleotide
ttgctgcatcctgctccgcgt

SEQ ID NO: 19484 - DNA, 21 bp, Artificial Sequence
  Description of Artificial Sequence: Synthetic oligonucleotide
ttgcttcatccggaggctatt

SEQ ID NO: 19485 - DNA, 21 bp, Artificial Sequence
  Description of Artificial Sequence: Synthetic oligonucleotide
ttgcttcattcgtcgtctcag

SEQ ID NO: 19486 - DNA, 21 bp, Artificial Sequence
  Description of Artificial Sequence: Synthetic oligonucleotide
cttctgcatactcaggggaat

SEQ ID NO: 19487 - DNA, 21 bp, Artificial Sequence
  Description of Artificial Sequence: Synthetic oligonucleotide
cttcttcatacggtgagtgag

SEQ ID NO: 19488 - DNA, 21 bp, Artificial Sequence
  Description of Artificial Sequence: Synthetic oligonucleotide
ctgctgcatgttccgcgtgag

SEQ ID NO: 19489 - DNA, 21 bp, Artificial Sequence
  Description of Artificial Sequence: Synthetic oligonucleotide
ctgcttatttgtggggagcat

SEQ ID NO: 19490 - DNA, 21 bp, Artificial Sequence
  Description of Artificial Sequence: Synthetic oligonucleotide
ttgttgaagggtttttcggtt

SEQ ID NO: 19491 - DNA, 21 bp, Artificial Sequence
  Description of Artificial Sequence: Synthetic oligonucleotide
ctgttgaagccggctgctcct

SEQ ID NO: 19492 - DNA, 21 bp, Artificial Sequence
  Description of Artificial Sequence: Synthetic oligonucleotide
cttctgaagagtcctgtgcct

SEQ ID NO: 19493 - DNA, 21 bp, Artificial Sequence
  Description of Artificial Sequence: Synthetic oligonucleotide
ttgttgctggctccgacttcg

SEQ ID NO: 19494 - DNA, 21 bp, Artificial Sequence
  Description of Artificial Sequence: Synthetic oligonucleotide
ctgcttcttgcgcggacggtt

SEQ ID NO: 19495 - DNA, 21 bp, Artificial Sequence
  Description of Artificial Sequence: Synthetic oligonucleotide
ctgcttcttgatgatcatacg

SEQ ID NO: 19496 - DNA, 21 bp, Artificial Sequence
  Description of Artificial Sequence: Synthetic oligonucleotide
cttttgttgccggctcgtggt

SEQ ID NO: 19497 - DNA, 21 bp, Artificial Sequence
  Description of Artificial Sequence: Synthetic oligonucleotide
cttttgcttcaggctcgtgcg

SEQ ID NO: 19498 - DNA, 21 bp, Artificial Sequence
  Description of Artificial Sequence: Synthetic oligonucleotide
ttgttgttgcagaagggtcct

SEQ ID NO: 19499 - DNA, 21 bp, Artificial Sequence
  Description of Artificial Sequence: Synthetic oligonucleotide
cttcttttgcgggctgatggt

SEQ ID NO: 19500 - DNA, 21 bp, Artificial Sequence
  Description of Artificial Sequence: Synthetic oligonucleotide
ctgctgctgtctgttggtact

SEQ ID NO: 19501 - DNA, 21 bp, Artificial Sequence
  Description of Artificial Sequence: Synthetic oligonucleotide
cttctgcttacgggggttgcg

SEQ ID NO: 19502 - DNA, 21 bp, Artificial Sequence
  Description of Artificial Sequence: Synthetic oligonucleotide
cttttgatgccgtcggggctt

SEQ ID NO: 19503 - DNA, 21 bp, Artificial Sequence
  Description of Artificial Sequence: Synthetic oligonucleotide
ttgcttaatgatgcttatgtg

SEQ ID NO: 19504 - DNA, 21 bp, Artificial Sequence
  Description of Artificial Sequence: Synthetic oligonucleotide
ttgttgaatgggcatgaggct

SEQ ID NO: 19505 - DNA, 21 bp, Artificial Sequence
  Description of Artificial Sequence: Synthetic oligonucleotide
ctgttgaatatggctaggact

SEQ ID NO: 19506 - DNA, 21 bp, Artificial Sequence
  Description of Artificial Sequence: Synthetic oligonucleotide
ctgttgaatacgagtagtgct

SEQ ID NO: 19507 - DNA, 21 bp, Artificial Sequence
  Description of Artificial Sequence: Synthetic oligonucleotide
ttgttgccggctgagagggct

SEQ ID NO: 19508 - DNA, 21 bp, Artificial Sequence
  Description of Artificial Sequence: Synthetic oligonucleotide
cttcttcctgagtattcgcgt

SEQ ID NO: 19509 - DNA, 21 bp, Artificial Sequence
  Description of Artificial Sequence: Synthetic oligonucleotide
ttgttgccggggcgtactgat

SEQ ID NO: 19510 - DNA, 21 bp, Artificial Sequence
  Description of Artificial Sequence: Synthetic oligonucleotide
ttgttgccgcatgaggggacg

SEQ ID NO: 19511 - DNA, 21 bp, Artificial Sequence
  Description of Artificial Sequence: Synthetic oligonucleotide
ctgttgcctaaggcgtcgtcg

SEQ ID NO: 19512 - DNA, 21 bp, Artificial Sequence
  Description of Artificial Sequence: Synthetic oligonucleotide
cttttgcctctggctccgagg

SEQ ID NO: 19513 - DNA, 21 bp, Artificial Sequence
  Description of Artificial Sequence: Synthetic oligonucleotide
ctgttgccgaatccgcctacg

SEQ ID NO: 19514 - DNA, 21 bp, Artificial Sequence
  Description of Artificial Sequence: Synthetic oligonucleotide
cttctgcctaatcagagtttt

SEQ ID NO: 19515 - DNA, 21 bp, Artificial Sequence
  Description of Artificial Sequence: Synthetic oligonucleotide
cttttgcctaatacgcctccg

SEQ ID NO: 19516 - DNA, 21 bp, Artificial Sequence
  Description of Artificial Sequence: Synthetic oligonucleotide
ctgcttcctccgcgtgatccg

SEQ ID NO: 19517 - DNA, 21 bp, Artificial Sequence
  Description of Artificial Sequence: Synthetic oligonucleotide
ttgctgccgccgtcgagttcg

SEQ ID NO: 19518 - DNA, 21 bp, Artificial Sequence
  Description of Artificial Sequence: Synthetic oligonucleotide
ttgcttccgcagtttaggagt

SEQ ID NO: 19519 - DNA, 21 bp, Artificial Sequence
  Description of Artificial Sequence: Synthetic oligonucleotide
ttgttgccgcgtacgcattat

SEQ ID NO: 19520 - DNA, 21 bp, Artificial Sequence
  Description of Artificial Sequence: Synthetic oligonucleotide
cttctgccttcgttggcgtct

SEQ ID NO: 19521 - DNA, 21 bp, Artificial Sequence
  Description of Artificial Sequence: Synthetic oligonucleotide
ttgctgccgtcgcgtggggct

SEQ ID NO: 19522 - DNA, 21 bp, Artificial Sequence
  Description of Artificial Sequence: Synthetic oligonucleotide
ttgctgcctactagtaagctg

SEQ ID NO: 19523 - DNA, 21 bp, Artificial Sequence
  Description of Artificial Sequence: Synthetic oligonucleotide
cttctgcctgtgttgtctgag

SEQ ID NO: 19524 - DNA, 21 bp, Artificial Sequence
  Description of Artificial Sequence: Synthetic oligonucleotide
cttcttcagccgtcggttcct

SEQ ID NO: 19525 - DNA, 21 bp, Artificial Sequence
  Description of Artificial Sequence: Synthetic oligonucleotide
ctgcttcagcagcctgagtgg

SEQ ID NO: 19526 - DNA, 21 bp, Artificial Sequence
  Description of Artificial Sequence: Synthetic oligonucleotide
cttcttcagcgttctctttct

SEQ ID NO: 19527 - DNA, 21 bp, Artificial Sequence
  Description of Artificial Sequence: Synthetic oligonucleotide
cttctgcagacgcttaagccg

SEQ ID NO: 19528 - DNA, 21 bp, Artificial Sequence
  Description of Artificial Sequence: Synthetic oligonucleotide
cttctgcgtggggcggtggcg

SEQ ID NO: 19529 - DNA, 21 bp, Artificial Sequence
  Description of Artificial Sequence: Synthetic oligonucleotide
ctgctgaggggtgatgcggcg

SEQ ID NO: 19530 - DNA, 21 bp, Artificial Sequence
  Description of Artificial Sequence: Synthetic oligonucleotide
ttgttgcgtaaggatgaggct

SEQ ID NO: 19531 - DNA, 21 bp, Artificial Sequence
  Description of Artificial Sequence: Synthetic oligonucleotide
ctgcttcggaataatccgcat

SEQ ID NO: 19532 - DNA, 21 bp, Artificial Sequence
  Description of Artificial Sequence: Synthetic oligonucleotide
cttttgcgtaatgtgctgcct

SEQ ID NO: 19533 - DNA, 21 bp, Artificial Sequence
  Description of Artificial Sequence: Synthetic oligonucleotide
ttgcttaggtcgcagagtgcg

SEQ ID NO: 19534 - DNA, 21 bp, Artificial Sequence
  Description of Artificial Sequence: Synthetic oligonucleotide
cttcttaggactccttcttct

SEQ ID NO: 19535 - DNA, 21 bp, Artificial Sequence
  Description of Artificial Sequence: Synthetic oligonucleotide
ctgttgcgggttccgaatccg

SEQ ID NO: 19536 - DNA, 21 bp, Artificial Sequence
  Description of Artificial Sequence: Synthetic oligonucleotide
cttcttagtgctgcggatcgg

SEQ ID NO: 19537 - DNA, 21 bp, Artificial Sequence
  Description of Artificial Sequence: Synthetic oligonucleotide
ctgctgtcggcgccgtatact

SEQ ID NO: 19538 - DNA, 21 bp, Artificial Sequence
  Description of Artificial Sequence: Synthetic oligonucleotide
ctgctgagtgcttctacttcg

SEQ ID NO: 19539 - DNA, 21 bp, Artificial Sequence
  Description of Artificial Sequence: Synthetic oligonucleotide
cttttgtctgatagtgctagg

SEQ ID NO: 19540 - DNA, 21 bp, Artificial Sequence
  Description of Artificial Sequence: Synthetic oligonucleotide
ctgttgtcgtttactacggat

SEQ ID NO: 19541 - DNA, 21 bp, Artificial Sequence
  Description of Artificial Sequence: Synthetic oligonucleotide
ctgttgtcgggtgcgcttcag

SEQ ID NO: 19542 - DNA, 21 bp, Artificial Sequence
  Description of Artificial Sequence: Synthetic oligonucleotide
cttttgagtgggcgggttact

SEQ ID NO: 19543 - DNA, 21 bp, Artificial Sequence
  Description of Artificial Sequence: Synthetic oligonucleotide
cttctttctaagggtcattcg

SEQ ID NO: 19544 - DNA, 21 bp, Artificial Sequence
  Description of Artificial Sequence: Synthetic oligonucleotide
ttgctgagtatgcgtacgcct

SEQ ID NO: 19545 - DNA, 21 bp, Artificial Sequence
  Description of Artificial Sequence: Synthetic oligonucleotide
cttttgtctcctgatgagtat

SEQ ID NO: 19546 - DNA, 21 bp, Artificial Sequence
  Description of Artificial Sequence: Synthetic oligonucleotide
ctgcttagtcctggtcctctt

SEQ ID NO: 19547 - DNA, 21 bp, Artificial Sequence
  Description of Artificial Sequence: Synthetic oligonucleotide
ctgctgagtcgtgtgcatgat

SEQ ID NO: 19548 - DNA, 21 bp, Artificial Sequence
  Description of Artificial Sequence: Synthetic oligonucleotide
cttctttctacggctgttagt

SEQ ID NO: 19549 - DNA, 21 bp, Artificial Sequence
  Description of Artificial Sequence: Synthetic oligonucleotide
ctgctgtctactgatgggtcg

SEQ ID NO: 19550 - DNA, 21 bp, Artificial Sequence
  Description of Artificial Sequence: Synthetic oligonucleotide
ctgctttctgttcatgagatg

SEQ ID NO: 19551 - DNA, 21 bp, Artificial Sequence
  Description of Artificial Sequence: Synthetic oligonucleotide
cttcttactgatgagtgtacg

SEQ ID NO: 19552 - DNA, 21 bp, Artificial Sequence
  Description of Artificial Sequence: Synthetic oligonucleotide
cttctgactgatcggcgtctg

SEQ ID NO: 19553 - DNA, 21 bp, Artificial Sequence
  Description of Artificial Sequence: Synthetic oligonucleotide
ttgctgacgcatttttcttcg

SEQ ID NO: 19554 - DNA, 21 bp, Artificial Sequence
  Description of Artificial Sequence: Synthetic oligonucleotide
ttgttgactattgggaagccg

SEQ ID NO: 19555 - DNA, 21 bp, Artificial Sequence
  Description of Artificial Sequence: Synthetic oligonucleotide
ctgttgactctgtctgaggtg

SEQ ID NO: 19556 - DNA, 21 bp, Artificial Sequence
  Description of Artificial Sequence: Synthetic oligonucleotide
ctgctgacgctgagtactccg

SEQ ID NO: 19557 - DNA, 21 bp, Artificial Sequence
  Description of Artificial Sequence: Synthetic oligonucleotide
cttcttactaatgctattccg

SEQ ID NO: 19558 - DNA, 21 bp, Artificial Sequence
  Description of Artificial Sequence: Synthetic oligonucleotide
ctgttgactccgtataatcct

SEQ ID NO: 19559 - DNA, 21 bp, Artificial Sequence
  Description of Artificial Sequence: Synthetic oligonucleotide
ctgttgactcgttctactgag

SEQ ID NO: 19560 - DNA, 21 bp, Artificial Sequence
  Description of Artificial Sequence: Synthetic oligonucleotide
ttgctggttcataaggttgtt

SEQ ID NO: 19561 - DNA, 21 bp, Artificial Sequence
  Description of Artificial Sequence: Synthetic oligonucleotide
cttctggtgaggcatcgtgat

SEQ ID NO: 19562 - DNA, 21 bp, Artificial Sequence
  Description of Artificial Sequence: Synthetic oligonucleotide
cttctggtgcgtaatactgat

SEQ ID NO: 19563 - DNA, 21 bp, Artificial Sequence
  Description of Artificial Sequence: Synthetic oligonucleotide
cttttggtttctgagaattct

SEQ ID NO: 19564 - DNA, 21 bp, Artificial Sequence
  Description of Artificial Sequence: Synthetic oligonucleotide
ttgctggttactgataagatg

SEQ ID NO: 19565 - DNA, 21 bp, Artificial Sequence
  Description of Artificial Sequence: Synthetic oligonucleotide
ttgttggtggtgccttcgcgt

SEQ ID NO: 19566 - DNA, 21 bp, Artificial Sequence
  Description of Artificial Sequence: Synthetic oligonucleotide
ttgctttatgcggagcgtcct

SEQ ID NO: 19567 - DNA, 21 bp, Artificial Sequence
  Description of Artificial Sequence: Synthetic oligonucleotide
ttgttgtatcagaattcgtcg

SEQ ID NO: 19568 - DNA, 21 bp, Artificial Sequence
  Description of Artificial Sequence: Synthetic oligonucleotide
cttctttatagtactgataag

SEQ ID NO: 19569 - DNA, 21 bp, Artificial Sequence
  Description of Artificial Sequence: Synthetic oligonucleotide
ctgatggctcattctcagctt

SEQ ID NO: 19570 - DNA, 21 bp, Artificial Sequence
  Description of Artificial Sequence: Synthetic oligonucleotide
cttatggctattcataagccg

SEQ ID NO: 19571 - DNA, 21 bp, Artificial Sequence
  Description of Artificial Sequence: Synthetic oligonucleotide
ttgatggctactcgtgtgcct

SEQ ID NO: 19572 - DNA, 21 bp, Artificial Sequence
  Description of Artificial Sequence: Synthetic oligonucleotide
ttgatggattctcgtaagtat

SEQ ID NO: 19573 - DNA, 21 bp, Artificial Sequence
  Description of Artificial Sequence: Synthetic oligonucleotide
ttgatggaggctacttttaag

SEQ ID NO: 19574 - DNA, 21 bp, Artificial Sequence
  Description of Artificial Sequence: Synthetic oligonucleotide
ctgatggagcatattattgag

SEQ ID NO: 19575 - DNA, 21 bp, Artificial Sequence
  Description of Artificial Sequence: Synthetic oligonucleotide
ttgatggagaatcatatggct

SEQ ID NO: 19576 - DNA, 21 bp, Artificial Sequence
  Description of Artificial Sequence: Synthetic oligonucleotide
ttgatggggcagggtaggacg

SEQ ID NO: 19577 - DNA, 21 bp, Artificial Sequence
  Description of Artificial Sequence: Synthetic oligonucleotide
ctgatggggcaggttgctggg

SEQ ID NO: 19578 - DNA, 21 bp, Artificial Sequence
  Description of Artificial Sequence: Synthetic oligonucleotide
cttatgaagcctagtgctggt

SEQ ID NO: 19579 - DNA, 21 bp, Artificial Sequence
  Description of Artificial Sequence: Synthetic oligonucleotide
ttgatgaagcgtgtggagact

SEQ ID NO: 19580 - DNA, 21 bp, Artificial Sequence
  Description of Artificial Sequence: Synthetic oligonucleotide
ctgatgcttgctcgtaatgat

SEQ ID NO: 19581 - DNA, 21 bp, Artificial Sequence
  Description of Artificial Sequence: Synthetic oligonucleotide
ctgatgctgcgttcttcgcag

SEQ ID NO: 19582 - DNA, 21 bp, Artificial Sequence
  Description of Artificial Sequence: Synthetic oligonucleotide
ctgatgaatggtgggtcgact

SEQ ID NO: 19583 - DNA, 21 bp, Artificial Sequence
  Description of Artificial Sequence: Synthetic oligonucleotide
ttgatgaattcggcgattgct

SEQ ID NO: 19584 - DNA, 21 bp, Artificial Sequence
  Description of Artificial Sequence: Synthetic oligonucleotide
cttatgccttcgatgcgtcct

SEQ ID NO: 19585 - DNA, 21 bp, Artificial Sequence
  Description of Artificial Sequence: Synthetic oligonucleotide
ttgatgcagccgaagtctgct

SEQ ID NO: 19586 - DNA, 21 bp, Artificial Sequence
  Description of Artificial Sequence: Synthetic oligonucleotide
ctgatgaggatttctactgcg

SEQ ID NO: 19587 - DNA, 21 bp, Artificial Sequence
  Description of Artificial Sequence: Synthetic oligonucleotide
ttgatgcggccggcggagctt

SEQ ID NO: 19588 - DNA, 21 bp, Artificial Sequence
  Description of Artificial Sequence: Synthetic oligonucleotide
ttgatgcgtactaatccggat

SEQ ID NO: 19589 - DNA, 21 bp, Artificial Sequence
  Description of Artificial Sequence: Synthetic oligonucleotide
ttgatgtcgctgacgactgtt

SEQ ID NO: 19590 - DNA, 21 bp, Artificial Sequence
  Description of Artificial Sequence: Synthetic oligonucleotide
cttatgtcgcctcagagtccg

SEQ ID NO: 19591 - DNA, 21 bp, Artificial Sequence
  Description of Artificial Sequence: Synthetic oligonucleotide
cttatgtcgcaggagctgcgt

SEQ ID NO: 19592 - DNA, 21 bp, Artificial Sequence
  Description of Artificial Sequence: Synthetic oligonucleotide
ctgatgtctcagactcagcgt

SEQ ID NO: 19593 - DNA, 21 bp, Artificial Sequence
  Description of Artificial Sequence: Synthetic oligonucleotide
cttatgtcttctaagcctcct

SEQ ID NO: 19594 - DNA, 21 bp, Artificial Sequence
  Description of Artificial Sequence: Synthetic oligonucleotide
ctgatgtctacggctgagcct

SEQ ID NO: 19595 - DNA, 21 bp, Artificial Sequence
  Description of Artificial Sequence: Synthetic oligonucleotide
ttgatgtcgacggcttcgcct

SEQ ID NO: 19596 - DNA, 21 bp, Artificial Sequence
  Description of Artificial Sequence: Synthetic oligonucleotide
ttgatgactggtattacgatt

SEQ ID NO: 19597 - DNA, 21 bp, Artificial Sequence
  Description of Artificial Sequence: Synthetic oligonucleotide
ttgatgactggtgttcctttg

SEQ ID NO: 19598 - DNA, 21 bp, Artificial Sequence
  Description of Artificial Sequence: Synthetic oligonucleotide
ttgatgactaatgctcagctg

SEQ ID NO: 19599 - DNA, 21 bp, Artificial Sequence
  Description of Artificial Sequence: Synthetic oligonucleotide
ttgatgactaatcctgttccg

SEQ ID NO: 19600 - DNA, 21 bp, Artificial Sequence
  Description of Artificial Sequence: Synthetic oligonucleotide
ctgatgacttcgggtcataag

SEQ ID NO: 19601 - DNA, 21 bp, Artificial Sequence
  Description of Artificial Sequence: Synthetic oligonucleotide
ttgatgacttctaatggggcg

SEQ ID NO: 19602 - DNA, 21 bp, Artificial Sequence
  Description of Artificial Sequence: Synthetic oligonucleotide
cttatgactacgcatgttgat

SEQ ID NO: 19603 - DNA, 21 bp, Artificial Sequence
  Description of Artificial Sequence: Synthetic oligonucleotide
ctgatggttgagtctcatgtt

SEQ ID NO: 19604 - DNA, 21 bp, Artificial Sequence
  Description of Artificial Sequence: Synthetic oligonucleotide
cttatggtgggtcgtaagttg

SEQ ID NO: 19605 - DNA, 21 bp, Artificial Sequence
  Description of Artificial Sequence: Synthetic oligonucleotide
ctgaatgcgaatgcgttggct

SEQ ID NO: 19606 - DNA, 21 bp, Artificial Sequence
  Description of Artificial Sequence: Synthetic oligonucleotide
ctgaatgcgccgggtcgtact

SEQ ID NO: 19607 - DNA, 21 bp, Artificial Sequence
  Description of Artificial Sequence: Synthetic oligonucleotide
cttaatgcgcctaatcctatg

SEQ ID NO: 19608 - DNA, 21 bp, Artificial Sequence
  Description of Artificial Sequence: Synthetic oligonucleotide
ctgaatgctcaggtgagtacg

SEQ ID NO: 19609 - DNA, 21 bp, Artificial Sequence
  Description of Artificial Sequence: Synthetic oligonucleotide
cttaatgcttcgactaagact

SEQ ID NO: 19610 - DNA, 21 bp, Artificial Sequence
  Description of Artificial Sequence: Synthetic oligonucleotide
cttaatgctacggatgggaag

SEQ ID NO: 19611 - DNA, 21 bp, Artificial Sequence
  Description of Artificial Sequence: Synthetic oligonucleotide
cttaatgatgatgcgtggtcg

SEQ ID NO: 19612 - DNA, 21 bp, Artificial Sequence
  Description of Artificial Sequence: Synthetic oligonucleotide
cttaatgatgttttgacgcag

SEQ ID NO: 19613 - DNA, 21 bp, Artificial Sequence
  Description of Artificial Sequence: Synthetic oligonucleotide
cttaatgagattacgcggagt

SEQ ID NO: 19614 - DNA, 21 bp, Artificial Sequence
  Description of Artificial Sequence: Synthetic oligonucleotide
cttaatgagttgcagtttcag

SEQ ID NO: 19615 - DNA, 21 bp, Artificial Sequence
  Description of Artificial Sequence: Synthetic oligonucleotide
ctgaatgagaggccgcgtagt

SEQ ID NO: 19616 - DNA, 21 bp, Artificial Sequence
  Description of Artificial Sequence: Synthetic oligonucleotide
ttgaatggtgagtatttgaag

SEQ ID NO: 19617 - DNA, 21 bp, Artificial Sequence
  Description of Artificial Sequence: Synthetic oligonucleotide
ctgaatggttttactgcgacg

SEQ ID NO: 19618 - DNA, 21 bp, Artificial Sequence
  Description of Artificial Sequence: Synthetic oligonucleotide
ttgaatggtcgtagggctgag

SEQ ID NO: 19619 - DNA, 21 bp, Artificial Sequence
  Description of Artificial Sequence: Synthetic oligonucleotide
ttgaatgggtcttatattcag

SEQ ID NO: 19620 - DNA, 21 bp, Artificial Sequence
  Description of Artificial Sequence: Synthetic oligonucleotide
cttaatcatgagaaggatggt

SEQ ID NO: 19621 - DNA, 21 bp, Artificial Sequence
  Description of Artificial Sequence: Synthetic oligonucleotide
ctgaatcataatcctggtttg

SEQ ID NO: 19622 - DNA, 21 bp, Artificial Sequence
  Description of Artificial Sequence: Synthetic oligonucleotide
ctgaatcataatagtttgcgt

SEQ ID NO: 19623 - DNA, 21 bp, Artificial Sequence
  Description of Artificial Sequence: Synthetic oligonucleotide
ttgaatcatacgaggccgttg

SEQ ID NO: 19624 - DNA, 21 bp, Artificial Sequence
  Description of Artificial Sequence: Synthetic oligonucleotide
ttgaatattcctagtgatcct

SEQ ID NO: 19625 - DNA, 21 bp, Artificial Sequence
  Description of Artificial Sequence: Synthetic oligonucleotide
cttaatattacgacttcgggt

SEQ ID NO: 19626 - DNA, 21 bp, Artificial Sequence
  Description of Artificial Sequence: Synthetic oligonucleotide
ttgaataaggagtttgcgagt

SEQ ID NO: 19627 - DNA, 21 bp, Artificial Sequence
  Description of Artificial Sequence: Synthetic oligonucleotide
ttgaataagaattcgccggtg

SEQ ID NO: 19628 - DNA, 21 bp, Artificial Sequence
  Description of Artificial Sequence: Synthetic oligonucleotide
cttaataagcagccgtttgtg

SEQ ID NO: 19629 - DNA, 21 bp, Artificial Sequence
  Description of Artificial Sequence: Synthetic oligonucleotide
ttgaataagcgtgctcctgat

SEQ ID NO: 19630 - DNA, 21 bp, Artificial Sequence
  Description of Artificial Sequence: Synthetic oligonucleotide
cttaataagtcttcgacgggt

SEQ ID NO: 19631 - DNA, 21 bp, Artificial Sequence
  Description of Artificial Sequence: Synthetic oligonucleotide
cttaatctggcgaggccggcg

SEQ ID NO: 19632 - DNA, 21 bp, Artificial Sequence
  Description of Artificial Sequence: Synthetic oligonucleotide
ctgaatttggagttgtatgat

SEQ ID NO: 19633 - DNA, 21 bp, Artificial Sequence
  Description of Artificial Sequence: Synthetic oligonucleotide
ctgaatctggggaggccggat

SEQ ID NO: 19634 - DNA, 21 bp, Artificial Sequence
  Description of Artificial Sequence: Synthetic oligonucleotide
cttaatctgcatgcgccgacg

SEQ ID NO: 19635 - DNA, 21 bp, Artificial Sequence
  Description of Artificial Sequence: Synthetic oligonucleotide
ttgaatcttccgaatcatggt

SEQ ID NO: 19636 - DNA, 21 bp, Artificial Sequence
  Description of Artificial Sequence: Synthetic oligonucleotide
ctgaatcttcagtctcagagt

SEQ ID NO: 19637 - DNA, 21 bp, Artificial Sequence
  Description of Artificial Sequence: Synthetic oligonucleotide
cttaatcttagtgggcttgtt

SEQ ID NO: 19638 - DNA, 21 bp, Artificial Sequence
  Description of Artificial Sequence: Synthetic oligonucleotide
ttgaatcttacgtcggttagt

SEQ ID NO: 19639 - DNA, 21 bp, Artificial Sequence
  Description of Artificial Sequence: Synthetic oligonucleotide
ctgaatatgtctgagccgcgt

SEQ ID NO: 19640 - DNA, 21 bp, Artificial Sequence
  Description of Artificial Sequence: Synthetic oligonucleotide
ttgaatatgagtcctacgggt

SEQ ID NO: 19641 - DNA, 21 bp, Artificial Sequence
  Description of Artificial Sequence: Synthetic oligonucleotide
ttgaataatcatcagtttagt

SEQ ID NO: 19642 - DNA, 21 bp, Artificial Sequence
  Description of Artificial Sequence: Synthetic oligonucleotide
ttgaataatctgccgagtcgt

SEQ ID NO: 19643 - DNA, 21 bp, Artificial Sequence
  Description of Artificial Sequence: Synthetic oligonucleotide
cttaatccggctgcgcgtatt

SEQ ID NO: 19644 - DNA, 21 bp, Artificial Sequence
  Description of Artificial Sequence: Synthetic oligonucleotide
cttaatcctgcgaaggctagt

SEQ ID NO: 19645 - DNA, 21 bp, Artificial Sequence
  Description of Artificial Sequence: Synthetic oligonucleotide
cttaatcctcatgagaatggg

SEQ ID NO: 19646 - DNA, 21 bp, Artificial Sequence
  Description of Artificial Sequence: Synthetic oligonucleotide
cttaatccttctagggtgccg

SEQ ID NO: 19647 - DNA, 21 bp, Artificial Sequence
  Description of Artificial Sequence: Synthetic oligonucleotide
ttgaatcctgttaatgtgatg

SEQ ID NO: 19648 - DNA, 21 bp, Artificial Sequence
  Description of Artificial Sequence: Synthetic oligonucleotide
ttgaatcagggtaatatgacg

SEQ ID NO: 19649 - DNA, 21 bp, Artificial Sequence
  Description of Artificial Sequence: Synthetic oligonucleotide
ttgaatcagcatgttcctgtt

SEQ ID NO: 19650 - DNA, 21 bp, Artificial Sequence
  Description of Artificial Sequence: Synthetic oligonucleotide
ttgaatcagtcgcggtctact

SEQ ID NO: 19651 - DNA, 21 bp, Artificial Sequence
  Description of Artificial Sequence: Synthetic oligonucleotide
ctgaatcagtcggtgagggtt

SEQ ID NO: 19652 - DNA, 21 bp, Artificial Sequence
  Description of Artificial Sequence: Synthetic oligonucleotide
ttgaatcgtgctgatgttgat

SEQ ID NO: 19653 - DNA, 21 bp, Artificial Sequence
  Description of Artificial Sequence: Synthetic oligonucleotide
ctgaatagggatatgtcttat

SEQ ID NO: 19654 - DNA, 21 bp, Artificial Sequence
  Description of Artificial Sequence: Synthetic oligonucleotide
cttaatcgggagcaggcgtct

SEQ ID NO: 19655 - DNA, 21 bp, Artificial Sequence
  Description of Artificial Sequence: Synthetic oligonucleotide
ctgaataggtcgagtatgccg

SEQ ID NO: 19656 - DNA, 21 bp, Artificial Sequence
  Description of Artificial Sequence: Synthetic oligonucleotide
cttaatcggacgaatccggat

SEQ ID NO: 19657 - DNA, 21 bp, Artificial Sequence
  Description of Artificial Sequence: Synthetic oligonucleotide
cttaatcgggttactccgtcg

SEQ ID NO: 19658 - DNA, 21 bp, Artificial Sequence
  Description of Artificial Sequence: Synthetic oligonucleotide
ctgaattcggatgctccgtat

SEQ ID NO: 19659 - DNA, 21 bp, Artificial Sequence
  Description of Artificial Sequence: Synthetic oligonucleotide
ttgaatagtctgggtacgttt

SEQ ID NO: 19660 - DNA, 21 bp, Artificial Sequence
  Description of Artificial Sequence: Synthetic oligonucleotide
ctgaattcgcctcttattgcg

SEQ ID NO: 19661 - DNA, 21 bp, Artificial Sequence
  Description of Artificial Sequence: Synthetic oligonucleotide
cttaatagtcagcctggtttg

SEQ ID NO: 19662 - DNA, 21 bp, Artificial Sequence
  Description of Artificial Sequence: Synthetic oligonucleotide
ttgaatagtcagcggtttggt

SEQ ID NO: 19663 - DNA, 21 bp, Artificial Sequence
  Description of Artificial Sequence: Synthetic oligonucleotide
ctgaattcttcgcatgatgct

SEQ ID NO: 19664 - DNA, 21 bp, Artificial Sequence
  Description of Artificial Sequence: Synthetic oligonucleotide
ctgaatagttctcgttctgct

SEQ ID NO: 19665 - DNA, 21 bp, Artificial Sequence
  Description of Artificial Sequence: Synthetic oligonucleotide
ctgaattcgtcttcgcatggg

SEQ ID NO: 19666 - DNA, 21 bp, Artificial Sequence
  Description of Artificial Sequence: Synthetic oligonucleotide
ttgaattcgacgaatccgcat

SEQ ID NO: 19667 - DNA, 21 bp, Artificial Sequence
  Description of Artificial Sequence: Synthetic oligonucleotide
cttaattcggttaggaataat

SEQ ID NO: 19668 - DNA, 21 bp, Artificial Sequence
  Description of Artificial Sequence: Synthetic oligonucleotide
cttaatacggctgctttgccg

SEQ ID NO: 19669 - DNA, 21 bp, Artificial Sequence
  Description of Artificial Sequence: Synthetic oligonucleotide
ctgaatactcattcttatgtg

SEQ ID NO: 19670 - DNA, 21 bp, Artificial Sequence
  Description of Artificial Sequence: Synthetic oligonucleotide
ctgaatactaagccgttttcg

SEQ ID NO: 19671 - DNA, 21 bp, Artificial Sequence
  Description of Artificial Sequence: Synthetic oligonucleotide
cttaatacgaggcagcagact

SEQ ID NO: 19672 - DNA, 21 bp, Artificial Sequence
  Description of Artificial Sequence: Synthetic oligonucleotide
ttgaatacgcggtctctttct

SEQ ID NO: 19673 - DNA, 21 bp, Artificial Sequence
  Description of Artificial Sequence: Synthetic oligonucleotide
cttaatgtggaggtggagcgg

SEQ ID NO: 19674 - DNA, 21 bp, Artificial Sequence
  Description of Artificial Sequence: Synthetic oligonucleotide
cttaatgttaagtctgggctg

SEQ ID NO: 19675 - DNA, 21 bp, Artificial Sequence
  Description of Artificial Sequence: Synthetic oligonucleotide
ttgaatgttaatattgcgccg

SEQ ID NO: 19676 - DNA, 21 bp, Artificial Sequence
  Description of Artificial Sequence: Synthetic oligonucleotide
ttgaatgtgcgtgagagtgtg

SEQ ID NO: 19677 - DNA, 21 bp, Artificial Sequence
  Description of Artificial Sequence: Synthetic oligonucleotide
ctgaatgtgcggagggtggct

SEQ ID NO: 19678 - DNA, 21 bp, Artificial Sequence
  Description of Artificial Sequence: Synthetic oligonucleotide
cttaatgtgcgtacggatcgt

SEQ ID NO: 19679 - DNA, 21 bp, Artificial Sequence
  Description of Artificial Sequence: Synthetic oligonucleotide
cttaatgtgtcggggaatgcg

SEQ ID NO: 19680 - DNA, 21 bp, Artificial Sequence
  Description of Artificial Sequence: Synthetic oligonucleotide
cttaatgtgtctagtacgggt

SEQ ID NO: 19681 - DNA, 21 bp, Artificial Sequence
  Description of Artificial Sequence: Synthetic oligonucleotide
ttgaatgttgttagtacttat

SEQ ID NO: 19682 - DNA, 21 bp, Artificial Sequence
  Description of Artificial Sequence: Synthetic oligonucleotide
cttaattatgatccgatgacg

SEQ ID NO: 19683 - DNA, 21 bp, Artificial Sequence
  Description of Artificial Sequence: Synthetic oligonucleotide
ctgaattatgggccggctctg

SEQ ID NO: 19684 - DNA, 21 bp, Artificial Sequence
  Description of Artificial Sequence: Synthetic oligonucleotide
cttaattatcatgcgagtgtg

SEQ ID NO: 19685 - DNA, 21 bp, Artificial Sequence
  Description of Artificial Sequence: Synthetic oligonucleotide
ttgcctgcgggtaatacgtct

SEQ ID NO: 19686 - DNA, 21 bp, Artificial Sequence
  Description of Artificial Sequence: Synthetic oligonucleotide
cttcctgcgggtaattatcat

SEQ ID NO: 19687 - DNA, 21 bp, Artificial Sequence
  Description of Artificial Sequence: Synthetic oligonucleotide
ctgcctgctaataattcgatt

SEQ ID NO: 19688 - DNA, 21 bp, Artificial Sequence
  Description of Artificial Sequence: Synthetic oligonucleotide
ttgcctgctcctaagcctgcg

SEQ ID NO: 19689 - DNA, 21 bp, Artificial Sequence
  Description of Artificial Sequence: Synthetic oligonucleotide
cttcctgcgcgtttggctact

SEQ ID NO: 19690 - DNA, 21 bp, Artificial Sequence
  Description of Artificial Sequence: Synthetic oligonucleotide
ttgcctgcgtctggggctgcg

SEQ ID NO: 19691 - DNA, 21 bp, Artificial Sequence
  Description of Artificial Sequence: Synthetic oligonucleotide
ttgccggcgacgaggtctatt

SEQ ID NO: 19692 - DNA, 21 bp, Artificial Sequence
  Description of Artificial Sequence: Synthetic oligonucleotide
ctgccggctgtgtgtggtccg

SEQ ID NO: 19693 - DNA, 21 bp, Artificial Sequence
  Description of Artificial Sequence: Synthetic oligonucleotide
ctgcctgataagtcgcttatg

SEQ ID NO: 19694 - DNA, 21 bp, Artificial Sequence
  Description of Artificial Sequence: Synthetic oligonucleotide
ctgccggatatgtctcgtgag

SEQ ID NO: 19695 - DNA, 21 bp, Artificial Sequence
  Description of Artificial Sequence: Synthetic oligonucleotide
ctgccggatcctaggcctgat

SEQ ID NO: 19696 - DNA, 21 bp, Artificial Sequence
  Description of Artificial Sequence: Synthetic oligonucleotide
cttccggatacgattcgtagt

SEQ ID NO: 19697 - DNA, 21 bp, Artificial Sequence
  Description of Artificial Sequence: Synthetic oligonucleotide
cttcctgatacgaggacgctt

SEQ ID NO: 19698 - DNA, 21 bp, Artificial Sequence
  Description of Artificial Sequence: Synthetic oligonucleotide
ttgccggatgtggctaggtat

SEQ ID NO: 19699 - DNA, 21 bp, Artificial Sequence
  Description of Artificial Sequence: Synthetic oligonucleotide
ttgcctgaggctggggttccg

SEQ ID NO: 19700 - DNA, 21 bp, Artificial Sequence
  Description of Artificial Sequence: Synthetic oligonucleotide
ttgcctgagatttcgccgcat

SEQ ID NO: 19701 - DNA, 21 bp, Artificial Sequence
  Description of Artificial Sequence: Synthetic oligonucleotide
ctgccggagaatacgccttat

SEQ ID NO: 19702 - DNA, 21 bp, Artificial Sequence
  Description of Artificial Sequence: Synthetic oligonucleotide
cttccggagcagacggttatt

SEQ ID NO: 19703 - DNA, 21 bp, Artificial Sequence
  Description of Artificial Sequence: Synthetic oligonucleotide
ctgccggagcgggttggtctg

SEQ ID NO: 19704 - DNA, 21 bp, Artificial Sequence
  Description of Artificial Sequence: Synthetic oligonucleotide
ctgcctgagactggtatgagt

SEQ ID NO: 19705 - DNA, 21 bp, Artificial Sequence
  Description of Artificial Sequence: Synthetic oligonucleotide
cttccgtttgctacttctcct

SEQ ID NO: 19706 - DNA, 21 bp, Artificial Sequence
  Description of Artificial Sequence: Synthetic oligonucleotide
ttgccgggggcgactattgag

SEQ ID NO: 19707 - DNA, 21 bp, Artificial Sequence
  Description of Artificial Sequence: Synthetic oligonucleotide
cttccgggtaaggttacgacg

SEQ ID NO: 19708 - DNA, 21 bp, Artificial Sequence
  Description of Artificial Sequence: Synthetic oligonucleotide
ttgccgggtcgtgctgcgcct

SEQ ID NO: 19709 - DNA, 21 bp, Artificial Sequence
  Description of Artificial Sequence: Synthetic oligonucleotide
cttccggggactccgcggggt

SEQ ID NO: 19710 - DNA, 21 bp, Artificial Sequence
  Description of Artificial Sequence: Synthetic oligonucleotide
cttcctggtactgtgggtgtt

SEQ ID NO: 19711 - DNA, 21 bp, Artificial Sequence
  Description of Artificial Sequence: Synthetic oligonucleotide
ttgccgggttggcctctggat

SEQ ID NO: 19712 - DNA, 21 bp, Artificial Sequence
  Description of Artificial Sequence: Synthetic oligonucleotide
ctgccgcatccttcgcagaat

SEQ ID NO: 19713 - DNA, 21 bp, Artificial Sequence
  Description of Artificial Sequence: Synthetic oligonucleotide
cttcctcatcgtccgaatagt

SEQ ID NO: 19714 - DNA, 21 bp, Artificial Sequence
  Description of Artificial Sequence: Synthetic oligonucleotide
ttgcctcattctactccgatg

SEQ ID NO: 19715 - DNA, 21 bp, Artificial Sequence
  Description of Artificial Sequence: Synthetic oligonucleotide
ttgcctattgctacgtctaag

SEQ ID NO: 19716 - DNA, 21 bp, Artificial Sequence
  Description of Artificial Sequence: Synthetic oligonucleotide
ttgcctattggtaagcaggtg

SEQ ID NO: 19717 - DNA, 21 bp, Artificial Sequence
  Description of Artificial Sequence: Synthetic oligonucleotide
ctgcctattttgacgtctcat

SEQ ID NO: 19718 - DNA, 21 bp, Artificial Sequence
  Description of Artificial Sequence: Synthetic oligonucleotide
ctgcctattcttactagtagt

SEQ ID NO: 19719 - DNA, 21 bp, Artificial Sequence
  Description of Artificial Sequence: Synthetic oligonucleotide
ctgcctattaatcataagttt

SEQ ID NO: 19720 - DNA, 21 bp, Artificial Sequence
  Description of Artificial Sequence: Synthetic oligonucleotide
ttgcctattccggttgatgcg

SEQ ID NO: 19721 - DNA, 21 bp, Artificial Sequence
  Description of Artificial Sequence: Synthetic oligonucleotide
ttgccgatttctcttcagcct

SEQ ID NO: 19722 - DNA, 21 bp, Artificial Sequence
  Description of Artificial Sequence: Synthetic oligonucleotide
ttgcctattacttatgcggat

SEQ ID NO: 19723 - DNA, 21 bp, Artificial Sequence
  Description of Artificial Sequence: Synthetic oligonucleotide
ctgccgaaggcgtcgacgtcg

SEQ ID NO: 19724 - DNA, 21 bp, Artificial Sequence
  Description of Artificial Sequence: Synthetic oligonucleotide
cttcctaagtttcgtgatcag

SEQ ID NO: 19725 - DNA, 21 bp, Artificial Sequence
  Description of Artificial Sequence: Synthetic oligonucleotide
cttcctaagattgataatact

SEQ ID NO: 19726 - DNA, 21 bp, Artificial Sequence
  Description of Artificial Sequence: Synthetic oligonucleotide
ctgcctaagaattatgatgct

SEQ ID NO: 19727 - DNA, 21 bp, Artificial Sequence
  Description of Artificial Sequence: Synthetic oligonucleotide
ctgcctaagtctagtgatgct

SEQ ID NO: 19728 - DNA, 21 bp, Artificial Sequence
  Description of Artificial Sequence: Synthetic oligonucleotide
cttcctaaggtggttgctacg

SEQ ID NO: 19729 - DNA, 21 bp, Artificial Sequence
  Description of Artificial Sequence: Synthetic oligonucleotide
ctgccgttggctcagcagcct

SEQ ID NO: 19730 - DNA, 21 bp, Artificial Sequence
  Description of Artificial Sequence: Synthetic oligonucleotide
ttgcctcttgctgtgtatgat

SEQ ID NO: 19731 - DNA, 21 bp, Artificial Sequence
  Description of Artificial Sequence: Synthetic oligonucleotide
ttgccgcttggtaatcgtatg

SEQ ID NO: 19732 - DNA, 21 bp, Artificial Sequence
  Description of Artificial Sequence: Synthetic oligonucleotide
ctgcctcttcataggagttct

SEQ ID NO: 19733 - DNA, 21 bp, Artificial Sequence
  Description of Artificial Sequence: Synthetic oligonucleotide
ttgcctttgcatagtcctagg

SEQ ID NO: 19734 - DNA, 21 bp, Artificial Sequence
  Description of Artificial Sequence: Synthetic oligonucleotide
ctgccgctgatttttactgag

SEQ ID NO: 19735 - DNA, 21 bp, Artificial Sequence
  Description of Artificial Sequence: Synthetic oligonucleotide
cttccgttgaagggggcggat

SEQ ID NO: 19736 - DNA, 21 bp, Artificial Sequence
  Description of Artificial Sequence: Synthetic oligonucleotide
cttcctctgatgaagccgggg

SEQ ID NO: 19737 - DNA, 21 bp, Artificial Sequence
  Description of Artificial Sequence: Synthetic oligonucleotide
ctgccgttgaattttgatcgt

SEQ ID NO: 19738 - DNA, 21 bp, Artificial Sequence
  Description of Artificial Sequence: Synthetic oligonucleotide
cttccgctgaataagtctcat

SEQ ID NO: 19739 - DNA, 21 bp, Artificial Sequence
  Description of Artificial Sequence: Synthetic oligonucleotide
ttgccgttgaatacttatact

SEQ ID NO: 19740 - DNA, 21 bp, Artificial Sequence
  Description of Artificial Sequence: Synthetic oligonucleotide
ttgcctcttcctccgtatgtt

SEQ ID NO: 19741 - DNA, 21 bp, Artificial Sequence
  Description of Artificial Sequence: Synthetic oligonucleotide
ctgcctttgccgacgagtggt

SEQ ID NO: 19742 - DNA, 21 bp, Artificial Sequence
  Description of Artificial Sequence: Synthetic oligonucleotide
ctgcctctgcgggagcctaag

SEQ ID NO: 19743 - DNA, 21 bp, Artificial Sequence
  Description of Artificial Sequence: Synthetic oligonucleotide
ctgccgcttcggatgtctgat

SEQ ID NO: 19744 - DNA, 21 bp, Artificial Sequence
  Description of Artificial Sequence: Synthetic oligonucleotide
ttgccgttgtcgccgatgcat

SEQ ID NO: 19745 - DNA, 21 bp, Artificial Sequence
  Description of Artificial Sequence: Synthetic oligonucleotide
ctgcctatggatcttgtggcg

SEQ ID NO: 19746 - DNA, 21 bp, Artificial Sequence
  Description of Artificial Sequence: Synthetic oligonucleotide
ttgcctatgatggctcatctt

SEQ ID NO: 19747 - DNA, 21 bp, Artificial Sequence
  Description of Artificial Sequence: Synthetic oligonucleotide
cttccgatgagtcatctgccg

SEQ ID NO: 19748 - DNA, 21 bp, Artificial Sequence
  Description of Artificial Sequence: Synthetic oligonucleotide
ttgcctaatgcttatatgcat

SEQ ID NO: 19749 - DNA, 21 bp, Artificial Sequence
  Description of Artificial Sequence: Synthetic oligonucleotide
ttgccgaatgagccgagtgat

SEQ ID NO: 19750 - DNA, 21 bp, Artificial Sequence
  Description of Artificial Sequence: Synthetic oligonucleotide
ttgccgaatcatatttcgccg

SEQ ID NO: 19751 - DNA, 21 bp, Artificial Sequence
  Description of Artificial Sequence: Synthetic oligonucleotide
ctgccgaatctgcgtgatcag

SEQ ID NO: 19752 - DNA, 21 bp, Artificial Sequence
  Description of Artificial Sequence: Synthetic oligonucleotide
ttgccgaataattcgagggat

SEQ ID NO: 19753 - DNA, 21 bp, Artificial Sequence
  Description of Artificial Sequence: Synthetic oligonucleotide
cttccgaatccgcgtagtgat

SEQ ID NO: 19754 - DNA, 21 bp, Artificial Sequence
  Description of Artificial Sequence: Synthetic oligonucleotide
cttccgaattctgtttttacg

SEQ ID NO: 19755 - DNA, 21 bp, Artificial Sequence
  Description of Artificial Sequence: Synthetic oligonucleotide
cttcctcctgctgcgcatagg

SEQ ID NO: 19756 - DNA, 21 bp, Artificial Sequence
  Description of Artificial Sequence: Synthetic oligonucleotide
ctgcctccggctcatgctcat

SEQ ID NO: 19757 - DNA, 21 bp, Artificial Sequence
  Description of Artificial Sequence: Synthetic oligonucleotide
cttccgccgtgtcttacgaat

SEQ ID NO: 19758 - DNA, 21 bp, Artificial Sequence
  Description of Artificial Sequence: Synthetic oligonucleotide
ctgcctccggagcatcggggt

SEQ ID NO: 19759 - DNA, 21 bp, Artificial Sequence
  Description of Artificial Sequence: Synthetic oligonucleotide
cttcctccggagacgtttcct

SEQ ID NO: 19760 - DNA, 21 bp, Artificial Sequence
  Description of Artificial Sequence: Synthetic oligonucleotide
ttgccgcctgggcctgctacg

SEQ ID NO: 19761 - DNA, 21 bp, Artificial Sequence
  Description of Artificial Sequence: Synthetic oligonucleotide
ctgccgccgcatgggaatgtg

SEQ ID NO: 19762 - DNA, 21 bp, Artificial Sequence
  Description of Artificial Sequence: Synthetic oligonucleotide
ttgccgcctcatggttcggct

SEQ ID NO: 19763 - DNA, 21 bp, Artificial Sequence
  Description of Artificial Sequence: Synthetic oligonucleotide
cttcctccgcatggttatgct

SEQ ID NO: 19764 - DNA, 21 bp, Artificial Sequence
  Description of Artificial Sequence: Synthetic oligonucleotide
ttgcctccgcttgttcagtat

SEQ ID NO: 19765 - DNA, 21 bp, Artificial Sequence
  Description of Artificial Sequence: Synthetic oligonucleotide
cttccgcctaatgggcatcgg

SEQ ID NO: 19766 - DNA, 21 bp, Artificial Sequence
  Description of Artificial Sequence: Synthetic oligonucleotide
ttgccgcctaataagtttatg

SEQ ID NO: 19767 - DNA, 21 bp, Artificial Sequence
  Description of Artificial Sequence: Synthetic oligonucleotide
ttgccgccgcgggatgatcgt

SEQ ID NO: 19768 - DNA, 21 bp, Artificial Sequence
  Description of Artificial Sequence: Synthetic oligonucleotide
ctgcctcctaggtcttcgtat

SEQ ID NO: 19769 - DNA, 21 bp, Artificial Sequence
  Description of Artificial Sequence: Synthetic oligonucleotide
ctgccgcctagtcatgctatg

SEQ ID NO: 19770 - DNA, 21 bp, Artificial Sequence
  Description of Artificial Sequence: Synthetic oligonucleotide
ttgcctccgtcgattgataat

SEQ ID NO: 19771 - DNA, 21 bp, Artificial Sequence
  Description of Artificial Sequence: Synthetic oligonucleotide
ctgccgccttatcgggggcct

SEQ ID NO: 19772 - DNA, 21 bp, Artificial Sequence
  Description of Artificial Sequence: Synthetic oligonucleotide
ctgccgccgtattctcctgcg

SEQ ID NO: 19773 - DNA, 21 bp, Artificial Sequence
  Description of Artificial Sequence: Synthetic oligonucleotide
ttgccgcagcctggggctgct

SEQ ID NO: 19774 - DNA, 21 bp, Artificial Sequence
  Description of Artificial Sequence: Synthetic oligonucleotide
ttgccgcagcgtacgtctcat

SEQ ID NO: 19775 - DNA, 21 bp, Artificial Sequence
  Description of Artificial Sequence: Synthetic oligonucleotide
ttgccgcgggagccgttgact

SEQ ID NO: 19776 - DNA, 21 bp, Artificial Sequence
  Description of Artificial Sequence: Synthetic oligonucleotide
ttgccgaggtttcctgtggat

SEQ ID NO: 19777 - DNA, 21 bp, Artificial Sequence
  Description of Artificial Sequence: Synthetic oligonucleotide
cttccgaggggtatgacttct

SEQ ID NO: 19778 - DNA, 21 bp, Artificial Sequence
  Description of Artificial Sequence: Synthetic oligonucleotide
ctgccgcgtcatcagcagacg

SEQ ID NO: 19779 - DNA, 21 bp, Artificial Sequence
  Description of Artificial Sequence: Synthetic oligonucleotide
ttgccgaggattcctactggt

SEQ ID NO: 19780 - DNA, 21 bp, Artificial Sequence
  Description of Artificial Sequence: Synthetic oligonucleotide
ttgcctcggctgatggcgcct

SEQ ID NO: 19781 - DNA, 21 bp, Artificial Sequence
  Description of Artificial Sequence: Synthetic oligonucleotide
cttccgcgtcaggctgcgctg

SEQ ID NO: 19782 - DNA, 21 bp, Artificial Sequence
  Description of Artificial Sequence: Synthetic oligonucleotide
ctgcctcgttctcagtttatt

SEQ ID NO: 19783 - DNA, 21 bp, Artificial Sequence
  Description of Artificial Sequence: Synthetic oligonucleotide
ctgccgcgtgttaatgctggg

SEQ ID NO: 19784 - DNA, 21 bp, Artificial Sequence
  Description of Artificial Sequence: Synthetic oligonucleotide
cttccgagtgctgatcgtgtt

SEQ ID NO: 19785 - DNA, 21 bp, Artificial Sequence
  Description of Artificial Sequence: Synthetic oligonucleotide
cttccttcttgtattggtcct

SEQ ID NO: 19786 - DNA, 21 bp, Artificial Sequence
  Description of Artificial Sequence: Synthetic oligonucleotide
ctgccttcgtttaatgggtcg

SEQ ID NO: 19787 - DNA, 21 bp, Artificial Sequence
  Description of Artificial Sequence: Synthetic oligonucleotide
cttcctagtattttgttgccg

SEQ ID NO: 19788 - DNA, 21 bp, Artificial Sequence
  Description of Artificial Sequence: Synthetic oligonucleotide
cttccgtctattcctcggact

SEQ ID NO: 19789 - DNA, 21 bp, Artificial Sequence
  Description of Artificial Sequence: Synthetic oligonucleotide
ttgccgagtatgtctttgtct

SEQ ID NO: 19790 - DNA, 21 bp, Artificial Sequence
  Description of Artificial Sequence: Synthetic oligonucleotide
ctgcctagtaatgctgtttcg

SEQ ID NO: 19791 - DNA, 21 bp, Artificial Sequence
  Description of Artificial Sequence: Synthetic oligonucleotide
ttgccttctaatacgaggctg

SEQ ID NO: 19792 - DNA, 21 bp, Artificial Sequence
  Description of Artificial Sequence: Synthetic oligonucleotide
cttcctagtcctccgggtgtg

SEQ ID NO: 19793 - DNA, 21 bp, Artificial Sequence
  Description of Artificial Sequence: Synthetic oligonucleotide
ttgccgtcgcctcctatttct

SEQ ID NO: 19794 - DNA, 21 bp, Artificial Sequence
  Description of Artificial Sequence: Synthetic oligonucleotide
ttgccttctcagcttattggt

SEQ ID NO: 19795 - DNA, 21 bp, Artificial Sequence
  Description of Artificial Sequence: Synthetic oligonucleotide
cttccttctcgggctttttcg

SEQ ID NO: 19796 - DNA, 21 bp, Artificial Sequence
  Description of Artificial Sequence: Synthetic oligonucleotide
ctgccgagtagtacgccgaat

SEQ ID NO: 19797 - DNA, 21 bp, Artificial Sequence
  Description of Artificial Sequence: Synthetic oligonucleotide
ttgccttcttctgtttatacg

SEQ ID NO: 19798 - DNA, 21 bp, Artificial Sequence
  Description of Artificial Sequence: Synthetic oligonucleotide
cttcctagtacgtgtgggaag

SEQ ID NO: 19799 - DNA, 21 bp, Artificial Sequence
  Description of Artificial Sequence: Synthetic oligonucleotide
cttccttcgactgggggtctg

SEQ ID NO: 19800 - DNA, 21 bp, Artificial Sequence
  Description of Artificial Sequence: Synthetic oligonucleotide
ttgcctagtactcctccgagg

SEQ ID NO: 19801 - DNA, 21 bp, Artificial Sequence
  Description of Artificial Sequence: Synthetic oligonucleotide
ctgccttcgtataatgcgtct

SEQ ID NO: 19802 - DNA, 21 bp, Artificial Sequence
  Description of Artificial Sequence: Synthetic oligonucleotide
cttccgacgcatttggaggcg

SEQ ID NO: 19803 - DNA, 21 bp, Artificial Sequence
  Description of Artificial Sequence: Synthetic oligonucleotide
ttgccgactattaatgctgtg

SEQ ID NO: 19804 - DNA, 21 bp, Artificial Sequence
  Description of Artificial Sequence: Synthetic oligonucleotide
ctgcctactaaggaggctgtg

SEQ ID NO: 19805 - DNA, 21 bp, Artificial Sequence
  Description of Artificial Sequence: Synthetic oligonucleotide
ctgcctactctgcggattcct

SEQ ID NO: 19806 - DNA, 21 bp, Artificial Sequence
  Description of Artificial Sequence: Synthetic oligonucleotide
ttgcctactctttcgtatgtt

SEQ ID NO: 19807 - DNA, 21 bp, Artificial Sequence
  Description of Artificial Sequence: Synthetic oligonucleotide
ctgccgactatgcataatact

SEQ ID NO: 19808 - DNA, 21 bp, Artificial Sequence
  Description of Artificial Sequence: Synthetic oligonucleotide
ttgccgacgaataagggtatt

SEQ ID NO: 19809 - DNA, 21 bp, Artificial Sequence
  Description of Artificial Sequence: Synthetic oligonucleotide
ctgcctactaattatgctgcg

SEQ ID NO: 19810 - DNA, 21 bp, Artificial Sequence
  Description of Artificial Sequence: Synthetic oligonucleotide
ctgccgacgccgtttagttct

SEQ ID NO: 19811 - DNA, 21 bp, Artificial Sequence
  Description of Artificial Sequence: Synthetic oligonucleotide
cttcctacgccgttgactagt

SEQ ID NO: 19812 - DNA, 21 bp, Artificial Sequence
  Description of Artificial Sequence: Synthetic oligonucleotide
ttgccgacgagtccgagtgcg

SEQ ID NO: 19813 - DNA, 21 bp, Artificial Sequence
  Description of Artificial Sequence: Synthetic oligonucleotide
ctgcctacttctacttctatt

SEQ ID NO: 19814 - DNA, 21 bp, Artificial Sequence
  Description of Artificial Sequence: Synthetic oligonucleotide
ctgcctactagtgttgttctg

SEQ ID NO: 19815 - DNA, 21 bp, Artificial Sequence
  Description of Artificial Sequence: Synthetic oligonucleotide
ctgccggtgggggatcctctg

SEQ ID NO: 19816 - DNA, 21 bp, Artificial Sequence
  Description of Artificial Sequence: Synthetic oligonucleotide
ttgcctgttaatattgtgggt

SEQ ID NO: 19817 - DNA, 21 bp, Artificial Sequence
  Description of Artificial Sequence: Synthetic oligonucleotide
cttcctgtgagtgataggtat

SEQ ID NO: 19818 - DNA, 21 bp, Artificial Sequence
  Description of Artificial Sequence: Synthetic oligonucleotide
ctgcctgtgagttctcgtcat

SEQ ID NO: 19819 - DNA, 21 bp, Artificial Sequence
  Description of Artificial Sequence: Synthetic oligonucleotide
ctgccggtttctacgcggcat

SEQ ID NO: 19820 - DNA, 21 bp, Artificial Sequence
  Description of Artificial Sequence: Synthetic oligonucleotide
ctgcctgttgttaatgctagt

SEQ ID NO: 19821 - DNA, 21 bp, Artificial Sequence
  Description of Artificial Sequence: Synthetic oligonucleotide
ttgccttatactgttggtacg

SEQ ID NO: 19822 - DNA, 21 bp, Artificial Sequence
  Description of Artificial Sequence: Synthetic oligonucleotide
ctgcaggctcgtacgcttaat

SEQ ID NO: 19823 - DNA, 21 bp, Artificial Sequence
  Description of Artificial Sequence: Synthetic oligonucleotide
cttcaggcgtctaaggctgat

SEQ ID NO: 19824 - DNA, 21 bp, Artificial Sequence
  Description of Artificial Sequence: Synthetic oligonucleotide
cttcaggcttctaatgatatt

SEQ ID NO: 19825 - DNA, 21 bp, Artificial Sequence
  Description of Artificial Sequence: Synthetic oligonucleotide
cttcaggcgactcggggggct

SEQ ID NO: 19826 - DNA, 21 bp, Artificial Sequence
  Description of Artificial Sequence: Synthetic oligonucleotide
cttcaggatgcggtgtgtaat

SEQ ID NO: 19827 - DNA, 21 bp, Artificial Sequence
  Description of Artificial Sequence: Synthetic oligonucleotide
cttcaggatcctcgtagtccg

SEQ ID NO: 19828 - DNA, 21 bp, Artificial Sequence
  Description of Artificial Sequence: Synthetic oligonucleotide
ttgcaggatgtttcgatgggg

SEQ ID NO: 19829 - DNA, 21 bp, Artificial Sequence
  Description of Artificial Sequence: Synthetic oligonucleotide
ttgcaggagaagagttgggag

SEQ ID NO: 19830 - DNA, 21 bp, Artificial Sequence
  Description of Artificial Sequence: Synthetic oligonucleotide
ttgcaggagccgggtaatttg

SEQ ID NO: 19831 - DNA, 21 bp, Artificial Sequence
  Description of Artificial Sequence: Synthetic oligonucleotide
cttcagtttagtccgcctagt

SEQ ID NO: 19832 - DNA, 21 bp, Artificial Sequence
  Description of Artificial Sequence: Synthetic oligonucleotide
ttgcagggggcgtttgcttcg

SEQ ID NO: 19833 - DNA, 21 bp, Artificial Sequence
  Description of Artificial Sequence: Synthetic oligonucleotide
ttgcaggggtcgcgtcagatt

SEQ ID NO: 19834 - DNA, 21 bp, Artificial Sequence
  Description of Artificial Sequence: Synthetic oligonucleotide
cttcaggggtggcatgctcag

SEQ ID NO: 19835 - DNA, 21 bp, Artificial Sequence
  Description of Artificial Sequence: Synthetic oligonucleotide
ttgcagcatcattctaatggg

SEQ ID NO: 19836 - DNA, 21 bp, Artificial Sequence
  Description of Artificial Sequence: Synthetic oligonucleotide
ctgcagcatctgcagccgtcg

SEQ ID NO: 19837 - DNA, 21 bp, Artificial Sequence
  Description of Artificial Sequence: Synthetic oligonucleotide
ttgcagaagatggttccgttg

SEQ ID NO: 19838 - DNA, 21 bp, Artificial Sequence
  Description of Artificial Sequence: Synthetic oligonucleotide
ttgcagaagccgacgatgtct

SEQ ID NO: 19839 - DNA, 21 bp, Artificial Sequence
  Description of Artificial Sequence: Synthetic oligonucleotide
ctgcagaagcctacttctgct

SEQ ID NO: 19840 - DNA, 21 bp, Artificial Sequence
  Description of Artificial Sequence: Synthetic oligonucleotide
cttcagttgaatcagcagaag

SEQ ID NO: 19841 - DNA, 21 bp, Artificial Sequence
  Description of Artificial Sequence: Synthetic oligonucleotide
ttgcagttgcggcagactagt

SEQ ID NO: 19842 - DNA, 21 bp, Artificial Sequence
  Description of Artificial Sequence: Synthetic oligonucleotide
cttcagttgactcgtggtgag

SEQ ID NO: 19843 - DNA, 21 bp, Artificial Sequence
  Description of Artificial Sequence: Synthetic oligonucleotide
ttgcagatggcgagggggggt

SEQ ID NO: 19844 - DNA, 21 bp, Artificial Sequence
  Description of Artificial Sequence: Synthetic oligonucleotide
ctgcagatgcgtcctatgact

SEQ ID NO: 19845 - DNA, 21 bp, Artificial Sequence
  Description of Artificial Sequence: Synthetic oligonucleotide
cttcagaatggttgtaagtct

SEQ ID NO: 19846 - DNA, 21 bp, Artificial Sequence
  Description of Artificial Sequence: Synthetic oligonucleotide
cttcagaatacgagtagttcg

SEQ ID NO: 19847 - DNA, 21 bp, Artificial Sequence
  Description of Artificial Sequence: Synthetic oligonucleotide
cttcagccttttaagcatcag

SEQ ID NO: 19848 - DNA, 21 bp, Artificial Sequence
  Description of Artificial Sequence: Synthetic oligonucleotide
ttgcagcctcgtgagcctgtt

SEQ ID NO: 19849 - DNA, 21 bp, Artificial Sequence
  Description of Artificial Sequence: Synthetic oligonucleotide
ttgcagcctagttcgcgtacg

SEQ ID NO: 19850 - DNA, 21 bp, Artificial Sequence
  Description of Artificial Sequence: Synthetic oligonucleotide
cttcagccgactggtgaggct

SEQ ID NO: 19851 - DNA, 21 bp, Artificial Sequence
  Description of Artificial Sequence: Synthetic oligonucleotide
ctgcagcagacggggttgcgt

SEQ ID NO: 19852 - DNA, 21 bp, Artificial Sequence
  Description of Artificial Sequence: Synthetic oligonucleotide
cttcagcgtgcgaatatggtg

SEQ ID NO: 19853 - DNA, 21 bp, Artificial Sequence
  Description of Artificial Sequence: Synthetic oligonucleotide
cttcagcgtgaggctcatacg

SEQ ID NO: 19854 - DNA, 21 bp, Artificial Sequence
  Description of Artificial Sequence: Synthetic oligonucleotide
ttgcagcgttcgagggggccg

SEQ ID NO: 19855 - DNA, 21 bp, Artificial Sequence
  Description of Artificial Sequence: Synthetic oligonucleotide
cttcagtctgctcgtgctcct

SEQ ID NO: 19856 - DNA, 21 bp, Artificial Sequence
  Description of Artificial Sequence: Synthetic oligonucleotide
ttgcagtctttttcgtctccg

SEQ ID NO: 19857 - DNA, 21 bp, Artificial Sequence
  Description of Artificial Sequence: Synthetic oligonucleotide
ctgcagagtggtcctcagccg

SEQ ID NO: 19858 - DNA, 21 bp, Artificial Sequence
  Description of Artificial Sequence: Synthetic oligonucleotide
cttcagtctcctgagaatgag

SEQ ID NO: 19859 - DNA, 21 bp, Artificial Sequence
  Description of Artificial Sequence: Synthetic oligonucleotide
ctgcagagttatacgccgccg

SEQ ID NO: 19860 - DNA, 21 bp, Artificial Sequence
  Description of Artificial Sequence: Synthetic oligonucleotide
ttgcagactgggcgtttttct

SEQ ID NO: 19861 - DNA, 21 bp, Artificial Sequence
  Description of Artificial Sequence: Synthetic oligonucleotide
ttgcagactaagtcgtcttct

SEQ ID NO: 19862 - DNA, 21 bp, Artificial Sequence
  Description of Artificial Sequence: Synthetic oligonucleotide
ttgcagacggtggatattgat

SEQ ID NO: 19863 - DNA, 21 bp, Artificial Sequence
  Description of Artificial Sequence: Synthetic oligonucleotide
ttgcaggtggattctaatgtg

SEQ ID NO: 19864 - DNA, 21 bp, Artificial Sequence
  Description of Artificial Sequence: Synthetic oligonucleotide
ttgcaggttccttcttctctg

SEQ ID NO: 19865 - DNA, 21 bp, Artificial Sequence
  Description of Artificial Sequence: Synthetic oligonucleotide
ttgcaggtgtcggggctggat

SEQ ID NO: 19866 - DNA, 21 bp, Artificial Sequence
  Description of Artificial Sequence: Synthetic oligonucleotide
ctgcagtatgctacttcggat

SEQ ID NO: 19867 - DNA, 21 bp, Artificial Sequence
  Description of Artificial Sequence: Synthetic oligonucleotide
ctgcgtgcggctgagatttcg

SEQ ID NO: 19868 - DNA, 21 bp, Artificial Sequence
  Description of Artificial Sequence: Synthetic oligonucleotide
cttcgtgcggcgaatgctctt

SEQ ID NO: 19869 - DNA, 21 bp, Artificial Sequence
  Description of Artificial Sequence: Synthetic oligonucleotide
ctgcgtgctgatgggaaggcg

SEQ ID NO: 19870 - DNA, 21 bp, Artificial Sequence
  Description of Artificial Sequence: Synthetic oligonucleotide
cttcgtgcggggacggcgcag

SEQ ID NO: 19871 - DNA, 21 bp, Artificial Sequence
  Description of Artificial Sequence: Synthetic oligonucleotide
ttgcgtgctggtacgtctagt

SEQ ID NO: 19872 - DNA, 21 bp, Artificial Sequence
  Description of Artificial Sequence: Synthetic oligonucleotide
cttcgggcgattcttgaggag

SEQ ID NO: 19873 - DNA, 21 bp, Artificial Sequence
  Description of Artificial Sequence: Synthetic oligonucleotide
cttcgtgctctgacggggagt

SEQ ID NO: 19874 - DNA, 21 bp, Artificial Sequence
  Description of Artificial Sequence: Synthetic oligonucleotide
ttgcgtgctcagaatgatgct

SEQ ID NO: 19875 - DNA, 21 bp, Artificial Sequence
  Description of Artificial Sequence: Synthetic oligonucleotide
ctgcgggcgacgaattctttg

SEQ ID NO: 19876 - DNA, 21 bp, Artificial Sequence
  Description of Artificial Sequence: Synthetic oligonucleotide
cttagggatggtcagcgtcct

SEQ ID NO: 19877 - DNA, 21 bp, Artificial Sequence
  Description of Artificial Sequence: Synthetic oligonucleotide
cttcgggatgggcgtgcttct

SEQ ID NO: 19878 - DNA, 21 bp, Artificial Sequence
  Description of Artificial Sequence: Synthetic oligonucleotide
ttgcgggatcatggtggtcat

SEQ ID NO: 19879 - DNA, 21 bp, Artificial Sequence
  Description of Artificial Sequence: Synthetic oligonucleotide
cttcgggatcgggattttaag

SEQ ID NO: 19880 - DNA, 21 bp, Artificial Sequence
  Description of Artificial Sequence: Synthetic oligonucleotide
ctgagggatcgtgatgtgctt

SEQ ID NO: 19881 - DNA, 21 bp, Artificial Sequence
  Description of Artificial Sequence: Synthetic oligonucleotide
cttcgggattcgaataagaat

SEQ ID NO: 19882 - DNA, 21 bp, Artificial Sequence
  Description of Artificial Sequence: Synthetic oligonucleotide
ttgcgggatagtgtgcaggtg

SEQ ID NO: 19883 - DNA, 21 bp, Artificial Sequence
  Description of Artificial Sequence: Synthetic oligonucleotide
ttgagggagcatgggcctgtt

SEQ ID NO: 19884 - DNA, 21 bp, Artificial Sequence
  Description of Artificial Sequence: Synthetic oligonucleotide
ttgagggagatgcctctgcct

SEQ ID NO: 19885 - DNA, 21 bp, Artificial Sequence
  Description of Artificial Sequence: Synthetic oligonucleotide
ttgagggagaatatgtcgaat

SEQ ID NO: 19886 - DNA, 21 bp, Artificial Sequence
  Description of Artificial Sequence: Synthetic oligonucleotide
cttcgtgagcctactgggttt

SEQ ID NO: 19887 - DNA, 21 bp, Artificial Sequence
  Description of Artificial Sequence: Synthetic oligonucleotide
cttcgtgagccggtgattcag

SEQ ID NO: 19888 - DNA, 21 bp, Artificial Sequence
  Description of Artificial Sequence: Synthetic oligonucleotide
ttgcgtgagtctcagcggatt

SEQ ID NO: 19889 - DNA, 21 bp, Artificial Sequence
  Description of Artificial Sequence: Synthetic oligonucleotide
ttgaggtttcctggtacgcct

SEQ ID NO: 19890 - DNA, 21 bp, Artificial Sequence
  Description of Artificial Sequence: Synthetic oligonucleotide
cttcgttttcagtctactccg

SEQ ID NO: 19891 - DNA, 21 bp, Artificial Sequence
  Description of Artificial Sequence: Synthetic oligonucleotide
ctgaggggtgcgattgctccg

SEQ ID NO: 19892 - DNA, 21 bp, Artificial Sequence
  Description of Artificial Sequence: Synthetic oligonucleotide
ttgcggggtgatgcgagtgag

SEQ ID NO: 19893 - DNA, 21 bp, Artificial Sequence
  Description of Artificial Sequence: Synthetic oligonucleotide
cttaggggggagagtagtccg

SEQ ID NO: 19894 - DNA, 21 bp, Artificial Sequence
  Description of Artificial Sequence: Synthetic oligonucleotide
ctgcgtgggggtatggatccg

SEQ ID NO: 19895 - DNA, 21 bp, Artificial Sequence
  Description of Artificial Sequence: Synthetic oligonucleotide
ttgaggggtaatgtggaggcg

SEQ ID NO: 19896 - DNA, 21 bp, Artificial Sequence
  Description of Artificial Sequence: Synthetic oligonucleotide
ctgagggggcctactacggtg

SEQ ID NO: 19897 - DNA, 21 bp, Artificial Sequence
  Description of Artificial Sequence: Synthetic oligonucleotide
ctgaggggtcagctttcgaat

SEQ ID NO: 19898 - DNA, 21 bp, Artificial Sequence
  Description of Artificial Sequence: Synthetic oligonucleotide
ttgcgtgggcgttcgagtgag

SEQ ID NO: 19899 - DNA, 21 bp, Artificial Sequence
  Description of Artificial Sequence: Synthetic oligonucleotide
ctgagggggtcgcttgagcat

SEQ ID NO: 19900 - DNA, 21 bp, Artificial Sequence
  Description of Artificial Sequence: Synthetic oligonucleotide
ttgcgtgggactatggagagt

SEQ ID NO: 19901 - DNA, 21 bp, Artificial Sequence
  Description of Artificial Sequence: Synthetic oligonucleotide
ttgcggcatgattctaatgcg

SEQ ID NO: 19902 - DNA, 21 bp, Artificial Sequence
  Description of Artificial Sequence: Synthetic oligonucleotide
cttcgtatttcgactagtgat

SEQ ID NO: 19903 - DNA, 21 bp, Artificial Sequence
  Description of Artificial Sequence: Synthetic oligonucleotide
ttgcgtaaggagtatcttggt

SEQ ID NO: 19904 - DNA, 21 bp, Artificial Sequence
  Description of Artificial Sequence: Synthetic oligonucleotide
ttgcggttggatgatcaggct

SEQ ID NO: 19905 - DNA, 21 bp, Artificial Sequence
  Description of Artificial Sequence: Synthetic oligonucleotide
ctgcggctgcatcaggagtcg

SEQ ID NO: 19906 - DNA, 21 bp, Artificial Sequence
  Description of Artificial Sequence: Synthetic oligonucleotide
ttgcggttgaagaatgatgct

SEQ ID NO: 19907 - DNA, 21 bp, Artificial Sequence
  Description of Artificial Sequence: Synthetic oligonucleotide
ttgcgtctgcctcctgctgag

SEQ ID NO: 19908 - DNA, 21 bp, Artificial Sequence
  Description of Artificial Sequence: Synthetic oligonucleotide
ttgcggctttctgataatcgg

SEQ ID NO: 19909 - DNA, 21 bp, Artificial Sequence
  Description of Artificial Sequence: Synthetic oligonucleotide
ttgaggcttacggggcgtcct

SEQ ID NO: 19910 - DNA, 21 bp, Artificial Sequence
  Description of Artificial Sequence: Synthetic oligonucleotide
ttgcgtctggttcgtgagccg

SEQ ID NO: 19911 - DNA, 21 bp, Artificial Sequence
  Description of Artificial Sequence: Synthetic oligonucleotide
cttaggaatgctgcgtctgtg

SEQ ID NO: 19912 - DNA, 21 bp, Artificial Sequence
  Description of Artificial Sequence: Synthetic oligonucleotide
cttaggaatgctgatggtgcg

SEQ ID NO: 19913 - DNA, 21 bp, Artificial Sequence
  Description of Artificial Sequence: Synthetic oligonucleotide
ctgaggaatctgaattcgtat

SEQ ID NO: 19914 - DNA, 21 bp, Artificial Sequence
  Description of Artificial Sequence: Synthetic oligonucleotide
ttgcgtaataatcctttggcg

SEQ ID NO: 19915 - DNA, 21 bp, Artificial Sequence
  Description of Artificial Sequence: Synthetic oligonucleotide
ttgaggaatcggcctagtgag

SEQ ID NO: 19916 - DNA, 21 bp, Artificial Sequence
  Description of Artificial Sequence: Synthetic oligonucleotide
ttgaggaattcttcggttgtg

SEQ ID NO: 19917 - DNA, 21 bp, Artificial Sequence
  Description of Artificial Sequence: Synthetic oligonucleotide
ctgcgtaatactcctatgtct

SEQ ID NO: 19918 - DNA, 21 bp, Artificial Sequence
  Description of Artificial Sequence: Synthetic oligonucleotide
ttgcggaatactgttttgggt

SEQ ID NO: 19919 - DNA, 21 bp, Artificial Sequence
  Description of Artificial Sequence: Synthetic oligonucleotide
ttgcgtaatgtggcggagcat

SEQ ID NO: 19920 - DNA, 21 bp, Artificial Sequence
  Description of Artificial Sequence: Synthetic oligonucleotide
ttgcgtccgaatggttatact

SEQ ID NO: 19921 - DNA, 21 bp, Artificial Sequence
  Description of Artificial Sequence: Synthetic oligonucleotide
ttgcgtccgcctgcgtttccg

SEQ ID NO: 19922 - DNA, 21 bp, Artificial Sequence
  Description of Artificial Sequence: Synthetic oligonucleotide
ttgaggccgccggctgggttg

SEQ ID NO: 19923 - DNA, 21 bp, Artificial Sequence
  Description of Artificial Sequence: Synthetic oligonucleotide
ctgcgtcctcctcagaataat

SEQ ID NO: 19924 - DNA, 21 bp, Artificial Sequence
  Description of Artificial Sequence: Synthetic oligonucleotide
ttgcgtccgcgtccgagtgat

SEQ ID NO: 19925 - DNA, 21 bp, Artificial Sequence
  Description of Artificial Sequence: Synthetic oligonucleotide
ttgcggcctagttttagtccg

SEQ ID NO: 19926 - DNA, 21 bp, Artificial Sequence
  Description of Artificial Sequence: Synthetic oligonucleotide
cttcgtccttctagtattagt

SEQ ID NO: 19927 - DNA, 21 bp, Artificial Sequence
  Description of Artificial Sequence: Synthetic oligonucleotide
ctgaggccttcttctcagact

SEQ ID NO: 19928 - DNA, 21 bp, Artificial Sequence
  Description of Artificial Sequence: Synthetic oligonucleotide
ttgcgtccttctgttcgggag

SEQ ID NO: 19929 - DNA, 21 bp, Artificial Sequence
  Description of Artificial Sequence: Synthetic oligonucleotide
ctgcggccgacgactatgcct

SEQ ID NO: 19930 - DNA, 21 bp, Artificial Sequence
  Description of Artificial Sequence: Synthetic oligonucleotide
ttgcggcagggttatagtcag

SEQ ID NO: 19931 - DNA, 21 bp, Artificial Sequence
  Description of Artificial Sequence: Synthetic oligonucleotide
ttgaggcagtctactccgcct

SEQ ID NO: 19932 - DNA, 21 bp, Artificial Sequence
  Description of Artificial Sequence: Synthetic oligonucleotide
ctgcgtaggcctgaggagctt

SEQ ID NO: 19933 - DNA, 21 bp, Artificial Sequence
  Description of Artificial Sequence: Synthetic oligonucleotide
cttcggagtgatacgaagtat

SEQ ID NO: 19934 - DNA, 21 bp, Artificial Sequence
  Description of Artificial Sequence: Synthetic oligonucleotide
ctgaggtcggatgtgcagttt

SEQ ID NO: 19935 - DNA, 21 bp, Artificial Sequence
  Description of Artificial Sequence: Synthetic oligonucleotide
ttgcgttctgattgggttgag

SEQ ID NO: 19936 - DNA, 21 bp, Artificial Sequence
  Description of Artificial Sequence: Synthetic oligonucleotide
ctgaggtctgagtcgtgtgcg

SEQ ID NO: 19937 - DNA, 21 bp, Artificial Sequence
  Description of Artificial Sequence: Synthetic oligonucleotide
ctgcggtcgggtgctattcag

SEQ ID NO: 19938 - DNA, 21 bp, Artificial Sequence
  Description of Artificial Sequence: Synthetic oligonucleotide
ttgaggtctgggacgctggct

SEQ ID NO: 19939 - DNA, 21 bp, Artificial Sequence
  Description of Artificial Sequence: Synthetic oligonucleotide
ctgcggtcgctgactgatgcg

SEQ ID NO: 19940 - DNA, 21 bp, Artificial Sequence
  Description of Artificial Sequence: Synthetic oligonucleotide
cttcggtcgatgcagactccg

SEQ ID NO: 19941 - DNA, 21 bp, Artificial Sequence
  Description of Artificial Sequence: Synthetic oligonucleotide
ttgaggtctccgcattttgat

SEQ ID NO: 19942 - DNA, 21 bp, Artificial Sequence
  Description of Artificial Sequence: Synthetic oligonucleotide
ctgaggagtccgctgtctccg

SEQ ID NO: 19943 - DNA, 21 bp, Artificial Sequence
  Description of Artificial Sequence: Synthetic oligonucleotide
ctgcggtctcctcctactgcg

SEQ ID NO: 19944 - DNA, 21 bp, Artificial Sequence
  Description of Artificial Sequence: Synthetic oligonucleotide
ttgcggtctcaggagcggcat

SEQ ID NO: 19945 - DNA, 21 bp, Artificial Sequence
  Description of Artificial Sequence: Synthetic oligonucleotide
ttgcgttctcaggggccgctg

SEQ ID NO: 19946 - DNA, 21 bp, Artificial Sequence
  Description of Artificial Sequence: Synthetic oligonucleotide
ctgaggagttcgctggattgg

SEQ ID NO: 19947 - DNA, 21 bp, Artificial Sequence
  Description of Artificial Sequence: Synthetic oligonucleotide
ctgcggagttcttcgcctggg

SEQ ID NO: 19948 - DNA, 21 bp, Artificial Sequence
  Description of Artificial Sequence: Synthetic oligonucleotide
cttcggtcttcgactactcct

SEQ ID NO: 19949 - DNA, 21 bp, Artificial Sequence
  Description of Artificial Sequence: Synthetic oligonucleotide
ttgcgttctacttcggcgtat

SEQ ID NO: 19950 - DNA, 21 bp, Artificial Sequence
  Description of Artificial Sequence: Synthetic oligonucleotide
ttgcggtctgttaatgattcg

SEQ ID NO: 19951 - DNA, 21 bp, Artificial Sequence
  Description of Artificial Sequence: Synthetic oligonucleotide
ttgcggacggctgatgttgcg

SEQ ID NO: 19952 - DNA, 21 bp, Artificial Sequence
  Description of Artificial Sequence: Synthetic oligonucleotide
cttaggactgcttcgcctcct

SEQ ID NO: 19953 - DNA, 21 bp, Artificial Sequence
  Description of Artificial Sequence: Synthetic oligonucleotide
ttgcgtacggcttcgtcgact

SEQ ID NO: 19954 - DNA, 21 bp, Artificial Sequence
  Description of Artificial Sequence: Synthetic oligonucleotide
cttaggacggatattctgtct

SEQ ID NO: 19955 - DNA, 21 bp, Artificial Sequence
  Description of Artificial Sequence: Synthetic oligonucleotide
ctgaggactgggtatcttgat

SEQ ID NO: 19956 - DNA, 21 bp, Artificial Sequence
  Description of Artificial Sequence: Synthetic oligonucleotide
cttaggacgcttaatgcggcg

SEQ ID NO: 19957 - DNA, 21 bp, Artificial Sequence
  Description of Artificial Sequence: Synthetic oligonucleotide
cttcgtacgaatgatagtcag

SEQ ID NO: 19958 - DNA, 21 bp, Artificial Sequence
  Description of Artificial Sequence: Synthetic oligonucleotide
ctgaggacgccggagaggttg

SEQ ID NO: 19959 - DNA, 21 bp, Artificial Sequence
  Description of Artificial Sequence: Synthetic oligonucleotide
ttgcggactccgaatggtcct

SEQ ID NO: 19960 - DNA, 21 bp, Artificial Sequence
  Description of Artificial Sequence: Synthetic oligonucleotide
cttcgtacgcgtgaggcgggt

SEQ ID NO: 19961 - DNA, 21 bp, Artificial Sequence
  Description of Artificial Sequence: Synthetic oligonucleotide
ctgcgtacttctcaggatcgt

SEQ ID NO: 19962 - DNA, 21 bp, Artificial Sequence
  Description of Artificial Sequence: Synthetic oligonucleotide
cttcggactactcttccgttg

SEQ ID NO: 19963 - DNA, 21 bp, Artificial Sequence
  Description of Artificial Sequence: Synthetic oligonucleotide
ctgcgtacggtgaatagtgcg

SEQ ID NO: 19964 - DNA, 21 bp, Artificial Sequence
  Description of Artificial Sequence: Synthetic oligonucleotide
cttcgtgttgatcttctgcag

SEQ ID NO: 19965 - DNA, 21 bp, Artificial Sequence
  Description of Artificial Sequence: Synthetic oligonucleotide
cttcgggttgattcgccggtt

SEQ ID NO: 19966 - DNA, 21 bp, Artificial Sequence
  Description of Artificial Sequence: Synthetic oligonucleotide
cttagggttgatgttgctact

SEQ ID NO: 19967 - DNA, 21 bp, Artificial Sequence
  Description of Artificial Sequence: Synthetic oligonucleotide
cttcgtgtgggtgggtcgtat

SEQ ID NO: 19968 - DNA, 21 bp, Artificial Sequence
  Description of Artificial Sequence: Synthetic oligonucleotide
ttgcgtgtgggtactgagcag

SEQ ID NO: 19969 - DNA, 21 bp, Artificial Sequence
  Description of Artificial Sequence: Synthetic oligonucleotide
ctgagggtgctggatgctagt

SEQ ID NO: 19970 - DNA, 21 bp, Artificial Sequence
  Description of Artificial Sequence: Synthetic oligonucleotide
ctgcgtgtgaatccgatggtt

SEQ ID NO: 19971 - DNA, 21 bp, Artificial Sequence
  Description of Artificial Sequence: Synthetic oligonucleotide
cttcgtgttaatgtggaggtt

SEQ ID NO: 19972 - DNA, 21 bp, Artificial Sequence
  Description of Artificial Sequence: Synthetic oligonucleotide
ttgcgtgttccgcctatgtct

SEQ ID NO: 19973 - DNA, 21 bp, Artificial Sequence
  Description of Artificial Sequence: Synthetic oligonucleotide
ttgcgggtgccgcctaataat

SEQ ID NO: 19974 - DNA, 21 bp, Artificial Sequence
  Description of Artificial Sequence: Synthetic oligonucleotide
ttgagggttacttctcatccg

SEQ ID NO: 19975 - DNA, 21 bp, Artificial Sequence
  Description of Artificial Sequence: Synthetic oligonucleotide
cttagtgcggctcctagtaat

SEQ ID NO: 19976 - DNA, 21 bp, Artificial Sequence
  Description of Artificial Sequence: Synthetic oligonucleotide
cttagtgcggcgactactaag

SEQ ID NO: 19977 - DNA, 21 bp, Artificial Sequence
  Description of Artificial Sequence: Synthetic oligonucleotide
cttagtgcgtttgttaaggag

SEQ ID NO: 19978 - DNA, 21 bp, Artificial Sequence
  Description of Artificial Sequence: Synthetic oligonucleotide
ttgagtgcgggtgctcgggct

SEQ ID NO: 19979 - DNA, 21 bp, Artificial Sequence
  Description of Artificial Sequence: Synthetic oligonucleotide
ttgtctgctctgaatgtgaag

SEQ ID NO: 19980 - DNA, 21 bp, Artificial Sequence
  Description of Artificial Sequence: Synthetic oligonucleotide
ctgtcggctcagcggggggct

SEQ ID NO: 19981 - DNA, 21 bp, Artificial Sequence
  Description of Artificial Sequence: Synthetic oligonucleotide
ctgtcggctaggcatatgccg

SEQ ID NO: 19982 - DNA, 21 bp, Artificial Sequence
  Description of Artificial Sequence: Synthetic oligonucleotide
ctgtcggcgcggccggatttg

SEQ ID NO: 19983 - DNA, 21 bp, Artificial Sequence
  Description of Artificial Sequence: Synthetic oligonucleotide
ctgtctgcgaggccgcatttg

SEQ ID NO: 19984 - DNA, 21 bp, Artificial Sequence
  Description of Artificial Sequence: Synthetic oligonucleotide
ttgtcggcttctgcgaatagt

SEQ ID NO: 19985 - DNA, 21 bp, Artificial Sequence
  Description of Artificial Sequence: Synthetic oligonucleotide
ttgtctgcgagtcatgtggtg

SEQ ID NO: 19986 - DNA, 21 bp, Artificial Sequence
  Description of Artificial Sequence: Synthetic oligonucleotide
ctttcggcgtcttggactagt

SEQ ID NO: 19987 - DNA, 21 bp, Artificial Sequence
  Description of Artificial Sequence: Synthetic oligonucleotide
ttgtcggcgtatgctcagggt

SEQ ID NO: 19988 - DNA, 21 bp, Artificial Sequence
  Description of Artificial Sequence: Synthetic oligonucleotide
ttgtcttgtgggtcgatggag

SEQ ID NO: 19989 - DNA, 21 bp, Artificial Sequence
  Description of Artificial Sequence: Synthetic oligonucleotide
ctttcggatgctcattcgtgg

SEQ ID NO: 19990 - DNA, 21 bp, Artificial Sequence
  Description of Artificial Sequence: Synthetic oligonucleotide
ttgtcggatgcggttgcggag

SEQ ID NO: 19991 - DNA, 21 bp, Artificial Sequence
  Description of Artificial Sequence: Synthetic oligonucleotide
ctgtctgatgagcgtactcat

SEQ ID NO: 19992 - DNA, 21 bp, Artificial Sequence
  Description of Artificial Sequence: Synthetic oligonucleotide
ctgagtgattttcagaatccg

SEQ ID NO: 19993 - DNA, 21 bp, Artificial Sequence
  Description of Artificial Sequence: Synthetic oligonucleotide
ctgtctgatcatcatgggttg

SEQ ID NO: 19994 - DNA, 21 bp, Artificial Sequence
  Description of Artificial Sequence: Synthetic oligonucleotide
ctgtcggataagggtcatccg

SEQ ID NO: 19995 - DNA, 21 bp, Artificial Sequence
  Description of Artificial Sequence: Synthetic oligonucleotide
cttagtgatttgcaggggaat

SEQ ID NO: 19996 - DNA, 21 bp, Artificial Sequence
  Description of Artificial Sequence: Synthetic oligonucleotide
ctgtctgatttgacttcgtgg

SEQ ID NO: 19997 - DNA, 21 bp, Artificial Sequence
  Description of Artificial Sequence: Synthetic oligonucleotide
ctttctgatcctactgagatt

SEQ ID NO: 19998 - DNA, 21 bp, Artificial Sequence
  Description of Artificial Sequence: Synthetic oligonucleotide
ttgtctgatcggtctgttttg

SEQ ID NO: 19999 - DNA, 21 bp, Artificial Sequence
  Description of Artificial Sequence: Synthetic oligonucleotide
ctttctgaggctccggtgcat

SEQ ID NO: 20000 - DNA, 21 bp, Artificial Sequence
  Description of Artificial Sequence: Synthetic oligonucleotide
ctttctgagttttctcgggcg

SEQ ID NO: 20001 - DNA, 21 bp, Artificial Sequence
  Description of Artificial Sequence: Synthetic oligonucleotide
cttagtgaggggtgtattttg

SEQ ID NO: 20002 - DNA, 21 bp, Artificial Sequence
  Description of Artificial Sequence: Synthetic oligonucleotide
ctttcggaggggttgcagaag

SEQ ID NO: 20003 - DNA, 21 bp, Artificial Sequence
  Description of Artificial Sequence: Synthetic oligonucleotide
ttgtctgagccgatgcctttt

SEQ ID NO: 20004 - DNA, 21 bp, Artificial Sequence
  Description of Artificial Sequence: Synthetic oligonucleotide
ctgtctgagcagacgcggtat

SEQ ID NO: 20005 - DNA, 21 bp, Artificial Sequence
  Description of Artificial Sequence: Synthetic oligonucleotide
ttgtctgagcggggggatatg

SEQ ID NO: 20006 - DNA, 21 bp, Artificial Sequence
  Description of Artificial Sequence: Synthetic oligonucleotide
ctttcggagcggccggttctg

SEQ ID NO: 20007 - DNA, 21 bp, Artificial Sequence
  Description of Artificial Sequence: Synthetic oligonucleotide
ctgtctgagtctaatcaggtt

SEQ ID NO: 20008 - DNA, 21 bp, Artificial Sequence
  Description of Artificial Sequence: Synthetic oligonucleotide
ctttctgagagttatgttgtg

SEQ ID NO: 20009 - DNA, 21 bp, Artificial Sequence
  Description of Artificial Sequence: Synthetic oligonucleotide
ttgagttttgggacgactacg

SEQ ID NO: 20010 - DNA, 21 bp, Artificial Sequence
  Description of Artificial Sequence: Synthetic oligonucleotide
ttgagttttaagacgcagctg

SEQ ID NO: 20011 - DNA, 21 bp, Artificial Sequence
  Description of Artificial Sequence: Synthetic oligonucleotide
ttgtcgtttagtgctgagtcg

SEQ ID NO: 20012 - DNA, 21 bp, Artificial Sequence
  Description of Artificial Sequence: Synthetic oligonucleotide
ctgagtttttcgacgtctggg

SEQ ID NO: 20013 - DNA, 21 bp, Artificial Sequence
  Description of Artificial Sequence: Synthetic oligonucleotide
ctttctggggcggctggtctt

SEQ ID NO: 20014 - DNA, 21 bp, Artificial Sequence
  Description of Artificial Sequence: Synthetic oligonucleotide
ttgtctggtgctattccgccg

SEQ ID NO: 20015 - DNA, 21 bp, Artificial Sequence
  Description of Artificial Sequence: Synthetic oligonucleotide
ttgtcgggggctaattcgggt

SEQ ID NO: 20016 - DNA, 21 bp, Artificial Sequence
  Description of Artificial Sequence: Synthetic oligonucleotide
ctttcgggggagcaggcgttg

SEQ ID NO: 20017 - DNA, 21 bp, Artificial Sequence
  Description of Artificial Sequence: Synthetic oligonucleotide
ttgagtgggggtgagcctccg

SEQ ID NO: 20018 - DNA, 21 bp, Artificial Sequence
  Description of Artificial Sequence: Synthetic oligonucleotide
ctttcggggggtcagatttct

SEQ ID NO: 20019 - DNA, 21 bp, Artificial Sequence
  Description of Artificial Sequence: Synthetic oligonucleotide
ctgtctggtcatcatattgtg

SEQ ID NO: 20020 - DNA, 21 bp, Artificial Sequence
  Description of Artificial Sequence: Synthetic oligonucleotide
ttgtcgggtattgctggtatt

SEQ ID NO: 20021 - DNA, 21 bp, Artificial Sequence
  Description of Artificial Sequence: Synthetic oligonucleotide
ctgagtggtccttcgtctctg

SEQ ID NO: 20022 - DNA, 21 bp, Artificial Sequence
  Description of Artificial Sequence: Synthetic oligonucleotide
ctgtctggtacgccggggatt

SEQ ID NO: 20023 - DNA, 21 bp, Artificial Sequence
  Description of Artificial Sequence: Synthetic oligonucleotide
ttgtctggtgttgctattcag

SEQ ID NO: 20024 - DNA, 21 bp, Artificial Sequence
  Description of Artificial Sequence: Synthetic oligonucleotide
ttgtcgcatgatgtgcttacg

SEQ ID NO: 20025 - DNA, 21 bp, Artificial Sequence
  Description of Artificial Sequence: Synthetic oligonucleotide
ttgagtcatgggatgcttggg

SEQ ID NO: 20026 - DNA, 21 bp, Artificial Sequence
  Description of Artificial Sequence: Synthetic oligonucleotide
ttgtcgcataagctgacggag

SEQ ID NO: 20027 - DNA, 21 bp, Artificial Sequence
  Description of Artificial Sequence: Synthetic oligonucleotide
ctgtcgcatctgggttttcct

SEQ ID NO: 20028 - DNA, 21 bp, Artificial Sequence
  Description of Artificial Sequence: Synthetic oligonucleotide
ctgtctcatcctatggggtat

SEQ ID NO: 20029 - DNA, 21 bp, Artificial Sequence
  Description of Artificial Sequence: Synthetic oligonucleotide
ttgtctcattctattcctcgg

SEQ ID NO: 20030 - DNA, 21 bp, Artificial Sequence
  Description of Artificial Sequence: Synthetic oligonucleotide
ttgtcgcatacgactaatggt

SEQ ID NO: 20031 - DNA, 21 bp, Artificial Sequence
  Description of Artificial Sequence: Synthetic oligonucleotide
ttgtctcatgtgacgacggcg

SEQ ID NO: 20032 - DNA, 21 bp, Artificial Sequence
  Description of Artificial Sequence: Synthetic oligonucleotide
ctttctattttgtcggggatt

SEQ ID NO: 20033 - DNA, 21 bp, Artificial Sequence
  Description of Artificial Sequence: Synthetic oligonucleotide
ctttcgattcctagtggtcct

SEQ ID NO: 20034 - DNA, 21 bp, Artificial Sequence
  Description of Artificial Sequence: Synthetic oligonucleotide
ttgtctaaggagccttttatg

SEQ ID NO: 20035 - DNA, 21 bp, Artificial Sequence
  Description of Artificial Sequence: Synthetic oligonucleotide
ctttcgaaggggtttatgggg

SEQ ID NO: 20036 - DNA, 21 bp, Artificial Sequence
  Description of Artificial Sequence: Synthetic oligonucleotide
ctgtcgaagggtaatgctgct

SEQ ID NO: 20037 - DNA, 21 bp, Artificial Sequence
  Description of Artificial Sequence: Synthetic oligonucleotide
cttagtaagacgttggaggag

SEQ ID NO: 20038 - DNA, 21 bp, Artificial Sequence
  Description of Artificial Sequence: Synthetic oligonucleotide
ctgtcgctgggggcttctgct

SEQ ID NO: 20039 - DNA, 21 bp, Artificial Sequence
  Description of Artificial Sequence: Synthetic oligonucleotide
ttgtctcttgggccgcatagt

SEQ ID NO: 20040 - DNA, 21 bp, Artificial Sequence
  Description of Artificial Sequence: Synthetic oligonucleotide
ctgtctcttggggtggatagt

SEQ ID NO: 20041 - DNA, 21 bp, Artificial Sequence
  Description of Artificial Sequence: Synthetic oligonucleotide
cttagtttgcatccggcgcct

SEQ ID NO: 20042 - DNA, 21 bp, Artificial Sequence
  Description of Artificial Sequence: Synthetic oligonucleotide
ttgtctcttaagcatctgaag

SEQ ID NO: 20043 - DNA, 21 bp, Artificial Sequence
  Description of Artificial Sequence: Synthetic oligonucleotide
cttagtctgccgcagtcgatg

SEQ ID NO: 20044 - DNA, 21 bp, Artificial Sequence
  Description of Artificial Sequence: Synthetic oligonucleotide
ctttcgcttcctcgttcggat

SEQ ID NO: 20045 - DNA, 21 bp, Artificial Sequence
  Description of Artificial Sequence: Synthetic oligonucleotide
ctttcgttgccttataatcgt

SEQ ID NO: 20046 - DNA, 21 bp, Artificial Sequence
  Description of Artificial Sequence: Synthetic oligonucleotide
ctttctcttcagacggttcct

SEQ ID NO: 20047 - DNA, 21 bp, Artificial Sequence
  Description of Artificial Sequence: Synthetic oligonucleotide
ttgtctttgtctaagggttcg

SEQ ID NO: 20048 - DNA, 21 bp, Artificial Sequence
  Description of Artificial Sequence: Synthetic oligonucleotide
ttgtctctgagtcctgttgtt

SEQ ID NO: 20049 - DNA, 21 bp, Artificial Sequence
  Description of Artificial Sequence: Synthetic oligonucleotide
ctgtcgcttgtgaagcatgat

SEQ ID NO: 20050 - DNA, 21 bp, Artificial Sequence
  Description of Artificial Sequence: Synthetic oligonucleotide
ctttctatggctaggactcct

SEQ ID NO: 20051 - DNA, 21 bp, Artificial Sequence
  Description of Artificial Sequence: Synthetic oligonucleotide
ctgtcgatgaatcctaatggt

SEQ ID NO: 20052 - DNA, 21 bp, Artificial Sequence
  Description of Artificial Sequence: Synthetic oligonucleotide
ttgtcgatgaatgttcagtat

SEQ ID NO: 20053 - DNA, 21 bp, Artificial Sequence
  Description of Artificial Sequence: Synthetic oligonucleotide
ctgagtatgcagaggactgtg

SEQ ID NO: 20054 - DNA, 21 bp, Artificial Sequence
  Description of Artificial Sequence: Synthetic oligonucleotide
ttgtctatgcgttcggagacg

SEQ ID NO: 20055 - DNA, 21 bp, Artificial Sequence
  Description of Artificial Sequence: Synthetic oligonucleotide
ttgagtatgtctaagacgcct

SEQ ID NO: 20056 - DNA, 21 bp, Artificial Sequence
  Description of Artificial Sequence: Synthetic oligonucleotide
ctgtcgaatgagggtagttat

SEQ ID NO: 20057 - DNA, 21 bp, Artificial Sequence
  Description of Artificial Sequence: Synthetic oligonucleotide
ctttctaatgggcggtattcg

SEQ ID NO: 20058 - DNA, 21 bp, Artificial Sequence
  Description of Artificial Sequence: Synthetic oligonucleotide
ctgagtaatcatccgtttagt

SEQ ID NO: 20059 - DNA, 21 bp, Artificial Sequence
  Description of Artificial Sequence: Synthetic oligonucleotide
ctgtctaatcatgtgattacg

SEQ ID NO: 20060 - DNA, 21 bp, Artificial Sequence
  Description of Artificial Sequence: Synthetic oligonucleotide
ctttcgaatatgcagcagaag

SEQ ID NO: 20061 - DNA, 21 bp, Artificial Sequence
  Description of Artificial Sequence: Synthetic oligonucleotide
ctgtctaatccggcgaagact

SEQ ID NO: 20062 - DNA, 21 bp, Artificial Sequence
  Description of Artificial Sequence: Synthetic oligonucleotide
ctttcgaatccgacgaggagt

SEQ ID NO: 20063 - DNA, 21 bp, Artificial Sequence
  Description of Artificial Sequence: Synthetic oligonucleotide
ctgtctaatcgtaagggtgag

SEQ ID NO: 20064 - DNA, 21 bp, Artificial Sequence
  Description of Artificial Sequence: Synthetic oligonucleotide
ttgtcgaatcgtcagattact

SEQ ID NO: 20065 - DNA, 21 bp, Artificial Sequence
  Description of Artificial Sequence: Synthetic oligonucleotide
ctgtcgaattctgcgattctg

SEQ ID NO: 20066 - DNA, 21 bp, Artificial Sequence
  Description of Artificial Sequence: Synthetic oligonucleotide
ctttctaattcgaaggggcct

SEQ ID NO: 20067 - DNA, 21 bp, Artificial Sequence
  Description of Artificial Sequence: Synthetic oligonucleotide
ctttctaattctcgtcatgat

SEQ ID NO: 20068 - DNA, 21 bp, Artificial Sequence
  Description of Artificial Sequence: Synthetic oligonucleotide
ctgagtaattctagtaggatg

SEQ ID NO: 20069 - DNA, 21 bp, Artificial Sequence
  Description of Artificial Sequence: Synthetic oligonucleotide
ctgtctcctgctgttacgcgt

SEQ ID NO: 20070 - DNA, 21 bp, Artificial Sequence
  Description of Artificial Sequence: Synthetic oligonucleotide
ttgagtccttgtccgagtaat

SEQ ID NO: 20071 - DNA, 21 bp, Artificial Sequence
  Description of Artificial Sequence: Synthetic oligonucleotide
ctgtctccgttttcggttgtt

SEQ ID NO: 20072 - DNA, 21 bp, Artificial Sequence
  Description of Artificial Sequence: Synthetic oligonucleotide
ctgagtccggggattgcgcag

SEQ ID NO: 20073 - DNA, 21 bp, Artificial Sequence
  Description of Artificial Sequence: Synthetic oligonucleotide
ctttctccgcataggacgtct

SEQ ID NO: 20074 - DNA, 21 bp, Artificial Sequence
  Description of Artificial Sequence: Synthetic oligonucleotide
cttagtcctaagtttgtgctg

SEQ ID NO: 20075 - DNA, 21 bp, Artificial Sequence
  Description of Artificial Sequence: Synthetic oligonucleotide
ctttctccgaatgggccgaat

SEQ ID NO: 20076 - DNA, 21 bp, Artificial Sequence
  Description of Artificial Sequence: Synthetic oligonucleotide
ctttcgcctccggataggttg

SEQ ID NO: 20077 - DNA, 21 bp, Artificial Sequence
  Description of Artificial Sequence: Synthetic oligonucleotide
ctgtctccgcctcctgttgat

SEQ ID NO: 20078 - DNA, 21 bp, Artificial Sequence
  Description of Artificial Sequence: Synthetic oligonucleotide
ctgtctcctcctacgcctcat

SEQ ID NO: 20079 - DNA, 21 bp, Artificial Sequence
  Description of Artificial Sequence: Synthetic oligonucleotide
ttgagtcctaggactgtgcat

SEQ ID NO: 20080 - DNA, 21 bp, Artificial Sequence
  Description of Artificial Sequence: Synthetic oligonucleotide
ttgagtccgtcgtttacgagt

SEQ ID NO: 20081 - DNA, 21 bp, Artificial Sequence
  Description of Artificial Sequence: Synthetic oligonucleotide
ttgtcgccttcgtcgcttttt

SEQ ID NO: 20082 - DNA, 21 bp, Artificial Sequence
  Description of Artificial Sequence: Synthetic oligonucleotide
ttgtcgccgtctagtctgggg

SEQ ID NO: 20083 - DNA, 21 bp, Artificial Sequence
  Description of Artificial Sequence: Synthetic oligonucleotide
ctttctccgagttctcgtggt

SEQ ID NO: 20084 - DNA, 21 bp, Artificial Sequence
  Description of Artificial Sequence: Synthetic oligonucleotide
ctgtcgccgagtactgatttt

SEQ ID NO: 20085 - DNA, 21 bp, Artificial Sequence
  Description of Artificial Sequence: Synthetic oligonucleotide
ctgtctccttctgttacgaag

SEQ ID NO: 20086 - DNA, 21 bp, Artificial Sequence
  Description of Artificial Sequence: Synthetic oligonucleotide
ttgagtcctacgcgtactcag

SEQ ID NO: 20087 - DNA, 21 bp, Artificial Sequence
  Description of Artificial Sequence: Synthetic oligonucleotide
ctgtctccgactgttgcttat

SEQ ID NO: 20088 - DNA, 21 bp, Artificial Sequence
  Description of Artificial Sequence: Synthetic oligonucleotide
ttgagtcctgttcctgtggcg

SEQ ID NO: 20089 - DNA, 21 bp, Artificial Sequence
  Description of Artificial Sequence: Synthetic oligonucleotide
cttagtcctgttcaggcggcg

SEQ ID NO: 20090 - DNA, 21 bp, Artificial Sequence
  Description of Artificial Sequence: Synthetic oligonucleotide
ctgtcgcaggcgattcagtct

SEQ ID NO: 20091 - DNA, 21 bp, Artificial Sequence
  Description of Artificial Sequence: Synthetic oligonucleotide
ttgagtcaggcgaagaatgtt

SEQ ID NO: 20092 - DNA, 21 bp, Artificial Sequence
  Description of Artificial Sequence: Synthetic oligonucleotide
ctttctcaggctctgcttgat

SEQ ID NO: 20093 - DNA, 21 bp, Artificial Sequence
  Description of Artificial Sequence: Synthetic oligonucleotide
ttgagtcaggcgaatgagagg

SEQ ID NO: 20094 - DNA, 21 bp, Artificial Sequence
  Description of Artificial Sequence: Synthetic oligonucleotide
ctgtcgcaggatctgactgtg

SEQ ID NO: 20095 - DNA, 21 bp, Artificial Sequence
  Description of Artificial Sequence: Synthetic oligonucleotide
ctttctcaggggtctgctcct

SEQ ID NO: 20096 - DNA, 21 bp, Artificial Sequence
  Description of Artificial Sequence: Synthetic oligonucleotide
cttagtcagcatgctagtact

SEQ ID NO: 20097 - DNA, 21 bp, Artificial Sequence
  Description of Artificial Sequence: Synthetic oligonucleotide
ctttcgcagcatatgcgtcct

SEQ ID NO: 20098 - DNA, 21 bp, Artificial Sequence
  Description of Artificial Sequence: Synthetic oligonucleotide
ctgtctcagaagactggtatt

SEQ ID NO: 20099 - DNA, 21 bp, Artificial Sequence
  Description of Artificial Sequence: Synthetic oligonucleotide
ctttctcagcttattcagggt

SEQ ID NO: 20100 - DNA, 21 bp, Artificial Sequence
  Description of Artificial Sequence: Synthetic oligonucleotide
ctttcgcagttgactccgtct

SEQ ID NO: 20101 - DNA, 21 bp, Artificial Sequence
  Description of Artificial Sequence: Synthetic oligonucleotide
ttgtctcagctgacttctcag

SEQ ID NO: 20102 - DNA, 21 bp, Artificial Sequence
  Description of Artificial Sequence: Synthetic oligonucleotide
ctgtcgcagcttgtttcgagt

SEQ ID NO: 20103 - DNA, 21 bp, Artificial Sequence
  Description of Artificial Sequence: Synthetic oligonucleotide
ttgtctcagccgctgaatatg

SEQ ID NO: 20104 - DNA, 21 bp, Artificial Sequence
  Description of Artificial Sequence: Synthetic oligonucleotide
cttagtcagtcttttgcgagt

SEQ ID NO: 20105 - DNA, 21 bp, Artificial Sequence
  Description of Artificial Sequence: Synthetic oligonucleotide
ctgtctcagactgctcgtgct

SEQ ID NO: 20106 - DNA, 21 bp, Artificial Sequence
  Description of Artificial Sequence: Synthetic oligonucleotide
ctttctcaggttcataagttt

SEQ ID NO: 20107 - DNA, 21 bp, Artificial Sequence
  Description of Artificial Sequence: Synthetic oligonucleotide
ttgtctcaggtgcaggctggt

SEQ ID NO: 20108 - DNA, 21 bp, Artificial Sequence
  Description of Artificial Sequence: Synthetic oligonucleotide
ttgtcgcgtgatttggagctg

SEQ ID NO: 20109 - DNA, 21 bp, Artificial Sequence
  Description of Artificial Sequence: Synthetic oligonucleotide
ttgagtcgggggccgactccg

SEQ ID NO: 20110 - DNA, 21 bp, Artificial Sequence
  Description of Artificial Sequence: Synthetic oligonucleotide
ctgtctcgggggcaggttcct

SEQ ID NO: 20111 - DNA, 21 bp, Artificial Sequence
  Description of Artificial Sequence: Synthetic oligonucleotide
ctttcgaggcttggtccgtct

SEQ ID NO: 20112 - DNA, 21 bp, Artificial Sequence
  Description of Artificial Sequence: Synthetic oligonucleotide
cttagtaggcttcctagttct

SEQ ID NO: 20113 - DNA, 21 bp, Artificial Sequence
  Description of Artificial Sequence: Synthetic oligonucleotide
ttgagtaggctttctactgat

SEQ ID NO: 20114 - DNA, 21 bp, Artificial Sequence
  Description of Artificial Sequence: Synthetic oligonucleotide
ttgtcgcgtaatgtgacggag

SEQ ID NO: 20115 - DNA, 21 bp, Artificial Sequence
  Description of Artificial Sequence: Synthetic oligonucleotide
ttgagtcgtcagacgggttat

SEQ ID NO: 20116 - DNA, 21 bp, Artificial Sequence
  Description of Artificial Sequence: Synthetic oligonucleotide
ttgagtaggagttctgcggct

SEQ ID NO: 20117 - DNA, 21 bp, Artificial Sequence
  Description of Artificial Sequence: Synthetic oligonucleotide
ttgagtcgttctgtgagtact

SEQ ID NO: 20118 - DNA, 21 bp, Artificial Sequence
  Description of Artificial Sequence: Synthetic oligonucleotide
ctgtcgcgtactactgctgat

SEQ ID NO: 20119 - DNA, 21 bp, Artificial Sequence
  Description of Artificial Sequence: Synthetic oligonucleotide
ctgtctagggtggcggttctt

SEQ ID NO: 20120 - DNA, 21 bp, Artificial Sequence
  Description of Artificial Sequence: Synthetic oligonucleotide
ctgtcgagtgcgaattcgacg

SEQ ID NO: 20121 - DNA, 21 bp, Artificial Sequence
  Description of Artificial Sequence: Synthetic oligonucleotide
ttgtcttcggcgcagagggct

SEQ ID NO: 20122 - DNA, 21 bp, Artificial Sequence
  Description of Artificial Sequence: Synthetic oligonucleotide
ctgtcgtctgatagtcctgtg

SEQ ID NO: 20123 - DNA, 21 bp, Artificial Sequence
  Description of Artificial Sequence: Synthetic oligonucleotide
ttgtcgagtgagtgtgctcct

SEQ ID NO: 20124 - DNA, 21 bp, Artificial Sequence
  Description of Artificial Sequence: Synthetic oligonucleotide
ctttcgagtggtatgtcgcgt

SEQ ID NO: 20125 - DNA, 21 bp, Artificial Sequence
  Description of Artificial Sequence: Synthetic oligonucleotide
cttagttctgggcgtcctcct

SEQ ID NO: 20126 - DNA, 21 bp, Artificial Sequence
  Description of Artificial Sequence: Synthetic oligonucleotide
ctttcttctcatagtacgtct

SEQ ID NO: 20127 - DNA, 21 bp, Artificial Sequence
  Description of Artificial Sequence: Synthetic oligonucleotide
ttgtcgtctattcagacttat

SEQ ID NO: 20128 - DNA, 21 bp, Artificial Sequence
  Description of Artificial Sequence: Synthetic oligonucleotide
cttagttcgatttcgcataat

SEQ ID NO: 20129 - DNA, 21 bp, Artificial Sequence
  Description of Artificial Sequence: Synthetic oligonucleotide
ttgtcgagtaagccgtatgcg

SEQ ID NO: 20130 - DNA, 21 bp, Artificial Sequence
  Description of Artificial Sequence: Synthetic oligonucleotide
cttagtagtcttgcgatggtt

SEQ ID NO: 20131 - DNA, 21 bp, Artificial Sequence
  Description of Artificial Sequence: Synthetic oligonucleotide
ctgtcttcgctgaagggtaat

SEQ ID NO: 20132 - DNA, 21 bp, Artificial Sequence
  Description of Artificial Sequence: Synthetic oligonucleotide
ctttcttctctgaagcttgct

SEQ ID NO: 20133 - DNA, 21 bp, Artificial Sequence
  Description of Artificial Sequence: Synthetic oligonucleotide
ctgtcgtcgcttatgcatagt

SEQ ID NO: 20134 - DNA, 21 bp, Artificial Sequence
  Description of Artificial Sequence: Synthetic oligonucleotide
cttagttctttgaatcctagt

SEQ ID NO: 20135 - DNA, 21 bp, Artificial Sequence
  Description of Artificial Sequence: Synthetic oligonucleotide
ctgtcgtctcttccgaagatt

SEQ ID NO: 20136 - DNA, 21 bp, Artificial Sequence
  Description of Artificial Sequence: Synthetic oligonucleotide
ctgtcgtctatgcgttctact

SEQ ID NO: 20137 - DNA, 21 bp, Artificial Sequence
  Description of Artificial Sequence: Synthetic oligonucleotide
ctgagtagtatgactaatgat

SEQ ID NO: 20138 - DNA, 21 bp, Artificial Sequence
  Description of Artificial Sequence: Synthetic oligonucleotide
ctgtctagtaattcgctggat

SEQ ID NO: 20139 - DNA, 21 bp, Artificial Sequence
  Description of Artificial Sequence: Synthetic oligonucleotide
ttgagtagtcctgcggggtcg

SEQ ID NO: 20140 - DNA, 21 bp, Artificial Sequence
  Description of Artificial Sequence: Synthetic oligonucleotide
ctttcgagtcctgggtctatg

SEQ ID NO: 20141 - DNA, 21 bp, Artificial Sequence
  Description of Artificial Sequence: Synthetic oligonucleotide
ttgtctagtcctatggattcg

SEQ ID NO: 20142 - DNA, 21 bp, Artificial Sequence
  Description of Artificial Sequence: Synthetic oligonucleotide
ctgtcttctcagtgtattaat

SEQ ID NO: 20143 - DNA, 21 bp, Artificial Sequence
  Description of Artificial Sequence: Synthetic oligonucleotide
ttgtcgtctcagcatacgagt

SEQ ID NO: 20144 - DNA, 21 bp, Artificial Sequence
  Description of Artificial Sequence: Synthetic oligonucleotide
ctgtcgtcgcagcctaagttt

SEQ ID NO: 20145 - DNA, 21 bp, Artificial Sequence
  Description of Artificial Sequence: Synthetic oligonucleotide
ttgagtagtaggagtacgacg

SEQ ID NO: 20146 - DNA, 21 bp, Artificial Sequence
  Description of Artificial Sequence: Synthetic oligonucleotide
ctttcgtcgtcgtgtgagcgt

SEQ ID NO: 20147 - DNA, 21 bp, Artificial Sequence
  Description of Artificial Sequence: Synthetic oligonucleotide
ctgagttcttctcttgagtat

SEQ ID NO: 20148 - DNA, 21 bp, Artificial Sequence
  Description of Artificial Sequence: Synthetic oligonucleotide
ctgtcttcgagtaggccgtcg

SEQ ID NO: 20149 - DNA, 21 bp, Artificial Sequence
  Description of Artificial Sequence: Synthetic oligonucleotide
ctttcgagttcggttgtgttt

SEQ ID NO: 20150 - DNA, 21 bp, Artificial Sequence
  Description of Artificial Sequence: Synthetic oligonucleotide
ctgtcgtctacgtctaaggcg

SEQ ID NO: 20151 - DNA, 21 bp, Artificial Sequence
  Description of Artificial Sequence: Synthetic oligonucleotide
ctgagttcggttgcgactccg

SEQ ID NO: 20152 - DNA, 21 bp, Artificial Sequence
  Description of Artificial Sequence: Synthetic oligonucleotide
ctttcgtctgtttttcggact

SEQ ID NO: 20153 - DNA, 21 bp, Artificial Sequence
  Description of Artificial Sequence: Synthetic oligonucleotide
ctgtctagtgtgcatgcggtt

SEQ ID NO: 20154 - DNA, 21 bp, Artificial Sequence
  Description of Artificial Sequence: Synthetic oligonucleotide
ctttcttcggtgcgtctgtcg

SEQ ID NO: 20155 - DNA, 21 bp, Artificial Sequence
  Description of Artificial Sequence: Synthetic oligonucleotide
ttgtctactgctgtgactagg

SEQ ID NO: 20156 - DNA, 21 bp, Artificial Sequence
  Description of Artificial Sequence: Synthetic oligonucleotide
ttgagtactgaggatcttctt

SEQ ID NO: 20157 - DNA, 21 bp, Artificial Sequence
  Description of Artificial Sequence: Synthetic oligonucleotide
ctgtcgacttttcctgttgct

SEQ ID NO: 20158 - DNA, 21 bp, Artificial Sequence
  Description of Artificial Sequence: Synthetic oligonucleotide
ctttcgacttttcagggtggg

SEQ ID NO: 20159 - DNA, 21 bp, Artificial Sequence
  Description of Artificial Sequence: Synthetic oligonucleotide
ctgtctacggggtcgaggcag

SEQ ID NO: 20160 - DNA, 21 bp, Artificial Sequence
  Description of Artificial Sequence: Synthetic oligonucleotide
ttgagtacgggtactatggat

SEQ ID NO: 20161 - DNA, 21 bp, Artificial Sequence
  Description of Artificial Sequence: Synthetic oligonucleotide
ttgtctacgattcatccttcg

SEQ ID NO: 20162 - DNA, 21 bp, Artificial Sequence
  Description of Artificial Sequence: Synthetic oligonucleotide
ctgtcgactaaggggactatg

SEQ ID NO: 20163 - DNA, 21 bp, Artificial Sequence
  Description of Artificial Sequence: Synthetic oligonucleotide
ctgagtacgcttgagaatgag

SEQ ID NO: 20164 - DNA, 21 bp, Artificial Sequence
  Description of Artificial Sequence: Synthetic oligonucleotide
ctttcgactcttttgacggct

SEQ ID NO: 20165 - DNA, 21 bp, Artificial Sequence
  Description of Artificial Sequence: Synthetic oligonucleotide
ctgtctactctgcctaaggat

SEQ ID NO: 20166 - DNA, 21 bp, Artificial Sequence
  Description of Artificial Sequence: Synthetic oligonucleotide
ttgagtacgatgtcttctctg

SEQ ID NO: 20167 - DNA, 21 bp, Artificial Sequence
  Description of Artificial Sequence: Synthetic oligonucleotide
cttagtacgatgactgcttat

SEQ ID NO: 20168 - DNA, 21 bp, Artificial Sequence
  Description of Artificial Sequence: Synthetic oligonucleotide
ttgtctacgaatatgccgccg

SEQ ID NO: 20169 - DNA, 21 bp, Artificial Sequence
  Description of Artificial Sequence: Synthetic oligonucleotide
ctttcgactcctcatctgacg

SEQ ID NO: 20170 - DNA, 21 bp, Artificial Sequence
  Description of Artificial Sequence: Synthetic oligonucleotide
ttgtctacgccgcatatggcg

SEQ ID NO: 20171 - DNA, 21 bp, Artificial Sequence
  Description of Artificial Sequence: Synthetic oligonucleotide
cttagtactccttcgcagcct

SEQ ID NO: 20172 - DNA, 21 bp, Artificial Sequence
  Description of Artificial Sequence: Synthetic oligonucleotide
cttagtacgaggtctctgcct

SEQ ID NO: 20173 - DNA, 21 bp, Artificial Sequence
  Description of Artificial Sequence: Synthetic oligonucleotide
cttagtacgaggtctccgctg

SEQ ID NO: 20174 - DNA, 21 bp, Artificial Sequence
  Description of Artificial Sequence: Synthetic oligonucleotide
ctttcgacttcgcattcggtt

SEQ ID NO: 20175 - DNA, 21 bp, Artificial Sequence
  Description of Artificial Sequence: Synthetic oligonucleotide
ctttctacggtgaggatggtt

SEQ ID NO: 20176 - DNA, 21 bp, Artificial Sequence
  Description of Artificial Sequence: Synthetic oligonucleotide
ttgagtgttgatgagatggtt

SEQ ID NO: 20177 - DNA, 21 bp, Artificial Sequence
  Description of Artificial Sequence: Synthetic oligonucleotide
ctgagtgtgggtcggacggag

SEQ ID NO: 20178 - DNA, 21 bp, Artificial Sequence
  Description of Artificial Sequence: Synthetic oligonucleotide
ctttctgttcatgggctgaag

SEQ ID NO: 20179 - DNA, 21 bp, Artificial Sequence
  Description of Artificial Sequence: Synthetic oligonucleotide
ctttcggtgaatagttctttg

SEQ ID NO: 20180 - DNA, 21 bp, Artificial Sequence
  Description of Artificial Sequence: Synthetic oligonucleotide
cttagtgtgcctatgcctgat

SEQ ID NO: 20181 - DNA, 21 bp, Artificial Sequence
  Description of Artificial Sequence: Synthetic oligonucleotide
ttgtctgtgcctcgggctcct

SEQ ID NO: 20182 - DNA, 21 bp, Artificial Sequence
  Description of Artificial Sequence: Synthetic oligonucleotide
ctgtcggttagggggcatatt

SEQ ID NO: 20183 - DNA, 21 bp, Artificial Sequence
  Description of Artificial Sequence: Synthetic oligonucleotide
ctgtctgtgcggtctattggg

SEQ ID NO: 20184 - DNA, 21 bp, Artificial Sequence
  Description of Artificial Sequence: Synthetic oligonucleotide
ttgagtgtttctcttacggcg

SEQ ID NO: 20185 - DNA, 21 bp, Artificial Sequence
  Description of Artificial Sequence: Synthetic oligonucleotide
ttgagtgtttctcctttgagt

SEQ ID NO: 20186 - DNA, 21 bp, Artificial Sequence
  Description of Artificial Sequence: Synthetic oligonucleotide
ctgagtgtgtatactgcggat

SEQ ID NO: 20187 - DNA, 21 bp, Artificial Sequence
  Description of Artificial Sequence: Synthetic oligonucleotide
ctttcttatggtcgtcctgtg

SEQ ID NO: 20188 - DNA, 21 bp, Artificial Sequence
  Description of Artificial Sequence: Synthetic oligonucleotide
ttgtcttatccgaggaatgat

SEQ ID NO: 20189 - DNA, 21 bp, Artificial Sequence
  Description of Artificial Sequence: Synthetic oligonucleotide
ctgactgctcctaggcaggcg

SEQ ID NO: 20190 - DNA, 21 bp, Artificial Sequence
  Description of Artificial Sequence: Synthetic oligonucleotide
cttacggcgcctacgagtcag

SEQ ID NO: 20191 - DNA, 21 bp, Artificial Sequence
  Description of Artificial Sequence: Synthetic oligonucleotide
ttgactgcgagtattgggaat

SEQ ID NO: 20192 - DNA, 21 bp, Artificial Sequence
  Description of Artificial Sequence: Synthetic oligonucleotide
ctgacggcgagtattaaggct

SEQ ID NO: 20193 - DNA, 21 bp, Artificial Sequence
  Description of Artificial Sequence: Synthetic oligonucleotide
cttactgcggtgccgctgtcg

SEQ ID NO: 20194 - DNA, 21 bp, Artificial Sequence
  Description of Artificial Sequence: Synthetic oligonucleotide
cttacggatgagaatgtgtgt

SEQ ID NO: 20195 - DNA, 21 bp, Artificial Sequence
  Description of Artificial Sequence: Synthetic oligonucleotide
cttacggatattacgaatcgg

SEQ ID NO: 20196 - DNA, 21 bp, Artificial Sequence
  Description of Artificial Sequence: Synthetic oligonucleotide
ttgacggatttggatcagatg

SEQ ID NO: 20197 - DNA, 21 bp, Artificial Sequence
  Description of Artificial Sequence: Synthetic oligonucleotide
ctgacggatcttcgtctggtg

SEQ ID NO: 20198 - DNA, 21 bp, Artificial Sequence
  Description of Artificial Sequence: Synthetic oligonucleotide
cttactgatctgagtgctagt

SEQ ID NO: 20199 - DNA, 21 bp, Artificial Sequence
  Description of Artificial Sequence: Synthetic oligonucleotide
cttacggattcgcttcgtacg

SEQ ID NO: 20200 - DNA, 21 bp, Artificial Sequence
  Description of Artificial Sequence: Synthetic oligonucleotide
cttactgatactagggttacg

SEQ ID NO: 20201 - DNA, 21 bp, Artificial Sequence
  Description of Artificial Sequence: Synthetic oligonucleotide
cttactgagatgcgtccgggg

SEQ ID NO: 20202 - DNA, 21 bp, Artificial Sequence
  Description of Artificial Sequence: Synthetic oligonucleotide
cttactgagactcgtgctggg

SEQ ID NO: 20203 - DNA, 21 bp, Artificial Sequence
  Description of Artificial Sequence: Synthetic oligonucleotide
cttactgaggtgcggacgtat

SEQ ID NO: 20204 - DNA, 21 bp, Artificial Sequence
  Description of Artificial Sequence: Synthetic oligonucleotide
cttactgagtggtctaaggag

SEQ ID NO: 20205 - DNA, 21 bp, Artificial Sequence
  Description of Artificial Sequence: Synthetic oligonucleotide
cttacttttggtgctacttcg

SEQ ID NO: 20206 - DNA, 21 bp, Artificial Sequence
  Description of Artificial Sequence: Synthetic oligonucleotide
ttgacgttttcggctggtttg

SEQ ID NO: 20207 - DNA, 21 bp, Artificial Sequence
  Description of Artificial Sequence: Synthetic oligonucleotide
ctgactggggcgtttaagagt

SEQ ID NO: 20208 - DNA, 21 bp, Artificial Sequence
  Description of Artificial Sequence: Synthetic oligonucleotide
ttgacgggtgagtttcgtgat

SEQ ID NO: 20209 - DNA, 21 bp, Artificial Sequence
  Description of Artificial Sequence: Synthetic oligonucleotide
ctgactggtttttctaatcag

SEQ ID NO: 20210 - DNA, 21 bp, Artificial Sequence
  Description of Artificial Sequence: Synthetic oligonucleotide
cttactggggggttgtatggg

SEQ ID NO: 20211 - DNA, 21 bp, Artificial Sequence
  Description of Artificial Sequence: Synthetic oligonucleotide
ctgactggtggtcaggtggct

SEQ ID NO: 20212 - DNA, 21 bp, Artificial Sequence
  Description of Artificial Sequence: Synthetic oligonucleotide
cttacggggatgattaagtat

SEQ ID NO: 20213 - DNA, 21 bp, Artificial Sequence
  Description of Artificial Sequence: Synthetic oligonucleotide
cttactggtaatcgtcctgct

SEQ ID NO: 20214 - DNA, 21 bp, Artificial Sequence
  Description of Artificial Sequence: Synthetic oligonucleotide
cttacgggtccttgtacgtct

SEQ ID NO: 20215 - DNA, 21 bp, Artificial Sequence
  Description of Artificial Sequence: Synthetic oligonucleotide
ttgactggtcagattagggtt

SEQ ID NO: 20216 - DNA, 21 bp, Artificial Sequence
  Description of Artificial Sequence: Synthetic oligonucleotide
ttgactgggcgtgggggttcg

SEQ ID NO: 20217 - DNA, 21 bp, Artificial Sequence
  Description of Artificial Sequence: Synthetic oligonucleotide
ctgactggtagtagtcatgtg

SEQ ID NO: 20218 - DNA, 21 bp, Artificial Sequence
  Description of Artificial Sequence: Synthetic oligonucleotide
cttactgggacgcttaggatg

SEQ ID NO: 20219 - DNA, 21 bp, Artificial Sequence
  Description of Artificial Sequence: Synthetic oligonucleotide
cttactcatgctgtgcctacg

SEQ ID NO: 20220 - DNA, 21 bp, Artificial Sequence
  Description of Artificial Sequence: Synthetic oligonucleotide
ttgactcataagctggatgct

SEQ ID NO: 20221 - DNA, 21 bp, Artificial Sequence
  Description of Artificial Sequence: Synthetic oligonucleotide
cttactcatccggctgtgcat

SEQ ID NO: 20222 - DNA, 21 bp, Artificial Sequence
  Description of Artificial Sequence: Synthetic oligonucleotide
ttgactcatgttcctacggcg

SEQ ID NO: 20223 - DNA, 21 bp, Artificial Sequence
  Description of Artificial Sequence: Synthetic oligonucleotide
ttgactattggtcatgtgcct

SEQ ID NO: 20224 - DNA, 21 bp, Artificial Sequence
  Description of Artificial Sequence: Synthetic oligonucleotide
cttacgattccgtctgcgcag

SEQ ID NO: 20225 - DNA, 21 bp, Artificial Sequence
  Description of Artificial Sequence: Synthetic oligonucleotide
cttacgaagggtagtgttcag

SEQ ID NO: 20226 - DNA, 21 bp, Artificial Sequence
  Description of Artificial Sequence: Synthetic oligonucleotide
ttgactaagtcgagtcatgct

SEQ ID NO: 20227 - DNA, 21 bp, Artificial Sequence
  Description of Artificial Sequence: Synthetic oligonucleotide
ctgactaagactgtggggtcg

SEQ ID NO: 20228 - DNA, 21 bp, Artificial Sequence
  Description of Artificial Sequence: Synthetic oligonucleotide
ctgactctggctattggggct

SEQ ID NO: 20229 - DNA, 21 bp, Artificial Sequence
  Description of Artificial Sequence: Synthetic oligonucleotide
ttgactctgggtcctcgttct

SEQ ID NO: 20230 - DNA, 21 bp, Artificial Sequence
  Description of Artificial Sequence: Synthetic oligonucleotide
ttgactctgcagaagggtacg

SEQ ID NO: 20231 - DNA, 21 bp, Artificial Sequence
  Description of Artificial Sequence: Synthetic oligonucleotide
cttacgttgcagccgattgct

SEQ ID NO: 20232 - DNA, 21 bp, Artificial Sequence
  Description of Artificial Sequence: Synthetic oligonucleotide
ctgacgctgactggttcttct

SEQ ID NO: 20233 - DNA, 21 bp, Artificial Sequence
  Description of Artificial Sequence: Synthetic oligonucleotide
ttgactctgacgtcggctcat

SEQ ID NO: 20234 - DNA, 21 bp, Artificial Sequence
  Description of Artificial Sequence: Synthetic oligonucleotide
ctgacgttggttcatgctgag

SEQ ID NO: 20235 - DNA, 21 bp, Artificial Sequence
  Description of Artificial Sequence: Synthetic oligonucleotide
ttgactatgggttcggcgtct

SEQ ID NO: 20236 - DNA, 21 bp, Artificial Sequence
  Description of Artificial Sequence: Synthetic oligonucleotide
cttacgatgattcagcgggat

SEQ ID NO: 20237 - DNA, 21 bp, Artificial Sequence
  Description of Artificial Sequence: Synthetic oligonucleotide
ttgactatgaggccgccgagt

SEQ ID NO: 20238 - DNA, 21 bp, Artificial Sequence
  Description of Artificial Sequence: Synthetic oligonucleotide
ttgacgatgtcgagggctctt

SEQ ID NO: 20239 - DNA, 21 bp, Artificial Sequence
  Description of Artificial Sequence: Synthetic oligonucleotide
cttacgaatgctcatcatctt

SEQ ID NO: 20240 - DNA, 21 bp, Artificial Sequence
  Description of Artificial Sequence: Synthetic oligonucleotide
ttgacgaatgcgcgtccggcg

SEQ ID NO: 20241 - DNA, 21 bp, Artificial Sequence
  Description of Artificial Sequence: Synthetic oligonucleotide
cttactaatgaggctcatcgg

SEQ ID NO: 20242 - DNA, 21 bp, Artificial Sequence
  Description of Artificial Sequence: Synthetic oligonucleotide
ttgactaataagccgatttgt

SEQ ID NO: 20243 - DNA, 21 bp, Artificial Sequence
  Description of Artificial Sequence: Synthetic oligonucleotide
cttacgaatatgcgtactact

SEQ ID NO: 20244 - DNA, 21 bp, Artificial Sequence
  Description of Artificial Sequence: Synthetic oligonucleotide
ctgacgaataatgagcaggtt

SEQ ID NO: 20245 - DNA, 21 bp, Artificial Sequence
  Description of Artificial Sequence: Synthetic oligonucleotide
ttgactaatcgtcagaatcag

SEQ ID NO: 20246 - DNA, 21 bp, Artificial Sequence
  Description of Artificial Sequence: Synthetic oligonucleotide
ttgacgcctgcgttgggtcct

SEQ ID NO: 20247 - DNA, 21 bp, Artificial Sequence
  Description of Artificial Sequence: Synthetic oligonucleotide
cttactccggctaggacgtat

SEQ ID NO: 20248 - DNA, 21 bp, Artificial Sequence
  Description of Artificial Sequence: Synthetic oligonucleotide
ctgactcctggtcggggggtg

SEQ ID NO: 20249 - DNA, 21 bp, Artificial Sequence
  Description of Artificial Sequence: Synthetic oligonucleotide
ctgacgccgcatgttatggat

SEQ ID NO: 20250 - DNA, 21 bp, Artificial Sequence
  Description of Artificial Sequence: Synthetic oligonucleotide
ttgactccgattaattctgct

SEQ ID NO: 20251 - DNA, 21 bp, Artificial Sequence
  Description of Artificial Sequence: Synthetic oligonucleotide
cttacgccgaagtcgatttct

SEQ ID NO: 20252 - DNA, 21 bp, Artificial Sequence
  Description of Artificial Sequence: Synthetic oligonucleotide
ttgacgccgcttcttggtagt

SEQ ID NO: 20253 - DNA, 21 bp, Artificial Sequence
  Description of Artificial Sequence: Synthetic oligonucleotide
ttgacgccgctgatgtctgat

SEQ ID NO: 20254 - DNA, 21 bp, Artificial Sequence
  Description of Artificial Sequence: Synthetic oligonucleotide
ttgactcctcggttgcctgct

SEQ ID NO: 20255 - DNA, 21 bp, Artificial Sequence
  Description of Artificial Sequence: Synthetic oligonucleotide
cttacgccttctggtcattgg

SEQ ID NO: 20256 - DNA, 21 bp, Artificial Sequence
  Description of Artificial Sequence: Synthetic oligonucleotide
ctgacgccttcggggtataat

SEQ ID NO: 20257 - DNA, 21 bp, Artificial Sequence
  Description of Artificial Sequence: Synthetic oligonucleotide
ctgactccgtcgcagccttat

SEQ ID NO: 20258 - DNA, 21 bp, Artificial Sequence
  Description of Artificial Sequence: Synthetic oligonucleotide
ctgacgccttcggttaagggt

SEQ ID NO: 20259 - DNA, 21 bp, Artificial Sequence
  Description of Artificial Sequence: Synthetic oligonucleotide
ttgactcctagtgttccgcat

SEQ ID NO: 20260 - DNA, 21 bp, Artificial Sequence
  Description of Artificial Sequence: Synthetic oligonucleotide
ctgactcctacgaagatggag

SEQ ID NO: 20261 - DNA, 21 bp, Artificial Sequence
  Description of Artificial Sequence: Synthetic oligonucleotide
cttactcctgtttcgccggat

SEQ ID NO: 20262 - DNA, 21 bp, Artificial Sequence
  Description of Artificial Sequence: Synthetic oligonucleotide
cttacgcagaagactccgtat

SEQ ID NO: 20263 - DNA, 21 bp, Artificial Sequence
  Description of Artificial Sequence: Synthetic oligonucleotide
cttactcagttgagggttact

SEQ ID NO: 20264 - DNA, 21 bp, Artificial Sequence
  Description of Artificial Sequence: Synthetic oligonucleotide
ctgactcagtctcatccggct

SEQ ID NO: 20265 - DNA, 21 bp, Artificial Sequence
  Description of Artificial Sequence: Synthetic oligonucleotide
cttactcggaaggagactgat

SEQ ID NO: 20266 - DNA, 21 bp, Artificial Sequence
  Description of Artificial Sequence: Synthetic oligonucleotide
ctgactaggcctgatgatacg

SEQ ID NO: 20267 - DNA, 21 bp, Artificial Sequence
  Description of Artificial Sequence: Synthetic oligonucleotide
cttactcggcagcattctgat

SEQ ID NO: 20268 - DNA, 21 bp, Artificial Sequence
  Description of Artificial Sequence: Synthetic oligonucleotide
ctgactcggtctccgcctgct

SEQ ID NO: 20269 - DNA, 21 bp, Artificial Sequence
  Description of Artificial Sequence: Synthetic oligonucleotide
ttgacgagtgctccggggcgt

SEQ ID NO: 20270 - DNA, 21 bp, Artificial Sequence
  Description of Artificial Sequence: Synthetic oligonucleotide
ctgacttctggtaagtcgcag

SEQ ID NO: 20271 - DNA, 21 bp, Artificial Sequence
  Description of Artificial Sequence: Synthetic oligonucleotide
ctgacgtctgggccgcttcgg

SEQ ID NO: 20272 - DNA, 21 bp, Artificial Sequence
  Description of Artificial Sequence: Synthetic oligonucleotide
cttacgtcgcatgcgcagtat

SEQ ID NO: 20273 - DNA, 21 bp, Artificial Sequence
  Description of Artificial Sequence: Synthetic oligonucleotide
ttgactagtaagcatttgccg

SEQ ID NO: 20274 - DNA, 21 bp, Artificial Sequence
  Description of Artificial Sequence: Synthetic oligonucleotide
ttgactagtaagcagggttcg

SEQ ID NO: 20275 - DNA, 21 bp, Artificial Sequence
  Description of Artificial Sequence: Synthetic oligonucleotide
ttgacttctctgaagagtgct

SEQ ID NO: 20276 - DNA, 21 bp, Artificial Sequence
  Description of Artificial Sequence: Synthetic oligonucleotide
ttgacttctcttcgtacggag

SEQ ID NO: 20277 - DNA, 21 bp, Artificial Sequence
  Description of Artificial Sequence: Synthetic oligonucleotide
ctgacttcgctttatggtgtt

SEQ ID NO: 20278 - DNA, 21 bp, Artificial Sequence
  Description of Artificial Sequence: Synthetic oligonucleotide
cttactagtaatgagatgagt

SEQ ID NO: 20279 - DNA, 21 bp, Artificial Sequence
  Description of Artificial Sequence: Synthetic oligonucleotide
ctgacgtcgaatagggctttg

SEQ ID NO: 20280 - DNA, 21 bp, Artificial Sequence
  Description of Artificial Sequence: Synthetic oligonucleotide
cttactagtcggacggtgcct

SEQ ID NO: 20281 - DNA, 21 bp, Artificial Sequence
  Description of Artificial Sequence: Synthetic oligonucleotide
ttgacgtctacggctcagagt

SEQ ID NO: 20282 - DNA, 21 bp, Artificial Sequence
  Description of Artificial Sequence: Synthetic oligonucleotide
ttgactagtactaatgggatg

SEQ ID NO: 20283 - DNA, 21 bp, Artificial Sequence
  Description of Artificial Sequence: Synthetic oligonucleotide
ttgactagtactcgtcttagt

SEQ ID NO: 20284 - DNA, 21 bp, Artificial Sequence
  Description of Artificial Sequence: Synthetic oligonucleotide
cttacgactgcgcggcctctt

SEQ ID NO: 20285 - DNA, 21 bp, Artificial Sequence
  Description of Artificial Sequence: Synthetic oligonucleotide
cttacgacgggtgcttatggg

SEQ ID NO: 20286 - DNA, 21 bp, Artificial Sequence
  Description of Artificial Sequence: Synthetic oligonucleotide
cttacgactattagggatgtg

SEQ ID NO: 20287 - DNA, 21 bp, Artificial Sequence
  Description of Artificial Sequence: Synthetic oligonucleotide
ttgacgactaaggctgcgaat

SEQ ID NO: 20288 - DNA, 21 bp, Artificial Sequence
  Description of Artificial Sequence: Synthetic oligonucleotide
cttactacgaagaatatggcg

SEQ ID NO: 20289 - DNA, 21 bp, Artificial Sequence
  Description of Artificial Sequence: Synthetic oligonucleotide
ctgacgactaagcggcttgat

SEQ ID NO: 20290 - DNA, 21 bp, Artificial Sequence
  Description of Artificial Sequence: Synthetic oligonucleotide
cttacgactaagagtcaggat

SEQ ID NO: 20291 - DNA, 21 bp, Artificial Sequence
  Description of Artificial Sequence: Synthetic oligonucleotide
ttgactacgcttcattctaag

SEQ ID NO: 20292 - DNA, 21 bp, Artificial Sequence
  Description of Artificial Sequence: Synthetic oligonucleotide
ctgacgacgatgaatgcgttt

SEQ ID NO: 20293 - DNA, 21 bp, Artificial Sequence
  Description of Artificial Sequence: Synthetic oligonucleotide
ttgactacgatgaggtcgaat

SEQ ID NO: 20294 - DNA, 21 bp, Artificial Sequence
  Description of Artificial Sequence: Synthetic oligonucleotide
ttgactactatgtcgaaggcg

SEQ ID NO: 20295 - DNA, 21 bp, Artificial Sequence
  Description of Artificial Sequence: Synthetic oligonucleotide
cttacgactcctcttccgcat

SEQ ID NO: 20296 - DNA, 21 bp, Artificial Sequence
  Description of Artificial Sequence: Synthetic oligonucleotide
ttgactacgcaggagcattgg

SEQ ID NO: 20297 - DNA, 21 bp, Artificial Sequence
  Description of Artificial Sequence: Synthetic oligonucleotide
ctgactactaggcctgctttt

SEQ ID NO: 20298 - DNA, 21 bp, Artificial Sequence
  Description of Artificial Sequence: Synthetic oligonucleotide
ctgacgacgcggtcgagtccg

SEQ ID NO: 20299 - DNA, 21 bp, Artificial Sequence
  Description of Artificial Sequence: Synthetic oligonucleotide
ttgactacgtcgcttaagcct

SEQ ID NO: 20300 - DNA, 21 bp, Artificial Sequence
  Description of Artificial Sequence: Synthetic oligonucleotide
ttgactacgagttcttttacg

SEQ ID NO: 20301 - DNA, 21 bp, Artificial Sequence
  Description of Artificial Sequence: Synthetic oligonucleotide
ttgactactactattaataat

SEQ ID NO: 20302 - DNA, 21 bp, Artificial Sequence
  Description of Artificial Sequence: Synthetic oligonucleotide
ttgactacgacgccggctaag

SEQ ID NO: 20303 - DNA, 21 bp, Artificial Sequence
  Description of Artificial Sequence: Synthetic oligonucleotide
cttacggtgggggctacgatt

SEQ ID NO: 20304 - DNA, 21 bp, Artificial Sequence
  Description of Artificial Sequence: Synthetic oligonucleotide
ttgactgtgcaggagactcag

SEQ ID NO: 20305 - DNA, 21 bp, Artificial Sequence
  Description of Artificial Sequence: Synthetic oligonucleotide
cttacggtgtcggctgtgaag

SEQ ID NO: 20306 - DNA, 21 bp, Artificial Sequence
  Description of Artificial Sequence: Synthetic oligonucleotide
cttactgtgtctaatctgcct

SEQ ID NO: 20307 - DNA, 21 bp, Artificial Sequence
  Description of Artificial Sequence: Synthetic oligonucleotide
cttactgttacttgggctgag

SEQ ID NO: 20308 - DNA, 21 bp, Artificial Sequence
  Description of Artificial Sequence: Synthetic oligonucleotide
ttgacggtggttcctagtggt

SEQ ID NO: 20309 - DNA, 21 bp, Artificial Sequence
  Description of Artificial Sequence: Synthetic oligonucleotide
ctgacgtattttgtggaggag

SEQ ID NO: 20310 - DNA, 21 bp, Artificial Sequence
  Description of Artificial Sequence: Synthetic oligonucleotide
cttacgtatcctggtagtcag

SEQ ID NO: 20311 - DNA, 21 bp, Artificial Sequence
  Description of Artificial Sequence: Synthetic oligonucleotide
ttgacttatcgtggtggggag

SEQ ID NO: 20312 - DNA, 21 bp, Artificial Sequence
  Description of Artificial Sequence: Synthetic oligonucleotide
cttacttatagtccgcagacg

SEQ ID NO: 20313 - DNA, 21 bp, Artificial Sequence
  Description of Artificial Sequence: Synthetic oligonucleotide
ttgacgtattctcggagtgat

SEQ ID NO: 20314 - DNA, 21 bp, Artificial Sequence
  Description of Artificial Sequence: Synthetic oligonucleotide
ttggttgctaagatgactccg

SEQ ID NO: 20315 - DNA, 21 bp, Artificial Sequence
  Description of Artificial Sequence: Synthetic oligonucleotide
ttggtggcgcgtgggggtgct

SEQ ID NO: 20316 - DNA, 21 bp, Artificial Sequence
  Description of Artificial Sequence: Synthetic oligonucleotide
ctggttgcgacgcaggcgcct

SEQ ID NO: 20317 - DNA, 21 bp, Artificial Sequence
  Description of Artificial Sequence: Synthetic oligonucleotide
cttgtggctgttagtacgact

SEQ ID NO: 20318 - DNA, 21 bp, Artificial Sequence
  Description of Artificial Sequence: Synthetic oligonucleotide
cttgtggattcgcggactatg

SEQ ID NO: 20319 - DNA, 21 bp, Artificial Sequence
  Description of Artificial Sequence: Synthetic oligonucleotide
ctggttgaggggctgattgat

SEQ ID NO: 20320 - DNA, 21 bp, Artificial Sequence
  Description of Artificial Sequence: Synthetic oligonucleotide
ttggttgagaatcgtcgtgag

SEQ ID NO: 20321 - DNA, 21 bp, Artificial Sequence
  Description of Artificial Sequence: Synthetic oligonucleotide
ctggtggagcctatgaagcat

SEQ ID NO: 20322 - DNA, 21 bp, Artificial Sequence
  Description of Artificial Sequence: Synthetic oligonucleotide
cttgtggagacgaagggtagt

SEQ ID NO: 20323 - DNA, 21 bp, Artificial Sequence
  Description of Artificial Sequence: Synthetic oligonucleotide
ttggttgagacgttgactcat

SEQ ID NO: 20324 - DNA, 21 bp, Artificial Sequence
  Description of Artificial Sequence: Synthetic oligonucleotide
ctggttggtgagtcgcatatt

SEQ ID NO: 20325 - DNA, 21 bp, Artificial Sequence
  Description of Artificial Sequence: Synthetic oligonucleotide
ctggtgggtcatcctacgcct

SEQ ID NO: 20326 - DNA, 21 bp, Artificial Sequence
  Description of Artificial Sequence: Synthetic oligonucleotide
ctggtgggtcatactggttct

SEQ ID NO: 20327 - DNA, 21 bp, Artificial Sequence
  Description of Artificial Sequence: Synthetic oligonucleotide
ttggtgggtcaggttgcggtt

SEQ ID NO: 20328 - DNA, 21 bp, Artificial Sequence
  Description of Artificial Sequence: Synthetic oligonucleotide
ttggttgggcgtgcttgttgt

SEQ ID NO: 20329 - DNA, 21 bp, Artificial Sequence
  Description of Artificial Sequence: Synthetic oligonucleotide
ttggttggtcggctgtctacg

SEQ ID NO: 20330 - DNA, 21 bp, Artificial Sequence
  Description of Artificial Sequence: Synthetic oligonucleotide
ctggttggttctcctccttct

SEQ ID NO: 20331 - DNA, 21 bp, Artificial Sequence
  Description of Artificial Sequence: Synthetic oligonucleotide
ctggtgcatttgatgactgat

SEQ ID NO: 20332 - DNA, 21 bp, Artificial Sequence
  Description of Artificial Sequence: Synthetic oligonucleotide
ttggttcataatcggacgtct

SEQ ID NO: 20333 - DNA, 21 bp, Artificial Sequence
  Description of Artificial Sequence: Synthetic oligonucleotide
cttgttcattattctccggat

SEQ ID NO: 20334 - DNA, 21 bp, Artificial Sequence
  Description of Artificial Sequence: Synthetic oligonucleotide
ctggttattccggggcctggt

SEQ ID NO: 20335 - DNA, 21 bp, Artificial Sequence
  Description of Artificial Sequence: Synthetic oligonucleotide
cttgtgaaggagagtcctacg

SEQ ID NO: 20336 - DNA, 21 bp, Artificial Sequence
  Description of Artificial Sequence: Synthetic oligonucleotide
cttgttaagggtgggcctaat

SEQ ID NO: 20337 - DNA, 21 bp, Artificial Sequence
  Description of Artificial Sequence: Synthetic oligonucleotide
cttgtgaagcagactacgctg

SEQ ID NO: 20338 - DNA, 21 bp, Artificial Sequence
  Description of Artificial Sequence: Synthetic oligonucleotide
ctggtgaagtcggttgatcag

SEQ ID NO: 20339 - DNA, 21 bp, Artificial Sequence
  Description of Artificial Sequence: Synthetic oligonucleotide
ctggttcttgggcctcctgcg

SEQ ID NO: 20340 - DNA, 21 bp, Artificial Sequence
  Description of Artificial Sequence: Synthetic oligonucleotide
cttgttttgggtagtaagtct

SEQ ID NO: 20341 - DNA, 21 bp, Artificial Sequence
  Description of Artificial Sequence: Synthetic oligonucleotide
ttggttctgaataatgatggg

SEQ ID NO: 20342 - DNA, 21 bp, Artificial Sequence
  Description of Artificial Sequence: Synthetic oligonucleotide
cttgtgcttccggcgaggcag

SEQ ID NO: 20343 - DNA, 21 bp, Artificial Sequence
  Description of Artificial Sequence: Synthetic oligonucleotide
ttggtgctgccgcagaagagt

SEQ ID NO: 20344 - DNA, 21 bp, Artificial Sequence
  Description of Artificial Sequence: Synthetic oligonucleotide
ctggttttgtcgaatgcgtcg

SEQ ID NO: 20345 - DNA, 21 bp, Artificial Sequence
  Description of Artificial Sequence: Synthetic oligonucleotide
ctggtgatgagtccggctcct

SEQ ID NO: 20346 - DNA, 21 bp, Artificial Sequence
  Description of Artificial Sequence: Synthetic oligonucleotide
ttggttatgtctacgagggcg

SEQ ID NO: 20347 - DNA, 21 bp, Artificial Sequence
  Description of Artificial Sequence: Synthetic oligonucleotide
cttgttatgacgtcggggagt

SEQ ID NO: 20348 - DNA, 21 bp, Artificial Sequence
  Description of Artificial Sequence: Synthetic oligonucleotide
ctggtgaatgattgttgtact

SEQ ID NO: 20349 - DNA, 21 bp, Artificial Sequence
  Description of Artificial Sequence: Synthetic oligonucleotide
ctggtgaatgagacgactcgt

SEQ ID NO: 20350 - DNA, 21 bp, Artificial Sequence
  Description of Artificial Sequence: Synthetic oligonucleotide
cttgttaataagttggggcct

SEQ ID NO: 20351 - DNA, 21 bp, Artificial Sequence
  Description of Artificial Sequence: Synthetic oligonucleotide
ctggttaataagagttataat

SEQ ID NO: 20352 - DNA, 21 bp, Artificial Sequence
  Description of Artificial Sequence: Synthetic oligonucleotide
cttgtgaatcctgggacgcgg

SEQ ID NO: 20353 - DNA, 21 bp, Artificial Sequence
  Description of Artificial Sequence: Synthetic oligonucleotide
ttggttaattctaaggattcg

SEQ ID NO: 20354 - DNA, 21 bp, Artificial Sequence
  Description of Artificial Sequence: Synthetic oligonucleotide
ttggtgaatactcctacggag

SEQ ID NO: 20355 - DNA, 21 bp, Artificial Sequence
  Description of Artificial Sequence: Synthetic oligonucleotide
ctggtgcctgcgcggtctggt

SEQ ID NO: 20356 - DNA, 21 bp, Artificial Sequence
  Description of Artificial Sequence: Synthetic oligonucleotide
ctggttcctgggctgacgggg

SEQ ID NO: 20357 - DNA, 21 bp, Artificial Sequence
  Description of Artificial Sequence: Synthetic oligonucleotide
ttggttcctggtatgattact

SEQ ID NO: 20358 - DNA, 21 bp, Artificial Sequence
  Description of Artificial Sequence: Synthetic oligonucleotide
ctggtgccgggtgttcattct

SEQ ID NO: 20359 - DNA, 21 bp, Artificial Sequence
  Description of Artificial Sequence: Synthetic oligonucleotide
ttggttcctcatagtaatttt

SEQ ID NO: 20360 - DNA, 21 bp, Artificial Sequence
  Description of Artificial Sequence: Synthetic oligonucleotide
cttgtgcctaagcatatgaat

SEQ ID NO: 20361 - DNA, 21 bp, Artificial Sequence
  Description of Artificial Sequence: Synthetic oligonucleotide
ttggttccgttgcttccggct

SEQ ID NO: 20362 - DNA, 21 bp, Artificial Sequence
  Description of Artificial Sequence: Synthetic oligonucleotide
ttggttccgcttcctcattcg

SEQ ID NO: 20363 - DNA, 21 bp, Artificial Sequence
  Description of Artificial Sequence: Synthetic oligonucleotide
cttgttccgctgtatactgag

SEQ ID NO: 20364 - DNA, 21 bp, Artificial Sequence
  Description of Artificial Sequence: Synthetic oligonucleotide
ttggttccgaattttcagcct

SEQ ID NO: 20365 - DNA, 21 bp, Artificial Sequence
  Description of Artificial Sequence: Synthetic oligonucleotide
ctggtgccgaatagtgcggag

SEQ ID NO: 20366 - DNA, 21 bp, Artificial Sequence
  Description of Artificial Sequence: Synthetic oligonucleotide
cttgttccgcgggctgcggat

SEQ ID NO: 20367 - DNA, 21 bp, Artificial Sequence
  Description of Artificial Sequence: Synthetic oligonucleotide
cttgtgccgcgtaatagtctt

SEQ ID NO: 20368 - DNA, 21 bp, Artificial Sequence
  Description of Artificial Sequence: Synthetic oligonucleotide
ttggttccttcgattcagact

SEQ ID NO: 20369 - DNA, 21 bp, Artificial Sequence
  Description of Artificial Sequence: Synthetic oligonucleotide
ttggttccgagtttggagcag

SEQ ID NO: 20370 - DNA, 21 bp, Artificial Sequence
  Description of Artificial Sequence: Synthetic oligonucleotide
cttgtgcctgtgagtttgagt

SEQ ID NO: 20371 - DNA, 21 bp, Artificial Sequence
  Description of Artificial Sequence: Synthetic oligonucleotide
ttggttcagttggatgtggcg

SEQ ID NO: 20372 - DNA, 21 bp, Artificial Sequence
  Description of Artificial Sequence: Synthetic oligonucleotide
ctggtgcagtcgctggggatg

SEQ ID NO: 20373 - DNA, 21 bp, Artificial Sequence
  Description of Artificial Sequence: Synthetic oligonucleotide
cttgtgagggctatggatacg

SEQ ID NO: 20374 - DNA, 21 bp, Artificial Sequence
  Description of Artificial Sequence: Synthetic oligonucleotide
cttgtgcgtggggctagtcat

SEQ ID NO: 20375 - DNA, 21 bp, Artificial Sequence
  Description of Artificial Sequence: Synthetic oligonucleotide
cttgttcggcatgataatttg

SEQ ID NO: 20376 - DNA, 21 bp, Artificial Sequence
  Description of Artificial Sequence: Synthetic oligonucleotide
cttgttcgtaatgggctttcg

SEQ ID NO: 20377 - DNA, 21 bp, Artificial Sequence
  Description of Artificial Sequence: Synthetic oligonucleotide
ctggtgcgtccgtctcctgct

SEQ ID NO: 20378 - DNA, 21 bp, Artificial Sequence
  Description of Artificial Sequence: Synthetic oligonucleotide
cttgtttcgggtcatcatatg

SEQ ID NO: 20379 - DNA, 21 bp, Artificial Sequence
  Description of Artificial Sequence: Synthetic oligonucleotide
cttgtgtcgggtaatcgtgtg

SEQ ID NO: 20380 - DNA, 21 bp, Artificial Sequence
  Description of Artificial Sequence: Synthetic oligonucleotide
cttgttagtgggactgatagg

SEQ ID NO: 20381 - DNA, 21 bp, Artificial Sequence
  Description of Artificial Sequence: Synthetic oligonucleotide
ttggtttctcatcctcggcct

SEQ ID NO: 20382 - DNA, 21 bp, Artificial Sequence
  Description of Artificial Sequence: Synthetic oligonucleotide
ttggtttctcatcggtcggct

SEQ ID NO: 20383 - DNA, 21 bp, Artificial Sequence
  Description of Artificial Sequence: Synthetic oligonucleotide
ctggttagtaaggatgagagt

SEQ ID NO: 20384 - DNA, 21 bp, Artificial Sequence
  Description of Artificial Sequence: Synthetic oligonucleotide
cttgttagtccggctcggccg

SEQ ID NO: 20385 - DNA, 21 bp, Artificial Sequence
  Description of Artificial Sequence: Synthetic oligonucleotide
ctggtttctcctgaggagggg

SEQ ID NO: 20386 - DNA, 21 bp, Artificial Sequence
  Description of Artificial Sequence: Synthetic oligonucleotide
ctggtttcgccttctttgact

SEQ ID NO: 20387 - DNA, 21 bp, Artificial Sequence
  Description of Artificial Sequence: Synthetic oligonucleotide
ctggtgtcgtctaagcatccg

SEQ ID NO: 20388 - DNA, 21 bp, Artificial Sequence
  Description of Artificial Sequence: Synthetic oligonucleotide
cttgtgtcgtcgcctcggact

SEQ ID NO: 20389 - DNA, 21 bp, Artificial Sequence
  Description of Artificial Sequence: Synthetic oligonucleotide
cttgtttcgacgatgactgag

SEQ ID NO: 20390 - DNA, 21 bp, Artificial Sequence
  Description of Artificial Sequence: Synthetic oligonucleotide
cttgtgactgcgggtccgttg

SEQ ID NO: 20391 - DNA, 21 bp, Artificial Sequence
  Description of Artificial Sequence: Synthetic oligonucleotide
cttgttactgcgccgactcct

SEQ ID NO: 20392 - DNA, 21 bp, Artificial Sequence
  Description of Artificial Sequence: Synthetic oligonucleotide
ttggttactgctcagcatccg

SEQ ID NO: 20393 - DNA, 21 bp, Artificial Sequence
  Description of Artificial Sequence: Synthetic oligonucleotide
ctggttacgggggatgctagt

SEQ ID NO: 20394 - DNA, 21 bp, Artificial Sequence
  Description of Artificial Sequence: Synthetic oligonucleotide
ctggtgacgcataattatgct

SEQ ID NO: 20395 - DNA, 21 bp, Artificial Sequence
  Description of Artificial Sequence: Synthetic oligonucleotide
cttgtgacgatgaggccggtt

SEQ ID NO: 20396 - DNA, 21 bp, Artificial Sequence
  Description of Artificial Sequence: Synthetic oligonucleotide
ttggtgacgaatgcgcatagt

SEQ ID NO: 20397 - DNA, 21 bp, Artificial Sequence
  Description of Artificial Sequence: Synthetic oligonucleotide
cttgtgactcctggggatagg

SEQ ID NO: 20398 - DNA, 21 bp, Artificial Sequence
  Description of Artificial Sequence: Synthetic oligonucleotide
ctggttactcagtctaatgag

SEQ ID NO: 20399 - DNA, 21 bp, Artificial Sequence
  Description of Artificial Sequence: Synthetic oligonucleotide
cttgtgacttatactcctatg

SEQ ID NO: 20400 - DNA, 21 bp, Artificial Sequence
  Description of Artificial Sequence: Synthetic oligonucleotide
ttggtggtggctgcgcatttg

SEQ ID NO: 20401 - DNA, 21 bp, Artificial Sequence
  Description of Artificial Sequence: Synthetic oligonucleotide
ttggtggtggcggagaggatt

SEQ ID NO: 20402 - DNA, 21 bp, Artificial Sequence
  Description of Artificial Sequence: Synthetic oligonucleotide
ttggttgttgatgagatgacg

SEQ ID NO: 20403 - DNA, 21 bp, Artificial Sequence
  Description of Artificial Sequence: Synthetic oligonucleotide
cttgttgttaatcgtatggat

SEQ ID NO: 20404 - DNA, 21 bp, Artificial Sequence
  Description of Artificial Sequence: Synthetic oligonucleotide
cttgtggttcctggtaatggt

SEQ ID NO: 20405 - DNA, 21 bp, Artificial Sequence
  Description of Artificial Sequence: Synthetic oligonucleotide
ctggtgtatggtcatgatcat

SEQ ID NO: 20406 - DNA, 21 bp, Artificial Sequence
  Description of Artificial Sequence: Synthetic oligonucleotide
ttggtttatacttcgacgtcg

SEQ ID NO: 20407 - DNA, 21 bp, Artificial Sequence
  Description of Artificial Sequence: Synthetic oligonucleotide
ctgtgggatcttggtaatccg

SEQ ID NO: 20408 - DNA, 21 bp, Artificial Sequence
  Description of Artificial Sequence: Synthetic oligonucleotide
ttgtgggagacttctactgat

SEQ ID NO: 20409 - DNA, 21 bp, Artificial Sequence
  Description of Artificial Sequence: Synthetic oligonucleotide
ctgtggggggatggtacgttg

SEQ ID NO: 20410 - DNA, 21 bp, Artificial Sequence
  Description of Artificial Sequence: Synthetic oligonucleotide
ctgtggaataagcctgatgat

SEQ ID NO: 20411 - DNA, 21 bp, Artificial Sequence
  Description of Artificial Sequence: Synthetic oligonucleotide
ttgtggaattctaatactgct

SEQ ID NO: 20412 - DNA, 21 bp, Artificial Sequence
  Description of Artificial Sequence: Synthetic oligonucleotide
ctgtggcagtctgaggtggat

SEQ ID NO: 20413 - DNA, 21 bp, Artificial Sequence
  Description of Artificial Sequence: Synthetic oligonucleotide
ctgtggcgtgcggatgatgct

SEQ ID NO: 20414 - DNA, 21 bp, Artificial Sequence
  Description of Artificial Sequence: Synthetic oligonucleotide
ttgtggaggtcgtctacgacg

SEQ ID NO: 20415 - DNA, 21 bp, Artificial Sequence
  Description of Artificial Sequence: Synthetic oligonucleotide
ctttggacggctgagcgtgat

SEQ ID NO: 20416 - DNA, 21 bp, Artificial Sequence
  Description of Artificial Sequence: Synthetic oligonucleotide
ttgtggactggttcgggtcct

SEQ ID NO: 20417 - DNA, 21 bp, Artificial Sequence
  Description of Artificial Sequence: Synthetic oligonucleotide
ctttggacgaatcagccgagt

SEQ ID NO: 20418 - DNA, 21 bp, Artificial Sequence
  Description of Artificial Sequence: Synthetic oligonucleotide
ctttatgctaattctaagcct

SEQ ID NO: 20419 - DNA, 21 bp, Artificial Sequence
  Description of Artificial Sequence: Synthetic oligonucleotide
ttgtatgatttgcggggggcg

SEQ ID NO: 20420 - DNA, 21 bp, Artificial Sequence
  Description of Artificial Sequence: Synthetic oligonucleotide
ctgtatgattcgcaggatact

SEQ ID NO: 20421 - DNA, 21 bp, Artificial Sequence
  Description of Artificial Sequence: Synthetic oligonucleotide
ttgtatgatactagtctgctt

SEQ ID NO: 20422 - DNA, 21 bp, Artificial Sequence
  Description of Artificial Sequence: Synthetic oligonucleotide
ctgtatgagcattctagtcct

SEQ ID NO: 20423 - DNA, 21 bp, Artificial Sequence
  Description of Artificial Sequence: Synthetic oligonucleotide
ctttatgagtatcctagtggg

SEQ ID NO: 20424 - DNA, 21 bp, Artificial Sequence
  Description of Artificial Sequence: Synthetic oligonucleotide
ttgtatggtagtttggtgccg

SEQ ID NO: 20425 - DNA, 21 bp, Artificial Sequence
  Description of Artificial Sequence: Synthetic oligonucleotide
ttgtatggtacgtctgcgatt

SEQ ID NO: 20426 - DNA, 21 bp, Artificial Sequence
  Description of Artificial Sequence: Synthetic oligonucleotide
ctgtataagtcgcctgagact

SEQ ID NO: 20427 - DNA, 21 bp, Artificial Sequence
  Description of Artificial Sequence: Synthetic oligonucleotide
ctttatctgggtagtaaggat

SEQ ID NO: 20428 - DNA, 21 bp, Artificial Sequence
  Description of Artificial Sequence: Synthetic oligonucleotide
ttgtatctgcagaatgataag

SEQ ID NO: 20429 - DNA, 21 bp, Artificial Sequence
  Description of Artificial Sequence: Synthetic oligonucleotide
ctgtatcttacgtctcttgat

SEQ ID NO: 20430 - DNA, 21 bp, Artificial Sequence
  Description of Artificial Sequence: Synthetic oligonucleotide
ctgtataatgattttagtttt

SEQ ID NO: 20431 - DNA, 21 bp, Artificial Sequence
  Description of Artificial Sequence: Synthetic oligonucleotide
ttgtataattcttctgattcg

SEQ ID NO: 20432 - DNA, 21 bp, Artificial Sequence
  Description of Artificial Sequence: Synthetic oligonucleotide
ctttatcctcatgctccttct

SEQ ID NO: 20433 - DNA, 21 bp, Artificial Sequence
  Description of Artificial Sequence: Synthetic oligonucleotide
ctttatcctcttcagactgct

SEQ ID NO: 20434 - DNA, 21 bp, Artificial Sequence
  Description of Artificial Sequence: Synthetic oligonucleotide
ttgtatcagggtagtaattct

SEQ ID NO: 20435 - DNA, 21 bp, Artificial Sequence
  Description of Artificial Sequence: Synthetic oligonucleotide
ctttatcagggttatagtgct

SEQ ID NO: 20436 - DNA, 21 bp, Artificial Sequence
  Description of Artificial Sequence: Synthetic oligonucleotide
ctgtattctgctgcgagtaag

SEQ ID NO: 20437 - DNA, 21 bp, Artificial Sequence
  Description of Artificial Sequence: Synthetic oligonucleotide
ctgtatagtgaggttggtttg

SEQ ID NO: 20438 - DNA, 21 bp, Artificial Sequence
  Description of Artificial Sequence: Synthetic oligonucleotide
ctgtattcggggactattcct

SEQ ID NO: 20439 - DNA, 21 bp, Artificial Sequence
  Description of Artificial Sequence: Synthetic oligonucleotide
ctgtattctaatcctaatgtg

SEQ ID NO: 20440 - DNA, 21 bp, Artificial Sequence
  Description of Artificial Sequence: Synthetic oligonucleotide
ttgtattctcctctgtctaat

SEQ ID NO: 20441 - DNA, 21 bp, Artificial Sequence
  Description of Artificial Sequence: Synthetic oligonucleotide
ctgtatactgcgacggcgaag

SEQ ID NO: 20442 - DNA, 21 bp, Artificial Sequence
  Description of Artificial Sequence: Synthetic oligonucleotide
ttgtatacggattctgctttt

SEQ ID NO: 20443 - DNA, 21 bp, Artificial Sequence
  Description of Artificial Sequence: Synthetic oligonucleotide
ttgtatactgggcttgggact

SEQ ID NO: 20444 - DNA, 21 bp, Artificial Sequence
  Description of Artificial Sequence: Synthetic oligonucleotide
ttgtatacgaagaatgagggt

SEQ ID NO: 20445 - DNA, 21 bp, Artificial Sequence
  Description of Artificial Sequence: Synthetic oligonucleotide
ctgtatactaagtcggtgcct

SEQ ID NO: 20446 - DNA, 21 bp, Artificial Sequence
  Description of Artificial Sequence: Synthetic oligonucleotide
ctttatactccgaatggtgct

SEQ ID NO: 20447 - DNA, 21 bp, Artificial Sequence
  Description of Artificial Sequence: Synthetic oligonucleotide
ctttatactagtctgcctcag

SEQ ID NO: 20448 - DNA, 21 bp, Artificial Sequence
  Description of Artificial Sequence: Synthetic oligonucleotide
ctgtatacttctagtgggtcg

SEQ ID NO: 20449 - DNA, 21 bp, Artificial Sequence
  Description of Artificial Sequence: Synthetic oligonucleotide
ttgtatacggttacttcgggg

SEQ ID NO: 20450 - DNA, 21 bp, Artificial Sequence
  Description of Artificial Sequence: Synthetic oligonucleotide
ctgtatgtgtctgagaagcct

SEQ ID NO: 20451 - DNA, 21 bp, Artificial Sequence
  Description of Artificial Sequence: Synthetic oligonucleotide
ttgtattatccgagtacggag

SEQ ID NO: 20452 - DNA, 21 bp, Artificial Sequence
  Description of Artificial Sequence: Synthetic oligonucleotide
atggcggcgttgaatgatttt

SEQ ID NO: 20453 - DNA, 21 bp, Artificial Sequence
  Description of Artificial Sequence: Synthetic oligonucleotide
atggcggcgcaggattatgcg

SEQ ID NO: 20454 - DNA, 21 bp, Artificial Sequence
  Description of Artificial Sequence: Synthetic oligonucleotide
atggcggcgaggactagtaat

SEQ ID NO: 20455 - DNA, 21 bp, Artificial Sequence
  Description of Artificial Sequence: Synthetic oligonucleotide
atggctgctagtaagacgttt

SEQ ID NO: 20456 - DNA, 21 bp, Artificial Sequence
  Description of Artificial Sequence: Synthetic oligonucleotide
atggcggagtttgttcatcgt

SEQ ID NO: 20457 - DNA, 21 bp, Artificial Sequence
  Description of Artificial Sequence: Synthetic oligonucleotide
atggctgggaaggcttctcat

SEQ ID NO: 20458 - DNA, 21 bp, Artificial Sequence
  Description of Artificial Sequence: Synthetic oligonucleotide
atggcggggaatcttgttact

SEQ ID NO: 20459 - DNA, 21 bp, Artificial Sequence
  Description of Artificial Sequence: Synthetic oligonucleotide
atggctaagcttactgtgtct

SEQ ID NO: 20460 - DNA, 21 bp, Artificial Sequence
  Description of Artificial Sequence: Synthetic oligonucleotide
atggcgttgcagggttctctg

SEQ ID NO: 20461 - DNA, 21 bp, Artificial Sequence
  Description of Artificial Sequence: Synthetic oligonucleotide
atggcgcttcggcttgttaat

SEQ ID NO: 20462 - DNA, 21 bp, Artificial Sequence
  Description of Artificial Sequence: Synthetic oligonucleotide
atggctaatatgtcgtcgccg

SEQ ID NO: 20463 - DNA, 21 bp, Artificial Sequence
  Description of Artificial Sequence: Synthetic oligonucleotide
atggctccggtgcgggttcct

SEQ ID NO: 20464 - DNA, 21 bp, Artificial Sequence
  Description of Artificial Sequence: Synthetic oligonucleotide
atggctcgggctcttccgccg

SEQ ID NO: 20465 - DNA, 21 bp, Artificial Sequence
  Description of Artificial Sequence: Synthetic oligonucleotide
atggctcgggatgtggatcgg

SEQ ID NO: 20466 - DNA, 21 bp, Artificial Sequence
  Description of Artificial Sequence: Synthetic oligonucleotide
atggcgcgtgagacgacttat

SEQ ID NO: 20467 - DNA, 21 bp, Artificial Sequence
  Description of Artificial Sequence: Synthetic oligonucleotide
atggcgagtgctacgccggtt

SEQ ID NO: 20468 - DNA, 21 bp, Artificial Sequence
  Description of Artificial Sequence: Synthetic oligonucleotide
atggcgtcggggcagtcgctg

SEQ ID NO: 20469 - DNA, 21 bp, Artificial Sequence
  Description of Artificial Sequence: Synthetic oligonucleotide
atggcgtcgcatgttcctgtg

SEQ ID NO: 20470 - DNA, 21 bp, Artificial Sequence
  Description of Artificial Sequence: Synthetic oligonucleotide
atggcgtctccttattcgagt

SEQ ID NO: 20471 - DNA, 21 bp, Artificial Sequence
  Description of Artificial Sequence: Synthetic oligonucleotide
atggcttctcagattaggcct

SEQ ID NO: 20472 - DNA, 21 bp, Artificial Sequence
  Description of Artificial Sequence: Synthetic oligonucleotide
atggcgtcttcgtataatgat

SEQ ID NO: 20473 - DNA, 21 bp, Artificial Sequence
  Description of Artificial Sequence: Synthetic oligonucleotide
atggcttctactgagtcgcgt

SEQ ID NO: 20474 - DNA, 21 bp, Artificial Sequence
  Description of Artificial Sequence: Synthetic oligonucleotide
atggcgacggcgcctcttcat

SEQ ID NO: 20475 - DNA, 21 bp, Artificial Sequence
  Description of Artificial Sequence: Synthetic oligonucleotide
atggctactgatcggaggtat

SEQ ID NO: 20476 - DNA, 21 bp, Artificial Sequence
  Description of Artificial Sequence: Synthetic oligonucleotide
atggctactcatgtgatgggg

SEQ ID NO: 20477 - DNA, 21 bp, Artificial Sequence
  Description of Artificial Sequence: Synthetic oligonucleotide
atggctgttaaggttggtgag

SEQ ID NO: 20478 - DNA, 21 bp, Artificial Sequence
  Description of Artificial Sequence: Synthetic oligonucleotide
atggcgtatcagccgacgctg

SEQ ID NO: 20479 - DNA, 21 bp, Artificial Sequence
  Description of Artificial Sequence: Synthetic oligonucleotide
atggcgtatcagcagattcct

SEQ ID NO: 20480 - DNA, 21 bp, Artificial Sequence
  Description of Artificial Sequence: Synthetic oligonucleotide
atgtgtgattctgatcgtcct

SEQ ID NO: 20481 - DNA, 21 bp, Artificial Sequence
  Description of Artificial Sequence: Synthetic oligonucleotide
atggatgatagggcggggttt

SEQ ID NO: 20482 - DNA, 21 bp, Artificial Sequence
  Description of Artificial Sequence: Synthetic oligonucleotide
atggatgagcctgagccttct

SEQ ID NO: 20483 - DNA, 21 bp, Artificial Sequence
  Description of Artificial Sequence: Synthetic oligonucleotide
atggataagattcttacttct

SEQ ID NO: 20484 - DNA, 21 bp, Artificial Sequence
  Description of Artificial Sequence: Synthetic oligonucleotide
atggatttgactgggccggtg

SEQ ID NO: 20485 - DNA, 21 bp, Artificial Sequence
  Description of Artificial Sequence: Synthetic oligonucleotide
atggatatgggtggtagtcct

SEQ ID NO: 20486 - DNA, 21 bp, Artificial Sequence
  Description of Artificial Sequence: Synthetic oligonucleotide
atggataatttgaggcagtcg

SEQ ID NO: 20487 - DNA, 21 bp, Artificial Sequence
  Description of Artificial Sequence: Synthetic oligonucleotide
atggatcgggcgttgcatggg

SEQ ID NO: 20488 - DNA, 21 bp, Artificial Sequence
  Description of Artificial Sequence: Synthetic oligonucleotide
atggataggatgactttgatg

SEQ ID NO: 20489 - DNA, 21 bp, Artificial Sequence
  Description of Artificial Sequence: Synthetic oligonucleotide
atggatcgtaattttgtgatg

SEQ ID NO: 20490 - DNA, 21 bp, Artificial Sequence
  Description of Artificial Sequence: Synthetic oligonucleotide
atggatcggccttcgacttcg

SEQ ID NO: 20491 - DNA, 21 bp, Artificial Sequence
  Description of Artificial Sequence: Synthetic oligonucleotide
atggattcggctgattatgag

SEQ ID NO: 20492 - DNA, 21 bp, Artificial Sequence
  Description of Artificial Sequence: Synthetic oligonucleotide
atggattcgcttccgccgccg

SEQ ID NO: 20493 - DNA, 21 bp, Artificial Sequence
  Description of Artificial Sequence: Synthetic oligonucleotide
atggatagtaggacgcttctt

SEQ ID NO: 20494 - DNA, 21 bp, Artificial Sequence
  Description of Artificial Sequence: Synthetic oligonucleotide
atggatagtacttcgccgccg

SEQ ID NO: 20495 - DNA, 21 bp, Artificial Sequence
  Description of Artificial Sequence: Synthetic oligonucleotide
atggatgtttcgcatgggagt

SEQ ID NO: 20496 - DNA, 21 bp, Artificial Sequence
  Description of Artificial Sequence: Synthetic oligonucleotide
atggagtttggtacgacgcct

SEQ ID NO: 20497 - DNA, 21 bp, Artificial Sequence
  Description of Artificial Sequence: Synthetic oligonucleotide
atggagtttgtttcgacgttt

SEQ ID NO: 20498 - DNA, 21 bp, Artificial Sequence
  Description of Artificial Sequence: Synthetic oligonucleotide
atggagggttctggtcgtaat

SEQ ID NO: 20499 - DNA, 21 bp, Artificial Sequence
  Description of Artificial Sequence: Synthetic oligonucleotide
atggagattgagtcgctgaat

SEQ ID NO: 20500 - DNA, 21 bp, Artificial Sequence
  Description of Artificial Sequence: Synthetic oligonucleotide
atggagattacgcgtgcgcct

SEQ ID NO: 20501 - DNA, 21 bp, Artificial Sequence
  Description of Artificial Sequence: Synthetic oligonucleotide
atggagaaggctacgccgtct

SEQ ID NO: 20502 - DNA, 21 bp, Artificial Sequence
  Description of Artificial Sequence: Synthetic oligonucleotide
atggagaagctgaagcagaat

SEQ ID NO: 20503 - DNA, 21 bp, Artificial Sequence
  Description of Artificial Sequence: Synthetic oligonucleotide
atggagttgattgagggtcct

SEQ ID NO: 20504 - DNA, 21 bp, Artificial Sequence
  Description of Artificial Sequence: Synthetic oligonucleotide
atggagaatacgacgcggagt

SEQ ID NO: 20505 - DNA, 21 bp, Artificial Sequence
  Description of Artificial Sequence: Synthetic oligonucleotide
atggagccgaagcgttcttat

SEQ ID NO: 20506 - DNA, 21 bp, Artificial Sequence
  Description of Artificial Sequence: Synthetic oligonucleotide
atggagcctccgattaatccg

SEQ ID NO: 20507 - DNA, 21 bp, Artificial Sequence
  Description of Artificial Sequence: Synthetic oligonucleotide
atggagaggactctttgtaat

SEQ ID NO: 20508 - DNA, 21 bp, Artificial Sequence
  Description of Artificial Sequence: Synthetic oligonucleotide
atggagagtcttggtctggcg

SEQ ID NO: 20509 - DNA, 21 bp, Artificial Sequence
  Description of Artificial Sequence: Synthetic oligonucleotide
atggagtcgaatcattctcgt

SEQ ID NO: 20510 - DNA, 21 bp, Artificial Sequence
  Description of Artificial Sequence: Synthetic oligonucleotide
atggagagtcgtcctagttat

SEQ ID NO: 20511 - DNA, 21 bp, Artificial Sequence
  Description of Artificial Sequence: Synthetic oligonucleotide
atggagacgaagtctatttct

SEQ ID NO: 20512 - DNA, 21 bp, Artificial Sequence
  Description of Artificial Sequence: Synthetic oligonucleotide
atggagactaattggcctgcg

SEQ ID NO: 20513 - DNA, 21 bp, Artificial Sequence
  Description of Artificial Sequence: Synthetic oligonucleotide
atggagacgtcgcatcgtatg

SEQ ID NO: 20514 - DNA, 21 bp, Artificial Sequence
  Description of Artificial Sequence: Synthetic oligonucleotide
atgtttgggaatgctgagtat

SEQ ID NO: 20515 - DNA, 21 bp, Artificial Sequence
  Description of Artificial Sequence: Synthetic oligonucleotide
atgtttgggacgtcgcaggat

SEQ ID NO: 20516 - DNA, 21 bp, Artificial Sequence
  Description of Artificial Sequence: Synthetic oligonucleotide
atgtttctgaaggtgtcgcct

SEQ ID NO: 20517 - DNA, 21 bp, Artificial Sequence
  Description of Artificial Sequence: Synthetic oligonucleotide
atgtttcgggtggtttcggat

SEQ ID NO: 20518 - DNA, 21 bp, Artificial Sequence
  Description of Artificial Sequence: Synthetic oligonucleotide
atgttttcgtctactaagcct

SEQ ID NO: 20519 - DNA, 21 bp, Artificial Sequence
  Description of Artificial Sequence: Synthetic oligonucleotide
atgtttactgattctcgttct

SEQ ID NO: 20520 - DNA, 21 bp, Artificial Sequence
  Description of Artificial Sequence: Synthetic oligonucleotide
atgtttgtgaatgagctgaag

SEQ ID NO: 20521 - DNA, 21 bp, Artificial Sequence
  Description of Artificial Sequence: Synthetic oligonucleotide
atgggggctacgcatcctcgg

SEQ ID NO: 20522 - DNA, 21 bp, Artificial Sequence
  Description of Artificial Sequence: Synthetic oligonucleotide
atgggggatcgtagtcgtaat

SEQ ID NO: 20523 - DNA, 21 bp, Artificial Sequence
  Description of Artificial Sequence: Synthetic oligonucleotide
atgggtgattatactactaag

SEQ ID NO: 20524 - DNA, 21 bp, Artificial Sequence
  Description of Artificial Sequence: Synthetic oligonucleotide
atgggtgagaggcttttttct

SEQ ID NO: 20525 - DNA, 21 bp, Artificial Sequence
  Description of Artificial Sequence: Synthetic oligonucleotide
atgggtggtcatggtcgtact

SEQ ID NO: 20526 - DNA, 21 bp, Artificial Sequence
  Description of Artificial Sequence: Synthetic oligonucleotide
atgggtggtaattcgccgttt

SEQ ID NO: 20527 - DNA, 21 bp, Artificial Sequence
  Description of Artificial Sequence: Synthetic oligonucleotide
atggggggtacgagggggact

SEQ ID NO: 20528 - DNA, 21 bp, Artificial Sequence
  Description of Artificial Sequence: Synthetic oligonucleotide
atgggtggtacgtattgtcgt

SEQ ID NO: 20529 - DNA, 21 bp, Artificial Sequence
  Description of Artificial Sequence: Synthetic oligonucleotide
atggggcattcggatacgccg

SEQ ID NO: 20530 - DNA, 21 bp, Artificial Sequence
  Description of Artificial Sequence: Synthetic oligonucleotide
atgggtcatactcctagggag

SEQ ID NO: 20531 - DNA, 21 bp, Artificial Sequence
  Description of Artificial Sequence: Synthetic oligonucleotide
atgggtaagactgctgagcgt

SEQ ID NO: 20532 - DNA, 21 bp, Artificial Sequence
  Description of Artificial Sequence: Synthetic oligonucleotide
atgggtcttgggtcgtctaat

SEQ ID NO: 20533 - DNA, 21 bp, Artificial Sequence
  Description of Artificial Sequence: Synthetic oligonucleotide
atggggttgcggccggagggt

SEQ ID NO: 20534 - DNA, 21 bp, Artificial Sequence
  Description of Artificial Sequence: Synthetic oligonucleotide
atggggatgcatgggacgagt

SEQ ID NO: 20535 - DNA, 21 bp, Artificial Sequence
  Description of Artificial Sequence: Synthetic oligonucleotide
atgggtaatcatgcgggttcg

SEQ ID NO: 20536 - DNA, 21 bp, Artificial Sequence
  Description of Artificial Sequence: Synthetic oligonucleotide
atggggaattcgcttaagcag

SEQ ID NO: 20537 - DNA, 21 bp, Artificial Sequence
  Description of Artificial Sequence: Synthetic oligonucleotide
atggggccggatggttcgatt

SEQ ID NO: 20538 - DNA, 21 bp, Artificial Sequence
  Description of Artificial Sequence: Synthetic oligonucleotide
atgggtccgattacgcctcag

SEQ ID NO: 20539 - DNA, 21 bp, Artificial Sequence
  Description of Artificial Sequence: Synthetic oligonucleotide
atggggcagaatatggcgttg

SEQ ID NO: 20540 - DNA, 21 bp, Artificial Sequence
  Description of Artificial Sequence: Synthetic oligonucleotide
atggggcgtgatgagcctggt

SEQ ID NO: 20541 - DNA, 21 bp, Artificial Sequence
  Description of Artificial Sequence: Synthetic oligonucleotide
atgggtagtggttatactatg

SEQ ID NO: 20542 - DNA, 21 bp, Artificial Sequence
  Description of Artificial Sequence: Synthetic oligonucleotide
atgggttctacgattgctttg

SEQ ID NO: 20543 - DNA, 21 bp, Artificial Sequence
  Description of Artificial Sequence: Synthetic oligonucleotide
atgggttctgttcataatctg

SEQ ID NO: 20544 - DNA, 21 bp, Artificial Sequence
  Description of Artificial Sequence: Synthetic oligonucleotide
atggggagtgttattggtact

SEQ ID NO: 20545 - DNA, 21 bp, Artificial Sequence
  Description of Artificial Sequence: Synthetic oligonucleotide
atgggtacgacgcatacttct

SEQ ID NO: 20546 - DNA, 21 bp, Artificial Sequence
  Description of Artificial Sequence: Synthetic oligonucleotide
atgggtactactcctacgctt

SEQ ID NO: 20547 - DNA, 21 bp, Artificial Sequence
  Description of Artificial Sequence: Synthetic oligonucleotide
atgggtgtgcggaatgcggcg

SEQ ID NO: 20548 - DNA, 21 bp, Artificial Sequence
  Description of Artificial Sequence: Synthetic oligonucleotide
atgggttatcttacgggtgag

SEQ ID NO: 20549 - DNA, 21 bp, Artificial Sequence
  Description of Artificial Sequence: Synthetic oligonucleotide
atgcatgatgctgataagccg

SEQ ID NO: 20550 - DNA, 21 bp, Artificial Sequence
  Description of Artificial Sequence: Synthetic oligonucleotide
atgcatgattttcctgagctt

SEQ ID NO: 20551 - DNA, 21 bp, Artificial Sequence
  Description of Artificial Sequence: Synthetic oligonucleotide
atgcatgatagtccgcaggct

SEQ ID NO: 20552 - DNA, 21 bp, Artificial Sequence
  Description of Artificial Sequence: Synthetic oligonucleotide
atgcatgagtctctgtatccg

SEQ ID NO: 20553 - DNA, 21 bp, Artificial Sequence
  Description of Artificial Sequence: Synthetic oligonucleotide
atgcatttttcggctgagccg

SEQ ID NO: 20554 - DNA, 21 bp, Artificial Sequence
  Description of Artificial Sequence: Synthetic oligonucleotide
atgcatcatgcgacggcgccg

SEQ ID NO: 20555 - DNA, 21 bp, Artificial Sequence
  Description of Artificial Sequence: Synthetic oligonucleotide
atgcatcctgcgcctctgcgg

SEQ ID NO: 20556 - DNA, 21 bp, Artificial Sequence
  Description of Artificial Sequence: Synthetic oligonucleotide
atgcatcctggtggtgggtct

SEQ ID NO: 20557 - DNA, 21 bp, Artificial Sequence
  Description of Artificial Sequence: Synthetic oligonucleotide
atgcatcagcgggatggtgct

SEQ ID NO: 20558 - DNA, 21 bp, Artificial Sequence
  Description of Artificial Sequence: Synthetic oligonucleotide
atgcatcagacttcgatgggg

SEQ ID NO: 20559 - DNA, 21 bp, Artificial Sequence
  Description of Artificial Sequence: Synthetic oligonucleotide
atgcattctaagggtgcgaat

SEQ ID NO: 20560 - DNA, 21 bp, Artificial Sequence
  Description of Artificial Sequence: Synthetic oligonucleotide
atgcatagtccgcagactcat

SEQ ID NO: 20561 - DNA, 21 bp, Artificial Sequence
  Description of Artificial Sequence: Synthetic oligonucleotide
atgcattcttctcctctggat

SEQ ID NO: 20562 - DNA, 21 bp, Artificial Sequence
  Description of Artificial Sequence: Synthetic oligonucleotide
atgcattctactgttcctgcg

SEQ ID NO: 20563 - DNA, 21 bp, Artificial Sequence
  Description of Artificial Sequence: Synthetic oligonucleotide
atgattgatcgtgttcgtact

SEQ ID NO: 20564 - DNA, 21 bp, Artificial Sequence
  Description of Artificial Sequence: Synthetic oligonucleotide
atgattgagattaaggagctt

SEQ ID NO: 20565 - DNA, 21 bp, Artificial Sequence
  Description of Artificial Sequence: Synthetic oligonucleotide
atgattgaggtgctgccgtcg

SEQ ID NO: 20566 - DNA, 21 bp, Artificial Sequence
  Description of Artificial Sequence: Synthetic oligonucleotide
atgattggtgatgctccggct

SEQ ID NO: 20567 - DNA, 21 bp, Artificial Sequence
  Description of Artificial Sequence: Synthetic oligonucleotide
atgattggtaagagtacggat

SEQ ID NO: 20568 - DNA, 21 bp, Artificial Sequence
  Description of Artificial Sequence: Synthetic oligonucleotide
atgattaagaaggattatgcg

SEQ ID NO: 20569 - DNA, 21 bp, Artificial Sequence
  Description of Artificial Sequence: Synthetic oligonucleotide
atgattaagacgaatagtgtt

SEQ ID NO: 20570 - DNA, 21 bp, Artificial Sequence
  Description of Artificial Sequence: Synthetic oligonucleotide
atgattaatgctaatacgaat

SEQ ID NO: 20571 - DNA, 21 bp, Artificial Sequence
  Description of Artificial Sequence: Synthetic oligonucleotide
atgattcctgttaggccggat

SEQ ID NO: 20572 - DNA, 21 bp, Artificial Sequence
  Description of Artificial Sequence: Synthetic oligonucleotide
atgatttctgagccgttgact

SEQ ID NO: 20573 - DNA, 21 bp, Artificial Sequence
  Description of Artificial Sequence: Synthetic oligonucleotide
atgattagtggtcggacgact

SEQ ID NO: 20574 - DNA, 21 bp, Artificial Sequence
  Description of Artificial Sequence: Synthetic oligonucleotide
atgatttcgcatcagcctccg

SEQ ID NO: 20575 - DNA, 21 bp, Artificial Sequence
  Description of Artificial Sequence: Synthetic oligonucleotide
atgatttctattcagcagacg

SEQ ID NO: 20576 - DNA, 21 bp, Artificial Sequence
  Description of Artificial Sequence: Synthetic oligonucleotide
atgattagttctatgttgggg

SEQ ID NO: 20577 - DNA, 21 bp, Artificial Sequence
  Description of Artificial Sequence: Synthetic oligonucleotide
atgattgttactactcctgag

SEQ ID NO: 20578 - DNA, 21 bp, Artificial Sequence
  Description of Artificial Sequence: Synthetic oligonucleotide
atgaaggcggcggttagggag

SEQ ID NO: 20579 - DNA, 21 bp, Artificial Sequence
  Description of Artificial Sequence: Synthetic oligonucleotide
atgaaggcggatccggagtgg

SEQ ID NO: 20580 - DNA, 21 bp, Artificial Sequence
  Description of Artificial Sequence: Synthetic oligonucleotide
atgaaggataataatgttact

SEQ ID NO: 20581 - DNA, 21 bp, Artificial Sequence
  Description of Artificial Sequence: Synthetic oligonucleotide
atgaagcatgctgcgcagctg

SEQ ID NO: 20582 - DNA, 21 bp, Artificial Sequence
  Description of Artificial Sequence: Synthetic oligonucleotide
atgaagcatcctcagtataat

SEQ ID NO: 20583 - DNA, 21 bp, Artificial Sequence
  Description of Artificial Sequence: Synthetic oligonucleotide
atgaagatgaatcggaatgag

SEQ ID NO: 20584 - DNA, 21 bp, Artificial Sequence
  Description of Artificial Sequence: Synthetic oligonucleotide
atgaagccgggtttgcctatg

SEQ ID NO: 20585 - DNA, 21 bp, Artificial Sequence
  Description of Artificial Sequence: Synthetic oligonucleotide
atgaagccgcttgctgcgtct

SEQ ID NO: 20586 - DNA, 21 bp, Artificial Sequence
  Description of Artificial Sequence: Synthetic oligonucleotide
atgaagcctacgagtcaggtt

SEQ ID NO: 20587 - DNA, 21 bp, Artificial Sequence
  Description of Artificial Sequence: Synthetic oligonucleotide
atgaagagtgggctgacgatg

SEQ ID NO: 20588 - DNA, 21 bp, Artificial Sequence
  Description of Artificial Sequence: Synthetic oligonucleotide
atgaagagtattattccgtcg

SEQ ID NO: 20589 - DNA, 21 bp, Artificial Sequence
  Description of Artificial Sequence: Synthetic oligonucleotide
atgaagagtccttatgggctg

SEQ ID NO: 20590 - DNA, 21 bp, Artificial Sequence
  Description of Artificial Sequence: Synthetic oligonucleotide
atgaagtcgcagtcggatcct

SEQ ID NO: 20591 - DNA, 21 bp, Artificial Sequence
  Description of Artificial Sequence: Synthetic oligonucleotide
atgaagtcttctgagtcgcgt

SEQ ID NO: 20592 - DNA, 21 bp, Artificial Sequence
  Description of Artificial Sequence: Synthetic oligonucleotide
atgaagactgagcttcctgcg

SEQ ID NO: 20593 - DNA, 21 bp, Artificial Sequence
  Description of Artificial Sequence: Synthetic oligonucleotide
atgaagacgcctcctcagagt

SEQ ID NO: 20594 - DNA, 21 bp, Artificial Sequence
  Description of Artificial Sequence: Synthetic oligonucleotide
atgaagtgggatggtaaggcg

SEQ ID NO: 20595 - DNA, 21 bp, Artificial Sequence
  Description of Artificial Sequence: Synthetic oligonucleotide
atgaagtattcggatattggg

SEQ ID NO: 20596 - DNA, 21 bp, Artificial Sequence
  Description of Artificial Sequence: Synthetic oligonucleotide
atgcttgatgatattaatgag

SEQ ID NO: 20597 - DNA, 21 bp, Artificial Sequence
  Description of Artificial Sequence: Synthetic oligonucleotide
atgctggatactactaagcgg

SEQ ID NO: 20598 - DNA, 21 bp, Artificial Sequence
  Description of Artificial Sequence: Synthetic oligonucleotide
atgcttgagatgaatcagact

SEQ ID NO: 20599 - DNA, 21 bp, Artificial Sequence
  Description of Artificial Sequence: Synthetic oligonucleotide
atgctggggcatctgacggct

SEQ ID NO: 20600 - DNA, 21 bp, Artificial Sequence
  Description of Artificial Sequence: Synthetic oligonucleotide
atgcttggtcttagtcatacg

SEQ ID NO: 20601 - DNA, 21 bp, Artificial Sequence
  Description of Artificial Sequence: Synthetic oligonucleotide
atgctgcatccgactgcgacg

SEQ ID NO: 20602 - DNA, 21 bp, Artificial Sequence
  Description of Artificial Sequence: Synthetic oligonucleotide
atgcttcatagtagtggggcg

SEQ ID NO: 20603 - DNA, 21 bp, Artificial Sequence
  Description of Artificial Sequence: Synthetic oligonucleotide
atgcttaagtatacggagcat

SEQ ID NO: 20604 - DNA, 21 bp, Artificial Sequence
  Description of Artificial Sequence: Synthetic oligonucleotide
atgctgttgcctactactaag

SEQ ID NO: 20605 - DNA, 21 bp, Artificial Sequence
  Description of Artificial Sequence: Synthetic oligonucleotide
atgttgccggattctaatgct

SEQ ID NO: 20606 - DNA, 21 bp, Artificial Sequence
  Description of Artificial Sequence: Synthetic oligonucleotide
atgctgccgtttgatactgat

SEQ ID NO: 20607 - DNA, 21 bp, Artificial Sequence
  Description of Artificial Sequence: Synthetic oligonucleotide
atgttgccgggggattcggct

SEQ ID NO: 20608 - DNA, 21 bp, Artificial Sequence
  Description of Artificial Sequence: Synthetic oligonucleotide
atgcttcctgggactcctcat

SEQ ID NO: 20609 - DNA, 21 bp, Artificial Sequence
  Description of Artificial Sequence: Synthetic oligonucleotide
atgttgcaggggcagttgagt

SEQ ID NO: 20610 - DNA, 21 bp, Artificial Sequence
  Description of Artificial Sequence: Synthetic oligonucleotide
atgttgcagaatgggcagcgt

SEQ ID NO: 20611 - DNA, 21 bp, Artificial Sequence
  Description of Artificial Sequence: Synthetic oligonucleotide
atgttgcggattgcgggtgat

SEQ ID NO: 20612 - DNA, 21 bp, Artificial Sequence
  Description of Artificial Sequence: Synthetic oligonucleotide
atgttgcggcagggtcttcag

SEQ ID NO: 20613 - DNA, 21 bp, Artificial Sequence
  Description of Artificial Sequence: Synthetic oligonucleotide
atgcttaggacgtcgcaggat

SEQ ID NO: 20614 - DNA, 21 bp, Artificial Sequence
  Description of Artificial Sequence: Synthetic oligonucleotide
atgctttctggtgagatgcat

SEQ ID NO: 20615 - DNA, 21 bp, Artificial Sequence
  Description of Artificial Sequence: Synthetic oligonucleotide
atgctttctaatgaggttatt

SEQ ID NO: 20616 - DNA, 21 bp, Artificial Sequence
  Description of Artificial Sequence: Synthetic oligonucleotide
atgcttagtcgtgatgatcag

SEQ ID NO: 20617 - DNA, 21 bp, Artificial Sequence
  Description of Artificial Sequence: Synthetic oligonucleotide
atgctgtctaggcttgcgcag

SEQ ID NO: 20618 - DNA, 21 bp, Artificial Sequence
  Description of Artificial Sequence: Synthetic oligonucleotide
atgatggatcggattgagggg

SEQ ID NO: 20619 - DNA, 21 bp, Artificial Sequence
  Description of Artificial Sequence: Synthetic oligonucleotide
atgatggagttgcagcttcct

SEQ ID NO: 20620 - DNA, 21 bp, Artificial Sequence
  Description of Artificial Sequence: Synthetic oligonucleotide
atgatggggaattctaagggg

SEQ ID NO: 20621 - DNA, 21 bp, Artificial Sequence
  Description of Artificial Sequence: Synthetic oligonucleotide
atgatgcatgcgggtgctcag

SEQ ID NO: 20622 - DNA, 21 bp, Artificial Sequence
  Description of Artificial Sequence: Synthetic oligonucleotide
atgatgcatcaggaggatagt

SEQ ID NO: 20623 - DNA, 21 bp, Artificial Sequence
  Description of Artificial Sequence: Synthetic oligonucleotide
atgatgaatatgaggggtggg

SEQ ID NO: 20624 - DNA, 21 bp, Artificial Sequence
  Description of Artificial Sequence: Synthetic oligonucleotide
atgatgccgcaggagattgtg

SEQ ID NO: 20625 - DNA, 21 bp, Artificial Sequence
  Description of Artificial Sequence: Synthetic oligonucleotide
atgatgtcggataatgcgaag

SEQ ID NO: 20626 - DNA, 21 bp, Artificial Sequence
  Description of Artificial Sequence: Synthetic oligonucleotide
atgatgactgattctcagcgt

SEQ ID NO: 20627 - DNA, 21 bp, Artificial Sequence
  Description of Artificial Sequence: Synthetic oligonucleotide
atgatgacgggggcgtcggat

SEQ ID NO: 20628 - DNA, 21 bp, Artificial Sequence
  Description of Artificial Sequence: Synthetic oligonucleotide
atgatgacgaagactggtact

SEQ ID NO: 20629 - DNA, 21 bp, Artificial Sequence
  Description of Artificial Sequence: Synthetic oligonucleotide
atgatgacgtctgctgggcct

SEQ ID NO: 20630 - DNA, 21 bp, Artificial Sequence
  Description of Artificial Sequence: Synthetic oligonucleotide
atgaatgcgtttaagcaggag

SEQ ID NO: 20631 - DNA, 21 bp, Artificial Sequence
  Description of Artificial Sequence: Synthetic oligonucleotide
atgaatgcgaagtgttgtagt

SEQ ID NO: 20632 - DNA, 21 bp, Artificial Sequence
  Description of Artificial Sequence: Synthetic oligonucleotide
atgaatgcgcggttgattgat

SEQ ID NO: 20633 - DNA, 21 bp, Artificial Sequence
  Description of Artificial Sequence: Synthetic oligonucleotide
atgaatgcttcggcgaatagt

SEQ ID NO: 20634 - DNA, 21 bp, Artificial Sequence
  Description of Artificial Sequence: Synthetic oligonucleotide
atgaatgcgtctacgatgatt

SEQ ID NO: 20635 - DNA, 21 bp, Artificial Sequence
  Description of Artificial Sequence: Synthetic oligonucleotide
atgaatggtagtcttcctatg

SEQ ID NO: 20636 - DNA, 21 bp, Artificial Sequence
  Description of Artificial Sequence: Synthetic oligonucleotide
atgaatgggagtcgtcagatg

SEQ ID NO: 20637 - DNA, 21 bp, Artificial Sequence
  Description of Artificial Sequence: Synthetic oligonucleotide
atgaatcatggtgcgaattat

SEQ ID NO: 20638 - DNA, 21 bp, Artificial Sequence
  Description of Artificial Sequence: Synthetic oligonucleotide
atgaataaggcttcgtttgct

SEQ ID NO: 20639 - DNA, 21 bp, Artificial Sequence
  Description of Artificial Sequence: Synthetic oligonucleotide
atgaataagggtacggttgcg

SEQ ID NO: 20640 - DNA, 21 bp, Artificial Sequence
  Description of Artificial Sequence: Synthetic oligonucleotide
atgaataagcttaaggttgag

SEQ ID NO: 20641 - DNA, 21 bp, Artificial Sequence
  Description of Artificial Sequence: Synthetic oligonucleotide
atgaatttgcataatcctgct

SEQ ID NO: 20642 - DNA, 21 bp, Artificial Sequence
  Description of Artificial Sequence: Synthetic oligonucleotide
atgaatcttaagcttagtccg

SEQ ID NO: 20643 - DNA, 21 bp, Artificial Sequence
  Description of Artificial Sequence: Synthetic oligonucleotide
atgaatttgcggatggctccg

SEQ ID NO: 20644 - DNA, 21 bp, Artificial Sequence
  Description of Artificial Sequence: Synthetic oligonucleotide
atgaatctgtctacgaagcct

SEQ ID NO: 20645 - DNA, 21 bp, Artificial Sequence
  Description of Artificial Sequence: Synthetic oligonucleotide
atgaataatctttctgggcgg

SEQ ID NO: 20646 - DNA, 21 bp, Artificial Sequence
  Description of Artificial Sequence: Synthetic oligonucleotide
atgaatccgatttcgaagtgt

SEQ ID NO: 20647 - DNA, 21 bp, Artificial Sequence
  Description of Artificial Sequence: Synthetic oligonucleotide
atgaatcctcttccgtatcct

SEQ ID NO: 20648 - DNA, 21 bp, Artificial Sequence
  Description of Artificial Sequence: Synthetic oligonucleotide
atgaatccttctgttgagctt

SEQ ID NO: 20649 - DNA, 21 bp, Artificial Sequence
  Description of Artificial Sequence: Synthetic oligonucleotide
atgaatcagacgaagccttat

SEQ ID NO: 20650 - DNA, 21 bp, Artificial Sequence
  Description of Artificial Sequence: Synthetic oligonucleotide
atgaatcaggtgaggagtctt

SEQ ID NO: 20651 - DNA, 21 bp, Artificial Sequence
  Description of Artificial Sequence: Synthetic oligonucleotide
atgaatcggattgttatgtct

SEQ ID NO: 20652 - DNA, 21 bp, Artificial Sequence
  Description of Artificial Sequence: Synthetic oligonucleotide
atgaatagtggttgtgaggat

SEQ ID NO: 20653 - DNA, 21 bp, Artificial Sequence
  Description of Artificial Sequence: Synthetic oligonucleotide
atgaattctggtatgccgttt

SEQ ID NO: 20654 - DNA, 21 bp, Artificial Sequence
  Description of Artificial Sequence: Synthetic oligonucleotide
atgaattctaagggtgagccg

SEQ ID NO: 20655 - DNA, 21 bp, Artificial Sequence
  Description of Artificial Sequence: Synthetic oligonucleotide
atgaatagtaagatgtatcct

SEQ ID NO: 20656 - DNA, 21 bp, Artificial Sequence
  Description of Artificial Sequence: Synthetic oligonucleotide
atgaattctcttcctcgttcg

SEQ ID NO: 20657 - DNA, 21 bp, Artificial Sequence
  Description of Artificial Sequence: Synthetic oligonucleotide
atgaattctcgtaatgggtat

SEQ ID NO: 20658 - DNA, 21 bp, Artificial Sequence
  Description of Artificial Sequence: Synthetic oligonucleotide
atgaattctacgttggctgct

SEQ ID NO: 20659 - DNA, 21 bp, Artificial Sequence
  Description of Artificial Sequence: Synthetic oligonucleotide
atgaattctacgactacgcct

SEQ ID NO: 20660 - DNA, 21 bp, Artificial Sequence
  Description of Artificial Sequence: Synthetic oligonucleotide
atgaatactaagacgtttccg

SEQ ID NO: 20661 - DNA, 21 bp, Artificial Sequence
  Description of Artificial Sequence: Synthetic oligonucleotide
atgaatacttcggtggtgtat

SEQ ID NO: 20662 - DNA, 21 bp, Artificial Sequence
  Description of Artificial Sequence: Synthetic oligonucleotide
atgaatgttgttgggcagtct

SEQ ID NO: 20663 - DNA, 21 bp, Artificial Sequence
  Description of Artificial Sequence: Synthetic oligonucleotide
atgccggctcatgttctgcct

SEQ ID NO: 20664 - DNA, 21 bp, Artificial Sequence
  Description of Artificial Sequence: Synthetic oligonucleotide
atgccggcgtcttcggtttcg

SEQ ID NO: 20665 - DNA, 21 bp, Artificial Sequence
  Description of Artificial Sequence: Synthetic oligonucleotide
atgcctgctacgtttacggat

SEQ ID NO: 20666 - DNA, 21 bp, Artificial Sequence
  Description of Artificial Sequence: Synthetic oligonucleotide
atgcctgatgctaagatttcg

SEQ ID NO: 20667 - DNA, 21 bp, Artificial Sequence
  Description of Artificial Sequence: Synthetic oligonucleotide
atgcctgatcatcctcttcgg

SEQ ID NO: 20668 - DNA, 21 bp, Artificial Sequence
  Description of Artificial Sequence: Synthetic oligonucleotide
atgccggagagtatgaatacg

SEQ ID NO: 20669 - DNA, 21 bp, Artificial Sequence
  Description of Artificial Sequence: Synthetic oligonucleotide
atgccttttaatgataatgtt

SEQ ID NO: 20670 - DNA, 21 bp, Artificial Sequence
  Description of Artificial Sequence: Synthetic oligonucleotide
atgccgcatgggagttttgct

SEQ ID NO: 20671 - DNA, 21 bp, Artificial Sequence
  Description of Artificial Sequence: Synthetic oligonucleotide
atgccgcatttggagatgaat

SEQ ID NO: 20672 - DNA, 21 bp, Artificial Sequence
  Description of Artificial Sequence: Synthetic oligonucleotide
atgcctcatcttattacgagt

SEQ ID NO: 20673 - DNA, 21 bp, Artificial Sequence
  Description of Artificial Sequence: Synthetic oligonucleotide
atgcctcatatgggtctgacg

SEQ ID NO: 20674 - DNA, 21 bp, Artificial Sequence
  Description of Artificial Sequence: Synthetic oligonucleotide
atgccgatttcgccgttggcg

SEQ ID NO: 20675 - DNA, 21 bp, Artificial Sequence
  Description of Artificial Sequence: Synthetic oligonucleotide
atgccgattgttcgtattagt

SEQ ID NO: 20676 - DNA, 21 bp, Artificial Sequence
  Description of Artificial Sequence: Synthetic oligonucleotide
atgcctaagcaggagttgatt

SEQ ID NO: 20677 - DNA, 21 bp, Artificial Sequence
  Description of Artificial Sequence: Synthetic oligonucleotide
atgcctttggatagtgtggcg

SEQ ID NO: 20678 - DNA, 21 bp, Artificial Sequence
  Description of Artificial Sequence: Synthetic oligonucleotide
atgccgcttggtggtgcgtat

SEQ ID NO: 20679 - DNA, 21 bp, Artificial Sequence
  Description of Artificial Sequence: Synthetic oligonucleotide
atgcctttgcggaatactatg

SEQ ID NO: 20680 - DNA, 21 bp, Artificial Sequence
  Description of Artificial Sequence: Synthetic oligonucleotide
atgccgcttagtaatagttcg

SEQ ID NO: 20681 - DNA, 21 bp, Artificial Sequence
  Description of Artificial Sequence: Synthetic oligonucleotide
atgccgatgggggatccgatt

SEQ ID NO: 20682 - DNA, 21 bp, Artificial Sequence
  Description of Artificial Sequence: Synthetic oligonucleotide
atgcctatgatgctgcgtctt

SEQ ID NO: 20683 - DNA, 21 bp, Artificial Sequence
  Description of Artificial Sequence: Synthetic oligonucleotide
atgcctatgaatcggactcct

SEQ ID NO: 20684 - DNA, 21 bp, Artificial Sequence
  Description of Artificial Sequence: Synthetic oligonucleotide
atgccgatgcgtgctaatggg

SEQ ID NO: 20685 - DNA, 21 bp, Artificial Sequence
  Description of Artificial Sequence: Synthetic oligonucleotide
atgccgaatgttcctcctacg

SEQ ID NO: 20686 - DNA, 21 bp, Artificial Sequence
  Description of Artificial Sequence: Synthetic oligonucleotide
atgccgcctgctcttctgacg

SEQ ID NO: 20687 - DNA, 21 bp, Artificial Sequence
  Description of Artificial Sequence: Synthetic oligonucleotide
atgccgcctgaggttcctgtt

SEQ ID NO: 20688 - DNA, 21 bp, Artificial Sequence
  Description of Artificial Sequence: Synthetic oligonucleotide
atgcctccgccgaatcttaat

SEQ ID NO: 20689 - DNA, 21 bp, Artificial Sequence
  Description of Artificial Sequence: Synthetic oligonucleotide
atgcctccgcagaatgcgatg

SEQ ID NO: 20690 - DNA, 21 bp, Artificial Sequence
  Description of Artificial Sequence: Synthetic oligonucleotide
atgcctccttcgaatcggcct

SEQ ID NO: 20691 - DNA, 21 bp, Artificial Sequence
  Description of Artificial Sequence: Synthetic oligonucleotide
atgcctccttctacgtatgcg

SEQ ID NO: 20692 - DNA, 21 bp, Artificial Sequence
  Description of Artificial Sequence: Synthetic oligonucleotide
atgcctcagttgcatgagact

SEQ ID NO: 20693 - DNA, 21 bp, Artificial Sequence
  Description of Artificial Sequence: Synthetic oligonucleotide
atgccgcagtcgcgtgatgag

SEQ ID NO: 20694 - DNA, 21 bp, Artificial Sequence
  Description of Artificial Sequence: Synthetic oligonucleotide
atgcctagggatgcgtatggt

SEQ ID NO: 20695 - DNA, 21 bp, Artificial Sequence
  Description of Artificial Sequence: Synthetic oligonucleotide
atgccgcgtggggagattccg

SEQ ID NO: 20696 - DNA, 21 bp, Artificial Sequence
  Description of Artificial Sequence: Synthetic oligonucleotide
atgccgaggaatggtccgcct

SEQ ID NO: 20697 - DNA, 21 bp, Artificial Sequence
  Description of Artificial Sequence: Synthetic oligonucleotide
atgcctcgtgtggcgtctaat

SEQ ID NO: 20698 - DNA, 21 bp, Artificial Sequence
  Description of Artificial Sequence: Synthetic oligonucleotide
atgcctagtgcttctgaggtt

SEQ ID NO: 20699 - DNA, 21 bp, Artificial Sequence
  Description of Artificial Sequence: Synthetic oligonucleotide
atgccttcgggtagggttcat

SEQ ID NO: 20700 - DNA, 21 bp, Artificial Sequence
  Description of Artificial Sequence: Synthetic oligonucleotide
atgccgtcgggtcgtgttcct

SEQ ID NO: 20701 - DNA, 21 bp, Artificial Sequence
  Description of Artificial Sequence: Synthetic oligonucleotide
atgccgtcgatttctctgcct

SEQ ID NO: 20702 - DNA, 21 bp, Artificial Sequence
  Description of Artificial Sequence: Synthetic oligonucleotide
atgccgtctaatagtatttct

SEQ ID NO: 20703 - DNA, 21 bp, Artificial Sequence
  Description of Artificial Sequence: Synthetic oligonucleotide
atgccgtctccggaggtgtat

SEQ ID NO: 20704 - DNA, 21 bp, Artificial Sequence
  Description of Artificial Sequence: Synthetic oligonucleotide
atgcctacggatcctaagatg

SEQ ID NO: 20705 - DNA, 21 bp, Artificial Sequence
  Description of Artificial Sequence: Synthetic oligonucleotide
atgccgacgggtactgatctt

SEQ ID NO: 20706 - DNA, 21 bp, Artificial Sequence
  Description of Artificial Sequence: Synthetic oligonucleotide
atgcctacgcctcggactggt

SEQ ID NO: 20707 - DNA, 21 bp, Artificial Sequence
  Description of Artificial Sequence: Synthetic oligonucleotide
atgcctacgtctgggcctccg

SEQ ID NO: 20708 - DNA, 21 bp, Artificial Sequence
  Description of Artificial Sequence: Synthetic oligonucleotide
atgcctacttatgataagcgt

SEQ ID NO: 20709 - DNA, 21 bp, Artificial Sequence
  Description of Artificial Sequence: Synthetic oligonucleotide
atgcctgtgccggagaggcct

SEQ ID NO: 20710 - DNA, 21 bp, Artificial Sequence
  Description of Artificial Sequence: Synthetic oligonucleotide
atgccggtgagtggtcatgtt

SEQ ID NO: 20711 - DNA, 21 bp, Artificial Sequence
  Description of Artificial Sequence: Synthetic oligonucleotide
atgcctgtgtcgcgtctggag

SEQ ID NO: 20712 - DNA, 21 bp, Artificial Sequence
  Description of Artificial Sequence: Synthetic oligonucleotide
atgcctgttagtagtactcgt

SEQ ID NO: 20713 - DNA, 21 bp, Artificial Sequence
  Description of Artificial Sequence: Synthetic oligonucleotide
atgccgtggaaggatgcggct

SEQ ID NO: 20714 - DNA, 21 bp, Artificial Sequence
  Description of Artificial Sequence: Synthetic oligonucleotide
atgcaggcggcttcttctcct

SEQ ID NO: 20715 - DNA, 21 bp, Artificial Sequence
  Description of Artificial Sequence: Synthetic oligonucleotide
atgcaggctggtagtatgcgt

SEQ ID NO: 20716 - DNA, 21 bp, Artificial Sequence
  Description of Artificial Sequence: Synthetic oligonucleotide
atgcaggctagtcattctccg

SEQ ID NO: 20717 - DNA, 21 bp, Artificial Sequence
  Description of Artificial Sequence: Synthetic oligonucleotide
atgcaggatgggtatacgaat

SEQ ID NO: 20718 - DNA, 21 bp, Artificial Sequence
  Description of Artificial Sequence: Synthetic oligonucleotide
atgcaggggaagttgttggct

SEQ ID NO: 20719 - DNA, 21 bp, Artificial Sequence
  Description of Artificial Sequence: Synthetic oligonucleotide
atgcagcatggtgctcatcct

SEQ ID NO: 20720 - DNA, 21 bp, Artificial Sequence
  Description of Artificial Sequence: Synthetic oligonucleotide
atgcagcttgagcattctcct

SEQ ID NO: 20721 - DNA, 21 bp, Artificial Sequence
  Description of Artificial Sequence: Synthetic oligonucleotide
atgcagcttggtaatgtttcg

SEQ ID NO: 20722 - DNA, 21 bp, Artificial Sequence
  Description of Artificial Sequence: Synthetic oligonucleotide
atgcagcttggtcctgtgatg

SEQ ID NO: 20723 - DNA, 21 bp, Artificial Sequence
  Description of Artificial Sequence: Synthetic oligonucleotide
atgcagaatatgcctccgccg

SEQ ID NO: 20724 - DNA, 21 bp, Artificial Sequence
  Description of Artificial Sequence: Synthetic oligonucleotide
atgcagccgaatacgtcgttt

SEQ ID NO: 20725 - DNA, 21 bp, Artificial Sequence
  Description of Artificial Sequence: Synthetic oligonucleotide
atgcagcgtaggcttgatatt

SEQ ID NO: 20726 - DNA, 21 bp, Artificial Sequence
  Description of Artificial Sequence: Synthetic oligonucleotide
atgcagaggacgactcatgtt

SEQ ID NO: 20727 - DNA, 21 bp, Artificial Sequence
  Description of Artificial Sequence: Synthetic oligonucleotide
atgcagtcgcgtgttcctttg

SEQ ID NO: 20728 - DNA, 21 bp, Artificial Sequence
  Description of Artificial Sequence: Synthetic oligonucleotide
atgcagtcttcgcctgatggg

SEQ ID NO: 20729 - DNA, 21 bp, Artificial Sequence
  Description of Artificial Sequence: Synthetic oligonucleotide
atgcagacggcgacgcagggt

SEQ ID NO: 20730 - DNA, 21 bp, Artificial Sequence
  Description of Artificial Sequence: Synthetic oligonucleotide
atgcagactcagtctcttcct

SEQ ID NO: 20731 - DNA, 21 bp, Artificial Sequence
  Description of Artificial Sequence: Synthetic oligonucleotide
atgcaggtgtctgagaggcct

SEQ ID NO: 20732 - DNA, 21 bp, Artificial Sequence
  Description of Artificial Sequence: Synthetic oligonucleotide
atgcaggtttctgggccgcct

SEQ ID NO: 20733 - DNA, 21 bp, Artificial Sequence
  Description of Artificial Sequence: Synthetic oligonucleotide
atgcaggtgactgaggggctt

SEQ ID NO: 20734 - DNA, 21 bp, Artificial Sequence
  Description of Artificial Sequence: Synthetic oligonucleotide
atgcgggctggggcggcgggt

SEQ ID NO: 20735 - DNA, 21 bp, Artificial Sequence
  Description of Artificial Sequence: Synthetic oligonucleotide
atgcgggcttctgcggggatg

SEQ ID NO: 20736 - DNA, 21 bp, Artificial Sequence
  Description of Artificial Sequence: Synthetic oligonucleotide
atgcgggatgatgcggctgtt

SEQ ID NO: 20737 - DNA, 21 bp, Artificial Sequence
  Description of Artificial Sequence: Synthetic oligonucleotide
atgcgtgatggtcctccgaat

SEQ ID NO: 20738 - DNA, 21 bp, Artificial Sequence
  Description of Artificial Sequence: Synthetic oligonucleotide
atgcgggagcggtcgagtgct

SEQ ID NO: 20739 - DNA, 21 bp, Artificial Sequence
  Description of Artificial Sequence: Synthetic oligonucleotide
atgaggggtgattcggcgcct

SEQ ID NO: 20740 - DNA, 21 bp, Artificial Sequence
  Description of Artificial Sequence: Synthetic oligonucleotide
atgaggggttttgatgagttg

SEQ ID NO: 20741 - DNA, 21 bp, Artificial Sequence
  Description of Artificial Sequence: Synthetic oligonucleotide
atgcggggtacgccggttggt

SEQ ID NO: 20742 - DNA, 21 bp, Artificial Sequence
  Description of Artificial Sequence: Synthetic oligonucleotide
atgcggcatgggaatcctgcg

SEQ ID NO: 20743 - DNA, 21 bp, Artificial Sequence
  Description of Artificial Sequence: Synthetic oligonucleotide
atgcggcatgttaatacgccg

SEQ ID NO: 20744 - DNA, 21 bp, Artificial Sequence
  Description of Artificial Sequence: Synthetic oligonucleotide
atgcggattggggataggcat

SEQ ID NO: 20745 - DNA, 21 bp, Artificial Sequence
  Description of Artificial Sequence: Synthetic oligonucleotide
atgcgtttgagtacgccggag

SEQ ID NO: 20746 - DNA, 21 bp, Artificial Sequence
  Description of Artificial Sequence: Synthetic oligonucleotide
atgaggttggtgtcggcggag

SEQ ID NO: 20747 - DNA, 21 bp, Artificial Sequence
  Description of Artificial Sequence: Synthetic oligonucleotide
atgcggatggcggtgagtgct

SEQ ID NO: 20748 - DNA, 21 bp, Artificial Sequence
  Description of Artificial Sequence: Synthetic oligonucleotide
atgaggatggggggtgtgcct

SEQ ID NO: 20749 - DNA, 21 bp, Artificial Sequence
  Description of Artificial Sequence: Synthetic oligonucleotide
atgaggaatgcggctaagagg

SEQ ID NO: 20750 - DNA, 21 bp, Artificial Sequence
  Description of Artificial Sequence: Synthetic oligonucleotide
atgaggaattcggtgtatccg

SEQ ID NO: 20751 - DNA, 21 bp, Artificial Sequence
  Description of Artificial Sequence: Synthetic oligonucleotide
atgcggaatacgacgtttgag

SEQ ID NO: 20752 - DNA, 21 bp, Artificial Sequence
  Description of Artificial Sequence: Synthetic oligonucleotide
atgcgtccggctaatgagtcg

SEQ ID NO: 20753 - DNA, 21 bp, Artificial Sequence
  Description of Artificial Sequence: Synthetic oligonucleotide
atgcggccggcggtgggggtt

SEQ ID NO: 20754 - DNA, 21 bp, Artificial Sequence
  Description of Artificial Sequence: Synthetic oligonucleotide
atgaggccgggtttggagggt

SEQ ID NO: 20755 - DNA, 21 bp, Artificial Sequence
  Description of Artificial Sequence: Synthetic oligonucleotide
atgaggccgacgcatgcgtgt

SEQ ID NO: 20756 - DNA, 21 bp, Artificial Sequence
  Description of Artificial Sequence: Synthetic oligonucleotide
atgcggcctactaatgctact

SEQ ID NO: 20757 - DNA, 21 bp, Artificial Sequence
  Description of Artificial Sequence: Synthetic oligonucleotide
atgcggcagattggttatcat

SEQ ID NO: 20758 - DNA, 21 bp, Artificial Sequence
  Description of Artificial Sequence: Synthetic oligonucleotide
atgcgtcaggttgggcgtgag

SEQ ID NO: 20759 - DNA, 21 bp, Artificial Sequence
  Description of Artificial Sequence: Synthetic oligonucleotide
atgaggtcgttttcttatgag

SEQ ID NO: 20760 - DNA, 21 bp, Artificial Sequence
  Description of Artificial Sequence: Synthetic oligonucleotide
atgaggagtaatgatgtggtt

SEQ ID NO: 20761 - DNA, 21 bp, Artificial Sequence
  Description of Artificial Sequence: Synthetic oligonucleotide
atgcggagtccgccgttgtat

SEQ ID NO: 20762 - DNA, 21 bp, Artificial Sequence
  Description of Artificial Sequence: Synthetic oligonucleotide
atgcggtctcagagttttagt

SEQ ID NO: 20763 - DNA, 21 bp, Artificial Sequence
  Description of Artificial Sequence: Synthetic oligonucleotide
atgcggtctcgtgtggatact

SEQ ID NO: 20764 - DNA, 21 bp, Artificial Sequence
  Description of Artificial Sequence: Synthetic oligonucleotide
atgaggtctgtgattgcgcag

SEQ ID NO: 20765 - DNA, 21 bp, Artificial Sequence
  Description of Artificial Sequence: Synthetic oligonucleotide
atgcgtacggagtcgactttg

SEQ ID NO: 20766 - DNA, 21 bp, Artificial Sequence
  Description of Artificial Sequence: Synthetic oligonucleotide
atgcgtacgaatagtagtact

SEQ ID NO: 20767 - DNA, 21 bp, Artificial Sequence
  Description of Artificial Sequence: Synthetic oligonucleotide
atgcgtacttctaatactgct

SEQ ID NO: 20768 - DNA, 21 bp, Artificial Sequence
  Description of Artificial Sequence: Synthetic oligonucleotide
atgcgtgttaatactgatcct

SEQ ID NO: 20769 - DNA, 21 bp, Artificial Sequence
  Description of Artificial Sequence: Synthetic oligonucleotide
atgcgtgtgtcgactgcggcg

SEQ ID NO: 20770 - DNA, 21 bp, Artificial Sequence
  Description of Artificial Sequence: Synthetic oligonucleotide
atgcgttatgctccgggtacg

SEQ ID NO: 20771 - DNA, 21 bp, Artificial Sequence
  Description of Artificial Sequence: Synthetic oligonucleotide
atgagtgctgataggttttcg

SEQ ID NO: 20772 - DNA, 21 bp, Artificial Sequence
  Description of Artificial Sequence: Synthetic oligonucleotide
atgagtgctaagacttatctt

SEQ ID NO: 20773 - DNA, 21 bp, Artificial Sequence
  Description of Artificial Sequence: Synthetic oligonucleotide
atgagtgcttcgattggttct

SEQ ID NO: 20774 - DNA, 21 bp, Artificial Sequence
  Description of Artificial Sequence: Synthetic oligonucleotide
atgtctgctgtgttgccgcat

SEQ ID NO: 20775 - DNA, 21 bp, Artificial Sequence
  Description of Artificial Sequence: Synthetic oligonucleotide
atgtctgatcagctgcggttt

SEQ ID NO: 20776 - DNA, 21 bp, Artificial Sequence
  Description of Artificial Sequence: Synthetic oligonucleotide
atgtcggattcgcattcgcgt

SEQ ID NO: 20777 - DNA, 21 bp, Artificial Sequence
  Description of Artificial Sequence: Synthetic oligonucleotide
atgtcggattggaatggtatt

SEQ ID NO: 20778 - DNA, 21 bp, Artificial Sequence
  Description of Artificial Sequence: Synthetic oligonucleotide
atgtctgagatgagtactcat

SEQ ID NO: 20779 - DNA, 21 bp, Artificial Sequence
  Description of Artificial Sequence: Synthetic oligonucleotide
atgagtggtgggtcgtcttat

SEQ ID NO: 20780 - DNA, 21 bp, Artificial Sequence
  Description of Artificial Sequence: Synthetic oligonucleotide
atgtctgggaatcatgctact

SEQ ID NO: 20781 - DNA, 21 bp, Artificial Sequence
  Description of Artificial Sequence: Synthetic oligonucleotide
atgtcgggtccgcagttgagt

SEQ ID NO: 20782 - DNA, 21 bp, Artificial Sequence
  Description of Artificial Sequence: Synthetic oligonucleotide
atgagtgggcgtggtcagatt

SEQ ID NO: 20783 - DNA, 21 bp, Artificial Sequence
  Description of Artificial Sequence: Synthetic oligonucleotide
atgtctcatcatagtactacg

SEQ ID NO: 20784 - DNA, 21 bp, Artificial Sequence
  Description of Artificial Sequence: Synthetic oligonucleotide
atgtctcatccgtataagccg

SEQ ID NO: 20785 - DNA, 21 bp, Artificial Sequence
  Description of Artificial Sequence: Synthetic oligonucleotide
atgtctcattatctgaaggct

SEQ ID NO: 20786 - DNA, 21 bp, Artificial Sequence
  Description of Artificial Sequence: Synthetic oligonucleotide
atgtcgattgatgaggctgag

SEQ ID NO: 20787 - DNA, 21 bp, Artificial Sequence
  Description of Artificial Sequence: Synthetic oligonucleotide
atgtctattggtacgtcggag

SEQ ID NO: 20788 - DNA, 21 bp, Artificial Sequence
  Description of Artificial Sequence: Synthetic oligonucleotide
atgtctattattggtggtgtt

SEQ ID NO: 20789 - DNA, 21 bp, Artificial Sequence
  Description of Artificial Sequence: Synthetic oligonucleotide
atgtctatttctcatactacg

SEQ ID NO: 20790 - DNA, 21 bp, Artificial Sequence
  Description of Artificial Sequence: Synthetic oligonucleotide
atgtcgattactcatcattct

SEQ ID NO: 20791 - DNA, 21 bp, Artificial Sequence
  Description of Artificial Sequence: Synthetic oligonucleotide
atgtcgaagatttggccgtct

SEQ ID NO: 20792 - DNA, 21 bp, Artificial Sequence
  Description of Artificial Sequence: Synthetic oligonucleotide
atgtctaagaatttgtcggct

SEQ ID NO: 20793 - DNA, 21 bp, Artificial Sequence
  Description of Artificial Sequence: Synthetic oligonucleotide
atgagtaagaggactgattcg

SEQ ID NO: 20794 - DNA, 21 bp, Artificial Sequence
  Description of Artificial Sequence: Synthetic oligonucleotide
atgagtaagactattgcgcag

SEQ ID NO: 20795 - DNA, 21 bp, Artificial Sequence
  Description of Artificial Sequence: Synthetic oligonucleotide
atgtcgaaggtgccttttaat

SEQ ID NO: 20796 - DNA, 21 bp, Artificial Sequence
  Description of Artificial Sequence: Synthetic oligonucleotide
atgtcgttggcgaataagagt

SEQ ID NO: 20797 - DNA, 21 bp, Artificial Sequence
  Description of Artificial Sequence: Synthetic oligonucleotide
atgtctctgaagctgtctggt

SEQ ID NO: 20798 - DNA, 21 bp, Artificial Sequence
  Description of Artificial Sequence: Synthetic oligonucleotide
atgtctttgccgtcgactcag

SEQ ID NO: 20799 - DNA, 21 bp, Artificial Sequence
  Description of Artificial Sequence: Synthetic oligonucleotide
atgtctttgacggttacggct

SEQ ID NO: 20800 - DNA, 21 bp, Artificial Sequence
  Description of Artificial Sequence: Synthetic oligonucleotide
atgtctatgcatgggggttct

SEQ ID NO: 20801 - DNA, 21 bp, Artificial Sequence
  Description of Artificial Sequence: Synthetic oligonucleotide
atgtcgaatgggtggcaggat

SEQ ID NO: 20802 - DNA, 21 bp, Artificial Sequence
  Description of Artificial Sequence: Synthetic oligonucleotide
atgagtaatattggtctgggt

SEQ ID NO: 20803 - DNA, 21 bp, Artificial Sequence
  Description of Artificial Sequence: Synthetic oligonucleotide
atgtctaataatcatggtctt

SEQ ID NO: 20804 - DNA, 21 bp, Artificial Sequence
  Description of Artificial Sequence: Synthetic oligonucleotide
atgtctaattcggagtttggt

SEQ ID NO: 20805 - DNA, 21 bp, Artificial Sequence
  Description of Artificial Sequence: Synthetic oligonucleotide
atgagtcctgctatgcagacg

SEQ ID NO: 20806 - DNA, 21 bp, Artificial Sequence
  Description of Artificial Sequence: Synthetic oligonucleotide
atgagtcctgatcagaggtat

SEQ ID NO: 20807 - DNA, 21 bp, Artificial Sequence
  Description of Artificial Sequence: Synthetic oligonucleotide
atgtctcctggtgttaatgct

SEQ ID NO: 20808 - DNA, 21 bp, Artificial Sequence
  Description of Artificial Sequence: Synthetic oligonucleotide
atgtctccgcattttaatacg

SEQ ID NO: 20809 - DNA, 21 bp, Artificial Sequence
  Description of Artificial Sequence: Synthetic oligonucleotide
atgagtccgatggtgactgcg

SEQ ID NO: 20810 - DNA, 21 bp, Artificial Sequence
  Description of Artificial Sequence: Synthetic oligonucleotide
atgtctccgtctgattttggt

SEQ ID NO: 20811 - DNA, 21 bp, Artificial Sequence
  Description of Artificial Sequence: Synthetic oligonucleotide
atgagtccttctagtcctatg

SEQ ID NO: 20812 - DNA, 21 bp, Artificial Sequence
  Description of Artificial Sequence: Synthetic oligonucleotide
atgtctcagcagtcgagtggt

SEQ ID NO: 20813 - DNA, 21 bp, Artificial Sequence
  Description of Artificial Sequence: Synthetic oligonucleotide
atgtctcagcgtagggatcct

SEQ ID NO: 20814 - DNA, 21 bp, Artificial Sequence
  Description of Artificial Sequence: Synthetic oligonucleotide
atgagtcgggatgtgtcgcat

SEQ ID NO: 20815 - DNA, 21 bp, Artificial Sequence
  Description of Artificial Sequence: Synthetic oligonucleotide
atgtctcgtgagtcgggtggg

SEQ ID NO: 20816 - DNA, 21 bp, Artificial Sequence
  Description of Artificial Sequence: Synthetic oligonucleotide
atgtcgaggttggattctccg

SEQ ID NO: 20817 - DNA, 21 bp, Artificial Sequence
  Description of Artificial Sequence: Synthetic oligonucleotide
atgagtcggcttggtgcgacg

SEQ ID NO: 20818 - DNA, 21 bp, Artificial Sequence
  Description of Artificial Sequence: Synthetic oligonucleotide
atgtctcgtaatttgtgttgt

SEQ ID NO: 20819 - DNA, 21 bp, Artificial Sequence
  Description of Artificial Sequence: Synthetic oligonucleotide
atgagttcggcgtctagtcct

SEQ ID NO: 20820 - DNA, 21 bp, Artificial Sequence
  Description of Artificial Sequence: Synthetic oligonucleotide
atgtctagtgagccggttaag

SEQ ID NO: 20821 - DNA, 21 bp, Artificial Sequence
  Description of Artificial Sequence: Synthetic oligonucleotide
atgtcgtctcatggtgtggct

SEQ ID NO: 20822 - DNA, 21 bp, Artificial Sequence
  Description of Artificial Sequence: Synthetic oligonucleotide
atgtcgagtcttaattctctt

SEQ ID NO: 20823 - DNA, 21 bp, Artificial Sequence
  Description of Artificial Sequence: Synthetic oligonucleotide
atgtcgtcgcttaatgttcat

SEQ ID NO: 20824 - DNA, 21 bp, Artificial Sequence
  Description of Artificial Sequence: Synthetic oligonucleotide
atgtctagtctgcggcaggcg

SEQ ID NO: 20825 - DNA, 21 bp, Artificial Sequence
  Description of Artificial Sequence: Synthetic oligonucleotide
atgtcgtcgcctcagttgagt

SEQ ID NO: 20826 - DNA, 21 bp, Artificial Sequence
  Description of Artificial Sequence: Synthetic oligonucleotide
atgagttctcagacttctaag

SEQ ID NO: 20827 - DNA, 21 bp, Artificial Sequence
  Description of Artificial Sequence: Synthetic oligonucleotide
atgtcgagtcgttgggcggcg

SEQ ID NO: 20828 - DNA, 21 bp, Artificial Sequence
  Description of Artificial Sequence: Synthetic oligonucleotide
atgagttcttctgtgcatact

SEQ ID NO: 20829 - DNA, 21 bp, Artificial Sequence
  Description of Artificial Sequence: Synthetic oligonucleotide
atgtcgagtactcgtactgat

SEQ ID NO: 20830 - DNA, 21 bp, Artificial Sequence
  Description of Artificial Sequence: Synthetic oligonucleotide
atgtcgagtacttcgtatagt

SEQ ID NO: 20831 - DNA, 21 bp, Artificial Sequence
  Description of Artificial Sequence: Synthetic oligonucleotide
atgtctactgaggatcatgcg

SEQ ID NO: 20832 - DNA, 21 bp, Artificial Sequence
  Description of Artificial Sequence: Synthetic oligonucleotide
atgtcgactgagcgtaatgcg

SEQ ID NO: 20833 - DNA, 21 bp, Artificial Sequence
  Description of Artificial Sequence: Synthetic oligonucleotide
atgagtacttttccgcctcct

SEQ ID NO: 20834 - DNA, 21 bp, Artificial Sequence
  Description of Artificial Sequence: Synthetic oligonucleotide
atgagtactgggaggcttatt

SEQ ID NO: 20835 - DNA, 21 bp, Artificial Sequence
  Description of Artificial Sequence: Synthetic oligonucleotide
atgtctacgcatgtggtgagt

SEQ ID NO: 20836 - DNA, 21 bp, Artificial Sequence
  Description of Artificial Sequence: Synthetic oligonucleotide
atgagtactctgcctcatgct

SEQ ID NO: 20837 - DNA, 21 bp, Artificial Sequence
  Description of Artificial Sequence: Synthetic oligonucleotide
atgtctacgatgcagaggagt

SEQ ID NO: 20838 - DNA, 21 bp, Artificial Sequence
  Description of Artificial Sequence: Synthetic oligonucleotide
atgtctactaattttaagggt

SEQ ID NO: 20839 - DNA, 21 bp, Artificial Sequence
  Description of Artificial Sequence: Synthetic oligonucleotide
atgtcgactaatacgcatttg

SEQ ID NO: 20840 - DNA, 21 bp, Artificial Sequence
  Description of Artificial Sequence: Synthetic oligonucleotide
atgtcgacgaggattgcgaat

SEQ ID NO: 20841 - DNA, 21 bp, Artificial Sequence
  Description of Artificial Sequence: Synthetic oligonucleotide
atgtctacgaggcctatgccg

SEQ ID NO: 20842 - DNA, 21 bp, Artificial Sequence
  Description of Artificial Sequence: Synthetic oligonucleotide
atgagtacgcggagtccgtcg

SEQ ID NO: 20843 - DNA, 21 bp, Artificial Sequence
  Description of Artificial Sequence: Synthetic oligonucleotide
atgtctgtgcctcatggtgat

SEQ ID NO: 20844 - DNA, 21 bp, Artificial Sequence
  Description of Artificial Sequence: Synthetic oligonucleotide
atgtcttatccttatcagaat

SEQ ID NO: 20845 - DNA, 21 bp, Artificial Sequence
  Description of Artificial Sequence: Synthetic oligonucleotide
atgtcttatcagaagccttcg

SEQ ID NO: 20846 - DNA, 21 bp, Artificial Sequence
  Description of Artificial Sequence: Synthetic oligonucleotide
atgtcttatacttctgattct

SEQ ID NO: 20847 - DNA, 21 bp, Artificial Sequence
  Description of Artificial Sequence: Synthetic oligonucleotide
atgacggctaatactgctctt

SEQ ID NO: 20848 - DNA, 21 bp, Artificial Sequence
  Description of Artificial Sequence: Synthetic oligonucleotide
atgacggatattacgggtagg

SEQ ID NO: 20849 - DNA, 21 bp, Artificial Sequence
  Description of Artificial Sequence: Synthetic oligonucleotide
atgacggattcgcagccgggt

SEQ ID NO: 20850 - DNA, 21 bp, Artificial Sequence
  Description of Artificial Sequence: Synthetic oligonucleotide
atgactgatactcggcggctg

SEQ ID NO: 20851 - DNA, 21 bp, Artificial Sequence
  Description of Artificial Sequence: Synthetic oligonucleotide
atgacggatgtgggtgtgcgt

SEQ ID NO: 20852 - DNA, 21 bp, Artificial Sequence
  Description of Artificial Sequence: Synthetic oligonucleotide
atgacggattattcgaagggg

SEQ ID NO: 20853 - DNA, 21 bp, Artificial Sequence
  Description of Artificial Sequence: Synthetic oligonucleotide
atgactgagccgatggtggat

SEQ ID NO: 20854 - DNA, 21 bp, Artificial Sequence
  Description of Artificial Sequence: Synthetic oligonucleotide
atgacggagtctttgacggcg

SEQ ID NO: 20855 - DNA, 21 bp, Artificial Sequence
  Description of Artificial Sequence: Synthetic oligonucleotide
atgacggaggttacgacgttt

SEQ ID NO: 20856 - DNA, 21 bp, Artificial Sequence
  Description of Artificial Sequence: Synthetic oligonucleotide
atgacttttccgaagctgaat

SEQ ID NO: 20857 - DNA, 21 bp, Artificial Sequence
  Description of Artificial Sequence: Synthetic oligonucleotide
atgactggtatgactagtgcg

SEQ ID NO: 20858 - DNA, 21 bp, Artificial Sequence
  Description of Artificial Sequence: Synthetic oligonucleotide
atgactggtaatcatcggatt

SEQ ID NO: 20859 - DNA, 21 bp, Artificial Sequence
  Description of Artificial Sequence: Synthetic oligonucleotide
atgactggtacgtcgcagcct

SEQ ID NO: 20860 - DNA, 21 bp, Artificial Sequence
  Description of Artificial Sequence: Synthetic oligonucleotide
atgactcatcctccttcggat

SEQ ID NO: 20861 - DNA, 21 bp, Artificial Sequence
  Description of Artificial Sequence: Synthetic oligonucleotide
atgactcatacgggtactttg

SEQ ID NO: 20862 - DNA, 21 bp, Artificial Sequence
  Description of Artificial Sequence: Synthetic oligonucleotide
atgacgaagcctcatattgtg

SEQ ID NO: 20863 - DNA, 21 bp, Artificial Sequence
  Description of Artificial Sequence: Synthetic oligonucleotide
atgactcttggttctgttgtt

SEQ ID NO: 20864 - DNA, 21 bp, Artificial Sequence
  Description of Artificial Sequence: Synthetic oligonucleotide
atgactttgcatcagcagttt

SEQ ID NO: 20865 - DNA, 21 bp, Artificial Sequence
  Description of Artificial Sequence: Synthetic oligonucleotide
atgacgctgtcgactggtgct

SEQ ID NO: 20866 - DNA, 21 bp, Artificial Sequence
  Description of Artificial Sequence: Synthetic oligonucleotide
atgacgcttgtggctagtccg

SEQ ID NO: 20867 - DNA, 21 bp, Artificial Sequence
  Description of Artificial Sequence: Synthetic oligonucleotide
atgactatggaggcggctaag

SEQ ID NO: 20868 - DNA, 21 bp, Artificial Sequence
  Description of Artificial Sequence: Synthetic oligonucleotide
atgacgatgggtgagtttaag

SEQ ID NO: 20869 - DNA, 21 bp, Artificial Sequence
  Description of Artificial Sequence: Synthetic oligonucleotide
atgacgatgacgcatcgtggg

SEQ ID NO: 20870 - DNA, 21 bp, Artificial Sequence
  Description of Artificial Sequence: Synthetic oligonucleotide
atgactaatgctgttgttgat

SEQ ID NO: 20871 - DNA, 21 bp, Artificial Sequence
  Description of Artificial Sequence: Synthetic oligonucleotide
atgacgaatggtcatggtatg

SEQ ID NO: 20872 - DNA, 21 bp, Artificial Sequence
  Description of Artificial Sequence: Synthetic oligonucleotide
atgactaatcttcagtctttg

SEQ ID NO: 20873 - DNA, 21 bp, Artificial Sequence
  Description of Artificial Sequence: Synthetic oligonucleotide
atgactaatcgtgctacggcg

SEQ ID NO: 20874 - DNA, 21 bp, Artificial Sequence
  Description of Artificial Sequence: Synthetic oligonucleotide
atgacgccgcataatagtagg

SEQ ID NO: 20875 - DNA, 21 bp, Artificial Sequence
  Description of Artificial Sequence: Synthetic oligonucleotide
atgacgccgcctcatggggcg

SEQ ID NO: 20876 - DNA, 21 bp, Artificial Sequence
  Description of Artificial Sequence: Synthetic oligonucleotide
atgactcctacgtcgtataat

SEQ ID NO: 20877 - DNA, 21 bp, Artificial Sequence
  Description of Artificial Sequence: Synthetic oligonucleotide
atgacgcagactgatgttacg

SEQ ID NO: 20878 - DNA, 21 bp, Artificial Sequence
  Description of Artificial Sequence: Synthetic oligonucleotide
atgacgcgttctgagtggtct

SEQ ID NO: 20879 - DNA, 21 bp, Artificial Sequence
  Description of Artificial Sequence: Synthetic oligonucleotide
atgactagtttggcggctctt

SEQ ID NO: 20880 - DNA, 21 bp, Artificial Sequence
  Description of Artificial Sequence: Synthetic oligonucleotide
atgacgagtaatacgaggatg

SEQ ID NO: 20881 - DNA, 21 bp, Artificial Sequence
  Description of Artificial Sequence: Synthetic oligonucleotide
atgacttcggttcggatgtcg

SEQ ID NO: 20882 - DNA, 21 bp, Artificial Sequence
  Description of Artificial Sequence: Synthetic oligonucleotide
atgacgacggggattgatagt

SEQ ID NO: 20883 - DNA, 21 bp, Artificial Sequence
  Description of Artificial Sequence: Synthetic oligonucleotide
atgacgacgagtccttttgct

SEQ ID NO: 20884 - DNA, 21 bp, Artificial Sequence
  Description of Artificial Sequence: Synthetic oligonucleotide
atgacgacttcgagtgatttg

SEQ ID NO: 20885 - DNA, 21 bp, Artificial Sequence
  Description of Artificial Sequence: Synthetic oligonucleotide
atgacggtgggggatagtgct

SEQ ID NO: 20886 - DNA, 21 bp, Artificial Sequence
  Description of Artificial Sequence: Synthetic oligonucleotide
atgactgttggtattcctgcg

SEQ ID NO: 20887 - DNA, 21 bp, Artificial Sequence
  Description of Artificial Sequence: Synthetic oligonucleotide
atgactgttagtaataagtat

SEQ ID NO: 20888 - DNA, 21 bp, Artificial Sequence
  Description of Artificial Sequence: Synthetic oligonucleotide
atgactgtttctcctggtact

SEQ ID NO: 20889 - DNA, 21 bp, Artificial Sequence
  Description of Artificial Sequence: Synthetic oligonucleotide
atggttgcgtctgataatagt

SEQ ID NO: 20890 - DNA, 21 bp, Artificial Sequence
  Description of Artificial Sequence: Synthetic oligonucleotide
atggtggatcgtgtgcttgat

SEQ ID NO: 20891 - DNA, 21 bp, Artificial Sequence
  Description of Artificial Sequence: Synthetic oligonucleotide
atggttgagctgacgtgggag

SEQ ID NO: 20892 - DNA, 21 bp, Artificial Sequence
  Description of Artificial Sequence: Synthetic oligonucleotide
atggttggttttggtgcggcg

SEQ ID NO: 20893 - DNA, 21 bp, Artificial Sequence
  Description of Artificial Sequence: Synthetic oligonucleotide
atggttgggcaggtgaagaat

SEQ ID NO: 20894 - DNA, 21 bp, Artificial Sequence
  Description of Artificial Sequence: Synthetic oligonucleotide
atggtgggtaggccgattgtt

SEQ ID NO: 20895 - DNA, 21 bp, Artificial Sequence
  Description of Artificial Sequence: Synthetic oligonucleotide
atggttggtaggacgggtggg

SEQ ID NO: 20896 - DNA, 21 bp, Artificial Sequence
  Description of Artificial Sequence: Synthetic oligonucleotide
atggttggtcgtgtgcctagt

SEQ ID NO: 20897 - DNA, 21 bp, Artificial Sequence
  Description of Artificial Sequence: Synthetic oligonucleotide
atggtgcattcgtcggcgcat

SEQ ID NO: 20898 - DNA, 21 bp, Artificial Sequence
  Description of Artificial Sequence: Synthetic oligonucleotide
atggtgcattcttctgagtcg

SEQ ID NO: 20899 - DNA, 21 bp, Artificial Sequence
  Description of Artificial Sequence: Synthetic oligonucleotide
atggtgattcatccggatcat

SEQ ID NO: 20900 - DNA, 21 bp, Artificial Sequence
  Description of Artificial Sequence: Synthetic oligonucleotide
atggtgttgaagctggctgct

SEQ ID NO: 20901 - DNA, 21 bp, Artificial Sequence
  Description of Artificial Sequence: Synthetic oligonucleotide
atggttaatgtgattatgccg

SEQ ID NO: 20902 - DNA, 21 bp, Artificial Sequence
  Description of Artificial Sequence: Synthetic oligonucleotide
atggtgaattatctggatgtt

SEQ ID NO: 20903 - DNA, 21 bp, Artificial Sequence
  Description of Artificial Sequence: Synthetic oligonucleotide
atggtgcctggtaatagtggt

SEQ ID NO: 20904 - DNA, 21 bp, Artificial Sequence
  Description of Artificial Sequence: Synthetic oligonucleotide
atggttcctcgtgagaatctt

SEQ ID NO: 20905 - DNA, 21 bp, Artificial Sequence
  Description of Artificial Sequence: Synthetic oligonucleotide
atggtgccgagtcagcattct

SEQ ID NO: 20906 - DNA, 21 bp, Artificial Sequence
  Description of Artificial Sequence: Synthetic oligonucleotide
atggtgccgagtagtgagatg

SEQ ID NO: 20907 - DNA, 21 bp, Artificial Sequence
  Description of Artificial Sequence: Synthetic oligonucleotide
atggttcagcggacgacgacg

SEQ ID NO: 20908 - DNA, 21 bp, Artificial Sequence
  Description of Artificial Sequence: Synthetic oligonucleotide
atggttcgggcgctgccgtgt

SEQ ID NO: 20909 - DNA, 21 bp, Artificial Sequence
  Description of Artificial Sequence: Synthetic oligonucleotide
atggtgtcgaatcgtcagacg

SEQ ID NO: 20910 - DNA, 21 bp, Artificial Sequence
  Description of Artificial Sequence: Synthetic oligonucleotide
atggtgtctcctagtccgact

SEQ ID NO: 20911 - DNA, 21 bp, Artificial Sequence
  Description of Artificial Sequence: Synthetic oligonucleotide
atggtgtcggttgatagggat

SEQ ID NO: 20912 - DNA, 21 bp, Artificial Sequence
  Description of Artificial Sequence: Synthetic oligonucleotide
atggttactctgactccgggt

SEQ ID NO: 20913 - DNA, 21 bp, Artificial Sequence
  Description of Artificial Sequence: Synthetic oligonucleotide
atggttactaatgttactaag

SEQ ID NO: 20914 - DNA, 21 bp, Artificial Sequence
  Description of Artificial Sequence: Synthetic oligonucleotide
atggttacgcgtccggagagt

SEQ ID NO: 20915 - DNA, 21 bp, Artificial Sequence
  Description of Artificial Sequence: Synthetic oligonucleotide
atggtgacgtcttcgacttct

SEQ ID NO: 20916 - DNA, 21 bp, Artificial Sequence
  Description of Artificial Sequence: Synthetic oligonucleotide
atggttacgtatgggcagcag

SEQ ID NO: 20917 - DNA, 21 bp, Artificial Sequence
  Description of Artificial Sequence: Synthetic oligonucleotide
atggttgtgcatcataataat

SEQ ID NO: 20918 - DNA, 21 bp, Artificial Sequence
  Description of Artificial Sequence: Synthetic oligonucleotide
atggtggtgaagatggtgtcg

SEQ ID NO: 20919 - DNA, 21 bp, Artificial Sequence
  Description of Artificial Sequence: Synthetic oligonucleotide
atgtggaataaggagcatgat

SEQ ID NO: 20920 - DNA, 21 bp, Artificial Sequence
  Description of Artificial Sequence: Synthetic oligonucleotide
atgtatgataatgatgtgtgg

SEQ ID NO: 20921 - DNA, 21 bp, Artificial Sequence
  Description of Artificial Sequence: Synthetic oligonucleotide
atgtatgataggagtgggctg

SEQ ID NO: 20922 - DNA, 21 bp, Artificial Sequence
  Description of Artificial Sequence: Synthetic oligonucleotide
atgtatgagtctcggggggtt

SEQ ID NO: 20923 - DNA, 21 bp, Artificial Sequence
  Description of Artificial Sequence: Synthetic oligonucleotide
atgtatccggggatgatgatg

SEQ ID NO: 20924 - DNA, 21 bp, Artificial Sequence
  Description of Artificial Sequence: Synthetic oligonucleotide
atgtatcctagtgggattgtt

SEQ ID NO: 20925 - DNA, 21 bp, Artificial Sequence
  Description of Artificial Sequence: Synthetic oligonucleotide
atgtatccgactcatacgggg

SEQ ID NO: 20926 - DNA, 21 bp, Artificial Sequence
  Description of Artificial Sequence: Synthetic oligonucleotide
atgtatcctgtgaggcttgat

SEQ ID NO: 20927 - DNA, 21 bp, Artificial Sequence
  Description of Artificial Sequence: Synthetic oligonucleotide
atgtatcaggagcatacggag

SEQ ID NO: 20928 - DNA, 21 bp, Artificial Sequence
  Description of Artificial Sequence: Synthetic oligonucleotide
atgtatcagcaggctcatagt

SEQ ID NO: 20929 - DNA, 21 bp, Artificial Sequence
  Description of Artificial Sequence: Synthetic oligonucleotide
atgtatagggatgagcttact

SEQ ID NO: 20930 - DNA, 21 bp, Artificial Sequence
  Description of Artificial Sequence: Synthetic oligonucleotide
atgtattcgatgtctaatgtt

SEQ ID NO: 20931 - DNA, 21 bp, Artificial Sequence
  Description of Artificial Sequence: Synthetic oligonucleotide
atgtattcgacgcagtcttcg

SEQ ID NO: 20932 - DNA, 21 bp, Artificial Sequence
  Description of Artificial Sequence: Synthetic oligonucleotide
atgtatacgtcgatggcgggt

SEQ ID NO: 20933 - DNA, 21 bp, Artificial Sequence
  Description of Artificial Sequence: Synthetic oligonucleotide
atgtatgttgctgcttctcct

SEQ ID NO: 20934 - DNA, 21 bp, Artificial Sequence
  Description of Artificial Sequence: Synthetic oligonucleotide
aatgcggctccgtcgactatt

SEQ ID NO: 20935 - DNA, 21 bp, Artificial Sequence
  Description of Artificial Sequence: Synthetic oligonucleotide
aatgctgctcggttgacgtct

SEQ ID NO: 20936 - DNA, 21 bp, Artificial Sequence
  Description of Artificial Sequence: Synthetic oligonucleotide
aatgcggctagtcctggtttt

SEQ ID NO: 20937 - DNA, 21 bp, Artificial Sequence
  Description of Artificial Sequence: Synthetic oligonucleotide
aatgcggcgtctcagtcgcct

SEQ ID NO: 20938 - DNA, 21 bp, Artificial Sequence
  Description of Artificial Sequence: Synthetic oligonucleotide
aatgcggatgcgctgggttcg

SEQ ID NO: 20939 - DNA, 21 bp, Artificial Sequence
  Description of Artificial Sequence: Synthetic oligonucleotide
aatgcggatcctcgtgatcgg

SEQ ID NO: 20940 - DNA, 21 bp, Artificial Sequence
  Description of Artificial Sequence: Synthetic oligonucleotide
aatgcggatcgtcgttctgag

SEQ ID NO: 20941 - DNA, 21 bp, Artificial Sequence
  Description of Artificial Sequence: Synthetic oligonucleotide
aatgctgaggcgtttttggat

SEQ ID NO: 20942 - DNA, 21 bp, Artificial Sequence
  Description of Artificial Sequence: Synthetic oligonucleotide
aatgcggaggataggactgtg

SEQ ID NO: 20943 - DNA, 21 bp, Artificial Sequence
  Description of Artificial Sequence: Synthetic oligonucleotide
aatgcttttagtacgtcgacg

SEQ ID NO: 20944 - DNA, 21 bp, Artificial Sequence
  Description of Artificial Sequence: Synthetic oligonucleotide
aatgctggtggtacgtgggat

SEQ ID NO: 20945 - DNA, 21 bp, Artificial Sequence
  Description of Artificial Sequence: Synthetic oligonucleotide
aatgctgggacgcggcaggct

SEQ ID NO: 20946 - DNA, 21 bp, Artificial Sequence
  Description of Artificial Sequence: Synthetic oligonucleotide
aatgctcatcttagtttgaat

SEQ ID NO: 20947 - DNA, 21 bp, Artificial Sequence
  Description of Artificial Sequence: Synthetic oligonucleotide
aatgctcatagtacgctggtt

SEQ ID NO: 20948 - DNA, 21 bp, Artificial Sequence
  Description of Artificial Sequence: Synthetic oligonucleotide
aatgcgcatacggatcgtcag

SEQ ID NO: 20949 - DNA, 21 bp, Artificial Sequence
  Description of Artificial Sequence: Synthetic oligonucleotide
aatgctcatactcagattcag

SEQ ID NO: 20950 - DNA, 21 bp, Artificial Sequence
  Description of Artificial Sequence: Synthetic oligonucleotide
aatgcgaaggctctggcgatg

SEQ ID NO: 20951 - DNA, 21 bp, Artificial Sequence
  Description of Artificial Sequence: Synthetic oligonucleotide
aatgctaagagtacgattggg

SEQ ID NO: 20952 - DNA, 21 bp, Artificial Sequence
  Description of Artificial Sequence: Synthetic oligonucleotide
aatgcgcttgctcgttctggg

SEQ ID NO: 20953 - DNA, 21 bp, Artificial Sequence
  Description of Artificial Sequence: Synthetic oligonucleotide
aatgcgttggatgataatgtg

SEQ ID NO: 20954 - DNA, 21 bp, Artificial Sequence
  Description of Artificial Sequence: Synthetic oligonucleotide
aatgcgctggatcggtctatg

SEQ ID NO: 20955 - DNA, 21 bp, Artificial Sequence
  Description of Artificial Sequence: Synthetic oligonucleotide
aatgctcttgaggcgtctggt

SEQ ID NO: 20956 - DNA, 21 bp, Artificial Sequence
  Description of Artificial Sequence: Synthetic oligonucleotide
aatgcgcttaatccgaatttt

SEQ ID NO: 20957 - DNA, 21 bp, Artificial Sequence
  Description of Artificial Sequence: Synthetic oligonucleotide
aatgctctgcgttcttattcg

SEQ ID NO: 20958 - DNA, 21 bp, Artificial Sequence
  Description of Artificial Sequence: Synthetic oligonucleotide
aatgctttgtcgcatgttacg

SEQ ID NO: 20959 - DNA, 21 bp, Artificial Sequence
  Description of Artificial Sequence: Synthetic oligonucleotide
aatgctcttgtgtctgagtct

SEQ ID NO: 20960 - DNA, 21 bp, Artificial Sequence
  Description of Artificial Sequence: Synthetic oligonucleotide
aatgctaatgggtctcgggtt

SEQ ID NO: 20961 - DNA, 21 bp, Artificial Sequence
  Description of Artificial Sequence: Synthetic oligonucleotide
aatgcgaatcatcagaatgtg

SEQ ID NO: 20962 - DNA, 21 bp, Artificial Sequence
  Description of Artificial Sequence: Synthetic oligonucleotide
aatgctaatttgaatagtgcg

SEQ ID NO: 20963 - DNA, 21 bp, Artificial Sequence
  Description of Artificial Sequence: Synthetic oligonucleotide
aatgctaatacggggaggctg

SEQ ID NO: 20964 - DNA, 21 bp, Artificial Sequence
  Description of Artificial Sequence: Synthetic oligonucleotide
aatgctaatgtgcctaatcgg

SEQ ID NO: 20965 - DNA, 21 bp, Artificial Sequence
  Description of Artificial Sequence: Synthetic oligonucleotide
aatgcgccgcgttcggctgtt

SEQ ID NO: 20966 - DNA, 21 bp, Artificial Sequence
  Description of Artificial Sequence: Synthetic oligonucleotide
aatgcgccgagtgagtcgcgt

SEQ ID NO: 20967 - DNA, 21 bp, Artificial Sequence
  Description of Artificial Sequence: Synthetic oligonucleotide
aatgctcagattcgtcctatg

SEQ ID NO: 20968 - DNA, 21 bp, Artificial Sequence
  Description of Artificial Sequence: Synthetic oligonucleotide
aatgctcgtctttctacgagt

SEQ ID NO: 20969 - DNA, 21 bp, Artificial Sequence
  Description of Artificial Sequence: Synthetic oligonucleotide
aatgcgcggatgctggctagt

SEQ ID NO: 20970 - DNA, 21 bp, Artificial Sequence
  Description of Artificial Sequence: Synthetic oligonucleotide
aatgcgcggcctcatgatccg

SEQ ID NO: 20971 - DNA, 21 bp, Artificial Sequence
  Description of Artificial Sequence: Synthetic oligonucleotide
aatgcgaggcctagtgatatg

SEQ ID NO: 20972 - DNA, 21 bp, Artificial Sequence
  Description of Artificial Sequence: Synthetic oligonucleotide
aatgctaggagtattgattat

SEQ ID NO: 20973 - DNA, 21 bp, Artificial Sequence
  Description of Artificial Sequence: Synthetic oligonucleotide
aatgcgaggagttctagttat

SEQ ID NO: 20974 - DNA, 21 bp, Artificial Sequence
  Description of Artificial Sequence: Synthetic oligonucleotide
aatgcgcgggttgaggctcct

SEQ ID NO: 20975 - DNA, 21 bp, Artificial Sequence
  Description of Artificial Sequence: Synthetic oligonucleotide
aatgctcggtatactcattct

SEQ ID NO: 20976 - DNA, 21 bp, Artificial Sequence
  Description of Artificial Sequence: Synthetic oligonucleotide
aatgcttctgggctgccgcgt

SEQ ID NO: 20977 - DNA, 21 bp, Artificial Sequence
  Description of Artificial Sequence: Synthetic oligonucleotide
aatgcgtctattcatagtcat

SEQ ID NO: 20978 - DNA, 21 bp, Artificial Sequence
  Description of Artificial Sequence: Synthetic oligonucleotide
aatgctagtcttccgttgagt

SEQ ID NO: 20979 - DNA, 21 bp, Artificial Sequence
  Description of Artificial Sequence: Synthetic oligonucleotide
aatgcttctaattcggagaag

SEQ ID NO: 20980 - DNA, 21 bp, Artificial Sequence
  Description of Artificial Sequence: Synthetic oligonucleotide
aatgcgtcgcctattaggctg

SEQ ID NO: 20981 - DNA, 21 bp, Artificial Sequence
  Description of Artificial Sequence: Synthetic oligonucleotide
aatgcttcgtctaggtcgctt

SEQ ID NO: 20982 - DNA, 21 bp, Artificial Sequence
  Description of Artificial Sequence: Synthetic oligonucleotide
aatgcgtctacggtgcctgag

SEQ ID NO: 20983 - DNA, 21 bp, Artificial Sequence
  Description of Artificial Sequence: Synthetic oligonucleotide
aatgctacggctgatgggttt

SEQ ID NO: 20984 - DNA, 21 bp, Artificial Sequence
  Description of Artificial Sequence: Synthetic oligonucleotide
aatgcgacgcatcctaatttt

SEQ ID NO: 20985 - DNA, 21 bp, Artificial Sequence
  Description of Artificial Sequence: Synthetic oligonucleotide
aatgcgacgcatacgtcgact

SEQ ID NO: 20986 - DNA, 21 bp, Artificial Sequence
  Description of Artificial Sequence: Synthetic oligonucleotide
aatgcgactccggttgcggtt

SEQ ID NO: 20987 - DNA, 21 bp, Artificial Sequence
  Description of Artificial Sequence: Synthetic oligonucleotide
aatgcgacgtctggttctcat

SEQ ID NO: 20988 - DNA, 21 bp, Artificial Sequence
  Description of Artificial Sequence: Synthetic oligonucleotide
aatgcgactagtacgctttgt

SEQ ID NO: 20989 - DNA, 21 bp, Artificial Sequence
  Description of Artificial Sequence: Synthetic oligonucleotide
aatgctacgagttatactatg

SEQ ID NO: 20990 - DNA, 21 bp, Artificial Sequence
  Description of Artificial Sequence: Synthetic oligonucleotide
aatgctacggtgtctccgagg

SEQ ID NO: 20991 - DNA, 21 bp, Artificial Sequence
  Description of Artificial Sequence: Synthetic oligonucleotide
aatgctgtgcctggtcggagt

SEQ ID NO: 20992 - DNA, 21 bp, Artificial Sequence
  Description of Artificial Sequence: Synthetic oligonucleotide
aatgcggttcctattcctccg

SEQ ID NO: 20993 - DNA, 21 bp, Artificial Sequence
  Description of Artificial Sequence: Synthetic oligonucleotide
aatgctgttcagagtcttatg

SEQ ID NO: 20994 - DNA, 21 bp, Artificial Sequence
  Description of Artificial Sequence: Synthetic oligonucleotide
aatgcggtgtcggtgaattct

SEQ ID NO: 20995 - DNA, 21 bp, Artificial Sequence
  Description of Artificial Sequence: Synthetic oligonucleotide
aatgcttggaagactcctgtg

SEQ ID NO: 20996 - DNA, 21 bp, Artificial Sequence
  Description of Artificial Sequence: Synthetic oligonucleotide
aatgcttatactacgggtccg

SEQ ID NO: 20997 - DNA, 21 bp, Artificial Sequence
  Description of Artificial Sequence: Synthetic oligonucleotide
aattgtgatgctgttgcgtgg

SEQ ID NO: 20998 - DNA, 21 bp, Artificial Sequence
  Description of Artificial Sequence: Synthetic oligonucleotide
aatgatgatattcagcgtaag

SEQ ID NO: 20999 - DNA, 21 bp, Artificial Sequence
  Description of Artificial Sequence: Synthetic oligonucleotide
aatgatgggcatcggaatttt

SEQ ID NO: 21000 - DNA, 21 bp, Artificial Sequence
  Description of Artificial Sequence: Synthetic oligonucleotide
aatgatattctgctgctgagt

SEQ ID NO: 21001 - DNA, 21 bp, Artificial Sequence
  Description of Artificial Sequence: Synthetic oligonucleotide
aatgatattactgaggtgcct

SEQ ID NO: 21002 - DNA, 21 bp, Artificial Sequence
  Description of Artificial Sequence: Synthetic oligonucleotide
aatgataagtttaggttgtct

SEQ ID NO: 21003 - DNA, 21 bp, Artificial Sequence
  Description of Artificial Sequence: Synthetic oligonucleotide
aatgataagatgttgcagcgt

SEQ ID NO: 21004 - DNA, 21 bp, Artificial Sequence
  Description of Artificial Sequence: Synthetic oligonucleotide
aatgatccgaaggtgcctcag

SEQ ID NO: 21005 - DNA, 21 bp, Artificial Sequence
  Description of Artificial Sequence: Synthetic oligonucleotide
aatgatccgatgacgtctcag

SEQ ID NO: 21006 - DNA, 21 bp, Artificial Sequence
  Description of Artificial Sequence: Synthetic oligonucleotide
aatgatcggatgaagaattct

SEQ ID NO: 21007 - DNA, 21 bp, Artificial Sequence
  Description of Artificial Sequence: Synthetic oligonucleotide
aatgatcggtctaagtatcct

SEQ ID NO: 21008 - DNA, 21 bp, Artificial Sequence
  Description of Artificial Sequence: Synthetic oligonucleotide
aatgattctagtcttggtgcg

SEQ ID NO: 21009 - DNA, 21 bp, Artificial Sequence
  Description of Artificial Sequence: Synthetic oligonucleotide
aatgatagtagtagtacgatg

SEQ ID NO: 21010 - DNA, 21 bp, Artificial Sequence
  Description of Artificial Sequence: Synthetic oligonucleotide
aatgatacgttttcgtctctg

SEQ ID NO: 21011 - DNA, 21 bp, Artificial Sequence
  Description of Artificial Sequence: Synthetic oligonucleotide
aatgatactggggctttgatg

SEQ ID NO: 21012 - DNA, 21 bp, Artificial Sequence
  Description of Artificial Sequence: Synthetic oligonucleotide
aatgatacttatcgtacttct

SEQ ID NO: 21013 - DNA, 21 bp, Artificial Sequence
  Description of Artificial Sequence: Synthetic oligonucleotide
aatgatgtgccgaatactcct

SEQ ID NO: 21014 - DNA, 21 bp, Artificial Sequence
  Description of Artificial Sequence: Synthetic oligonucleotide
aatgatgttacgacgcataag

SEQ ID NO: 21015 - DNA, 21 bp, Artificial Sequence
  Description of Artificial Sequence: Synthetic oligonucleotide
aatgattggttgattgcgggg

SEQ ID NO: 21016 - DNA, 21 bp, Artificial Sequence
  Description of Artificial Sequence: Synthetic oligonucleotide
aatgaggctctttcgcagttg

SEQ ID NO: 21017 - DNA, 21 bp, Artificial Sequence
  Description of Artificial Sequence: Synthetic oligonucleotide
aatgaggctgttgcgtctatg

SEQ ID NO: 21018 - DNA, 21 bp, Artificial Sequence
  Description of Artificial Sequence: Synthetic oligonucleotide
aatgagtgtgatgatctgatg

SEQ ID NO: 21019 - DNA, 21 bp, Artificial Sequence
  Description of Artificial Sequence: Synthetic oligonucleotide
aatgagggttttctgcttggg

SEQ ID NO: 21020 - DNA, 21 bp, Artificial Sequence
  Description of Artificial Sequence: Synthetic oligonucleotide
aatgagcatcataagactgag

SEQ ID NO: 21021 - DNA, 21 bp, Artificial Sequence
  Description of Artificial Sequence: Synthetic oligonucleotide
aatgagatttttacgccgatg

SEQ ID NO: 21022 - DNA, 21 bp, Artificial Sequence
  Description of Artificial Sequence: Synthetic oligonucleotide
aatgagctggcttcgagggcg

SEQ ID NO: 21023 - DNA, 21 bp, Artificial Sequence
  Description of Artificial Sequence: Synthetic oligonucleotide
aatgagttgggggggcatcat

SEQ ID NO: 21024 - DNA, 21 bp, Artificial Sequence
  Description of Artificial Sequence: Synthetic oligonucleotide
aatgagttggtgtctaagacg

SEQ ID NO: 21025 - DNA, 21 bp, Artificial Sequence
  Description of Artificial Sequence: Synthetic oligonucleotide
aatgagatgtctgggcagcgg

SEQ ID NO: 21026 - DNA, 21 bp, Artificial Sequence
  Description of Artificial Sequence: Synthetic oligonucleotide
aatgagccgcttgggatgcgt

SEQ ID NO: 21027 - DNA, 21 bp, Artificial Sequence
  Description of Artificial Sequence: Synthetic oligonucleotide
aatgagcagcatgcgactcat

SEQ ID NO: 21028 - DNA, 21 bp, Artificial Sequence
  Description of Artificial Sequence: Synthetic oligonucleotide
aatgagcggggttcgagttgg

SEQ ID NO: 21029 - DNA, 21 bp, Artificial Sequence
  Description of Artificial Sequence: Synthetic oligonucleotide
aatgagcgtcatcatcaggtt

SEQ ID NO: 21030 - DNA, 21 bp, Artificial Sequence
  Description of Artificial Sequence: Synthetic oligonucleotide
aatgagcggaatgtgcagctg

SEQ ID NO: 21031 - DNA, 21 bp, Artificial Sequence
  Description of Artificial Sequence: Synthetic oligonucleotide
aatgagcgtagggttgtgctg

SEQ ID NO: 21032 - DNA, 21 bp, Artificial Sequence
  Description of Artificial Sequence: Synthetic oligonucleotide
aatgagtcgcataagaatgtg

SEQ ID NO: 21033 - DNA, 21 bp, Artificial Sequence
  Description of Artificial Sequence: Synthetic oligonucleotide
aatgagtcgctgaggactgcg

SEQ ID NO: 21034 - DNA, 21 bp, Artificial Sequence
  Description of Artificial Sequence: Synthetic oligonucleotide
aatgagagtttgacgtctgct

SEQ ID NO: 21035 - DNA, 21 bp, Artificial Sequence
  Description of Artificial Sequence: Synthetic oligonucleotide
aatgagagtgttcgtagttat

SEQ ID NO: 21036 - DNA, 21 bp, Artificial Sequence
  Description of Artificial Sequence: Synthetic oligonucleotide
aatgagtatgtgcttgggctt

SEQ ID NO: 21037 - DNA, 21 bp, Artificial Sequence
  Description of Artificial Sequence: Synthetic oligonucleotide
aattttgcggcgaggagttat

SEQ ID NO: 21038 - DNA, 21 bp, Artificial Sequence
  Description of Artificial Sequence: Synthetic oligonucleotide
aattttgatcgtcatggtgcg

SEQ ID NO: 21039 - DNA, 21 bp, Artificial Sequence
  Description of Artificial Sequence: Synthetic oligonucleotide
aattttgatcggcctaggact

SEQ ID NO: 21040 - DNA, 21 bp, Artificial Sequence
  Description of Artificial Sequence: Synthetic oligonucleotide
aattttaatactagggtggct

SEQ ID NO: 21041 - DNA, 21 bp, Artificial Sequence
  Description of Artificial Sequence: Synthetic oligonucleotide
aattttcgtgtgtctagtggt

SEQ ID NO: 21042 - DNA, 21 bp, Artificial Sequence
  Description of Artificial Sequence: Synthetic oligonucleotide
aattttagtcctactagtcct

SEQ ID NO: 21043 - DNA, 21 bp, Artificial Sequence
  Description of Artificial Sequence: Synthetic oligonucleotide
aattttactaaggctggggct

SEQ ID NO: 21044 - DNA, 21 bp, Artificial Sequence
  Description of Artificial Sequence: Synthetic oligonucleotide
aattttactaagagtgcgggg

SEQ ID NO: 21045 - DNA, 21 bp, Artificial Sequence
  Description of Artificial Sequence: Synthetic oligonucleotide
aattttacgctgaagccgatt

SEQ ID NO: 21046 - DNA, 21 bp, Artificial Sequence
  Description of Artificial Sequence: Synthetic oligonucleotide
aattttgtgggggtgccgacg

SEQ ID NO: 21047 - DNA, 21 bp, Artificial Sequence
  Description of Artificial Sequence: Synthetic oligonucleotide
aattttgttgtgcctagtgat

SEQ ID NO: 21048 - DNA, 21 bp, Artificial Sequence
  Description of Artificial Sequence: Synthetic oligonucleotide
aatggtgctgcggaggttgcg

SEQ ID NO: 21049 - DNA, 21 bp, Artificial Sequence
  Description of Artificial Sequence: Synthetic oligonucleotide
aatggtgcggatcgtgcgtcg

SEQ ID NO: 21050 - DNA, 21 bp, Artificial Sequence
  Description of Artificial Sequence: Synthetic oligonucleotide
aatggtgcgggtctgactatt

SEQ ID NO: 21051 - DNA, 21 bp, Artificial Sequence
  Description of Artificial Sequence: Synthetic oligonucleotide
aatggggctctgcgtctgcct

SEQ ID NO: 21052 - DNA, 21 bp, Artificial Sequence
  Description of Artificial Sequence: Synthetic oligonucleotide
aatggtgatgcttgtccgagt

SEQ ID NO: 21053 - DNA, 21 bp, Artificial Sequence
  Description of Artificial Sequence: Synthetic oligonucleotide
aatggggaggctcaggctcgt

SEQ ID NO: 21054 - DNA, 21 bp, Artificial Sequence
  Description of Artificial Sequence: Synthetic oligonucleotide
aatggtgagccgtttagtatt

SEQ ID NO: 21055 - DNA, 21 bp, Artificial Sequence
  Description of Artificial Sequence: Synthetic oligonucleotide
aatggtggtgcgtatacgctg

SEQ ID NO: 21056 - DNA, 21 bp, Artificial Sequence
  Description of Artificial Sequence: Synthetic oligonucleotide
aatggggggattagtaggacg

SEQ ID NO: 21057 - DNA, 21 bp, Artificial Sequence
  Description of Artificial Sequence: Synthetic oligonucleotide
aatggtgggaatttgcttttg

SEQ ID NO: 21058 - DNA, 21 bp, Artificial Sequence
  Description of Artificial Sequence: Synthetic oligonucleotide
aatggtcattttgttgatgct

SEQ ID NO: 21059 - DNA, 21 bp, Artificial Sequence
  Description of Artificial Sequence: Synthetic oligonucleotide
aatgggcataatcatatgttg

SEQ ID NO: 21060 - DNA, 21 bp, Artificial Sequence
  Description of Artificial Sequence: Synthetic oligonucleotide
aatggtcatagtgtgtctgag

SEQ ID NO: 21061 - DNA, 21 bp, Artificial Sequence
  Description of Artificial Sequence: Synthetic oligonucleotide
aatggtaagaatggttcgacg

SEQ ID NO: 21062 - DNA, 21 bp, Artificial Sequence
  Description of Artificial Sequence: Synthetic oligonucleotide
aatgggcttcagacgggggtt

SEQ ID NO: 21063 - DNA, 21 bp, Artificial Sequence
  Description of Artificial Sequence: Synthetic oligonucleotide
aatgggatgggggctgtggtg

SEQ ID NO: 21064 - DNA, 21 bp, Artificial Sequence
  Description of Artificial Sequence: Synthetic oligonucleotide
aatggtatgcagcctttgaat

SEQ ID NO: 21065 - DNA, 21 bp, Artificial Sequence
  Description of Artificial Sequence: Synthetic oligonucleotide
aatgggatgtatccgtatcct

SEQ ID NO: 21066 - DNA, 21 bp, Artificial Sequence
  Description of Artificial Sequence: Synthetic oligonucleotide
aatgggaatgaggttttgtct

SEQ ID NO: 21067 - DNA, 21 bp, Artificial Sequence
  Description of Artificial Sequence: Synthetic oligonucleotide
aatggtcctcatcgtatggtt

SEQ ID NO: 21068 - DNA, 21 bp, Artificial Sequence
  Description of Artificial Sequence: Synthetic oligonucleotide
aatgggccgccggctgttggg

SEQ ID NO: 21069 - DNA, 21 bp, Artificial Sequence
  Description of Artificial Sequence: Synthetic oligonucleotide
aatggtcctccgaagggtatt

SEQ ID NO: 21070 - DNA, 21 bp, Artificial Sequence
  Description of Artificial Sequence: Synthetic oligonucleotide
aatgggcctagtgcgcagcag

SEQ ID NO: 21071 - DNA, 21 bp, Artificial Sequence
  Description of Artificial Sequence: Synthetic oligonucleotide
aatgggcaggctgagcctgct

SEQ ID NO: 21072 - DNA, 21 bp, Artificial Sequence
  Description of Artificial Sequence: Synthetic oligonucleotide
aatgggtctcatattgatcgg

SEQ ID NO: 21073 - DNA, 21 bp, Artificial Sequence
  Description of Artificial Sequence: Synthetic oligonucleotide
aatgggtcgtgggtgccggct

SEQ ID NO: 21074 - DNA, 21 bp, Artificial Sequence
  Description of Artificial Sequence: Synthetic oligonucleotide
aatggttcttatcagcctccg

SEQ ID NO: 21075 - DNA, 21 bp, Artificial Sequence
  Description of Artificial Sequence: Synthetic oligonucleotide
aatggtactcagcttctgagt

SEQ ID NO: 21076 - DNA, 21 bp, Artificial Sequence
  Description of Artificial Sequence: Synthetic oligonucleotide
aatgggactactgcgcttttt

SEQ ID NO: 21077 - DNA, 21 bp, Artificial Sequence
  Description of Artificial Sequence: Synthetic oligonucleotide
aatgggacgtatagtgtggag

SEQ ID NO: 21078 - DNA, 21 bp, Artificial Sequence
  Description of Artificial Sequence: Synthetic oligonucleotide
aatggtgtgctgcttcatgcg

SEQ ID NO: 21079 - DNA, 21 bp, Artificial Sequence
  Description of Artificial Sequence: Synthetic oligonucleotide
aatggtgtgccgagtttgggt

SEQ ID NO: 21080 - DNA, 21 bp, Artificial Sequence
  Description of Artificial Sequence: Synthetic oligonucleotide
aatgggtatgcggtttctgcg

SEQ ID NO: 21081 - DNA, 21 bp, Artificial Sequence
  Description of Artificial Sequence: Synthetic oligonucleotide
aatggttatactcgggatgag

SEQ ID NO: 21082 - DNA, 21 bp, Artificial Sequence
  Description of Artificial Sequence: Synthetic oligonucleotide
aatcatgcgagtaatacgacg

SEQ ID NO: 21083 - DNA, 21 bp, Artificial Sequence
  Description of Artificial Sequence: Synthetic oligonucleotide
aatcatcataatgcgtattct

SEQ ID NO: 21084 - DNA, 21 bp, Artificial Sequence
  Description of Artificial Sequence: Synthetic oligonucleotide
aatcatattacgtatgagaat

SEQ ID NO: 21085 - DNA, 21 bp, Artificial Sequence
  Description of Artificial Sequence: Synthetic oligonucleotide
aatcataagtgtgctgatgag

SEQ ID NO: 21086 - DNA, 21 bp, Artificial Sequence
  Description of Artificial Sequence: Synthetic oligonucleotide
aatcataagggtttgaatttg

SEQ ID NO: 21087 - DNA, 21 bp, Artificial Sequence
  Description of Artificial Sequence: Synthetic oligonucleotide
aatcatatgccttcggtgtat

SEQ ID NO: 21088 - DNA, 21 bp, Artificial Sequence
  Description of Artificial Sequence: Synthetic oligonucleotide
aatcataatggtcttcagatg

SEQ ID NO: 21089 - DNA, 21 bp, Artificial Sequence
  Description of Artificial Sequence: Synthetic oligonucleotide
aatcataataggccggctaat

SEQ ID NO: 21090 - DNA, 21 bp, Artificial Sequence
  Description of Artificial Sequence: Synthetic oligonucleotide
aatcatccttctgctagtact

SEQ ID NO: 21091 - DNA, 21 bp, Artificial Sequence
  Description of Artificial Sequence: Synthetic oligonucleotide
aatcatcctgttccgtcgtct

SEQ ID NO: 21092 - DNA, 21 bp, Artificial Sequence
  Description of Artificial Sequence: Synthetic oligonucleotide
aatcatccgtatcctaagatg

SEQ ID NO: 21093 - DNA, 21 bp, Artificial Sequence
  Description of Artificial Sequence: Synthetic oligonucleotide
aatcatcagttggtttcggag

SEQ ID NO: 21094 - DNA, 21 bp, Artificial Sequence
  Description of Artificial Sequence: Synthetic oligonucleotide
aatcatcgggcgagtccttat

SEQ ID NO: 21095 - DNA, 21 bp, Artificial Sequence
  Description of Artificial Sequence: Synthetic oligonucleotide
aatcatcggactggtaatgct

SEQ ID NO: 21096 - DNA, 21 bp, Artificial Sequence
  Description of Artificial Sequence: Synthetic oligonucleotide
aatcataggacgagtggttcg

SEQ ID NO: 21097 - DNA, 21 bp, Artificial Sequence
  Description of Artificial Sequence: Synthetic oligonucleotide
aatcattctgcggagatgagt

SEQ ID NO: 21098 - DNA, 21 bp, Artificial Sequence
  Description of Artificial Sequence: Synthetic oligonucleotide
aatcatagtgagactttgatg

SEQ ID NO: 21099 - DNA, 21 bp, Artificial Sequence
  Description of Artificial Sequence: Synthetic oligonucleotide
aatcattcgggtacgattgtt

SEQ ID NO: 21100 - DNA, 21 bp, Artificial Sequence
  Description of Artificial Sequence: Synthetic oligonucleotide
aatcattctccggtgcctctg

SEQ ID NO: 21101 - DNA, 21 bp, Artificial Sequence
  Description of Artificial Sequence: Synthetic oligonucleotide
aatcatagttcggatggtgct

SEQ ID NO: 21102 - DNA, 21 bp, Artificial Sequence
  Description of Artificial Sequence: Synthetic oligonucleotide
aatcatactggttctactctg

SEQ ID NO: 21103 - DNA, 21 bp, Artificial Sequence
  Description of Artificial Sequence: Synthetic oligonucleotide
aatcatactccgtcgattcct

SEQ ID NO: 21104 - DNA, 21 bp, Artificial Sequence
  Description of Artificial Sequence: Synthetic oligonucleotide
aatcatgttgcgaagagttgg

SEQ ID NO: 21105 - DNA, 21 bp, Artificial Sequence
  Description of Artificial Sequence: Synthetic oligonucleotide
aatcattataatgtgaatgag

SEQ ID NO: 21106 - DNA, 21 bp, Artificial Sequence
  Description of Artificial Sequence: Synthetic oligonucleotide
aatattgctaatgctttgaat

SEQ ID NO: 21107 - DNA, 21 bp, Artificial Sequence
  Description of Artificial Sequence: Synthetic oligonucleotide
aatatttttgatgatgctgat

SEQ ID NO: 21108 - DNA, 21 bp, Artificial Sequence
  Description of Artificial Sequence: Synthetic oligonucleotide
aatattggtgcgactccgagt

SEQ ID NO: 21109 - DNA, 21 bp, Artificial Sequence
  Description of Artificial Sequence: Synthetic oligonucleotide
aatattgggggtatgatgtcg

SEQ ID NO: 21110 - DNA, 21 bp, Artificial Sequence
  Description of Artificial Sequence: Synthetic oligonucleotide
aatattgggatgactacgggg

SEQ ID NO: 21111 - DNA, 21 bp, Artificial Sequence
  Description of Artificial Sequence: Synthetic oligonucleotide
aatattaagcatgggccgcat

SEQ ID NO: 21112 - DNA, 21 bp, Artificial Sequence
  Description of Artificial Sequence: Synthetic oligonucleotide
aatattaagctggggcatgat

SEQ ID NO: 21113 - DNA, 21 bp, Artificial Sequence
  Description of Artificial Sequence: Synthetic oligonucleotide
aatattctgcagtatacttct

SEQ ID NO: 21114 - DNA, 21 bp, Artificial Sequence
  Description of Artificial Sequence: Synthetic oligonucleotide
aatattttgcgtacggatgag

SEQ ID NO: 21115 - DNA, 21 bp, Artificial Sequence
  Description of Artificial Sequence: Synthetic oligonucleotide
aatattccggatcgttttatt

SEQ ID NO: 21116 - DNA, 21 bp, Artificial Sequence
  Description of Artificial Sequence: Synthetic oligonucleotide
aatattccgctgggtgcggcg

SEQ ID NO: 21117 - DNA, 21 bp, Artificial Sequence
  Description of Artificial Sequence: Synthetic oligonucleotide
aatattcctccgcggcctctt

SEQ ID NO: 21118 - DNA, 21 bp, Artificial Sequence
  Description of Artificial Sequence: Synthetic oligonucleotide
aatattcaggttaggagtggg

SEQ ID NO: 21119 - DNA, 21 bp, Artificial Sequence
  Description of Artificial Sequence: Synthetic oligonucleotide
aatattcgtgatcttgttcat

SEQ ID NO: 21120 - DNA, 21 bp, Artificial Sequence
  Description of Artificial Sequence: Synthetic oligonucleotide
aatattcgtacgaataatatt

SEQ ID NO: 21121 - DNA, 21 bp, Artificial Sequence
  Description of Artificial Sequence: Synthetic oligonucleotide
aatatttcgttgccgttgttg

SEQ ID NO: 21122 - DNA, 21 bp, Artificial Sequence
  Description of Artificial Sequence: Synthetic oligonucleotide
aatattagttatacgattgag

SEQ ID NO: 21123 - DNA, 21 bp, Artificial Sequence
  Description of Artificial Sequence: Synthetic oligonucleotide
aatattacgctggctcatctg

SEQ ID NO: 21124 - DNA, 21 bp, Artificial Sequence
  Description of Artificial Sequence: Synthetic oligonucleotide
aatattacttctaatgagagt

SEQ ID NO: 21125 - DNA, 21 bp, Artificial Sequence
  Description of Artificial Sequence: Synthetic oligonucleotide
aatattactactcgtgggacg

SEQ ID NO: 21126 - DNA, 21 bp, Artificial Sequence
  Description of Artificial Sequence: Synthetic oligonucleotide
aatattgtggagcgttcgagg

SEQ ID NO: 21127 - DNA, 21 bp, Artificial Sequence
  Description of Artificial Sequence: Synthetic oligonucleotide
aataaggcgcttactcatatg

SEQ ID NO: 21128 - DNA, 21 bp, Artificial Sequence
  Description of Artificial Sequence: Synthetic oligonucleotide
aataaggagcatgttcagggg

SEQ ID NO: 21129 - DNA, 21 bp, Artificial Sequence
  Description of Artificial Sequence: Synthetic oligonucleotide
aataaggagccgactgattct

SEQ ID NO: 21130 - DNA, 21 bp, Artificial Sequence
  Description of Artificial Sequence: Synthetic oligonucleotide
aataaggaggtgcataattcg

SEQ ID NO: 21131 - DNA, 21 bp, Artificial Sequence
  Description of Artificial Sequence: Synthetic oligonucleotide
aataagggtgtgtattcgggt

SEQ ID NO: 21132 - DNA, 21 bp, Artificial Sequence
  Description of Artificial Sequence: Synthetic oligonucleotide
aataagcattttcaggcgcat

SEQ ID NO: 21133 - DNA, 21 bp, Artificial Sequence
  Description of Artificial Sequence: Synthetic oligonucleotide
aataagattgatccttatact

SEQ ID NO: 21134 - DNA, 21 bp, Artificial Sequence
  Description of Artificial Sequence: Synthetic oligonucleotide
aataagatgactacttatgct

SEQ ID NO: 21135 - DNA, 21 bp, Artificial Sequence
  Description of Artificial Sequence: Synthetic oligonucleotide
aataagcagtttacgcctgag

SEQ ID NO: 21136 - DNA, 21 bp, Artificial Sequence
  Description of Artificial Sequence: Synthetic oligonucleotide
aataagagtattaatactgat

SEQ ID NO: 21137 - DNA, 21 bp, Artificial Sequence
  Description of Artificial Sequence: Synthetic oligonucleotide
aataagtctttgacgacgggt

SEQ ID NO: 21138 - DNA, 21 bp, Artificial Sequence
  Description of Artificial Sequence: Synthetic oligonucleotide
aataagagtatgaatgttccg

SEQ ID NO: 21139 - DNA, 21 bp, Artificial Sequence
  Description of Artificial Sequence: Synthetic oligonucleotide
aataagactgataatgtttct

SEQ ID NO: 21140 - DNA, 21 bp, Artificial Sequence
  Description of Artificial Sequence: Synthetic oligonucleotide
aataagacgcagagtaggcat

SEQ ID NO: 21141 - DNA, 21 bp, Artificial Sequence
  Description of Artificial Sequence: Synthetic oligonucleotide
aataaggtgttgcatgctccg

SEQ ID NO: 21142 - DNA, 21 bp, Artificial Sequence
  Description of Artificial Sequence: Synthetic oligonucleotide
aataaggtgtctggtccgatg

SEQ ID NO: 21143 - DNA, 21 bp, Artificial Sequence
  Description of Artificial Sequence: Synthetic oligonucleotide
aataagtatcaggatttgcgt

SEQ ID NO: 21144 - DNA, 21 bp, Artificial Sequence
  Description of Artificial Sequence: Synthetic oligonucleotide
aatttggctcatactaagttt

SEQ ID NO: 21145 - DNA, 21 bp, Artificial Sequence
  Description of Artificial Sequence: Synthetic oligonucleotide
aatcttgcgctggatgctcgt

SEQ ID NO: 21146 - DNA, 21 bp, Artificial Sequence
  Description of Artificial Sequence: Synthetic oligonucleotide
aatcttgctcctattcagcgg

SEQ ID NO: 21147 - DNA, 21 bp, Artificial Sequence
  Description of Artificial Sequence: Synthetic oligonucleotide
aatttggatcgtccggtgacg

SEQ ID NO: 21148 - DNA, 21 bp, Artificial Sequence
  Description of Artificial Sequence: Synthetic oligonucleotide
aatcttgagactattcctagg

SEQ ID NO: 21149 - DNA, 21 bp, Artificial Sequence
  Description of Artificial Sequence: Synthetic oligonucleotide
aatttgggtggttcggtggag

SEQ ID NO: 21150 - DNA, 21 bp, Artificial Sequence
  Description of Artificial Sequence: Synthetic oligonucleotide
aatctgggtaagaaggagctt

SEQ ID NO: 21151 - DNA, 21 bp, Artificial Sequence
  Description of Artificial Sequence: Synthetic oligonucleotide
aatttggggcctacgctgccg

SEQ ID NO: 21152 - DNA, 21 bp, Artificial Sequence
  Description of Artificial Sequence: Synthetic oligonucleotide
aatttgggtccttatcctctt

SEQ ID NO: 21153 - DNA, 21 bp, Artificial Sequence
  Description of Artificial Sequence: Synthetic oligonucleotide
aatttgcatcttattagtgcg

SEQ ID NO: 21154 - DNA, 21 bp, Artificial Sequence
  Description of Artificial Sequence: Synthetic oligonucleotide
aatctgcatttgccgtcgagt

SEQ ID NO: 21155 - DNA, 21 bp, Artificial Sequence
  Description of Artificial Sequence: Synthetic oligonucleotide
aatttgcatcggacgcctgat

SEQ ID NO: 21156 - DNA, 21 bp, Artificial Sequence
  Description of Artificial Sequence: Synthetic oligonucleotide
aatttgcattcgactacggcg

SEQ ID NO: 21157 - DNA, 21 bp, Artificial Sequence
  Description of Artificial Sequence: Synthetic oligonucleotide
aatctgattgctatgggttct

SEQ ID NO: 21158 - DNA, 21 bp, Artificial Sequence
  Description of Artificial Sequence: Synthetic oligonucleotide
aatttgattccgacgaaggcg

SEQ ID NO: 21159 - DNA, 21 bp, Artificial Sequence
  Description of Artificial Sequence: Synthetic oligonucleotide
aatctgaagcttatgtctggt

SEQ ID NO: 21160 - DNA, 21 bp, Artificial Sequence
  Description of Artificial Sequence: Synthetic oligonucleotide
aatttgaaggtgctggttacg

SEQ ID NO: 21161 - DNA, 21 bp, Artificial Sequence
  Description of Artificial Sequence: Synthetic oligonucleotide
aatttgaaggtgacgagggat

SEQ ID NO: 21162 - DNA, 21 bp, Artificial Sequence
  Description of Artificial Sequence: Synthetic oligonucleotide
aatctgcttgatgtgcatttg

SEQ ID NO: 21163 - DNA, 21 bp, Artificial Sequence
  Description of Artificial Sequence: Synthetic oligonucleotide
aatctgttgggtcatgctgtg

SEQ ID NO: 21164 - DNA, 21 bp, Artificial Sequence
  Description of Artificial Sequence: Synthetic oligonucleotide
aatcttctgactaatgctgtt

SEQ ID NO: 21165 - DNA, 21 bp, Artificial Sequence
  Description of Artificial Sequence: Synthetic oligonucleotide
aatctgaatgcgacgtcggtg

SEQ ID NO: 21166 - DNA, 21 bp, Artificial Sequence
  Description of Artificial Sequence: Synthetic oligonucleotide
aatttgccgccgagttcgcct

SEQ ID NO: 21167 - DNA, 21 bp, Artificial Sequence
  Description of Artificial Sequence: Synthetic oligonucleotide
aatttgccgcggccttctttg

SEQ ID NO: 21168 - DNA, 21 bp, Artificial Sequence
  Description of Artificial Sequence: Synthetic oligonucleotide
aatttgcctaggcggactgat

SEQ ID NO: 21169 - DNA, 21 bp, Artificial Sequence
  Description of Artificial Sequence: Synthetic oligonucleotide
aatttgccttattcgttggtt

SEQ ID NO: 21170 - DNA, 21 bp, Artificial Sequence
  Description of Artificial Sequence: Synthetic oligonucleotide
aatcttccttatacgcaggct

SEQ ID NO: 21171 - DNA, 21 bp, Artificial Sequence
  Description of Artificial Sequence: Synthetic oligonucleotide
aatctgcagcttacgaatggt

SEQ ID NO: 21172 - DNA, 21 bp, Artificial Sequence
  Description of Artificial Sequence: Synthetic oligonucleotide
aatttgagggatggtgggact

SEQ ID NO: 21173 - DNA, 21 bp, Artificial Sequence
  Description of Artificial Sequence: Synthetic oligonucleotide
aatttgcgtgggaatccggct

SEQ ID NO: 21174 - DNA, 21 bp, Artificial Sequence
  Description of Artificial Sequence: Synthetic oligonucleotide
aatctgcggatgcagattcct

SEQ ID NO: 21175 - DNA, 21 bp, Artificial Sequence
  Description of Artificial Sequence: Synthetic oligonucleotide
aatttgcgtcctatgtcgtcg

SEQ ID NO: 21176 - DNA, 21 bp, Artificial Sequence
  Description of Artificial Sequence: Synthetic oligonucleotide
aatctttctgatgatagggag

SEQ ID NO: 21177 - DNA, 21 bp, Artificial Sequence
  Description of Artificial Sequence: Synthetic oligonucleotide
aatctgtcggatagtaggagt

SEQ ID NO: 21178 - DNA, 21 bp, Artificial Sequence
  Description of Artificial Sequence: Synthetic oligonucleotide
aatttgagtcatggtgtgttg

SEQ ID NO: 21179 - DNA, 21 bp, Artificial Sequence
  Description of Artificial Sequence: Synthetic oligonucleotide
aatctttcgcataggcctatg

SEQ ID NO: 21180 - DNA, 21 bp, Artificial Sequence
  Description of Artificial Sequence: Synthetic oligonucleotide
aatttgtctatgggttcgccg

SEQ ID NO: 21181 - DNA, 21 bp, Artificial Sequence
  Description of Artificial Sequence: Synthetic oligonucleotide
aatctgagtaattcggtgaag

SEQ ID NO: 21182 - DNA, 21 bp, Artificial Sequence
  Description of Artificial Sequence: Synthetic oligonucleotide
aatctttctccttatcctatg

SEQ ID NO: 21183 - DNA, 21 bp, Artificial Sequence
  Description of Artificial Sequence: Synthetic oligonucleotide
aatctttctccttatactatg

SEQ ID NO: 21184 - DNA, 21 bp, Artificial Sequence
  Description of Artificial Sequence: Synthetic oligonucleotide
aatctgagtcgggattctact

SEQ ID NO: 21185 - DNA, 21 bp, Artificial Sequence
  Description of Artificial Sequence: Synthetic oligonucleotide
aatctttcttcgggtcaggtt

SEQ ID NO: 21186 - DNA, 21 bp, Artificial Sequence
  Description of Artificial Sequence: Synthetic oligonucleotide
aatttgtcgtatacgcagcag

SEQ ID NO: 21187 - DNA, 21 bp, Artificial Sequence
  Description of Artificial Sequence: Synthetic oligonucleotide
aatttgactgcgggtcctcct

SEQ ID NO: 21188 - DNA, 21 bp, Artificial Sequence
  Description of Artificial Sequence: Synthetic oligonucleotide
aatttgacgggtggtagttct

SEQ ID NO: 21189 - DNA, 21 bp, Artificial Sequence
  Description of Artificial Sequence: Synthetic oligonucleotide
aatcttactcatactgttatg

SEQ ID NO: 21190 - DNA, 21 bp, Artificial Sequence
  Description of Artificial Sequence: Synthetic oligonucleotide
aatctgactaattcgagtatg

SEQ ID NO: 21191 - DNA, 21 bp, Artificial Sequence
  Description of Artificial Sequence: Synthetic oligonucleotide
aatctgacgcgtatgattcat

SEQ ID NO: 21192 - DNA, 21 bp, Artificial Sequence
  Description of Artificial Sequence: Synthetic oligonucleotide
aatctgacggttaaggttcag

SEQ ID NO: 21193 - DNA, 21 bp, Artificial Sequence
  Description of Artificial Sequence: Synthetic oligonucleotide
aatttggttcagtttgttcat

SEQ ID NO: 21194 - DNA, 21 bp, Artificial Sequence
  Description of Artificial Sequence: Synthetic oligonucleotide
aatttggttcagaataagccg

SEQ ID NO: 21195 - DNA, 21 bp, Artificial Sequence
  Description of Artificial Sequence: Synthetic oligonucleotide
aatctttatgcgtatgatccg

SEQ ID NO: 21196 - DNA, 21 bp, Artificial Sequence
  Description of Artificial Sequence: Synthetic oligonucleotide
aatttgtatactccttatcct

SEQ ID NO: 21197 - DNA, 21 bp, Artificial Sequence
  Description of Artificial Sequence: Synthetic oligonucleotide
aatatggcgcattctccgccg

SEQ ID NO: 21198 - DNA, 21 bp, Artificial Sequence
  Description of Artificial Sequence: Synthetic oligonucleotide
aatatggcgcatgtgcagtat

SEQ ID NO: 21199 - DNA, 21 bp, Artificial Sequence
  Description of Artificial Sequence: Synthetic oligonucleotide
aatatggctattgttgagcag

SEQ ID NO: 21200 - DNA, 21 bp, Artificial Sequence
  Description of Artificial Sequence: Synthetic oligonucleotide
aatatggctacgattagggtt

SEQ ID NO: 21201 - DNA, 21 bp, Artificial Sequence
  Description of Artificial Sequence: Synthetic oligonucleotide
aatatgcatattcgttctact

SEQ ID NO: 21202 - DNA, 21 bp, Artificial Sequence
  Description of Artificial Sequence: Synthetic oligonucleotide
aatatgcatactcggacttct

SEQ ID NO: 21203 - DNA, 21 bp, Artificial Sequence
  Description of Artificial Sequence: Synthetic oligonucleotide
aatatgattgctctgcagacg

SEQ ID NO: 21204 - DNA, 21 bp, Artificial Sequence
  Description of Artificial Sequence: Synthetic oligonucleotide
aatatgaaggcttcgtctgtt

SEQ ID NO: 21205 - DNA, 21 bp, Artificial Sequence
  Description of Artificial Sequence: Synthetic oligonucleotide
aatatgctgacggatcgtgtg

SEQ ID NO: 21206 - DNA, 21 bp, Artificial Sequence
  Description of Artificial Sequence: Synthetic oligonucleotide
aatatgccgaatacttctcat

SEQ ID NO: 21207 - DNA, 21 bp, Artificial Sequence
  Description of Artificial Sequence: Synthetic oligonucleotide
aatatgcctaggcatgggctt

SEQ ID NO: 21208 - DNA, 21 bp, Artificial Sequence
  Description of Artificial Sequence: Synthetic oligonucleotide
aatatgccggttggttcgacg

SEQ ID NO: 21209 - DNA, 21 bp, Artificial Sequence
  Description of Artificial Sequence: Synthetic oligonucleotide
aatatgcaggggactaatcct

SEQ ID NO: 21210 - DNA, 21 bp, Artificial Sequence
  Description of Artificial Sequence: Synthetic oligonucleotide
aatatgcgggatacggcgagt

SEQ ID NO: 21211 - DNA, 21 bp, Artificial Sequence
  Description of Artificial Sequence: Synthetic oligonucleotide
aatatgcggctggatcagggt

SEQ ID NO: 21212 - DNA, 21 bp, Artificial Sequence
  Description of Artificial Sequence: Synthetic oligonucleotide
aatatgcggcctcatactggt

SEQ ID NO: 21213 - DNA, 21 bp, Artificial Sequence
  Description of Artificial Sequence: Synthetic oligonucleotide
aatatgcgggttactccgcag

SEQ ID NO: 21214 - DNA, 21 bp, Artificial Sequence
  Description of Artificial Sequence: Synthetic oligonucleotide
aatatgtctgctaatattaat

SEQ ID NO: 21215 - DNA, 21 bp, Artificial Sequence
  Description of Artificial Sequence: Synthetic oligonucleotide
aatatgtcgaagagtcctggt

SEQ ID NO: 21216 - DNA, 21 bp, Artificial Sequence
  Description of Artificial Sequence: Synthetic oligonucleotide
aatatgagtaatgtgcatacg

SEQ ID NO: 21217 - DNA, 21 bp, Artificial Sequence
  Description of Artificial Sequence: Synthetic oligonucleotide
aatatgtcgcggggtgcgatg

SEQ ID NO: 21218 - DNA, 21 bp, Artificial Sequence
  Description of Artificial Sequence: Synthetic oligonucleotide
aatatgtatccggtgcctcct

SEQ ID NO: 21219 - DNA, 21 bp, Artificial Sequence
  Description of Artificial Sequence: Synthetic oligonucleotide
aataatgctaaggcgatgact

SEQ ID NO: 21220 - DNA, 21 bp, Artificial Sequence
  Description of Artificial Sequence: Synthetic oligonucleotide
aataatgcttcgagttctgat

SEQ ID NO: 21221 - DNA, 21 bp, Artificial Sequence
  Description of Artificial Sequence: Synthetic oligonucleotide
aataatgatcggctggtgcat

SEQ ID NO: 21222 - DNA, 21 bp, Artificial Sequence
  Description of Artificial Sequence: Synthetic oligonucleotide
aataatgagttgaggtcgtct

SEQ ID NO: 21223 - DNA, 21 bp, Artificial Sequence
  Description of Artificial Sequence: Synthetic oligonucleotide
aataattttggtaatacttat

SEQ ID NO: 21224 - DNA, 21 bp, Artificial Sequence
  Description of Artificial Sequence: Synthetic oligonucleotide
aataatgggaagggtcctgtg

SEQ ID NO: 21225 - DNA, 21 bp, Artificial Sequence
  Description of Artificial Sequence: Synthetic oligonucleotide
aataatgggttgccttctcgg

SEQ ID NO: 21226 - DNA, 21 bp, Artificial Sequence
  Description of Artificial Sequence: Synthetic oligonucleotide
aataatgggcgtgctcagctt

SEQ ID NO: 21227 - DNA, 21 bp, Artificial Sequence
  Description of Artificial Sequence: Synthetic oligonucleotide
aataatgggaggttgccgaat

SEQ ID NO: 21228 - DNA, 21 bp, Artificial Sequence
  Description of Artificial Sequence: Synthetic oligonucleotide
aataatcataagattcagtct

SEQ ID NO: 21229 - DNA, 21 bp, Artificial Sequence
  Description of Artificial Sequence: Synthetic oligonucleotide
aataatctgaggttgaatctt

SEQ ID NO: 21230 - DNA, 21 bp, Artificial Sequence
  Description of Artificial Sequence: Synthetic oligonucleotide
aataatcttaggacgtctttg

SEQ ID NO: 21231 - DNA, 21 bp, Artificial Sequence
  Description of Artificial Sequence: Synthetic oligonucleotide
aataatatgaatactatgccg

SEQ ID NO: 21232 - DNA, 21 bp, Artificial Sequence
  Description of Artificial Sequence: Synthetic oligonucleotide
aataataatgagcattatgtt

SEQ ID NO: 21233 - DNA, 21 bp, Artificial Sequence
  Description of Artificial Sequence: Synthetic oligonucleotide
aataataatcttgagacgatg

SEQ ID NO: 21234 - DNA, 21 bp, Artificial Sequence
  Description of Artificial Sequence: Synthetic oligonucleotide
aataataatcctaagtatggg

SEQ ID NO: 21235 - DNA, 21 bp, Artificial Sequence
  Description of Artificial Sequence: Synthetic oligonucleotide
aataataatacgactccgttg

SEQ ID NO: 21236 - DNA, 21 bp, Artificial Sequence
  Description of Artificial Sequence: Synthetic oligonucleotide
aataatccggctcctccgtcg

SEQ ID NO: 21237 - DNA, 21 bp, Artificial Sequence
  Description of Artificial Sequence: Synthetic oligonucleotide
aataatccggatgcgtatagt

SEQ ID NO: 21238 - DNA, 21 bp, Artificial Sequence
  Description of Artificial Sequence: Synthetic oligonucleotide
aataatcgtccggcgcgggag

SEQ ID NO: 21239 - DNA, 21 bp, Artificial Sequence
  Description of Artificial Sequence: Synthetic oligonucleotide
aataatagtatggctctgatg

SEQ ID NO: 21240 - DNA, 21 bp, Artificial Sequence
  Description of Artificial Sequence: Synthetic oligonucleotide
aataattcgcggattagttct

SEQ ID NO: 21241 - DNA, 21 bp, Artificial Sequence
  Description of Artificial Sequence: Synthetic oligonucleotide
aataattcgcgggttgggacg

SEQ ID NO: 21242 - DNA, 21 bp, Artificial Sequence
  Description of Artificial Sequence: Synthetic oligonucleotide
aataattctagttattctgag

SEQ ID NO: 21243 - DNA, 21 bp, Artificial Sequence
  Description of Artificial Sequence: Synthetic oligonucleotide
aataatgtgaatcctattgcg

SEQ ID NO: 21244 - DNA, 21 bp, Artificial Sequence
  Description of Artificial Sequence: Synthetic oligonucleotide
aataatgtttctacgattatt

SEQ ID NO: 21245 - DNA, 21 bp, Artificial Sequence
  Description of Artificial Sequence: Synthetic oligonucleotide
aataattggcataatacgccg

SEQ ID NO: 21246 - DNA, 21 bp, Artificial Sequence
  Description of Artificial Sequence: Synthetic oligonucleotide
aataattataatcctcctact

SEQ ID NO: 21247 - DNA, 21 bp, Artificial Sequence
  Description of Artificial Sequence: Synthetic oligonucleotide
aatccggctgcttcgactcat

SEQ ID NO: 21248 - DNA, 21 bp, Artificial Sequence
  Description of Artificial Sequence: Synthetic oligonucleotide
aatccggctcttcctggtcat

SEQ ID NO: 21249 - DNA, 21 bp, Artificial Sequence
  Description of Artificial Sequence: Synthetic oligonucleotide
aatccggagggttgggggctt

SEQ ID NO: 21250 - DNA, 21 bp, Artificial Sequence
  Description of Artificial Sequence: Synthetic oligonucleotide
aatcctgagacgctgattagg

SEQ ID NO: 21251 - DNA, 21 bp, Artificial Sequence
  Description of Artificial Sequence: Synthetic oligonucleotide
aatcctgaggtttctccgtct

SEQ ID NO: 21252 - DNA, 21 bp, Artificial Sequence
  Description of Artificial Sequence: Synthetic oligonucleotide
aatcctggtgcgaatatgtcg

SEQ ID NO: 21253 - DNA, 21 bp, Artificial Sequence
  Description of Artificial Sequence: Synthetic oligonucleotide
aatccgggttctcagatggtt

SEQ ID NO: 21254 - DNA, 21 bp, Artificial Sequence
  Description of Artificial Sequence: Synthetic oligonucleotide
aatccgggtactactacgact

SEQ ID NO: 21255 - DNA, 21 bp, Artificial Sequence
  Description of Artificial Sequence: Synthetic oligonucleotide
aatcctggtgtgaagagtgct

SEQ ID NO: 21256 - DNA, 21 bp, Artificial Sequence
  Description of Artificial Sequence: Synthetic oligonucleotide
aatcctggtgtgactcatctt

SEQ ID NO: 21257 - DNA, 21 bp, Artificial Sequence
  Description of Artificial Sequence: Synthetic oligonucleotide
aatcctcatatttcggtttct

SEQ ID NO: 21258 - DNA, 21 bp, Artificial Sequence
  Description of Artificial Sequence: Synthetic oligonucleotide
aatcctcatatgcagaatatt

SEQ ID NO: 21259 - DNA, 21 bp, Artificial Sequence
  Description of Artificial Sequence: Synthetic oligonucleotide
aatccgcataatgatacgggt

SEQ ID NO: 21260 - DNA, 21 bp, Artificial Sequence
  Description of Artificial Sequence: Synthetic oligonucleotide
aatccgattctgaagactcag

SEQ ID NO: 21261 - DNA, 21 bp, Artificial Sequence
  Description of Artificial Sequence: Synthetic oligonucleotide
aatcctattagttcggggcct

SEQ ID NO: 21262 - DNA, 21 bp, Artificial Sequence
  Description of Artificial Sequence: Synthetic oligonucleotide
aatccgaagttgatgaaggag

SEQ ID NO: 21263 - DNA, 21 bp, Artificial Sequence
  Description of Artificial Sequence: Synthetic oligonucleotide
aatccgctttcgaatgatggt

SEQ ID NO: 21264 - DNA, 21 bp, Artificial Sequence
  Description of Artificial Sequence: Synthetic oligonucleotide
aatcctcttacgactcatgat

SEQ ID NO: 21265 - DNA, 21 bp, Artificial Sequence
  Description of Artificial Sequence: Synthetic oligonucleotide
aatcctatgatgcatgggtcg

SEQ ID NO: 21266 - DNA, 21 bp, Artificial Sequence
  Description of Artificial Sequence: Synthetic oligonucleotide
aatccgatgacgcctgatcct

SEQ ID NO: 21267 - DNA, 21 bp, Artificial Sequence
  Description of Artificial Sequence: Synthetic oligonucleotide
aatccgaatcaggttgcggag

SEQ ID NO: 21268 - DNA, 21 bp, Artificial Sequence
  Description of Artificial Sequence: Synthetic oligonucleotide
aatcctaatacgcgtaattgt

SEQ ID NO: 21269 - DNA, 21 bp, Artificial Sequence
  Description of Artificial Sequence: Synthetic oligonucleotide
aatccgcctgcgctgttgcct

SEQ ID NO: 21270 - DNA, 21 bp, Artificial Sequence
  Description of Artificial Sequence: Synthetic oligonucleotide
aatccgcctcctccgagtcct

SEQ ID NO: 21271 - DNA, 21 bp, Artificial Sequence
  Description of Artificial Sequence: Synthetic oligonucleotide
aatccgccgaggtatggtagt

SEQ ID NO: 21272 - DNA, 21 bp, Artificial Sequence
  Description of Artificial Sequence: Synthetic oligonucleotide
aatcctcctagtctgtcttcg

SEQ ID NO: 21273 - DNA, 21 bp, Artificial Sequence
  Description of Artificial Sequence: Synthetic oligonucleotide
aatcctccttcgcggggtaat

SEQ ID NO: 21274 - DNA, 21 bp, Artificial Sequence
  Description of Artificial Sequence: Synthetic oligonucleotide
aatcctccttatgcgctggct

SEQ ID NO: 21275 - DNA, 21 bp, Artificial Sequence
  Description of Artificial Sequence: Synthetic oligonucleotide
aatccgcagatgcctagtccg

SEQ ID NO: 21276 - DNA, 21 bp, Artificial Sequence
  Description of Artificial Sequence: Synthetic oligonucleotide
aatccgcagaggcttgggcag

SEQ ID NO: 21277 - DNA, 21 bp, Artificial Sequence
  Description of Artificial Sequence: Synthetic oligonucleotide
aatcctcagagtgtgacgcat

SEQ ID NO: 21278 - DNA, 21 bp, Artificial Sequence
  Description of Artificial Sequence: Synthetic oligonucleotide
aatcctagggcgcagatgagt

SEQ ID NO: 21279 - DNA, 21 bp, Artificial Sequence
  Description of Artificial Sequence: Synthetic oligonucleotide
aatccgcgtgcttcgtcttgg

SEQ ID NO: 21280 - DNA, 21 bp, Artificial Sequence
  Description of Artificial Sequence: Synthetic oligonucleotide
aatcctcggaatccgactctg

SEQ ID NO: 21281 - DNA, 21 bp, Artificial Sequence
  Description of Artificial Sequence: Synthetic oligonucleotide
aatccgaggcctgggcaggtg

SEQ ID NO: 21282 - DNA, 21 bp, Artificial Sequence
  Description of Artificial Sequence: Synthetic oligonucleotide
aatccgagtggtaaggttgcg

SEQ ID NO: 21283 - DNA, 21 bp, Artificial Sequence
  Description of Artificial Sequence: Synthetic oligonucleotide
aatccgtcgcttcagactacg

SEQ ID NO: 21284 - DNA, 21 bp, Artificial Sequence
  Description of Artificial Sequence: Synthetic oligonucleotide
aatccgtctttgcggattggt

SEQ ID NO: 21285 - DNA, 21 bp, Artificial Sequence
  Description of Artificial Sequence: Synthetic oligonucleotide
aatccttcgaatcatgcgctt

SEQ ID NO: 21286 - DNA, 21 bp, Artificial Sequence
  Description of Artificial Sequence: Synthetic oligonucleotide
aatccttctcagtttgatttt

SEQ ID NO: 21287 - DNA, 21 bp, Artificial Sequence
  Description of Artificial Sequence: Synthetic oligonucleotide
aatccttcgcggctgccgcag

SEQ ID NO: 21288 - DNA, 21 bp, Artificial Sequence
  Description of Artificial Sequence: Synthetic oligonucleotide
aatcctagtaggcaggcgccg

SEQ ID NO: 21289 - DNA, 21 bp, Artificial Sequence
  Description of Artificial Sequence: Synthetic oligonucleotide
aatccttcgtcttcgggttgt

SEQ ID NO: 21290 - DNA, 21 bp, Artificial Sequence
  Description of Artificial Sequence: Synthetic oligonucleotide
aatccgtctgtggttactgct

SEQ ID NO: 21291 - DNA, 21 bp, Artificial Sequence
  Description of Artificial Sequence: Synthetic oligonucleotide
aatcctactgcgtcgaatgct

SEQ ID NO: 21292 - DNA, 21 bp, Artificial Sequence
  Description of Artificial Sequence: Synthetic oligonucleotide
aatcctacgtttcatgggtct

SEQ ID NO: 21293 - DNA, 21 bp, Artificial Sequence
  Description of Artificial Sequence: Synthetic oligonucleotide
aatcctactcagccgattaag

SEQ ID NO: 21294 - DNA, 21 bp, Artificial Sequence
  Description of Artificial Sequence: Synthetic oligonucleotide
aatccgacgtcgttgccgtct

SEQ ID NO: 21295 - DNA, 21 bp, Artificial Sequence
  Description of Artificial Sequence: Synthetic oligonucleotide
aatccgacgactcgttatatg

SEQ ID NO: 21296 - DNA, 21 bp, Artificial Sequence
  Description of Artificial Sequence: Synthetic oligonucleotide
aatccgactgttacggggtcg

SEQ ID NO: 21297 - DNA, 21 bp, Artificial Sequence
  Description of Artificial Sequence: Synthetic oligonucleotide
aatccttataatactgaggcg

SEQ ID NO: 21298 - DNA, 21 bp, Artificial Sequence
  Description of Artificial Sequence: Synthetic oligonucleotide
aatccgtatgtgcttcgtgct

SEQ ID NO: 21299 - DNA, 21 bp, Artificial Sequence
  Description of Artificial Sequence: Synthetic oligonucleotide
aatcaggataaggctactcat

SEQ ID NO: 21300 - DNA, 21 bp, Artificial Sequence
  Description of Artificial Sequence: Synthetic oligonucleotide
aatcaggatccttatatgtat

SEQ ID NO: 21301 - DNA, 21 bp, Artificial Sequence
  Description of Artificial Sequence: Synthetic oligonucleotide
aatcaggagggttctcctatt

SEQ ID NO: 21302 - DNA, 21 bp, Artificial Sequence
  Description of Artificial Sequence: Synthetic oligonucleotide
aatcaggagaataagattggg

SEQ ID NO: 21303 - DNA, 21 bp, Artificial Sequence
  Description of Artificial Sequence: Synthetic oligonucleotide
aatcagggtcagaatcctgtg

SEQ ID NO: 21304 - DNA, 21 bp, Artificial Sequence
  Description of Artificial Sequence: Synthetic oligonucleotide
aatcagattgctgtgtcgagg

SEQ ID NO: 21305 - DNA, 21 bp, Artificial Sequence
  Description of Artificial Sequence: Synthetic oligonucleotide
aatcagctgcatcctgtgcgt

SEQ ID NO: 21306 - DNA, 21 bp, Artificial Sequence
  Description of Artificial Sequence: Synthetic oligonucleotide
aatcagcttgtggctcatgct

SEQ ID NO: 21307 - DNA, 21 bp, Artificial Sequence
  Description of Artificial Sequence: Synthetic oligonucleotide
aatcagaattatcagattgtg

SEQ ID NO: 21308 - DNA, 21 bp, Artificial Sequence
  Description of Artificial Sequence: Synthetic oligonucleotide
aatcagcagggttcgatggct

SEQ ID NO: 21309 - DNA, 21 bp, Artificial Sequence
  Description of Artificial Sequence: Synthetic oligonucleotide
aatcagcgggatactatgact

SEQ ID NO: 21310 - DNA, 21 bp, Artificial Sequence
  Description of Artificial Sequence: Synthetic oligonucleotide
aatcagcgtccggttaatttt

SEQ ID NO: 21311 - DNA, 21 bp, Artificial Sequence
  Description of Artificial Sequence: Synthetic oligonucleotide
aatcagaggtcgactagtatg

SEQ ID NO: 21312 - DNA, 21 bp, Artificial Sequence
  Description of Artificial Sequence: Synthetic oligonucleotide
aatcagagtattcatcagact

SEQ ID NO: 21313 - DNA, 21 bp, Artificial Sequence
  Description of Artificial Sequence: Synthetic oligonucleotide
aatcagacggcgtgtgaggtt

SEQ ID NO: 21314 - DNA, 21 bp, Artificial Sequence
  Description of Artificial Sequence: Synthetic oligonucleotide
aatcagacgttgatggctagt

SEQ ID NO: 21315 - DNA, 21 bp, Artificial Sequence
  Description of Artificial Sequence: Synthetic oligonucleotide
aatcagactaatgggcgggct

SEQ ID NO: 21316 - DNA, 21 bp, Artificial Sequence
  Description of Artificial Sequence: Synthetic oligonucleotide
aatcagactcgggtggttccg

SEQ ID NO: 21317 - DNA, 21 bp, Artificial Sequence
  Description of Artificial Sequence: Synthetic oligonucleotide
aatcagtatccgagggatcct

SEQ ID NO: 21318 - DNA, 21 bp, Artificial Sequence
  Description of Artificial Sequence: Synthetic oligonucleotide
aatcgtgctgagtcgctgctg

SEQ ID NO: 21319 - DNA, 21 bp, Artificial Sequence
  Description of Artificial Sequence: Synthetic oligonucleotide
aatcgggctcctcctctgtcg

SEQ ID NO: 21320 - DNA, 21 bp, Artificial Sequence
  Description of Artificial Sequence: Synthetic oligonucleotide
aatcgggatattgcgggtagg

SEQ ID NO: 21321 - DNA, 21 bp, Artificial Sequence
  Description of Artificial Sequence: Synthetic oligonucleotide
aatcgggatattttgagttcg

SEQ ID NO: 21322 - DNA, 21 bp, Artificial Sequence
  Description of Artificial Sequence: Synthetic oligonucleotide
aatcgtgatgttccggagtcg

SEQ ID NO: 21323 - DNA, 21 bp, Artificial Sequence
  Description of Artificial Sequence: Synthetic oligonucleotide
aatcgtgattatagtacggct

SEQ ID NO: 21324 - DNA, 21 bp, Artificial Sequence
  Description of Artificial Sequence: Synthetic oligonucleotide
aatcgtgattatagtgttgat

SEQ ID NO: 21325 - DNA, 21 bp, Artificial Sequence
  Description of Artificial Sequence: Synthetic oligonucleotide
aatcgtgattatacttctcct

SEQ ID NO: 21326 - DNA, 21 bp, Artificial Sequence
  Description of Artificial Sequence: Synthetic oligonucleotide
aatcgtgagccggggcttaat

SEQ ID NO: 21327 - DNA, 21 bp, Artificial Sequence
  Description of Artificial Sequence: Synthetic oligonucleotide
aatcgggagcgggcgatgact

SEQ ID NO: 21328 - DNA, 21 bp, Artificial Sequence
  Description of Artificial Sequence: Synthetic oligonucleotide
aatagggagagttattctctg

SEQ ID NO: 21329 - DNA, 21 bp, Artificial Sequence
  Description of Artificial Sequence: Synthetic oligonucleotide
aatcgttttcctcatgttgat

SEQ ID NO: 21330 - DNA, 21 bp, Artificial Sequence
  Description of Artificial Sequence: Synthetic oligonucleotide
aatcgtggtcatttggattct

SEQ ID NO: 21331 - DNA, 21 bp, Artificial Sequence
  Description of Artificial Sequence: Synthetic oligonucleotide
aatcggggtctggttgctgcg

SEQ ID NO: 21332 - DNA, 21 bp, Artificial Sequence
  Description of Artificial Sequence: Synthetic oligonucleotide
aatcgtggtaattttgatcgt

SEQ ID NO: 21333 - DNA, 21 bp, Artificial Sequence
  Description of Artificial Sequence: Synthetic oligonucleotide
aatcgtggtccttctaatacg

SEQ ID NO: 21334 - DNA, 21 bp, Artificial Sequence
  Description of Artificial Sequence: Synthetic oligonucleotide
aatagggggcagactgcgcag

SEQ ID NO: 21335 - DNA, 21 bp, Artificial Sequence
  Description of Artificial Sequence: Synthetic oligonucleotide
aatcgtgggacgcttctgtct

SEQ ID NO: 21336 - DNA, 21 bp, Artificial Sequence
  Description of Artificial Sequence: Synthetic oligonucleotide
aatcggattgctgcggaggct

SEQ ID NO: 21337 - DNA, 21 bp, Artificial Sequence
  Description of Artificial Sequence: Synthetic oligonucleotide
aatcggattatgccgatttct

SEQ ID NO: 21338 - DNA, 21 bp, Artificial Sequence
  Description of Artificial Sequence: Synthetic oligonucleotide
aataggatttcggcgcagcat

SEQ ID NO: 21339 - DNA, 21 bp, Artificial Sequence
  Description of Artificial Sequence: Synthetic oligonucleotide
aataggatttcgtcgtttccg

SEQ ID NO: 21340 - DNA, 21 bp, Artificial Sequence
  Description of Artificial Sequence: Synthetic oligonucleotide
aatcgtaaggctctttctgag

SEQ ID NO: 21341 - DNA, 21 bp, Artificial Sequence
  Description of Artificial Sequence: Synthetic oligonucleotide
aatcgtaagcctacgatggat

SEQ ID NO: 21342 - DNA, 21 bp, Artificial Sequence
  Description of Artificial Sequence: Synthetic oligonucleotide
aatcgtttgcttgggtatggt

SEQ ID NO: 21343 - DNA, 21 bp, Artificial Sequence
  Description of Artificial Sequence: Synthetic oligonucleotide
aatcgtatgccttcggcggct

SEQ ID NO: 21344 - DNA, 21 bp, Artificial Sequence
  Description of Artificial Sequence: Synthetic oligonucleotide
aataggatgtcggggtcggat

SEQ ID NO: 21345 - DNA, 21 bp, Artificial Sequence
  Description of Artificial Sequence: Synthetic oligonucleotide
aatcgtaatttggataatggt

SEQ ID NO: 21346 - DNA, 21 bp, Artificial Sequence
  Description of Artificial Sequence: Synthetic oligonucleotide
aatcgtcctatggagctgctg

SEQ ID NO: 21347 - DNA, 21 bp, Artificial Sequence
  Description of Artificial Sequence: Synthetic oligonucleotide
aatcggccgcagcatgcggtt

SEQ ID NO: 21348 - DNA, 21 bp, Artificial Sequence
  Description of Artificial Sequence: Synthetic oligonucleotide
aatcgtcaggatgtgccgagt

SEQ ID NO: 21349 - DNA, 21 bp, Artificial Sequence
  Description of Artificial Sequence: Synthetic oligonucleotide
aatcggcagggtaatgagctt

SEQ ID NO: 21350 - DNA, 21 bp, Artificial Sequence
  Description of Artificial Sequence: Synthetic oligonucleotide
aataggcagcctttgatgact

SEQ ID NO: 21351 - DNA, 21 bp, Artificial Sequence
  Description of Artificial Sequence: Synthetic oligonucleotide
aatcgtcagcctccgcgggag

SEQ ID NO: 21352 - DNA, 21 bp, Artificial Sequence
  Description of Artificial Sequence: Synthetic oligonucleotide
aataggcagtcgctgccgctg

SEQ ID NO: 21353 - DNA, 21 bp, Artificial Sequence
  Description of Artificial Sequence: Synthetic oligonucleotide
aatcgtcagactattgcgttg

SEQ ID NO: 21354 - DNA, 21 bp, Artificial Sequence
  Description of Artificial Sequence: Synthetic oligonucleotide
aataggaggactaatgaggat

SEQ ID NO: 21355 - DNA, 21 bp, Artificial Sequence
  Description of Artificial Sequence: Synthetic oligonucleotide
aataggtctgctgagtgttgg

SEQ ID NO: 21356 - DNA, 21 bp, Artificial Sequence
  Description of Artificial Sequence: Synthetic oligonucleotide
aatcgtagtgcgctgacgcct

SEQ ID NO: 21357 - DNA, 21 bp, Artificial Sequence
  Description of Artificial Sequence: Synthetic oligonucleotide
aataggtcggcgcgtgatccg

SEQ ID NO: 21358 - DNA, 21 bp, Artificial Sequence
  Description of Artificial Sequence: Synthetic oligonucleotide
aatcgttcggagatggtggag

SEQ ID NO: 21359 - DNA, 21 bp, Artificial Sequence
  Description of Artificial Sequence: Synthetic oligonucleotide
aatcgttcgggtttggtttcg

SEQ ID NO: 21360 - DNA, 21 bp, Artificial Sequence
  Description of Artificial Sequence: Synthetic oligonucleotide
aataggtcgattacgcatgat

SEQ ID NO: 21361 - DNA, 21 bp, Artificial Sequence
  Description of Artificial Sequence: Synthetic oligonucleotide
aataggagtttggcgacggtg

SEQ ID NO: 21362 - DNA, 21 bp, Artificial Sequence
  Description of Artificial Sequence: Synthetic oligonucleotide
aatcgttctgtgctttcggat

SEQ ID NO: 21363 - DNA, 21 bp, Artificial Sequence
  Description of Artificial Sequence: Synthetic oligonucleotide
aatcggagttatgattctccg

SEQ ID NO: 21364 - DNA, 21 bp, Artificial Sequence
  Description of Artificial Sequence: Synthetic oligonucleotide
aataggacgttggatatgagt

SEQ ID NO: 21365 - DNA, 21 bp, Artificial Sequence
  Description of Artificial Sequence: Synthetic oligonucleotide
aatcgtacgctgccgacttct

SEQ ID NO: 21366 - DNA, 21 bp, Artificial Sequence
  Description of Artificial Sequence: Synthetic oligonucleotide
aatcgtactctttatcctgcg

SEQ ID NO: 21367 - DNA, 21 bp, Artificial Sequence
  Description of Artificial Sequence: Synthetic oligonucleotide
aatcgtacgcagcagagtagt

SEQ ID NO: 21368 - DNA, 21 bp, Artificial Sequence
  Description of Artificial Sequence: Synthetic oligonucleotide
aatcgtactcagtctattagt

SEQ ID NO: 21369 - DNA, 21 bp, Artificial Sequence
  Description of Artificial Sequence: Synthetic oligonucleotide
aatcgtactacgcttatgagt

SEQ ID NO: 21370 - DNA, 21 bp, Artificial Sequence
  Description of Artificial Sequence: Synthetic oligonucleotide
aatcgggtgggtgagacgcgt

SEQ ID NO: 21371 - DNA, 21 bp, Artificial Sequence
  Description of Artificial Sequence: Synthetic oligonucleotide
aatagggttgggattgctcct

SEQ ID NO: 21372 - DNA, 21 bp, Artificial Sequence
  Description of Artificial Sequence: Synthetic oligonucleotide
aatcgtgttgtgtttgagggg

SEQ ID NO: 21373 - DNA, 21 bp, Artificial Sequence
  Description of Artificial Sequence: Synthetic oligonucleotide
aatcgttatgatgcgtctgat

SEQ ID NO: 21374 - DNA, 21 bp, Artificial Sequence
  Description of Artificial Sequence: Synthetic oligonucleotide
aattcggcggctcggattcat

SEQ ID NO: 21375 - DNA, 21 bp, Artificial Sequence
  Description of Artificial Sequence: Synthetic oligonucleotide
aattctgcggattctagtccg

SEQ ID NO: 21376 - DNA, 21 bp, Artificial Sequence
  Description of Artificial Sequence: Synthetic oligonucleotide
aatagtgcgatgcatggtact

SEQ ID NO: 21377 - DNA, 21 bp, Artificial Sequence
  Description of Artificial Sequence: Synthetic oligonucleotide
aatagtgcgtctgagtttgtg

SEQ ID NO: 21378 - DNA, 21 bp, Artificial Sequence
  Description of Artificial Sequence: Synthetic oligonucleotide
aatagtgcttcggagatgacg

SEQ ID NO: 21379 - DNA, 21 bp, Artificial Sequence
  Description of Artificial Sequence: Synthetic oligonucleotide
aattctgcttcgacgtttcag

SEQ ID NO: 21380 - DNA, 21 bp, Artificial Sequence
  Description of Artificial Sequence: Synthetic oligonucleotide
aattctgctagtacttttacg

SEQ ID NO: 21381 - DNA, 21 bp, Artificial Sequence
  Description of Artificial Sequence: Synthetic oligonucleotide
aattctgctgtgatgactcgt

SEQ ID NO: 21382 - DNA, 21 bp, Artificial Sequence
  Description of Artificial Sequence: Synthetic oligonucleotide
aattctgcttatccggtgcat

SEQ ID NO: 21383 - DNA, 21 bp, Artificial Sequence
  Description of Artificial Sequence: Synthetic oligonucleotide
aatagtgatttttcgcttgct

SEQ ID NO: 21384 - DNA, 21 bp, Artificial Sequence
  Description of Artificial Sequence: Synthetic oligonucleotide
aatagtgatcttcataagccg

SEQ ID NO: 21385 - DNA, 21 bp, Artificial Sequence
  Description of Artificial Sequence: Synthetic oligonucleotide
aattctgattctcgtacgcct

SEQ ID NO: 21386 - DNA, 21 bp, Artificial Sequence
  Description of Artificial Sequence: Synthetic oligonucleotide
aattcggattcttctattcgt

SEQ ID NO: 21387 - DNA, 21 bp, Artificial Sequence
  Description of Artificial Sequence: Synthetic oligonucleotide
aattcgggtctggagctgctt

SEQ ID NO: 21388 - DNA, 21 bp, Artificial Sequence
  Description of Artificial Sequence: Synthetic oligonucleotide
aattctgggaattcgactcct

SEQ ID NO: 21389 - DNA, 21 bp, Artificial Sequence
  Description of Artificial Sequence: Synthetic oligonucleotide
aatagtggtcgggctcatatt

SEQ ID NO: 21390 - DNA, 21 bp, Artificial Sequence
  Description of Artificial Sequence: Synthetic oligonucleotide
aattcgcatgcgcatcatgat

SEQ ID NO: 21391 - DNA, 21 bp, Artificial Sequence
  Description of Artificial Sequence: Synthetic oligonucleotide
aattctcataatttgacgctt

SEQ ID NO: 21392 - DNA, 21 bp, Artificial Sequence
  Description of Artificial Sequence: Synthetic oligonucleotide
aattcgcatccgcagacgagg

SEQ ID NO: 21393 - DNA, 21 bp, Artificial Sequence
  Description of Artificial Sequence: Synthetic oligonucleotide
aattctcatagttctccggct

SEQ ID NO: 21394 - DNA, 21 bp, Artificial Sequence
  Description of Artificial Sequence: Synthetic oligonucleotide
aattcgcattctgtgagtacg

SEQ ID NO: 21395 - DNA, 21 bp, Artificial Sequence
  Description of Artificial Sequence: Synthetic oligonucleotide
aattcgattccggagcggttt

SEQ ID NO: 21396 - DNA, 21 bp, Artificial Sequence
  Description of Artificial Sequence: Synthetic oligonucleotide
aatagtattaggttgtcgggg

SEQ ID NO: 21397 - DNA, 21 bp, Artificial Sequence
  Description of Artificial Sequence: Synthetic oligonucleotide
aatagtaagatgcctcgtgcg

SEQ ID NO: 21398 - DNA, 21 bp, Artificial Sequence
  Description of Artificial Sequence: Synthetic oligonucleotide
aattcgaagtatacgcctatg

SEQ ID NO: 21399 - DNA, 21 bp, Artificial Sequence
  Description of Artificial Sequence: Synthetic oligonucleotide
aattcgttggctgcgaggaat

SEQ ID NO: 21400 - DNA, 21 bp, Artificial Sequence
  Description of Artificial Sequence: Synthetic oligonucleotide
aattctctggctcggaaggag

SEQ ID NO: 21401 - DNA, 21 bp, Artificial Sequence
  Description of Artificial Sequence: Synthetic oligonucleotide
aattcgctgaatgatcgggct

SEQ ID NO: 21402 - DNA, 21 bp, Artificial Sequence
  Description of Artificial Sequence: Synthetic oligonucleotide
aattctttgaatcctggtttg

SEQ ID NO: 21403 - DNA, 21 bp, Artificial Sequence
  Description of Artificial Sequence: Synthetic oligonucleotide
aatagtcttccggattctgtg

SEQ ID NO: 21404 - DNA, 21 bp, Artificial Sequence
  Description of Artificial Sequence: Synthetic oligonucleotide
aatagtcttccgatggcttcg

SEQ ID NO: 21405 - DNA, 21 bp, Artificial Sequence
  Description of Artificial Sequence: Synthetic oligonucleotide
aattcgatgcagtatagtgcg

SEQ ID NO: 21406 - DNA, 21 bp, Artificial Sequence
  Description of Artificial Sequence: Synthetic oligonucleotide
aattcgaatgcggcgagtggg

SEQ ID NO: 21407 - DNA, 21 bp, Artificial Sequence
  Description of Artificial Sequence: Synthetic oligonucleotide
aattctaatcatgagcggtat

SEQ ID NO: 21408 - DNA, 21 bp, Artificial Sequence
  Description of Artificial Sequence: Synthetic oligonucleotide
aattcgaatactcctgggatg

SEQ ID NO: 21409 - DNA, 21 bp, Artificial Sequence
  Description of Artificial Sequence: Synthetic oligonucleotide
aattcgaatgttagtcctggt

SEQ ID NO: 21410 - DNA, 21 bp, Artificial Sequence
  Description of Artificial Sequence: Synthetic oligonucleotide
aattcgccgatttttgtgggg

SEQ ID NO: 21411 - DNA, 21 bp, Artificial Sequence
  Description of Artificial Sequence: Synthetic oligonucleotide
aattctcctaatgagcgtacg

SEQ ID NO: 21412 - DNA, 21 bp, Artificial Sequence
  Description of Artificial Sequence: Synthetic oligonucleotide
aatagtcctaatcagctgggt

SEQ ID NO: 21413 - DNA, 21 bp, Artificial Sequence
  Description of Artificial Sequence: Synthetic oligonucleotide
aattcgcctaggcatgtggcg

SEQ ID NO: 21414 - DNA, 21 bp, Artificial Sequence
  Description of Artificial Sequence: Synthetic oligonucleotide
aatagtccgtcgcattcgccg

SEQ ID NO: 21415 - DNA, 21 bp, Artificial Sequence
  Description of Artificial Sequence: Synthetic oligonucleotide
aatagtccgacggttcagctg

SEQ ID NO: 21416 - DNA, 21 bp, Artificial Sequence
  Description of Artificial Sequence: Synthetic oligonucleotide
aatagtcctgttgttagtcgg

SEQ ID NO: 21417 - DNA, 21 bp, Artificial Sequence
  Description of Artificial Sequence: Synthetic oligonucleotide
aattcgcagcattctacgact

SEQ ID NO: 21418 - DNA, 21 bp, Artificial Sequence
  Description of Artificial Sequence: Synthetic oligonucleotide
aatagtcagttgcagtcgtcg

SEQ ID NO: 21419 - DNA, 21 bp, Artificial Sequence
  Description of Artificial Sequence: Synthetic oligonucleotide
aatagtcagcgttatttgagt

SEQ ID NO: 21420 - DNA, 21 bp, Artificial Sequence
  Description of Artificial Sequence: Synthetic oligonucleotide
aatagtcagtctgctactccg

SEQ ID NO: 21421 - DNA, 21 bp, Artificial Sequence
  Description of Artificial Sequence: Synthetic oligonucleotide
aatagtcgtgctgtgctggtt

SEQ ID NO: 21422 - DNA, 21 bp, Artificial Sequence
  Description of Artificial Sequence: Synthetic oligonucleotide
aattctcgtgatttgctgact

SEQ ID NO: 21423 - DNA, 21 bp, Artificial Sequence
  Description of Artificial Sequence: Synthetic oligonucleotide
aatagtcgtggtgcttcgttg

SEQ ID NO: 21424 - DNA, 21 bp, Artificial Sequence
  Description of Artificial Sequence: Synthetic oligonucleotide
aattcgcggggtttggggcat

SEQ ID NO: 21425 - DNA, 21 bp, Artificial Sequence
  Description of Artificial Sequence: Synthetic oligonucleotide
aatagtagggggatgcctgat

SEQ ID NO: 21426 - DNA, 21 bp, Artificial Sequence
  Description of Artificial Sequence: Synthetic oligonucleotide
aattcgcgtgggccggttgcg

SEQ ID NO: 21427 - DNA, 21 bp, Artificial Sequence
  Description of Artificial Sequence: Synthetic oligonucleotide
aatagtcggctggttacttcg

SEQ ID NO: 21428 - DNA, 21 bp, Artificial Sequence
  Description of Artificial Sequence: Synthetic oligonucleotide
aattcgcgttctaatgagagt

SEQ ID NO: 21429 - DNA, 21 bp, Artificial Sequence
  Description of Artificial Sequence: Synthetic oligonucleotide
aatagtcggtcgactccgaat

SEQ ID NO: 21430 - DNA, 21 bp, Artificial Sequence
  Description of Artificial Sequence: Synthetic oligonucleotide
aattctaggactgcgcatgag

SEQ ID NO: 21431 - DNA, 21 bp, Artificial Sequence
  Description of Artificial Sequence: Synthetic oligonucleotide
aattctcggactgtgcagatt

SEQ ID NO: 21432 - DNA, 21 bp, Artificial Sequence
  Description of Artificial Sequence: Synthetic oligonucleotide
aattctcgtgttgtgggtttt

SEQ ID NO: 21433 - DNA, 21 bp, Artificial Sequence
  Description of Artificial Sequence: Synthetic oligonucleotide
aattctagtgagtggcctgat

SEQ ID NO: 21434 - DNA, 21 bp, Artificial Sequence
  Description of Artificial Sequence: Synthetic oligonucleotide
aattcgagtggtaagactccg

SEQ ID NO: 21435 - DNA, 21 bp, Artificial Sequence
  Description of Artificial Sequence: Synthetic oligonucleotide
aatagtagtattcgtaatgct

SEQ ID NO: 21436 - DNA, 21 bp, Artificial Sequence
  Description of Artificial Sequence: Synthetic oligonucleotide
aatagttcgcttaagctgaat

SEQ ID NO: 21437 - DNA, 21 bp, Artificial Sequence
  Description of Artificial Sequence: Synthetic oligonucleotide
aattcttcgatgcgtattaat

SEQ ID NO: 21438 - DNA, 21 bp, Artificial Sequence
  Description of Artificial Sequence: Synthetic oligonucleotide
aatagttcgatgtcttcgggt

SEQ ID NO: 21439 - DNA, 21 bp, Artificial Sequence
  Description of Artificial Sequence: Synthetic oligonucleotide
aatagttctccgtcgctggct

SEQ ID NO: 21440 - DNA, 21 bp, Artificial Sequence
  Description of Artificial Sequence: Synthetic oligonucleotide
aatagttctcaggttcatttg

SEQ ID NO: 21441 - DNA, 21 bp, Artificial Sequence
  Description of Artificial Sequence: Synthetic oligonucleotide
aatagttcgtcgactcctatt

SEQ ID NO: 21442 - DNA, 21 bp, Artificial Sequence
  Description of Artificial Sequence: Synthetic oligonucleotide
aattctactaagctgctggat

SEQ ID NO: 21443 - DNA, 21 bp, Artificial Sequence
  Description of Artificial Sequence: Synthetic oligonucleotide
aattcgacgctggagggtagg

SEQ ID NO: 21444 - DNA, 21 bp, Artificial Sequence
  Description of Artificial Sequence: Synthetic oligonucleotide
aattctactttgactgtgcat

SEQ ID NO: 21445 - DNA, 21 bp, Artificial Sequence
  Description of Artificial Sequence: Synthetic oligonucleotide
aattcgacgaattttcgtact

SEQ ID NO: 21446 - DNA, 21 bp, Artificial Sequence
  Description of Artificial Sequence: Synthetic oligonucleotide
aatagtactcctcagcctcag

SEQ ID NO: 21447 - DNA, 21 bp, Artificial Sequence
  Description of Artificial Sequence: Synthetic oligonucleotide
aattctacgtcgacttatggt

SEQ ID NO: 21448 - DNA, 21 bp, Artificial Sequence
  Description of Artificial Sequence: Synthetic oligonucleotide
aattctgtgaagggtgtggtg

SEQ ID NO: 21449 - DNA, 21 bp, Artificial Sequence
  Description of Artificial Sequence: Synthetic oligonucleotide
aattcggttcgtcataattcg

SEQ ID NO: 21450 - DNA, 21 bp, Artificial Sequence
  Description of Artificial Sequence: Synthetic oligonucleotide
aattcggtgtctggtgttacg

SEQ ID NO: 21451 - DNA, 21 bp, Artificial Sequence
  Description of Artificial Sequence: Synthetic oligonucleotide
aattcggtttcgcagatgtat

SEQ ID NO: 21452 - DNA, 21 bp, Artificial Sequence
  Description of Artificial Sequence: Synthetic oligonucleotide
aatagtgtgtatgatcgttct

SEQ ID NO: 21453 - DNA, 21 bp, Artificial Sequence
  Description of Artificial Sequence: Synthetic oligonucleotide
aattcgtatcaggtgagtcgt

SEQ ID NO: 21454 - DNA, 21 bp, Artificial Sequence
  Description of Artificial Sequence: Synthetic oligonucleotide
aatacggcggggaagcctagt

SEQ ID NO: 21455 - DNA, 21 bp, Artificial Sequence
  Description of Artificial Sequence: Synthetic oligonucleotide
aatacggcgagggagcgttcg

SEQ ID NO: 21456 - DNA, 21 bp, Artificial Sequence
  Description of Artificial Sequence: Synthetic oligonucleotide
aatactgcgaggacgtctttg

SEQ ID NO: 21457 - DNA, 21 bp, Artificial Sequence
  Description of Artificial Sequence: Synthetic oligonucleotide
aatacggatggggataggctg

SEQ ID NO: 21458 - DNA, 21 bp, Artificial Sequence
  Description of Artificial Sequence: Synthetic oligonucleotide
aatactgaggatgttcatatg

SEQ ID NO: 21459 - DNA, 21 bp, Artificial Sequence
  Description of Artificial Sequence: Synthetic oligonucleotide
aatacggagcataataggagt

SEQ ID NO: 21460 - DNA, 21 bp, Artificial Sequence
  Description of Artificial Sequence: Synthetic oligonucleotide
aatactgagactccgttggct

SEQ ID NO: 21461 - DNA, 21 bp, Artificial Sequence
  Description of Artificial Sequence: Synthetic oligonucleotide
aatacgtttagtaattcgtct

SEQ ID NO: 21462 - DNA, 21 bp, Artificial Sequence
  Description of Artificial Sequence: Synthetic oligonucleotide
aatacgggtcctggtatggct

SEQ ID NO: 21463 - DNA, 21 bp, Artificial Sequence
  Description of Artificial Sequence: Synthetic oligonucleotide
aatacgcatggtgcggctcag

SEQ ID NO: 21464 - DNA, 21 bp, Artificial Sequence
  Description of Artificial Sequence: Synthetic oligonucleotide
aatactcatccgactccgttt

SEQ ID NO: 21465 - DNA, 21 bp, Artificial Sequence
  Description of Artificial Sequence: Synthetic oligonucleotide
aatacgcatactaagatgtcg

SEQ ID NO: 21466 - DNA, 21 bp, Artificial Sequence
  Description of Artificial Sequence: Synthetic oligonucleotide
aatactcatgttgaggattgg

SEQ ID NO: 21467 - DNA, 21 bp, Artificial Sequence
  Description of Artificial Sequence: Synthetic oligonucleotide
aatacgattcctaatgtgaag

SEQ ID NO: 21468 - DNA, 21 bp, Artificial Sequence
  Description of Artificial Sequence: Synthetic oligonucleotide
aatactattcgtgattctatt

SEQ ID NO: 21469 - DNA, 21 bp, Artificial Sequence
  Description of Artificial Sequence: Synthetic oligonucleotide
aatactatttcggggagtcgt

SEQ ID NO: 21470 - DNA, 21 bp, Artificial Sequence
  Description of Artificial Sequence: Synthetic oligonucleotide
aatacgaagctgacgaataat

SEQ ID NO: 21471 - DNA, 21 bp, Artificial Sequence
  Description of Artificial Sequence: Synthetic oligonucleotide
aatactaagaataataatctt

SEQ ID NO: 21472 - DNA, 21 bp, Artificial Sequence
  Description of Artificial Sequence: Synthetic oligonucleotide
aatactaagtcggatcctgct

SEQ ID NO: 21473 - DNA, 21 bp, Artificial Sequence
  Description of Artificial Sequence: Synthetic oligonucleotide
aatactaagagtcctttttct

SEQ ID NO: 21474 - DNA, 21 bp, Artificial Sequence
  Description of Artificial Sequence: Synthetic oligonucleotide
aatactttgggggagacgttg

SEQ ID NO: 21475 - DNA, 21 bp, Artificial Sequence
  Description of Artificial Sequence: Synthetic oligonucleotide
aatactctgaagctgagtcag

SEQ ID NO: 21476 - DNA, 21 bp, Artificial Sequence
  Description of Artificial Sequence: Synthetic oligonucleotide
aatactttgcagtcttatcct

SEQ ID NO: 21477 - DNA, 21 bp, Artificial Sequence
  Description of Artificial Sequence: Synthetic oligonucleotide
aatacgaatattccgaggtct

SEQ ID NO: 21478 - DNA, 21 bp, Artificial Sequence
  Description of Artificial Sequence: Synthetic oligonucleotide
aatactaatgttgagagtcgt

SEQ ID NO: 21479 - DNA, 21 bp, Artificial Sequence
  Description of Artificial Sequence: Synthetic oligonucleotide
aatacgaatgtttcggttagt

SEQ ID NO: 21480 - DNA, 21 bp, Artificial Sequence
  Description of Artificial Sequence: Synthetic oligonucleotide
aatactcctcgggtgctgtcg

SEQ ID NO: 21481 - DNA, 21 bp, Artificial Sequence
  Description of Artificial Sequence: Synthetic oligonucleotide
aatactccgtctactcggcag

SEQ ID NO: 21482 - DNA, 21 bp, Artificial Sequence
  Description of Artificial Sequence: Synthetic oligonucleotide
aatacgcgtgggggttcttct

SEQ ID NO: 21483 - DNA, 21 bp, Artificial Sequence
  Description of Artificial Sequence: Synthetic oligonucleotide
aatactcgtcatgatgtttct

SEQ ID NO: 21484 - DNA, 21 bp, Artificial Sequence
  Description of Artificial Sequence: Synthetic oligonucleotide
aatacgcggaatgatccgccg

SEQ ID NO: 21485 - DNA, 21 bp, Artificial Sequence
  Description of Artificial Sequence: Synthetic oligonucleotide
aatactcgtcagttggtgtcg

SEQ ID NO: 21486 - DNA, 21 bp, Artificial Sequence
  Description of Artificial Sequence: Synthetic oligonucleotide
aatacgcggcgtactgatggt

SEQ ID NO: 21487 - DNA, 21 bp, Artificial Sequence
  Description of Artificial Sequence: Synthetic oligonucleotide
aatacgcggacgttgtcgaat

SEQ ID NO: 21488 - DNA, 21 bp, Artificial Sequence
  Description of Artificial Sequence: Synthetic oligonucleotide
aatactcggacgtattctagt

SEQ ID NO: 21489 - DNA, 21 bp, Artificial Sequence
  Description of Artificial Sequence: Synthetic oligonucleotide
aatacgtctgataatgcgcgt

SEQ ID NO: 21490 - DNA, 21 bp, Artificial Sequence
  Description of Artificial Sequence: Synthetic oligonucleotide
aatacgtcttttagtagttcg

SEQ ID NO: 21491 - DNA, 21 bp, Artificial Sequence
  Description of Artificial Sequence: Synthetic oligonucleotide
aatacgagtaaggatctgccg

SEQ ID NO: 21492 - DNA, 21 bp, Artificial Sequence
  Description of Artificial Sequence: Synthetic oligonucleotide
aatacgagtcagtttgcttct

SEQ ID NO: 21493 - DNA, 21 bp, Artificial Sequence
  Description of Artificial Sequence: Synthetic oligonucleotide
aatacgtcgagttctgataag

SEQ ID NO: 21494 - DNA, 21 bp, Artificial Sequence
  Description of Artificial Sequence: Synthetic oligonucleotide
aatacttctgttatgatggtg

SEQ ID NO: 21495 - DNA, 21 bp, Artificial Sequence
  Description of Artificial Sequence: Synthetic oligonucleotide
aatacttcggtgagggtggtg

SEQ ID NO: 21496 - DNA, 21 bp, Artificial Sequence
  Description of Artificial Sequence: Synthetic oligonucleotide
aatacttcttggaatgggtct

SEQ ID NO: 21497 - DNA, 21 bp, Artificial Sequence
  Description of Artificial Sequence: Synthetic oligonucleotide
aatacgacgaattctcagttg

SEQ ID NO: 21498 - DNA, 21 bp, Artificial Sequence
  Description of Artificial Sequence: Synthetic oligonucleotide
aatacgacgccgattacgaat

SEQ ID NO: 21499 - DNA, 21 bp, Artificial Sequence
  Description of Artificial Sequence: Synthetic oligonucleotide
aatactactgttctgcctaag

SEQ ID NO: 21500 - DNA, 21 bp, Artificial Sequence
  Description of Artificial Sequence: Synthetic oligonucleotide
aatactgttcctattaaggct

SEQ ID NO: 21501 - DNA, 21 bp, Artificial Sequence
  Description of Artificial Sequence: Synthetic oligonucleotide
aatacttataggagggatggt

SEQ ID NO: 21502 - DNA, 21 bp, Artificial Sequence
  Description of Artificial Sequence: Synthetic oligonucleotide
aatgtggcggctcgtgcgcat

SEQ ID NO: 21503 - DNA, 21 bp, Artificial Sequence
  Description of Artificial Sequence: Synthetic oligonucleotide
aatgttgctattaatttttcg

SEQ ID NO: 21504 - DNA, 21 bp, Artificial Sequence
  Description of Artificial Sequence: Synthetic oligonucleotide
aatgttgcgcgtaattttgtg

SEQ ID NO: 21505 - DNA, 21 bp, Artificial Sequence
  Description of Artificial Sequence: Synthetic oligonucleotide
aatgttgctgttgggtatcag

SEQ ID NO: 21506 - DNA, 21 bp, Artificial Sequence
  Description of Artificial Sequence: Synthetic oligonucleotide
aatgttgcggtggtgttgtct

SEQ ID NO: 21507 - DNA, 21 bp, Artificial Sequence
  Description of Artificial Sequence: Synthetic oligonucleotide
aatgttgcgtgggtgacggag

SEQ ID NO: 21508 - DNA, 21 bp, Artificial Sequence
  Description of Artificial Sequence: Synthetic oligonucleotide
aatgtggatgcgaatgttctg

SEQ ID NO: 21509 - DNA, 21 bp, Artificial Sequence
  Description of Artificial Sequence: Synthetic oligonucleotide
aatgttgatacttcgacggat

SEQ ID NO: 21510 - DNA, 21 bp, Artificial Sequence
  Description of Artificial Sequence: Synthetic oligonucleotide
aatgttgagcagccttcgtgt

SEQ ID NO: 21511 - DNA, 21 bp, Artificial Sequence
  Description of Artificial Sequence: Synthetic oligonucleotide
aatgtggagtcgaatcctttg

SEQ ID NO: 21512 - DNA, 21 bp, Artificial Sequence
  Description of Artificial Sequence: Synthetic oligonucleotide
aatgtttttgcggtgtgtgag

SEQ ID NO: 21513 - DNA, 21 bp, Artificial Sequence
  Description of Artificial Sequence: Synthetic oligonucleotide
aatgtttttagtgctacgcct

SEQ ID NO: 21514 - DNA, 21 bp, Artificial Sequence
  Description of Artificial Sequence: Synthetic oligonucleotide
aatgtgtttgttgcggttaat

SEQ ID NO: 21515 - DNA, 21 bp, Artificial Sequence
  Description of Artificial Sequence: Synthetic oligonucleotide
aatgtgggggcgacggaggtg

SEQ ID NO: 21516 - DNA, 21 bp, Artificial Sequence
  Description of Artificial Sequence: Synthetic oligonucleotide
aatgtgcatgctctggagtct

SEQ ID NO: 21517 - DNA, 21 bp, Artificial Sequence
  Description of Artificial Sequence: Synthetic oligonucleotide
aatgtgcatacgccttcgcag

SEQ ID NO: 21518 - DNA, 21 bp, Artificial Sequence
  Description of Artificial Sequence: Synthetic oligonucleotide
aatgttattaatacgcctcag

SEQ ID NO: 21519 - DNA, 21 bp, Artificial Sequence
  Description of Artificial Sequence: Synthetic oligonucleotide
aatgtgaagcttaattcgttt

SEQ ID NO: 21520 - DNA, 21 bp, Artificial Sequence
  Description of Artificial Sequence: Synthetic oligonucleotide
aatgtgctgggggcgcagcag

SEQ ID NO: 21521 - DNA, 21 bp, Artificial Sequence
  Description of Artificial Sequence: Synthetic oligonucleotide
aatgtgctgattaagtatagt

SEQ ID NO: 21522 - DNA, 21 bp, Artificial Sequence
  Description of Artificial Sequence: Synthetic oligonucleotide
aatgttttgcgtccgcaggtg

SEQ ID NO: 21523 - DNA, 21 bp, Artificial Sequence
  Description of Artificial Sequence: Synthetic oligonucleotide
aatgttatgatggctaggatg

SEQ ID NO: 21524 - DNA, 21 bp, Artificial Sequence
  Description of Artificial Sequence: Synthetic oligonucleotide
aatgtgatggtgcggctgcct

SEQ ID NO: 21525 - DNA, 21 bp, Artificial Sequence
  Description of Artificial Sequence: Synthetic oligonucleotide
aatgttatggtgaggatgggt

SEQ ID NO: 21526 - DNA, 21 bp, Artificial Sequence
  Description of Artificial Sequence: Synthetic oligonucleotide
aatgttaatcagccggatact

SEQ ID NO: 21527 - DNA, 21 bp, Artificial Sequence
  Description of Artificial Sequence: Synthetic oligonucleotide
aatgtgaatcagtattcgggt

SEQ ID NO: 21528 - DNA, 21 bp, Artificial Sequence
  Description of Artificial Sequence: Synthetic oligonucleotide
aatgtgccggcggcttcttat

SEQ ID NO: 21529 - DNA, 21 bp, Artificial Sequence
  Description of Artificial Sequence: Synthetic oligonucleotide
aatgttccggcggcgacgttt

SEQ ID NO: 21530 - DNA, 21 bp, Artificial Sequence
  Description of Artificial Sequence: Synthetic oligonucleotide
aatgttcctgagtcgtcggat

SEQ ID NO: 21531 - DNA, 21 bp, Artificial Sequence
  Description of Artificial Sequence: Synthetic oligonucleotide
aatgttccgtcgacgaaggag

SEQ ID NO: 21532 - DNA, 21 bp, Artificial Sequence
  Description of Artificial Sequence: Synthetic oligonucleotide
aatgttcaggcgacgggttat

SEQ ID NO: 21533 - DNA, 21 bp, Artificial Sequence
  Description of Artificial Sequence: Synthetic oligonucleotide
aatgtgcagtttagttctggt

SEQ ID NO: 21534 - DNA, 21 bp, Artificial Sequence
  Description of Artificial Sequence: Synthetic oligonucleotide
aatgtgcggcttcaggcgatt

SEQ ID NO: 21535 - DNA, 21 bp, Artificial Sequence
  Description of Artificial Sequence: Synthetic oligonucleotide
aatgtgcggctgtctattgat

SEQ ID NO: 21536 - DNA, 21 bp, Artificial Sequence
  Description of Artificial Sequence: Synthetic oligonucleotide
aatgtgcggccgcagtcgacg

SEQ ID NO: 21537 - DNA, 21 bp, Artificial Sequence
  Description of Artificial Sequence: Synthetic oligonucleotide
aatgttcggcctgtgctttct

SEQ ID NO: 21538 - DNA, 21 bp, Artificial Sequence
  Description of Artificial Sequence: Synthetic oligonucleotide
aatgtgaggcagcagtctgct

SEQ ID NO: 21539 - DNA, 21 bp, Artificial Sequence
  Description of Artificial Sequence: Synthetic oligonucleotide
aatgtgcgttcggttactaat

SEQ ID NO: 21540 - DNA, 21 bp, Artificial Sequence
  Description of Artificial Sequence: Synthetic oligonucleotide
aatgtgcggtcttatgctgcg

SEQ ID NO: 21541 - DNA, 21 bp, Artificial Sequence
  Description of Artificial Sequence: Synthetic oligonucleotide
aatgtgaggacggttgctgag

SEQ ID NO: 21542 - DNA, 21 bp, Artificial Sequence
  Description of Artificial Sequence: Synthetic oligonucleotide
aatgtttcgtttcctagtctg

SEQ ID NO: 21543 - DNA, 21 bp, Artificial Sequence
  Description of Artificial Sequence: Synthetic oligonucleotide
aatgtttcgaatgttccttct

SEQ ID NO: 21544 - DNA, 21 bp, Artificial Sequence
  Description of Artificial Sequence: Synthetic oligonucleotide
aatgtgagtccgctttttctg

SEQ ID NO: 21545 - DNA, 21 bp, Artificial Sequence
  Description of Artificial Sequence: Synthetic oligonucleotide
aatgtttctaggactacgctg

SEQ ID NO: 21546 - DNA, 21 bp, Artificial Sequence
  Description of Artificial Sequence: Synthetic oligonucleotide
aatgtgagtcgtacggtttct

SEQ ID NO: 21547 - DNA, 21 bp, Artificial Sequence
  Description of Artificial Sequence: Synthetic oligonucleotide
aatgtttcttcggctccgaag

SEQ ID NO: 21548 - DNA, 21 bp, Artificial Sequence
  Description of Artificial Sequence: Synthetic oligonucleotide
aatgtttcgactgctctgagt

SEQ ID NO: 21549 - DNA, 21 bp, Artificial Sequence
  Description of Artificial Sequence: Synthetic oligonucleotide
aatgtgacggctattggtctg

SEQ ID NO: 21550 - DNA, 21 bp, Artificial Sequence
  Description of Artificial Sequence: Synthetic oligonucleotide
aatgttactcctcctgataat

SEQ ID NO: 21551 - DNA, 21 bp, Artificial Sequence
  Description of Artificial Sequence: Synthetic oligonucleotide
aatgttacgacgtctgaggct

SEQ ID NO: 21552 - DNA, 21 bp, Artificial Sequence
  Description of Artificial Sequence: Synthetic oligonucleotide
aatgtggtgcctcctcttact

SEQ ID NO: 21553 - DNA, 21 bp, Artificial Sequence
  Description of Artificial Sequence: Synthetic oligonucleotide
aatgtggtgagtaggtctccg

SEQ ID NO: 21554 - DNA, 21 bp, Artificial Sequence
  Description of Artificial Sequence: Synthetic oligonucleotide
aatgttgttactaagccgatg

SEQ ID NO: 21555 - DNA, 21 bp, Artificial Sequence
  Description of Artificial Sequence: Synthetic oligonucleotide
aatgttgtggttcctgttggt

SEQ ID NO: 21556 - DNA, 21 bp, Artificial Sequence
  Description of Artificial Sequence: Synthetic oligonucleotide
aattgggcttctgatcatgtg

SEQ ID NO: 21557 - DNA, 21 bp, Artificial Sequence
  Description of Artificial Sequence: Synthetic oligonucleotide
aattgggggcaggagaagttg

SEQ ID NO: 21558 - DNA, 21 bp, Artificial Sequence
  Description of Artificial Sequence: Synthetic oligonucleotide
aattggcctgatcctgagtct

SEQ ID NO: 21559 - DNA, 21 bp, Artificial Sequence
  Description of Artificial Sequence: Synthetic oligonucleotide
aattggactgcggcgactcct

SEQ ID NO: 21560 - DNA, 21 bp, Artificial Sequence
  Description of Artificial Sequence: Synthetic oligonucleotide
aattatgctggttctgatggt

SEQ ID NO: 21561 - DNA, 21 bp, Artificial Sequence
  Description of Artificial Sequence: Synthetic oligonucleotide
aattatgcgaaggttcatacg

SEQ ID NO: 21562 - DNA, 21 bp, Artificial Sequence
  Description of Artificial Sequence: Synthetic oligonucleotide
aattatgcgtcgcagattgtt

SEQ ID NO: 21563 - DNA, 21 bp, Artificial Sequence
  Description of Artificial Sequence: Synthetic oligonucleotide
aattatgatcgtgagcagatg

SEQ ID NO: 21564 - DNA, 21 bp, Artificial Sequence
  Description of Artificial Sequence: Synthetic oligonucleotide
aattatgagcctacttctgat

SEQ ID NO: 21565 - DNA, 21 bp, Artificial Sequence
  Description of Artificial Sequence: Synthetic oligonucleotide
aattatgggaatagtattccg

SEQ ID NO: 21566 - DNA, 21 bp, Artificial Sequence
  Description of Artificial Sequence: Synthetic oligonucleotide
aattatcatacttctcttgtg

SEQ ID NO: 21567 - DNA, 21 bp, Artificial Sequence
  Description of Artificial Sequence: Synthetic oligonucleotide
aattataatactccgaatcct

SEQ ID NO: 21568 - DNA, 21 bp, Artificial Sequence
  Description of Artificial Sequence: Synthetic oligonucleotide
aattatcctgatactcctaat

SEQ ID NO: 21569 - DNA, 21 bp, Artificial Sequence
  Description of Artificial Sequence: Synthetic oligonucleotide
aattatccggatgttcgtagt

SEQ ID NO: 21570 - DNA, 21 bp, Artificial Sequence
  Description of Artificial Sequence: Synthetic oligonucleotide
aattatcctcctagtcggctg

SEQ ID NO: 21571 - DNA, 21 bp, Artificial Sequence
  Description of Artificial Sequence: Synthetic oligonucleotide
aattatcgtcagacgctttcg

SEQ ID NO: 21572 - DNA, 21 bp, Artificial Sequence
  Description of Artificial Sequence: Synthetic oligonucleotide
cctgcggctgatcggaatctg

SEQ ID NO: 21573 - DNA, 21 bp, Artificial Sequence
  Description of Artificial Sequence: Synthetic oligonucleotide
cctgcggctgagtttgcgtcg

SEQ ID NO: 21574 - DNA, 21 bp, Artificial Sequence
  Description of Artificial Sequence: Synthetic oligonucleotide
cctgctgctcgggagcggctg

SEQ ID NO: 21575 - DNA, 21 bp, Artificial Sequence
  Description of Artificial Sequence: Synthetic oligonucleotide
ccggcggatttggggtctatg

SEQ ID NO: 21576 - DNA, 21 bp, Artificial Sequence
  Description of Artificial Sequence: Synthetic oligonucleotide
cctgctgataatggtccgtgg

SEQ ID NO: 21577 - DNA, 21 bp, Artificial Sequence
  Description of Artificial Sequence: Synthetic oligonucleotide
ccggctgatcctcctagtgtg

SEQ ID NO: 21578 - DNA, 21 bp, Artificial Sequence
  Description of Artificial Sequence: Synthetic oligonucleotide
cctgctgataggtctccgact

SEQ ID NO: 21579 - DNA, 21 bp, Artificial Sequence
  Description of Artificial Sequence: Synthetic oligonucleotide
ccggcggattatcagaaggat

SEQ ID NO: 21580 - DNA, 21 bp, Artificial Sequence
  Description of Artificial Sequence: Synthetic oligonucleotide
ccggctgagaaggttcgtact

SEQ ID NO: 21581 - DNA, 21 bp, Artificial Sequence
  Description of Artificial Sequence: Synthetic oligonucleotide
cctgcgttttctgggcgggat

SEQ ID NO: 21582 - DNA, 21 bp, Artificial Sequence
  Description of Artificial Sequence: Synthetic oligonucleotide
cctgctttttctatgtctatt

SEQ ID NO: 21583 - DNA, 21 bp, Artificial Sequence
  Description of Artificial Sequence: Synthetic oligonucleotide
ccggctgggcttcctgatcgt

SEQ ID NO: 21584 - DNA, 21 bp, Artificial Sequence
  Description of Artificial Sequence: Synthetic oligonucleotide
cctgcggggtctcagcctccg

SEQ ID NO: 21585 - DNA, 21 bp, Artificial Sequence
  Description of Artificial Sequence: Synthetic oligonucleotide
cctgctgggagtacgatgcct

SEQ ID NO: 21586 - DNA, 21 bp, Artificial Sequence
  Description of Artificial Sequence: Synthetic oligonucleotide
ccggctcatgctctgactatg

SEQ ID NO: 21587 - DNA, 21 bp, Artificial Sequence
  Description of Artificial Sequence: Synthetic oligonucleotide
ccggcgcattttactactggg

SEQ ID NO: 21588 - DNA, 21 bp, Artificial Sequence
  Description of Artificial Sequence: Synthetic oligonucleotide
cctgcgattggggttcatagg

SEQ ID NO: 21589 - DNA, 21 bp, Artificial Sequence
  Description of Artificial Sequence: Synthetic oligonucleotide
cctgctattaagtctcagctt

SEQ ID NO: 21590 - DNA, 21 bp, Artificial Sequence
  Description of Artificial Sequence: Synthetic oligonucleotide
cctgctattctgcgtacttct

SEQ ID NO: 21591 - DNA, 21 bp, Artificial Sequence
  Description of Artificial Sequence: Synthetic oligonucleotide
ccggctatttcggggacgatt

SEQ ID NO: 21592 - DNA, 21 bp, Artificial Sequence
  Description of Artificial Sequence: Synthetic oligonucleotide
cctgctaagccgattgatttt

SEQ ID NO: 21593 - DNA, 21 bp, Artificial Sequence
  Description of Artificial Sequence: Synthetic oligonucleotide
cctgctttggcgccgatttat

SEQ ID NO: 21594 - DNA, 21 bp, Artificial Sequence
  Description of Artificial Sequence: Synthetic oligonucleotide
cctgcgctgatggcgccggct

SEQ ID NO: 21595 - DNA, 21 bp, Artificial Sequence
  Description of Artificial Sequence: Synthetic oligonucleotide
cctgcgatgggtcagtctgat

SEQ ID NO: 21596 - DNA, 21 bp, Artificial Sequence
  Description of Artificial Sequence: Synthetic oligonucleotide
cctgcgatgtctgatcggtcg

SEQ ID NO: 21597 - DNA, 21 bp, Artificial Sequence
  Description of Artificial Sequence: Synthetic oligonucleotide
ccggctatgagtaatactatt

SEQ ID NO: 21598 - DNA, 21 bp, Artificial Sequence
  Description of Artificial Sequence: Synthetic oligonucleotide
ccggcgaatgatgcggatcgt

SEQ ID NO: 21599 - DNA, 21 bp, Artificial Sequence
  Description of Artificial Sequence: Synthetic oligonucleotide
cctgctaatttgacgtctccg

SEQ ID NO: 21600 - DNA, 21 bp, Artificial Sequence
  Description of Artificial Sequence: Synthetic oligonucleotide
cctgcgaatcctcctgattct

SEQ ID NO: 21601 - DNA, 21 bp, Artificial Sequence
  Description of Artificial Sequence: Synthetic oligonucleotide
ccggctaatcctccgaagtcg

SEQ ID NO: 21602 - DNA, 21 bp, Artificial Sequence
  Description of Artificial Sequence: Synthetic oligonucleotide
cctgcgaatcgtgtggggacg

SEQ ID NO: 21603 - DNA, 21 bp, Artificial Sequence
  Description of Artificial Sequence: Synthetic oligonucleotide
ccggcgaattatttgtctgtt

SEQ ID NO: 21604 - DNA, 21 bp, Artificial Sequence
  Description of Artificial Sequence: Synthetic oligonucleotide
ccggcgccgatgaattttcag

SEQ ID NO: 21605 - DNA, 21 bp, Artificial Sequence
  Description of Artificial Sequence: Synthetic oligonucleotide
cctgctcctagtcatcagtcg

SEQ ID NO: 21606 - DNA, 21 bp, Artificial Sequence
  Description of Artificial Sequence: Synthetic oligonucleotide
cctgctccgactagtattgcg

SEQ ID NO: 21607 - DNA, 21 bp, Artificial Sequence
  Description of Artificial Sequence: Synthetic oligonucleotide
cctgctcagaggacgatggcg

SEQ ID NO: 21608 - DNA, 21 bp, Artificial Sequence
  Description of Artificial Sequence: Synthetic oligonucleotide
ccggcgcagtcgactggtcct

SEQ ID NO: 21609 - DNA, 21 bp, Artificial Sequence
  Description of Artificial Sequence: Synthetic oligonucleotide
cctgctcgggcggatccggcg

SEQ ID NO: 21610 - DNA, 21 bp, Artificial Sequence
  Description of Artificial Sequence: Synthetic oligonucleotide
ccggcgcgtgcgtttgatgcg

SEQ ID NO: 21611 - DNA, 21 bp, Artificial Sequence
  Description of Artificial Sequence: Synthetic oligonucleotide
cctgctcggattactgggatg

SEQ ID NO: 21612 - DNA, 21 bp, Artificial Sequence
  Description of Artificial Sequence: Synthetic oligonucleotide
cctgctcgtcttgctactaat

SEQ ID NO: 21613 - DNA, 21 bp, Artificial Sequence
  Description of Artificial Sequence: Synthetic oligonucleotide
cctgcgcggcggcctgatgat

SEQ ID NO: 21614 - DNA, 21 bp, Artificial Sequence
  Description of Artificial Sequence: Synthetic oligonucleotide
cctgcgcgtacgcttattcat

SEQ ID NO: 21615 - DNA, 21 bp, Artificial Sequence
  Description of Artificial Sequence: Synthetic oligonucleotide
ccggcgaggactaatcctacg

SEQ ID NO: 21616 - DNA, 21 bp, Artificial Sequence
  Description of Artificial Sequence: Synthetic oligonucleotide
ccggcgcgtacgcaggtggat

SEQ ID NO: 21617 - DNA, 21 bp, Artificial Sequence
  Description of Artificial Sequence: Synthetic oligonucleotide
ccggcttcggagcggtcgctt

SEQ ID NO: 21618 - DNA, 21 bp, Artificial Sequence
  Description of Artificial Sequence: Synthetic oligonucleotide
cctgcgagttttgggattaat

SEQ ID NO: 21619 - DNA, 21 bp, Artificial Sequence
  Description of Artificial Sequence: Synthetic oligonucleotide
cctgcttcgcatatgaatccg

SEQ ID NO: 21620 - DNA, 21 bp, Artificial Sequence
  Description of Artificial Sequence: Synthetic oligonucleotide
cctgcgagtcctttgcattct

SEQ ID NO: 21621 - DNA, 21 bp, Artificial Sequence
  Description of Artificial Sequence: Synthetic oligonucleotide
ccggcgagtcctgttacgtct

SEQ ID NO: 21622 - DNA, 21 bp, Artificial Sequence
  Description of Artificial Sequence: Synthetic oligonucleotide
ccggctagtgttatggcgggg

SEQ ID NO: 21623 - DNA, 21 bp, Artificial Sequence
  Description of Artificial Sequence: Synthetic oligonucleotide
ccggctactgcgttgagtcgt

SEQ ID NO: 21624 - DNA, 21 bp, Artificial Sequence
  Description of Artificial Sequence: Synthetic oligonucleotide
cctgcgacggggctgccgtat

SEQ ID NO: 21625 - DNA, 21 bp, Artificial Sequence
  Description of Artificial Sequence: Synthetic oligonucleotide
ccggcgacgatgattcggcat

SEQ ID NO: 21626 - DNA, 21 bp, Artificial Sequence
  Description of Artificial Sequence: Synthetic oligonucleotide
cctgcgactaatgtgcggggt

SEQ ID NO: 21627 - DNA, 21 bp, Artificial Sequence
  Description of Artificial Sequence: Synthetic oligonucleotide
ccggctactccgagtgttgtg

SEQ ID NO: 21628 - DNA, 21 bp, Artificial Sequence
  Description of Artificial Sequence: Synthetic oligonucleotide
cctgcgacgtcgtcggtgtcg

SEQ ID NO: 21629 - DNA, 21 bp, Artificial Sequence
  Description of Artificial Sequence: Synthetic oligonucleotide
ccggctgtggaggcggatggt

SEQ ID NO: 21630 - DNA, 21 bp, Artificial Sequence
  Description of Artificial Sequence: Synthetic oligonucleotide
cctgctgttaagccgagtttt

SEQ ID NO: 21631 - DNA, 21 bp, Artificial Sequence
  Description of Artificial Sequence: Synthetic oligonucleotide
cctgcttatcctcatgctccg

SEQ ID NO: 21632 - DNA, 21 bp, Artificial Sequence
  Description of Artificial Sequence: Synthetic oligonucleotide
cctgatgcggagattcggcgt

SEQ ID NO: 21633 - DNA, 21 bp, Artificial Sequence
  Description of Artificial Sequence: Synthetic oligonucleotide
cctgatgattttcggcatcat

SEQ ID NO: 21634 - DNA, 21 bp, Artificial Sequence
  Description of Artificial Sequence: Synthetic oligonucleotide
cctgatgagcttaaggttagg

SEQ ID NO: 21635 - DNA, 21 bp, Artificial Sequence
  Description of Artificial Sequence: Synthetic oligonucleotide
ccggatggtgatactgcgctg

SEQ ID NO: 21636 - DNA, 21 bp, Artificial Sequence
  Description of Artificial Sequence: Synthetic oligonucleotide
ccggatgggtcttcgaggcat

SEQ ID NO: 21637 - DNA, 21 bp, Artificial Sequence
  Description of Artificial Sequence: Synthetic oligonucleotide
cctgatcatgcgtctattagt

SEQ ID NO: 21638 - DNA, 21 bp, Artificial Sequence
  Description of Artificial Sequence: Synthetic oligonucleotide
cctgatcatgggggtattgct

SEQ ID NO: 21639 - DNA, 21 bp, Artificial Sequence
  Description of Artificial Sequence: Synthetic oligonucleotide
ccggatcatcgtagtcctaat

SEQ ID NO: 21640 - DNA, 21 bp, Artificial Sequence
  Description of Artificial Sequence: Synthetic oligonucleotide
ccggatcattctaatgatcag

SEQ ID NO: 21641 - DNA, 21 bp, Artificial Sequence
  Description of Artificial Sequence: Synthetic oligonucleotide
ccggatattgcttttgcggag

SEQ ID NO: 21642 - DNA, 21 bp, Artificial Sequence
  Description of Artificial Sequence: Synthetic oligonucleotide
ccggatttggaggtggttaag

SEQ ID NO: 21643 - DNA, 21 bp, Artificial Sequence
  Description of Artificial Sequence: Synthetic oligonucleotide
ccggatctgatttctgatgcg

SEQ ID NO: 21644 - DNA, 21 bp, Artificial Sequence
  Description of Artificial Sequence: Synthetic oligonucleotide
ccggatcttcctgggattagg

SEQ ID NO: 21645 - DNA, 21 bp, Artificial Sequence
  Description of Artificial Sequence: Synthetic oligonucleotide
cctgataatcttcaggtgagt

SEQ ID NO: 21646 - DNA, 21 bp, Artificial Sequence
  Description of Artificial Sequence: Synthetic oligonucleotide
cctgataatgttaggactttt

SEQ ID NO: 21647 - DNA, 21 bp, Artificial Sequence
  Description of Artificial Sequence: Synthetic oligonucleotide
cctgataatgtgtataatgat

SEQ ID NO: 21648 - DNA, 21 bp, Artificial Sequence
  Description of Artificial Sequence: Synthetic oligonucleotide
cctgatccggcttatttgcat

SEQ ID NO: 21649 - DNA, 21 bp, Artificial Sequence
  Description of Artificial Sequence: Synthetic oligonucleotide
ccggatccgattgatcggcct

SEQ ID NO: 21650 - DNA, 21 bp, Artificial Sequence
  Description of Artificial Sequence: Synthetic oligonucleotide
cctgatcctcctacttcgccg

SEQ ID NO: 21651 - DNA, 21 bp, Artificial Sequence
  Description of Artificial Sequence: Synthetic oligonucleotide
cctgatcaggcttcggggcgg

SEQ ID NO: 21652 - DNA, 21 bp, Artificial Sequence
  Description of Artificial Sequence: Synthetic oligonucleotide
ccggatcagatggtgcggatt

SEQ ID NO: 21653 - DNA, 21 bp, Artificial Sequence
  Description of Artificial Sequence: Synthetic oligonucleotide
ccggatcagaggggtaatcat

SEQ ID NO: 21654 - DNA, 21 bp, Artificial Sequence
  Description of Artificial Sequence: Synthetic oligonucleotide
ccggatcagagtttgactggt

SEQ ID NO: 21655 - DNA, 21 bp, Artificial Sequence
  Description of Artificial Sequence: Synthetic oligonucleotide
ccggatcggctgcttgatagg

SEQ ID NO: 21656 - DNA, 21 bp, Artificial Sequence
  Description of Artificial Sequence: Synthetic oligonucleotide
ccggataggctttctgagttt

SEQ ID NO: 21657 - DNA, 21 bp, Artificial Sequence
  Description of Artificial Sequence: Synthetic oligonucleotide
cctgataggatgcagaatcgt

SEQ ID NO: 21658 - DNA, 21 bp, Artificial Sequence
  Description of Artificial Sequence: Synthetic oligonucleotide
cctgatcggcagcagcagttg

SEQ ID NO: 21659 - DNA, 21 bp, Artificial Sequence
  Description of Artificial Sequence: Synthetic oligonucleotide
ccggatcgtgttccgacggtt

SEQ ID NO: 21660 - DNA, 21 bp, Artificial Sequence
  Description of Artificial Sequence: Synthetic oligonucleotide
ccggattctgctcctcttcct

SEQ ID NO: 21661 - DNA, 21 bp, Artificial Sequence
  Description of Artificial Sequence: Synthetic oligonucleotide
ccggattcggatccgccgcat

SEQ ID NO: 21662 - DNA, 21 bp, Artificial Sequence
  Description of Artificial Sequence: Synthetic oligonucleotide
cctgattctatgtatcggtct

SEQ ID NO: 21663 - DNA, 21 bp, Artificial Sequence
  Description of Artificial Sequence: Synthetic oligonucleotide
cctgattctactcttcagttt

SEQ ID NO: 21664 - DNA, 21 bp, Artificial Sequence
  Description of Artificial Sequence: Synthetic oligonucleotide
ccggatactgatccgcctctt

SEQ ID NO: 21665 - DNA, 21 bp, Artificial Sequence
  Description of Artificial Sequence: Synthetic oligonucleotide
cctgatactaagtggtgtcat

SEQ ID NO: 21666 - DNA, 21 bp, Artificial Sequence
  Description of Artificial Sequence: Synthetic oligonucleotide
cctgatacttcgcatgatttg

SEQ ID NO: 21667 - DNA, 21 bp, Artificial Sequence
  Description of Artificial Sequence: Synthetic oligonucleotide
ccggatgtgaaggctggtagg

SEQ ID NO: 21668 - DNA, 21 bp, Artificial Sequence
  Description of Artificial Sequence: Synthetic oligonucleotide
ccggattatgcgaagttgtcg

SEQ ID NO: 21669 - DNA, 21 bp, Artificial Sequence
  Description of Artificial Sequence: Synthetic oligonucleotide
ccggattatgagaagaagcag

SEQ ID NO: 21670 - DNA, 21 bp, Artificial Sequence
  Description of Artificial Sequence: Synthetic oligonucleotide
cctgattattcggcggttctg

SEQ ID NO: 21671 - DNA, 21 bp, Artificial Sequence
  Description of Artificial Sequence: Synthetic oligonucleotide
cctgaggctgaggatgatatt

SEQ ID NO: 21672 - DNA, 21 bp, Artificial Sequence
  Description of Artificial Sequence: Synthetic oligonucleotide
cctgaggcgttgcggacgggg

SEQ ID NO: 21673 - DNA, 21 bp, Artificial Sequence
  Description of Artificial Sequence: Synthetic oligonucleotide
ccggaggagcctcgtctttct

SEQ ID NO: 21674 - DNA, 21 bp, Artificial Sequence
  Description of Artificial Sequence: Synthetic oligonucleotide
cctgaggaggtgtgtcggatt

SEQ ID NO: 21675 - DNA, 21 bp, Artificial Sequence
  Description of Artificial Sequence: Synthetic oligonucleotide
ccggagtttgcgattgatgcg

SEQ ID NO: 21676 - DNA, 21 bp, Artificial Sequence
  Description of Artificial Sequence: Synthetic oligonucleotide
cctgagtttaagactcgtaat

SEQ ID NO: 21677 - DNA, 21 bp, Artificial Sequence
  Description of Artificial Sequence: Synthetic oligonucleotide
ccggagggtaggttgcatgcg

SEQ ID NO: 21678 - DNA, 21 bp, Artificial Sequence
  Description of Artificial Sequence: Synthetic oligonucleotide
cctgagaaggatactcatcgt

SEQ ID NO: 21679 - DNA, 21 bp, Artificial Sequence
  Description of Artificial Sequence: Synthetic oligonucleotide
ccggagaagtattcgcagaat

SEQ ID NO: 21680 - DNA, 21 bp, Artificial Sequence
  Description of Artificial Sequence: Synthetic oligonucleotide
ccggagatggggaggctgggt

SEQ ID NO: 21681 - DNA, 21 bp, Artificial Sequence
  Description of Artificial Sequence: Synthetic oligonucleotide
cctgagatgaagccgggtcag

SEQ ID NO: 21682 - DNA, 21 bp, Artificial Sequence
  Description of Artificial Sequence: Synthetic oligonucleotide
cctgagaattcgaaggtggat

SEQ ID NO: 21683 - DNA, 21 bp, Artificial Sequence
  Description of Artificial Sequence: Synthetic oligonucleotide
ccggagaattctcagcgtggt

SEQ ID NO: 21684 - DNA, 21 bp, Artificial Sequence
  Description of Artificial Sequence: Synthetic oligonucleotide
ccggagaatacgacgtatgct

SEQ ID NO: 21685 - DNA, 21 bp, Artificial Sequence
  Description of Artificial Sequence: Synthetic oligonucleotide
cctgagccgtcgaatacgcgt

SEQ ID NO: 21686 - DNA, 21 bp, Artificial Sequence
  Description of Artificial Sequence: Synthetic oligonucleotide
cctgagcctacgcttaatctg

SEQ ID NO: 21687 - DNA, 21 bp, Artificial Sequence
  Description of Artificial Sequence: Synthetic oligonucleotide
ccggagcgggggttgcatgtg

SEQ ID NO: 21688 - DNA, 21 bp, Artificial Sequence
  Description of Artificial Sequence: Synthetic oligonucleotide
cctgagcggaaggcgcatact

SEQ ID NO: 21689 - DNA, 21 bp, Artificial Sequence
  Description of Artificial Sequence: Synthetic oligonucleotide
cctgagaggccggctttgagt

SEQ ID NO: 21690 - DNA, 21 bp, Artificial Sequence
  Description of Artificial Sequence: Synthetic oligonucleotide
ccggagcggtctcaggcgggg

SEQ ID NO: 21691 - DNA, 21 bp, Artificial Sequence
  Description of Artificial Sequence: Synthetic oligonucleotide
cctgagcggtcgacttgggtt

SEQ ID NO: 21692 - DNA, 21 bp, Artificial Sequence
  Description of Artificial Sequence: Synthetic oligonucleotide
cctgagtctaaggatgcgcat

SEQ ID NO: 21693 - DNA, 21 bp, Artificial Sequence
  Description of Artificial Sequence: Synthetic oligonucleotide
ccggagtctcctcgtacgctg

SEQ ID NO: 21694 - DNA, 21 bp, Artificial Sequence
  Description of Artificial Sequence: Synthetic oligonucleotide
cctgagtctgttctgcgtcgg

SEQ ID NO: 21695 - DNA, 21 bp, Artificial Sequence
  Description of Artificial Sequence: Synthetic oligonucleotide
ccggagtcttggccgagtccg

SEQ ID NO: 21696 - DNA, 21 bp, Artificial Sequence
  Description of Artificial Sequence: Synthetic oligonucleotide
cctgagacttctcctcgtcct

SEQ ID NO: 21697 - DNA, 21 bp, Artificial Sequence
  Description of Artificial Sequence: Synthetic oligonucleotide
ccgtttgctgaggctggtatt

SEQ ID NO: 21698 - DNA, 21 bp, Artificial Sequence
  Description of Artificial Sequence: Synthetic oligonucleotide
ccttttgctgggcatgcgctt

SEQ ID NO: 21699 - DNA, 21 bp, Artificial Sequence
  Description of Artificial Sequence: Synthetic oligonucleotide
ccttttgcgcagactcttacg

SEQ ID NO: 21700 - DNA, 21 bp, Artificial Sequence
  Description of Artificial Sequence: Synthetic oligonucleotide
ccttttgcttcgagtacgtct

SEQ ID NO: 21701 - DNA, 21 bp, Artificial Sequence
  Description of Artificial Sequence: Synthetic oligonucleotide
ccgtttgatcatttgacggat

SEQ ID NO: 21702 - DNA, 21 bp, Artificial Sequence
  Description of Artificial Sequence: Synthetic oligonucleotide
ccgtttggtgtttcggtggat

SEQ ID NO: 21703 - DNA, 21 bp, Artificial Sequence
  Description of Artificial Sequence: Synthetic oligonucleotide
ccttttccgcatgataggcct

SEQ ID NO: 21704 - DNA, 21 bp, Artificial Sequence
  Description of Artificial Sequence: Synthetic oligonucleotide
ccttttcagactggttctggg

SEQ ID NO: 21705 - DNA, 21 bp, Artificial Sequence
  Description of Artificial Sequence: Synthetic oligonucleotide
ccgtttcggattcagactgat

SEQ ID NO: 21706 - DNA, 21 bp, Artificial Sequence
  Description of Artificial Sequence: Synthetic oligonucleotide
ccgtttcggcctgttgttgat

SEQ ID NO: 21707 - DNA, 21 bp, Artificial Sequence
  Description of Artificial Sequence: Synthetic oligonucleotide
ccgtttagtgatcttaggatg

SEQ ID NO: 21708 - DNA, 21 bp, Artificial Sequence
  Description of Artificial Sequence: Synthetic oligonucleotide
ccgttttcgggtctgactggt

SEQ ID NO: 21709 - DNA, 21 bp, Artificial Sequence
  Description of Artificial Sequence: Synthetic oligonucleotide
cctttttcgaatattcagatg

SEQ ID NO: 21710 - DNA, 21 bp, Artificial Sequence
  Description of Artificial Sequence: Synthetic oligonucleotide
cctttttcgtcggcggttatt

SEQ ID NO: 21711 - DNA, 21 bp, Artificial Sequence
  Description of Artificial Sequence: Synthetic oligonucleotide
ccttttagtagtccttctccg

SEQ ID NO: 21712 - DNA, 21 bp, Artificial Sequence
  Description of Artificial Sequence: Synthetic oligonucleotide
cctttttctactcctgatatg

SEQ ID NO: 21713 - DNA, 21 bp, Artificial Sequence
  Description of Artificial Sequence: Synthetic oligonucleotide
ccgtttactgctggtttttcg

SEQ ID NO: 21714 - DNA, 21 bp, Artificial Sequence
  Description of Artificial Sequence: Synthetic oligonucleotide
ccttttacggctactgatcgt

SEQ ID NO: 21715 - DNA, 21 bp, Artificial Sequence
  Description of Artificial Sequence: Synthetic oligonucleotide
ccgtttactgatgagttgatg

SEQ ID NO: 21716 - DNA, 21 bp, Artificial Sequence
  Description of Artificial Sequence: Synthetic oligonucleotide
ccttttacgggggcgccgcag

SEQ ID NO: 21717 - DNA, 21 bp, Artificial Sequence
  Description of Artificial Sequence: Synthetic oligonucleotide
cctggtgctaggcgggagctt

SEQ ID NO: 21718 - DNA, 21 bp, Artificial Sequence
  Description of Artificial Sequence: Synthetic oligonucleotide
cctggggctgtgccgccttct

SEQ ID NO: 21719 - DNA, 21 bp, Artificial Sequence
  Description of Artificial Sequence: Synthetic oligonucleotide
cctggttgttcgtctgttgtt

SEQ ID NO: 21720 - DNA, 21 bp, Artificial Sequence
  Description of Artificial Sequence: Synthetic oligonucleotide
ccgggtgatgcgaagcctcgt

SEQ ID NO: 21721 - DNA, 21 bp, Artificial Sequence
  Description of Artificial Sequence: Synthetic oligonucleotide
cctggtgatccgactcatgat

SEQ ID NO: 21722 - DNA, 21 bp, Artificial Sequence
  Description of Artificial Sequence: Synthetic oligonucleotide
cctggtgaggctactaagctg

SEQ ID NO: 21723 - DNA, 21 bp, Artificial Sequence
  Description of Artificial Sequence: Synthetic oligonucleotide
cctggggagaagctttggtgt

SEQ ID NO: 21724 - DNA, 21 bp, Artificial Sequence
  Description of Artificial Sequence: Synthetic oligonucleotide
cctggggagacgcaggaggtg

SEQ ID NO: 21725 - DNA, 21 bp, Artificial Sequence
  Description of Artificial Sequence: Synthetic oligonucleotide
ccgggttttgatccgtctggg

SEQ ID NO: 21726 - DNA, 21 bp, Artificial Sequence
  Description of Artificial Sequence: Synthetic oligonucleotide
ccgggtggttcggatcattct

SEQ ID NO: 21727 - DNA, 21 bp, Artificial Sequence
  Description of Artificial Sequence: Synthetic oligonucleotide
cctggtgggtcgctgggggag

SEQ ID NO: 21728 - DNA, 21 bp, Artificial Sequence
  Description of Artificial Sequence: Synthetic oligonucleotide
cctgggcatgatgtggctcgt

SEQ ID NO: 21729 - DNA, 21 bp, Artificial Sequence
  Description of Artificial Sequence: Synthetic oligonucleotide
ccggggcatatgcctgctagt

SEQ ID NO: 21730 - DNA, 21 bp, Artificial Sequence
  Description of Artificial Sequence: Synthetic oligonucleotide
cctgggattgatgctcgtatt

SEQ ID NO: 21731 - DNA, 21 bp, Artificial Sequence
  Description of Artificial Sequence: Synthetic oligonucleotide
cctgggattgatcgtaagtcg

SEQ ID NO: 21732 - DNA, 21 bp, Artificial Sequence
  Description of Artificial Sequence: Synthetic oligonucleotide
ccgggtattcaggctccgatt

SEQ ID NO: 21733 - DNA, 21 bp, Artificial Sequence
  Description of Artificial Sequence: Synthetic oligonucleotide
ccggggaagattcatgcggct

SEQ ID NO: 21734 - DNA, 21 bp, Artificial Sequence
  Description of Artificial Sequence: Synthetic oligonucleotide
ccggggaagcttttgaatccg

SEQ ID NO: 21735 - DNA, 21 bp, Artificial Sequence
  Description of Artificial Sequence: Synthetic oligonucleotide
cctgggaagtctcttgaggcg

SEQ ID NO: 21736 - DNA, 21 bp, Artificial Sequence
  Description of Artificial Sequence: Synthetic oligonucleotide
cctgggaagtatagtccttcg

SEQ ID NO: 21737 - DNA, 21 bp, Artificial Sequence
  Description of Artificial Sequence: Synthetic oligonucleotide
cctggtcttgctgattatggt

SEQ ID NO: 21738 - DNA, 21 bp, Artificial Sequence
  Description of Artificial Sequence: Synthetic oligonucleotide
ccggggcttctggatcatgtg

SEQ ID NO: 21739 - DNA, 21 bp, Artificial Sequence
  Description of Artificial Sequence: Synthetic oligonucleotide
cctgggttgcagtcgatgaag

SEQ ID NO: 21740 - DNA, 21 bp, Artificial Sequence
  Description of Artificial Sequence: Synthetic oligonucleotide
cctgggctgcggtcggattct

SEQ ID NO: 21741 - DNA, 21 bp, Artificial Sequence
  Description of Artificial Sequence: Synthetic oligonucleotide
cctggtctgactgctaatccg

SEQ ID NO: 21742 - DNA, 21 bp, Artificial Sequence
  Description of Artificial Sequence: Synthetic oligonucleotide
cctggtctgacgaaggctatt

SEQ ID NO: 21743 - DNA, 21 bp, Artificial Sequence
  Description of Artificial Sequence: Synthetic oligonucleotide
cctgggatgaggatgggtcag

SEQ ID NO: 21744 - DNA, 21 bp, Artificial Sequence
  Description of Artificial Sequence: Synthetic oligonucleotide
ccgggtaatcatgttacgcgg

SEQ ID NO: 21745 - DNA, 21 bp, Artificial Sequence
  Description of Artificial Sequence: Synthetic oligonucleotide
ccgggtaattatgagtatcgg

SEQ ID NO: 21746 - DNA, 21 bp, Artificial Sequence
  Description of Artificial Sequence: Synthetic oligonucleotide
ccggggccggggcagccgcgt

SEQ ID NO: 21747 - DNA, 21 bp, Artificial Sequence
  Description of Artificial Sequence: Synthetic oligonucleotide
ccggggcctatgaattcgagt

SEQ ID NO: 21748 - DNA, 21 bp, Artificial Sequence
  Description of Artificial Sequence: Synthetic oligonucleotide
cctggtccgcggagggatatt

SEQ ID NO: 21749 - DNA, 21 bp, Artificial Sequence
  Description of Artificial Sequence: Synthetic oligonucleotide
cctgggcctacgggtgcgtat

SEQ ID NO: 21750 - DNA, 21 bp, Artificial Sequence
  Description of Artificial Sequence: Synthetic oligonucleotide
cctgggcaggagacttcgtat

SEQ ID NO: 21751 - DNA, 21 bp, Artificial Sequence
  Description of Artificial Sequence: Synthetic oligonucleotide
ccgggtcagcagaagaatatg

SEQ ID NO: 21752 - DNA, 21 bp, Artificial Sequence
  Description of Artificial Sequence: Synthetic oligonucleotide
ccgggtcagcggggtactcct

SEQ ID NO: 21753 - DNA, 21 bp, Artificial Sequence
  Description of Artificial Sequence: Synthetic oligonucleotide
ccggggcagacgcagcataat

SEQ ID NO: 21754 - DNA, 21 bp, Artificial Sequence
  Description of Artificial Sequence: Synthetic oligonucleotide
cctgggagggatgcggagggt

SEQ ID NO: 21755 - DNA, 21 bp, Artificial Sequence
  Description of Artificial Sequence: Synthetic oligonucleotide
ccggggagggagggggtgact

SEQ ID NO: 21756 - DNA, 21 bp, Artificial Sequence
  Description of Artificial Sequence: Synthetic oligonucleotide
cctggtcgtccgcagccttct

SEQ ID NO: 21757 - DNA, 21 bp, Artificial Sequence
  Description of Artificial Sequence: Synthetic oligonucleotide
cctgggagggtggggccgttg

SEQ ID NO: 21758 - DNA, 21 bp, Artificial Sequence
  Description of Artificial Sequence: Synthetic oligonucleotide
ccggggagttttccgaggggg

SEQ ID NO: 21759 - DNA, 21 bp, Artificial Sequence
  Description of Artificial Sequence: Synthetic oligonucleotide
cctggtagtaattctgggcat

SEQ ID NO: 21760 - DNA, 21 bp, Artificial Sequence
  Description of Artificial Sequence: Synthetic oligonucleotide
cctgggtcgcaggctgttcat

SEQ ID NO: 21761 - DNA, 21 bp, Artificial Sequence
  Description of Artificial Sequence: Synthetic oligonucleotide
cctggttcgcagcgtaatagt

SEQ ID NO: 21762 - DNA, 21 bp, Artificial Sequence
  Description of Artificial Sequence: Synthetic oligonucleotide
cctgggtcgcgggctccgggt

SEQ ID NO: 21763 - DNA, 21 bp, Artificial Sequence
  Description of Artificial Sequence: Synthetic oligonucleotide
ccgggtactgctcggactaat

SEQ ID NO: 21764 - DNA, 21 bp, Artificial Sequence
  Description of Artificial Sequence: Synthetic oligonucleotide
ccgggtacgggtaggtatgtt

SEQ ID NO: 21765 - DNA, 21 bp, Artificial Sequence
  Description of Artificial Sequence: Synthetic oligonucleotide
cctgggactcctctgcagtcg

SEQ ID NO: 21766 - DNA, 21 bp, Artificial Sequence
  Description of Artificial Sequence: Synthetic oligonucleotide
ccggggactagttcgacgggg

SEQ ID NO: 21767 - DNA, 21 bp, Artificial Sequence
  Description of Artificial Sequence: Synthetic oligonucleotide
cctggtgttaatcctgcgatt

SEQ ID NO: 21768 - DNA, 21 bp, Artificial Sequence
  Description of Artificial Sequence: Synthetic oligonucleotide
ccgggggttaggggttctccg

SEQ ID NO: 21769 - DNA, 21 bp, Artificial Sequence
  Description of Artificial Sequence: Synthetic oligonucleotide
cctggggtgactgatcggggt

SEQ ID NO: 21770 - DNA, 21 bp, Artificial Sequence
  Description of Artificial Sequence: Synthetic oligonucleotide
ccgggttatcctgcggtgacg

SEQ ID NO: 21771 - DNA, 21 bp, Artificial Sequence
  Description of Artificial Sequence: Synthetic oligonucleotide
ccgcatgctaatagttcgttg

SEQ ID NO: 21772 - DNA, 21 bp, Artificial Sequence
  Description of Artificial Sequence: Synthetic oligonucleotide
cctcatgattctccgactcct

SEQ ID NO: 21773 - DNA, 21 bp, Artificial Sequence
  Description of Artificial Sequence: Synthetic oligonucleotide
ccgcatggggttggtgatgcg

SEQ ID NO: 21774 - DNA, 21 bp, Artificial Sequence
  Description of Artificial Sequence: Synthetic oligonucleotide
cctcatcatgatgatgagaat

SEQ ID NO: 21775 - DNA, 21 bp, Artificial Sequence
  Description of Artificial Sequence: Synthetic oligonucleotide
cctcatcttgagtgtggtatg

SEQ ID NO: 21776 - DNA, 21 bp, Artificial Sequence
  Description of Artificial Sequence: Synthetic oligonucleotide
ccgcatttgggtgtgtcgacg

SEQ ID NO: 21777 - DNA, 21 bp, Artificial Sequence
  Description of Artificial Sequence: Synthetic oligonucleotide
cctcatttgcataatggtctg

SEQ ID NO: 21778 - DNA, 21 bp, Artificial Sequence
  Description of Artificial Sequence: Synthetic oligonucleotide
ccgcatttgaagattgctgcg

SEQ ID NO: 21779 - DNA, 21 bp, Artificial Sequence
  Description of Artificial Sequence: Synthetic oligonucleotide
ccgcatttgcctgatcatgcg

SEQ ID NO: 21780 - DNA, 21 bp, Artificial Sequence
  Description of Artificial Sequence: Synthetic oligonucleotide
cctcatcttccgccggcgaat

SEQ ID NO: 21781 - DNA, 21 bp, Artificial Sequence
  Description of Artificial Sequence: Synthetic oligonucleotide
cctcatctgcctcagaatatg

SEQ ID NO: 21782 - DNA, 21 bp, Artificial Sequence
  Description of Artificial Sequence: Synthetic oligonucleotide
cctcatctgtcggcgaatgcg

SEQ ID NO: 21783 - DNA, 21 bp, Artificial Sequence
  Description of Artificial Sequence: Synthetic oligonucleotide
ccgcatatggggcgtgctgat

SEQ ID NO: 21784 - DNA, 21 bp, Artificial Sequence
  Description of Artificial Sequence: Synthetic oligonucleotide
cctcataatagtacggatact

SEQ ID NO: 21785 - DNA, 21 bp, Artificial Sequence
  Description of Artificial Sequence: Synthetic oligonucleotide
cctcatcctaattcttctccg

SEQ ID NO: 21786 - DNA, 21 bp, Artificial Sequence
  Description of Artificial Sequence: Synthetic oligonucleotide
ccgcatcctcctgagcagtcg

SEQ ID NO: 21787 - DNA, 21 bp, Artificial Sequence
  Description of Artificial Sequence: Synthetic oligonucleotide
ccgcatcctccttctaatcgt

SEQ ID NO: 21788 - DNA, 21 bp, Artificial Sequence
  Description of Artificial Sequence: Synthetic oligonucleotide
ccgcatccgtctgctcagggg

SEQ ID NO: 21789 - DNA, 21 bp, Artificial Sequence
  Description of Artificial Sequence: Synthetic oligonucleotide
ccgcatccttcgtcgattccg

SEQ ID NO: 21790 - DNA, 21 bp, Artificial Sequence
  Description of Artificial Sequence: Synthetic oligonucleotide
cctcatcagtctattcctccg

SEQ ID NO: 21791 - DNA, 21 bp, Artificial Sequence
  Description of Artificial Sequence: Synthetic oligonucleotide
ccgcatcgggagtatgttgtt

SEQ ID NO: 21792 - DNA, 21 bp, Artificial Sequence
  Description of Artificial Sequence: Synthetic oligonucleotide
cctcatcgtccgtctaattct

SEQ ID NO: 21793 - DNA, 21 bp, Artificial Sequence
  Description of Artificial Sequence: Synthetic oligonucleotide
ccgcatcggcctacggttgtg

SEQ ID NO: 21794 - DNA, 21 bp, Artificial Sequence
  Description of Artificial Sequence: Synthetic oligonucleotide
cctcatcgtgtgtcggtttcg

SEQ ID NO: 21795 - DNA, 21 bp, Artificial Sequence
  Description of Artificial Sequence: Synthetic oligonucleotide
cctcattctaatatgaattcg

SEQ ID NO: 21796 - DNA, 21 bp, Artificial Sequence
  Description of Artificial Sequence: Synthetic oligonucleotide
ccgcattcgtcgaaggagatg

SEQ ID NO: 21797 - DNA, 21 bp, Artificial Sequence
  Description of Artificial Sequence: Synthetic oligonucleotide
cctcattcttctatgcttttg

SEQ ID NO: 21798 - DNA, 21 bp, Artificial Sequence
  Description of Artificial Sequence: Synthetic oligonucleotide
ccgcatactgggtatacggat

SEQ ID NO: 21799 - DNA, 21 bp, Artificial Sequence
  Description of Artificial Sequence: Synthetic oligonucleotide
ccgcatactttggtgacgagg

SEQ ID NO: 21800 - DNA, 21 bp, Artificial Sequence
  Description of Artificial Sequence: Synthetic oligonucleotide
cctcatactagtccgccgtct

SEQ ID NO: 21801 - DNA, 21 bp, Artificial Sequence
  Description of Artificial Sequence: Synthetic oligonucleotide
cctattgcgcgtgagtatggg

SEQ ID NO: 21802 - DNA, 21 bp, Artificial Sequence
  Description of Artificial Sequence: Synthetic oligonucleotide
cctattgcgcggggtgatttt

SEQ ID NO: 21803 - DNA, 21 bp, Artificial Sequence
  Description of Artificial Sequence: Synthetic oligonucleotide
ccgattgatcgggagtatgcg

SEQ ID NO: 21804 - DNA, 21 bp, Artificial Sequence
  Description of Artificial Sequence: Synthetic oligonucleotide
ccgattgatactggtagggag

SEQ ID NO: 21805 - DNA, 21 bp, Artificial Sequence
  Description of Artificial Sequence: Synthetic oligonucleotide
ccgattgattatggggttgag

SEQ ID NO: 21806 - DNA, 21 bp, Artificial Sequence
  Description of Artificial Sequence: Synthetic oligonucleotide
ccgattgagggtaggcgggtg

SEQ ID NO: 21807 - DNA, 21 bp, Artificial Sequence
  Description of Artificial Sequence: Synthetic oligonucleotide
cctattgagcgtacgcttcct

SEQ ID NO: 21808 - DNA, 21 bp, Artificial Sequence
  Description of Artificial Sequence: Synthetic oligonucleotide
cctattggtcctcctaattcg

SEQ ID NO: 21809 - DNA, 21 bp, Artificial Sequence
  Description of Artificial Sequence: Synthetic oligonucleotide
ccgattgggtctatgctgagt

SEQ ID NO: 21810 - DNA, 21 bp, Artificial Sequence
  Description of Artificial Sequence: Synthetic oligonucleotide
ccgattggtagtaatgggaag

SEQ ID NO: 21811 - DNA, 21 bp, Artificial Sequence
  Description of Artificial Sequence: Synthetic oligonucleotide
cctattggggttcaggagaag

SEQ ID NO: 21812 - DNA, 21 bp, Artificial Sequence
  Description of Artificial Sequence: Synthetic oligonucleotide
cctattcatattagttctgtt

SEQ ID NO: 21813 - DNA, 21 bp, Artificial Sequence
  Description of Artificial Sequence: Synthetic oligonucleotide
ccgattcattattctcaggat

SEQ ID NO: 21814 - DNA, 21 bp, Artificial Sequence
  Description of Artificial Sequence: Synthetic oligonucleotide
cctattatggggcagaagtct

SEQ ID NO: 21815 - DNA, 21 bp, Artificial Sequence
  Description of Artificial Sequence: Synthetic oligonucleotide
cctattaatgattcgtcttcg

SEQ ID NO: 21816 - DNA, 21 bp, Artificial Sequence
  Description of Artificial Sequence: Synthetic oligonucleotide
ccgattaatatgcgggggcct

SEQ ID NO: 21817 - DNA, 21 bp, Artificial Sequence
  Description of Artificial Sequence: Synthetic oligonucleotide
ccgattcctgataagagttct

SEQ ID NO: 21818 - DNA, 21 bp, Artificial Sequence
  Description of Artificial Sequence: Synthetic oligonucleotide
cctattccgggtccgggtaag

SEQ ID NO: 21819 - DNA, 21 bp, Artificial Sequence
  Description of Artificial Sequence: Synthetic oligonucleotide
ccgattccgaataagggtggt

SEQ ID NO: 21820 - DNA, 21 bp, Artificial Sequence
  Description of Artificial Sequence: Synthetic oligonucleotide
ccgattcagacgcgtacgtat

SEQ ID NO: 21821 - DNA, 21 bp, Artificial Sequence
  Description of Artificial Sequence: Synthetic oligonucleotide
cctattcgtgcggctgcgtcg

SEQ ID NO: 21822 - DNA, 21 bp, Artificial Sequence
  Description of Artificial Sequence: Synthetic oligonucleotide
cctattcgggcggaggctgtg

SEQ ID NO: 21823 - DNA, 21 bp, Artificial Sequence
  Description of Artificial Sequence: Synthetic oligonucleotide
cctattagtgagtttaatgcg

SEQ ID NO: 21824 - DNA, 21 bp, Artificial Sequence
  Description of Artificial Sequence: Synthetic oligonucleotide
ccgatttcgttgtcgatgccg

SEQ ID NO: 21825 - DNA, 21 bp, Artificial Sequence
  Description of Artificial Sequence: Synthetic oligonucleotide
cctatttctcctttgtcgtat

SEQ ID NO: 21826 - DNA, 21 bp, Artificial Sequence
  Description of Artificial Sequence: Synthetic oligonucleotide
cctattagtcagggtcgtttg

SEQ ID NO: 21827 - DNA, 21 bp, Artificial Sequence
  Description of Artificial Sequence: Synthetic oligonucleotide
ccgattagttctaagtcgtcg

SEQ ID NO: 21828 - DNA, 21 bp, Artificial Sequence
  Description of Artificial Sequence: Synthetic oligonucleotide
ccgattagtactttgcttgct

SEQ ID NO: 21829 - DNA, 21 bp, Artificial Sequence
  Description of Artificial Sequence: Synthetic oligonucleotide
cctattactaatcctaggatt

SEQ ID NO: 21830 - DNA, 21 bp, Artificial Sequence
  Description of Artificial Sequence: Synthetic oligonucleotide
ccgattacgaatagtaatatt

SEQ ID NO: 21831 - DNA, 21 bp, Artificial Sequence
  Description of Artificial Sequence: Synthetic oligonucleotide
ccgattactaattatagtagt

SEQ ID NO: 21832 - DNA, 21 bp, Artificial Sequence
  Description of Artificial Sequence: Synthetic oligonucleotide
ccgattactccggggaatgag

SEQ ID NO: 21833 - DNA, 21 bp, Artificial Sequence
  Description of Artificial Sequence: Synthetic oligonucleotide
cctattactacggtgcctgcg

SEQ ID NO: 21834 - DNA, 21 bp, Artificial Sequence
  Description of Artificial Sequence: Synthetic oligonucleotide
cctattgtggggagtcatgag

SEQ ID NO: 21835 - DNA, 21 bp, Artificial Sequence
  Description of Artificial Sequence: Synthetic oligonucleotide
ccgattgtgccggtgtcggct

SEQ ID NO: 21836 - DNA, 21 bp, Artificial Sequence
  Description of Artificial Sequence: Synthetic oligonucleotide
ccgattgttacgcatgcgctg

SEQ ID NO: 21837 - DNA, 21 bp, Artificial Sequence
  Description of Artificial Sequence: Synthetic oligonucleotide
ccgatttataaggggacgggt

SEQ ID NO: 21838 - DNA, 21 bp, Artificial Sequence
  Description of Artificial Sequence: Synthetic oligonucleotide
cctaaggcggcgcctaatttt

SEQ ID NO: 21839 - DNA, 21 bp, Artificial Sequence
  Description of Artificial Sequence: Synthetic oligonucleotide
cctaaggcgattttgccttct

SEQ ID NO: 21840 - DNA, 21 bp, Artificial Sequence
  Description of Artificial Sequence: Synthetic oligonucleotide
cctaaggcgtcggattggcat

SEQ ID NO: 21841 - DNA, 21 bp, Artificial Sequence
  Description of Artificial Sequence: Synthetic oligonucleotide
cctaaggatgatggtcagaat

SEQ ID NO: 21842 - DNA, 21 bp, Artificial Sequence
  Description of Artificial Sequence: Synthetic oligonucleotide
cctaaggatattagggagttt

SEQ ID NO: 21843 - DNA, 21 bp, Artificial Sequence
  Description of Artificial Sequence: Synthetic oligonucleotide
ccgaaggataggaatccggtg

SEQ ID NO: 21844 - DNA, 21 bp, Artificial Sequence
  Description of Artificial Sequence: Synthetic oligonucleotide
cctaaggatagttcgcggacg

SEQ ID NO: 21845 - DNA, 21 bp, Artificial Sequence
  Description of Artificial Sequence: Synthetic oligonucleotide
ccgaaggagcggacgcatttg

SEQ ID NO: 21846 - DNA, 21 bp, Artificial Sequence
  Description of Artificial Sequence: Synthetic oligonucleotide
ccgaagtttgggggtgtgagt

SEQ ID NO: 21847 - DNA, 21 bp, Artificial Sequence
  Description of Artificial Sequence: Synthetic oligonucleotide
ccgaagggggctgcgacgatg

SEQ ID NO: 21848 - DNA, 21 bp, Artificial Sequence
  Description of Artificial Sequence: Synthetic oligonucleotide
cctaagggggagactggtcgt

SEQ ID NO: 21849 - DNA, 21 bp, Artificial Sequence
  Description of Artificial Sequence: Synthetic oligonucleotide
cctaagggtacgcattttggg

SEQ ID NO: 21850 - DNA, 21 bp, Artificial Sequence
  Description of Artificial Sequence: Synthetic oligonucleotide
cctaaggggtatggtgcgtct

SEQ ID NO: 21851 - DNA, 21 bp, Artificial Sequence
  Description of Artificial Sequence: Synthetic oligonucleotide
ccgaagattagtactctgggt

SEQ ID NO: 21852 - DNA, 21 bp, Artificial Sequence
  Description of Artificial Sequence: Synthetic oligonucleotide
ccgaagaaggatccggtgcct

SEQ ID NO: 21853 - DNA, 21 bp, Artificial Sequence
  Description of Artificial Sequence: Synthetic oligonucleotide
ccgaagctgaaggatgttact

SEQ ID NO: 21854 - DNA, 21 bp, Artificial Sequence
  Description of Artificial Sequence: Synthetic oligonucleotide
ccgaagcttagttcttctact

SEQ ID NO: 21855 - DNA, 21 bp, Artificial Sequence
  Description of Artificial Sequence: Synthetic oligonucleotide
ccgaagctgtatgatatgatg

SEQ ID NO: 21856 - DNA, 21 bp, Artificial Sequence
  Description of Artificial Sequence: Synthetic oligonucleotide
cctaagatggatgataagaat

SEQ ID NO: 21857 - DNA, 21 bp, Artificial Sequence
  Description of Artificial Sequence: Synthetic oligonucleotide
cctaagatgcttgttactggt

SEQ ID NO: 21858 - DNA, 21 bp, Artificial Sequence
  Description of Artificial Sequence: Synthetic oligonucleotide
ccgaagatgactggggctcgt

SEQ ID NO: 21859 - DNA, 21 bp, Artificial Sequence
  Description of Artificial Sequence: Synthetic oligonucleotide
ccgaagaatatggttcctccg

SEQ ID NO: 21860 - DNA, 21 bp, Artificial Sequence
  Description of Artificial Sequence: Synthetic oligonucleotide
ccgaagcctgagtttgcgtct

SEQ ID NO: 21861 - DNA, 21 bp, Artificial Sequence
  Description of Artificial Sequence: Synthetic oligonucleotide
cctaagcctgagtttcttgct

SEQ ID NO: 21862 - DNA, 21 bp, Artificial Sequence
  Description of Artificial Sequence: Synthetic oligonucleotide
ccgaagccggagccgcatgct

SEQ ID NO: 21863 - DNA, 21 bp, Artificial Sequence
  Description of Artificial Sequence: Synthetic oligonucleotide
ccgaagcctattactgtgacg

SEQ ID NO: 21864 - DNA, 21 bp, Artificial Sequence
  Description of Artificial Sequence: Synthetic oligonucleotide
ccgaagcctcctaatctgttg

SEQ ID NO: 21865 - DNA, 21 bp, Artificial Sequence
  Description of Artificial Sequence: Synthetic oligonucleotide
cctaagcctccgtctttgggg

SEQ ID NO: 21866 - DNA, 21 bp, Artificial Sequence
  Description of Artificial Sequence: Synthetic oligonucleotide
ccgaagcaggagtcttatgcg

SEQ ID NO: 21867 - DNA, 21 bp, Artificial Sequence
  Description of Artificial Sequence: Synthetic oligonucleotide
ccgaagtcgatggatggttat

SEQ ID NO: 21868 - DNA, 21 bp, Artificial Sequence
  Description of Artificial Sequence: Synthetic oligonucleotide
ccgaagtcgaattattatcct

SEQ ID NO: 21869 - DNA, 21 bp, Artificial Sequence
  Description of Artificial Sequence: Synthetic oligonucleotide
cctaagacgcatgtgctgtcg

SEQ ID NO: 21870 - DNA, 21 bp, Artificial Sequence
  Description of Artificial Sequence: Synthetic oligonucleotide
cctaagacttatgagactgtg

SEQ ID NO: 21871 - DNA, 21 bp, Artificial Sequence
  Description of Artificial Sequence: Synthetic oligonucleotide
ccgcttgcggctgggtctgtt

SEQ ID NO: 21872 - DNA, 21 bp, Artificial Sequence
  Description of Artificial Sequence: Synthetic oligonucleotide
cctctggcgggtcctcttact

SEQ ID NO: 21873 - DNA, 21 bp, Artificial Sequence
  Description of Artificial Sequence: Synthetic oligonucleotide
cctttggctcatactacttcg

SEQ ID NO: 21874 - DNA, 21 bp, Artificial Sequence
  Description of Artificial Sequence: Synthetic oligonucleotide
ccgcttgctcgtgaggagctg

SEQ ID NO: 21875 - DNA, 21 bp, Artificial Sequence
  Description of Artificial Sequence: Synthetic oligonucleotide
ccgcttgcttcgcctattcct

SEQ ID NO: 21876 - DNA, 21 bp, Artificial Sequence
  Description of Artificial Sequence: Synthetic oligonucleotide
cctcttgcgagtacgtatccg

SEQ ID NO: 21877 - DNA, 21 bp, Artificial Sequence
  Description of Artificial Sequence: Synthetic oligonucleotide
cctcttgatgcgaagatgtat

SEQ ID NO: 21878 - DNA, 21 bp, Artificial Sequence
  Description of Artificial Sequence: Synthetic oligonucleotide
cctcttgatgataagcctttt

SEQ ID NO: 21879 - DNA, 21 bp, Artificial Sequence
  Description of Artificial Sequence: Synthetic oligonucleotide
ccgctggatcctgggattttg

SEQ ID NO: 21880 - DNA, 21 bp, Artificial Sequence
  Description of Artificial Sequence: Synthetic oligonucleotide
ccgttggattctaatgttgtg

SEQ ID NO: 21881 - DNA, 21 bp, Artificial Sequence
  Description of Artificial Sequence: Synthetic oligonucleotide
cctctggatacgcgtttttct

SEQ ID NO: 21882 - DNA, 21 bp, Artificial Sequence
  Description of Artificial Sequence: Synthetic oligonucleotide
ccgctggattatcggaagggg

SEQ ID NO: 21883 - DNA, 21 bp, Artificial Sequence
  Description of Artificial Sequence: Synthetic oligonucleotide
cctctggagaagtcgtctttt

SEQ ID NO: 21884 - DNA, 21 bp, Artificial Sequence
  Description of Artificial Sequence: Synthetic oligonucleotide
cctttggagagtgtggatatt

SEQ ID NO: 21885 - DNA, 21 bp, Artificial Sequence
  Description of Artificial Sequence: Synthetic oligonucleotide
ccgttgtttaatgggtctgcg

SEQ ID NO: 21886 - DNA, 21 bp, Artificial Sequence
  Description of Artificial Sequence: Synthetic oligonucleotide
ccgttgggtgctgggaagagt

SEQ ID NO: 21887 - DNA, 21 bp, Artificial Sequence
  Description of Artificial Sequence: Synthetic oligonucleotide
cctttgggtgctcagcatctg

SEQ ID NO: 21888 - DNA, 21 bp, Artificial Sequence
  Description of Artificial Sequence: Synthetic oligonucleotide
cctttgggtgatgcgtggggg

SEQ ID NO: 21889 - DNA, 21 bp, Artificial Sequence
  Description of Artificial Sequence: Synthetic oligonucleotide
ccgctggggatggtgcatacg

SEQ ID NO: 21890 - DNA, 21 bp, Artificial Sequence
  Description of Artificial Sequence: Synthetic oligonucleotide
ccgctgcatatgacgactatg

SEQ ID NO: 21891 - DNA, 21 bp, Artificial Sequence
  Description of Artificial Sequence: Synthetic oligonucleotide
ccgctgcataatcgggttcct

SEQ ID NO: 21892 - DNA, 21 bp, Artificial Sequence
  Description of Artificial Sequence: Synthetic oligonucleotide
ccgcttcatcgggctaatact

SEQ ID NO: 21893 - DNA, 21 bp, Artificial Sequence
  Description of Artificial Sequence: Synthetic oligonucleotide
ccgttgcatcggacgcttgat

SEQ ID NO: 21894 - DNA, 21 bp, Artificial Sequence
  Description of Artificial Sequence: Synthetic oligonucleotide
cctcttattgcggtgccgact

SEQ ID NO: 21895 - DNA, 21 bp, Artificial Sequence
  Description of Artificial Sequence: Synthetic oligonucleotide
cctttgattggtaagccgaat

SEQ ID NO: 21896 - DNA, 21 bp, Artificial Sequence
  Description of Artificial Sequence: Synthetic oligonucleotide
cctcttattactccggatctt

SEQ ID NO: 21897 - DNA, 21 bp, Artificial Sequence
  Description of Artificial Sequence: Synthetic oligonucleotide
ccgctgaaggctcatatgatg

SEQ ID NO: 21898 - DNA, 21 bp, Artificial Sequence
  Description of Artificial Sequence: Synthetic oligonucleotide
ccgttgaaggcgtcgggtatg

SEQ ID NO: 21899 - DNA, 21 bp, Artificial Sequence
  Description of Artificial Sequence: Synthetic oligonucleotide
ccgttgaagcttagttatggg

SEQ ID NO: 21900 - DNA, 21 bp, Artificial Sequence
  Description of Artificial Sequence: Synthetic oligonucleotide
cctttgaaggtgagtgcttcg

SEQ ID NO: 21901 - DNA, 21 bp, Artificial Sequence
  Description of Artificial Sequence: Synthetic oligonucleotide
cctttgttggatagtcatagt

SEQ ID NO: 21902 - DNA, 21 bp, Artificial Sequence
  Description of Artificial Sequence: Synthetic oligonucleotide
cctctgcttgagcatcgtggt

SEQ ID NO: 21903 - DNA, 21 bp, Artificial Sequence
  Description of Artificial Sequence: Synthetic oligonucleotide
ccgttgttgcatgataagatt

SEQ ID NO: 21904 - DNA, 21 bp, Artificial Sequence
  Description of Artificial Sequence: Synthetic oligonucleotide
ccgcttaatgctgcgcctttt

SEQ ID NO: 21905 - DNA, 21 bp, Artificial Sequence
  Description of Artificial Sequence: Synthetic oligonucleotide
cctctgaatggtgatgcgcct

SEQ ID NO: 21906 - DNA, 21 bp, Artificial Sequence
  Description of Artificial Sequence: Synthetic oligonucleotide
ccgctgaatcctagtacgggt

SEQ ID NO: 21907 - DNA, 21 bp, Artificial Sequence
  Description of Artificial Sequence: Synthetic oligonucleotide
cctctgaatgtgaggactgtt

SEQ ID NO: 21908 - DNA, 21 bp, Artificial Sequence
  Description of Artificial Sequence: Synthetic oligonucleotide
cctcttcctgattatcttgtg

SEQ ID NO: 21909 - DNA, 21 bp, Artificial Sequence
  Description of Artificial Sequence: Synthetic oligonucleotide
cctctgcctggtaatgttggg

SEQ ID NO: 21910 - DNA, 21 bp, Artificial Sequence
  Description of Artificial Sequence: Synthetic oligonucleotide
ccgttgccgctgaggacgggg

SEQ ID NO: 21911 - DNA, 21 bp, Artificial Sequence
  Description of Artificial Sequence: Synthetic oligonucleotide
ccgcttcctcctccggaggcg

SEQ ID NO: 21912 - DNA, 21 bp, Artificial Sequence
  Description of Artificial Sequence: Synthetic oligonucleotide
ccgcttccgaggctggcttct

SEQ ID NO: 21913 - DNA, 21 bp, Artificial Sequence
  Description of Artificial Sequence: Synthetic oligonucleotide
ccgctgcctagtgatgggcat

SEQ ID NO: 21914 - DNA, 21 bp, Artificial Sequence
  Description of Artificial Sequence: Synthetic oligonucleotide
ccgttgccggtttctaggtct

SEQ ID NO: 21915 - DNA, 21 bp, Artificial Sequence
  Description of Artificial Sequence: Synthetic oligonucleotide
cctctgcagagtcagactgtt

SEQ ID NO: 21916 - DNA, 21 bp, Artificial Sequence
  Description of Artificial Sequence: Synthetic oligonucleotide
cctcttcagtcgtcgcagttt

SEQ ID NO: 21917 - DNA, 21 bp, Artificial Sequence
  Description of Artificial Sequence: Synthetic oligonucleotide
cctctgcagacgatgactctg

SEQ ID NO: 21918 - DNA, 21 bp, Artificial Sequence
  Description of Artificial Sequence: Synthetic oligonucleotide
cctttgcaggtgcggctgtcg

SEQ ID NO: 21919 - DNA, 21 bp, Artificial Sequence
  Description of Artificial Sequence: Synthetic oligonucleotide
ccgcttagggatgggttggtt

SEQ ID NO: 21920 - DNA, 21 bp, Artificial Sequence
  Description of Artificial Sequence: Synthetic oligonucleotide
ccgctgaggttgacttctgat

SEQ ID NO: 21921 - DNA, 21 bp, Artificial Sequence
  Description of Artificial Sequence: Synthetic oligonucleotide
ccgctgcgtccggggcagttg

SEQ ID NO: 21922 - DNA, 21 bp, Artificial Sequence
  Description of Artificial Sequence: Synthetic oligonucleotide
cctttgcgggtttcgacgcct

SEQ ID NO: 21923 - DNA, 21 bp, Artificial Sequence
  Description of Artificial Sequence: Synthetic oligonucleotide
cctctgtcggcgattaattcg

SEQ ID NO: 21924 - DNA, 21 bp, Artificial Sequence
  Description of Artificial Sequence: Synthetic oligonucleotide
ccgttgtctgatgctatgtct

SEQ ID NO: 21925 - DNA, 21 bp, Artificial Sequence
  Description of Artificial Sequence: Synthetic oligonucleotide
cctttgtctgatcctaatatt

SEQ ID NO: 21926 - DNA, 21 bp, Artificial Sequence
  Description of Artificial Sequence: Synthetic oligonucleotide
cctttgtctgaggataagagg

SEQ ID NO: 21927 - DNA, 21 bp, Artificial Sequence
  Description of Artificial Sequence: Synthetic oligonucleotide
cctcttagttttacggttgcg

SEQ ID NO: 21928 - DNA, 21 bp, Artificial Sequence
  Description of Artificial Sequence: Synthetic oligonucleotide
cctttgagtatgatggagccg

SEQ ID NO: 21929 - DNA, 21 bp, Artificial Sequence
  Description of Artificial Sequence: Synthetic oligonucleotide
cctctttctatgcggccggat

SEQ ID NO: 21930 - DNA, 21 bp, Artificial Sequence
  Description of Artificial Sequence: Synthetic oligonucleotide
cctctttcgaatcttcagcct

SEQ ID NO: 21931 - DNA, 21 bp, Artificial Sequence
  Description of Artificial Sequence: Synthetic oligonucleotide
cctctgtctcctgcgggtgcg

SEQ ID NO: 21932 - DNA, 21 bp, Artificial Sequence
  Description of Artificial Sequence: Synthetic oligonucleotide
cctttgtcgcctattaggaat

SEQ ID NO: 21933 - DNA, 21 bp, Artificial Sequence
  Description of Artificial Sequence: Synthetic oligonucleotide
cctctgtctccgacttggaag

SEQ ID NO: 21934 - DNA, 21 bp, Artificial Sequence
  Description of Artificial Sequence: Synthetic oligonucleotide
cctctttctcgtaatcagatt

SEQ ID NO: 21935 - DNA, 21 bp, Artificial Sequence
  Description of Artificial Sequence: Synthetic oligonucleotide
cctctttcttctgctgcgggt

SEQ ID NO: 21936 - DNA, 21 bp, Artificial Sequence
  Description of Artificial Sequence: Synthetic oligonucleotide
cctcttagttcgggtggtatg

SEQ ID NO: 21937 - DNA, 21 bp, Artificial Sequence
  Description of Artificial Sequence: Synthetic oligonucleotide
cctctgtctagtccggctcgg

SEQ ID NO: 21938 - DNA, 21 bp, Artificial Sequence
  Description of Artificial Sequence: Synthetic oligonucleotide
ccgttgtcgtctccgaatggg

SEQ ID NO: 21939 - DNA, 21 bp, Artificial Sequence
  Description of Artificial Sequence: Synthetic oligonucleotide
ccgttgtcttctacgcttggg

SEQ ID NO: 21940 - DNA, 21 bp, Artificial Sequence
  Description of Artificial Sequence: Synthetic oligonucleotide
cctctgagtacgaatagtacg

SEQ ID NO: 21941 - DNA, 21 bp, Artificial Sequence
  Description of Artificial Sequence: Synthetic oligonucleotide
ccgctttcgtatcagaagaat

SEQ ID NO: 21942 - DNA, 21 bp, Artificial Sequence
  Description of Artificial Sequence: Synthetic oligonucleotide
cctctgacggcgggtttggcg

SEQ ID NO: 21943 - DNA, 21 bp, Artificial Sequence
  Description of Artificial Sequence: Synthetic oligonucleotide
ccgctgactgctcatgtgagt

SEQ ID NO: 21944 - DNA, 21 bp, Artificial Sequence
  Description of Artificial Sequence: Synthetic oligonucleotide
ccgttgactcaggcggtgcct

SEQ ID NO: 21945 - DNA, 21 bp, Artificial Sequence
  Description of Artificial Sequence: Synthetic oligonucleotide
cctcttacgtctttgaagttg

SEQ ID NO: 21946 - DNA, 21 bp, Artificial Sequence
  Description of Artificial Sequence: Synthetic oligonucleotide
cctcttacgagtgtggcgcct

SEQ ID NO: 21947 - DNA, 21 bp, Artificial Sequence
  Description of Artificial Sequence: Synthetic oligonucleotide
cctctgactactcgtaatcag

SEQ ID NO: 21948 - DNA, 21 bp, Artificial Sequence
  Description of Artificial Sequence: Synthetic oligonucleotide
ccgttggtggcgatttctacg

SEQ ID NO: 21949 - DNA, 21 bp, Artificial Sequence
  Description of Artificial Sequence: Synthetic oligonucleotide
ccgttggtgttgtcgtctcat

SEQ ID NO: 21950 - DNA, 21 bp, Artificial Sequence
  Description of Artificial Sequence: Synthetic oligonucleotide
ccgcttgtgcgtggggattcg

SEQ ID NO: 21951 - DNA, 21 bp, Artificial Sequence
  Description of Artificial Sequence: Synthetic oligonucleotide
cctttggttagtacggggatt

SEQ ID NO: 21952 - DNA, 21 bp, Artificial Sequence
  Description of Artificial Sequence: Synthetic oligonucleotide
cctttggttacgatggcgagt

SEQ ID NO: 21953 - DNA, 21 bp, Artificial Sequence
  Description of Artificial Sequence: Synthetic oligonucleotide
cctatggctcctcctgttcag

SEQ ID NO: 21954 - DNA, 21 bp, Artificial Sequence
  Description of Artificial Sequence: Synthetic oligonucleotide
ccgatggcgcaggtggctccg

SEQ ID NO: 21955 - DNA, 21 bp, Artificial Sequence
  Description of Artificial Sequence: Synthetic oligonucleotide
ccgatggagcggactcatatg

SEQ ID NO: 21956 - DNA, 21 bp, Artificial Sequence
  Description of Artificial Sequence: Synthetic oligonucleotide
cctatgggtcatcagtcggct

SEQ ID NO: 21957 - DNA, 21 bp, Artificial Sequence
  Description of Artificial Sequence: Synthetic oligonucleotide
ccgatgattaattcgtcgatg

SEQ ID NO: 21958 - DNA, 21 bp, Artificial Sequence
  Description of Artificial Sequence: Synthetic oligonucleotide
cctatgaaggcgtcgagtcct

SEQ ID NO: 21959 - DNA, 21 bp, Artificial Sequence
  Description of Artificial Sequence: Synthetic oligonucleotide
ccgatgaagggttctgtttat

SEQ ID NO: 21960 - DNA, 21 bp, Artificial Sequence
  Description of Artificial Sequence: Synthetic oligonucleotide
cctatgaagatgggtccgggg

SEQ ID NO: 21961 - DNA, 21 bp, Artificial Sequence
  Description of Artificial Sequence: Synthetic oligonucleotide
cctatgatgcagactccgaag

SEQ ID NO: 21962 - DNA, 21 bp, Artificial Sequence
  Description of Artificial Sequence: Synthetic oligonucleotide
ccgatgaatcgtggtaaggag

SEQ ID NO: 21963 - DNA, 21 bp, Artificial Sequence
  Description of Artificial Sequence: Synthetic oligonucleotide
cctatgaatactaatgtttct

SEQ ID NO: 21964 - DNA, 21 bp, Artificial Sequence
  Description of Artificial Sequence: Synthetic oligonucleotide
ccgatgccggcgagtgatttt

SEQ ID NO: 21965 - DNA, 21 bp, Artificial Sequence
  Description of Artificial Sequence: Synthetic oligonucleotide
ccgatgcctgagtttaatggg

SEQ ID NO: 21966 - DNA, 21 bp, Artificial Sequence
  Description of Artificial Sequence: Synthetic oligonucleotide
cctatgccggagatggctggt

SEQ ID NO: 21967 - DNA, 21 bp, Artificial Sequence
  Description of Artificial Sequence: Synthetic oligonucleotide
cctatgcctgttcgggcggtt

SEQ ID NO: 21968 - DNA, 21 bp, Artificial Sequence
  Description of Artificial Sequence: Synthetic oligonucleotide
cctatgcgtgggtcgactctt

SEQ ID NO: 21969 - DNA, 21 bp, Artificial Sequence
  Description of Artificial Sequence: Synthetic oligonucleotide
cctatgcggaatcaggtggat

SEQ ID NO: 21970 - DNA, 21 bp, Artificial Sequence
  Description of Artificial Sequence: Synthetic oligonucleotide
ccgatgcggcagattaatgat

SEQ ID NO: 21971 - DNA, 21 bp, Artificial Sequence
  Description of Artificial Sequence: Synthetic oligonucleotide
ccgatgtcggagcttactcct

SEQ ID NO: 21972 - DNA, 21 bp, Artificial Sequence
  Description of Artificial Sequence: Synthetic oligonucleotide
cctatgagtggtccgtcgatg

SEQ ID NO: 21973 - DNA, 21 bp, Artificial Sequence
  Description of Artificial Sequence: Synthetic oligonucleotide
ccgatgagtggttctaatgcg

SEQ ID NO: 21974 - DNA, 21 bp, Artificial Sequence
  Description of Artificial Sequence: Synthetic oligonucleotide
cctatgtctcatatggctccg

SEQ ID NO: 21975 - DNA, 21 bp, Artificial Sequence
  Description of Artificial Sequence: Synthetic oligonucleotide
cctatgagtctgcctctgagt

SEQ ID NO: 21976 - DNA, 21 bp, Artificial Sequence
  Description of Artificial Sequence: Synthetic oligonucleotide
cctatgtctatgaaggagcct

SEQ ID NO: 21977 - DNA, 21 bp, Artificial Sequence
  Description of Artificial Sequence: Synthetic oligonucleotide
ccgatgtctcagacgcctggg

SEQ ID NO: 21978 - DNA, 21 bp, Artificial Sequence
  Description of Artificial Sequence: Synthetic oligonucleotide
cctatgtcgcagactacgagt

SEQ ID NO: 21979 - DNA, 21 bp, Artificial Sequence
  Description of Artificial Sequence: Synthetic oligonucleotide
cctatgtcttcgccgcttaag

SEQ ID NO: 21980 - DNA, 21 bp, Artificial Sequence
  Description of Artificial Sequence: Synthetic oligonucleotide
ccgatgtcttcgcgtgttgtg

SEQ ID NO: 21981 - DNA, 21 bp, Artificial Sequence
  Description of Artificial Sequence: Synthetic oligonucleotide
ccgatgtctactagtactccg

SEQ ID NO: 21982 - DNA, 21 bp, Artificial Sequence
  Description of Artificial Sequence: Synthetic oligonucleotide
ccgatggttaaggggacgtct

SEQ ID NO: 21983 - DNA, 21 bp, Artificial Sequence
  Description of Artificial Sequence: Synthetic oligonucleotide
cctatggtgacggttcggacg

SEQ ID NO: 21984 - DNA, 21 bp, Artificial Sequence
  Description of Artificial Sequence: Synthetic oligonucleotide
ccgaatgctaagacgattcct

SEQ ID NO: 21985 - DNA, 21 bp, Artificial Sequence
  Description of Artificial Sequence: Synthetic oligonucleotide
ccgaatgctcagactgtgtat

SEQ ID NO: 21986 - DNA, 21 bp, Artificial Sequence
  Description of Artificial Sequence: Synthetic oligonucleotide
cctaatgctcgtatgctggtt

SEQ ID NO: 21987 - DNA, 21 bp, Artificial Sequence
  Description of Artificial Sequence: Synthetic oligonucleotide
ccgaatgatggggcgcttcct

SEQ ID NO: 21988 - DNA, 21 bp, Artificial Sequence
  Description of Artificial Sequence: Synthetic oligonucleotide
cctaatgatcgggctgtggtt

SEQ ID NO: 21989 - DNA, 21 bp, Artificial Sequence
  Description of Artificial Sequence: Synthetic oligonucleotide
cctaatgataggactcgtatt

SEQ ID NO: 21990 - DNA, 21 bp, Artificial Sequence
  Description of Artificial Sequence: Synthetic oligonucleotide
ccgaatgagcaggctcttggt

SEQ ID NO: 21991 - DNA, 21 bp, Artificial Sequence
  Description of Artificial Sequence: Synthetic oligonucleotide
ccgaatgagtctcttgttact

SEQ ID NO: 21992 - DNA, 21 bp, Artificial Sequence
  Description of Artificial Sequence: Synthetic oligonucleotide
cctaattttcatcgtgctgag

SEQ ID NO: 21993 - DNA, 21 bp, Artificial Sequence
  Description of Artificial Sequence: Synthetic oligonucleotide
ccgaatggtccttataatgct

SEQ ID NO: 21994 - DNA, 21 bp, Artificial Sequence
  Description of Artificial Sequence: Synthetic oligonucleotide
ccgaatggttctgctaagtct

SEQ ID NO: 21995 - DNA, 21 bp, Artificial Sequence
  Description of Artificial Sequence: Synthetic oligonucleotide
ccgaatcatgatgtgccgcct

SEQ ID NO: 21996 - DNA, 21 bp, Artificial Sequence
  Description of Artificial Sequence: Synthetic oligonucleotide
ccgaatcataagggttttggg

SEQ ID NO: 21997 - DNA, 21 bp, Artificial Sequence
  Description of Artificial Sequence: Synthetic oligonucleotide
ccgaatcataatagtgataag

SEQ ID NO: 21998 - DNA, 21 bp, Artificial Sequence
  Description of Artificial Sequence: Synthetic oligonucleotide
ccgaatcattctcagcttctg

SEQ ID NO: 21999 - DNA, 21 bp, Artificial Sequence
  Description of Artificial Sequence: Synthetic oligonucleotide
cctaatattaagaatccttct

SEQ ID NO: 22000 - DNA, 21 bp, Artificial Sequence
  Description of Artificial Sequence: Synthetic oligonucleotide
ccgaatattcctatgcggggt

SEQ ID NO: 22001 - DNA, 21 bp, Artificial Sequence
  Description of Artificial Sequence: Synthetic oligonucleotide
ccgaatattacttcgactctt

SEQ ID NO: 22002 - DNA, 21 bp, Artificial Sequence
  Description of Artificial Sequence: Synthetic oligonucleotide
cctaatctgattctgggtccg

SEQ ID NO: 22003 - DNA, 21 bp, Artificial Sequence
  Description of Artificial Sequence: Synthetic oligonucleotide
cctaatctgcagaggagtcct

SEQ ID NO: 22004 - DNA, 21 bp, Artificial Sequence
  Description of Artificial Sequence: Synthetic oligonucleotide
cctaatctttcggatgagtct

SEQ ID NO: 22005 - DNA, 21 bp, Artificial Sequence
  Description of Artificial Sequence: Synthetic oligonucleotide
ccgaatcttactatggcttct

SEQ ID NO: 22006 - DNA, 21 bp, Artificial Sequence
  Description of Artificial Sequence: Synthetic oligonucleotide
cctaatcttgtgacggctgct

SEQ ID NO: 22007 - DNA, 21 bp, Artificial Sequence
  Description of Artificial Sequence: Synthetic oligonucleotide
cctaataataatgttcctagt

SEQ ID NO: 22008 - DNA, 21 bp, Artificial Sequence
  Description of Artificial Sequence: Synthetic oligonucleotide
cctaataatagggatagtacg

SEQ ID NO: 22009 - DNA, 21 bp, Artificial Sequence
  Description of Artificial Sequence: Synthetic oligonucleotide
cctaataatgttatttcggag

SEQ ID NO: 22010 - DNA, 21 bp, Artificial Sequence
  Description of Artificial Sequence: Synthetic oligonucleotide
ccgaataatgttccgcttgcg

SEQ ID NO: 22011 - DNA, 21 bp, Artificial Sequence
  Description of Artificial Sequence: Synthetic oligonucleotide
ccgaatccggctgctgcggct

SEQ ID NO: 22012 - DNA, 21 bp, Artificial Sequence
  Description of Artificial Sequence: Synthetic oligonucleotide
cctaatcctgcgcgtcttact

SEQ ID NO: 22013 - DNA, 21 bp, Artificial Sequence
  Description of Artificial Sequence: Synthetic oligonucleotide
ccgaatccgatttttagtagt

SEQ ID NO: 22014 - DNA, 21 bp, Artificial Sequence
  Description of Artificial Sequence: Synthetic oligonucleotide
ccgaatcctacttggtcgtcg

SEQ ID NO: 22015 - DNA, 21 bp, Artificial Sequence
  Description of Artificial Sequence: Synthetic oligonucleotide
ccgaatccggtgactcgtggt

SEQ ID NO: 22016 - DNA, 21 bp, Artificial Sequence
  Description of Artificial Sequence: Synthetic oligonucleotide
cctaatcaggatactcttgat

SEQ ID NO: 22017 - DNA, 21 bp, Artificial Sequence
  Description of Artificial Sequence: Synthetic oligonucleotide
cctaatcagtctgtgaagccg

SEQ ID NO: 22018 - DNA, 21 bp, Artificial Sequence
  Description of Artificial Sequence: Synthetic oligonucleotide
ccgaataggggtcatccgtcg

SEQ ID NO: 22019 - DNA, 21 bp, Artificial Sequence
  Description of Artificial Sequence: Synthetic oligonucleotide
cctaataggattgctcctatt

SEQ ID NO: 22020 - DNA, 21 bp, Artificial Sequence
  Description of Artificial Sequence: Synthetic oligonucleotide
cctaattcgggggttgtgact

SEQ ID NO: 22021 - DNA, 21 bp, Artificial Sequence
  Description of Artificial Sequence: Synthetic oligonucleotide
ccgaattctcttaatgcggcg

SEQ ID NO: 22022 - DNA, 21 bp, Artificial Sequence
  Description of Artificial Sequence: Synthetic oligonucleotide
ccgaatagtcggacgccgtat

SEQ ID NO: 22023 - DNA, 21 bp, Artificial Sequence
  Description of Artificial Sequence: Synthetic oligonucleotide
cctaattcttcgccgaggttg

SEQ ID NO: 22024 - DNA, 21 bp, Artificial Sequence
  Description of Artificial Sequence: Synthetic oligonucleotide
cctaatagtacgagggtggtt

SEQ ID NO: 22025 - DNA, 21 bp, Artificial Sequence
  Description of Artificial Sequence: Synthetic oligonucleotide
ccgaatactatgacgaggttg

SEQ ID NO: 22026 - DNA, 21 bp, Artificial Sequence
  Description of Artificial Sequence: Synthetic oligonucleotide
ccgaatgttcatcctaatatt

SEQ ID NO: 22027 - DNA, 21 bp, Artificial Sequence
  Description of Artificial Sequence: Synthetic oligonucleotide
ccgaatgtgaatgtgtctacg

SEQ ID NO: 22028 - DNA, 21 bp, Artificial Sequence
  Description of Artificial Sequence: Synthetic oligonucleotide
cctaatgttgttgatatgtcg

SEQ ID NO: 22029 - DNA, 21 bp, Artificial Sequence
  Description of Artificial Sequence: Synthetic oligonucleotide
cctcctgctgatcttaggacg

SEQ ID NO: 22030 - DNA, 21 bp, Artificial Sequence
  Description of Artificial Sequence: Synthetic oligonucleotide
ccgccggctcttagtccggtg

SEQ ID NO: 22031 - DNA, 21 bp, Artificial Sequence
  Description of Artificial Sequence: Synthetic oligonucleotide
cctccggctaattcgtcgtct

SEQ ID NO: 22032 - DNA, 21 bp, Artificial Sequence
  Description of Artificial Sequence: Synthetic oligonucleotide
ccgccggatgctaggtcttct

SEQ ID NO: 22033 - DNA, 21 bp, Artificial Sequence
  Description of Artificial Sequence: Synthetic oligonucleotide
cctccggatggggcgtctcgg

SEQ ID NO: 22034 - DNA, 21 bp, Artificial Sequence
  Description of Artificial Sequence: Synthetic oligonucleotide
cctcctgataagatgcattcg

SEQ ID NO: 22035 - DNA, 21 bp, Artificial Sequence
  Description of Artificial Sequence: Synthetic oligonucleotide
cctccggataatctgcataag

SEQ ID NO: 22036 - DNA, 21 bp, Artificial Sequence
  Description of Artificial Sequence: Synthetic oligonucleotide
cctccggagatgattttgggt

SEQ ID NO: 22037 - DNA, 21 bp, Artificial Sequence
  Description of Artificial Sequence: Synthetic oligonucleotide
cctccgtttaataagtcggat

SEQ ID NO: 22038 - DNA, 21 bp, Artificial Sequence
  Description of Artificial Sequence: Synthetic oligonucleotide
cctccttttccggagaggctt

SEQ ID NO: 22039 - DNA, 21 bp, Artificial Sequence
  Description of Artificial Sequence: Synthetic oligonucleotide
cctcctgggcatgatgcttct

SEQ ID NO: 22040 - DNA, 21 bp, Artificial Sequence
  Description of Artificial Sequence: Synthetic oligonucleotide
ccgcctggtattacgacgagt

SEQ ID NO: 22041 - DNA, 21 bp, Artificial Sequence
  Description of Artificial Sequence: Synthetic oligonucleotide
ccgcctgggcagtctcttacg

SEQ ID NO: 22042 - DNA, 21 bp, Artificial Sequence
  Description of Artificial Sequence: Synthetic oligonucleotide
cctccgggtagggtggttgcg

SEQ ID NO: 22043 - DNA, 21 bp, Artificial Sequence
  Description of Artificial Sequence: Synthetic oligonucleotide
cctcctggtagtcatagttcg

SEQ ID NO: 22044 - DNA, 21 bp, Artificial Sequence
  Description of Artificial Sequence: Synthetic oligonucleotide
ccgccggggtcttcgtctcgg

SEQ ID NO: 22045 - DNA, 21 bp, Artificial Sequence
  Description of Artificial Sequence: Synthetic oligonucleotide
cctccggggtatagggctagt

SEQ ID NO: 22046 - DNA, 21 bp, Artificial Sequence
  Description of Artificial Sequence: Synthetic oligonucleotide
cctcctcatcagcatctgctg

SEQ ID NO: 22047 - DNA, 21 bp, Artificial Sequence
  Description of Artificial Sequence: Synthetic oligonucleotide
cctcctcataggacgtttccg

SEQ ID NO: 22048 - DNA, 21 bp, Artificial Sequence
  Description of Artificial Sequence: Synthetic oligonucleotide
ccgcctcatactacgtttctt

SEQ ID NO: 22049 - DNA, 21 bp, Artificial Sequence
  Description of Artificial Sequence: Synthetic oligonucleotide
cctccgattgataatcggact

SEQ ID NO: 22050 - DNA, 21 bp, Artificial Sequence
  Description of Artificial Sequence: Synthetic oligonucleotide
ccgcctaaggcgatgccgact

SEQ ID NO: 22051 - DNA, 21 bp, Artificial Sequence
  Description of Artificial Sequence: Synthetic oligonucleotide
ccgcctttggaggttaagcag

SEQ ID NO: 22052 - DNA, 21 bp, Artificial Sequence
  Description of Artificial Sequence: Synthetic oligonucleotide
ccgcctttgcatactggggag

SEQ ID NO: 22053 - DNA, 21 bp, Artificial Sequence
  Description of Artificial Sequence: Synthetic oligonucleotide
cctccgcttaagtctcctcct

SEQ ID NO: 22054 - DNA, 21 bp, Artificial Sequence
  Description of Artificial Sequence: Synthetic oligonucleotide
ccgcctcttccttcgaatgcg

SEQ ID NO: 22055 - DNA, 21 bp, Artificial Sequence
  Description of Artificial Sequence: Synthetic oligonucleotide
cctcctatgcatggtactcgt

SEQ ID NO: 22056 - DNA, 21 bp, Artificial Sequence
  Description of Artificial Sequence: Synthetic oligonucleotide
cctcctatgtctcctcatgtg

SEQ ID NO: 22057 - DNA, 21 bp, Artificial Sequence
  Description of Artificial Sequence: Synthetic oligonucleotide
cctcctatggttacgaataat

SEQ ID NO: 22058 - DNA, 21 bp, Artificial Sequence
  Description of Artificial Sequence: Synthetic oligonucleotide
cctcctaataatcatgctggt

SEQ ID NO: 22059 - DNA, 21 bp, Artificial Sequence
  Description of Artificial Sequence: Synthetic oligonucleotide
ccgcctaattatctgaatgcg

SEQ ID NO: 22060 - DNA, 21 bp, Artificial Sequence
  Description of Artificial Sequence: Synthetic oligonucleotide
cctccgcctgcggctctttct

SEQ ID NO: 22061 - DNA, 21 bp, Artificial Sequence
  Description of Artificial Sequence: Synthetic oligonucleotide
ccgccgccgaagtcgcagtcg

SEQ ID NO: 22062 - DNA, 21 bp, Artificial Sequence
  Description of Artificial Sequence: Synthetic oligonucleotide
cctcctcctaataataatctt

SEQ ID NO: 22063 - DNA, 21 bp, Artificial Sequence
  Description of Artificial Sequence: Synthetic oligonucleotide
cctcctcctcgtgaggtgcat

SEQ ID NO: 22064 - DNA, 21 bp, Artificial Sequence
  Description of Artificial Sequence: Synthetic oligonucleotide
ccgccgccttcttgtatggtt

SEQ ID NO: 22065 - DNA, 21 bp, Artificial Sequence
  Description of Artificial Sequence: Synthetic oligonucleotide
ccgcctccgtctcggatgggg

SEQ ID NO: 22066 - DNA, 21 bp, Artificial Sequence
  Description of Artificial Sequence: Synthetic oligonucleotide
cctccgcaggagatgaggtat

SEQ ID NO: 22067 - DNA, 21 bp, Artificial Sequence
  Description of Artificial Sequence: Synthetic oligonucleotide
cctcctcagagtgctgctgtg

SEQ ID NO: 22068 - DNA, 21 bp, Artificial Sequence
  Description of Artificial Sequence: Synthetic oligonucleotide
cctcctcagtctaataggaat

SEQ ID NO: 22069 - DNA, 21 bp, Artificial Sequence
  Description of Artificial Sequence: Synthetic oligonucleotide
ccgcctcggattagtgatgct

SEQ ID NO: 22070 - DNA, 21 bp, Artificial Sequence
  Description of Artificial Sequence: Synthetic oligonucleotide
cctccgcggcttcctagttgt

SEQ ID NO: 22071 - DNA, 21 bp, Artificial Sequence
  Description of Artificial Sequence: Synthetic oligonucleotide
ccgcctaggcttgtttctact

SEQ ID NO: 22072 - DNA, 21 bp, Artificial Sequence
  Description of Artificial Sequence: Synthetic oligonucleotide
ccgcctcggcctaatggtatt

SEQ ID NO: 22073 - DNA, 21 bp, Artificial Sequence
  Description of Artificial Sequence: Synthetic oligonucleotide
ccgcctcggaggccgatggag

SEQ ID NO: 22074 - DNA, 21 bp, Artificial Sequence
  Description of Artificial Sequence: Synthetic oligonucleotide
cctcctcgtagtaatgtggag

SEQ ID NO: 22075 - DNA, 21 bp, Artificial Sequence
  Description of Artificial Sequence: Synthetic oligonucleotide
ccgcctcggacgccgtcttcg

SEQ ID NO: 22076 - DNA, 21 bp, Artificial Sequence
  Description of Artificial Sequence: Synthetic oligonucleotide
cctcctcgggtttcggcggtt

SEQ ID NO: 22077 - DNA, 21 bp, Artificial Sequence
  Description of Artificial Sequence: Synthetic oligonucleotide
ccgcctagtccttctgtgacg

SEQ ID NO: 22078 - DNA, 21 bp, Artificial Sequence
  Description of Artificial Sequence: Synthetic oligonucleotide
cctcctagtccgacttatatg

SEQ ID NO: 22079 - DNA, 21 bp, Artificial Sequence
  Description of Artificial Sequence: Synthetic oligonucleotide
ccgccgtctactgagatttct

SEQ ID NO: 22080 - DNA, 21 bp, Artificial Sequence
  Description of Artificial Sequence: Synthetic oligonucleotide
cctccgtctacgaagcttgtg

SEQ ID NO: 22081 - DNA, 21 bp, Artificial Sequence
  Description of Artificial Sequence: Synthetic oligonucleotide
cctcctagtactaatccgaag

SEQ ID NO: 22082 - DNA, 21 bp, Artificial Sequence
  Description of Artificial Sequence: Synthetic oligonucleotide
cctccttctgtgcctagggag

SEQ ID NO: 22083 - DNA, 21 bp, Artificial Sequence
  Description of Artificial Sequence: Synthetic oligonucleotide
ccgccgacggagccgagggcg

SEQ ID NO: 22084 - DNA, 21 bp, Artificial Sequence
  Description of Artificial Sequence: Synthetic oligonucleotide
ccgccgacgggggcgtctttt

SEQ ID NO: 22085 - DNA, 21 bp, Artificial Sequence
  Description of Artificial Sequence: Synthetic oligonucleotide
cctcctacgattacttcgagt

SEQ ID NO: 22086 - DNA, 21 bp, Artificial Sequence
  Description of Artificial Sequence: Synthetic oligonucleotide
ccgcctactaaggttgatatg

SEQ ID NO: 22087 - DNA, 21 bp, Artificial Sequence
  Description of Artificial Sequence: Synthetic oligonucleotide
cctccgactcttcagagtgat

SEQ ID NO: 22088 - DNA, 21 bp, Artificial Sequence
  Description of Artificial Sequence: Synthetic oligonucleotide
cctcctactaatccgacggtg

SEQ ID NO: 22089 - DNA, 21 bp, Artificial Sequence
  Description of Artificial Sequence: Synthetic oligonucleotide
cctcctacgcctgctgcgcat

SEQ ID NO: 22090 - DNA, 21 bp, Artificial Sequence
  Description of Artificial Sequence: Synthetic oligonucleotide
ccgcctacgccggttagttgg

SEQ ID NO: 22091 - DNA, 21 bp, Artificial Sequence
  Description of Artificial Sequence: Synthetic oligonucleotide
cctcctacgcgtgagtcgcct

SEQ ID NO: 22092 - DNA, 21 bp, Artificial Sequence
  Description of Artificial Sequence: Synthetic oligonucleotide
ccgcctactacgaatttgaat

SEQ ID NO: 22093 - DNA, 21 bp, Artificial Sequence
  Description of Artificial Sequence: Synthetic oligonucleotide
ccgcctgtgggtacggttttg

SEQ ID NO: 22094 - DNA, 21 bp, Artificial Sequence
  Description of Artificial Sequence: Synthetic oligonucleotide
cctccttatggtgcggttact

SEQ ID NO: 22095 - DNA, 21 bp, Artificial Sequence
  Description of Artificial Sequence: Synthetic oligonucleotide
cctccgtatactgtgtcgccg

SEQ ID NO: 22096 - DNA, 21 bp, Artificial Sequence
  Description of Artificial Sequence: Synthetic oligonucleotide
ccgcaggcgaggcagcctttt

SEQ ID NO: 22097 - DNA, 21 bp, Artificial Sequence
  Description of Artificial Sequence: Synthetic oligonucleotide
cctcaggagccgggttttgat

SEQ ID NO: 22098 - DNA, 21 bp, Artificial Sequence
  Description of Artificial Sequence: Synthetic oligonucleotide
ccgcaggagcgtgctaggagt

SEQ ID NO: 22099 - DNA, 21 bp, Artificial Sequence
  Description of Artificial Sequence: Synthetic oligonucleotide
ccgcagcatccgagtcggaat

SEQ ID NO: 22100 - DNA, 21 bp, Artificial Sequence
  Description of Artificial Sequence: Synthetic oligonucleotide
cctcagattcatattatggct

SEQ ID NO: 22101 - DNA, 21 bp, Artificial Sequence
  Description of Artificial Sequence: Synthetic oligonucleotide
cctcagattcttcctagtgct

SEQ ID NO: 22102 - DNA, 21 bp, Artificial Sequence
  Description of Artificial Sequence: Synthetic oligonucleotide
cctcagcttagtcagaatgtt

SEQ ID NO: 22103 - DNA, 21 bp, Artificial Sequence
  Description of Artificial Sequence: Synthetic oligonucleotide
cctcagaatgctagttatcgt

SEQ ID NO: 22104 - DNA, 21 bp, Artificial Sequence
  Description of Artificial Sequence: Synthetic oligonucleotide
ccgcagaataatccgccgggg

SEQ ID NO: 22105 - DNA, 21 bp, Artificial Sequence
  Description of Artificial Sequence: Synthetic oligonucleotide
ccgcagaataggcctcctgtg

SEQ ID NO: 22106 - DNA, 21 bp, Artificial Sequence
  Description of Artificial Sequence: Synthetic oligonucleotide
ccgcagcctcgtaatgttatt

SEQ ID NO: 22107 - DNA, 21 bp, Artificial Sequence
  Description of Artificial Sequence: Synthetic oligonucleotide
ccgcagcctactgagacgccg

SEQ ID NO: 22108 - DNA, 21 bp, Artificial Sequence
  Description of Artificial Sequence: Synthetic oligonucleotide
ccgcagccgacttatacgctg

SEQ ID NO: 22109 - DNA, 21 bp, Artificial Sequence
  Description of Artificial Sequence: Synthetic oligonucleotide
cctcagcgtaatgctggtgct

SEQ ID NO: 22110 - DNA, 21 bp, Artificial Sequence
  Description of Artificial Sequence: Synthetic oligonucleotide
cctcagcggcagggtttgttg

SEQ ID NO: 22111 - DNA, 21 bp, Artificial Sequence
  Description of Artificial Sequence: Synthetic oligonucleotide
cctcagaggagtgctatgccg

SEQ ID NO: 22112 - DNA, 21 bp, Artificial Sequence
  Description of Artificial Sequence: Synthetic oligonucleotide
ccgcagaggacgcagcaggag

SEQ ID NO: 22113 - DNA, 21 bp, Artificial Sequence
  Description of Artificial Sequence: Synthetic oligonucleotide
cctcagagggttcatgcggcg

SEQ ID NO: 22114 - DNA, 21 bp, Artificial Sequence
  Description of Artificial Sequence: Synthetic oligonucleotide
cctcagagtttgcatgtgagg

SEQ ID NO: 22115 - DNA, 21 bp, Artificial Sequence
  Description of Artificial Sequence: Synthetic oligonucleotide
cctcagtcgcctaatcattcg

SEQ ID NO: 22116 - DNA, 21 bp, Artificial Sequence
  Description of Artificial Sequence: Synthetic oligonucleotide
ccgcagtcgcgtgatacttat

SEQ ID NO: 22117 - DNA, 21 bp, Artificial Sequence
  Description of Artificial Sequence: Synthetic oligonucleotide
ccgcagtcgaggaatactaat

SEQ ID NO: 22118 - DNA, 21 bp, Artificial Sequence
  Description of Artificial Sequence: Synthetic oligonucleotide
ccgcagactctgacttcggtg

SEQ ID NO: 22119 - DNA, 21 bp, Artificial Sequence
  Description of Artificial Sequence: Synthetic oligonucleotide
cctcagacgaggagtccgtcg

SEQ ID NO: 22120 - DNA, 21 bp, Artificial Sequence
  Description of Artificial Sequence: Synthetic oligonucleotide
cctcagacggtgactaaggtg

SEQ ID NO: 22121 - DNA, 21 bp, Artificial Sequence
  Description of Artificial Sequence: Synthetic oligonucleotide
ccgcaggttagggcgtctcag

SEQ ID NO: 22122 - DNA, 21 bp, Artificial Sequence
  Description of Artificial Sequence: Synthetic oligonucleotide
ccgcaggttcgtcaggggccg

SEQ ID NO: 22123 - DNA, 21 bp, Artificial Sequence
  Description of Artificial Sequence: Synthetic oligonucleotide
cctcaggttacgacgtcggct

SEQ ID NO: 22124 - DNA, 21 bp, Artificial Sequence
  Description of Artificial Sequence: Synthetic oligonucleotide
cctcgggcgaattctggtatg

SEQ ID NO: 22125 - DNA, 21 bp, Artificial Sequence
  Description of Artificial Sequence: Synthetic oligonucleotide
cctcgtgctaatacgttttcg

SEQ ID NO: 22126 - DNA, 21 bp, Artificial Sequence
  Description of Artificial Sequence: Synthetic oligonucleotide
cctagggctccggctgtgtct

SEQ ID NO: 22127 - DNA, 21 bp, Artificial Sequence
  Description of Artificial Sequence: Synthetic oligonucleotide
cctcgtgcgtcgggtccgtat

SEQ ID NO: 22128 - DNA, 21 bp, Artificial Sequence
  Description of Artificial Sequence: Synthetic oligonucleotide
cctcgtgctacgacttattct

SEQ ID NO: 22129 - DNA, 21 bp, Artificial Sequence
  Description of Artificial Sequence: Synthetic oligonucleotide
cctcgggatgctactcggttg

SEQ ID NO: 22130 - DNA, 21 bp, Artificial Sequence
  Description of Artificial Sequence: Synthetic oligonucleotide
ccgcgggataagaatcctgct

SEQ ID NO: 22131 - DNA, 21 bp, Artificial Sequence
  Description of Artificial Sequence: Synthetic oligonucleotide
cctcgtgatcggttggtgatt

SEQ ID NO: 22132 - DNA, 21 bp, Artificial Sequence
  Description of Artificial Sequence: Synthetic oligonucleotide
cctcgtgattatcagacttcg

SEQ ID NO: 22133 - DNA, 21 bp, Artificial Sequence
  Description of Artificial Sequence: Synthetic oligonucleotide
cctcgtgagaaggctgcgacg

SEQ ID NO: 22134 - DNA, 21 bp, Artificial Sequence
  Description of Artificial Sequence: Synthetic oligonucleotide
ccgcgggagccttatgctgag

SEQ ID NO: 22135 - DNA, 21 bp, Artificial Sequence
  Description of Artificial Sequence: Synthetic oligonucleotide
ccgcgtggggagggtacgaat

SEQ ID NO: 22136 - DNA, 21 bp, Artificial Sequence
  Description of Artificial Sequence: Synthetic oligonucleotide
cctaggggttttgagactgct

SEQ ID NO: 22137 - DNA, 21 bp, Artificial Sequence
  Description of Artificial Sequence: Synthetic oligonucleotide
cctcgtgggctttcttctgct

SEQ ID NO: 22138 - DNA, 21 bp, Artificial Sequence
  Description of Artificial Sequence: Synthetic oligonucleotide
ccgcggggtcagattgcgagt

SEQ ID NO: 22139 - DNA, 21 bp, Artificial Sequence
  Description of Artificial Sequence: Synthetic oligonucleotide
cctcgtggtagtgggtctagt

SEQ ID NO: 22140 - DNA, 21 bp, Artificial Sequence
  Description of Artificial Sequence: Synthetic oligonucleotide
ccgcgtgggtcgtctgattat

SEQ ID NO: 22141 - DNA, 21 bp, Artificial Sequence
  Description of Artificial Sequence: Synthetic oligonucleotide
cctcggcatacggtgtatgct

SEQ ID NO: 22142 - DNA, 21 bp, Artificial Sequence
  Description of Artificial Sequence: Synthetic oligonucleotide
cctcggattgaggctcggaat

SEQ ID NO: 22143 - DNA, 21 bp, Artificial Sequence
  Description of Artificial Sequence: Synthetic oligonucleotide
cctaggattattaatactatt

SEQ ID NO: 22144 - DNA, 21 bp, Artificial Sequence
  Description of Artificial Sequence: Synthetic oligonucleotide
cctcgtattcctcagactcat

SEQ ID NO: 22145 - DNA, 21 bp, Artificial Sequence
  Description of Artificial Sequence: Synthetic oligonucleotide
ccgcgtaagttgccgggtgat

SEQ ID NO: 22146 - DNA, 21 bp, Artificial Sequence
  Description of Artificial Sequence: Synthetic oligonucleotide
ccgcggaaggttgggctgtcg

SEQ ID NO: 22147 - DNA, 21 bp, Artificial Sequence
  Description of Artificial Sequence: Synthetic oligonucleotide
ccgaggttggcgggtggtatt

SEQ ID NO: 22148 - DNA, 21 bp, Artificial Sequence
  Description of Artificial Sequence: Synthetic oligonucleotide
ccgcgtttgggtggtgtggtt

SEQ ID NO: 22149 - DNA, 21 bp, Artificial Sequence
  Description of Artificial Sequence: Synthetic oligonucleotide
cctcggcttgggttggataat

SEQ ID NO: 22150 - DNA, 21 bp, Artificial Sequence
  Description of Artificial Sequence: Synthetic oligonucleotide
cctcgtctgaatgagatgcct

SEQ ID NO: 22151 - DNA, 21 bp, Artificial Sequence
  Description of Artificial Sequence: Synthetic oligonucleotide
cctcgtcttactgcttcgatt

SEQ ID NO: 22152 - DNA, 21 bp, Artificial Sequence
  Description of Artificial Sequence: Synthetic oligonucleotide
cctcggatgagtgcgagtgtg

SEQ ID NO: 22153 - DNA, 21 bp, Artificial Sequence
  Description of Artificial Sequence: Synthetic oligonucleotide
cctcggaatgcgtcgacgccg

SEQ ID NO: 22154 - DNA, 21 bp, Artificial Sequence
  Description of Artificial Sequence: Synthetic oligonucleotide
ccgaggaatccggagtttggg

SEQ ID NO: 22155 - DNA, 21 bp, Artificial Sequence
  Description of Artificial Sequence: Synthetic oligonucleotide
ccgcggaatcagtatgctgct

SEQ ID NO: 22156 - DNA, 21 bp, Artificial Sequence
  Description of Artificial Sequence: Synthetic oligonucleotide
ccgaggaatcggctttctgat

SEQ ID NO: 22157 - DNA, 21 bp, Artificial Sequence
  Description of Artificial Sequence: Synthetic oligonucleotide
ccgaggcctgctccggtgcat

SEQ ID NO: 22158 - DNA, 21 bp, Artificial Sequence
  Description of Artificial Sequence: Synthetic oligonucleotide
ccgcggccggctgtgccggct

SEQ ID NO: 22159 - DNA, 21 bp, Artificial Sequence
  Description of Artificial Sequence: Synthetic oligonucleotide
ccgcgtccgggtatggataag

SEQ ID NO: 22160 - DNA, 21 bp, Artificial Sequence
  Description of Artificial Sequence: Synthetic oligonucleotide
cctaggcctcaggctaattct

SEQ ID NO: 22161 - DNA, 21 bp, Artificial Sequence
  Description of Artificial Sequence: Synthetic oligonucleotide
ccgcgtcctcagtcgctgact

SEQ ID NO: 22162 - DNA, 21 bp, Artificial Sequence
  Description of Artificial Sequence: Synthetic oligonucleotide
cctcggccgtcgcttgatttg

SEQ ID NO: 22163 - DNA, 21 bp, Artificial Sequence
  Description of Artificial Sequence: Synthetic oligonucleotide
cctaggcctacgcatgcggtt

SEQ ID NO: 22164 - DNA, 21 bp, Artificial Sequence
  Description of Artificial Sequence: Synthetic oligonucleotide
cctcgtcagactgagggtatg

SEQ ID NO: 22165 - DNA, 21 bp, Artificial Sequence
  Description of Artificial Sequence: Synthetic oligonucleotide
ccgcggcagactacgaatggt

SEQ ID NO: 22166 - DNA, 21 bp, Artificial Sequence
  Description of Artificial Sequence: Synthetic oligonucleotide
ccgaggcgtgatcaggagact

SEQ ID NO: 22167 - DNA, 21 bp, Artificial Sequence
  Description of Artificial Sequence: Synthetic oligonucleotide
ccgcggcggattgagtttccg

SEQ ID NO: 22168 - DNA, 21 bp, Artificial Sequence
  Description of Artificial Sequence: Synthetic oligonucleotide
ccgcgtagtgcggatttggag

SEQ ID NO: 22169 - DNA, 21 bp, Artificial Sequence
  Description of Artificial Sequence: Synthetic oligonucleotide
ccgcgtagtggtacggcttct

SEQ ID NO: 22170 - DNA, 21 bp, Artificial Sequence
  Description of Artificial Sequence: Synthetic oligonucleotide
cctaggagtcatccgacgtcg

SEQ ID NO: 22171 - DNA, 21 bp, Artificial Sequence
  Description of Artificial Sequence: Synthetic oligonucleotide
cctaggtcgattcctgggctt

SEQ ID NO: 22172 - DNA, 21 bp, Artificial Sequence
  Description of Artificial Sequence: Synthetic oligonucleotide
cctcggtctctgcctctgact

SEQ ID NO: 22173 - DNA, 21 bp, Artificial Sequence
  Description of Artificial Sequence: Synthetic oligonucleotide
cctaggtctatgaatcagacg

SEQ ID NO: 22174 - DNA, 21 bp, Artificial Sequence
  Description of Artificial Sequence: Synthetic oligonucleotide
cctcgttctaattctgatact

SEQ ID NO: 22175 - DNA, 21 bp, Artificial Sequence
  Description of Artificial Sequence: Synthetic oligonucleotide
cctcgtagtccgaatccgcct

SEQ ID NO: 22176 - DNA, 21 bp, Artificial Sequence
  Description of Artificial Sequence: Synthetic oligonucleotide
cctaggtcgcctagtgataag

SEQ ID NO: 22177 - DNA, 21 bp, Artificial Sequence
  Description of Artificial Sequence: Synthetic oligonucleotide
ccgaggagtagttttactgag

SEQ ID NO: 22178 - DNA, 21 bp, Artificial Sequence
  Description of Artificial Sequence: Synthetic oligonucleotide
cctaggtcttcttcttcgttg

SEQ ID NO: 22179 - DNA, 21 bp, Artificial Sequence
  Description of Artificial Sequence: Synthetic oligonucleotide
cctcggacggagccttttctt

SEQ ID NO: 22180 - DNA, 21 bp, Artificial Sequence
  Description of Artificial Sequence: Synthetic oligonucleotide
ccgcggactcatacggatgct

SEQ ID NO: 22181 - DNA, 21 bp, Artificial Sequence
  Description of Artificial Sequence: Synthetic oligonucleotide
cctcgtacttctgggactatg

SEQ ID NO: 22182 - DNA, 21 bp, Artificial Sequence
  Description of Artificial Sequence: Synthetic oligonucleotide
cctcgtactagttctactcat

SEQ ID NO: 22183 - DNA, 21 bp, Artificial Sequence
  Description of Artificial Sequence: Synthetic oligonucleotide
ccgcggactactatgactgag

SEQ ID NO: 22184 - DNA, 21 bp, Artificial Sequence
  Description of Artificial Sequence: Synthetic oligonucleotide
cctaggacgacgtatagtgat

SEQ ID NO: 22185 - DNA, 21 bp, Artificial Sequence
  Description of Artificial Sequence: Synthetic oligonucleotide
ccgcgggtgggtagtccgcag

SEQ ID NO: 22186 - DNA, 21 bp, Artificial Sequence
  Description of Artificial Sequence: Synthetic oligonucleotide
cctagggtgctgtcgagtggg

SEQ ID NO: 22187 - DNA, 21 bp, Artificial Sequence
  Description of Artificial Sequence: Synthetic oligonucleotide
ccgcgggtgcctactcatgat

SEQ ID NO: 22188 - DNA, 21 bp, Artificial Sequence
  Description of Artificial Sequence: Synthetic oligonucleotide
ccgcgtgtttctattgcgaat

SEQ ID NO: 22189 - DNA, 21 bp, Artificial Sequence
  Description of Artificial Sequence: Synthetic oligonucleotide
ccgagggtgtcggttgcgccg

SEQ ID NO: 22190 - DNA, 21 bp, Artificial Sequence
  Description of Artificial Sequence: Synthetic oligonucleotide
ccgcgttatgatgctgctggt

SEQ ID NO: 22191 - DNA, 21 bp, Artificial Sequence
  Description of Artificial Sequence: Synthetic oligonucleotide
ccgtcggcggctcatcctcct

SEQ ID NO: 22192 - DNA, 21 bp, Artificial Sequence
  Description of Artificial Sequence: Synthetic oligonucleotide
ccgagtgcgaatatgcggtcg

SEQ ID NO: 22193 - DNA, 21 bp, Artificial Sequence
  Description of Artificial Sequence: Synthetic oligonucleotide
ccgagtgcgaatcgtttgtct

SEQ ID NO: 22194 - DNA, 21 bp, Artificial Sequence
  Description of Artificial Sequence: Synthetic oligonucleotide
ccttctgcgcagtctcatagt

SEQ ID NO: 22195 - DNA, 21 bp, Artificial Sequence
  Description of Artificial Sequence: Synthetic oligonucleotide
ccttcggctagtaatagtatg

SEQ ID NO: 22196 - DNA, 21 bp, Artificial Sequence
  Description of Artificial Sequence: Synthetic oligonucleotide
cctagtgcgactggggtgaag

SEQ ID NO: 22197 - DNA, 21 bp, Artificial Sequence
  Description of Artificial Sequence: Synthetic oligonucleotide
ccttcttgtgataataatacg

SEQ ID NO: 22198 - DNA, 21 bp, Artificial Sequence
  Description of Artificial Sequence: Synthetic oligonucleotide
cctagtgatgatgctgggggt

SEQ ID NO: 22199 - DNA, 21 bp, Artificial Sequence
  Description of Artificial Sequence: Synthetic oligonucleotide
cctagtgataagaatactggg

SEQ ID NO: 22200 - DNA, 21 bp, Artificial Sequence
  Description of Artificial Sequence: Synthetic oligonucleotide
ccttctgataagagttttcgt

SEQ ID NO: 22201 - DNA, 21 bp, Artificial Sequence
  Description of Artificial Sequence: Synthetic oligonucleotide
ccgtcggatatgccttcgtcg

SEQ ID NO: 22202 - DNA, 21 bp, Artificial Sequence
  Description of Artificial Sequence: Synthetic oligonucleotide
ccgtcggatccttcggctggt

SEQ ID NO: 22203 - DNA, 21 bp, Artificial Sequence
  Description of Artificial Sequence: Synthetic oligonucleotide
ccttcggatccggtgacgagg

SEQ ID NO: 22204 - DNA, 21 bp, Artificial Sequence
  Description of Artificial Sequence: Synthetic oligonucleotide
ccttcggatcgtgtgcatacg

SEQ ID NO: 22205 - DNA, 21 bp, Artificial Sequence
  Description of Artificial Sequence: Synthetic oligonucleotide
ccttctgattctgcgtatcct

SEQ ID NO: 22206 - DNA, 21 bp, Artificial Sequence
  Description of Artificial Sequence: Synthetic oligonucleotide
ccgtctgattcggttcattcg

SEQ ID NO: 22207 - DNA, 21 bp, Artificial Sequence
  Description of Artificial Sequence: Synthetic oligonucleotide
ccttcggatacgcataggagt

SEQ ID NO: 22208 - DNA, 21 bp, Artificial Sequence
  Description of Artificial Sequence: Synthetic oligonucleotide
ccgagtgatactcctacgagg

SEQ ID NO: 22209 - DNA, 21 bp, Artificial Sequence
  Description of Artificial Sequence: Synthetic oligonucleotide
ccgtcggagcttaattctcgg

SEQ ID NO: 22210 - DNA, 21 bp, Artificial Sequence
  Description of Artificial Sequence: Synthetic oligonucleotide
ccgtctgagcagccggtgagg

SEQ ID NO: 22211 - DNA, 21 bp, Artificial Sequence
  Description of Artificial Sequence: Synthetic oligonucleotide
ccgtcggagtctactattgtt

SEQ ID NO: 22212 - DNA, 21 bp, Artificial Sequence
  Description of Artificial Sequence: Synthetic oligonucleotide
ccgagtgagtatactctggat

SEQ ID NO: 22213 - DNA, 21 bp, Artificial Sequence
  Description of Artificial Sequence: Synthetic oligonucleotide
ccgtcgtttttggaggggatt

SEQ ID NO: 22214 - DNA, 21 bp, Artificial Sequence
  Description of Artificial Sequence: Synthetic oligonucleotide
ccttcttttaatcctatgact

SEQ ID NO: 22215 - DNA, 21 bp, Artificial Sequence
  Description of Artificial Sequence: Synthetic oligonucleotide
ccttcgtttccgtctatgact

SEQ ID NO: 22216 - DNA, 21 bp, Artificial Sequence
  Description of Artificial Sequence: Synthetic oligonucleotide
ccgtctgggaagtctccttat

SEQ ID NO: 22217 - DNA, 21 bp, Artificial Sequence
  Description of Artificial Sequence: Synthetic oligonucleotide
cctagtgggatgaagcctact

SEQ ID NO: 22218 - DNA, 21 bp, Artificial Sequence
  Description of Artificial Sequence: Synthetic oligonucleotide
cctagtggtatgcctagttcg

SEQ ID NO: 22219 - DNA, 21 bp, Artificial Sequence
  Description of Artificial Sequence: Synthetic oligonucleotide
ccgtctgggcaggtgactggt

SEQ ID NO: 22220 - DNA, 21 bp, Artificial Sequence
  Description of Artificial Sequence: Synthetic oligonucleotide
ccgtcgggtagtgataatctg

SEQ ID NO: 22221 - DNA, 21 bp, Artificial Sequence
  Description of Artificial Sequence: Synthetic oligonucleotide
ccgagtgggactcttactatg

SEQ ID NO: 22222 - DNA, 21 bp, Artificial Sequence
  Description of Artificial Sequence: Synthetic oligonucleotide
ccttcgcatgattcttttctg

SEQ ID NO: 22223 - DNA, 21 bp, Artificial Sequence
  Description of Artificial Sequence: Synthetic oligonucleotide
ccgtctcatgggcttgataag

SEQ ID NO: 22224 - DNA, 21 bp, Artificial Sequence
  Description of Artificial Sequence: Synthetic oligonucleotide
ccttctcataaggcggttttt

SEQ ID NO: 22225 - DNA, 21 bp, Artificial Sequence
  Description of Artificial Sequence: Synthetic oligonucleotide
ccttctcatcctcatgagcgt

SEQ ID NO: 22226 - DNA, 21 bp, Artificial Sequence
  Description of Artificial Sequence: Synthetic oligonucleotide
ccttctcataggactagtctt

SEQ ID NO: 22227 - DNA, 21 bp, Artificial Sequence
  Description of Artificial Sequence: Synthetic oligonucleotide
ccgtctcatagtggtactact

SEQ ID NO: 22228 - DNA, 21 bp, Artificial Sequence
  Description of Artificial Sequence: Synthetic oligonucleotide
ccgtcgcatactaggccggtt

SEQ ID NO: 22229 - DNA, 21 bp, Artificial Sequence
  Description of Artificial Sequence: Synthetic oligonucleotide
ccgtcgattgctcagccgcct

SEQ ID NO: 22230 - DNA, 21 bp, Artificial Sequence
  Description of Artificial Sequence: Synthetic oligonucleotide
ccttcgattaagttgagtgag

SEQ ID NO: 22231 - DNA, 21 bp, Artificial Sequence
  Description of Artificial Sequence: Synthetic oligonucleotide
ccgagtattagtaagcctatg

SEQ ID NO: 22232 - DNA, 21 bp, Artificial Sequence
  Description of Artificial Sequence: Synthetic oligonucleotide
ccttctaaggcttcgacggag

SEQ ID NO: 22233 - DNA, 21 bp, Artificial Sequence
  Description of Artificial Sequence: Synthetic oligonucleotide
ccgagtaagtctcctagtact

SEQ ID NO: 22234 - DNA, 21 bp, Artificial Sequence
  Description of Artificial Sequence: Synthetic oligonucleotide
ccgagtaagtcgtctgctgct

SEQ ID NO: 22235 - DNA, 21 bp, Artificial Sequence
  Description of Artificial Sequence: Synthetic oligonucleotide
ccgtcgaaggtggggcgggag

SEQ ID NO: 22236 - DNA, 21 bp, Artificial Sequence
  Description of Artificial Sequence: Synthetic oligonucleotide
ccttctttggagggtgctcct

SEQ ID NO: 22237 - DNA, 21 bp, Artificial Sequence
  Description of Artificial Sequence: Synthetic oligonucleotide
ccgagtcttcgggctgctctt

SEQ ID NO: 22238 - DNA, 21 bp, Artificial Sequence
  Description of Artificial Sequence: Synthetic oligonucleotide
cctagtctgtcgaataaggtg

SEQ ID NO: 22239 - DNA, 21 bp, Artificial Sequence
  Description of Artificial Sequence: Synthetic oligonucleotide
ccttcgctttcgagtagtccg

SEQ ID NO: 22240 - DNA, 21 bp, Artificial Sequence
  Description of Artificial Sequence: Synthetic oligonucleotide
ccgtcgatgagtccgcatacg

SEQ ID NO: 22241 - DNA, 21 bp, Artificial Sequence
  Description of Artificial Sequence: Synthetic oligonucleotide
ccgtctatgacggcgcaggag

SEQ ID NO: 22242 - DNA, 21 bp, Artificial Sequence
  Description of Artificial Sequence: Synthetic oligonucleotide
ccgtctaatgcggggcggttt

SEQ ID NO: 22243 - DNA, 21 bp, Artificial Sequence
  Description of Artificial Sequence: Synthetic oligonucleotide
ccttctaatggtaagtctatt

SEQ ID NO: 22244 - DNA, 21 bp, Artificial Sequence
  Description of Artificial Sequence: Synthetic oligonucleotide
cctagtaatcatttgaagagt

SEQ ID NO: 22245 - DNA, 21 bp, Artificial Sequence
  Description of Artificial Sequence: Synthetic oligonucleotide
ccgtcgaataatactgagggt

SEQ ID NO: 22246 - DNA, 21 bp, Artificial Sequence
  Description of Artificial Sequence: Synthetic oligonucleotide
ccttcgaatccttcttttcgt

SEQ ID NO: 22247 - DNA, 21 bp, Artificial Sequence
  Description of Artificial Sequence: Synthetic oligonucleotide
ccgtctaatcagttggttcgt

SEQ ID NO: 22248 - DNA, 21 bp, Artificial Sequence
  Description of Artificial Sequence: Synthetic oligonucleotide
cctagtccggcggttaagagt

SEQ ID NO: 22249 - DNA, 21 bp, Artificial Sequence
  Description of Artificial Sequence: Synthetic oligonucleotide
ccgtctcctgatgttaggggg

SEQ ID NO: 22250 - DNA, 21 bp, Artificial Sequence
  Description of Artificial Sequence: Synthetic oligonucleotide
cctagtcctaagacttgtcct

SEQ ID NO: 22251 - DNA, 21 bp, Artificial Sequence
  Description of Artificial Sequence: Synthetic oligonucleotide
ccttctccgcttcgtcttggg

SEQ ID NO: 22252 - DNA, 21 bp, Artificial Sequence
  Description of Artificial Sequence: Synthetic oligonucleotide
ccgagtccggttaaggggggt

SEQ ID NO: 22253 - DNA, 21 bp, Artificial Sequence
  Description of Artificial Sequence: Synthetic oligonucleotide
ccttctcaggatcctcatctt

SEQ ID NO: 22254 - DNA, 21 bp, Artificial Sequence
  Description of Artificial Sequence: Synthetic oligonucleotide
ccttctcaggatcggcaggct

SEQ ID NO: 22255 - DNA, 21 bp, Artificial Sequence
  Description of Artificial Sequence: Synthetic oligonucleotide
cctagtcagtttaaggagaat

SEQ ID NO: 22256 - DNA, 21 bp, Artificial Sequence
  Description of Artificial Sequence: Synthetic oligonucleotide
ccttctcagggtcattcgatg

SEQ ID NO: 22257 - DNA, 21 bp, Artificial Sequence
  Description of Artificial Sequence: Synthetic oligonucleotide
ccgagtcagggtccgtggact

SEQ ID NO: 22258 - DNA, 21 bp, Artificial Sequence
  Description of Artificial Sequence: Synthetic oligonucleotide
ccgtctcagcttgcgtcgaat

SEQ ID NO: 22259 - DNA, 21 bp, Artificial Sequence
  Description of Artificial Sequence: Synthetic oligonucleotide
ccgtcgcagcttgttgttgct

SEQ ID NO: 22260 - DNA, 21 bp, Artificial Sequence
  Description of Artificial Sequence: Synthetic oligonucleotide
ccttctcagccgggggcgatt

SEQ ID NO: 22261 - DNA, 21 bp, Artificial Sequence
  Description of Artificial Sequence: Synthetic oligonucleotide
cctagtcagagggagatgaag

SEQ ID NO: 22262 - DNA, 21 bp, Artificial Sequence
  Description of Artificial Sequence: Synthetic oligonucleotide
ccgtctcagtcgaatcttcgt

SEQ ID NO: 22263 - DNA, 21 bp, Artificial Sequence
  Description of Artificial Sequence: Synthetic oligonucleotide
ccgtctcagtcgtctaagctt

SEQ ID NO: 22264 - DNA, 21 bp, Artificial Sequence
  Description of Artificial Sequence: Synthetic oligonucleotide
ccgtcgcagacggcgacgcct

SEQ ID NO: 22265 - DNA, 21 bp, Artificial Sequence
  Description of Artificial Sequence: Synthetic oligonucleotide
ccttcgcagactcattctcct

SEQ ID NO: 22266 - DNA, 21 bp, Artificial Sequence
  Description of Artificial Sequence: Synthetic oligonucleotide
ccgtcgagggagatttcgctg

SEQ ID NO: 22267 - DNA, 21 bp, Artificial Sequence
  Description of Artificial Sequence: Synthetic oligonucleotide
ccttcgcgtgagcgttcgaat

SEQ ID NO: 22268 - DNA, 21 bp, Artificial Sequence
  Description of Artificial Sequence: Synthetic oligonucleotide
cctagtcgttttagtacgcct

SEQ ID NO: 22269 - DNA, 21 bp, Artificial Sequence
  Description of Artificial Sequence: Synthetic oligonucleotide
ccttcgaggggggatattggt

SEQ ID NO: 22270 - DNA, 21 bp, Artificial Sequence
  Description of Artificial Sequence: Synthetic oligonucleotide
ccttcgcgtggggtgcttcct

SEQ ID NO: 22271 - DNA, 21 bp, Artificial Sequence
  Description of Artificial Sequence: Synthetic oligonucleotide
ccttctcgtttggggagtgct

SEQ ID NO: 22272 - DNA, 21 bp, Artificial Sequence
  Description of Artificial Sequence: Synthetic oligonucleotide
ccttcgcggttgactaatgat

SEQ ID NO: 22273 - DNA, 21 bp, Artificial Sequence
  Description of Artificial Sequence: Synthetic oligonucleotide
ccttctaggctggtgtcggag

SEQ ID NO: 22274 - DNA, 21 bp, Artificial Sequence
  Description of Artificial Sequence: Synthetic oligonucleotide
cctagtcgtccgatgatgagt

SEQ ID NO: 22275 - DNA, 21 bp, Artificial Sequence
  Description of Artificial Sequence: Synthetic oligonucleotide
ccttcgaggagtatgtcggag

SEQ ID NO: 22276 - DNA, 21 bp, Artificial Sequence
  Description of Artificial Sequence: Synthetic oligonucleotide
ccttctaggactgagcctccg

SEQ ID NO: 22277 - DNA, 21 bp, Artificial Sequence
  Description of Artificial Sequence: Synthetic oligonucleotide
cctagtcggactcatctgcat

SEQ ID NO: 22278 - DNA, 21 bp, Artificial Sequence
  Description of Artificial Sequence: Synthetic oligonucleotide
ccttctcgggtggttgaggct

SEQ ID NO: 22279 - DNA, 21 bp, Artificial Sequence
  Description of Artificial Sequence: Synthetic oligonucleotide
ccttcgagtgagtctgatttt

SEQ ID NO: 22280 - DNA, 21 bp, Artificial Sequence
  Description of Artificial Sequence: Synthetic oligonucleotide
ccttcttcgggtgggctggtt

SEQ ID NO: 22281 - DNA, 21 bp, Artificial Sequence
  Description of Artificial Sequence: Synthetic oligonucleotide
cctagttcgggtcttcatttg

SEQ ID NO: 22282 - DNA, 21 bp, Artificial Sequence
  Description of Artificial Sequence: Synthetic oligonucleotide
ccgtcttcgaagggtttgctt

SEQ ID NO: 22283 - DNA, 21 bp, Artificial Sequence
  Description of Artificial Sequence: Synthetic oligonucleotide
ccgagttctaaggttggtgat

SEQ ID NO: 22284 - DNA, 21 bp, Artificial Sequence
  Description of Artificial Sequence: Synthetic oligonucleotide
ccttctagtttggatgatggt

SEQ ID NO: 22285 - DNA, 21 bp, Artificial Sequence
  Description of Artificial Sequence: Synthetic oligonucleotide
ccttctagtcttaatcggctt

SEQ ID NO: 22286 - DNA, 21 bp, Artificial Sequence
  Description of Artificial Sequence: Synthetic oligonucleotide
ccgagtagtttgtctgcgggg

SEQ ID NO: 22287 - DNA, 21 bp, Artificial Sequence
  Description of Artificial Sequence: Synthetic oligonucleotide
ccttcttcgatggctcatcct

SEQ ID NO: 22288 - DNA, 21 bp, Artificial Sequence
  Description of Artificial Sequence: Synthetic oligonucleotide
ccttcttcgatgattgctgag

SEQ ID NO: 22289 - DNA, 21 bp, Artificial Sequence
  Description of Artificial Sequence: Synthetic oligonucleotide
ccttcgtcgccggctgttcgg

SEQ ID NO: 22290 - DNA, 21 bp, Artificial Sequence
  Description of Artificial Sequence: Synthetic oligonucleotide
ccttcgtctcctttgatgact

SEQ ID NO: 22291 - DNA, 21 bp, Artificial Sequence
  Description of Artificial Sequence: Synthetic oligonucleotide
ccgtcgagtcctccttttttt

SEQ ID NO: 22292 - DNA, 21 bp, Artificial Sequence
  Description of Artificial Sequence: Synthetic oligonucleotide
cctagttctcctgtgtttatt

SEQ ID NO: 22293 - DNA, 21 bp, Artificial Sequence
  Description of Artificial Sequence: Synthetic oligonucleotide
ccttcgtcgcggggggctctt

SEQ ID NO: 22294 - DNA, 21 bp, Artificial Sequence
  Description of Artificial Sequence: Synthetic oligonucleotide
cctagtagtagtattaatcgt

SEQ ID NO: 22295 - DNA, 21 bp, Artificial Sequence
  Description of Artificial Sequence: Synthetic oligonucleotide
ccgtcttcgagtagtgggaat

SEQ ID NO: 22296 - DNA, 21 bp, Artificial Sequence
  Description of Artificial Sequence: Synthetic oligonucleotide
ccgtcttcgtcgtatccgctg

SEQ ID NO: 22297 - DNA, 21 bp, Artificial Sequence
  Description of Artificial Sequence: Synthetic oligonucleotide
ccttcgtctactcctgggcag

SEQ ID NO: 22298 - DNA, 21 bp, Artificial Sequence
  Description of Artificial Sequence: Synthetic oligonucleotide
ccttctactgctgggtcgaag

SEQ ID NO: 22299 - DNA, 21 bp, Artificial Sequence
  Description of Artificial Sequence: Synthetic oligonucleotide
cctagtacggctcatagtact

SEQ ID NO: 22300 - DNA, 21 bp, Artificial Sequence
  Description of Artificial Sequence: Synthetic oligonucleotide
ccttctacggctattaagact

SEQ ID NO: 22301 - DNA, 21 bp, Artificial Sequence
  Description of Artificial Sequence: Synthetic oligonucleotide
cctagtactgcgcggacgtct

SEQ ID NO: 22302 - DNA, 21 bp, Artificial Sequence
  Description of Artificial Sequence: Synthetic oligonucleotide
ccgtctacggggccttttcat

SEQ ID NO: 22303 - DNA, 21 bp, Artificial Sequence
  Description of Artificial Sequence: Synthetic oligonucleotide
ccgtcgacgggtcgtccgttg

SEQ ID NO: 22304 - DNA, 21 bp, Artificial Sequence
  Description of Artificial Sequence: Synthetic oligonucleotide
ccgtctactaaggagtttatt

SEQ ID NO: 22305 - DNA, 21 bp, Artificial Sequence
  Description of Artificial Sequence: Synthetic oligonucleotide
ccgtcgactaatgcttatgct

SEQ ID NO: 22306 - DNA, 21 bp, Artificial Sequence
  Description of Artificial Sequence: Synthetic oligonucleotide
ccgtctacgaatgggtcgcat

SEQ ID NO: 22307 - DNA, 21 bp, Artificial Sequence
  Description of Artificial Sequence: Synthetic oligonucleotide
ccttctactccggcggcgaat

SEQ ID NO: 22308 - DNA, 21 bp, Artificial Sequence
  Description of Artificial Sequence: Synthetic oligonucleotide
ccgtctactcctgctgcgagt

SEQ ID NO: 22309 - DNA, 21 bp, Artificial Sequence
  Description of Artificial Sequence: Synthetic oligonucleotide
ccttctactagtctttcggag

SEQ ID NO: 22310 - DNA, 21 bp, Artificial Sequence
  Description of Artificial Sequence: Synthetic oligonucleotide
ccttctgtggattcttggagt

SEQ ID NO: 22311 - DNA, 21 bp, Artificial Sequence
  Description of Artificial Sequence: Synthetic oligonucleotide
ccttctgtggatagttatctt

SEQ ID NO: 22312 - DNA, 21 bp, Artificial Sequence
  Description of Artificial Sequence: Synthetic oligonucleotide
ccgagtgttgagcatgtgccg

SEQ ID NO: 22313 - DNA, 21 bp, Artificial Sequence
  Description of Artificial Sequence: Synthetic oligonucleotide
ccttctgtggagtcttggagt

SEQ ID NO: 22314 - DNA, 21 bp, Artificial Sequence
  Description of Artificial Sequence: Synthetic oligonucleotide
ccgagtgtgttgcatccgtcg

SEQ ID NO: 22315 - DNA, 21 bp, Artificial Sequence
  Description of Artificial Sequence: Synthetic oligonucleotide
ccttcggtgccgttgatgact

SEQ ID NO: 22316 - DNA, 21 bp, Artificial Sequence
  Description of Artificial Sequence: Synthetic oligonucleotide
ccttctgttccgcgtgggccg

SEQ ID NO: 22317 - DNA, 21 bp, Artificial Sequence
  Description of Artificial Sequence: Synthetic oligonucleotide
ccgtcggtgcagcattttcct

SEQ ID NO: 22318 - DNA, 21 bp, Artificial Sequence
  Description of Artificial Sequence: Synthetic oligonucleotide
ccgagtgtgcgggatcctgct

SEQ ID NO: 22319 - DNA, 21 bp, Artificial Sequence
  Description of Artificial Sequence: Synthetic oligonucleotide
ccgtcggtgacggggactatg

SEQ ID NO: 22320 - DNA, 21 bp, Artificial Sequence
  Description of Artificial Sequence: Synthetic oligonucleotide
ccttcttatgataagctgaag

SEQ ID NO: 22321 - DNA, 21 bp, Artificial Sequence
  Description of Artificial Sequence: Synthetic oligonucleotide
ccttcgtatcctggtttggat

SEQ ID NO: 22322 - DNA, 21 bp, Artificial Sequence
  Description of Artificial Sequence: Synthetic oligonucleotide
ccgtcgtattctcatatggag

SEQ ID NO: 22323 - DNA, 21 bp, Artificial Sequence
  Description of Artificial Sequence: Synthetic oligonucleotide
ccgtcttattctgttactgag

SEQ ID NO: 22324 - DNA, 21 bp, Artificial Sequence
  Description of Artificial Sequence: Synthetic oligonucleotide
cctactgctgctaggcctccg

SEQ ID NO: 22325 - DNA, 21 bp, Artificial Sequence
  Description of Artificial Sequence: Synthetic oligonucleotide
ccgacggctcttgcgagtttt

SEQ ID NO: 22326 - DNA, 21 bp, Artificial Sequence
  Description of Artificial Sequence: Synthetic oligonucleotide
cctacggcgcttgggaagtcg

SEQ ID NO: 22327 - DNA, 21 bp, Artificial Sequence
  Description of Artificial Sequence: Synthetic oligonucleotide
cctactgctcctacgattcct

SEQ ID NO: 22328 - DNA, 21 bp, Artificial Sequence
  Description of Artificial Sequence: Synthetic oligonucleotide
ccgacggcgagtcctaatacg

SEQ ID NO: 22329 - DNA, 21 bp, Artificial Sequence
  Description of Artificial Sequence: Synthetic oligonucleotide
ccgactgataatactagtccg

SEQ ID NO: 22330 - DNA, 21 bp, Artificial Sequence
  Description of Artificial Sequence: Synthetic oligonucleotide
cctactgatccgcgtgcgcct

SEQ ID NO: 22331 - DNA, 21 bp, Artificial Sequence
  Description of Artificial Sequence: Synthetic oligonucleotide
cctactgatcgtcattctatt

SEQ ID NO: 22332 - DNA, 21 bp, Artificial Sequence
  Description of Artificial Sequence: Synthetic oligonucleotide
cctactgataggcgtgagatg

SEQ ID NO: 22333 - DNA, 21 bp, Artificial Sequence
  Description of Artificial Sequence: Synthetic oligonucleotide
cctacggatacggttccgcct

SEQ ID NO: 22334 - DNA, 21 bp, Artificial Sequence
  Description of Artificial Sequence: Synthetic oligonucleotide
cctactgatgtgaatcgtggt

SEQ ID NO: 22335 - DNA, 21 bp, Artificial Sequence
  Description of Artificial Sequence: Synthetic oligonucleotide
cctactgattatgctaggggt

SEQ ID NO: 22336 - DNA, 21 bp, Artificial Sequence
  Description of Artificial Sequence: Synthetic oligonucleotide
cctactgaggctgctggggtt

SEQ ID NO: 22337 - DNA, 21 bp, Artificial Sequence
  Description of Artificial Sequence: Synthetic oligonucleotide
cctactgagacgaatggttat

SEQ ID NO: 22338 - DNA, 21 bp, Artificial Sequence
  Description of Artificial Sequence: Synthetic oligonucleotide
ccgacgtttttgacgacgaat

SEQ ID NO: 22339 - DNA, 21 bp, Artificial Sequence
  Description of Artificial Sequence: Synthetic oligonucleotide
ccgacgtttactaggtcgact

SEQ ID NO: 22340 - DNA, 21 bp, Artificial Sequence
  Description of Artificial Sequence: Synthetic oligonucleotide
ccgactggggcgacttcttcg

SEQ ID NO: 22341 - DNA, 21 bp, Artificial Sequence
  Description of Artificial Sequence: Synthetic oligonucleotide
ccgacggggggtgctcatact

SEQ ID NO: 22342 - DNA, 21 bp, Artificial Sequence
  Description of Artificial Sequence: Synthetic oligonucleotide
cctactggtcctgggtcgccg

SEQ ID NO: 22343 - DNA, 21 bp, Artificial Sequence
  Description of Artificial Sequence: Synthetic oligonucleotide
ccgactgggccgcatgatttg

SEQ ID NO: 22344 - DNA, 21 bp, Artificial Sequence
  Description of Artificial Sequence: Synthetic oligonucleotide
cctacggggcagccgcggcct

SEQ ID NO: 22345 - DNA, 21 bp, Artificial Sequence
  Description of Artificial Sequence: Synthetic oligonucleotide
ccgacggggagggctttggct

SEQ ID NO: 22346 - DNA, 21 bp, Artificial Sequence
  Description of Artificial Sequence: Synthetic oligonucleotide
cctacgggttctattcagatt

SEQ ID NO: 22347 - DNA, 21 bp, Artificial Sequence
  Description of Artificial Sequence: Synthetic oligonucleotide
ccgactgggactcctgagatt

SEQ ID NO: 22348 - DNA, 21 bp, Artificial Sequence
  Description of Artificial Sequence: Synthetic oligonucleotide
cctactgggacgtcgcctttg

SEQ ID NO: 22349 - DNA, 21 bp, Artificial Sequence
  Description of Artificial Sequence: Synthetic oligonucleotide
cctacgggtgtggggtctctg

SEQ ID NO: 22350 - DNA, 21 bp, Artificial Sequence
  Description of Artificial Sequence: Synthetic oligonucleotide
cctactcatcctaattctttt

SEQ ID NO: 22351 - DNA, 21 bp, Artificial Sequence
  Description of Artificial Sequence: Synthetic oligonucleotide
cctacgcattcggggattacg

SEQ ID NO: 22352 - DNA, 21 bp, Artificial Sequence
  Description of Artificial Sequence: Synthetic oligonucleotide
cctactcattcgctgatttct

SEQ ID NO: 22353 - DNA, 21 bp, Artificial Sequence
  Description of Artificial Sequence: Synthetic oligonucleotide
cctactcatagtacgaataag

SEQ ID NO: 22354 - DNA, 21 bp, Artificial Sequence
  Description of Artificial Sequence: Synthetic oligonucleotide
cctacgattcctaagaaggat

SEQ ID NO: 22355 - DNA, 21 bp, Artificial Sequence
  Description of Artificial Sequence: Synthetic oligonucleotide
ccgacgattcctttggatagg

SEQ ID NO: 22356 - DNA, 21 bp, Artificial Sequence
  Description of Artificial Sequence: Synthetic oligonucleotide
cctactaagcctttgggtgat

SEQ ID NO: 22357 - DNA, 21 bp, Artificial Sequence
  Description of Artificial Sequence: Synthetic oligonucleotide
ccgacgctggatgatccgaag

SEQ ID NO: 22358 - DNA, 21 bp, Artificial Sequence
  Description of Artificial Sequence: Synthetic oligonucleotide
ccgactcttgatgggaagccg

SEQ ID NO: 22359 - DNA, 21 bp, Artificial Sequence
  Description of Artificial Sequence: Synthetic oligonucleotide
cctacgttgaagagtgatatg

SEQ ID NO: 22360 - DNA, 21 bp, Artificial Sequence
  Description of Artificial Sequence: Synthetic oligonucleotide
cctactcttccgagtactgtt

SEQ ID NO: 22361 - DNA, 21 bp, Artificial Sequence
  Description of Artificial Sequence: Synthetic oligonucleotide
cctactttgagtatggctcat

SEQ ID NO: 22362 - DNA, 21 bp, Artificial Sequence
  Description of Artificial Sequence: Synthetic oligonucleotide
ccgacgttgtctcggacgcat

SEQ ID NO: 22363 - DNA, 21 bp, Artificial Sequence
  Description of Artificial Sequence: Synthetic oligonucleotide
cctactctttcgactttgttg

SEQ ID NO: 22364 - DNA, 21 bp, Artificial Sequence
  Description of Artificial Sequence: Synthetic oligonucleotide
ccgactatgcatatgctgtct

SEQ ID NO: 22365 - DNA, 21 bp, Artificial Sequence
  Description of Artificial Sequence: Synthetic oligonucleotide
cctactatgaatcggaatgag

SEQ ID NO: 22366 - DNA, 21 bp, Artificial Sequence
  Description of Artificial Sequence: Synthetic oligonucleotide
cctacgatgtctgatagtagg

SEQ ID NO: 22367 - DNA, 21 bp, Artificial Sequence
  Description of Artificial Sequence: Synthetic oligonucleotide
ccgacgaatgctcttcatttg

SEQ ID NO: 22368 - DNA, 21 bp, Artificial Sequence
  Description of Artificial Sequence: Synthetic oligonucleotide
cctactaatgctgtggataat

SEQ ID NO: 22369 - DNA, 21 bp, Artificial Sequence
  Description of Artificial Sequence: Synthetic oligonucleotide
cctactaatcttggtcgtgcg

SEQ ID NO: 22370 - DNA, 21 bp, Artificial Sequence
  Description of Artificial Sequence: Synthetic oligonucleotide
cctactaatcctcgtttgatg

SEQ ID NO: 22371 - DNA, 21 bp, Artificial Sequence
  Description of Artificial Sequence: Synthetic oligonucleotide
cctactaataggccgtcgtcg

SEQ ID NO: 22372 - DNA, 21 bp, Artificial Sequence
  Description of Artificial Sequence: Synthetic oligonucleotide
cctactccggcggcgcatggt

SEQ ID NO: 22373 - DNA, 21 bp, Artificial Sequence
  Description of Artificial Sequence: Synthetic oligonucleotide
ccgacgcctcctacggtgacg

SEQ ID NO: 22374 - DNA, 21 bp, Artificial Sequence
  Description of Artificial Sequence: Synthetic oligonucleotide
ccgacgccgcaggggtctgcg

SEQ ID NO: 22375 - DNA, 21 bp, Artificial Sequence
  Description of Artificial Sequence: Synthetic oligonucleotide
cctacgcctaggccgtcgccg

SEQ ID NO: 22376 - DNA, 21 bp, Artificial Sequence
  Description of Artificial Sequence: Synthetic oligonucleotide
cctacgccgaggtctgttcct

SEQ ID NO: 22377 - DNA, 21 bp, Artificial Sequence
  Description of Artificial Sequence: Synthetic oligonucleotide
ccgactcagtctggtgtgagt

SEQ ID NO: 22378 - DNA, 21 bp, Artificial Sequence
  Description of Artificial Sequence: Synthetic oligonucleotide
cctactcgggctgagttttat

SEQ ID NO: 22379 - DNA, 21 bp, Artificial Sequence
  Description of Artificial Sequence: Synthetic oligonucleotide
cctacgcgtcagccggttctg

SEQ ID NO: 22380 - DNA, 21 bp, Artificial Sequence
  Description of Artificial Sequence: Synthetic oligonucleotide
cctactcgtacgattaatgct

SEQ ID NO: 22381 - DNA, 21 bp, Artificial Sequence
  Description of Artificial Sequence: Synthetic oligonucleotide
cctacgcggactccggcgagt

SEQ ID NO: 22382 - DNA, 21 bp, Artificial Sequence
  Description of Artificial Sequence: Synthetic oligonucleotide
ccgacgagtgattttaagtgt

SEQ ID NO: 22383 - DNA, 21 bp, Artificial Sequence
  Description of Artificial Sequence: Synthetic oligonucleotide
cctacttctgaggcgcttagg

SEQ ID NO: 22384 - DNA, 21 bp, Artificial Sequence
  Description of Artificial Sequence: Synthetic oligonucleotide
ccgacttcgattcataggaat

SEQ ID NO: 22385 - DNA, 21 bp, Artificial Sequence
  Description of Artificial Sequence: Synthetic oligonucleotide
cctacttcgattgtgcgttct

SEQ ID NO: 22386 - DNA, 21 bp, Artificial Sequence
  Description of Artificial Sequence: Synthetic oligonucleotide
ccgacgtcgaagggtccgttg

SEQ ID NO: 22387 - DNA, 21 bp, Artificial Sequence
  Description of Artificial Sequence: Synthetic oligonucleotide
cctacgtctcctacggatatg

SEQ ID NO: 22388 - DNA, 21 bp, Artificial Sequence
  Description of Artificial Sequence: Synthetic oligonucleotide
ccgacgtcgcctactacttgt

SEQ ID NO: 22389 - DNA, 21 bp, Artificial Sequence
  Description of Artificial Sequence: Synthetic oligonucleotide
cctacgagtcgtccttcgctg

SEQ ID NO: 22390 - DNA, 21 bp, Artificial Sequence
  Description of Artificial Sequence: Synthetic oligonucleotide
cctacttcgtctattgggggt

SEQ ID NO: 22391 - DNA, 21 bp, Artificial Sequence
  Description of Artificial Sequence: Synthetic oligonucleotide
cctactagtacgaatcctctg

SEQ ID NO: 22392 - DNA, 21 bp, Artificial Sequence
  Description of Artificial Sequence: Synthetic oligonucleotide
ccgacttcggtgggtactggg

SEQ ID NO: 22393 - DNA, 21 bp, Artificial Sequence
  Description of Artificial Sequence: Synthetic oligonucleotide
cctacgtctgtgccgaagacg

SEQ ID NO: 22394 - DNA, 21 bp, Artificial Sequence
  Description of Artificial Sequence: Synthetic oligonucleotide
ccgacgacgcatctttctgat

SEQ ID NO: 22395 - DNA, 21 bp, Artificial Sequence
  Description of Artificial Sequence: Synthetic oligonucleotide
ccgactacgcattctgctcgt

SEQ ID NO: 22396 - DNA, 21 bp, Artificial Sequence
  Description of Artificial Sequence: Synthetic oligonucleotide
cctactactctggctgtggct

SEQ ID NO: 22397 - DNA, 21 bp, Artificial Sequence
  Description of Artificial Sequence: Synthetic oligonucleotide
ccgacgacgaatggttctacg

SEQ ID NO: 22398 - DNA, 21 bp, Artificial Sequence
  Description of Artificial Sequence: Synthetic oligonucleotide
cctactactcctgttgcgatt

SEQ ID NO: 22399 - DNA, 21 bp, Artificial Sequence
  Description of Artificial Sequence: Synthetic oligonucleotide
ccgacgactaggggtccgccg

SEQ ID NO: 22400 - DNA, 21 bp, Artificial Sequence
  Description of Artificial Sequence: Synthetic oligonucleotide
cctactgtgaagttgttgggt

SEQ ID NO: 22401 - DNA, 21 bp, Artificial Sequence
  Description of Artificial Sequence: Synthetic oligonucleotide
cctactgtgccggatctgaat

SEQ ID NO: 22402 - DNA, 21 bp, Artificial Sequence
  Description of Artificial Sequence: Synthetic oligonucleotide
ccgactgtgcctcgtccgggg

SEQ ID NO: 22403 - DNA, 21 bp, Artificial Sequence
  Description of Artificial Sequence: Synthetic oligonucleotide
cctactgttccggttggtttg

SEQ ID NO: 22404 - DNA, 21 bp, Artificial Sequence
  Description of Artificial Sequence: Synthetic oligonucleotide
cctactgtgcgggggcagtat

SEQ ID NO: 22405 - DNA, 21 bp, Artificial Sequence
  Description of Artificial Sequence: Synthetic oligonucleotide
cctacttatcctaaggctact

SEQ ID NO: 22406 - DNA, 21 bp, Artificial Sequence
  Description of Artificial Sequence: Synthetic oligonucleotide
cctacgtatagggatactgct

SEQ ID NO: 22407 - DNA, 21 bp, Artificial Sequence
  Description of Artificial Sequence: Synthetic oligonucleotide
cctgttgctaggtcgatgagt

SEQ ID NO: 22408 - DNA, 21 bp, Artificial Sequence
  Description of Artificial Sequence: Synthetic oligonucleotide
ccggttgctacttgtcgtgtt

SEQ ID NO: 22409 - DNA, 21 bp, Artificial Sequence
  Description of Artificial Sequence: Synthetic oligonucleotide
cctgttgctacttcttatgat

SEQ ID NO: 22410 - DNA, 21 bp, Artificial Sequence
  Description of Artificial Sequence: Synthetic oligonucleotide
ccggttgatgctcttccgcgt

SEQ ID NO: 22411 - DNA, 21 bp, Artificial Sequence
  Description of Artificial Sequence: Synthetic oligonucleotide
cctgtggatcatgctaggagt

SEQ ID NO: 22412 - DNA, 21 bp, Artificial Sequence
  Description of Artificial Sequence: Synthetic oligonucleotide
cctgttgatcttgggcgtggt

SEQ ID NO: 22413 - DNA, 21 bp, Artificial Sequence
  Description of Artificial Sequence: Synthetic oligonucleotide
ccggttgaggctacggtgctg

SEQ ID NO: 22414 - DNA, 21 bp, Artificial Sequence
  Description of Artificial Sequence: Synthetic oligonucleotide
ccggttgagaagtatgataag

SEQ ID NO: 22415 - DNA, 21 bp, Artificial Sequence
  Description of Artificial Sequence: Synthetic oligonucleotide
cctgttgagccgggtatgtcg

SEQ ID NO: 22416 - DNA, 21 bp, Artificial Sequence
  Description of Artificial Sequence: Synthetic oligonucleotide
cctgtggagtctcatcgtttg

SEQ ID NO: 22417 - DNA, 21 bp, Artificial Sequence
  Description of Artificial Sequence: Synthetic oligonucleotide
ccggtttttcatgaggcttcg

SEQ ID NO: 22418 - DNA, 21 bp, Artificial Sequence
  Description of Artificial Sequence: Synthetic oligonucleotide
ccggtgtttcctcagagttct

SEQ ID NO: 22419 - DNA, 21 bp, Artificial Sequence
  Description of Artificial Sequence: Synthetic oligonucleotide
cctgtgggttttactgagaat

SEQ ID NO: 22420 - DNA, 21 bp, Artificial Sequence
  Description of Artificial Sequence: Synthetic oligonucleotide
cctgtggggtcgaattctgcg

SEQ ID NO: 22421 - DNA, 21 bp, Artificial Sequence
  Description of Artificial Sequence: Synthetic oligonucleotide
cctgttcatattcatacttcg

SEQ ID NO: 22422 - DNA, 21 bp, Artificial Sequence
  Description of Artificial Sequence: Synthetic oligonucleotide
ccggttcatagtgggcgtcct

SEQ ID NO: 22423 - DNA, 21 bp, Artificial Sequence
  Description of Artificial Sequence: Synthetic oligonucleotide
ccggttatttcgacgattgcg

SEQ ID NO: 22424 - DNA, 21 bp, Artificial Sequence
  Description of Artificial Sequence: Synthetic oligonucleotide
ccggttaaggaggtgggtgat

SEQ ID NO: 22425 - DNA, 21 bp, Artificial Sequence
  Description of Artificial Sequence: Synthetic oligonucleotide
cctgttaagtctgcggcgccg

SEQ ID NO: 22426 - DNA, 21 bp, Artificial Sequence
  Description of Artificial Sequence: Synthetic oligonucleotide
cctgtgctgccgtctgatcat

SEQ ID NO: 22427 - DNA, 21 bp, Artificial Sequence
  Description of Artificial Sequence: Synthetic oligonucleotide
cctgttatgggtacgagtgtt

SEQ ID NO: 22428 - DNA, 21 bp, Artificial Sequence
  Description of Artificial Sequence: Synthetic oligonucleotide
cctgtgatgagtggggcgtcg

SEQ ID NO: 22429 - DNA, 21 bp, Artificial Sequence
  Description of Artificial Sequence: Synthetic oligonucleotide
cctgtgaatagtgagcgtatg

SEQ ID NO: 22430 - DNA, 21 bp, Artificial Sequence
  Description of Artificial Sequence: Synthetic oligonucleotide
ccggtgccgggtaagctggct

SEQ ID NO: 22431 - DNA, 21 bp, Artificial Sequence
  Description of Artificial Sequence: Synthetic oligonucleotide
ccggttccgcctcctttgcgt

SEQ ID NO: 22432 - DNA, 21 bp, Artificial Sequence
  Description of Artificial Sequence: Synthetic oligonucleotide
ccggtgcctaggtctgttaat

SEQ ID NO: 22433 - DNA, 21 bp, Artificial Sequence
  Description of Artificial Sequence: Synthetic oligonucleotide
cctgtgcagatgactgcttct

SEQ ID NO: 22434 - DNA, 21 bp, Artificial Sequence
  Description of Artificial Sequence: Synthetic oligonucleotide
cctgttcaggtgtcgttgggt

SEQ ID NO: 22435 - DNA, 21 bp, Artificial Sequence
  Description of Artificial Sequence: Synthetic oligonucleotide
ccggttcgtgcgattgagcat

SEQ ID NO: 22436 - DNA, 21 bp, Artificial Sequence
  Description of Artificial Sequence: Synthetic oligonucleotide
ccggtgagggcgatggatggt

SEQ ID NO: 22437 - DNA, 21 bp, Artificial Sequence
  Description of Artificial Sequence: Synthetic oligonucleotide
ccggttagtgggaattttacg

SEQ ID NO: 22438 - DNA, 21 bp, Artificial Sequence
  Description of Artificial Sequence: Synthetic oligonucleotide
cctgtttctaaggatcggcct

SEQ ID NO: 22439 - DNA, 21 bp, Artificial Sequence
  Description of Artificial Sequence: Synthetic oligonucleotide
ccggtgtctatggcggctagg

SEQ ID NO: 22440 - DNA, 21 bp, Artificial Sequence
  Description of Artificial Sequence: Synthetic oligonucleotide
cctgtgtctatgccgcgggag

SEQ ID NO: 22441 - DNA, 21 bp, Artificial Sequence
  Description of Artificial Sequence: Synthetic oligonucleotide
cctgtgtcgccggctattcct

SEQ ID NO: 22442 - DNA, 21 bp, Artificial Sequence
  Description of Artificial Sequence: Synthetic oligonucleotide
ccggtgtcgccggttcctgct

SEQ ID NO: 22443 - DNA, 21 bp, Artificial Sequence
  Description of Artificial Sequence: Synthetic oligonucleotide
ccggtgtctcagcatagtaag

SEQ ID NO: 22444 - DNA, 21 bp, Artificial Sequence
  Description of Artificial Sequence: Synthetic oligonucleotide
ccggtgtcttctccgactatg

SEQ ID NO: 22445 - DNA, 21 bp, Artificial Sequence
  Description of Artificial Sequence: Synthetic oligonucleotide
cctgtgtcgactagtgcggat

SEQ ID NO: 22446 - DNA, 21 bp, Artificial Sequence
  Description of Artificial Sequence: Synthetic oligonucleotide
cctgttactgcgggggagcgg

SEQ ID NO: 22447 - DNA, 21 bp, Artificial Sequence
  Description of Artificial Sequence: Synthetic oligonucleotide
cctgtgacggggccggggcag

SEQ ID NO: 22448 - DNA, 21 bp, Artificial Sequence
  Description of Artificial Sequence: Synthetic oligonucleotide
cctgtgactaagagtcttctg

SEQ ID NO: 22449 - DNA, 21 bp, Artificial Sequence
  Description of Artificial Sequence: Synthetic oligonucleotide
ccggtgactaagagtgttctt

SEQ ID NO: 22450 - DNA, 21 bp, Artificial Sequence
  Description of Artificial Sequence: Synthetic oligonucleotide
cctgttactaatgatcggcat

SEQ ID NO: 22451 - DNA, 21 bp, Artificial Sequence
  Description of Artificial Sequence: Synthetic oligonucleotide
ccggttactacgaatgctggt

SEQ ID NO: 22452 - DNA, 21 bp, Artificial Sequence
  Description of Artificial Sequence: Synthetic oligonucleotide
ccggttgttaatgtgtggtcg

SEQ ID NO: 22453 - DNA, 21 bp, Artificial Sequence
  Description of Artificial Sequence: Synthetic oligonucleotide
cctgtggtgtcggatacgctt

SEQ ID NO: 22454 - DNA, 21 bp, Artificial Sequence
  Description of Artificial Sequence: Synthetic oligonucleotide
ccggttgtgacgactactctt

SEQ ID NO: 22455 - DNA, 21 bp, Artificial Sequence
  Description of Artificial Sequence: Synthetic oligonucleotide
cctgtgtatgttggtgagatt

SEQ ID NO: 22456 - DNA, 21 bp, Artificial Sequence
  Description of Artificial Sequence: Synthetic oligonucleotide
ccttgggctactatgcagggt

SEQ ID NO: 22457 - DNA, 21 bp, Artificial Sequence
  Description of Artificial Sequence: Synthetic oligonucleotide
ccttggaaggataatcgtggg

SEQ ID NO: 22458 - DNA, 21 bp, Artificial Sequence
  Description of Artificial Sequence: Synthetic oligonucleotide
ccttggagtgaggatgggatg

SEQ ID NO: 22459 - DNA, 21 bp, Artificial Sequence
  Description of Artificial Sequence: Synthetic oligonucleotide
ccttatgctactgctctgacg

SEQ ID NO: 22460 - DNA, 21 bp, Artificial Sequence
  Description of Artificial Sequence: Synthetic oligonucleotide
ccgtatgataggccgtctgct

SEQ ID NO: 22461 - DNA, 21 bp, Artificial Sequence
  Description of Artificial Sequence: Synthetic oligonucleotide
ccttatgaggctcgggctttg

SEQ ID NO: 22462 - DNA, 21 bp, Artificial Sequence
  Description of Artificial Sequence: Synthetic oligonucleotide
ccgtatgagatggtggctatg

SEQ ID NO: 22463 - DNA, 21 bp, Artificial Sequence
  Description of Artificial Sequence: Synthetic oligonucleotide
ccttatggtacgcgggagacg

SEQ ID NO: 22464 - DNA, 21 bp, Artificial Sequence
  Description of Artificial Sequence: Synthetic oligonucleotide
ccgtatcataatcattcggct

SEQ ID NO: 22465 - DNA, 21 bp, Artificial Sequence
  Description of Artificial Sequence: Synthetic oligonucleotide
ccttatattgggggtatgtcg

SEQ ID NO: 22466 - DNA, 21 bp, Artificial Sequence
  Description of Artificial Sequence: Synthetic oligonucleotide
ccgtatttggatcctctgagg

SEQ ID NO: 22467 - DNA, 21 bp, Artificial Sequence
  Description of Artificial Sequence: Synthetic oligonucleotide
ccgtatctgtctaatcgtccg

SEQ ID NO: 22468 - DNA, 21 bp, Artificial Sequence
  Description of Artificial Sequence: Synthetic oligonucleotide
ccgtatctgtatccggaggag

SEQ ID NO: 22469 - DNA, 21 bp, Artificial Sequence
  Description of Artificial Sequence: Synthetic oligonucleotide
ccttatcctgatccgtcgaag

SEQ ID NO: 22470 - DNA, 21 bp, Artificial Sequence
  Description of Artificial Sequence: Synthetic oligonucleotide
ccgtatcctgagacttcgcat

SEQ ID NO: 22471 - DNA, 21 bp, Artificial Sequence
  Description of Artificial Sequence: Synthetic oligonucleotide
ccttatcctagtgataagttt

SEQ ID NO: 22472 - DNA, 21 bp, Artificial Sequence
  Description of Artificial Sequence: Synthetic oligonucleotide
ccgtatccgacgtctaatgag

SEQ ID NO: 22473 - DNA, 21 bp, Artificial Sequence
  Description of Artificial Sequence: Synthetic oligonucleotide
ccttatcagcgtaattcggtg

SEQ ID NO: 22474 - DNA, 21 bp, Artificial Sequence
  Description of Artificial Sequence: Synthetic oligonucleotide
ccgtatagggagcatactgtt

SEQ ID NO: 22475 - DNA, 21 bp, Artificial Sequence
  Description of Artificial Sequence: Synthetic oligonucleotide
ccgtatcgggagagtagtccg

SEQ ID NO: 22476 - DNA, 21 bp, Artificial Sequence
  Description of Artificial Sequence: Synthetic oligonucleotide
ccttatcgtagtgagccggcg

SEQ ID NO: 22477 - DNA, 21 bp, Artificial Sequence
  Description of Artificial Sequence: Synthetic oligonucleotide
ccttatagtgctggttatcat

SEQ ID NO: 22478 - DNA, 21 bp, Artificial Sequence
  Description of Artificial Sequence: Synthetic oligonucleotide
ccttatagtgggatgactttg

SEQ ID NO: 22479 - DNA, 21 bp, Artificial Sequence
  Description of Artificial Sequence: Synthetic oligonucleotide
ccgtattctgttgcggtgtct

SEQ ID NO: 22480 - DNA, 21 bp, Artificial Sequence
  Description of Artificial Sequence: Synthetic oligonucleotide
ccttatactagtgctttgctg

SEQ ID NO: 22481 - DNA, 21 bp, Artificial Sequence
  Description of Artificial Sequence: Synthetic oligonucleotide
ccttatgttactgatcgtgtt

SEQ ID NO: 22482 - DNA, 21 bp, Artificial Sequence
  Description of Artificial Sequence: Synthetic oligonucleotide
ccttatgttacggaggtttat

SEQ ID NO: 22483 - DNA, 21 bp, Artificial Sequence
  Description of Artificial Sequence: Synthetic oligonucleotide
caggcggcgtctcttctggcg

SEQ ID NO: 22484 - DNA, 21 bp, Artificial Sequence
  Description of Artificial Sequence: Synthetic oligonucleotide
caggcggagttgccttatggg

SEQ ID NO: 22485 - DNA, 21 bp, Artificial Sequence
  Description of Artificial Sequence: Synthetic oligonucleotide
caggcttttgatgttgagatg

SEQ ID NO: 22486 - DNA, 21 bp, Artificial Sequence
  Description of Artificial Sequence: Synthetic oligonucleotide
caggctgggatgcagggtgct

SEQ ID NO: 22487 - DNA, 21 bp, Artificial Sequence
  Description of Artificial Sequence: Synthetic oligonucleotide
caggcgggtaatctgcgtgat

SEQ ID NO: 22488 - DNA, 21 bp, Artificial Sequence
  Description of Artificial Sequence: Synthetic oligonucleotide
caggctggtaataatggtgct

SEQ ID NO: 22489 - DNA, 21 bp, Artificial Sequence
  Description of Artificial Sequence: Synthetic oligonucleotide
caggctggtgtgacgaattcg

SEQ ID NO: 22490 - DNA, 21 bp, Artificial Sequence
  Description of Artificial Sequence: Synthetic oligonucleotide
caggcgcatgggggggcgttg

SEQ ID NO: 22491 - DNA, 21 bp, Artificial Sequence
  Description of Artificial Sequence: Synthetic oligonucleotide
caggcgattcagcagcgtcag

SEQ ID NO: 22492 - DNA, 21 bp, Artificial Sequence
  Description of Artificial Sequence: Synthetic oligonucleotide
caggcgattcgtaatgagcct

SEQ ID NO: 22493 - DNA, 21 bp, Artificial Sequence
  Description of Artificial Sequence: Synthetic oligonucleotide
caggctaaggcgtatgcgact

SEQ ID NO: 22494 - DNA, 21 bp, Artificial Sequence
  Description of Artificial Sequence: Synthetic oligonucleotide
caggcgaagtctccttctttg

SEQ ID NO: 22495 - DNA, 21 bp, Artificial Sequence
  Description of Artificial Sequence: Synthetic oligonucleotide
caggcgctggcgccgactaat

SEQ ID NO: 22496 - DNA, 21 bp, Artificial Sequence
  Description of Artificial Sequence: Synthetic oligonucleotide
caggctttgcctactatgcat

SEQ ID NO: 22497 - DNA, 21 bp, Artificial Sequence
  Description of Artificial Sequence: Synthetic oligonucleotide
caggctaatggtagtgttggg

SEQ ID NO: 22498 - DNA, 21 bp, Artificial Sequence
  Description of Artificial Sequence: Synthetic oligonucleotide
caggcgaatgttagtcagccg

SEQ ID NO: 22499 - DNA, 21 bp, Artificial Sequence
  Description of Artificial Sequence: Synthetic oligonucleotide
caggctccgggtcatcgggag

SEQ ID NO: 22500 - DNA, 21 bp, Artificial Sequence
  Description of Artificial Sequence: Synthetic oligonucleotide
caggctcctggtattcttctt

SEQ ID NO: 22501 - DNA, 21 bp, Artificial Sequence
  Description of Artificial Sequence: Synthetic oligonucleotide
caggcgccggggctgctggtt

SEQ ID NO: 22502 - DNA, 21 bp, Artificial Sequence
  Description of Artificial Sequence: Synthetic oligonucleotide
caggcgccgcttgcttctttg

SEQ ID NO: 22503 - DNA, 21 bp, Artificial Sequence
  Description of Artificial Sequence: Synthetic oligonucleotide
caggcgccgcgtagtgatgtg

SEQ ID NO: 22504 - DNA, 21 bp, Artificial Sequence
  Description of Artificial Sequence: Synthetic oligonucleotide
caggctcagctgcagggtcgg

SEQ ID NO: 22505 - DNA, 21 bp, Artificial Sequence
  Description of Artificial Sequence: Synthetic oligonucleotide
caggcgcagcgggctttgagt

SEQ ID NO: 22506 - DNA, 21 bp, Artificial Sequence
  Description of Artificial Sequence: Synthetic oligonucleotide
caggcgcagtatccggctatg

SEQ ID NO: 22507 - DNA, 21 bp, Artificial Sequence
  Description of Artificial Sequence: Synthetic oligonucleotide
caggctcgggctgttacgtcg

SEQ ID NO: 22508 - DNA, 21 bp, Artificial Sequence
  Description of Artificial Sequence: Synthetic oligonucleotide
caggcgcgtgatccgtctttg

SEQ ID NO: 22509 - DNA, 21 bp, Artificial Sequence
  Description of Artificial Sequence: Synthetic oligonucleotide
caggctcgtgaggttagtcct

SEQ ID NO: 22510 - DNA, 21 bp, Artificial Sequence
  Description of Artificial Sequence: Synthetic oligonucleotide
caggcgaggggtaatgtttct

SEQ ID NO: 22511 - DNA, 21 bp, Artificial Sequence
  Description of Artificial Sequence: Synthetic oligonucleotide
caggcgcggaatacttctttg

SEQ ID NO: 22512 - DNA, 21 bp, Artificial Sequence
  Description of Artificial Sequence: Synthetic oligonucleotide
caggctaggccgggtattctt

SEQ ID NO: 22513 - DNA, 21 bp, Artificial Sequence
  Description of Artificial Sequence: Synthetic oligonucleotide
caggctcgtgtgtttgattct

SEQ ID NO: 22514 - DNA, 21 bp, Artificial Sequence
  Description of Artificial Sequence: Synthetic oligonucleotide
caggctagtgcgaatcgggcg

SEQ ID NO: 22515 - DNA, 21 bp, Artificial Sequence
  Description of Artificial Sequence: Synthetic oligonucleotide
caggcgtcgattattagggcg

SEQ ID NO: 22516 - DNA, 21 bp, Artificial Sequence
  Description of Artificial Sequence: Synthetic oligonucleotide
caggcgtcgaagctgccttct

SEQ ID NO: 22517 - DNA, 21 bp, Artificial Sequence
  Description of Artificial Sequence: Synthetic oligonucleotide
caggctagtcctgcttatggt

SEQ ID NO: 22518 - DNA, 21 bp, Artificial Sequence
  Description of Artificial Sequence: Synthetic oligonucleotide
caggctagtcagtctctttcg

SEQ ID NO: 22519 - DNA, 21 bp, Artificial Sequence
  Description of Artificial Sequence: Synthetic oligonucleotide
caggcgactgctaattctttg

SEQ ID NO: 22520 - DNA, 21 bp, Artificial Sequence
  Description of Artificial Sequence: Synthetic oligonucleotide
caggctacttttggggatgat

SEQ ID NO: 22521 - DNA, 21 bp, Artificial Sequence
  Description of Artificial Sequence: Synthetic oligonucleotide
caggcgactaatcagtctttg

SEQ ID NO: 22522 - DNA, 21 bp, Artificial Sequence
  Description of Artificial Sequence: Synthetic oligonucleotide
caggctactccgcttacgact

SEQ ID NO: 22523 - DNA, 21 bp, Artificial Sequence
  Description of Artificial Sequence: Synthetic oligonucleotide
caggcgacgcagctggggcat

SEQ ID NO: 22524 - DNA, 21 bp, Artificial Sequence
  Description of Artificial Sequence: Synthetic oligonucleotide
caggcggttagggataaggat

SEQ ID NO: 22525 - DNA, 21 bp, Artificial Sequence
  Description of Artificial Sequence: Synthetic oligonucleotide
caggcggttaggcctgattct

SEQ ID NO: 22526 - DNA, 21 bp, Artificial Sequence
  Description of Artificial Sequence: Synthetic oligonucleotide
caggcgtatcataattctttg

SEQ ID NO: 22527 - DNA, 21 bp, Artificial Sequence
  Description of Artificial Sequence: Synthetic oligonucleotide
caggcgtatgttaattctttg

SEQ ID NO: 22528 - DNA, 21 bp, Artificial Sequence
  Description of Artificial Sequence: Synthetic oligonucleotide
cagtgttcggatcgtagggct

SEQ ID NO: 22529 - DNA, 21 bp, Artificial Sequence
  Description of Artificial Sequence: Synthetic oligonucleotide
caggatgctgatccggcgcat

SEQ ID NO: 22530 - DNA, 21 bp, Artificial Sequence
  Description of Artificial Sequence: Synthetic oligonucleotide
caggatgattttcggtcgaag

SEQ ID NO: 22531 - DNA, 21 bp, Artificial Sequence
  Description of Artificial Sequence: Synthetic oligonucleotide
caggatgatgtgcagaagttg

SEQ ID NO: 22532 - DNA, 21 bp, Artificial Sequence
  Description of Artificial Sequence: Synthetic oligonucleotide
caggattttgatgatgttcat

SEQ ID NO: 22533 - DNA, 21 bp, Artificial Sequence
  Description of Artificial Sequence: Synthetic oligonucleotide
caggatggtattcggattatg

SEQ ID NO: 22534 - DNA, 21 bp, Artificial Sequence
  Description of Artificial Sequence: Synthetic oligonucleotide
caggatattcgggcttttgcg

SEQ ID NO: 22535 - DNA, 21 bp, Artificial Sequence
  Description of Artificial Sequence: Synthetic oligonucleotide
caggatcgtgctcttcagccg

SEQ ID NO: 22536 - DNA, 21 bp, Artificial Sequence
  Description of Artificial Sequence: Synthetic oligonucleotide
caggatcggctggcggatact

SEQ ID NO: 22537 - DNA, 21 bp, Artificial Sequence
  Description of Artificial Sequence: Synthetic oligonucleotide
caggatcgtatgagtctgagg

SEQ ID NO: 22538 - DNA, 21 bp, Artificial Sequence
  Description of Artificial Sequence: Synthetic oligonucleotide
caggatcgttctacgaatttt

SEQ ID NO: 22539 - DNA, 21 bp, Artificial Sequence
  Description of Artificial Sequence: Synthetic oligonucleotide
caggatagttgtcttttgcct

SEQ ID NO: 22540 - DNA, 21 bp, Artificial Sequence
  Description of Artificial Sequence: Synthetic oligonucleotide
caggatagttatctgggttat

SEQ ID NO: 22541 - DNA, 21 bp, Artificial Sequence
  Description of Artificial Sequence: Synthetic oligonucleotide
caggatactttgactaggttt

SEQ ID NO: 22542 - DNA, 21 bp, Artificial Sequence
  Description of Artificial Sequence: Synthetic oligonucleotide
caggatacgacgtcgctggat

SEQ ID NO: 22543 - DNA, 21 bp, Artificial Sequence
  Description of Artificial Sequence: Synthetic oligonucleotide
caggatacttatactcataag

SEQ ID NO: 22544 - DNA, 21 bp, Artificial Sequence
  Description of Artificial Sequence: Synthetic oligonucleotide
caggatgttggtcttactgtg

SEQ ID NO: 22545 - DNA, 21 bp, Artificial Sequence
  Description of Artificial Sequence: Synthetic oligonucleotide
caggatgttccgagttgtggg

SEQ ID NO: 22546 - DNA, 21 bp, Artificial Sequence
  Description of Artificial Sequence: Synthetic oligonucleotide
caggattataagaagccttct

SEQ ID NO: 22547 - DNA, 21 bp, Artificial Sequence
  Description of Artificial Sequence: Synthetic oligonucleotide
caggattatcggctgcctgag

SEQ ID NO: 22548 - DNA, 21 bp, Artificial Sequence
  Description of Artificial Sequence: Synthetic oligonucleotide
caggaggctgctagggtggag

SEQ ID NO: 22549 - DNA, 21 bp, Artificial Sequence
  Description of Artificial Sequence: Synthetic oligonucleotide
caggaggatacgtggtcgggg

SEQ ID NO: 22550 - DNA, 21 bp, Artificial Sequence
  Description of Artificial Sequence: Synthetic oligonucleotide
caggagggtgcggtgatgaat

SEQ ID NO: 22551 - DNA, 21 bp, Artificial Sequence
  Description of Artificial Sequence: Synthetic oligonucleotide
caggagttgctgaagggttat

SEQ ID NO: 22552 - DNA, 21 bp, Artificial Sequence
  Description of Artificial Sequence: Synthetic oligonucleotide
caggagttggtgttgactcgg

SEQ ID NO: 22553 - DNA, 21 bp, Artificial Sequence
  Description of Artificial Sequence: Synthetic oligonucleotide
caggagcctgctgtttctatt

SEQ ID NO: 22554 - DNA, 21 bp, Artificial Sequence
  Description of Artificial Sequence: Synthetic oligonucleotide
caggagccgatgtctggtgcg

SEQ ID NO: 22555 - DNA, 21 bp, Artificial Sequence
  Description of Artificial Sequence: Synthetic oligonucleotide
caggagccgcgggggatgcat

SEQ ID NO: 22556 - DNA, 21 bp, Artificial Sequence
  Description of Artificial Sequence: Synthetic oligonucleotide
caggagaggaggatgggtccg

SEQ ID NO: 22557 - DNA, 21 bp, Artificial Sequence
  Description of Artificial Sequence: Synthetic oligonucleotide
caggagtcgagtcatggtcct

SEQ ID NO: 22558 - DNA, 21 bp, Artificial Sequence
  Description of Artificial Sequence: Synthetic oligonucleotide
caggagtcgacgggggtttgg

SEQ ID NO: 22559 - DNA, 21 bp, Artificial Sequence
  Description of Artificial Sequence: Synthetic oligonucleotide
caggaggtggctaataatccg

SEQ ID NO: 22560 - DNA, 21 bp, Artificial Sequence
  Description of Artificial Sequence: Synthetic oligonucleotide
caggaggttcatattacgggg

SEQ ID NO: 22561 - DNA, 21 bp, Artificial Sequence
  Description of Artificial Sequence: Synthetic oligonucleotide
caggaggttccgggtaggatt

SEQ ID NO: 22562 - DNA, 21 bp, Artificial Sequence
  Description of Artificial Sequence: Synthetic oligonucleotide
caggagtggaatgctacggct

SEQ ID NO: 22563 - DNA, 21 bp, Artificial Sequence
  Description of Artificial Sequence: Synthetic oligonucleotide
caggagtatgtttctaagtcg

SEQ ID NO: 22564 - DNA, 21 bp, Artificial Sequence
  Description of Artificial Sequence: Synthetic oligonucleotide
cagtttgataagatgatgcct

SEQ ID NO: 22565 - DNA, 21 bp, Artificial Sequence
  Description of Artificial Sequence: Synthetic oligonucleotide
cagtttgatctgtctcctgct

SEQ ID NO: 22566 - DNA, 21 bp, Artificial Sequence
  Description of Artificial Sequence: Synthetic oligonucleotide
cagtttgagaatgcttgtgtg

SEQ ID NO: 22567 - DNA, 21 bp, Artificial Sequence
  Description of Artificial Sequence: Synthetic oligonucleotide
cagtttgggatgccgcgggat

SEQ ID NO: 22568 - DNA, 21 bp, Artificial Sequence
  Description of Artificial Sequence: Synthetic oligonucleotide
cagtttcttaagcatgaggag

SEQ ID NO: 22569 - DNA, 21 bp, Artificial Sequence
  Description of Artificial Sequence: Synthetic oligonucleotide
cagtttatgggtggtgtgaat

SEQ ID NO: 22570 - DNA, 21 bp, Artificial Sequence
  Description of Artificial Sequence: Synthetic oligonucleotide
cagtttaatgagactttgacg

SEQ ID NO: 22571 - DNA, 21 bp, Artificial Sequence
  Description of Artificial Sequence: Synthetic oligonucleotide
cagtttaatccgagtattcgt

SEQ ID NO: 22572 - DNA, 21 bp, Artificial Sequence
  Description of Artificial Sequence: Synthetic oligonucleotide
cagtttaattctccgatgccg

SEQ ID NO: 22573 - DNA, 21 bp, Artificial Sequence
  Description of Artificial Sequence: Synthetic oligonucleotide
cagtttcctgggtctatgcct

SEQ ID NO: 22574 - DNA, 21 bp, Artificial Sequence
  Description of Artificial Sequence: Synthetic oligonucleotide
cagtttcctcctgcgaattct

SEQ ID NO: 22575 - DNA, 21 bp, Artificial Sequence
  Description of Artificial Sequence: Synthetic oligonucleotide
cagtttcagtcttcgcaggct

SEQ ID NO: 22576 - DNA, 21 bp, Artificial Sequence
  Description of Artificial Sequence: Synthetic oligonucleotide
cagtttcgtgctgagattact

SEQ ID NO: 22577 - DNA, 21 bp, Artificial Sequence
  Description of Artificial Sequence: Synthetic oligonucleotide
cagttttcgttgaatgcggag

SEQ ID NO: 22578 - DNA, 21 bp, Artificial Sequence
  Description of Artificial Sequence: Synthetic oligonucleotide
cagtttagtccgacgtcgcgg

SEQ ID NO: 22579 - DNA, 21 bp, Artificial Sequence
  Description of Artificial Sequence: Synthetic oligonucleotide
cagttttcgtcggggtcgccg

SEQ ID NO: 22580 - DNA, 21 bp, Artificial Sequence
  Description of Artificial Sequence: Synthetic oligonucleotide
cagggggctgatagtcggttg

SEQ ID NO: 22581 - DNA, 21 bp, Artificial Sequence
  Description of Artificial Sequence: Synthetic oligonucleotide
cagggggagcattttgcggtt

SEQ ID NO: 22582 - DNA, 21 bp, Artificial Sequence
  Description of Artificial Sequence: Synthetic oligonucleotide
cagggggagaagcctgatgcg

SEQ ID NO: 22583 - DNA, 21 bp, Artificial Sequence
  Description of Artificial Sequence: Synthetic oligonucleotide
cagggtggttctggtccgtat

SEQ ID NO: 22584 - DNA, 21 bp, Artificial Sequence
  Description of Artificial Sequence: Synthetic oligonucleotide
cagggtcatgatgatgatatt

SEQ ID NO: 22585 - DNA, 21 bp, Artificial Sequence
  Description of Artificial Sequence: Synthetic oligonucleotide
cagggtattgagcataggccg

SEQ ID NO: 22586 - DNA, 21 bp, Artificial Sequence
  Description of Artificial Sequence: Synthetic oligonucleotide
caggggattacttgttcgcct

SEQ ID NO: 22587 - DNA, 21 bp, Artificial Sequence
  Description of Artificial Sequence: Synthetic oligonucleotide
cagggtaagcagctgacggct

SEQ ID NO: 22588 - DNA, 21 bp, Artificial Sequence
  Description of Artificial Sequence: Synthetic oligonucleotide
cagggtaaggttgatcagcgt

SEQ ID NO: 22589 - DNA, 21 bp, Artificial Sequence
  Description of Artificial Sequence: Synthetic oligonucleotide
cagggtctggttgcgaatttt

SEQ ID NO: 22590 - DNA, 21 bp, Artificial Sequence
  Description of Artificial Sequence: Synthetic oligonucleotide
cagggtatgtcgtttggtcct

SEQ ID NO: 22591 - DNA, 21 bp, Artificial Sequence
  Description of Artificial Sequence: Synthetic oligonucleotide
caggggaataggagtcctcat

SEQ ID NO: 22592 - DNA, 21 bp, Artificial Sequence
  Description of Artificial Sequence: Synthetic oligonucleotide
cagggtccggcgaatgttgtg

SEQ ID NO: 22593 - DNA, 21 bp, Artificial Sequence
  Description of Artificial Sequence: Synthetic oligonucleotide
cagggtccgcctgttacgaat

SEQ ID NO: 22594 - DNA, 21 bp, Artificial Sequence
  Description of Artificial Sequence: Synthetic oligonucleotide
caggggccgcgggctgctcct

SEQ ID NO: 22595 - DNA, 21 bp, Artificial Sequence
  Description of Artificial Sequence: Synthetic oligonucleotide
cagggtccttctatgttgact

SEQ ID NO: 22596 - DNA, 21 bp, Artificial Sequence
  Description of Artificial Sequence: Synthetic oligonucleotide
cagggtcagcatcctatgact

SEQ ID NO: 22597 - DNA, 21 bp, Artificial Sequence
  Description of Artificial Sequence: Synthetic oligonucleotide
cagggtcagccgattgatagg

SEQ ID NO: 22598 - DNA, 21 bp, Artificial Sequence
  Description of Artificial Sequence: Synthetic oligonucleotide
cagggtagggagtgggtgcag

SEQ ID NO: 22599 - DNA, 21 bp, Artificial Sequence
  Description of Artificial Sequence: Synthetic oligonucleotide
cagggtcgttcgttgccggcg

SEQ ID NO: 22600 - DNA, 21 bp, Artificial Sequence
  Description of Artificial Sequence: Synthetic oligonucleotide
caggggcggactcctcaggcg

SEQ ID NO: 22601 - DNA, 21 bp, Artificial Sequence
  Description of Artificial Sequence: Synthetic oligonucleotide
caggggtctcattcgagtact

SEQ ID NO: 22602 - DNA, 21 bp, Artificial Sequence
  Description of Artificial Sequence: Synthetic oligonucleotide
cagggttcgcgtacgaatccg

SEQ ID NO: 22603 - DNA, 21 bp, Artificial Sequence
  Description of Artificial Sequence: Synthetic oligonucleotide
caggggtctactgcggtgacg

SEQ ID NO: 22604 - DNA, 21 bp, Artificial Sequence
  Description of Artificial Sequence: Synthetic oligonucleotide
caggggagtacttggagtccg

SEQ ID NO: 22605 - DNA, 21 bp, Artificial Sequence
  Description of Artificial Sequence: Synthetic oligonucleotide
caggggactcttaagaatatt

SEQ ID NO: 22606 - DNA, 21 bp, Artificial Sequence
  Description of Artificial Sequence: Synthetic oligonucleotide
cagggggttgcggggcatgct

SEQ ID NO: 22607 - DNA, 21 bp, Artificial Sequence
  Description of Artificial Sequence: Synthetic oligonucleotide
cagggtgttttgctggttact

SEQ ID NO: 22608 - DNA, 21 bp, Artificial Sequence
  Description of Artificial Sequence: Synthetic oligonucleotide
cagggtgttcgtcaggctgtt

SEQ ID NO: 22609 - DNA, 21 bp, Artificial Sequence
  Description of Artificial Sequence: Synthetic oligonucleotide
cagggtgtgcgtacgacgtct

SEQ ID NO: 22610 - DNA, 21 bp, Artificial Sequence
  Description of Artificial Sequence: Synthetic oligonucleotide
cagcatgagcggatgccttcg

SEQ ID NO: 22611 - DNA, 21 bp, Artificial Sequence
  Description of Artificial Sequence: Synthetic oligonucleotide
cagcattttaatcaggctgag

SEQ ID NO: 22612 - DNA, 21 bp, Artificial Sequence
  Description of Artificial Sequence: Synthetic oligonucleotide
cagcatggtgctccgacttgg

SEQ ID NO: 22613 - DNA, 21 bp, Artificial Sequence
  Description of Artificial Sequence: Synthetic oligonucleotide
cagcatctgcatacgctgaag

SEQ ID NO: 22614 - DNA, 21 bp, Artificial Sequence
  Description of Artificial Sequence: Synthetic oligonucleotide
cagcatttgaattcgtatgtg

SEQ ID NO: 22615 - DNA, 21 bp, Artificial Sequence
  Description of Artificial Sequence: Synthetic oligonucleotide
cagcatttgccgaggactacg

SEQ ID NO: 22616 - DNA, 21 bp, Artificial Sequence
  Description of Artificial Sequence: Synthetic oligonucleotide
cagcatcttgttcatgatgct

SEQ ID NO: 22617 - DNA, 21 bp, Artificial Sequence
  Description of Artificial Sequence: Synthetic oligonucleotide
cagcattctcttgctgttact

SEQ ID NO: 22618 - DNA, 21 bp, Artificial Sequence
  Description of Artificial Sequence: Synthetic oligonucleotide
cagcattcgtcgctggggatt

SEQ ID NO: 22619 - DNA, 21 bp, Artificial Sequence
  Description of Artificial Sequence: Synthetic oligonucleotide
cagcattcgagtatggcgagg

SEQ ID NO: 22620 - DNA, 21 bp, Artificial Sequence
  Description of Artificial Sequence: Synthetic oligonucleotide
cagcatactgctgctgcgctt

SEQ ID NO: 22621 - DNA, 21 bp, Artificial Sequence
  Description of Artificial Sequence: Synthetic oligonucleotide
cagcatactttgactattagt

SEQ ID NO: 22622 - DNA, 21 bp, Artificial Sequence
  Description of Artificial Sequence: Synthetic oligonucleotide
cagcatactagggtggttttt

SEQ ID NO: 22623 - DNA, 21 bp, Artificial Sequence
  Description of Artificial Sequence: Synthetic oligonucleotide
cagcatacgactaagcagtct

SEQ ID NO: 22624 - DNA, 21 bp, Artificial Sequence
  Description of Artificial Sequence: Synthetic oligonucleotide
cagcatgtgtcttcgactggt

SEQ ID NO: 22625 - DNA, 21 bp, Artificial Sequence
  Description of Artificial Sequence: Synthetic oligonucleotide
cagattgctcgtagttctatt

SEQ ID NO: 22626 - DNA, 21 bp, Artificial Sequence
  Description of Artificial Sequence: Synthetic oligonucleotide
cagattgattatcgggcgccg

SEQ ID NO: 22627 - DNA, 21 bp, Artificial Sequence
  Description of Artificial Sequence: Synthetic oligonucleotide
cagattgagactctggctcat

SEQ ID NO: 22628 - DNA, 21 bp, Artificial Sequence
  Description of Artificial Sequence: Synthetic oligonucleotide
cagatttttgggaggactcct

SEQ ID NO: 22629 - DNA, 21 bp, Artificial Sequence
  Description of Artificial Sequence: Synthetic oligonucleotide
cagattgggtttgggactagt

SEQ ID NO: 22630 - DNA, 21 bp, Artificial Sequence
  Description of Artificial Sequence: Synthetic oligonucleotide
cagattggtacgtatttggct

SEQ ID NO: 22631 - DNA, 21 bp, Artificial Sequence
  Description of Artificial Sequence: Synthetic oligonucleotide
cagattcatgagtctggtgag

SEQ ID NO: 22632 - DNA, 21 bp, Artificial Sequence
  Description of Artificial Sequence: Synthetic oligonucleotide
cagattatggcggatactcgg

SEQ ID NO: 22633 - DNA, 21 bp, Artificial Sequence
  Description of Artificial Sequence: Synthetic oligonucleotide
cagattaattttccgatggat

SEQ ID NO: 22634 - DNA, 21 bp, Artificial Sequence
  Description of Artificial Sequence: Synthetic oligonucleotide
cagattaattcgaataagact

SEQ ID NO: 22635 - DNA, 21 bp, Artificial Sequence
  Description of Artificial Sequence: Synthetic oligonucleotide
cagattaattcgacgacgggt

SEQ ID NO: 22636 - DNA, 21 bp, Artificial Sequence
  Description of Artificial Sequence: Synthetic oligonucleotide
cagattccgattattgagtcg

SEQ ID NO: 22637 - DNA, 21 bp, Artificial Sequence
  Description of Artificial Sequence: Synthetic oligonucleotide
cagattcctaaggcgccgggt

SEQ ID NO: 22638 - DNA, 21 bp, Artificial Sequence
  Description of Artificial Sequence: Synthetic oligonucleotide
cagattcctaattcttttagt

SEQ ID NO: 22639 - DNA, 21 bp, Artificial Sequence
  Description of Artificial Sequence: Synthetic oligonucleotide
cagattcctactactttggct

SEQ ID NO: 22640 - DNA, 21 bp, Artificial Sequence
  Description of Artificial Sequence: Synthetic oligonucleotide
cagattcggaattctacggag

SEQ ID NO: 22641 - DNA, 21 bp, Artificial Sequence
  Description of Artificial Sequence: Synthetic oligonucleotide
cagattagtcagccgaagatt

SEQ ID NO: 22642 - DNA, 21 bp, Artificial Sequence
  Description of Artificial Sequence: Synthetic oligonucleotide
cagatttctacgttgactttt

SEQ ID NO: 22643 - DNA, 21 bp, Artificial Sequence
  Description of Artificial Sequence: Synthetic oligonucleotide
cagattgtgccgcagggtcct

SEQ ID NO: 22644 - DNA, 21 bp, Artificial Sequence
  Description of Artificial Sequence: Synthetic oligonucleotide
cagattgttactgggcttagt

SEQ ID NO: 22645 - DNA, 21 bp, Artificial Sequence
  Description of Artificial Sequence: Synthetic oligonucleotide
cagatttatgggtctgagtcg

SEQ ID NO: 22646 - DNA, 21 bp, Artificial Sequence
  Description of Artificial Sequence: Synthetic oligonucleotide
cagaaggcggcttcggctgat

SEQ ID NO: 22647 - DNA, 21 bp, Artificial Sequence
  Description of Artificial Sequence: Synthetic oligonucleotide
cagaaggcgattgattcgttg

SEQ ID NO: 22648 - DNA, 21 bp, Artificial Sequence
  Description of Artificial Sequence: Synthetic oligonucleotide
cagaaggagctgattgttgat

SEQ ID NO: 22649 - DNA, 21 bp, Artificial Sequence
  Description of Artificial Sequence: Synthetic oligonucleotide
cagaaggagccgggtccttct

SEQ ID NO: 22650 - DNA, 21 bp, Artificial Sequence
  Description of Artificial Sequence: Synthetic oligonucleotide
cagaagtttgctgataagggt

SEQ ID NO: 22651 - DNA, 21 bp, Artificial Sequence
  Description of Artificial Sequence: Synthetic oligonucleotide
cagaagcatgatattaggagt

SEQ ID NO: 22652 - DNA, 21 bp, Artificial Sequence
  Description of Artificial Sequence: Synthetic oligonucleotide
cagaagcataattgtcctgtg

SEQ ID NO: 22653 - DNA, 21 bp, Artificial Sequence
  Description of Artificial Sequence: Synthetic oligonucleotide
cagaagaaggatccgattcct

SEQ ID NO: 22654 - DNA, 21 bp, Artificial Sequence
  Description of Artificial Sequence: Synthetic oligonucleotide
cagaagatgcagcattatgat

SEQ ID NO: 22655 - DNA, 21 bp, Artificial Sequence
  Description of Artificial Sequence: Synthetic oligonucleotide
cagaagcctgctacgcgggat

SEQ ID NO: 22656 - DNA, 21 bp, Artificial Sequence
  Description of Artificial Sequence: Synthetic oligonucleotide
cagaagtcgaataatgcgctt

SEQ ID NO: 22657 - DNA, 21 bp, Artificial Sequence
  Description of Artificial Sequence: Synthetic oligonucleotide
cagaaggttattgcggaggtg

SEQ ID NO: 22658 - DNA, 21 bp, Artificial Sequence
  Description of Artificial Sequence: Synthetic oligonucleotide
cagaaggttatgcagccgggg

SEQ ID NO: 22659 - DNA, 21 bp, Artificial Sequence
  Description of Artificial Sequence: Synthetic oligonucleotide
cagttggcgaatcatgtgggt

SEQ ID NO: 22660 - DNA, 21 bp, Artificial Sequence
  Description of Artificial Sequence: Synthetic oligonucleotide
cagttggcgccgccgaagact

SEQ ID NO: 22661 - DNA, 21 bp, Artificial Sequence
  Description of Artificial Sequence: Synthetic oligonucleotide
cagctggcgtctaatgcgttt

SEQ ID NO: 22662 - DNA, 21 bp, Artificial Sequence
  Description of Artificial Sequence: Synthetic oligonucleotide
cagcttgcgagtgtgaggatt

SEQ ID NO: 22663 - DNA, 21 bp, Artificial Sequence
  Description of Artificial Sequence: Synthetic oligonucleotide
cagctggattttgatttggtg

SEQ ID NO: 22664 - DNA, 21 bp, Artificial Sequence
  Description of Artificial Sequence: Synthetic oligonucleotide
cagctggattctctttcggtt

SEQ ID NO: 22665 - DNA, 21 bp, Artificial Sequence
  Description of Artificial Sequence: Synthetic oligonucleotide
cagctggggccttcggttccg

SEQ ID NO: 22666 - DNA, 21 bp, Artificial Sequence
  Description of Artificial Sequence: Synthetic oligonucleotide
cagctggggtcgttggatggt

SEQ ID NO: 22667 - DNA, 21 bp, Artificial Sequence
  Description of Artificial Sequence: Synthetic oligonucleotide
cagctgggggtgcgttcgcag

SEQ ID NO: 22668 - DNA, 21 bp, Artificial Sequence
  Description of Artificial Sequence: Synthetic oligonucleotide
cagctgcattatgctaatgag

SEQ ID NO: 22669 - DNA, 21 bp, Artificial Sequence
  Description of Artificial Sequence: Synthetic oligonucleotide
cagcttattaagactcctggt

SEQ ID NO: 22670 - DNA, 21 bp, Artificial Sequence
  Description of Artificial Sequence: Synthetic oligonucleotide
cagctgaaggctgttgagttt

SEQ ID NO: 22671 - DNA, 21 bp, Artificial Sequence
  Description of Artificial Sequence: Synthetic oligonucleotide
cagttgaagcctctgtatttt

SEQ ID NO: 22672 - DNA, 21 bp, Artificial Sequence
  Description of Artificial Sequence: Synthetic oligonucleotide
cagttgaagactgagatgctg

SEQ ID NO: 22673 - DNA, 21 bp, Artificial Sequence
  Description of Artificial Sequence: Synthetic oligonucleotide
cagttgaagacgtcgctgtcg

SEQ ID NO: 22674 - DNA, 21 bp, Artificial Sequence
  Description of Artificial Sequence: Synthetic oligonucleotide
cagctgcttcggacgggtgat

SEQ ID NO: 22675 - DNA, 21 bp, Artificial Sequence
  Description of Artificial Sequence: Synthetic oligonucleotide
cagcttttgcgtgtgacgggt

SEQ ID NO: 22676 - DNA, 21 bp, Artificial Sequence
  Description of Artificial Sequence: Synthetic oligonucleotide
cagttgatgaggctgggggtg

SEQ ID NO: 22677 - DNA, 21 bp, Artificial Sequence
  Description of Artificial Sequence: Synthetic oligonucleotide
cagttgaatgatcttgcgcgg

SEQ ID NO: 22678 - DNA, 21 bp, Artificial Sequence
  Description of Artificial Sequence: Synthetic oligonucleotide
cagctgaatcgtccgccttct

SEQ ID NO: 22679 - DNA, 21 bp, Artificial Sequence
  Description of Artificial Sequence: Synthetic oligonucleotide
cagcttccggcggataatgct

SEQ ID NO: 22680 - DNA, 21 bp, Artificial Sequence
  Description of Artificial Sequence: Synthetic oligonucleotide
cagttgccgcatgattctgct

SEQ ID NO: 22681 - DNA, 21 bp, Artificial Sequence
  Description of Artificial Sequence: Synthetic oligonucleotide
cagttgcctcatgtgaaggtt

SEQ ID NO: 22682 - DNA, 21 bp, Artificial Sequence
  Description of Artificial Sequence: Synthetic oligonucleotide
cagctgccgcatgtttctatg

SEQ ID NO: 22683 - DNA, 21 bp, Artificial Sequence
  Description of Artificial Sequence: Synthetic oligonucleotide
cagctgccgttgactccgcat

SEQ ID NO: 22684 - DNA, 21 bp, Artificial Sequence
  Description of Artificial Sequence: Synthetic oligonucleotide
cagcttcctagtacgcggtct

SEQ ID NO: 22685 - DNA, 21 bp, Artificial Sequence
  Description of Artificial Sequence: Synthetic oligonucleotide
cagcttcctactaagctggat

SEQ ID NO: 22686 - DNA, 21 bp, Artificial Sequence
  Description of Artificial Sequence: Synthetic oligonucleotide
cagttgccggttaattctagt

SEQ ID NO: 22687 - DNA, 21 bp, Artificial Sequence
  Description of Artificial Sequence: Synthetic oligonucleotide
cagctgcagattactactggt

SEQ ID NO: 22688 - DNA, 21 bp, Artificial Sequence
  Description of Artificial Sequence: Synthetic oligonucleotide
cagcttcagcttaagactgct

SEQ ID NO: 22689 - DNA, 21 bp, Artificial Sequence
  Description of Artificial Sequence: Synthetic oligonucleotide
cagttgcagactgataagacg

SEQ ID NO: 22690 - DNA, 21 bp, Artificial Sequence
  Description of Artificial Sequence: Synthetic oligonucleotide
cagttgcgtgggtcttatccg

SEQ ID NO: 22691 - DNA, 21 bp, Artificial Sequence
  Description of Artificial Sequence: Synthetic oligonucleotide
cagttgcgtcatactgatttt

SEQ ID NO: 22692 - DNA, 21 bp, Artificial Sequence
  Description of Artificial Sequence: Synthetic oligonucleotide
cagctgaggccggctaattct

SEQ ID NO: 22693 - DNA, 21 bp, Artificial Sequence
  Description of Artificial Sequence: Synthetic oligonucleotide
cagctgaggcctgagggtctg

SEQ ID NO: 22694 - DNA, 21 bp, Artificial Sequence
  Description of Artificial Sequence: Synthetic oligonucleotide
cagctgtctgctcctgcggct

SEQ ID NO: 22695 - DNA, 21 bp, Artificial Sequence
  Description of Artificial Sequence: Synthetic oligonucleotide
cagctttctgcttcgacgcgt

SEQ ID NO: 22696 - DNA, 21 bp, Artificial Sequence
  Description of Artificial Sequence: Synthetic oligonucleotide
cagctttcgaaggatgtttct

SEQ ID NO: 22697 - DNA, 21 bp, Artificial Sequence
  Description of Artificial Sequence: Synthetic oligonucleotide
cagctttctctggagcctttt

SEQ ID NO: 22698 - DNA, 21 bp, Artificial Sequence
  Description of Artificial Sequence: Synthetic oligonucleotide
cagttgagtcgggaggagcct

SEQ ID NO: 22699 - DNA, 21 bp, Artificial Sequence
  Description of Artificial Sequence: Synthetic oligonucleotide
cagttgtcgcggcctgttccg

SEQ ID NO: 22700 - DNA, 21 bp, Artificial Sequence
  Description of Artificial Sequence: Synthetic oligonucleotide
cagctgtcttcggctcctact

SEQ ID NO: 22701 - DNA, 21 bp, Artificial Sequence
  Description of Artificial Sequence: Synthetic oligonucleotide
cagttgtcgacgactcagggt

SEQ ID NO: 22702 - DNA, 21 bp, Artificial Sequence
  Description of Artificial Sequence: Synthetic oligonucleotide
cagttgactgcgggtgtgccg

SEQ ID NO: 22703 - DNA, 21 bp, Artificial Sequence
  Description of Artificial Sequence: Synthetic oligonucleotide
cagcttacgccggttcatcat

SEQ ID NO: 22704 - DNA, 21 bp, Artificial Sequence
  Description of Artificial Sequence: Synthetic oligonucleotide
cagcttactcggggtaattat

SEQ ID NO: 22705 - DNA, 21 bp, Artificial Sequence
  Description of Artificial Sequence: Synthetic oligonucleotide
cagttgactgtgcatacgctt

SEQ ID NO: 22706 - DNA, 21 bp, Artificial Sequence
  Description of Artificial Sequence: Synthetic oligonucleotide
cagctggtgcagcagcatttg

SEQ ID NO: 22707 - DNA, 21 bp, Artificial Sequence
  Description of Artificial Sequence: Synthetic oligonucleotide
cagatggcggagactagtagg

SEQ ID NO: 22708 - DNA, 21 bp, Artificial Sequence
  Description of Artificial Sequence: Synthetic oligonucleotide
cagatggctcgtactatgtct

SEQ ID NO: 22709 - DNA, 21 bp, Artificial Sequence
  Description of Artificial Sequence: Synthetic oligonucleotide
cagatggcgtcgattccgtcg

SEQ ID NO: 22710 - DNA, 21 bp, Artificial Sequence
  Description of Artificial Sequence: Synthetic oligonucleotide
cagatggatgatgctccgtcg

SEQ ID NO: 22711 - DNA, 21 bp, Artificial Sequence
  Description of Artificial Sequence: Synthetic oligonucleotide
cagatggataatcggaatcct

SEQ ID NO: 22712 - DNA, 21 bp, Artificial Sequence
  Description of Artificial Sequence: Synthetic oligonucleotide
cagatggatcgttcgcgtgtg

SEQ ID NO: 22713 - DNA, 21 bp, Artificial Sequence
  Description of Artificial Sequence: Synthetic oligonucleotide
cagatggaggcggcgctttat

SEQ ID NO: 22714 - DNA, 21 bp, Artificial Sequence
  Description of Artificial Sequence: Synthetic oligonucleotide
cagatgcatagttctcttcat

SEQ ID NO: 22715 - DNA, 21 bp, Artificial Sequence
  Description of Artificial Sequence: Synthetic oligonucleotide
cagatgaagaatcaggcgact

SEQ ID NO: 22716 - DNA, 21 bp, Artificial Sequence
  Description of Artificial Sequence: Synthetic oligonucleotide
cagatgcttgataagaatcat

SEQ ID NO: 22717 - DNA, 21 bp, Artificial Sequence
  Description of Artificial Sequence: Synthetic oligonucleotide
cagatgaatgctcttcctatg

SEQ ID NO: 22718 - DNA, 21 bp, Artificial Sequence
  Description of Artificial Sequence: Synthetic oligonucleotide
cagatgaatatgccgaatgat

SEQ ID NO: 22719 - DNA, 21 bp, Artificial Sequence
  Description of Artificial Sequence: Synthetic oligonucleotide
cagatgcctgctacggcgaag

SEQ ID NO: 22720 - DNA, 21 bp, Artificial Sequence
  Description of Artificial Sequence: Synthetic oligonucleotide
cagatgcctgaggggactagt

SEQ ID NO: 22721 - DNA, 21 bp, Artificial Sequence
  Description of Artificial Sequence: Synthetic oligonucleotide
cagatgccgcctaattctaat

SEQ ID NO: 22722 - DNA, 21 bp, Artificial Sequence
  Description of Artificial Sequence: Synthetic oligonucleotide
cagatgccttcttttggtgag

SEQ ID NO: 22723 - DNA, 21 bp, Artificial Sequence
  Description of Artificial Sequence: Synthetic oligonucleotide
cagatgccgtcgatgtcgggt

SEQ ID NO: 22724 - DNA, 21 bp, Artificial Sequence
  Description of Artificial Sequence: Synthetic oligonucleotide
cagatgccgtcgagtcgttct

SEQ ID NO: 22725 - DNA, 21 bp, Artificial Sequence
  Description of Artificial Sequence: Synthetic oligonucleotide
cagatgcctacgaggactact

SEQ ID NO: 22726 - DNA, 21 bp, Artificial Sequence
  Description of Artificial Sequence: Synthetic oligonucleotide
cagatgcagcgtcctctgatt

SEQ ID NO: 22727 - DNA, 21 bp, Artificial Sequence
  Description of Artificial Sequence: Synthetic oligonucleotide
cagatgagtattgttgtgcct

SEQ ID NO: 22728 - DNA, 21 bp, Artificial Sequence
  Description of Artificial Sequence: Synthetic oligonucleotide
cagatgacgattttgaagcag

SEQ ID NO: 22729 - DNA, 21 bp, Artificial Sequence
  Description of Artificial Sequence: Synthetic oligonucleotide
cagaatgaggcgttggtgggg

SEQ ID NO: 22730 - DNA, 21 bp, Artificial Sequence
  Description of Artificial Sequence: Synthetic oligonucleotide
cagaatgagctgtttcgggcg

SEQ ID NO: 22731 - DNA, 21 bp, Artificial Sequence
  Description of Artificial Sequence: Synthetic oligonucleotide
cagaatgggctgcctcagacg

SEQ ID NO: 22732 - DNA, 21 bp, Artificial Sequence
  Description of Artificial Sequence: Synthetic oligonucleotide
cagaatcatccggtgacgaag

SEQ ID NO: 22733 - DNA, 21 bp, Artificial Sequence
  Description of Artificial Sequence: Synthetic oligonucleotide
cagaatattcttgcgcattgg

SEQ ID NO: 22734 - DNA, 21 bp, Artificial Sequence
  Description of Artificial Sequence: Synthetic oligonucleotide
cagaataagtcgaattcgtat

SEQ ID NO: 22735 - DNA, 21 bp, Artificial Sequence
  Description of Artificial Sequence: Synthetic oligonucleotide
cagaatctgcctagtgcttat

SEQ ID NO: 22736 - DNA, 21 bp, Artificial Sequence
  Description of Artificial Sequence: Synthetic oligonucleotide
cagaatctgacttttgggatg

SEQ ID NO: 22737 - DNA, 21 bp, Artificial Sequence
  Description of Artificial Sequence: Synthetic oligonucleotide
cagaatctgacgggtaagtcg

SEQ ID NO: 22738 - DNA, 21 bp, Artificial Sequence
  Description of Artificial Sequence: Synthetic oligonucleotide
cagaatatggtttgtgttgct

SEQ ID NO: 22739 - DNA, 21 bp, Artificial Sequence
  Description of Artificial Sequence: Synthetic oligonucleotide
cagaatccgaatatttcgggg

SEQ ID NO: 22740 - DNA, 21 bp, Artificial Sequence
  Description of Artificial Sequence: Synthetic oligonucleotide
cagaatcctcctcatattcag

SEQ ID NO: 22741 - DNA, 21 bp, Artificial Sequence
  Description of Artificial Sequence: Synthetic oligonucleotide
cagaatcctcggcttccgctt

SEQ ID NO: 22742 - DNA, 21 bp, Artificial Sequence
  Description of Artificial Sequence: Synthetic oligonucleotide
cagaatcctcggactggtcag

SEQ ID NO: 22743 - DNA, 21 bp, Artificial Sequence
  Description of Artificial Sequence: Synthetic oligonucleotide
cagaatccgacgtataagctt

SEQ ID NO: 22744 - DNA, 21 bp, Artificial Sequence
  Description of Artificial Sequence: Synthetic oligonucleotide
cagaatcggattgtggagccg

SEQ ID NO: 22745 - DNA, 21 bp, Artificial Sequence
  Description of Artificial Sequence: Synthetic oligonucleotide
cagaattctgctcctgcgatt

SEQ ID NO: 22746 - DNA, 21 bp, Artificial Sequence
  Description of Artificial Sequence: Synthetic oligonucleotide
cagaatacttctagtggtctt

SEQ ID NO: 22747 - DNA, 21 bp, Artificial Sequence
  Description of Artificial Sequence: Synthetic oligonucleotide
cagaatgttatgcatatgagt

SEQ ID NO: 22748 - DNA, 21 bp, Artificial Sequence
  Description of Artificial Sequence: Synthetic oligonucleotide
cagaatgttcagcgttatccg

SEQ ID NO: 22749 - DNA, 21 bp, Artificial Sequence
  Description of Artificial Sequence: Synthetic oligonucleotide
cagaatgttcggtcgcagacg

SEQ ID NO: 22750 - DNA, 21 bp, Artificial Sequence
  Description of Artificial Sequence: Synthetic oligonucleotide
cagaattatttgaagactgag

SEQ ID NO: 22751 - DNA, 21 bp, Artificial Sequence
  Description of Artificial Sequence: Synthetic oligonucleotide
cagcctgcggcgggtcatttt

SEQ ID NO: 22752 - DNA, 21 bp, Artificial Sequence
  Description of Artificial Sequence: Synthetic oligonucleotide
cagcctgcgcattgttctgat

SEQ ID NO: 22753 - DNA, 21 bp, Artificial Sequence
  Description of Artificial Sequence: Synthetic oligonucleotide
cagccggcgaagggttatcct

SEQ ID NO: 22754 - DNA, 21 bp, Artificial Sequence
  Description of Artificial Sequence: Synthetic oligonucleotide
cagcctgctccgacgctgagg

SEQ ID NO: 22755 - DNA, 21 bp, Artificial Sequence
  Description of Artificial Sequence: Synthetic oligonucleotide
cagcctgctactgaggttctt

SEQ ID NO: 22756 - DNA, 21 bp, Artificial Sequence
  Description of Artificial Sequence: Synthetic oligonucleotide
cagcctgctgtgatggagtcg

SEQ ID NO: 22757 - DNA, 21 bp, Artificial Sequence
  Description of Artificial Sequence: Synthetic oligonucleotide
cagccggatccttctccgccg

SEQ ID NO: 22758 - DNA, 21 bp, Artificial Sequence
  Description of Artificial Sequence: Synthetic oligonucleotide
cagcctttttattctgatgag

SEQ ID NO: 22759 - DNA, 21 bp, Artificial Sequence
  Description of Artificial Sequence: Synthetic oligonucleotide
cagccgggggtgagtcatact

SEQ ID NO: 22760 - DNA, 21 bp, Artificial Sequence
  Description of Artificial Sequence: Synthetic oligonucleotide
cagccgcatggggatcctatg

SEQ ID NO: 22761 - DNA, 21 bp, Artificial Sequence
  Description of Artificial Sequence: Synthetic oligonucleotide
cagccgattgctcatacggat

SEQ ID NO: 22762 - DNA, 21 bp, Artificial Sequence
  Description of Artificial Sequence: Synthetic oligonucleotide
cagccgattcagactcgtgcg

SEQ ID NO: 22763 - DNA, 21 bp, Artificial Sequence
  Description of Artificial Sequence: Synthetic oligonucleotide
cagcctatttcggctacgctg

SEQ ID NO: 22764 - DNA, 21 bp, Artificial Sequence
  Description of Artificial Sequence: Synthetic oligonucleotide
cagcctaagttttgtggggct

SEQ ID NO: 22765 - DNA, 21 bp, Artificial Sequence
  Description of Artificial Sequence: Synthetic oligonucleotide
cagcctaagctgagtgcgtcg

SEQ ID NO: 22766 - DNA, 21 bp, Artificial Sequence
  Description of Artificial Sequence: Synthetic oligonucleotide
cagccgaagtcttcgggggtg

SEQ ID NO: 22767 - DNA, 21 bp, Artificial Sequence
  Description of Artificial Sequence: Synthetic oligonucleotide
cagccgctggcgcgggcgagt

SEQ ID NO: 22768 - DNA, 21 bp, Artificial Sequence
  Description of Artificial Sequence: Synthetic oligonucleotide
cagcctctggcttcgaagacg

SEQ ID NO: 22769 - DNA, 21 bp, Artificial Sequence
  Description of Artificial Sequence: Synthetic oligonucleotide
cagcctctgttgagtgcttcg

SEQ ID NO: 22770 - DNA, 21 bp, Artificial Sequence
  Description of Artificial Sequence: Synthetic oligonucleotide
cagccgttgactatgcgtagt

SEQ ID NO: 22771 - DNA, 21 bp, Artificial Sequence
  Description of Artificial Sequence: Synthetic oligonucleotide
cagccgctgacttctgatacg

SEQ ID NO: 22772 - DNA, 21 bp, Artificial Sequence
  Description of Artificial Sequence: Synthetic oligonucleotide
cagcctatgcttgttgtgagt

SEQ ID NO: 22773 - DNA, 21 bp, Artificial Sequence
  Description of Artificial Sequence: Synthetic oligonucleotide
cagccgaatccggttgcgcat

SEQ ID NO: 22774 - DNA, 21 bp, Artificial Sequence
  Description of Artificial Sequence: Synthetic oligonucleotide
cagcctaattatccgtgtgct

SEQ ID NO: 22775 - DNA, 21 bp, Artificial Sequence
  Description of Artificial Sequence: Synthetic oligonucleotide
cagcctcctggtatgtctagt

SEQ ID NO: 22776 - DNA, 21 bp, Artificial Sequence
  Description of Artificial Sequence: Synthetic oligonucleotide
cagcctcctaatactgaggat

SEQ ID NO: 22777 - DNA, 21 bp, Artificial Sequence
  Description of Artificial Sequence: Synthetic oligonucleotide
cagcctccgcgtagtcagctg

SEQ ID NO: 22778 - DNA, 21 bp, Artificial Sequence
  Description of Artificial Sequence: Synthetic oligonucleotide
cagccgccttcgccgattagt

SEQ ID NO: 22779 - DNA, 21 bp, Artificial Sequence
  Description of Artificial Sequence: Synthetic oligonucleotide
cagccgccgtatcttagtggt

SEQ ID NO: 22780 - DNA, 21 bp, Artificial Sequence
  Description of Artificial Sequence: Synthetic oligonucleotide
cagccgcagggtcgggagccg

SEQ ID NO: 22781 - DNA, 21 bp, Artificial Sequence
  Description of Artificial Sequence: Synthetic oligonucleotide
cagccgcgtgcggaggtgcct

SEQ ID NO: 22782 - DNA, 21 bp, Artificial Sequence
  Description of Artificial Sequence: Synthetic oligonucleotide
cagccgcgggatgctgggagt

SEQ ID NO: 22783 - DNA, 21 bp, Artificial Sequence
  Description of Artificial Sequence: Synthetic oligonucleotide
cagcctcggcttttggataat

SEQ ID NO: 22784 - DNA, 21 bp, Artificial Sequence
  Description of Artificial Sequence: Synthetic oligonucleotide
cagcctaggactctgtcgact

SEQ ID NO: 22785 - DNA, 21 bp, Artificial Sequence
  Description of Artificial Sequence: Synthetic oligonucleotide
cagccgtcggctgctgctcgg

SEQ ID NO: 22786 - DNA, 21 bp, Artificial Sequence
  Description of Artificial Sequence: Synthetic oligonucleotide
cagcctagtcatgggacgcct

SEQ ID NO: 22787 - DNA, 21 bp, Artificial Sequence
  Description of Artificial Sequence: Synthetic oligonucleotide
cagccgagtcttgtgacgctt

SEQ ID NO: 22788 - DNA, 21 bp, Artificial Sequence
  Description of Artificial Sequence: Synthetic oligonucleotide
cagccgagtatggagcctcag

SEQ ID NO: 22789 - DNA, 21 bp, Artificial Sequence
  Description of Artificial Sequence: Synthetic oligonucleotide
cagccttctatgcagtctgag

SEQ ID NO: 22790 - DNA, 21 bp, Artificial Sequence
  Description of Artificial Sequence: Synthetic oligonucleotide
cagccttcgaatatggggcat

SEQ ID NO: 22791 - DNA, 21 bp, Artificial Sequence
  Description of Artificial Sequence: Synthetic oligonucleotide
cagccttctcctgggtttcat

SEQ ID NO: 22792 - DNA, 21 bp, Artificial Sequence
  Description of Artificial Sequence: Synthetic oligonucleotide
cagcctagttctcatcctgtg

SEQ ID NO: 22793 - DNA, 21 bp, Artificial Sequence
  Description of Artificial Sequence: Synthetic oligonucleotide
cagcctactgatactctgtcg

SEQ ID NO: 22794 - DNA, 21 bp, Artificial Sequence
  Description of Artificial Sequence: Synthetic oligonucleotide
cagcctacgcctactcctcat

SEQ ID NO: 22795 - DNA, 21 bp, Artificial Sequence
  Description of Artificial Sequence: Synthetic oligonucleotide
cagcctgtgaatccgatgcat

SEQ ID NO: 22796 - DNA, 21 bp, Artificial Sequence
  Description of Artificial Sequence: Synthetic oligonucleotide
cagcctgtgaatcctcgggtg

SEQ ID NO: 22797 - DNA, 21 bp, Artificial Sequence
  Description of Artificial Sequence: Synthetic oligonucleotide
cagccggttgtgacgccgaag

SEQ ID NO: 22798 - DNA, 21 bp, Artificial Sequence
  Description of Artificial Sequence: Synthetic oligonucleotide
cagccttattcgagtagtctt

SEQ ID NO: 22799 - DNA, 21 bp, Artificial Sequence
  Description of Artificial Sequence: Synthetic oligonucleotide
cagcaggctgatgcgactatt

SEQ ID NO: 22800 - DNA, 21 bp, Artificial Sequence
  Description of Artificial Sequence: Synthetic oligonucleotide
cagcaggcgcttagtatggct

SEQ ID NO: 22801 - DNA, 21 bp, Artificial Sequence
  Description of Artificial Sequence: Synthetic oligonucleotide
cagcaggctccttatcggcct

SEQ ID NO: 22802 - DNA, 21 bp, Artificial Sequence
  Description of Artificial Sequence: Synthetic oligonucleotide
cagcaggaggtggctcgtttg

SEQ ID NO: 22803 - DNA, 21 bp, Artificial Sequence
  Description of Artificial Sequence: Synthetic oligonucleotide
cagcagggtcgttgtcctgat

SEQ ID NO: 22804 - DNA, 21 bp, Artificial Sequence
  Description of Artificial Sequence: Synthetic oligonucleotide
cagcagattattgagtcgttg

SEQ ID NO: 22805 - DNA, 21 bp, Artificial Sequence
  Description of Artificial Sequence: Synthetic oligonucleotide
cagcagaagatgagttatgat

SEQ ID NO: 22806 - DNA, 21 bp, Artificial Sequence
  Description of Artificial Sequence: Synthetic oligonucleotide
cagcagcgtttgatgggggag

SEQ ID NO: 22807 - DNA, 21 bp, Artificial Sequence
  Description of Artificial Sequence: Synthetic oligonucleotide
cagcagaggcttcagatgatg

SEQ ID NO: 22808 - DNA, 21 bp, Artificial Sequence
  Description of Artificial Sequence: Synthetic oligonucleotide
cagcagcgtagttctctgctg

SEQ ID NO: 22809 - DNA, 21 bp, Artificial Sequence
  Description of Artificial Sequence: Synthetic oligonucleotide
cagcagcgtgttaatcctgag

SEQ ID NO: 22810 - DNA, 21 bp, Artificial Sequence
  Description of Artificial Sequence: Synthetic oligonucleotide
cagcagtctaatcagacgaag

SEQ ID NO: 22811 - DNA, 21 bp, Artificial Sequence
  Description of Artificial Sequence: Synthetic oligonucleotide
cagcagacggctggttcggat

SEQ ID NO: 22812 - DNA, 21 bp, Artificial Sequence
  Description of Artificial Sequence: Synthetic oligonucleotide
cagcagactggttatttgcct

SEQ ID NO: 22813 - DNA, 21 bp, Artificial Sequence
  Description of Artificial Sequence: Synthetic oligonucleotide
cagcagactcatatgggttct

SEQ ID NO: 22814 - DNA, 21 bp, Artificial Sequence
  Description of Artificial Sequence: Synthetic oligonucleotide
cagcagacgaagcagctgcag

SEQ ID NO: 22815 - DNA, 21 bp, Artificial Sequence
  Description of Artificial Sequence: Synthetic oligonucleotide
cagcagacgaagtctacggct

SEQ ID NO: 22816 - DNA, 21 bp, Artificial Sequence
  Description of Artificial Sequence: Synthetic oligonucleotide
cagcagacgaatgatcggaat

SEQ ID NO: 22817 - DNA, 21 bp, Artificial Sequence
  Description of Artificial Sequence: Synthetic oligonucleotide
cagcagacgcgtacgtcgttg

SEQ ID NO: 22818 - DNA, 21 bp, Artificial Sequence
  Description of Artificial Sequence: Synthetic oligonucleotide
cagcagacttcggctcgggag

SEQ ID NO: 22819 - DNA, 21 bp, Artificial Sequence
  Description of Artificial Sequence: Synthetic oligonucleotide
cagcaggtgaagtctggggat

SEQ ID NO: 22820 - DNA, 21 bp, Artificial Sequence
  Description of Artificial Sequence: Synthetic oligonucleotide
cagcgtgctccggatgggtgg

SEQ ID NO: 22821 - DNA, 21 bp, Artificial Sequence
  Description of Artificial Sequence: Synthetic oligonucleotide
cagcgtgcgcctgagtcgatg

SEQ ID NO: 22822 - DNA, 21 bp, Artificial Sequence
  Description of Artificial Sequence: Synthetic oligonucleotide
cagagggctcagcttaattcg

SEQ ID NO: 22823 - DNA, 21 bp, Artificial Sequence
  Description of Artificial Sequence: Synthetic oligonucleotide
cagcgtgctgttgcgcctacg

SEQ ID NO: 22824 - DNA, 21 bp, Artificial Sequence
  Description of Artificial Sequence: Synthetic oligonucleotide
cagcgtgctgttcaggtgtat

SEQ ID NO: 22825 - DNA, 21 bp, Artificial Sequence
  Description of Artificial Sequence: Synthetic oligonucleotide
cagagggatgctcgtttggat

SEQ ID NO: 22826 - DNA, 21 bp, Artificial Sequence
  Description of Artificial Sequence: Synthetic oligonucleotide
cagcggggtaaggaggctcat

SEQ ID NO: 22827 - DNA, 21 bp, Artificial Sequence
  Description of Artificial Sequence: Synthetic oligonucleotide
cagcgggggcctgggaatcag

SEQ ID NO: 22828 - DNA, 21 bp, Artificial Sequence
  Description of Artificial Sequence: Synthetic oligonucleotide
cagagggggccgatggagctt

SEQ ID NO: 22829 - DNA, 21 bp, Artificial Sequence
  Description of Artificial Sequence: Synthetic oligonucleotide
cagcggattgggccggcgttg

SEQ ID NO: 22830 - DNA, 21 bp, Artificial Sequence
  Description of Artificial Sequence: Synthetic oligonucleotide
cagcggattccggttgatgtt

SEQ ID NO: 22831 - DNA, 21 bp, Artificial Sequence
  Description of Artificial Sequence: Synthetic oligonucleotide
cagcgtttggcttcgccttct

SEQ ID NO: 22832 - DNA, 21 bp, Artificial Sequence
  Description of Artificial Sequence: Synthetic oligonucleotide
cagcgtttgactgctcaggag

SEQ ID NO: 22833 - DNA, 21 bp, Artificial Sequence
  Description of Artificial Sequence: Synthetic oligonucleotide
cagaggatggctaatatgtcg

SEQ ID NO: 22834 - DNA, 21 bp, Artificial Sequence
  Description of Artificial Sequence: Synthetic oligonucleotide
cagaggatgacgcaggatatg

SEQ ID NO: 22835 - DNA, 21 bp, Artificial Sequence
  Description of Artificial Sequence: Synthetic oligonucleotide
cagcgtaattcgaatacgttt

SEQ ID NO: 22836 - DNA, 21 bp, Artificial Sequence
  Description of Artificial Sequence: Synthetic oligonucleotide
cagcggccggggctgcatatg

SEQ ID NO: 22837 - DNA, 21 bp, Artificial Sequence
  Description of Artificial Sequence: Synthetic oligonucleotide
cagcgtccgttggggggtttg

SEQ ID NO: 22838 - DNA, 21 bp, Artificial Sequence
  Description of Artificial Sequence: Synthetic oligonucleotide
cagcgtcctcctagtgttgat

SEQ ID NO: 22839 - DNA, 21 bp, Artificial Sequence
  Description of Artificial Sequence: Synthetic oligonucleotide
cagcgtccgactgatcggacg

SEQ ID NO: 22840 - DNA, 21 bp, Artificial Sequence
  Description of Artificial Sequence: Synthetic oligonucleotide
cagcgtcagcctgttttggat

SEQ ID NO: 22841 - DNA, 21 bp, Artificial Sequence
  Description of Artificial Sequence: Synthetic oligonucleotide
cagaggcagagggatcttcct

SEQ ID NO: 22842 - DNA, 21 bp, Artificial Sequence
  Description of Artificial Sequence: Synthetic oligonucleotide
cagaggtcggcgaatgtggcg

SEQ ID NO: 22843 - DNA, 21 bp, Artificial Sequence
  Description of Artificial Sequence: Synthetic oligonucleotide
cagcgttcgcatatgaatccg

SEQ ID NO: 22844 - DNA, 21 bp, Artificial Sequence
  Description of Artificial Sequence: Synthetic oligonucleotide
cagcggtcttctggtacgcct

SEQ ID NO: 22845 - DNA, 21 bp, Artificial Sequence
  Description of Artificial Sequence: Synthetic oligonucleotide
cagcggtcgactaatttgaat

SEQ ID NO: 22846 - DNA, 21 bp, Artificial Sequence
  Description of Artificial Sequence: Synthetic oligonucleotide
cagcggactgtgcatcagggt

SEQ ID NO: 22847 - DNA, 21 bp, Artificial Sequence
  Description of Artificial Sequence: Synthetic oligonucleotide
cagaggactgttcggggtgag

SEQ ID NO: 22848 - DNA, 21 bp, Artificial Sequence
  Description of Artificial Sequence: Synthetic oligonucleotide
cagcgtgtgaattctagtggt

SEQ ID NO: 22849 - DNA, 21 bp, Artificial Sequence
  Description of Artificial Sequence: Synthetic oligonucleotide
cagtcggctgatcttgattat

SEQ ID NO: 22850 - DNA, 21 bp, Artificial Sequence
  Description of Artificial Sequence: Synthetic oligonucleotide
cagtcggcggaggcggaggcg

SEQ ID NO: 22851 - DNA, 21 bp, Artificial Sequence
  Description of Artificial Sequence: Synthetic oligonucleotide
cagagtgctcatccggctacg

SEQ ID NO: 22852 - DNA, 21 bp, Artificial Sequence
  Description of Artificial Sequence: Synthetic oligonucleotide
cagtctgctccggttcgtgtt

SEQ ID NO: 22853 - DNA, 21 bp, Artificial Sequence
  Description of Artificial Sequence: Synthetic oligonucleotide
cagagtgcttcggctcttcag

SEQ ID NO: 22854 - DNA, 21 bp, Artificial Sequence
  Description of Artificial Sequence: Synthetic oligonucleotide
cagtcggcgtctgtgatgaat

SEQ ID NO: 22855 - DNA, 21 bp, Artificial Sequence
  Description of Artificial Sequence: Synthetic oligonucleotide
cagtcggctgttttggagtat

SEQ ID NO: 22856 - DNA, 21 bp, Artificial Sequence
  Description of Artificial Sequence: Synthetic oligonucleotide
cagtctgatgattggccggtg

SEQ ID NO: 22857 - DNA, 21 bp, Artificial Sequence
  Description of Artificial Sequence: Synthetic oligonucleotide
cagagtgatattcgtaatccg

SEQ ID NO: 22858 - DNA, 21 bp, Artificial Sequence
  Description of Artificial Sequence: Synthetic oligonucleotide
cagtctgattgggtgccggtt

SEQ ID NO: 22859 - DNA, 21 bp, Artificial Sequence
  Description of Artificial Sequence: Synthetic oligonucleotide
cagtctgagaaggggacttat

SEQ ID NO: 22860 - DNA, 21 bp, Artificial Sequence
  Description of Artificial Sequence: Synthetic oligonucleotide
cagtctgagatgatggatgcg

SEQ ID NO: 22861 - DNA, 21 bp, Artificial Sequence
  Description of Artificial Sequence: Synthetic oligonucleotide
cagtctgagcgtgcgactgtg

SEQ ID NO: 22862 - DNA, 21 bp, Artificial Sequence
  Description of Artificial Sequence: Synthetic oligonucleotide
cagtcgtttcatcatgagcgg

SEQ ID NO: 22863 - DNA, 21 bp, Artificial Sequence
  Description of Artificial Sequence: Synthetic oligonucleotide
cagtcgtttccgctgcaggcg

SEQ ID NO: 22864 - DNA, 21 bp, Artificial Sequence
  Description of Artificial Sequence: Synthetic oligonucleotide
cagtcggggcaggggatgtat

SEQ ID NO: 22865 - DNA, 21 bp, Artificial Sequence
  Description of Artificial Sequence: Synthetic oligonucleotide
cagagtgggcggtggcattgg

SEQ ID NO: 22866 - DNA, 21 bp, Artificial Sequence
  Description of Artificial Sequence: Synthetic oligonucleotide
cagtctggttcgtctgcgcgt

SEQ ID NO: 22867 - DNA, 21 bp, Artificial Sequence
  Description of Artificial Sequence: Synthetic oligonucleotide
cagagtcatccttttaatgat

SEQ ID NO: 22868 - DNA, 21 bp, Artificial Sequence
  Description of Artificial Sequence: Synthetic oligonucleotide
cagagtcatacgcagggtagt

SEQ ID NO: 22869 - DNA, 21 bp, Artificial Sequence
  Description of Artificial Sequence: Synthetic oligonucleotide
cagtctattgcggttacgatt

SEQ ID NO: 22870 - DNA, 21 bp, Artificial Sequence
  Description of Artificial Sequence: Synthetic oligonucleotide
cagtctattgtgattgcgcat

SEQ ID NO: 22871 - DNA, 21 bp, Artificial Sequence
  Description of Artificial Sequence: Synthetic oligonucleotide
cagagtaagctggcgagtctt

SEQ ID NO: 22872 - DNA, 21 bp, Artificial Sequence
  Description of Artificial Sequence: Synthetic oligonucleotide
cagagtaagctttatttggag

SEQ ID NO: 22873 - DNA, 21 bp, Artificial Sequence
  Description of Artificial Sequence: Synthetic oligonucleotide
cagtcgaagatgccgaattgg

SEQ ID NO: 22874 - DNA, 21 bp, Artificial Sequence
  Description of Artificial Sequence: Synthetic oligonucleotide
cagagtctgaatgatctgaag

SEQ ID NO: 22875 - DNA, 21 bp, Artificial Sequence
  Description of Artificial Sequence: Synthetic oligonucleotide
cagagtatgtcgtctacgttg

SEQ ID NO: 22876 - DNA, 21 bp, Artificial Sequence
  Description of Artificial Sequence: Synthetic oligonucleotide
cagtctaatcaggatcgtcag

SEQ ID NO: 22877 - DNA, 21 bp, Artificial Sequence
  Description of Artificial Sequence: Synthetic oligonucleotide
cagagtaattcgagtaatact

SEQ ID NO: 22878 - DNA, 21 bp, Artificial Sequence
  Description of Artificial Sequence: Synthetic oligonucleotide
cagtctcctggtcatccgagt

SEQ ID NO: 22879 - DNA, 21 bp, Artificial Sequence
  Description of Artificial Sequence: Synthetic oligonucleotide
cagagtcctaaggagtgttat

SEQ ID NO: 22880 - DNA, 21 bp, Artificial Sequence
  Description of Artificial Sequence: Synthetic oligonucleotide
cagtcgccgctttatgcgtcg

SEQ ID NO: 22881 - DNA, 21 bp, Artificial Sequence
  Description of Artificial Sequence: Synthetic oligonucleotide
cagtctccgaatttgccgctg

SEQ ID NO: 22882 - DNA, 21 bp, Artificial Sequence
  Description of Artificial Sequence: Synthetic oligonucleotide
cagagtccgcctagtactgat

SEQ ID NO: 22883 - DNA, 21 bp, Artificial Sequence
  Description of Artificial Sequence: Synthetic oligonucleotide
cagtcgccgcggaattatgtt

SEQ ID NO: 22884 - DNA, 21 bp, Artificial Sequence
  Description of Artificial Sequence: Synthetic oligonucleotide
cagtctcctactaatgatatg

SEQ ID NO: 22885 - DNA, 21 bp, Artificial Sequence
  Description of Artificial Sequence: Synthetic oligonucleotide
cagagtcaggcgccgcatggt

SEQ ID NO: 22886 - DNA, 21 bp, Artificial Sequence
  Description of Artificial Sequence: Synthetic oligonucleotide
cagtctcgtgatattcctacg

SEQ ID NO: 22887 - DNA, 21 bp, Artificial Sequence
  Description of Artificial Sequence: Synthetic oligonucleotide
cagagtcgtggggcgttgcct

SEQ ID NO: 22888 - DNA, 21 bp, Artificial Sequence
  Description of Artificial Sequence: Synthetic oligonucleotide
cagagtcggcttgggagtttt

SEQ ID NO: 22889 - DNA, 21 bp, Artificial Sequence
  Description of Artificial Sequence: Synthetic oligonucleotide
cagagtcgtacgatgacgccg

SEQ ID NO: 22890 - DNA, 21 bp, Artificial Sequence
  Description of Artificial Sequence: Synthetic oligonucleotide
cagtctcgtactccttctcct

SEQ ID NO: 22891 - DNA, 21 bp, Artificial Sequence
  Description of Artificial Sequence: Synthetic oligonucleotide
cagtcgtctgcgatttcttat

SEQ ID NO: 22892 - DNA, 21 bp, Artificial Sequence
  Description of Artificial Sequence: Synthetic oligonucleotide
cagtcgagtgcgcgtggtatg

SEQ ID NO: 22893 - DNA, 21 bp, Artificial Sequence
  Description of Artificial Sequence: Synthetic oligonucleotide
cagtcgagtgcgactcgtaat

SEQ ID NO: 22894 - DNA, 21 bp, Artificial Sequence
  Description of Artificial Sequence: Synthetic oligonucleotide
cagtctagtgctgttttgact

SEQ ID NO: 22895 - DNA, 21 bp, Artificial Sequence
  Description of Artificial Sequence: Synthetic oligonucleotide
cagtcgtcggatacgggggag

SEQ ID NO: 22896 - DNA, 21 bp, Artificial Sequence
  Description of Artificial Sequence: Synthetic oligonucleotide
cagagttctggtcagacggtt

SEQ ID NO: 22897 - DNA, 21 bp, Artificial Sequence
  Description of Artificial Sequence: Synthetic oligonucleotide
cagagtagtaagattgtgtat

SEQ ID NO: 22898 - DNA, 21 bp, Artificial Sequence
  Description of Artificial Sequence: Synthetic oligonucleotide
cagtcttctctttcgttgtcg

SEQ ID NO: 22899 - DNA, 21 bp, Artificial Sequence
  Description of Artificial Sequence: Synthetic oligonucleotide
cagtcgtctatgccgcagact

SEQ ID NO: 22900 - DNA, 21 bp, Artificial Sequence
  Description of Artificial Sequence: Synthetic oligonucleotide
cagtcttcgaattttcagtcg

SEQ ID NO: 22901 - DNA, 21 bp, Artificial Sequence
  Description of Artificial Sequence: Synthetic oligonucleotide
cagtcttctagggctatgggt

SEQ ID NO: 22902 - DNA, 21 bp, Artificial Sequence
  Description of Artificial Sequence: Synthetic oligonucleotide
cagtcgagtaggccgtcgcct

SEQ ID NO: 22903 - DNA, 21 bp, Artificial Sequence
  Description of Artificial Sequence: Synthetic oligonucleotide
cagtcgagtactttgcagtcg

SEQ ID NO: 22904 - DNA, 21 bp, Artificial Sequence
  Description of Artificial Sequence: Synthetic oligonucleotide
cagagtacggatcagaaggat

SEQ ID NO: 22905 - DNA, 21 bp, Artificial Sequence
  Description of Artificial Sequence: Synthetic oligonucleotide
cagtctacgggtgctttgcgt

SEQ ID NO: 22906 - DNA, 21 bp, Artificial Sequence
  Description of Artificial Sequence: Synthetic oligonucleotide
cagtctactaatgagagttcg

SEQ ID NO: 22907 - DNA, 21 bp, Artificial Sequence
  Description of Artificial Sequence: Synthetic oligonucleotide
cagagtacgcagctggatcat

SEQ ID NO: 22908 - DNA, 21 bp, Artificial Sequence
  Description of Artificial Sequence: Synthetic oligonucleotide
cagagtacgcagagtgataag

SEQ ID NO: 22909 - DNA, 21 bp, Artificial Sequence
  Description of Artificial Sequence: Synthetic oligonucleotide
cagtctactactaggcatcct

SEQ ID NO: 22910 - DNA, 21 bp, Artificial Sequence
  Description of Artificial Sequence: Synthetic oligonucleotide
cagtcgactgtgacggttcgg

SEQ ID NO: 22911 - DNA, 21 bp, Artificial Sequence
  Description of Artificial Sequence: Synthetic oligonucleotide
cagagtgtgcatagtcctctt

SEQ ID NO: 22912 - DNA, 21 bp, Artificial Sequence
  Description of Artificial Sequence: Synthetic oligonucleotide
cagtcggtgaagtatgatcgt

SEQ ID NO: 22913 - DNA, 21 bp, Artificial Sequence
  Description of Artificial Sequence: Synthetic oligonucleotide
cagtctgtgatgacggctccg

SEQ ID NO: 22914 - DNA, 21 bp, Artificial Sequence
  Description of Artificial Sequence: Synthetic oligonucleotide
cagagtgttaatgcggagctt

SEQ ID NO: 22915 - DNA, 21 bp, Artificial Sequence
  Description of Artificial Sequence: Synthetic oligonucleotide
cagtcggttccgctggctagt

SEQ ID NO: 22916 - DNA, 21 bp, Artificial Sequence
  Description of Artificial Sequence: Synthetic oligonucleotide
cagtcttatgaggcgcggggg

SEQ ID NO: 22917 - DNA, 21 bp, Artificial Sequence
  Description of Artificial Sequence: Synthetic oligonucleotide
cagagttataatgggctgggt

SEQ ID NO: 22918 - DNA, 21 bp, Artificial Sequence
  Description of Artificial Sequence: Synthetic oligonucleotide
cagacggcggggaggcttgct

SEQ ID NO: 22919 - DNA, 21 bp, Artificial Sequence
  Description of Artificial Sequence: Synthetic oligonucleotide
cagactgctaataagccggtg

SEQ ID NO: 22920 - DNA, 21 bp, Artificial Sequence
  Description of Artificial Sequence: Synthetic oligonucleotide
cagacggatggtgctaaggat

SEQ ID NO: 22921 - DNA, 21 bp, Artificial Sequence
  Description of Artificial Sequence: Synthetic oligonucleotide
cagacggatagggcgtatgtt

SEQ ID NO: 22922 - DNA, 21 bp, Artificial Sequence
  Description of Artificial Sequence: Synthetic oligonucleotide
cagactgatgtggatgatatg

SEQ ID NO: 22923 - DNA, 21 bp, Artificial Sequence
  Description of Artificial Sequence: Synthetic oligonucleotide
cagacttttgggggtccgggt

SEQ ID NO: 22924 - DNA, 21 bp, Artificial Sequence
  Description of Artificial Sequence: Synthetic oligonucleotide
cagacgggtgggcgttcgcct

SEQ ID NO: 22925 - DNA, 21 bp, Artificial Sequence
  Description of Artificial Sequence: Synthetic oligonucleotide
cagacgggtcttaatcaggat

SEQ ID NO: 22926 - DNA, 21 bp, Artificial Sequence
  Description of Artificial Sequence: Synthetic oligonucleotide
cagacgggtcctactcgtgat

SEQ ID NO: 22927 - DNA, 21 bp, Artificial Sequence
  Description of Artificial Sequence: Synthetic oligonucleotide
cagacggggcgtgagcctatg

SEQ ID NO: 22928 - DNA, 21 bp, Artificial Sequence
  Description of Artificial Sequence: Synthetic oligonucleotide
cagactggttcttcttatagt

SEQ ID NO: 22929 - DNA, 21 bp, Artificial Sequence
  Description of Artificial Sequence: Synthetic oligonucleotide
cagacgattcggacggaggat

SEQ ID NO: 22930 - DNA, 21 bp, Artificial Sequence
  Description of Artificial Sequence: Synthetic oligonucleotide
cagacgatttctaaggatccg

SEQ ID NO: 22931 - DNA, 21 bp, Artificial Sequence
  Description of Artificial Sequence: Synthetic oligonucleotide
cagacgaagcatggtgagagt

SEQ ID NO: 22932 - DNA, 21 bp, Artificial Sequence
  Description of Artificial Sequence: Synthetic oligonucleotide
cagacgaagaatacgcatcct

SEQ ID NO: 22933 - DNA, 21 bp, Artificial Sequence
  Description of Artificial Sequence: Synthetic oligonucleotide
cagactaagtctctgattcct

SEQ ID NO: 22934 - DNA, 21 bp, Artificial Sequence
  Description of Artificial Sequence: Synthetic oligonucleotide
cagacgctgcagcatgcgact

SEQ ID NO: 22935 - DNA, 21 bp, Artificial Sequence
  Description of Artificial Sequence: Synthetic oligonucleotide
cagacgctttcggggatgcgt

SEQ ID NO: 22936 - DNA, 21 bp, Artificial Sequence
  Description of Artificial Sequence: Synthetic oligonucleotide
cagactatgatgcctgtgccg

SEQ ID NO: 22937 - DNA, 21 bp, Artificial Sequence
  Description of Artificial Sequence: Synthetic oligonucleotide
cagactatgcggtctgctggt

SEQ ID NO: 22938 - DNA, 21 bp, Artificial Sequence
  Description of Artificial Sequence: Synthetic oligonucleotide
cagactaatatgcagtctcct

SEQ ID NO: 22939 - DNA, 21 bp, Artificial Sequence
  Description of Artificial Sequence: Synthetic oligonucleotide
cagactaatcctaatatggtt

SEQ ID NO: 22940 - DNA, 21 bp, Artificial Sequence
  Description of Artificial Sequence: Synthetic oligonucleotide
cagacgaatactgcgacgaag

SEQ ID NO: 22941 - DNA, 21 bp, Artificial Sequence
  Description of Artificial Sequence: Synthetic oligonucleotide
cagactcctccttcggcggcg

SEQ ID NO: 22942 - DNA, 21 bp, Artificial Sequence
  Description of Artificial Sequence: Synthetic oligonucleotide
cagactcctcctacgaatcgt

SEQ ID NO: 22943 - DNA, 21 bp, Artificial Sequence
  Description of Artificial Sequence: Synthetic oligonucleotide
cagacgccgcgtgttattcag

SEQ ID NO: 22944 - DNA, 21 bp, Artificial Sequence
  Description of Artificial Sequence: Synthetic oligonucleotide
cagacgccttcgatgactcgt

SEQ ID NO: 22945 - DNA, 21 bp, Artificial Sequence
  Description of Artificial Sequence: Synthetic oligonucleotide
cagactccgtcttatcttggt

SEQ ID NO: 22946 - DNA, 21 bp, Artificial Sequence
  Description of Artificial Sequence: Synthetic oligonucleotide
cagactcagattagggtgggt

SEQ ID NO: 22947 - DNA, 21 bp, Artificial Sequence
  Description of Artificial Sequence: Synthetic oligonucleotide
cagactcagcctcagtcgtct

SEQ ID NO: 22948 - DNA, 21 bp, Artificial Sequence
  Description of Artificial Sequence: Synthetic oligonucleotide
cagacgcagagtttgtatcct

SEQ ID NO: 22949 - DNA, 21 bp, Artificial Sequence
  Description of Artificial Sequence: Synthetic oligonucleotide
cagactcagtcgcctgttcct

SEQ ID NO: 22950 - DNA, 21 bp, Artificial Sequence
  Description of Artificial Sequence: Synthetic oligonucleotide
cagactcaggttagttatggt

SEQ ID NO: 22951 - DNA, 21 bp, Artificial Sequence
  Description of Artificial Sequence: Synthetic oligonucleotide
cagactaggcatgatctgctt

SEQ ID NO: 22952 - DNA, 21 bp, Artificial Sequence
  Description of Artificial Sequence: Synthetic oligonucleotide
cagacgaggttggctcagcat

SEQ ID NO: 22953 - DNA, 21 bp, Artificial Sequence
  Description of Artificial Sequence: Synthetic oligonucleotide
cagacgcggctgccggcttcg

SEQ ID NO: 22954 - DNA, 21 bp, Artificial Sequence
  Description of Artificial Sequence: Synthetic oligonucleotide
cagacttcggctgcgcgggtg

SEQ ID NO: 22955 - DNA, 21 bp, Artificial Sequence
  Description of Artificial Sequence: Synthetic oligonucleotide
cagacttctcctggggttatg

SEQ ID NO: 22956 - DNA, 21 bp, Artificial Sequence
  Description of Artificial Sequence: Synthetic oligonucleotide
cagacgagtacggataatgct

SEQ ID NO: 22957 - DNA, 21 bp, Artificial Sequence
  Description of Artificial Sequence: Synthetic oligonucleotide
cagactagtgttcatcttaag

SEQ ID NO: 22958 - DNA, 21 bp, Artificial Sequence
  Description of Artificial Sequence: Synthetic oligonucleotide
cagactacggctagggcgcag

SEQ ID NO: 22959 - DNA, 21 bp, Artificial Sequence
  Description of Artificial Sequence: Synthetic oligonucleotide
cagactgtgcatgcgtttggt

SEQ ID NO: 22960 - DNA, 21 bp, Artificial Sequence
  Description of Artificial Sequence: Synthetic oligonucleotide
cagactgtgcggcttacttcg

SEQ ID NO: 22961 - DNA, 21 bp, Artificial Sequence
  Description of Artificial Sequence: Synthetic oligonucleotide
cagactgtttctgcgcttggt

SEQ ID NO: 22962 - DNA, 21 bp, Artificial Sequence
  Description of Artificial Sequence: Synthetic oligonucleotide
cagacttatgatcctgctagt

SEQ ID NO: 22963 - DNA, 21 bp, Artificial Sequence
  Description of Artificial Sequence: Synthetic oligonucleotide
cagacttatcatacgctggag

SEQ ID NO: 22964 - DNA, 21 bp, Artificial Sequence
  Description of Artificial Sequence: Synthetic oligonucleotide
cagacttatccgacgatggag

SEQ ID NO: 22965 - DNA, 21 bp, Artificial Sequence
  Description of Artificial Sequence: Synthetic oligonucleotide
caggttgctggtatgaagttt

SEQ ID NO: 22966 - DNA, 21 bp, Artificial Sequence
  Description of Artificial Sequence: Synthetic oligonucleotide
caggttgcttctccttatcgg

SEQ ID NO: 22967 - DNA, 21 bp, Artificial Sequence
  Description of Artificial Sequence: Synthetic oligonucleotide
caggttgatcgttctcctcat

SEQ ID NO: 22968 - DNA, 21 bp, Artificial Sequence
  Description of Artificial Sequence: Synthetic oligonucleotide
caggttgagcatgggcagact

SEQ ID NO: 22969 - DNA, 21 bp, Artificial Sequence
  Description of Artificial Sequence: Synthetic oligonucleotide
caggtggagcgtgaggcttgg

SEQ ID NO: 22970 - DNA, 21 bp, Artificial Sequence
  Description of Artificial Sequence: Synthetic oligonucleotide
caggttggtggtcgtgctttt

SEQ ID NO: 22971 - DNA, 21 bp, Artificial Sequence
  Description of Artificial Sequence: Synthetic oligonucleotide
caggtgggtaaggttacgttg

SEQ ID NO: 22972 - DNA, 21 bp, Artificial Sequence
  Description of Artificial Sequence: Synthetic oligonucleotide
caggtgggtgtgaagaatggg

SEQ ID NO: 22973 - DNA, 21 bp, Artificial Sequence
  Description of Artificial Sequence: Synthetic oligonucleotide
caggttctgaatgggagggag

SEQ ID NO: 22974 - DNA, 21 bp, Artificial Sequence
  Description of Artificial Sequence: Synthetic oligonucleotide
caggtgatgccgaatgtgtcg

SEQ ID NO: 22975 - DNA, 21 bp, Artificial Sequence
  Description of Artificial Sequence: Synthetic oligonucleotide
caggttccgtttccggcggat

SEQ ID NO: 22976 - DNA, 21 bp, Artificial Sequence
  Description of Artificial Sequence: Synthetic oligonucleotide
caggttcctctgtctttggag

SEQ ID NO: 22977 - DNA, 21 bp, Artificial Sequence
  Description of Artificial Sequence: Synthetic oligonucleotide
caggttccgtatgctccggcg

SEQ ID NO: 22978 - DNA, 21 bp, Artificial Sequence
  Description of Artificial Sequence: Synthetic oligonucleotide
caggtgcagcctgtgcatatt

SEQ ID NO: 22979 - DNA, 21 bp, Artificial Sequence
  Description of Artificial Sequence: Synthetic oligonucleotide
caggttcgtgctgctgtgact

SEQ ID NO: 22980 - DNA, 21 bp, Artificial Sequence
  Description of Artificial Sequence: Synthetic oligonucleotide
caggtgagggattcttattcg

SEQ ID NO: 22981 - DNA, 21 bp, Artificial Sequence
  Description of Artificial Sequence: Synthetic oligonucleotide
caggtgcgtgagcctgctatt

SEQ ID NO: 22982 - DNA, 21 bp, Artificial Sequence
  Description of Artificial Sequence: Synthetic oligonucleotide
caggtgcgtgagtcgtcttcg

SEQ ID NO: 22983 - DNA, 21 bp, Artificial Sequence
  Description of Artificial Sequence: Synthetic oligonucleotide
caggttcgtctggagccgagt

SEQ ID NO: 22984 - DNA, 21 bp, Artificial Sequence
  Description of Artificial Sequence: Synthetic oligonucleotide
caggttcggccggggcttctt

SEQ ID NO: 22985 - DNA, 21 bp, Artificial Sequence
  Description of Artificial Sequence: Synthetic oligonucleotide
caggtgtctcatcgggatagt

SEQ ID NO: 22986 - DNA, 21 bp, Artificial Sequence
  Description of Artificial Sequence: Synthetic oligonucleotide
caggtgtcgcttggtagtgtt

SEQ ID NO: 22987 - DNA, 21 bp, Artificial Sequence
  Description of Artificial Sequence: Synthetic oligonucleotide
caggtgtctccgagtcttaat

SEQ ID NO: 22988 - DNA, 21 bp, Artificial Sequence
  Description of Artificial Sequence: Synthetic oligonucleotide
caggtgtcttctcctgttcct

SEQ ID NO: 22989 - DNA, 21 bp, Artificial Sequence
  Description of Artificial Sequence: Synthetic oligonucleotide
caggtgactaagtctcatact

SEQ ID NO: 22990 - DNA, 21 bp, Artificial Sequence
  Description of Artificial Sequence: Synthetic oligonucleotide
caggttgtggcgtcgttgggg

SEQ ID NO: 22991 - DNA, 21 bp, Artificial Sequence
  Description of Artificial Sequence: Synthetic oligonucleotide
caggttgttcctcatcaggag

SEQ ID NO: 22992 - DNA, 21 bp, Artificial Sequence
  Description of Artificial Sequence: Synthetic oligonucleotide
caggttgtgcggtcgagttcg

SEQ ID NO: 22993 - DNA, 21 bp, Artificial Sequence
  Description of Artificial Sequence: Synthetic oligonucleotide
caggtttatactaatcagtat

SEQ ID NO: 22994 - DNA, 21 bp, Artificial Sequence
  Description of Artificial Sequence: Synthetic oligonucleotide
cagtgggcgaatactggtgag

SEQ ID NO: 22995 - DNA, 21 bp, Artificial Sequence
  Description of Artificial Sequence: Synthetic oligonucleotide
cagtgggaggatcattcgacg

SEQ ID NO: 22996 - DNA, 21 bp, Artificial Sequence
  Description of Artificial Sequence: Synthetic oligonucleotide
cagtatggggatgggcctaag

SEQ ID NO: 22997 - DNA, 21 bp, Artificial Sequence
  Description of Artificial Sequence: Synthetic oligonucleotide
cagtatggtcagcagcattct

SEQ ID NO: 22998 - DNA, 21 bp, Artificial Sequence
  Description of Artificial Sequence: Synthetic oligonucleotide
cagtatggtagtgttcatggg

SEQ ID NO: 22999 - DNA, 21 bp, Artificial Sequence
  Description of Artificial Sequence: Synthetic oligonucleotide
cagtatcatgctagtgggaag

SEQ ID NO: 23000 - DNA, 21 bp, Artificial Sequence
  Description of Artificial Sequence: Synthetic oligonucleotide
cagtataagcgggcggagctt

SEQ ID NO: 23001 - DNA, 21 bp, Artificial Sequence
  Description of Artificial Sequence: Synthetic oligonucleotide
cagtataagactgatatgact

SEQ ID NO: 23002 - DNA, 21 bp, Artificial Sequence
  Description of Artificial Sequence: Synthetic oligonucleotide
cagtataagactggggcgcag

SEQ ID NO: 23003 - DNA, 21 bp, Artificial Sequence
  Description of Artificial Sequence: Synthetic oligonucleotide
cagtatctggcgactcatggg

SEQ ID NO: 23004 - DNA, 21 bp, Artificial Sequence
  Description of Artificial Sequence: Synthetic oligonucleotide
cagtatcctaattctgatacg

SEQ ID NO: 23005 - DNA, 21 bp, Artificial Sequence
  Description of Artificial Sequence: Synthetic oligonucleotide
cagtatccggtttcgccgtcg

SEQ ID NO: 23006 - DNA, 21 bp, Artificial Sequence
  Description of Artificial Sequence: Synthetic oligonucleotide
cagtatactgcttcgaattct

SEQ ID NO: 23007 - DNA, 21 bp, Artificial Sequence
  Description of Artificial Sequence: Synthetic oligonucleotide
cagtatactgggactcagaag

SEQ ID NO: 23008 - DNA, 21 bp, Artificial Sequence
  Description of Artificial Sequence: Synthetic oligonucleotide
cagtatactgttctgacggag

SEQ ID NO: 23009 - DNA, 21 bp, Artificial Sequence
  Description of Artificial Sequence: Synthetic oligonucleotide
cagtatgttggtattgggact

SEQ ID NO: 23010 - DNA, 21 bp, Artificial Sequence
  Description of Artificial Sequence: Synthetic oligonucleotide
agggctgcggcttatggggct

SEQ ID NO: 23011 - DNA, 21 bp, Artificial Sequence
  Description of Artificial Sequence: Synthetic oligonucleotide
cgtgcggctatgatgaatcct

SEQ ID NO: 23012 - DNA, 21 bp, Artificial Sequence
  Description of Artificial Sequence: Synthetic oligonucleotide
agggctgctatggttgcggtt

SEQ ID NO: 23013 - DNA, 21 bp, Artificial Sequence
  Description of Artificial Sequence: Synthetic oligonucleotide
cgggcggcgaatgattttccg

SEQ ID NO: 23014 - DNA, 21 bp, Artificial Sequence
  Description of Artificial Sequence: Synthetic oligonucleotide
agggctgcgcctacgtcgagt

SEQ ID NO: 23015 - DNA, 21 bp, Artificial Sequence
  Description of Artificial Sequence: Synthetic oligonucleotide
cgtgctgctactgtgcctaat

SEQ ID NO: 23016 - DNA, 21 bp, Artificial Sequence
  Description of Artificial Sequence: Synthetic oligonucleotide
cgggcggataagggtccgtct

SEQ ID NO: 23017 - DNA, 21 bp, Artificial Sequence
  Description of Artificial Sequence: Synthetic oligonucleotide
agggcggatccgaggcctggg

SEQ ID NO: 23018 - DNA, 21 bp, Artificial Sequence
  Description of Artificial Sequence: Synthetic oligonucleotide
cgggctgatagggcgacgtat

SEQ ID NO: 23019 - DNA, 21 bp, Artificial Sequence
  Description of Artificial Sequence: Synthetic oligonucleotide
cgtgctgatgttcctcctgtt

SEQ ID NO: 23020 - DNA, 21 bp, Artificial Sequence
  Description of Artificial Sequence: Synthetic oligonucleotide
agggctgattatcatcataat

SEQ ID NO: 23021 - DNA, 21 bp, Artificial Sequence
  Description of Artificial Sequence: Synthetic oligonucleotide
cgtgctgaggcggtttgggat

SEQ ID NO: 23022 - DNA, 21 bp, Artificial Sequence
  Description of Artificial Sequence: Synthetic oligonucleotide
cgggcggagaatatttcgagg

SEQ ID NO: 23023 - DNA, 21 bp, Artificial Sequence
  Description of Artificial Sequence: Synthetic oligonucleotide
agggctgagagtttgcttggt

SEQ ID NO: 23024 - DNA, 21 bp, Artificial Sequence
  Description of Artificial Sequence: Synthetic oligonucleotide
cgtgctgaggtgttgtatacg

SEQ ID NO: 23025 - DNA, 21 bp, Artificial Sequence
  Description of Artificial Sequence: Synthetic oligonucleotide
cgtgcggagtatcagtctccg

SEQ ID NO: 23026 - DNA, 21 bp, Artificial Sequence
  Description of Artificial Sequence: Synthetic oligonucleotide
cgtgcttttggtcagtcgcct

SEQ ID NO: 23027 - DNA, 21 bp, Artificial Sequence
  Description of Artificial Sequence: Synthetic oligonucleotide
cgggcgtttccgaatgatagt

SEQ ID NO: 23028 - DNA, 21 bp, Artificial Sequence
  Description of Artificial Sequence: Synthetic oligonucleotide
cgtgctttttctcaggcggag

SEQ ID NO: 23029 - DNA, 21 bp, Artificial Sequence
  Description of Artificial Sequence: Synthetic oligonucleotide
cgtgctgggctgtctccgaat

SEQ ID NO: 23030 - DNA, 21 bp, Artificial Sequence
  Description of Artificial Sequence: Synthetic oligonucleotide
agggctgggcctgtgagtact

SEQ ID NO: 23031 - DNA, 21 bp, Artificial Sequence
  Description of Artificial Sequence: Synthetic oligonucleotide
cgggctggttcttatgagtct

SEQ ID NO: 23032 - DNA, 21 bp, Artificial Sequence
  Description of Artificial Sequence: Synthetic oligonucleotide
agggctggtgttcagtgtatt

SEQ ID NO: 23033 - DNA, 21 bp, Artificial Sequence
  Description of Artificial Sequence: Synthetic oligonucleotide
agggcgcatgggagtggtgct

SEQ ID NO: 23034 - DNA, 21 bp, Artificial Sequence
  Description of Artificial Sequence: Synthetic oligonucleotide
agggcgattgcgcaggcggtg

SEQ ID NO: 23035 - DNA, 21 bp, Artificial Sequence
  Description of Artificial Sequence: Synthetic oligonucleotide
cgtgctattgatttgcctaag

SEQ ID NO: 23036 - DNA, 21 bp, Artificial Sequence
  Description of Artificial Sequence: Synthetic oligonucleotide
cgtgcgattgattctgtgcct

SEQ ID NO: 23037 - DNA, 21 bp, Artificial Sequence
  Description of Artificial Sequence: Synthetic oligonucleotide
cgggctattaagagtgatcct

SEQ ID NO: 23038 - DNA, 21 bp, Artificial Sequence
  Description of Artificial Sequence: Synthetic oligonucleotide
agggctattcctacgccgggt

SEQ ID NO: 23039 - DNA, 21 bp, Artificial Sequence
  Description of Artificial Sequence: Synthetic oligonucleotide
cgtgcgttggatgttaatgcg

SEQ ID NO: 23040 - DNA, 21 bp, Artificial Sequence
  Description of Artificial Sequence: Synthetic oligonucleotide
cgtgctctgcttaatttgcag

SEQ ID NO: 23041 - DNA, 21 bp, Artificial Sequence
  Description of Artificial Sequence: Synthetic oligonucleotide
cgtgctctgcagactacgagt

SEQ ID NO: 23042 - DNA, 21 bp, Artificial Sequence
  Description of Artificial Sequence: Synthetic oligonucleotide
agggcgctttctgcgaatgtt

SEQ ID NO: 23043 - DNA, 21 bp, Artificial Sequence
  Description of Artificial Sequence: Synthetic oligonucleotide
cgtgctctgtcttcgcttccg

SEQ ID NO: 23044 - DNA, 21 bp, Artificial Sequence
  Description of Artificial Sequence: Synthetic oligonucleotide
cgtgctcttacggatcttgtt

SEQ ID NO: 23045 - DNA, 21 bp, Artificial Sequence
  Description of Artificial Sequence: Synthetic oligonucleotide
cgggcgatgggtaatgttttg

SEQ ID NO: 23046 - DNA, 21 bp, Artificial Sequence
  Description of Artificial Sequence: Synthetic oligonucleotide
cgtgcgatgcttgatcgtgct

SEQ ID NO: 23047 - DNA, 21 bp, Artificial Sequence
  Description of Artificial Sequence: Synthetic oligonucleotide
agggcgatgccgggtgaggtt

SEQ ID NO: 23048 - DNA, 21 bp, Artificial Sequence
  Description of Artificial Sequence: Synthetic oligonucleotide
cgggcgatgcctccttcttcg

SEQ ID NO: 23049 - DNA, 21 bp, Artificial Sequence
  Description of Artificial Sequence: Synthetic oligonucleotide
agggctaatgatcctcctccg

SEQ ID NO: 23050 - DNA, 21 bp, Artificial Sequence
  Description of Artificial Sequence: Synthetic oligonucleotide
cgtgctaatctgaatattcct

SEQ ID NO: 23051 - DNA, 21 bp, Artificial Sequence
  Description of Artificial Sequence: Synthetic oligonucleotide
agggcgccggagacggagttg

SEQ ID NO: 23052 - DNA, 21 bp, Artificial Sequence
  Description of Artificial Sequence: Synthetic oligonucleotide
cgtgcgcctcctagtcctaag

SEQ ID NO: 23053 - DNA, 21 bp, Artificial Sequence
  Description of Artificial Sequence: Synthetic oligonucleotide
cgtgctccgcaggggtctacg

SEQ ID NO: 23054 - DNA, 21 bp, Artificial Sequence
  Description of Artificial Sequence: Synthetic oligonucleotide
cgtgctccgcagggttatggt

SEQ ID NO: 23055 - DNA, 21 bp, Artificial Sequence
  Description of Artificial Sequence: Synthetic oligonucleotide
cgggctccgcgtcctattgag

SEQ ID NO: 23056 - DNA, 21 bp, Artificial Sequence
  Description of Artificial Sequence: Synthetic oligonucleotide
cgtgctcctgttagtcctatg

SEQ ID NO: 23057 - DNA, 21 bp, Artificial Sequence
  Description of Artificial Sequence: Synthetic oligonucleotide
cgggcgcagccgtctctgcat

SEQ ID NO: 23058 - DNA, 21 bp, Artificial Sequence
  Description of Artificial Sequence: Synthetic oligonucleotide
agggcgcagtcgccgttgtcg

SEQ ID NO: 23059 - DNA, 21 bp, Artificial Sequence
  Description of Artificial Sequence: Synthetic oligonucleotide
cgtgctcagactactctttct

SEQ ID NO: 23060 - DNA, 21 bp, Artificial Sequence
  Description of Artificial Sequence: Synthetic oligonucleotide
cgtgcgcagtattcgcaggat

SEQ ID NO: 23061 - DNA, 21 bp, Artificial Sequence
  Description of Artificial Sequence: Synthetic oligonucleotide
cgtgcgcagtatacgggtaat

SEQ ID NO: 23062 - DNA, 21 bp, Artificial Sequence
  Description of Artificial Sequence: Synthetic oligonucleotide
cgggcttcgtttccgcctgat

SEQ ID NO: 23063 - DNA, 21 bp, Artificial Sequence
  Description of Artificial Sequence: Synthetic oligonucleotide
cgggcgagtcatgatacgaat

SEQ ID NO: 23064 - DNA, 21 bp, Artificial Sequence
  Description of Artificial Sequence: Synthetic oligonucleotide
cgtgcttcgcttcgtgtggag

SEQ ID NO: 23065 - DNA, 21 bp, Artificial Sequence
  Description of Artificial Sequence: Synthetic oligonucleotide
agggcgtctaatcggccggat

SEQ ID NO: 23066 - DNA, 21 bp, Artificial Sequence
  Description of Artificial Sequence: Synthetic oligonucleotide
cgtgcgagtccgacgactagt

SEQ ID NO: 23067 - DNA, 21 bp, Artificial Sequence
  Description of Artificial Sequence: Synthetic oligonucleotide
cgggcttcttcggagttgccg

SEQ ID NO: 23068 - DNA, 21 bp, Artificial Sequence
  Description of Artificial Sequence: Synthetic oligonucleotide
agggcttcttctagtgaggat

SEQ ID NO: 23069 - DNA, 21 bp, Artificial Sequence
  Description of Artificial Sequence: Synthetic oligonucleotide
cgggcgagttctgttgatatg

SEQ ID NO: 23070 - DNA, 21 bp, Artificial Sequence
  Description of Artificial Sequence: Synthetic oligonucleotide
cgggcttctacgggtatggct

SEQ ID NO: 23071 - DNA, 21 bp, Artificial Sequence
  Description of Artificial Sequence: Synthetic oligonucleotide
agggctagtacgcatacgctt

SEQ ID NO: 23072 - DNA, 21 bp, Artificial Sequence
  Description of Artificial Sequence: Synthetic oligonucleotide
agggctacggagcattcgttt

SEQ ID NO: 23073 - DNA, 21 bp, Artificial Sequence
  Description of Artificial Sequence: Synthetic oligonucleotide
agggctacggagccggcgttt

SEQ ID NO: 23074 - DNA, 21 bp, Artificial Sequence
  Description of Artificial Sequence: Synthetic oligonucleotide
cgtgcgactctgccgaagact

SEQ ID NO: 23075 - DNA, 21 bp, Artificial Sequence
  Description of Artificial Sequence: Synthetic oligonucleotide
cgtgcgacgaatgatcgtgct

SEQ ID NO: 23076 - DNA, 21 bp, Artificial Sequence
  Description of Artificial Sequence: Synthetic oligonucleotide
cgggctactaatgatagtact

SEQ ID NO: 23077 - DNA, 21 bp, Artificial Sequence
  Description of Artificial Sequence: Synthetic oligonucleotide
cgggctacgaatactattctt

SEQ ID NO: 23078 - DNA, 21 bp, Artificial Sequence
  Description of Artificial Sequence: Synthetic oligonucleotide
cgtgctacgacgtcgacgttt

SEQ ID NO: 23079 - DNA, 21 bp, Artificial Sequence
  Description of Artificial Sequence: Synthetic oligonucleotide
cgtgctgtggaggataggcat

SEQ ID NO: 23080 - DNA, 21 bp, Artificial Sequence
  Description of Artificial Sequence: Synthetic oligonucleotide
cgggcggtgcttaatattggt

SEQ ID NO: 23081 - DNA, 21 bp, Artificial Sequence
  Description of Artificial Sequence: Synthetic oligonucleotide
cgggcggttcagcctatgctt

SEQ ID NO: 23082 - DNA, 21 bp, Artificial Sequence
  Description of Artificial Sequence: Synthetic oligonucleotide
agggctgtgagtcttcaggct

SEQ ID NO: 23083 - DNA, 21 bp, Artificial Sequence
  Description of Artificial Sequence: Synthetic oligonucleotide
cgggctgtgtatcagacgcag

SEQ ID NO: 23084 - DNA, 21 bp, Artificial Sequence
  Description of Artificial Sequence: Synthetic oligonucleotide
agggcgtatgggccgacgaat

SEQ ID NO: 23085 - DNA, 21 bp, Artificial Sequence
  Description of Artificial Sequence: Synthetic oligonucleotide
cgggcgtatatgactgatcct

SEQ ID NO: 23086 - DNA, 21 bp, Artificial Sequence
  Description of Artificial Sequence: Synthetic oligonucleotide
agggcgtataatgctgttgtt

SEQ ID NO: 23087 - DNA, 21 bp, Artificial Sequence
  Description of Artificial Sequence: Synthetic oligonucleotide
cgggcttatcctgtggatgat

SEQ ID NO: 23088 - DNA, 21 bp, Artificial Sequence
  Description of Artificial Sequence: Synthetic oligonucleotide
cgggatgctgcgtcttcttgt

SEQ ID NO: 23089 - DNA, 21 bp, Artificial Sequence
  Description of Artificial Sequence: Synthetic oligonucleotide
cgtgatgattcttcgcttctg

SEQ ID NO: 23090 - DNA, 21 bp, Artificial Sequence
  Description of Artificial Sequence: Synthetic oligonucleotide
cgggatgatgtgcgtacttat

SEQ ID NO: 23091 - DNA, 21 bp, Artificial Sequence
  Description of Artificial Sequence: Synthetic oligonucleotide
cgggatggggagatggatccg

SEQ ID NO: 23092 - DNA, 21 bp, Artificial Sequence
  Description of Artificial Sequence: Synthetic oligonucleotide
cgggatgggaagtgggtggct

SEQ ID NO: 23093 - DNA, 21 bp, Artificial Sequence
  Description of Artificial Sequence: Synthetic oligonucleotide
cgggatgggcagcatacgtcg

SEQ ID NO: 23094 - DNA, 21 bp, Artificial Sequence
  Description of Artificial Sequence: Synthetic oligonucleotide
agggatcatttgactgttgct

SEQ ID NO: 23095 - DNA, 21 bp, Artificial Sequence
  Description of Artificial Sequence: Synthetic oligonucleotide
agggatattgcggctaagact

SEQ ID NO: 23096 - DNA, 21 bp, Artificial Sequence
  Description of Artificial Sequence: Synthetic oligonucleotide
cgtgataagtctgatcatgct

SEQ ID NO: 23097 - DNA, 21 bp, Artificial Sequence
  Description of Artificial Sequence: Synthetic oligonucleotide
cgtgatctgaagacgcagtcg

SEQ ID NO: 23098 - DNA, 21 bp, Artificial Sequence
  Description of Artificial Sequence: Synthetic oligonucleotide
agggatctgcagcatctttct

SEQ ID NO: 23099 - DNA, 21 bp, Artificial Sequence
  Description of Artificial Sequence: Synthetic oligonucleotide
cgtgatctgtctagtgagtct

SEQ ID NO: 23100 - DNA, 21 bp, Artificial Sequence
  Description of Artificial Sequence: Synthetic oligonucleotide
agggataataaggcgaatatt

SEQ ID NO: 23101 - DNA, 21 bp, Artificial Sequence
  Description of Artificial Sequence: Synthetic oligonucleotide
cgtgataattcgagtgtggtg

SEQ ID NO: 23102 - DNA, 21 bp, Artificial Sequence
  Description of Artificial Sequence: Synthetic oligonucleotide
cgtgatcctaatattaatcct

SEQ ID NO: 23103 - DNA, 21 bp, Artificial Sequence
  Description of Artificial Sequence: Synthetic oligonucleotide
cgtgatcctcgggcggggttt

SEQ ID NO: 23104 - DNA, 21 bp, Artificial Sequence
  Description of Artificial Sequence: Synthetic oligonucleotide
cgtgatcctagggctcatctt

SEQ ID NO: 23105 - DNA, 21 bp, Artificial Sequence
  Description of Artificial Sequence: Synthetic oligonucleotide
agggatccgcggggtcagggg

SEQ ID NO: 23106 - DNA, 21 bp, Artificial Sequence
  Description of Artificial Sequence: Synthetic oligonucleotide
cgggatcaggctagtaagaat

SEQ ID NO: 23107 - DNA, 21 bp, Artificial Sequence
  Description of Artificial Sequence: Synthetic oligonucleotide
cgtgatcagggtcttgagtcg

SEQ ID NO: 23108 - DNA, 21 bp, Artificial Sequence
  Description of Artificial Sequence: Synthetic oligonucleotide
agggatcaggttgctacgcct

SEQ ID NO: 23109 - DNA, 21 bp, Artificial Sequence
  Description of Artificial Sequence: Synthetic oligonucleotide
cgggatcgggatccgacgtcg

SEQ ID NO: 23110 - DNA, 21 bp, Artificial Sequence
  Description of Artificial Sequence: Synthetic oligonucleotide
cgtgatcgggagccggcgctt

SEQ ID NO: 23111 - DNA, 21 bp, Artificial Sequence
  Description of Artificial Sequence: Synthetic oligonucleotide
cgggatcgtgaggtgtcgtgg

SEQ ID NO: 23112 - DNA, 21 bp, Artificial Sequence
  Description of Artificial Sequence: Synthetic oligonucleotide
cgtgattcggcgtttgctgtg

SEQ ID NO: 23113 - DNA, 21 bp, Artificial Sequence
  Description of Artificial Sequence: Synthetic oligonucleotide
agggatagtaagagtaattct

SEQ ID NO: 23114 - DNA, 21 bp, Artificial Sequence
  Description of Artificial Sequence: Synthetic oligonucleotide
cgggattctaaggtttctcat

SEQ ID NO: 23115 - DNA, 21 bp, Artificial Sequence
  Description of Artificial Sequence: Synthetic oligonucleotide
cgggattctcttgagactcag

SEQ ID NO: 23116 - DNA, 21 bp, Artificial Sequence
  Description of Artificial Sequence: Synthetic oligonucleotide
cgtgatagtatgttggttgcg

SEQ ID NO: 23117 - DNA, 21 bp, Artificial Sequence
  Description of Artificial Sequence: Synthetic oligonucleotide
cgtgatagtatgcctgctgct

SEQ ID NO: 23118 - DNA, 21 bp, Artificial Sequence
  Description of Artificial Sequence: Synthetic oligonucleotide
agggatagtcgtatgctgtct

SEQ ID NO: 23119 - DNA, 21 bp, Artificial Sequence
  Description of Artificial Sequence: Synthetic oligonucleotide
agggatagttctcattttccg

SEQ ID NO: 23120 - DNA, 21 bp, Artificial Sequence
  Description of Artificial Sequence: Synthetic oligonucleotide
agggattctagtctgtatttg

SEQ ID NO: 23121 - DNA, 21 bp, Artificial Sequence
  Description of Artificial Sequence: Synthetic oligonucleotide
cgggatagttcgtatactgat

SEQ ID NO: 23122 - DNA, 21 bp, Artificial Sequence
  Description of Artificial Sequence: Synthetic oligonucleotide
agggatacgattatttctgct

SEQ ID NO: 23123 - DNA, 21 bp, Artificial Sequence
  Description of Artificial Sequence: Synthetic oligonucleotide
agggatacgtcgttgcctgtt

SEQ ID NO: 23124 - DNA, 21 bp, Artificial Sequence
  Description of Artificial Sequence: Synthetic oligonucleotide
agggatacgagttctattggg

SEQ ID NO: 23125 - DNA, 21 bp, Artificial Sequence
  Description of Artificial Sequence: Synthetic oligonucleotide
cgggatgtggctgcgcgttct

SEQ ID NO: 23126 - DNA, 21 bp, Artificial Sequence
  Description of Artificial Sequence: Synthetic oligonucleotide
agggatgttgctatgcaggat

SEQ ID NO: 23127 - DNA, 21 bp, Artificial Sequence
  Description of Artificial Sequence: Synthetic oligonucleotide
cgtgatgtgccgcaggctgtg

SEQ ID NO: 23128 - DNA, 21 bp, Artificial Sequence
  Description of Artificial Sequence: Synthetic oligonucleotide
cgggatgtgagtggtccggtt

SEQ ID NO: 23129 - DNA, 21 bp, Artificial Sequence
  Description of Artificial Sequence: Synthetic oligonucleotide
cgtgatgttagtattccttct

SEQ ID NO: 23130 - DNA, 21 bp, Artificial Sequence
  Description of Artificial Sequence: Synthetic oligonucleotide
cgggatgtttctaggcttcct

SEQ ID NO: 23131 - DNA, 21 bp, Artificial Sequence
  Description of Artificial Sequence: Synthetic oligonucleotide
cgggatgttactcgtcttcct

SEQ ID NO: 23132 - DNA, 21 bp, Artificial Sequence
  Description of Artificial Sequence: Synthetic oligonucleotide
cgtgaggcggcgtttgctgat

SEQ ID NO: 23133 - DNA, 21 bp, Artificial Sequence
  Description of Artificial Sequence: Synthetic oligonucleotide
cgtgaggcggggggtgctagt

SEQ ID NO: 23134 - DNA, 21 bp, Artificial Sequence
  Description of Artificial Sequence: Synthetic oligonucleotide
cgtgaggcgggggggcttgcg

SEQ ID NO: 23135 - DNA, 21 bp, Artificial Sequence
  Description of Artificial Sequence: Synthetic oligonucleotide
agggaggctaagcctgcgtgg

SEQ ID NO: 23136 - DNA, 21 bp, Artificial Sequence
  Description of Artificial Sequence: Synthetic oligonucleotide
cgtgaggctgtgacgaaggcg

SEQ ID NO: 23137 - DNA, 21 bp, Artificial Sequence
  Description of Artificial Sequence: Synthetic oligonucleotide
cgggaggcttatgagacgccg

SEQ ID NO: 23138 - DNA, 21 bp, Artificial Sequence
  Description of Artificial Sequence: Synthetic oligonucleotide
cgggaggataatagtaatgat

SEQ ID NO: 23139 - DNA, 21 bp, Artificial Sequence
  Description of Artificial Sequence: Synthetic oligonucleotide
agggaggggggtcagtcgcgg

SEQ ID NO: 23140 - DNA, 21 bp, Artificial Sequence
  Description of Artificial Sequence: Synthetic oligonucleotide
cgtgaggggctgtattctcat

SEQ ID NO: 23141 - DNA, 21 bp, Artificial Sequence
  Description of Artificial Sequence: Synthetic oligonucleotide
cgtgagattgggtgtacgggt

SEQ ID NO: 23142 - DNA, 21 bp, Artificial Sequence
  Description of Artificial Sequence: Synthetic oligonucleotide
cgggagaagacggataggttt

SEQ ID NO: 23143 - DNA, 21 bp, Artificial Sequence
  Description of Artificial Sequence: Synthetic oligonucleotide
cgggagctggagggttttact

SEQ ID NO: 23144 - DNA, 21 bp, Artificial Sequence
  Description of Artificial Sequence: Synthetic oligonucleotide
cgtgagttgtctcctatgtat

SEQ ID NO: 23145 - DNA, 21 bp, Artificial Sequence
  Description of Artificial Sequence: Synthetic oligonucleotide
cgtgagctgtcgtatgcgtct

SEQ ID NO: 23146 - DNA, 21 bp, Artificial Sequence
  Description of Artificial Sequence: Synthetic oligonucleotide
cgtgagatgctgcctagttcg

SEQ ID NO: 23147 - DNA, 21 bp, Artificial Sequence
  Description of Artificial Sequence: Synthetic oligonucleotide
agggagaatgggctgagtctt

SEQ ID NO: 23148 - DNA, 21 bp, Artificial Sequence
  Description of Artificial Sequence: Synthetic oligonucleotide
agggagaatctggctgctggg

SEQ ID NO: 23149 - DNA, 21 bp, Artificial Sequence
  Description of Artificial Sequence: Synthetic oligonucleotide
cgggagaataatacggttaag

SEQ ID NO: 23150 - DNA, 21 bp, Artificial Sequence
  Description of Artificial Sequence: Synthetic oligonucleotide
cgggagcctcatacttcgaat

SEQ ID NO: 23151 - DNA, 21 bp, Artificial Sequence
  Description of Artificial Sequence: Synthetic oligonucleotide
cgtgagcctccgacgttgtcg

SEQ ID NO: 23152 - DNA, 21 bp, Artificial Sequence
  Description of Artificial Sequence: Synthetic oligonucleotide
cgggagcagtttcgtaatctg

SEQ ID NO: 23153 - DNA, 21 bp, Artificial Sequence
  Description of Artificial Sequence: Synthetic oligonucleotide
cgtgagcgttctgcgttgact

SEQ ID NO: 23154 - DNA, 21 bp, Artificial Sequence
  Description of Artificial Sequence: Synthetic oligonucleotide
cgggagcggagtccgatgccg

SEQ ID NO: 23155 - DNA, 21 bp, Artificial Sequence
  Description of Artificial Sequence: Synthetic oligonucleotide
cgtgagtcgtgtcctgatgct

SEQ ID NO: 23156 - DNA, 21 bp, Artificial Sequence
  Description of Artificial Sequence: Synthetic oligonucleotide
cgtgagtctcataaggggcct

SEQ ID NO: 23157 - DNA, 21 bp, Artificial Sequence
  Description of Artificial Sequence: Synthetic oligonucleotide
cgtgagagtcttaataatatg

SEQ ID NO: 23158 - DNA, 21 bp, Artificial Sequence
  Description of Artificial Sequence: Synthetic oligonucleotide
agggagtcgacgacgcatggt

SEQ ID NO: 23159 - DNA, 21 bp, Artificial Sequence
  Description of Artificial Sequence: Synthetic oligonucleotide
cgggagtcggtttcgattaat

SEQ ID NO: 23160 - DNA, 21 bp, Artificial Sequence
  Description of Artificial Sequence: Synthetic oligonucleotide
cgggagtcgtatgagagtggt

SEQ ID NO: 23161 - DNA, 21 bp, Artificial Sequence
  Description of Artificial Sequence: Synthetic oligonucleotide
cgggagacgcttgggagtcct

SEQ ID NO: 23162 - DNA, 21 bp, Artificial Sequence
  Description of Artificial Sequence: Synthetic oligonucleotide
cgggagactatggcttcgact

SEQ ID NO: 23163 - DNA, 21 bp, Artificial Sequence
  Description of Artificial Sequence: Synthetic oligonucleotide
cgggagacgcctaatattcct

SEQ ID NO: 23164 - DNA, 21 bp, Artificial Sequence
  Description of Artificial Sequence: Synthetic oligonucleotide
cgggagacgagttctagtcag

SEQ ID NO: 23165 - DNA, 21 bp, Artificial Sequence
  Description of Artificial Sequence: Synthetic oligonucleotide
cgggagactgttcggaatgtg

SEQ ID NO: 23166 - DNA, 21 bp, Artificial Sequence
  Description of Artificial Sequence: Synthetic oligonucleotide
cgtgaggtgctgtctacttgt

SEQ ID NO: 23167 - DNA, 21 bp, Artificial Sequence
  Description of Artificial Sequence: Synthetic oligonucleotide
cgggaggtgagtgcttctcct

SEQ ID NO: 23168 - DNA, 21 bp, Artificial Sequence
  Description of Artificial Sequence: Synthetic oligonucleotide
cgggaggtgtcgtttgattgg

SEQ ID NO: 23169 - DNA, 21 bp, Artificial Sequence
  Description of Artificial Sequence: Synthetic oligonucleotide
cgggagtatcctagtgggtcg

SEQ ID NO: 23170 - DNA, 21 bp, Artificial Sequence
  Description of Artificial Sequence: Synthetic oligonucleotide
aggtttgcggagactcggcct

SEQ ID NO: 23171 - DNA, 21 bp, Artificial Sequence
  Description of Artificial Sequence: Synthetic oligonucleotide
aggtttgctggtgcgggtgtg

SEQ ID NO: 23172 - DNA, 21 bp, Artificial Sequence
  Description of Artificial Sequence: Synthetic oligonucleotide
cgttttgctgggtctctgatt

SEQ ID NO: 23173 - DNA, 21 bp, Artificial Sequence
  Description of Artificial Sequence: Synthetic oligonucleotide
cgttttgcgaattcgggtgtg

SEQ ID NO: 23174 - DNA, 21 bp, Artificial Sequence
  Description of Artificial Sequence: Synthetic oligonucleotide
cggtttgagcttgctcataat

SEQ ID NO: 23175 - DNA, 21 bp, Artificial Sequence
  Description of Artificial Sequence: Synthetic oligonucleotide
cgttttgagtcttctgtgccg

SEQ ID NO: 23176 - DNA, 21 bp, Artificial Sequence
  Description of Artificial Sequence: Synthetic oligonucleotide
aggtttcatgctgctacttct

SEQ ID NO: 23177 - DNA, 21 bp, Artificial Sequence
  Description of Artificial Sequence: Synthetic oligonucleotide
cgttttaaggagatgccgatg

SEQ ID NO: 23178 - DNA, 21 bp, Artificial Sequence
  Description of Artificial Sequence: Synthetic oligonucleotide
cggtttaagactacgggtgag

SEQ ID NO: 23179 - DNA, 21 bp, Artificial Sequence
  Description of Artificial Sequence: Synthetic oligonucleotide
aggtttcctcagcctgatcct

SEQ ID NO: 23180 - DNA, 21 bp, Artificial Sequence
  Description of Artificial Sequence: Synthetic oligonucleotide
cgttttccggttgatggtgtg

SEQ ID NO: 23181 - DNA, 21 bp, Artificial Sequence
  Description of Artificial Sequence: Synthetic oligonucleotide
cgtttttcggattcgaggatg

SEQ ID NO: 23182 - DNA, 21 bp, Artificial Sequence
  Description of Artificial Sequence: Synthetic oligonucleotide
cgtttttctggtatggtggag

SEQ ID NO: 23183 - DNA, 21 bp, Artificial Sequence
  Description of Artificial Sequence: Synthetic oligonucleotide
aggttttcgcagtctcctgcg

SEQ ID NO: 23184 - DNA, 21 bp, Artificial Sequence
  Description of Artificial Sequence: Synthetic oligonucleotide
cgtttttctacgggtccttct

SEQ ID NO: 23185 - DNA, 21 bp, Artificial Sequence
  Description of Artificial Sequence: Synthetic oligonucleotide
cgtttttctactcagcagagt

SEQ ID NO: 23186 - DNA, 21 bp, Artificial Sequence
  Description of Artificial Sequence: Synthetic oligonucleotide
cggtttgtgccggataggcct

SEQ ID NO: 23187 - DNA, 21 bp, Artificial Sequence
  Description of Artificial Sequence: Synthetic oligonucleotide
aggggtgctgcgccggtgacg

SEQ ID NO: 23188 - DNA, 21 bp, Artificial Sequence
  Description of Artificial Sequence: Synthetic oligonucleotide
cgtggggctgagttggggggg

SEQ ID NO: 23189 - DNA, 21 bp, Artificial Sequence
  Description of Artificial Sequence: Synthetic oligonucleotide
aggggtgcgggggatgcgcat

SEQ ID NO: 23190 - DNA, 21 bp, Artificial Sequence
  Description of Artificial Sequence: Synthetic oligonucleotide
aggggggcggggccttcgact

SEQ ID NO: 23191 - DNA, 21 bp, Artificial Sequence
  Description of Artificial Sequence: Synthetic oligonucleotide
cgtggtgctattgctacgtcg

SEQ ID NO: 23192 - DNA, 21 bp, Artificial Sequence
  Description of Artificial Sequence: Synthetic oligonucleotide
cgtggggctattgggaatggt

SEQ ID NO: 23193 - DNA, 21 bp, Artificial Sequence
  Description of Artificial Sequence: Synthetic oligonucleotide
cgtggggcgattccgttgccg

SEQ ID NO: 23194 - DNA, 21 bp, Artificial Sequence
  Description of Artificial Sequence: Synthetic oligonucleotide
cgtggggctactgtggcgcct

SEQ ID NO: 23195 - DNA, 21 bp, Artificial Sequence
  Description of Artificial Sequence: Synthetic oligonucleotide
cgtggtgatggtgtttctttg

SEQ ID NO: 23196 - DNA, 21 bp, Artificial Sequence
  Description of Artificial Sequence: Synthetic oligonucleotide
cgtggggatcctggtctgggt

SEQ ID NO: 23197 - DNA, 21 bp, Artificial Sequence
  Description of Artificial Sequence: Synthetic oligonucleotide
cggggtgagaattctaatcct

SEQ ID NO: 23198 - DNA, 21 bp, Artificial Sequence
  Description of Artificial Sequence: Synthetic oligonucleotide
aggggtgagcgtagtgtgttt

SEQ ID NO: 23199 - DNA, 21 bp, Artificial Sequence
  Description of Artificial Sequence: Synthetic oligonucleotide
cgtggtgagtcggcttctact

SEQ ID NO: 23200 - DNA, 21 bp, Artificial Sequence
  Description of Artificial Sequence: Synthetic oligonucleotide
cggggtggtgggctgtctatg

SEQ ID NO: 23201 - DNA, 21 bp, Artificial Sequence
  Description of Artificial Sequence: Synthetic oligonucleotide
cggggtgggactatgacgatt

SEQ ID NO: 23202 - DNA, 21 bp, Artificial Sequence
  Description of Artificial Sequence: Synthetic oligonucleotide
cgtggtggtacgaatgttgag

SEQ ID NO: 23203 - DNA, 21 bp, Artificial Sequence
  Description of Artificial Sequence: Synthetic oligonucleotide
cgtgggcatcatgataatgag

SEQ ID NO: 23204 - DNA, 21 bp, Artificial Sequence
  Description of Artificial Sequence: Synthetic oligonucleotide
cgtggtcatctttctgatcct

SEQ ID NO: 23205 - DNA, 21 bp, Artificial Sequence
  Description of Artificial Sequence: Synthetic oligonucleotide
aggggtattgagttgcggggt

SEQ ID NO: 23206 - DNA, 21 bp, Artificial Sequence
  Description of Artificial Sequence: Synthetic oligonucleotide
cgtgggattgagctgactgtt

SEQ ID NO: 23207 - DNA, 21 bp, Artificial Sequence
  Description of Artificial Sequence: Synthetic oligonucleotide
cgtggtattccggcgattgct

SEQ ID NO: 23208 - DNA, 21 bp, Artificial Sequence
  Description of Artificial Sequence: Synthetic oligonucleotide
cggggtaaggagccttttccg

SEQ ID NO: 23209 - DNA, 21 bp, Artificial Sequence
  Description of Artificial Sequence: Synthetic oligonucleotide
cgtggtcttggtaatggtact

SEQ ID NO: 23210 - DNA, 21 bp, Artificial Sequence
  Description of Artificial Sequence: Synthetic oligonucleotide
cgtgggatggcggttccgggg

SEQ ID NO: 23211 - DNA, 21 bp, Artificial Sequence
  Description of Artificial Sequence: Synthetic oligonucleotide
cggggtaatgagtggtcgttg

SEQ ID NO: 23212 - DNA, 21 bp, Artificial Sequence
  Description of Artificial Sequence: Synthetic oligonucleotide
agggggccggctacggcgagt

SEQ ID NO: 23213 - DNA, 21 bp, Artificial Sequence
  Description of Artificial Sequence: Synthetic oligonucleotide
cggggtccggatacgggggct

SEQ ID NO: 23214 - DNA, 21 bp, Artificial Sequence
  Description of Artificial Sequence: Synthetic oligonucleotide
cgtgggccgggggagcctaat

SEQ ID NO: 23215 - DNA, 21 bp, Artificial Sequence
  Description of Artificial Sequence: Synthetic oligonucleotide
cgtgggcctttgacgagtgag

SEQ ID NO: 23216 - DNA, 21 bp, Artificial Sequence
  Description of Artificial Sequence: Synthetic oligonucleotide
cgtgggccgccgcctgcgact

SEQ ID NO: 23217 - DNA, 21 bp, Artificial Sequence
  Description of Artificial Sequence: Synthetic oligonucleotide
aggggtcctagtacttcggat

SEQ ID NO: 23218 - DNA, 21 bp, Artificial Sequence
  Description of Artificial Sequence: Synthetic oligonucleotide
cgtgggcctgttacgcgtgat

SEQ ID NO: 23219 - DNA, 21 bp, Artificial Sequence
  Description of Artificial Sequence: Synthetic oligonucleotide
cgtggtcagcataatctttcg

SEQ ID NO: 23220 - DNA, 21 bp, Artificial Sequence
  Description of Artificial Sequence: Synthetic oligonucleotide
cggggtcagacgattcgtgag

SEQ ID NO: 23221 - DNA, 21 bp, Artificial Sequence
  Description of Artificial Sequence: Synthetic oligonucleotide
cgggggagtgcgggtgtggcg

SEQ ID NO: 23222 - DNA, 21 bp, Artificial Sequence
  Description of Artificial Sequence: Synthetic oligonucleotide
cgtggttcggatgcttctgcg

SEQ ID NO: 23223 - DNA, 21 bp, Artificial Sequence
  Description of Artificial Sequence: Synthetic oligonucleotide
cgtgggtcgggtacgttgact

SEQ ID NO: 23224 - DNA, 21 bp, Artificial Sequence
  Description of Artificial Sequence: Synthetic oligonucleotide
cggggtagtatgctgggtgat

SEQ ID NO: 23225 - DNA, 21 bp, Artificial Sequence
  Description of Artificial Sequence: Synthetic oligonucleotide
cgtggttcgaatgcgtctggg

SEQ ID NO: 23226 - DNA, 21 bp, Artificial Sequence
  Description of Artificial Sequence: Synthetic oligonucleotide
aggggttctcctgctgcgact

SEQ ID NO: 23227 - DNA, 21 bp, Artificial Sequence
  Description of Artificial Sequence: Synthetic oligonucleotide
cgtgggtcgccgcagtcttcg

SEQ ID NO: 23228 - DNA, 21 bp, Artificial Sequence
  Description of Artificial Sequence: Synthetic oligonucleotide
cggggttcgcagactgggaat

SEQ ID NO: 23229 - DNA, 21 bp, Artificial Sequence
  Description of Artificial Sequence: Synthetic oligonucleotide
cgggggtctcagacttctttt

SEQ ID NO: 23230 - DNA, 21 bp, Artificial Sequence
  Description of Artificial Sequence: Synthetic oligonucleotide
aggggtagttcgacgattgag

SEQ ID NO: 23231 - DNA, 21 bp, Artificial Sequence
  Description of Artificial Sequence: Synthetic oligonucleotide
cgtggttctactgcgaatgcg

SEQ ID NO: 23232 - DNA, 21 bp, Artificial Sequence
  Description of Artificial Sequence: Synthetic oligonucleotide
cggggttctacggtgatgttt

SEQ ID NO: 23233 - DNA, 21 bp, Artificial Sequence
  Description of Artificial Sequence: Synthetic oligonucleotide
aggggtacggcgcatcttttg

SEQ ID NO: 23234 - DNA, 21 bp, Artificial Sequence
  Description of Artificial Sequence: Synthetic oligonucleotide
agggggactgagtcgccgtcg

SEQ ID NO: 23235 - DNA, 21 bp, Artificial Sequence
  Description of Artificial Sequence: Synthetic oligonucleotide
cggggtactgggaatcttaat

SEQ ID NO: 23236 - DNA, 21 bp, Artificial Sequence
  Description of Artificial Sequence: Synthetic oligonucleotide
agggggacgggtacggcgtgg

SEQ ID NO: 23237 - DNA, 21 bp, Artificial Sequence
  Description of Artificial Sequence: Synthetic oligonucleotide
cggggtactatgatggcggct

SEQ ID NO: 23238 - DNA, 21 bp, Artificial Sequence
  Description of Artificial Sequence: Synthetic oligonucleotide
aggggtactaatactctgcag

SEQ ID NO: 23239 - DNA, 21 bp, Artificial Sequence
  Description of Artificial Sequence: Synthetic oligonucleotide
cgtggtgttgctgtgccgcct

SEQ ID NO: 23240 - DNA, 21 bp, Artificial Sequence
  Description of Artificial Sequence: Synthetic oligonucleotide
aggggtgttcattcgcctgat

SEQ ID NO: 23241 - DNA, 21 bp, Artificial Sequence
  Description of Artificial Sequence: Synthetic oligonucleotide
aggggggtgatgtatggtgat

SEQ ID NO: 23242 - DNA, 21 bp, Artificial Sequence
  Description of Artificial Sequence: Synthetic oligonucleotide
aggcatgcgggtcaggataat

SEQ ID NO: 23243 - DNA, 21 bp, Artificial Sequence
  Description of Artificial Sequence: Synthetic oligonucleotide
cgtcatgctccggtggcgtct

SEQ ID NO: 23244 - DNA, 21 bp, Artificial Sequence
  Description of Artificial Sequence: Synthetic oligonucleotide
cggcatgcggtttcgaatttt

SEQ ID NO: 23245 - DNA, 21 bp, Artificial Sequence
  Description of Artificial Sequence: Synthetic oligonucleotide
cggcatgatcggatggataat

SEQ ID NO: 23246 - DNA, 21 bp, Artificial Sequence
  Description of Artificial Sequence: Synthetic oligonucleotide
cgtcatgagttgcattctacg

SEQ ID NO: 23247 - DNA, 21 bp, Artificial Sequence
  Description of Artificial Sequence: Synthetic oligonucleotide
cggcatgagaatattcgggat

SEQ ID NO: 23248 - DNA, 21 bp, Artificial Sequence
  Description of Artificial Sequence: Synthetic oligonucleotide
cgtcatgagaggcctatggcg

SEQ ID NO: 23249 - DNA, 21 bp, Artificial Sequence
  Description of Artificial Sequence: Synthetic oligonucleotide
cggcatggtagttcgatgacg

SEQ ID NO: 23250 - DNA, 21 bp, Artificial Sequence
  Description of Artificial Sequence: Synthetic oligonucleotide
cggcatgggacgcatccttcg

SEQ ID NO: 23251 - DNA, 21 bp, Artificial Sequence
  Description of Artificial Sequence: Synthetic oligonucleotide
aggcatcattctgcgccgaat

SEQ ID NO: 23252 - DNA, 21 bp, Artificial Sequence
  Description of Artificial Sequence: Synthetic oligonucleotide
cgtcatttggggtcgctgccg

SEQ ID NO: 23253 - DNA, 21 bp, Artificial Sequence
  Description of Artificial Sequence: Synthetic oligonucleotide
cggcatcctgctgctcatgct

SEQ ID NO: 23254 - DNA, 21 bp, Artificial Sequence
  Description of Artificial Sequence: Synthetic oligonucleotide
cggcatcctgctactatttct

SEQ ID NO: 23255 - DNA, 21 bp, Artificial Sequence
  Description of Artificial Sequence: Synthetic oligonucleotide
aggcatccgatgcttactggg

SEQ ID NO: 23256 - DNA, 21 bp, Artificial Sequence
  Description of Artificial Sequence: Synthetic oligonucleotide
cgtcatcctccgaattctttt

SEQ ID NO: 23257 - DNA, 21 bp, Artificial Sequence
  Description of Artificial Sequence: Synthetic oligonucleotide
cggcatccgagtactccgaat

SEQ ID NO: 23258 - DNA, 21 bp, Artificial Sequence
  Description of Artificial Sequence: Synthetic oligonucleotide
cggcatccggtgactgagccg

SEQ ID NO: 23259 - DNA, 21 bp, Artificial Sequence
  Description of Artificial Sequence: Synthetic oligonucleotide
aggcatcagacgattattgct

SEQ ID NO: 23260 - DNA, 21 bp, Artificial Sequence
  Description of Artificial Sequence: Synthetic oligonucleotide
aggcataggcctgcgccggag

SEQ ID NO: 23261 - DNA, 21 bp, Artificial Sequence
  Description of Artificial Sequence: Synthetic oligonucleotide
cgtcatagtgaggtgacgttt

SEQ ID NO: 23262 - DNA, 21 bp, Artificial Sequence
  Description of Artificial Sequence: Synthetic oligonucleotide
aggcattctcatactatttcg

SEQ ID NO: 23263 - DNA, 21 bp, Artificial Sequence
  Description of Artificial Sequence: Synthetic oligonucleotide
cggcattctctgagtttggat

SEQ ID NO: 23264 - DNA, 21 bp, Artificial Sequence
  Description of Artificial Sequence: Synthetic oligonucleotide
aggcattctaatcagacgttg

SEQ ID NO: 23265 - DNA, 21 bp, Artificial Sequence
  Description of Artificial Sequence: Synthetic oligonucleotide
cgtcattctcctttgactggt

SEQ ID NO: 23266 - DNA, 21 bp, Artificial Sequence
  Description of Artificial Sequence: Synthetic oligonucleotide
aggcatagtcagggtcctttt

SEQ ID NO: 23267 - DNA, 21 bp, Artificial Sequence
  Description of Artificial Sequence: Synthetic oligonucleotide
cgtcatacgatggagacttcg

SEQ ID NO: 23268 - DNA, 21 bp, Artificial Sequence
  Description of Artificial Sequence: Synthetic oligonucleotide
cgtcatacgcctgatcagggt

SEQ ID NO: 23269 - DNA, 21 bp, Artificial Sequence
  Description of Artificial Sequence: Synthetic oligonucleotide
cggattgcgccgactggtaat

SEQ ID NO: 23270 - DNA, 21 bp, Artificial Sequence
  Description of Artificial Sequence: Synthetic oligonucleotide
cgtattgatgctgagcttgag

SEQ ID NO: 23271 - DNA, 21 bp, Artificial Sequence
  Description of Artificial Sequence: Synthetic oligonucleotide
cgtattgatgggattctgtct

SEQ ID NO: 23272 - DNA, 21 bp, Artificial Sequence
  Description of Artificial Sequence: Synthetic oligonucleotide
cgtattgagaatgaggttgtg

SEQ ID NO: 23273 - DNA, 21 bp, Artificial Sequence
  Description of Artificial Sequence: Synthetic oligonucleotide
cggattggtgatcatattcgt

SEQ ID NO: 23274 - DNA, 21 bp, Artificial Sequence
  Description of Artificial Sequence: Synthetic oligonucleotide
cgtattggtaagaatgattct

SEQ ID NO: 23275 - DNA, 21 bp, Artificial Sequence
  Description of Artificial Sequence: Synthetic oligonucleotide
cggattggtcagaatttggct

SEQ ID NO: 23276 - DNA, 21 bp, Artificial Sequence
  Description of Artificial Sequence: Synthetic oligonucleotide
cggattgggcagacgtttgcg

SEQ ID NO: 23277 - DNA, 21 bp, Artificial Sequence
  Description of Artificial Sequence: Synthetic oligonucleotide
aggattggttcgggtactggt

SEQ ID NO: 23278 - DNA, 21 bp, Artificial Sequence
  Description of Artificial Sequence: Synthetic oligonucleotide
cgtattggttggacgattgat

SEQ ID NO: 23279 - DNA, 21 bp, Artificial Sequence
  Description of Artificial Sequence: Synthetic oligonucleotide
cgtattcattatgaggggatg

SEQ ID NO: 23280 - DNA, 21 bp, Artificial Sequence
  Description of Artificial Sequence: Synthetic oligonucleotide
cgtattaatattgctgagact

SEQ ID NO: 23281 - DNA, 21 bp, Artificial Sequence
  Description of Artificial Sequence: Synthetic oligonucleotide
cgtattccggctttgtctggt

SEQ ID NO: 23282 - DNA, 21 bp, Artificial Sequence
  Description of Artificial Sequence: Synthetic oligonucleotide
cggattcctacgagtcctccg

SEQ ID NO: 23283 - DNA, 21 bp, Artificial Sequence
  Description of Artificial Sequence: Synthetic oligonucleotide
cgtattcctgttcgggttgat

SEQ ID NO: 23284 - DNA, 21 bp, Artificial Sequence
  Description of Artificial Sequence: Synthetic oligonucleotide
cggattaggtatccggagggt

SEQ ID NO: 23285 - DNA, 21 bp, Artificial Sequence
  Description of Artificial Sequence: Synthetic oligonucleotide
cgtatttctgctttgcagcct

SEQ ID NO: 23286 - DNA, 21 bp, Artificial Sequence
  Description of Artificial Sequence: Synthetic oligonucleotide
cggattagtgattatcctcct

SEQ ID NO: 23287 - DNA, 21 bp, Artificial Sequence
  Description of Artificial Sequence: Synthetic oligonucleotide
aggattagtgggcatgctagt

SEQ ID NO: 23288 - DNA, 21 bp, Artificial Sequence
  Description of Artificial Sequence: Synthetic oligonucleotide
cggatttctccgactccgatt

SEQ ID NO: 23289 - DNA, 21 bp, Artificial Sequence
  Description of Artificial Sequence: Synthetic oligonucleotide
cggatttcgagtgggattgat

SEQ ID NO: 23290 - DNA, 21 bp, Artificial Sequence
  Description of Artificial Sequence: Synthetic oligonucleotide
cgtatttctagttctcctgat

SEQ ID NO: 23291 - DNA, 21 bp, Artificial Sequence
  Description of Artificial Sequence: Synthetic oligonucleotide
cgtatttatgatcagtctatt

SEQ ID NO: 23292 - DNA, 21 bp, Artificial Sequence
  Description of Artificial Sequence: Synthetic oligonucleotide
aggatttatagtccggatggg

SEQ ID NO: 23293 - DNA, 21 bp, Artificial Sequence
  Description of Artificial Sequence: Synthetic oligonucleotide
aggatttatactacgtcgcct

SEQ ID NO: 23294 - DNA, 21 bp, Artificial Sequence
  Description of Artificial Sequence: Synthetic oligonucleotide
cggaaggatgatactacgtgg

SEQ ID NO: 23295 - DNA, 21 bp, Artificial Sequence
  Description of Artificial Sequence: Synthetic oligonucleotide
cgtaaggatctttcgtgggat

SEQ ID NO: 23296 - DNA, 21 bp, Artificial Sequence
  Description of Artificial Sequence: Synthetic oligonucleotide
aggaaggatcgtagtcctgag

SEQ ID NO: 23297 - DNA, 21 bp, Artificial Sequence
  Description of Artificial Sequence: Synthetic oligonucleotide
cggaaggatacgccgatgcat

SEQ ID NO: 23298 - DNA, 21 bp, Artificial Sequence
  Description of Artificial Sequence: Synthetic oligonucleotide
cgtaaggatactgttccgaat

SEQ ID NO: 23299 - DNA, 21 bp, Artificial Sequence
  Description of Artificial Sequence: Synthetic oligonucleotide
cgtaagggtttggatgatgcg

SEQ ID NO: 23300 - DNA, 21 bp, Artificial Sequence
  Description of Artificial Sequence: Synthetic oligonucleotide
cgtaagcttcctcttgttgat

SEQ ID NO: 23301 - DNA, 21 bp, Artificial Sequence
  Description of Artificial Sequence: Synthetic oligonucleotide
aggaagatgaatcaggatcag

SEQ ID NO: 23302 - DNA, 21 bp, Artificial Sequence
  Description of Artificial Sequence: Synthetic oligonucleotide
cgtaagaattatcagctggat

SEQ ID NO: 23303 - DNA, 21 bp, Artificial Sequence
  Description of Artificial Sequence: Synthetic oligonucleotide
aggaagcctttgacggctcct

SEQ ID NO: 23304 - DNA, 21 bp, Artificial Sequence
  Description of Artificial Sequence: Synthetic oligonucleotide
cgtaagtcgccgcaggaggcg

SEQ ID NO: 23305 - DNA, 21 bp, Artificial Sequence
  Description of Artificial Sequence: Synthetic oligonucleotide
cgtaagtctacgttggatact

SEQ ID NO: 23306 - DNA, 21 bp, Artificial Sequence
  Description of Artificial Sequence: Synthetic oligonucleotide
cgtaaggtggagtcgaggagg

SEQ ID NO: 23307 - DNA, 21 bp, Artificial Sequence
  Description of Artificial Sequence: Synthetic oligonucleotide
cgtaaggttactcctgatact

SEQ ID NO: 23308 - DNA, 21 bp, Artificial Sequence
  Description of Artificial Sequence: Synthetic oligonucleotide
aggcttgctgcggagactctg

SEQ ID NO: 23309 - DNA, 21 bp, Artificial Sequence
  Description of Artificial Sequence: Synthetic oligonucleotide
cgtttggcggcgaatcatctt

SEQ ID NO: 23310 - DNA, 21 bp, Artificial Sequence
  Description of Artificial Sequence: Synthetic oligonucleotide
aggttggcggagacgtctcat

SEQ ID NO: 23311 - DNA, 21 bp, Artificial Sequence
  Description of Artificial Sequence: Synthetic oligonucleotide
cggttggcgcttgagtctaat

SEQ ID NO: 23312 - DNA, 21 bp, Artificial Sequence
  Description of Artificial Sequence: Synthetic oligonucleotide
aggctggctatgcaggcggct

SEQ ID NO: 23313 - DNA, 21 bp, Artificial Sequence
  Description of Artificial Sequence: Synthetic oligonucleotide
cggcttgctcagattaattcg

SEQ ID NO: 23314 - DNA, 21 bp, Artificial Sequence
  Description of Artificial Sequence: Synthetic oligonucleotide
cggcttgctactgaggatcct

SEQ ID NO: 23315 - DNA, 21 bp, Artificial Sequence
  Description of Artificial Sequence: Synthetic oligonucleotide
cggcttgatgcgaatagtcgg

SEQ ID NO: 23316 - DNA, 21 bp, Artificial Sequence
  Description of Artificial Sequence: Synthetic oligonucleotide
cgtcttgatgatgttgggctt

SEQ ID NO: 23317 - DNA, 21 bp, Artificial Sequence
  Description of Artificial Sequence: Synthetic oligonucleotide
cggttggattttgatacgccg

SEQ ID NO: 23318 - DNA, 21 bp, Artificial Sequence
  Description of Artificial Sequence: Synthetic oligonucleotide
cggttggatatgcgtattgag

SEQ ID NO: 23319 - DNA, 21 bp, Artificial Sequence
  Description of Artificial Sequence: Synthetic oligonucleotide
cgtctggatcctggggagccg

SEQ ID NO: 23320 - DNA, 21 bp, Artificial Sequence
  Description of Artificial Sequence: Synthetic oligonucleotide
aggcttgatcctcattcttct

SEQ ID NO: 23321 - DNA, 21 bp, Artificial Sequence
  Description of Artificial Sequence: Synthetic oligonucleotide
cggttggattcgttggctctg

SEQ ID NO: 23322 - DNA, 21 bp, Artificial Sequence
  Description of Artificial Sequence: Synthetic oligonucleotide
cggcttgatagtatgttttct

SEQ ID NO: 23323 - DNA, 21 bp, Artificial Sequence
  Description of Artificial Sequence: Synthetic oligonucleotide
cggcttgatactacgatgcag

SEQ ID NO: 23324 - DNA, 21 bp, Artificial Sequence
  Description of Artificial Sequence: Synthetic oligonucleotide
aggcttgatacggtttcgtct

SEQ ID NO: 23325 - DNA, 21 bp, Artificial Sequence
  Description of Artificial Sequence: Synthetic oligonucleotide
cgtcttgaggctcaggtggcg

SEQ ID NO: 23326 - DNA, 21 bp, Artificial Sequence
  Description of Artificial Sequence: Synthetic oligonucleotide
aggcttgagcctatgcagaat

SEQ ID NO: 23327 - DNA, 21 bp, Artificial Sequence
  Description of Artificial Sequence: Synthetic oligonucleotide
cgtcttgagtcttctcggccg

SEQ ID NO: 23328 - DNA, 21 bp, Artificial Sequence
  Description of Artificial Sequence: Synthetic oligonucleotide
cgtctttttggtgatgattat

SEQ ID NO: 23329 - DNA, 21 bp, Artificial Sequence
  Description of Artificial Sequence: Synthetic oligonucleotide
cggctgggggatggggcggat

SEQ ID NO: 23330 - DNA, 21 bp, Artificial Sequence
  Description of Artificial Sequence: Synthetic oligonucleotide
cgtctgggggatgtttgggct

SEQ ID NO: 23331 - DNA, 21 bp, Artificial Sequence
  Description of Artificial Sequence: Synthetic oligonucleotide
cggttgggtatggtttctgag

SEQ ID NO: 23332 - DNA, 21 bp, Artificial Sequence
  Description of Artificial Sequence: Synthetic oligonucleotide
aggttggggcctgggtatcct

SEQ ID NO: 23333 - DNA, 21 bp, Artificial Sequence
  Description of Artificial Sequence: Synthetic oligonucleotide
cggctgggtccggttagtggt

SEQ ID NO: 23334 - DNA, 21 bp, Artificial Sequence
  Description of Artificial Sequence: Synthetic oligonucleotide
aggctgggttcgcagacttct

SEQ ID NO: 23335 - DNA, 21 bp, Artificial Sequence
  Description of Artificial Sequence: Synthetic oligonucleotide
cggctggggactcattcggag

SEQ ID NO: 23336 - DNA, 21 bp, Artificial Sequence
  Description of Artificial Sequence: Synthetic oligonucleotide
cgtcttgggacttgggctgag

SEQ ID NO: 23337 - DNA, 21 bp, Artificial Sequence
  Description of Artificial Sequence: Synthetic oligonucleotide
aggcttggggtgtgtccgtct

SEQ ID NO: 23338 - DNA, 21 bp, Artificial Sequence
  Description of Artificial Sequence: Synthetic oligonucleotide
cgtctgcatattgggtctggg

SEQ ID NO: 23339 - DNA, 21 bp, Artificial Sequence
  Description of Artificial Sequence: Synthetic oligonucleotide
cgtctgcatattaatagtgag

SEQ ID NO: 23340 - DNA, 21 bp, Artificial Sequence
  Description of Artificial Sequence: Synthetic oligonucleotide
cggcttcatacggatttgggt

SEQ ID NO: 23341 - DNA, 21 bp, Artificial Sequence
  Description of Artificial Sequence: Synthetic oligonucleotide
cggctgattcattcgggtttt

SEQ ID NO: 23342 - DNA, 21 bp, Artificial Sequence
  Description of Artificial Sequence: Synthetic oligonucleotide
aggctgattaataattctgct

SEQ ID NO: 23343 - DNA, 21 bp, Artificial Sequence
  Description of Artificial Sequence: Synthetic oligonucleotide
cggttgttgaagactccgagt

SEQ ID NO: 23344 - DNA, 21 bp, Artificial Sequence
  Description of Artificial Sequence: Synthetic oligonucleotide
cgtcttctgtcggcgactggt

SEQ ID NO: 23345 - DNA, 21 bp, Artificial Sequence
  Description of Artificial Sequence: Synthetic oligonucleotide
cgtttgatggatcgtgcgggt

SEQ ID NO: 23346 - DNA, 21 bp, Artificial Sequence
  Description of Artificial Sequence: Synthetic oligonucleotide
cggttgatgaatccgaagggt

SEQ ID NO: 23347 - DNA, 21 bp, Artificial Sequence
  Description of Artificial Sequence: Synthetic oligonucleotide
aggctgaatgatctgactctt

SEQ ID NO: 23348 - DNA, 21 bp, Artificial Sequence
  Description of Artificial Sequence: Synthetic oligonucleotide
cggttgaatttgtcgactact

SEQ ID NO: 23349 - DNA, 21 bp, Artificial Sequence
  Description of Artificial Sequence: Synthetic oligonucleotide
aggctgaataataatactctg

SEQ ID NO: 23350 - DNA, 21 bp, Artificial Sequence
  Description of Artificial Sequence: Synthetic oligonucleotide
cgtctgaatcaggttccggcg

SEQ ID NO: 23351 - DNA, 21 bp, Artificial Sequence
  Description of Artificial Sequence: Synthetic oligonucleotide
aggcttaatacttcgatgatg

SEQ ID NO: 23352 - DNA, 21 bp, Artificial Sequence
  Description of Artificial Sequence: Synthetic oligonucleotide
aggttgcctgatcctagttcg

SEQ ID NO: 23353 - DNA, 21 bp, Artificial Sequence
  Description of Artificial Sequence: Synthetic oligonucleotide
aggctgccggggcctgagcgt

SEQ ID NO: 23354 - DNA, 21 bp, Artificial Sequence
  Description of Artificial Sequence: Synthetic oligonucleotide
cgtctgccgttggagaatttg

SEQ ID NO: 23355 - DNA, 21 bp, Artificial Sequence
  Description of Artificial Sequence: Synthetic oligonucleotide
cgtttgccgctgtcggctcat

SEQ ID NO: 23356 - DNA, 21 bp, Artificial Sequence
  Description of Artificial Sequence: Synthetic oligonucleotide
cgtcttcctccgtcggggatt

SEQ ID NO: 23357 - DNA, 21 bp, Artificial Sequence
  Description of Artificial Sequence: Synthetic oligonucleotide
aggctgccgcctacggatgtg

SEQ ID NO: 23358 - DNA, 21 bp, Artificial Sequence
  Description of Artificial Sequence: Synthetic oligonucleotide
cggttgcctcagagggatatt

SEQ ID NO: 23359 - DNA, 21 bp, Artificial Sequence
  Description of Artificial Sequence: Synthetic oligonucleotide
cgtctgccgtctgagaagcag

SEQ ID NO: 23360 - DNA, 21 bp, Artificial Sequence
  Description of Artificial Sequence: Synthetic oligonucleotide
cggcttccttctttggttgat

SEQ ID NO: 23361 - DNA, 21 bp, Artificial Sequence
  Description of Artificial Sequence: Synthetic oligonucleotide
aggctgcctacgcggcttgat

SEQ ID NO: 23362 - DNA, 21 bp, Artificial Sequence
  Description of Artificial Sequence: Synthetic oligonucleotide
cgtcttcctacttctcatttt

SEQ ID NO: 23363 - DNA, 21 bp, Artificial Sequence
  Description of Artificial Sequence: Synthetic oligonucleotide
aggctgccgactgttactggg

SEQ ID NO: 23364 - DNA, 21 bp, Artificial Sequence
  Description of Artificial Sequence: Synthetic oligonucleotide
cggcttccggtgcagccgtcg

SEQ ID NO: 23365 - DNA, 21 bp, Artificial Sequence
  Description of Artificial Sequence: Synthetic oligonucleotide
aggctgcaggataatggttcg

SEQ ID NO: 23366 - DNA, 21 bp, Artificial Sequence
  Description of Artificial Sequence: Synthetic oligonucleotide
cgtcttcaggggtttccgaat

SEQ ID NO: 23367 - DNA, 21 bp, Artificial Sequence
  Description of Artificial Sequence: Synthetic oligonucleotide
cgtctgcagcttcaggatcat

SEQ ID NO: 23368 - DNA, 21 bp, Artificial Sequence
  Description of Artificial Sequence: Synthetic oligonucleotide
cgtttgcagaatacggggacg

SEQ ID NO: 23369 - DNA, 21 bp, Artificial Sequence
  Description of Artificial Sequence: Synthetic oligonucleotide
cgtcttcagcctgctgaggag

SEQ ID NO: 23370 - DNA, 21 bp, Artificial Sequence
  Description of Artificial Sequence: Synthetic oligonucleotide
cggcttcagcaggttggggtg

SEQ ID NO: 23371 - DNA, 21 bp, Artificial Sequence
  Description of Artificial Sequence: Synthetic oligonucleotide
cgtctgcagtcttctattgag

SEQ ID NO: 23372 - DNA, 21 bp, Artificial Sequence
  Description of Artificial Sequence: Synthetic oligonucleotide
cggcttcgtccgggtcttgat

SEQ ID NO: 23373 - DNA, 21 bp, Artificial Sequence
  Description of Artificial Sequence: Synthetic oligonucleotide
aggctgagtgcggatacgcat

SEQ ID NO: 23374 - DNA, 21 bp, Artificial Sequence
  Description of Artificial Sequence: Synthetic oligonucleotide
cgtctttctcatgctggggtg

SEQ ID NO: 23375 - DNA, 21 bp, Artificial Sequence
  Description of Artificial Sequence: Synthetic oligonucleotide
aggctgagtattggtagtgtt

SEQ ID NO: 23376 - DNA, 21 bp, Artificial Sequence
  Description of Artificial Sequence: Synthetic oligonucleotide
cgtctgtctttggataggttt

SEQ ID NO: 23377 - DNA, 21 bp, Artificial Sequence
  Description of Artificial Sequence: Synthetic oligonucleotide
aggttgtcgttgccttctacg

SEQ ID NO: 23378 - DNA, 21 bp, Artificial Sequence
  Description of Artificial Sequence: Synthetic oligonucleotide
aggctttcgaattcggagcct

SEQ ID NO: 23379 - DNA, 21 bp, Artificial Sequence
  Description of Artificial Sequence: Synthetic oligonucleotide
cgtctgtctccgccgcctagt

SEQ ID NO: 23380 - DNA, 21 bp, Artificial Sequence
  Description of Artificial Sequence: Synthetic oligonucleotide
aggttgtcgcctcagccggct

SEQ ID NO: 23381 - DNA, 21 bp, Artificial Sequence
  Description of Artificial Sequence: Synthetic oligonucleotide
cgtctgagtcagtcgaataat

SEQ ID NO: 23382 - DNA, 21 bp, Artificial Sequence
  Description of Artificial Sequence: Synthetic oligonucleotide
cggctgtcgtctggtcctatt

SEQ ID NO: 23383 - DNA, 21 bp, Artificial Sequence
  Description of Artificial Sequence: Synthetic oligonucleotide
cggctttctagtaatctggag

SEQ ID NO: 23384 - DNA, 21 bp, Artificial Sequence
  Description of Artificial Sequence: Synthetic oligonucleotide
aggcttacggctacgtctaat

SEQ ID NO: 23385 - DNA, 21 bp, Artificial Sequence
  Description of Artificial Sequence: Synthetic oligonucleotide
cggctgactgataggtctacg

SEQ ID NO: 23386 - DNA, 21 bp, Artificial Sequence
  Description of Artificial Sequence: Synthetic oligonucleotide
cgtttgacggagcctcatcgt

SEQ ID NO: 23387 - DNA, 21 bp, Artificial Sequence
  Description of Artificial Sequence: Synthetic oligonucleotide
cggctgacgcatgagtctccg

SEQ ID NO: 23388 - DNA, 21 bp, Artificial Sequence
  Description of Artificial Sequence: Synthetic oligonucleotide
cggcttactcatactggtcat

SEQ ID NO: 23389 - DNA, 21 bp, Artificial Sequence
  Description of Artificial Sequence: Synthetic oligonucleotide
aggcttactatggttcgggat

SEQ ID NO: 23390 - DNA, 21 bp, Artificial Sequence
  Description of Artificial Sequence: Synthetic oligonucleotide
cgtctgactccggagggtcag

SEQ ID NO: 23391 - DNA, 21 bp, Artificial Sequence
  Description of Artificial Sequence: Synthetic oligonucleotide
aggcttgttgataatttgccg

SEQ ID NO: 23392 - DNA, 21 bp, Artificial Sequence
  Description of Artificial Sequence: Synthetic oligonucleotide
cgtctggttaatcagatgtcg

SEQ ID NO: 23393 - DNA, 21 bp, Artificial Sequence
  Description of Artificial Sequence: Synthetic oligonucleotide
cggctggtgcaggcgtttgcg

SEQ ID NO: 23394 - DNA, 21 bp, Artificial Sequence
  Description of Artificial Sequence: Synthetic oligonucleotide
aggctttattctgggattgag

SEQ ID NO: 23395 - DNA, 21 bp, Artificial Sequence
  Description of Artificial Sequence: Synthetic oligonucleotide
cgtctgtattcgaattcgcct

SEQ ID NO: 23396 - DNA, 21 bp, Artificial Sequence
  Description of Artificial Sequence: Synthetic oligonucleotide
cggatggctaaggagacttct

SEQ ID NO: 23397 - DNA, 21 bp, Artificial Sequence
  Description of Artificial Sequence: Synthetic oligonucleotide
cggatggagcctcctatttcg

SEQ ID NO: 23398 - DNA, 21 bp, Artificial Sequence
  Description of Artificial Sequence: Synthetic oligonucleotide
aggatggagccttctgctgtt

SEQ ID NO: 23399 - DNA, 21 bp, Artificial Sequence
  Description of Artificial Sequence: Synthetic oligonucleotide
aggatgggggctgctgtgtat

SEQ ID NO: 23400 - DNA, 21 bp, Artificial Sequence
  Description of Artificial Sequence: Synthetic oligonucleotide
cggatgggtgttcatccgact

SEQ ID NO: 23401 - DNA, 21 bp, Artificial Sequence
  Description of Artificial Sequence: Synthetic oligonucleotide
aggatgggttatgttgaggct

SEQ ID NO: 23402 - DNA, 21 bp, Artificial Sequence
  Description of Artificial Sequence: Synthetic oligonucleotide
aggatgcatgtgactgaggct

SEQ ID NO: 23403 - DNA, 21 bp, Artificial Sequence
  Description of Artificial Sequence: Synthetic oligonucleotide
cggatgattcagtcgggtcat

SEQ ID NO: 23404 - DNA, 21 bp, Artificial Sequence
  Description of Artificial Sequence: Synthetic oligonucleotide
cgtatgttggcgccgtctggg

SEQ ID NO: 23405 - DNA, 21 bp, Artificial Sequence
  Description of Artificial Sequence: Synthetic oligonucleotide
aggatgctggatcagttgaat

SEQ ID NO: 23406 - DNA, 21 bp, Artificial Sequence
  Description of Artificial Sequence: Synthetic oligonucleotide
aggatgttgccggatgtgtat

SEQ ID NO: 23407 - DNA, 21 bp, Artificial Sequence
  Description of Artificial Sequence: Synthetic oligonucleotide
cggatgatgcctgatcttcct

SEQ ID NO: 23408 - DNA, 21 bp, Artificial Sequence
  Description of Artificial Sequence: Synthetic oligonucleotide
aggatgaatgaggcgctgggg

SEQ ID NO: 23409 - DNA, 21 bp, Artificial Sequence
  Description of Artificial Sequence: Synthetic oligonucleotide
cgtatgaatattcaggttggt

SEQ ID NO: 23410 - DNA, 21 bp, Artificial Sequence
  Description of Artificial Sequence: Synthetic oligonucleotide
cggatgaattatgggactgag

SEQ ID NO: 23411 - DNA, 21 bp, Artificial Sequence
  Description of Artificial Sequence: Synthetic oligonucleotide
aggatgccggctatggctgtt

SEQ ID NO: 23412 - DNA, 21 bp, Artificial Sequence
  Description of Artificial Sequence: Synthetic oligonucleotide
aggatgccggcgtcgaatgcg

SEQ ID NO: 23413 - DNA, 21 bp, Artificial Sequence
  Description of Artificial Sequence: Synthetic oligonucleotide
cgtatgcctagggagcagtcg

SEQ ID NO: 23414 - DNA, 21 bp, Artificial Sequence
  Description of Artificial Sequence: Synthetic oligonucleotide
cggatgcagtcggcgtatgtg

SEQ ID NO: 23415 - DNA, 21 bp, Artificial Sequence
  Description of Artificial Sequence: Synthetic oligonucleotide
cgtatgcagtcgcagggtttt

SEQ ID NO: 23416 - DNA, 21 bp, Artificial Sequence
  Description of Artificial Sequence: Synthetic oligonucleotide
cgtatgtctgattcgtttgtg

SEQ ID NO: 23417 - DNA, 21 bp, Artificial Sequence
  Description of Artificial Sequence: Synthetic oligonucleotide
aggatgtctgaggttacgatt

SEQ ID NO: 23418 - DNA, 21 bp, Artificial Sequence
  Description of Artificial Sequence: Synthetic oligonucleotide
cgtatgagtattcctaatgat

SEQ ID NO: 23419 - DNA, 21 bp, Artificial Sequence
  Description of Artificial Sequence: Synthetic oligonucleotide
cggatgtcgttggctagtgag

SEQ ID NO: 23420 - DNA, 21 bp, Artificial Sequence
  Description of Artificial Sequence: Synthetic oligonucleotide
cggatgtctaatagtcctcag

SEQ ID NO: 23421 - DNA, 21 bp, Artificial Sequence
  Description of Artificial Sequence: Synthetic oligonucleotide
cgtatgtctagtgatcttcct

SEQ ID NO: 23422 - DNA, 21 bp, Artificial Sequence
  Description of Artificial Sequence: Synthetic oligonucleotide
cggatgacggcggctatttgt

SEQ ID NO: 23423 - DNA, 21 bp, Artificial Sequence
  Description of Artificial Sequence: Synthetic oligonucleotide
cgtatgactcatactgcgcct

SEQ ID NO: 23424 - DNA, 21 bp, Artificial Sequence
  Description of Artificial Sequence: Synthetic oligonucleotide
cggatgactattggtactacg

SEQ ID NO: 23425 - DNA, 21 bp, Artificial Sequence
  Description of Artificial Sequence: Synthetic oligonucleotide
cgtatggttggtggtggtgat

SEQ ID NO: 23426 - DNA, 21 bp, Artificial Sequence
  Description of Artificial Sequence: Synthetic oligonucleotide
aggatggttaatcttgggcat

SEQ ID NO: 23427 - DNA, 21 bp, Artificial Sequence
  Description of Artificial Sequence: Synthetic oligonucleotide
cgtatggtttctagttcggcg

SEQ ID NO: 23428 - DNA, 21 bp, Artificial Sequence
  Description of Artificial Sequence: Synthetic oligonucleotide
cgtatgtatggttcgtcttct

SEQ ID NO: 23429 - DNA, 21 bp, Artificial Sequence
  Description of Artificial Sequence: Synthetic oligonucleotide
aggaatgcggctgtggatccg

SEQ ID NO: 23430 - DNA, 21 bp, Artificial Sequence
  Description of Artificial Sequence: Synthetic oligonucleotide
aggaatgcgggggagactcat

SEQ ID NO: 23431 - DNA, 21 bp, Artificial Sequence
  Description of Artificial Sequence: Synthetic oligonucleotide
cgtaatgctgggacggatcgg

SEQ ID NO: 23432 - DNA, 21 bp, Artificial Sequence
  Description of Artificial Sequence: Synthetic oligonucleotide
aggaatgctaatatgcctacg

SEQ ID NO: 23433 - DNA, 21 bp, Artificial Sequence
  Description of Artificial Sequence: Synthetic oligonucleotide
cgtaatgcgccttctgcggat

SEQ ID NO: 23434 - DNA, 21 bp, Artificial Sequence
  Description of Artificial Sequence: Synthetic oligonucleotide
aggaatgctactgcgatggtt

SEQ ID NO: 23435 - DNA, 21 bp, Artificial Sequence
  Description of Artificial Sequence: Synthetic oligonucleotide
aggaatgatttgacgggtgtt

SEQ ID NO: 23436 - DNA, 21 bp, Artificial Sequence
  Description of Artificial Sequence: Synthetic oligonucleotide
cggaatgatatggtgcagtct

SEQ ID NO: 23437 - DNA, 21 bp, Artificial Sequence
  Description of Artificial Sequence: Synthetic oligonucleotide
cggaatgataatagggttact

SEQ ID NO: 23438 - DNA, 21 bp, Artificial Sequence
  Description of Artificial Sequence: Synthetic oligonucleotide
cgtaatgataggtcgtttgct

SEQ ID NO: 23439 - DNA, 21 bp, Artificial Sequence
  Description of Artificial Sequence: Synthetic oligonucleotide
cgtaatgatactagtgatttg

SEQ ID NO: 23440 - DNA, 21 bp, Artificial Sequence
  Description of Artificial Sequence: Synthetic oligonucleotide
cgtaatgatgtttcggatatt

SEQ ID NO: 23441 - DNA, 21 bp, Artificial Sequence
  Description of Artificial Sequence: Synthetic oligonucleotide
cgtaatgagcatcatttgcct

SEQ ID NO: 23442 - DNA, 21 bp, Artificial Sequence
  Description of Artificial Sequence: Synthetic oligonucleotide
cgtaatgagccgaatggtggg

SEQ ID NO: 23443 - DNA, 21 bp, Artificial Sequence
  Description of Artificial Sequence: Synthetic oligonucleotide
cggaattttgctgattctatg

SEQ ID NO: 23444 - DNA, 21 bp, Artificial Sequence
  Description of Artificial Sequence: Synthetic oligonucleotide
cggaattttactggtcctgag

SEQ ID NO: 23445 - DNA, 21 bp, Artificial Sequence
  Description of Artificial Sequence: Synthetic oligonucleotide
cgtaatggtgctattcaggct

SEQ ID NO: 23446 - DNA, 21 bp, Artificial Sequence
  Description of Artificial Sequence: Synthetic oligonucleotide
cggaatggtcgtgatgcgggg

SEQ ID NO: 23447 - DNA, 21 bp, Artificial Sequence
  Description of Artificial Sequence: Synthetic oligonucleotide
cgtaatggtgtgacggcggcg

SEQ ID NO: 23448 - DNA, 21 bp, Artificial Sequence
  Description of Artificial Sequence: Synthetic oligonucleotide
cggaatcatggttttgctgag

SEQ ID NO: 23449 - DNA, 21 bp, Artificial Sequence
  Description of Artificial Sequence: Synthetic oligonucleotide
cggaatattgatgatgcgaat

SEQ ID NO: 23450 - DNA, 21 bp, Artificial Sequence
  Description of Artificial Sequence: Synthetic oligonucleotide
cgtaataaggagaatgttggg

SEQ ID NO: 23451 - DNA, 21 bp, Artificial Sequence
  Description of Artificial Sequence: Synthetic oligonucleotide
cgtaatcttccgcctcgtgat

SEQ ID NO: 23452 - DNA, 21 bp, Artificial Sequence
  Description of Artificial Sequence: Synthetic oligonucleotide
cggaatctgactattcctgag

SEQ ID NO: 23453 - DNA, 21 bp, Artificial Sequence
  Description of Artificial Sequence: Synthetic oligonucleotide
aggaatatggcgctgactagt

SEQ ID NO: 23454 - DNA, 21 bp, Artificial Sequence
  Description of Artificial Sequence: Synthetic oligonucleotide
aggaataatgctctgccggat

SEQ ID NO: 23455 - DNA, 21 bp, Artificial Sequence
  Description of Artificial Sequence: Synthetic oligonucleotide
cgtaataattctcatgggttt

SEQ ID NO: 23456 - DNA, 21 bp, Artificial Sequence
  Description of Artificial Sequence: Synthetic oligonucleotide
aggaatcctgatatgcatcat

SEQ ID NO: 23457 - DNA, 21 bp, Artificial Sequence
  Description of Artificial Sequence: Synthetic oligonucleotide
aggaatccgcttagtgctcag

SEQ ID NO: 23458 - DNA, 21 bp, Artificial Sequence
  Description of Artificial Sequence: Synthetic oligonucleotide
aggaatcaggggcttttggct

SEQ ID NO: 23459 - DNA, 21 bp, Artificial Sequence
  Description of Artificial Sequence: Synthetic oligonucleotide
cggaatcagactagtacgtct

SEQ ID NO: 23460 - DNA, 21 bp, Artificial Sequence
  Description of Artificial Sequence: Synthetic oligonucleotide
aggaatcgggatccgcagttt

SEQ ID NO: 23461 - DNA, 21 bp, Artificial Sequence
  Description of Artificial Sequence: Synthetic oligonucleotide
aggaatagtgctgctttgcag

SEQ ID NO: 23462 - DNA, 21 bp, Artificial Sequence
  Description of Artificial Sequence: Synthetic oligonucleotide
cggaattcggattattcggtt

SEQ ID NO: 23463 - DNA, 21 bp, Artificial Sequence
  Description of Artificial Sequence: Synthetic oligonucleotide
aggaattctcttggttttggg

SEQ ID NO: 23464 - DNA, 21 bp, Artificial Sequence
  Description of Artificial Sequence: Synthetic oligonucleotide
cgtaatagtcaggttcctatt

SEQ ID NO: 23465 - DNA, 21 bp, Artificial Sequence
  Description of Artificial Sequence: Synthetic oligonucleotide
cgtaattcttcttcgttgggg

SEQ ID NO: 23466 - DNA, 21 bp, Artificial Sequence
  Description of Artificial Sequence: Synthetic oligonucleotide
cgtaattctacgtctatgacg

SEQ ID NO: 23467 - DNA, 21 bp, Artificial Sequence
  Description of Artificial Sequence: Synthetic oligonucleotide
cggaattcggtgactactcct

SEQ ID NO: 23468 - DNA, 21 bp, Artificial Sequence
  Description of Artificial Sequence: Synthetic oligonucleotide
cggaatagttatcctagtgat

SEQ ID NO: 23469 - DNA, 21 bp, Artificial Sequence
  Description of Artificial Sequence: Synthetic oligonucleotide
cgtaatacggatgttgattcg

SEQ ID NO: 23470 - DNA, 21 bp, Artificial Sequence
  Description of Artificial Sequence: Synthetic oligonucleotide
aggaatactcttctgatggat

SEQ ID NO: 23471 - DNA, 21 bp, Artificial Sequence
  Description of Artificial Sequence: Synthetic oligonucleotide
cgtaatacgctggttattcct

SEQ ID NO: 23472 - DNA, 21 bp, Artificial Sequence
  Description of Artificial Sequence: Synthetic oligonucleotide
aggaatactcctaatcgggat

SEQ ID NO: 23473 - DNA, 21 bp, Artificial Sequence
  Description of Artificial Sequence: Synthetic oligonucleotide
cggaatacttcgcagctggat

SEQ ID NO: 23474 - DNA, 21 bp, Artificial Sequence
  Description of Artificial Sequence: Synthetic oligonucleotide
cgtaatgtggagactgctggt

SEQ ID NO: 23475 - DNA, 21 bp, Artificial Sequence
  Description of Artificial Sequence: Synthetic oligonucleotide
cgtaatgttggtcatggtgat

SEQ ID NO: 23476 - DNA, 21 bp, Artificial Sequence
  Description of Artificial Sequence: Synthetic oligonucleotide
cgtaatgttggtcctcctact

SEQ ID NO: 23477 - DNA, 21 bp, Artificial Sequence
  Description of Artificial Sequence: Synthetic oligonucleotide
aggaatgttcctgagcatcgg

SEQ ID NO: 23478 - DNA, 21 bp, Artificial Sequence
  Description of Artificial Sequence: Synthetic oligonucleotide
cggaatgttcagttttcgccg

SEQ ID NO: 23479 - DNA, 21 bp, Artificial Sequence
  Description of Artificial Sequence: Synthetic oligonucleotide
cggaatgtgcgtgatactccg

SEQ ID NO: 23480 - DNA, 21 bp, Artificial Sequence
  Description of Artificial Sequence: Synthetic oligonucleotide
cgtaatgtgtctgatagttct

SEQ ID NO: 23481 - DNA, 21 bp, Artificial Sequence
  Description of Artificial Sequence: Synthetic oligonucleotide
cgtaattatgcgggtaaggat

SEQ ID NO: 23482 - DNA, 21 bp, Artificial Sequence
  Description of Artificial Sequence: Synthetic oligonucleotide
cggcctgctgcggtttctaat

SEQ ID NO: 23483 - DNA, 21 bp, Artificial Sequence
  Description of Artificial Sequence: Synthetic oligonucleotide
cgtccggctgataagtgtacg

SEQ ID NO: 23484 - DNA, 21 bp, Artificial Sequence
  Description of Artificial Sequence: Synthetic oligonucleotide
cggcctgcgaagctggagttg

SEQ ID NO: 23485 - DNA, 21 bp, Artificial Sequence
  Description of Artificial Sequence: Synthetic oligonucleotide
cggccggctatgctggctact

SEQ ID NO: 23486 - DNA, 21 bp, Artificial Sequence
  Description of Artificial Sequence: Synthetic oligonucleotide
cggccggcgtcgggtcatgtg

SEQ ID NO: 23487 - DNA, 21 bp, Artificial Sequence
  Description of Artificial Sequence: Synthetic oligonucleotide
cggcctgcgacggtgggtgct

SEQ ID NO: 23488 - DNA, 21 bp, Artificial Sequence
  Description of Artificial Sequence: Synthetic oligonucleotide
cgtcctgctgtgatgaagggg

SEQ ID NO: 23489 - DNA, 21 bp, Artificial Sequence
  Description of Artificial Sequence: Synthetic oligonucleotide
cgtcctgatgcttctgagtct

SEQ ID NO: 23490 - DNA, 21 bp, Artificial Sequence
  Description of Artificial Sequence: Synthetic oligonucleotide
aggcctgatgatcctgcgaat

SEQ ID NO: 23491 - DNA, 21 bp, Artificial Sequence
  Description of Artificial Sequence: Synthetic oligonucleotide
cgtcctgatggtatggcttct

SEQ ID NO: 23492 - DNA, 21 bp, Artificial Sequence
  Description of Artificial Sequence: Synthetic oligonucleotide
cgtcctgatcattctaatgtt

SEQ ID NO: 23493 - DNA, 21 bp, Artificial Sequence
  Description of Artificial Sequence: Synthetic oligonucleotide
aggccggataattctaaggcg

SEQ ID NO: 23494 - DNA, 21 bp, Artificial Sequence
  Description of Artificial Sequence: Synthetic oligonucleotide
aggccggattcgctgaagctt

SEQ ID NO: 23495 - DNA, 21 bp, Artificial Sequence
  Description of Artificial Sequence: Synthetic oligonucleotide
cggccggattcgccttttact

SEQ ID NO: 23496 - DNA, 21 bp, Artificial Sequence
  Description of Artificial Sequence: Synthetic oligonucleotide
cggccggatactcgggctgct

SEQ ID NO: 23497 - DNA, 21 bp, Artificial Sequence
  Description of Artificial Sequence: Synthetic oligonucleotide
aggcctgaggaggctacgtcg

SEQ ID NO: 23498 - DNA, 21 bp, Artificial Sequence
  Description of Artificial Sequence: Synthetic oligonucleotide
cgtcctgaggggtctatgggt

SEQ ID NO: 23499 - DNA, 21 bp, Artificial Sequence
  Description of Artificial Sequence: Synthetic oligonucleotide
aggcctgagcttggtcttctg

SEQ ID NO: 23500 - DNA, 21 bp, Artificial Sequence
  Description of Artificial Sequence: Synthetic oligonucleotide
cgtcctgagttgaagcagagt

SEQ ID NO: 23501 - DNA, 21 bp, Artificial Sequence
  Description of Artificial Sequence: Synthetic oligonucleotide
aggcctgagctgtcttcgagg

SEQ ID NO: 23502 - DNA, 21 bp, Artificial Sequence
  Description of Artificial Sequence: Synthetic oligonucleotide
cggcctgagtcggtgtatggg

SEQ ID NO: 23503 - DNA, 21 bp, Artificial Sequence
  Description of Artificial Sequence: Synthetic oligonucleotide
aggccgtttgctcctcaggag

SEQ ID NO: 23504 - DNA, 21 bp, Artificial Sequence
  Description of Artificial Sequence: Synthetic oligonucleotide
cgtccgtttagtccgacgccg

SEQ ID NO: 23505 - DNA, 21 bp, Artificial Sequence
  Description of Artificial Sequence: Synthetic oligonucleotide
aggcctggtgctgatgctagg

SEQ ID NO: 23506 - DNA, 21 bp, Artificial Sequence
  Description of Artificial Sequence: Synthetic oligonucleotide
aggccggggggtggtacggag

SEQ ID NO: 23507 - DNA, 21 bp, Artificial Sequence
  Description of Artificial Sequence: Synthetic oligonucleotide
cggccggggttgtcgacgctt

SEQ ID NO: 23508 - DNA, 21 bp, Artificial Sequence
  Description of Artificial Sequence: Synthetic oligonucleotide
aggcctgggaatacgttgcct

SEQ ID NO: 23509 - DNA, 21 bp, Artificial Sequence
  Description of Artificial Sequence: Synthetic oligonucleotide
cggccggggagggagccgctt

SEQ ID NO: 23510 - DNA, 21 bp, Artificial Sequence
  Description of Artificial Sequence: Synthetic oligonucleotide
aggccgggttcgagtactgag

SEQ ID NO: 23511 - DNA, 21 bp, Artificial Sequence
  Description of Artificial Sequence: Synthetic oligonucleotide
cgtccgggtacgtcgacggtt

SEQ ID NO: 23512 - DNA, 21 bp, Artificial Sequence
  Description of Artificial Sequence: Synthetic oligonucleotide
cgtccgcatagtgataagttt

SEQ ID NO: 23513 - DNA, 21 bp, Artificial Sequence
  Description of Artificial Sequence: Synthetic oligonucleotide
cggcctattgcttctacgaat

SEQ ID NO: 23514 - DNA, 21 bp, Artificial Sequence
  Description of Artificial Sequence: Synthetic oligonucleotide
cggcctaaggagtcgtctgtt

SEQ ID NO: 23515 - DNA, 21 bp, Artificial Sequence
  Description of Artificial Sequence: Synthetic oligonucleotide
aggcctcttgatgcgcctgat

SEQ ID NO: 23516 - DNA, 21 bp, Artificial Sequence
  Description of Artificial Sequence: Synthetic oligonucleotide
cgtcctcttgatcaggagagt

SEQ ID NO: 23517 - DNA, 21 bp, Artificial Sequence
  Description of Artificial Sequence: Synthetic oligonucleotide
cggccgctggagtctcgggat

SEQ ID NO: 23518 - DNA, 21 bp, Artificial Sequence
  Description of Artificial Sequence: Synthetic oligonucleotide
cgtcctcttggtccgcatatt

SEQ ID NO: 23519 - DNA, 21 bp, Artificial Sequence
  Description of Artificial Sequence: Synthetic oligonucleotide
cgtcctctgggtcctaatgat

SEQ ID NO: 23520 - DNA, 21 bp, Artificial Sequence
  Description of Artificial Sequence: Synthetic oligonucleotide
cgtccgctggggtctgatact

SEQ ID NO: 23521 - DNA, 21 bp, Artificial Sequence
  Description of Artificial Sequence: Synthetic oligonucleotide
cggcctctgattcctaataat

SEQ ID NO: 23522 - DNA, 21 bp, Artificial Sequence
  Description of Artificial Sequence: Synthetic oligonucleotide
aggccgttgaagcatgatcct

SEQ ID NO: 23523 - DNA, 21 bp, Artificial Sequence
  Description of Artificial Sequence: Synthetic oligonucleotide
cgtccgctgactgagtatgtg

SEQ ID NO: 23524 - DNA, 21 bp, Artificial Sequence
  Description of Artificial Sequence: Synthetic oligonucleotide
aggccgcttgttatgggggtt

SEQ ID NO: 23525 - DNA, 21 bp, Artificial Sequence
  Description of Artificial Sequence: Synthetic oligonucleotide
aggccgatggctactttgtct

SEQ ID NO: 23526 - DNA, 21 bp, Artificial Sequence
  Description of Artificial Sequence: Synthetic oligonucleotide
aggccgatgattacgtctgcg

SEQ ID NO: 23527 - DNA, 21 bp, Artificial Sequence
  Description of Artificial Sequence: Synthetic oligonucleotide
cggccgatgaatcttaaggag

SEQ ID NO: 23528 - DNA, 21 bp, Artificial Sequence
  Description of Artificial Sequence: Synthetic oligonucleotide
cgtccgatgccgaattcgcct

SEQ ID NO: 23529 - DNA, 21 bp, Artificial Sequence
  Description of Artificial Sequence: Synthetic oligonucleotide
cgtccgatgtctcttgagtcg

SEQ ID NO: 23530 - DNA, 21 bp, Artificial Sequence
  Description of Artificial Sequence: Synthetic oligonucleotide
aggccgatgactccgcagctt

SEQ ID NO: 23531 - DNA, 21 bp, Artificial Sequence
  Description of Artificial Sequence: Synthetic oligonucleotide
aggccgaatgctgttactgtg

SEQ ID NO: 23532 - DNA, 21 bp, Artificial Sequence
  Description of Artificial Sequence: Synthetic oligonucleotide
cgtccgcctgagattcatttt

SEQ ID NO: 23533 - DNA, 21 bp, Artificial Sequence
  Description of Artificial Sequence: Synthetic oligonucleotide
cgtcctccgggtcctatgtct

SEQ ID NO: 23534 - DNA, 21 bp, Artificial Sequence
  Description of Artificial Sequence: Synthetic oligonucleotide
cggccgcctttgggtgagggt

SEQ ID NO: 23535 - DNA, 21 bp, Artificial Sequence
  Description of Artificial Sequence: Synthetic oligonucleotide
cggcctccgaatgctactcct

SEQ ID NO: 23536 - DNA, 21 bp, Artificial Sequence
  Description of Artificial Sequence: Synthetic oligonucleotide
aggcctcctaatggggatatg

SEQ ID NO: 23537 - DNA, 21 bp, Artificial Sequence
  Description of Artificial Sequence: Synthetic oligonucleotide
cggccgccttcgacggttaat

SEQ ID NO: 23538 - DNA, 21 bp, Artificial Sequence
  Description of Artificial Sequence: Synthetic oligonucleotide
aggccgcctagtgttcagcct

SEQ ID NO: 23539 - DNA, 21 bp, Artificial Sequence
  Description of Artificial Sequence: Synthetic oligonucleotide
cgtccgcctgttcagacgggg

SEQ ID NO: 23540 - DNA, 21 bp, Artificial Sequence
  Description of Artificial Sequence: Synthetic oligonucleotide
cgtccgcagcatattatgcct

SEQ ID NO: 23541 - DNA, 21 bp, Artificial Sequence
  Description of Artificial Sequence: Synthetic oligonucleotide
cgtccgcagaaggcgtctgag

SEQ ID NO: 23542 - DNA, 21 bp, Artificial Sequence
  Description of Artificial Sequence: Synthetic oligonucleotide
cgtcctcagcctacgccgtgt

SEQ ID NO: 23543 - DNA, 21 bp, Artificial Sequence
  Description of Artificial Sequence: Synthetic oligonucleotide
cgtccgcgggagatttcgccg

SEQ ID NO: 23544 - DNA, 21 bp, Artificial Sequence
  Description of Artificial Sequence: Synthetic oligonucleotide
cggccgcgttttgctagtgat

SEQ ID NO: 23545 - DNA, 21 bp, Artificial Sequence
  Description of Artificial Sequence: Synthetic oligonucleotide
cggccgtcggcggctactccg

SEQ ID NO: 23546 - DNA, 21 bp, Artificial Sequence
  Description of Artificial Sequence: Synthetic oligonucleotide
cgtccgagtgatctgaagaat

SEQ ID NO: 23547 - DNA, 21 bp, Artificial Sequence
  Description of Artificial Sequence: Synthetic oligonucleotide
aggccttctggtatggctcat

SEQ ID NO: 23548 - DNA, 21 bp, Artificial Sequence
  Description of Artificial Sequence: Synthetic oligonucleotide
cggccgtcgcttgcggtgggt

SEQ ID NO: 23549 - DNA, 21 bp, Artificial Sequence
  Description of Artificial Sequence: Synthetic oligonucleotide
cgtccgagtttgccggatttt

SEQ ID NO: 23550 - DNA, 21 bp, Artificial Sequence
  Description of Artificial Sequence: Synthetic oligonucleotide
cgtccttctcttagtggtacg

SEQ ID NO: 23551 - DNA, 21 bp, Artificial Sequence
  Description of Artificial Sequence: Synthetic oligonucleotide
cgtccgtcgctttctccgact

SEQ ID NO: 23552 - DNA, 21 bp, Artificial Sequence
  Description of Artificial Sequence: Synthetic oligonucleotide
aggccttcgaatgctatggcg

SEQ ID NO: 23553 - DNA, 21 bp, Artificial Sequence
  Description of Artificial Sequence: Synthetic oligonucleotide
cgtcctagtaatcagagttct

SEQ ID NO: 23554 - DNA, 21 bp, Artificial Sequence
  Description of Artificial Sequence: Synthetic oligonucleotide
aggccttcgactgattcttat

SEQ ID NO: 23555 - DNA, 21 bp, Artificial Sequence
  Description of Artificial Sequence: Synthetic oligonucleotide
cgtccgtcgacgtatccgtct

SEQ ID NO: 23556 - DNA, 21 bp, Artificial Sequence
  Description of Artificial Sequence: Synthetic oligonucleotide
aggccgtctgtgaatgagcat

SEQ ID NO: 23557 - DNA, 21 bp, Artificial Sequence
  Description of Artificial Sequence: Synthetic oligonucleotide
cgtcctacgctgccgatggct

SEQ ID NO: 23558 - DNA, 21 bp, Artificial Sequence
  Description of Artificial Sequence: Synthetic oligonucleotide
aggcctactcagattcttggt

SEQ ID NO: 23559 - DNA, 21 bp, Artificial Sequence
  Description of Artificial Sequence: Synthetic oligonucleotide
cggcctacttctccgccggcg

SEQ ID NO: 23560 - DNA, 21 bp, Artificial Sequence
  Description of Artificial Sequence: Synthetic oligonucleotide
cggccgacttctactacttct

SEQ ID NO: 23561 - DNA, 21 bp, Artificial Sequence
  Description of Artificial Sequence: Synthetic oligonucleotide
aggccgactacgtctaatggt

SEQ ID NO: 23562 - DNA, 21 bp, Artificial Sequence
  Description of Artificial Sequence: Synthetic oligonucleotide
aggcctactacgacgcaggag

SEQ ID NO: 23563 - DNA, 21 bp, Artificial Sequence
  Description of Artificial Sequence: Synthetic oligonucleotide
aggccgactactacgtctgtt

SEQ ID NO: 23564 - DNA, 21 bp, Artificial Sequence
  Description of Artificial Sequence: Synthetic oligonucleotide
cgtcctgtttgtgatggtact

SEQ ID NO: 23565 - DNA, 21 bp, Artificial Sequence
  Description of Artificial Sequence: Synthetic oligonucleotide
cgtcctgttgattgggatctt

SEQ ID NO: 23566 - DNA, 21 bp, Artificial Sequence
  Description of Artificial Sequence: Synthetic oligonucleotide
cggcctgtgaaggagtatgtg

SEQ ID NO: 23567 - DNA, 21 bp, Artificial Sequence
  Description of Artificial Sequence: Synthetic oligonucleotide
cgtcctgtgttgtctactggg

SEQ ID NO: 23568 - DNA, 21 bp, Artificial Sequence
  Description of Artificial Sequence: Synthetic oligonucleotide
cggcctgttccggatcagatt

SEQ ID NO: 23569 - DNA, 21 bp, Artificial Sequence
  Description of Artificial Sequence: Synthetic oligonucleotide
cgtccttatccgccgcctatt

SEQ ID NO: 23570 - DNA, 21 bp, Artificial Sequence
  Description of Artificial Sequence: Synthetic oligonucleotide
aggcaggctctgattagtggt

SEQ ID NO: 23571 - DNA, 21 bp, Artificial Sequence
  Description of Artificial Sequence: Synthetic oligonucleotide
aggcaggatgctgctatttct

SEQ ID NO: 23572 - DNA, 21 bp, Artificial Sequence
  Description of Artificial Sequence: Synthetic oligonucleotide
cggcaggatgatcataagatt

SEQ ID NO: 23573 - DNA, 21 bp, Artificial Sequence
  Description of Artificial Sequence: Synthetic oligonucleotide
aggcagtttacggagaatgct

SEQ ID NO: 23574 - DNA, 21 bp, Artificial Sequence
  Description of Artificial Sequence: Synthetic oligonucleotide
cgtcagggtgttactcctact

SEQ ID NO: 23575 - DNA, 21 bp, Artificial Sequence
  Description of Artificial Sequence: Synthetic oligonucleotide
cggcagcatcagcttccgcat

SEQ ID NO: 23576 - DNA, 21 bp, Artificial Sequence
  Description of Artificial Sequence: Synthetic oligonucleotide
cgtcagattccgcatacggag

SEQ ID NO: 23577 - DNA, 21 bp, Artificial Sequence
  Description of Artificial Sequence: Synthetic oligonucleotide
cgtcagaaggagcataatctt

SEQ ID NO: 23578 - DNA, 21 bp, Artificial Sequence
  Description of Artificial Sequence: Synthetic oligonucleotide
cggcagctggaggcggatcct

SEQ ID NO: 23579 - DNA, 21 bp, Artificial Sequence
  Description of Artificial Sequence: Synthetic oligonucleotide
aggcagaatgatgtttgttct

SEQ ID NO: 23580 - DNA, 21 bp, Artificial Sequence
  Description of Artificial Sequence: Synthetic oligonucleotide
aggcagaatcatatgcctgct

SEQ ID NO: 23581 - DNA, 21 bp, Artificial Sequence
  Description of Artificial Sequence: Synthetic oligonucleotide
cgtcagaataggtgtattgat

SEQ ID NO: 23582 - DNA, 21 bp, Artificial Sequence
  Description of Artificial Sequence: Synthetic oligonucleotide
cgtcagcctttgtatacggat

SEQ ID NO: 23583 - DNA, 21 bp, Artificial Sequence
  Description of Artificial Sequence: Synthetic oligonucleotide
aggcagcctccgaagcttgct

SEQ ID NO: 23584 - DNA, 21 bp, Artificial Sequence
  Description of Artificial Sequence: Synthetic oligonucleotide
cggcagcaggcgcatttggtt

SEQ ID NO: 23585 - DNA, 21 bp, Artificial Sequence
  Description of Artificial Sequence: Synthetic oligonucleotide
cgtcagtcggatctttatagt

SEQ ID NO: 23586 - DNA, 21 bp, Artificial Sequence
  Description of Artificial Sequence: Synthetic oligonucleotide
aggcagtctaattttgcgact

SEQ ID NO: 23587 - DNA, 21 bp, Artificial Sequence
  Description of Artificial Sequence: Synthetic oligonucleotide
cgtcagtctaatactttgaat

SEQ ID NO: 23588 - DNA, 21 bp, Artificial Sequence
  Description of Artificial Sequence: Synthetic oligonucleotide
aggcagtctcagtgtcctatg

SEQ ID NO: 23589 - DNA, 21 bp, Artificial Sequence
  Description of Artificial Sequence: Synthetic oligonucleotide
aggcagagttcgtatgatgtg

SEQ ID NO: 23590 - DNA, 21 bp, Artificial Sequence
  Description of Artificial Sequence: Synthetic oligonucleotide
cggcagtcgacgcagctgctt

SEQ ID NO: 23591 - DNA, 21 bp, Artificial Sequence
  Description of Artificial Sequence: Synthetic oligonucleotide
cgtcagtcggttccgacgtcg

SEQ ID NO: 23592 - DNA, 21 bp, Artificial Sequence
  Description of Artificial Sequence: Synthetic oligonucleotide
cgtcagtcggtgtctaatttg

SEQ ID NO: 23593 - DNA, 21 bp, Artificial Sequence
  Description of Artificial Sequence: Synthetic oligonucleotide
cggcagactcatactctgcag

SEQ ID NO: 23594 - DNA, 21 bp, Artificial Sequence
  Description of Artificial Sequence: Synthetic oligonucleotide
aggcagacgcagcagatgtat

SEQ ID NO: 23595 - DNA, 21 bp, Artificial Sequence
  Description of Artificial Sequence: Synthetic oligonucleotide
aggcaggttgagactatgagt

SEQ ID NO: 23596 - DNA, 21 bp, Artificial Sequence
  Description of Artificial Sequence: Synthetic oligonucleotide
cggcaggtggggatgctgtcg

SEQ ID NO: 23597 - DNA, 21 bp, Artificial Sequence
  Description of Artificial Sequence: Synthetic oligonucleotide
aggcaggttccgtctgcggag

SEQ ID NO: 23598 - DNA, 21 bp, Artificial Sequence
  Description of Artificial Sequence: Synthetic oligonucleotide
cggcgggatgatggtagttct

SEQ ID NO: 23599 - DNA, 21 bp, Artificial Sequence
  Description of Artificial Sequence: Synthetic oligonucleotide
cgtcgggatgagttgactttg

SEQ ID NO: 23600 - DNA, 21 bp, Artificial Sequence
  Description of Artificial Sequence: Synthetic oligonucleotide
aggagggatgggatgcttatg

SEQ ID NO: 23601 - DNA, 21 bp, Artificial Sequence
  Description of Artificial Sequence: Synthetic oligonucleotide
cggcgtgatcatgctcctatt

SEQ ID NO: 23602 - DNA, 21 bp, Artificial Sequence
  Description of Artificial Sequence: Synthetic oligonucleotide
cggcgtgatccttcgacggtt

SEQ ID NO: 23603 - DNA, 21 bp, Artificial Sequence
  Description of Artificial Sequence: Synthetic oligonucleotide
cggcgtgatcagcctgtgcct

SEQ ID NO: 23604 - DNA, 21 bp, Artificial Sequence
  Description of Artificial Sequence: Synthetic oligonucleotide
cggagggatgtgtctggtccg

SEQ ID NO: 23605 - DNA, 21 bp, Artificial Sequence
  Description of Artificial Sequence: Synthetic oligonucleotide
aggcgggagtcgggtattggt

SEQ ID NO: 23606 - DNA, 21 bp, Artificial Sequence
  Description of Artificial Sequence: Synthetic oligonucleotide
aggcgtgggacttctgagcct

SEQ ID NO: 23607 - DNA, 21 bp, Artificial Sequence
  Description of Artificial Sequence: Synthetic oligonucleotide
aggcgtctgcctggtgatgtt

SEQ ID NO: 23608 - DNA, 21 bp, Artificial Sequence
  Description of Artificial Sequence: Synthetic oligonucleotide
aggcggaatgatgctcttcct

SEQ ID NO: 23609 - DNA, 21 bp, Artificial Sequence
  Description of Artificial Sequence: Synthetic oligonucleotide
cgtaggccggagattgagagg

SEQ ID NO: 23610 - DNA, 21 bp, Artificial Sequence
  Description of Artificial Sequence: Synthetic oligonucleotide
aggcggccttcgttgagtgat

SEQ ID NO: 23611 - DNA, 21 bp, Artificial Sequence
  Description of Artificial Sequence: Synthetic oligonucleotide
aggcggccgtctcctgatgtt

SEQ ID NO: 23612 - DNA, 21 bp, Artificial Sequence
  Description of Artificial Sequence: Synthetic oligonucleotide
cggcggagtgatctgtatgtg

SEQ ID NO: 23613 - DNA, 21 bp, Artificial Sequence
  Description of Artificial Sequence: Synthetic oligonucleotide
cgtcgtacggatacgctgtat

SEQ ID NO: 23614 - DNA, 21 bp, Artificial Sequence
  Description of Artificial Sequence: Synthetic oligonucleotide
aggcgtgttggtactggtgat

SEQ ID NO: 23615 - DNA, 21 bp, Artificial Sequence
  Description of Artificial Sequence: Synthetic oligonucleotide
aggtctgcggcggcggtgtat

SEQ ID NO: 23616 - DNA, 21 bp, Artificial Sequence
  Description of Artificial Sequence: Synthetic oligonucleotide
cggagtgcggcgatgagtgag

SEQ ID NO: 23617 - DNA, 21 bp, Artificial Sequence
  Description of Artificial Sequence: Synthetic oligonucleotide
aggagtgcggcgacgtcgact

SEQ ID NO: 23618 - DNA, 21 bp, Artificial Sequence
  Description of Artificial Sequence: Synthetic oligonucleotide
aggagtgctgcggttacgtat

SEQ ID NO: 23619 - DNA, 21 bp, Artificial Sequence
  Description of Artificial Sequence: Synthetic oligonucleotide
aggtctgcgggtcctaatgag

SEQ ID NO: 23620 - DNA, 21 bp, Artificial Sequence
  Description of Artificial Sequence: Synthetic oligonucleotide
cgttctgctttgaatacgagt

SEQ ID NO: 23621 - DNA, 21 bp, Artificial Sequence
  Description of Artificial Sequence: Synthetic oligonucleotide
cgttctgcgttgcctaatttg

SEQ ID NO: 23622 - DNA, 21 bp, Artificial Sequence
  Description of Artificial Sequence: Synthetic oligonucleotide
aggtctgctatggcggggccg

SEQ ID NO: 23623 - DNA, 21 bp, Artificial Sequence
  Description of Artificial Sequence: Synthetic oligonucleotide
cgtagtgctaatcagagtgtg

SEQ ID NO: 23624 - DNA, 21 bp, Artificial Sequence
  Description of Artificial Sequence: Synthetic oligonucleotide
cgtagtgctcctgcggtgatt

SEQ ID NO: 23625 - DNA, 21 bp, Artificial Sequence
  Description of Artificial Sequence: Synthetic oligonucleotide
cgttcggctccggagctgact

SEQ ID NO: 23626 - DNA, 21 bp, Artificial Sequence
  Description of Artificial Sequence: Synthetic oligonucleotide
cgtagtgctcagctgacggcg

SEQ ID NO: 23627 - DNA, 21 bp, Artificial Sequence
  Description of Artificial Sequence: Synthetic oligonucleotide
cgtagtgctcagaattcgttg

SEQ ID NO: 23628 - DNA, 21 bp, Artificial Sequence
  Description of Artificial Sequence: Synthetic oligonucleotide
aggtctgctagtttgcagtct

SEQ ID NO: 23629 - DNA, 21 bp, Artificial Sequence
  Description of Artificial Sequence: Synthetic oligonucleotide
cgttctgctgttcctgattcg

SEQ ID NO: 23630 - DNA, 21 bp, Artificial Sequence
  Description of Artificial Sequence: Synthetic oligonucleotide
cgttcggatgagcttaggact

SEQ ID NO: 23631 - DNA, 21 bp, Artificial Sequence
  Description of Artificial Sequence: Synthetic oligonucleotide
cgttctgatgggcgtagtatt

SEQ ID NO: 23632 - DNA, 21 bp, Artificial Sequence
  Description of Artificial Sequence: Synthetic oligonucleotide
cggagtgatccggcgcgtacg

SEQ ID NO: 23633 - DNA, 21 bp, Artificial Sequence
  Description of Artificial Sequence: Synthetic oligonucleotide
aggtcggattctaggcctctt

SEQ ID NO: 23634 - DNA, 21 bp, Artificial Sequence
  Description of Artificial Sequence: Synthetic oligonucleotide
aggagtgatagtgttacgcat

SEQ ID NO: 23635 - DNA, 21 bp, Artificial Sequence
  Description of Artificial Sequence: Synthetic oligonucleotide
aggtcggatgtgaggcttgct

SEQ ID NO: 23636 - DNA, 21 bp, Artificial Sequence
  Description of Artificial Sequence: Synthetic oligonucleotide
cggagtgaggagattcgggat

SEQ ID NO: 23637 - DNA, 21 bp, Artificial Sequence
  Description of Artificial Sequence: Synthetic oligonucleotide
aggtctgagattcttgttact

SEQ ID NO: 23638 - DNA, 21 bp, Artificial Sequence
  Description of Artificial Sequence: Synthetic oligonucleotide
cgttcggagaaggtggctcct

SEQ ID NO: 23639 - DNA, 21 bp, Artificial Sequence
  Description of Artificial Sequence: Synthetic oligonucleotide
aggtcggagccggatgagtat

SEQ ID NO: 23640 - DNA, 21 bp, Artificial Sequence
  Description of Artificial Sequence: Synthetic oligonucleotide
cggtctgagtatgcgcctcag

SEQ ID NO: 23641 - DNA, 21 bp, Artificial Sequence
  Description of Artificial Sequence: Synthetic oligonucleotide
cgttctgggcatagtgggtat

SEQ ID NO: 23642 - DNA, 21 bp, Artificial Sequence
  Description of Artificial Sequence: Synthetic oligonucleotide
cgttctgggctggcttcgggg

SEQ ID NO: 23643 - DNA, 21 bp, Artificial Sequence
  Description of Artificial Sequence: Synthetic oligonucleotide
cggtctgggcttgataagact

SEQ ID NO: 23644 - DNA, 21 bp, Artificial Sequence
  Description of Artificial Sequence: Synthetic oligonucleotide
cggtctggtctgaaggagctg

SEQ ID NO: 23645 - DNA, 21 bp, Artificial Sequence
  Description of Artificial Sequence: Synthetic oligonucleotide
cgttctggtatggtgtctgct

SEQ ID NO: 23646 - DNA, 21 bp, Artificial Sequence
  Description of Artificial Sequence: Synthetic oligonucleotide
cgttcgggtcaggatgcgctg

SEQ ID NO: 23647 - DNA, 21 bp, Artificial Sequence
  Description of Artificial Sequence: Synthetic oligonucleotide
cggtctggttctggtcttgag

SEQ ID NO: 23648 - DNA, 21 bp, Artificial Sequence
  Description of Artificial Sequence: Synthetic oligonucleotide
cggagtcataatgaggaggag

SEQ ID NO: 23649 - DNA, 21 bp, Artificial Sequence
  Description of Artificial Sequence: Synthetic oligonucleotide
cggtctcatagtacggattcg

SEQ ID NO: 23650 - DNA, 21 bp, Artificial Sequence
  Description of Artificial Sequence: Synthetic oligonucleotide
cggtcgattgcggcggatgcg

SEQ ID NO: 23651 - DNA, 21 bp, Artificial Sequence
  Description of Artificial Sequence: Synthetic oligonucleotide
cggagtattgcttggagtgag

SEQ ID NO: 23652 - DNA, 21 bp, Artificial Sequence
  Description of Artificial Sequence: Synthetic oligonucleotide
cggtcgattgagaatgcggat

SEQ ID NO: 23653 - DNA, 21 bp, Artificial Sequence
  Description of Artificial Sequence: Synthetic oligonucleotide
cgttctattcctgatcctact

SEQ ID NO: 23654 - DNA, 21 bp, Artificial Sequence
  Description of Artificial Sequence: Synthetic oligonucleotide
cggagtattcagcctacgaat

SEQ ID NO: 23655 - DNA, 21 bp, Artificial Sequence
  Description of Artificial Sequence: Synthetic oligonucleotide
cgttcgattcagacgaatccg

SEQ ID NO: 23656 - DNA, 21 bp, Artificial Sequence
  Description of Artificial Sequence: Synthetic oligonucleotide
cgttcgaaggaggctactagt

SEQ ID NO: 23657 - DNA, 21 bp, Artificial Sequence
  Description of Artificial Sequence: Synthetic oligonucleotide
cggagtaagcaggcttcggag

SEQ ID NO: 23658 - DNA, 21 bp, Artificial Sequence
  Description of Artificial Sequence: Synthetic oligonucleotide
cggagtaagagtagtgatccg

SEQ ID NO: 23659 - DNA, 21 bp, Artificial Sequence
  Description of Artificial Sequence: Synthetic oligonucleotide
aggtcgttggattttcctgat

SEQ ID NO: 23660 - DNA, 21 bp, Artificial Sequence
  Description of Artificial Sequence: Synthetic oligonucleotide
cgtagtctggagcattctaat

SEQ ID NO: 23661 - DNA, 21 bp, Artificial Sequence
  Description of Artificial Sequence: Synthetic oligonucleotide
aggtcgcttcatgggagtcag

SEQ ID NO: 23662 - DNA, 21 bp, Artificial Sequence
  Description of Artificial Sequence: Synthetic oligonucleotide
aggagtttgaatgcgctgcct

SEQ ID NO: 23663 - DNA, 21 bp, Artificial Sequence
  Description of Artificial Sequence: Synthetic oligonucleotide
aggagtctgaattctacggct

SEQ ID NO: 23664 - DNA, 21 bp, Artificial Sequence
  Description of Artificial Sequence: Synthetic oligonucleotide
cgttctcttcctgctgagact

SEQ ID NO: 23665 - DNA, 21 bp, Artificial Sequence
  Description of Artificial Sequence: Synthetic oligonucleotide
cggtcgttgccgagtccgcat

SEQ ID NO: 23666 - DNA, 21 bp, Artificial Sequence
  Description of Artificial Sequence: Synthetic oligonucleotide
cgttctcttcagcttagtgat

SEQ ID NO: 23667 - DNA, 21 bp, Artificial Sequence
  Description of Artificial Sequence: Synthetic oligonucleotide
cgttctctttcttttgctgct

SEQ ID NO: 23668 - DNA, 21 bp, Artificial Sequence
  Description of Artificial Sequence: Synthetic oligonucleotide
aggtcgttgtcgttgcttggg

SEQ ID NO: 23669 - DNA, 21 bp, Artificial Sequence
  Description of Artificial Sequence: Synthetic oligonucleotide
cgtagtcttagtcttccgccg

SEQ ID NO: 23670 - DNA, 21 bp, Artificial Sequence
  Description of Artificial Sequence: Synthetic oligonucleotide
cgttctttgtcgcctacgagg

SEQ ID NO: 23671 - DNA, 21 bp, Artificial Sequence
  Description of Artificial Sequence: Synthetic oligonucleotide
aggtctttgacggttactgcg

SEQ ID NO: 23672 - DNA, 21 bp, Artificial Sequence
  Description of Artificial Sequence: Synthetic oligonucleotide
aggtcgatggctgagtcggtg

SEQ ID NO: 23673 - DNA, 21 bp, Artificial Sequence
  Description of Artificial Sequence: Synthetic oligonucleotide
cggagtatgcatgctggtgcg

SEQ ID NO: 23674 - DNA, 21 bp, Artificial Sequence
  Description of Artificial Sequence: Synthetic oligonucleotide
cgttcgatgatgctgagtccg

SEQ ID NO: 23675 - DNA, 21 bp, Artificial Sequence
  Description of Artificial Sequence: Synthetic oligonucleotide
aggagtatgccgtctggggcg

SEQ ID NO: 23676 - DNA, 21 bp, Artificial Sequence
  Description of Artificial Sequence: Synthetic oligonucleotide
cgtagtatgccgactactact

SEQ ID NO: 23677 - DNA, 21 bp, Artificial Sequence
  Description of Artificial Sequence: Synthetic oligonucleotide
cgtagtatgactggtgcgctt

SEQ ID NO: 23678 - DNA, 21 bp, Artificial Sequence
  Description of Artificial Sequence: Synthetic oligonucleotide
cggtctaataaggagactagt

SEQ ID NO: 23679 - DNA, 21 bp, Artificial Sequence
  Description of Artificial Sequence: Synthetic oligonucleotide
aggtcgaatctggaggggctg

SEQ ID NO: 23680 - DNA, 21 bp, Artificial Sequence
  Description of Artificial Sequence: Synthetic oligonucleotide
aggtcgaatatgcctatgggg

SEQ ID NO: 23681 - DNA, 21 bp, Artificial Sequence
  Description of Artificial Sequence: Synthetic oligonucleotide
cgttctaatcctgcgccgttt

SEQ ID NO: 23682 - DNA, 21 bp, Artificial Sequence
  Description of Artificial Sequence: Synthetic oligonucleotide
cggagtaatcctgtgggtacg

SEQ ID NO: 23683 - DNA, 21 bp, Artificial Sequence
  Description of Artificial Sequence: Synthetic oligonucleotide
aggagtaattcggatgctgtt

SEQ ID NO: 23684 - DNA, 21 bp, Artificial Sequence
  Description of Artificial Sequence: Synthetic oligonucleotide
aggagtaatgttgagtcgaag

SEQ ID NO: 23685 - DNA, 21 bp, Artificial Sequence
  Description of Artificial Sequence: Synthetic oligonucleotide
cgtagtaatgttttggctcag

SEQ ID NO: 23686 - DNA, 21 bp, Artificial Sequence
  Description of Artificial Sequence: Synthetic oligonucleotide
cggtctcctgatactacgggg

SEQ ID NO: 23687 - DNA, 21 bp, Artificial Sequence
  Description of Artificial Sequence: Synthetic oligonucleotide
cggtctcctgagaaggctttg

SEQ ID NO: 23688 - DNA, 21 bp, Artificial Sequence
  Description of Artificial Sequence: Synthetic oligonucleotide
cgttctccgtttggtagtgcg

SEQ ID NO: 23689 - DNA, 21 bp, Artificial Sequence
  Description of Artificial Sequence: Synthetic oligonucleotide
aggagtccgggtaatgttggt

SEQ ID NO: 23690 - DNA, 21 bp, Artificial Sequence
  Description of Artificial Sequence: Synthetic oligonucleotide
cgttctcctccgcaggatatg

SEQ ID NO: 23691 - DNA, 21 bp, Artificial Sequence
  Description of Artificial Sequence: Synthetic oligonucleotide
cgtagtcctcctactattgcg

SEQ ID NO: 23692 - DNA, 21 bp, Artificial Sequence
  Description of Artificial Sequence: Synthetic oligonucleotide
cgttcgcctcagctttatgct

SEQ ID NO: 23693 - DNA, 21 bp, Artificial Sequence
  Description of Artificial Sequence: Synthetic oligonucleotide
cgttcgccgcaggttatgctt

SEQ ID NO: 23694 - DNA, 21 bp, Artificial Sequence
  Description of Artificial Sequence: Synthetic oligonucleotide
aggtcgccttctgggactact

SEQ ID NO: 23695 - DNA, 21 bp, Artificial Sequence
  Description of Artificial Sequence: Synthetic oligonucleotide
cgttctccttctacgtcgaat

SEQ ID NO: 23696 - DNA, 21 bp, Artificial Sequence
  Description of Artificial Sequence: Synthetic oligonucleotide
cggtcgcctagtgttcttcct

SEQ ID NO: 23697 - DNA, 21 bp, Artificial Sequence
  Description of Artificial Sequence: Synthetic oligonucleotide
cgttctccgacttttgctccg

SEQ ID NO: 23698 - DNA, 21 bp, Artificial Sequence
  Description of Artificial Sequence: Synthetic oligonucleotide
aggtctccgacttcggtggct

SEQ ID NO: 23699 - DNA, 21 bp, Artificial Sequence
  Description of Artificial Sequence: Synthetic oligonucleotide
cggtcgccggttaagggtctg

SEQ ID NO: 23700 - DNA, 21 bp, Artificial Sequence
  Description of Artificial Sequence: Synthetic oligonucleotide
aggtcgcaggcgcaggttatt

SEQ ID NO: 23701 - DNA, 21 bp, Artificial Sequence
  Description of Artificial Sequence: Synthetic oligonucleotide
cgttcgcagattagtgatagt

SEQ ID NO: 23702 - DNA, 21 bp, Artificial Sequence
  Description of Artificial Sequence: Synthetic oligonucleotide
aggtcgcagctgatgggtgcg

SEQ ID NO: 23703 - DNA, 21 bp, Artificial Sequence
  Description of Artificial Sequence: Synthetic oligonucleotide
cgtagtcagaatcaggggctg

SEQ ID NO: 23704 - DNA, 21 bp, Artificial Sequence
  Description of Artificial Sequence: Synthetic oligonucleotide
aggtctcagccgctttctctt

SEQ ID NO: 23705 - DNA, 21 bp, Artificial Sequence
  Description of Artificial Sequence: Synthetic oligonucleotide
cggtcgcagcctagtacgggg

SEQ ID NO: 23706 - DNA, 21 bp, Artificial Sequence
  Description of Artificial Sequence: Synthetic oligonucleotide
aggagtcagcagccttatgag

SEQ ID NO: 23707 - DNA, 21 bp, Artificial Sequence
  Description of Artificial Sequence: Synthetic oligonucleotide
cgttcgcagtcggctacgttg

SEQ ID NO: 23708 - DNA, 21 bp, Artificial Sequence
  Description of Artificial Sequence: Synthetic oligonucleotide
cgttcgcagactaatatgtat

SEQ ID NO: 23709 - DNA, 21 bp, Artificial Sequence
  Description of Artificial Sequence: Synthetic oligonucleotide
cgttcgcgtgattcggagcat

SEQ ID NO: 23710 - DNA, 21 bp, Artificial Sequence
  Description of Artificial Sequence: Synthetic oligonucleotide
cggtctagtgcttttgggcct

SEQ ID NO: 23711 - DNA, 21 bp, Artificial Sequence
  Description of Artificial Sequence: Synthetic oligonucleotide
cggtcgagtgagtatggtagt

SEQ ID NO: 23712 - DNA, 21 bp, Artificial Sequence
  Description of Artificial Sequence: Synthetic oligonucleotide
cggtcttcgtttaataaggat

SEQ ID NO: 23713 - DNA, 21 bp, Artificial Sequence
  Description of Artificial Sequence: Synthetic oligonucleotide
cgtagtagtcatggtggggag

SEQ ID NO: 23714 - DNA, 21 bp, Artificial Sequence
  Description of Artificial Sequence: Synthetic oligonucleotide
cgtagttctttgaatctgcat

SEQ ID NO: 23715 - DNA, 21 bp, Artificial Sequence
  Description of Artificial Sequence: Synthetic oligonucleotide
cgtagtagtaatcttaatgct

SEQ ID NO: 23716 - DNA, 21 bp, Artificial Sequence
  Description of Artificial Sequence: Synthetic oligonucleotide
cggtcgagtccgaattttcag

SEQ ID NO: 23717 - DNA, 21 bp, Artificial Sequence
  Description of Artificial Sequence: Synthetic oligonucleotide
cggagttctcctaatagtcct

SEQ ID NO: 23718 - DNA, 21 bp, Artificial Sequence
  Description of Artificial Sequence: Synthetic oligonucleotide
aggtcttctccgtcggataag

SEQ ID NO: 23719 - DNA, 21 bp, Artificial Sequence
  Description of Artificial Sequence: Synthetic oligonucleotide
cgtagttctccttatttggag

SEQ ID NO: 23720 - DNA, 21 bp, Artificial Sequence
  Description of Artificial Sequence: Synthetic oligonucleotide
cgttcttcgtcggctgttgtt

SEQ ID NO: 23721 - DNA, 21 bp, Artificial Sequence
  Description of Artificial Sequence: Synthetic oligonucleotide
cggtcttcgtcgcttacgccg

SEQ ID NO: 23722 - DNA, 21 bp, Artificial Sequence
  Description of Artificial Sequence: Synthetic oligonucleotide
cgttcgtcgagtaatccgctg

SEQ ID NO: 23723 - DNA, 21 bp, Artificial Sequence
  Description of Artificial Sequence: Synthetic oligonucleotide
cggtcgagttcgcctacgacg

SEQ ID NO: 23724 - DNA, 21 bp, Artificial Sequence
  Description of Artificial Sequence: Synthetic oligonucleotide
cggtcgtctagtacgcagtct

SEQ ID NO: 23725 - DNA, 21 bp, Artificial Sequence
  Description of Artificial Sequence: Synthetic oligonucleotide
cgtagttctacgcattcgggt

SEQ ID NO: 23726 - DNA, 21 bp, Artificial Sequence
  Description of Artificial Sequence: Synthetic oligonucleotide
cgtagtagtacgcagattcct

SEQ ID NO: 23727 - DNA, 21 bp, Artificial Sequence
  Description of Artificial Sequence: Synthetic oligonucleotide
aggagttctacgacgcttccg

SEQ ID NO: 23728 - DNA, 21 bp, Artificial Sequence
  Description of Artificial Sequence: Synthetic oligonucleotide
cgttcgtcgtatacggagcat

SEQ ID NO: 23729 - DNA, 21 bp, Artificial Sequence
  Description of Artificial Sequence: Synthetic oligonucleotide
aggagtactgctgatcgggat

SEQ ID NO: 23730 - DNA, 21 bp, Artificial Sequence
  Description of Artificial Sequence: Synthetic oligonucleotide
cgttctactgcgattgatttt

SEQ ID NO: 23731 - DNA, 21 bp, Artificial Sequence
  Description of Artificial Sequence: Synthetic oligonucleotide
aggagtactgctctgcctgat

SEQ ID NO: 23732 - DNA, 21 bp, Artificial Sequence
  Description of Artificial Sequence: Synthetic oligonucleotide
aggtcgactggtccgtctgtg

SEQ ID NO: 23733 - DNA, 21 bp, Artificial Sequence
  Description of Artificial Sequence: Synthetic oligonucleotide
aggtctactctgaattcgcct

SEQ ID NO: 23734 - DNA, 21 bp, Artificial Sequence
  Description of Artificial Sequence: Synthetic oligonucleotide
aggtctactatgagtaatagt

SEQ ID NO: 23735 - DNA, 21 bp, Artificial Sequence
  Description of Artificial Sequence: Synthetic oligonucleotide
aggtcgactaataatcttacg

SEQ ID NO: 23736 - DNA, 21 bp, Artificial Sequence
  Description of Artificial Sequence: Synthetic oligonucleotide
cggtctactagtcctcttccg

SEQ ID NO: 23737 - DNA, 21 bp, Artificial Sequence
  Description of Artificial Sequence: Synthetic oligonucleotide
cgttcgactacgagtcatcct

SEQ ID NO: 23738 - DNA, 21 bp, Artificial Sequence
  Description of Artificial Sequence: Synthetic oligonucleotide
cggagtgttgctactggtgtg

SEQ ID NO: 23739 - DNA, 21 bp, Artificial Sequence
  Description of Artificial Sequence: Synthetic oligonucleotide
cgttcggttgagcctcttgct

SEQ ID NO: 23740 - DNA, 21 bp, Artificial Sequence
  Description of Artificial Sequence: Synthetic oligonucleotide
aggagtgtgaagtttccgatg

SEQ ID NO: 23741 - DNA, 21 bp, Artificial Sequence
  Description of Artificial Sequence: Synthetic oligonucleotide
cgtagtgtgcctgagagtcgt

SEQ ID NO: 23742 - DNA, 21 bp, Artificial Sequence
  Description of Artificial Sequence: Synthetic oligonucleotide
cggagtgttcagacgccgtct

SEQ ID NO: 23743 - DNA, 21 bp, Artificial Sequence
  Description of Artificial Sequence: Synthetic oligonucleotide
cgttctgttaggcagaatgat

SEQ ID NO: 23744 - DNA, 21 bp, Artificial Sequence
  Description of Artificial Sequence: Synthetic oligonucleotide
cggagtgttacggctaataat

SEQ ID NO: 23745 - DNA, 21 bp, Artificial Sequence
  Description of Artificial Sequence: Synthetic oligonucleotide
cggagtgttactcctggtatt

SEQ ID NO: 23746 - DNA, 21 bp, Artificial Sequence
  Description of Artificial Sequence: Synthetic oligonucleotide
aggtctgtggttgctcagacg

SEQ ID NO: 23747 - DNA, 21 bp, Artificial Sequence
  Description of Artificial Sequence: Synthetic oligonucleotide
cggtcgtatggtctgcctgag

SEQ ID NO: 23748 - DNA, 21 bp, Artificial Sequence
  Description of Artificial Sequence: Synthetic oligonucleotide
cgtagttataatcctgagagt

SEQ ID NO: 23749 - DNA, 21 bp, Artificial Sequence
  Description of Artificial Sequence: Synthetic oligonucleotide
cgttcgtattcgccgccgacg

SEQ ID NO: 23750 - DNA, 21 bp, Artificial Sequence
  Description of Artificial Sequence: Synthetic oligonucleotide
cgtacggcggctacgtgtgcg

SEQ ID NO: 23751 - DNA, 21 bp, Artificial Sequence
  Description of Artificial Sequence: Synthetic oligonucleotide
cgtacggcggatatgagtggt

SEQ ID NO: 23752 - DNA, 21 bp, Artificial Sequence
  Description of Artificial Sequence: Synthetic oligonucleotide
cgtactgcgattggtaatttg

SEQ ID NO: 23753 - DNA, 21 bp, Artificial Sequence
  Description of Artificial Sequence: Synthetic oligonucleotide
cggacggcgaatccgactccg

SEQ ID NO: 23754 - DNA, 21 bp, Artificial Sequence
  Description of Artificial Sequence: Synthetic oligonucleotide
cgtacggcgtctcttgttcct

SEQ ID NO: 23755 - DNA, 21 bp, Artificial Sequence
  Description of Artificial Sequence: Synthetic oligonucleotide
cggactgcttcggtggcggct

SEQ ID NO: 23756 - DNA, 21 bp, Artificial Sequence
  Description of Artificial Sequence: Synthetic oligonucleotide
cggacggcggtgactgatacg

SEQ ID NO: 23757 - DNA, 21 bp, Artificial Sequence
  Description of Artificial Sequence: Synthetic oligonucleotide
cggactgatggtgatgtgaag

SEQ ID NO: 23758 - DNA, 21 bp, Artificial Sequence
  Description of Artificial Sequence: Synthetic oligonucleotide
cggacggagtttaatatgcct

SEQ ID NO: 23759 - DNA, 21 bp, Artificial Sequence
  Description of Artificial Sequence: Synthetic oligonucleotide
aggactgagggttgtgctgct

SEQ ID NO: 23760 - DNA, 21 bp, Artificial Sequence
  Description of Artificial Sequence: Synthetic oligonucleotide
cgtactgagccgggtccttcg

SEQ ID NO: 23761 - DNA, 21 bp, Artificial Sequence
  Description of Artificial Sequence: Synthetic oligonucleotide
cgtacggagagtcctccgcag

SEQ ID NO: 23762 - DNA, 21 bp, Artificial Sequence
  Description of Artificial Sequence: Synthetic oligonucleotide
cggacggagactgggaagctt

SEQ ID NO: 23763 - DNA, 21 bp, Artificial Sequence
  Description of Artificial Sequence: Synthetic oligonucleotide
cgtacgttttctggtgctgat

SEQ ID NO: 23764 - DNA, 21 bp, Artificial Sequence
  Description of Artificial Sequence: Synthetic oligonucleotide
aggacgggtgcgttgtcggag

SEQ ID NO: 23765 - DNA, 21 bp, Artificial Sequence
  Description of Artificial Sequence: Synthetic oligonucleotide
cgtacgggtgaggttacgttt

SEQ ID NO: 23766 - DNA, 21 bp, Artificial Sequence
  Description of Artificial Sequence: Synthetic oligonucleotide
cggacgggtaatgcggcttcg

SEQ ID NO: 23767 - DNA, 21 bp, Artificial Sequence
  Description of Artificial Sequence: Synthetic oligonucleotide
cgtacggggccgggttctgag

SEQ ID NO: 23768 - DNA, 21 bp, Artificial Sequence
  Description of Artificial Sequence: Synthetic oligonucleotide
cgtacggggccgactccgtct

SEQ ID NO: 23769 - DNA, 21 bp, Artificial Sequence
  Description of Artificial Sequence: Synthetic oligonucleotide
cggactgggtcttatcctcag

SEQ ID NO: 23770 - DNA, 21 bp, Artificial Sequence
  Description of Artificial Sequence: Synthetic oligonucleotide
cggactggtgtgtgtggtaat

SEQ ID NO: 23771 - DNA, 21 bp, Artificial Sequence
  Description of Artificial Sequence: Synthetic oligonucleotide
aggacgcattcgcctgctggg

SEQ ID NO: 23772 - DNA, 21 bp, Artificial Sequence
  Description of Artificial Sequence: Synthetic oligonucleotide
cgtactcttggtcctgtgggg

SEQ ID NO: 23773 - DNA, 21 bp, Artificial Sequence
  Description of Artificial Sequence: Synthetic oligonucleotide
cgtactttgatgccgcatcct

SEQ ID NO: 23774 - DNA, 21 bp, Artificial Sequence
  Description of Artificial Sequence: Synthetic oligonucleotide
cgtactcttaattctgttgct

SEQ ID NO: 23775 - DNA, 21 bp, Artificial Sequence
  Description of Artificial Sequence: Synthetic oligonucleotide
cgtacgatggatgctccggtg

SEQ ID NO: 23776 - DNA, 21 bp, Artificial Sequence
  Description of Artificial Sequence: Synthetic oligonucleotide
cggactaatggtgatgtgaag

SEQ ID NO: 23777 - DNA, 21 bp, Artificial Sequence
  Description of Artificial Sequence: Synthetic oligonucleotide
cgtactaatgggctttcgccg

SEQ ID NO: 23778 - DNA, 21 bp, Artificial Sequence
  Description of Artificial Sequence: Synthetic oligonucleotide
cgtactaataatgatgtgacg

SEQ ID NO: 23779 - DNA, 21 bp, Artificial Sequence
  Description of Artificial Sequence: Synthetic oligonucleotide
cggacgaattctcagttggat

SEQ ID NO: 23780 - DNA, 21 bp, Artificial Sequence
  Description of Artificial Sequence: Synthetic oligonucleotide
aggactaatagtacttcgatg

SEQ ID NO: 23781 - DNA, 21 bp, Artificial Sequence
  Description of Artificial Sequence: Synthetic oligonucleotide
aggactcctgctctttctaat

SEQ ID NO: 23782 - DNA, 21 bp, Artificial Sequence
  Description of Artificial Sequence: Synthetic oligonucleotide
cgtactccggattctctgggg

SEQ ID NO: 23783 - DNA, 21 bp, Artificial Sequence
  Description of Artificial Sequence: Synthetic oligonucleotide
cggacgcctgaggcgatttcg

SEQ ID NO: 23784 - DNA, 21 bp, Artificial Sequence
  Description of Artificial Sequence: Synthetic oligonucleotide
cggactcctcattcttcgttt

SEQ ID NO: 23785 - DNA, 21 bp, Artificial Sequence
  Description of Artificial Sequence: Synthetic oligonucleotide
cggactccgaagctgcctatg

SEQ ID NO: 23786 - DNA, 21 bp, Artificial Sequence
  Description of Artificial Sequence: Synthetic oligonucleotide
aggacgcctatgctggagcct

SEQ ID NO: 23787 - DNA, 21 bp, Artificial Sequence
  Description of Artificial Sequence: Synthetic oligonucleotide
aggacgcctgtttcgggtgag

SEQ ID NO: 23788 - DNA, 21 bp, Artificial Sequence
  Description of Artificial Sequence: Synthetic oligonucleotide
cgtacgcagattggtgtgaat

SEQ ID NO: 23789 - DNA, 21 bp, Artificial Sequence
  Description of Artificial Sequence: Synthetic oligonucleotide
cgtactagtgcggtgggtctg

SEQ ID NO: 23790 - DNA, 21 bp, Artificial Sequence
  Description of Artificial Sequence: Synthetic oligonucleotide
cgtacgtcgtgtagtcctggt

SEQ ID NO: 23791 - DNA, 21 bp, Artificial Sequence
  Description of Artificial Sequence: Synthetic oligonucleotide
aggactagtgatgcttctttt

SEQ ID NO: 23792 - DNA, 21 bp, Artificial Sequence
  Description of Artificial Sequence: Synthetic oligonucleotide
aggacttcggatctgtctgcg

SEQ ID NO: 23793 - DNA, 21 bp, Artificial Sequence
  Description of Artificial Sequence: Synthetic oligonucleotide
cgtactagtggtcctactgat

SEQ ID NO: 23794 - DNA, 21 bp, Artificial Sequence
  Description of Artificial Sequence: Synthetic oligonucleotide
cggacgtcgatgggtcaggct

SEQ ID NO: 23795 - DNA, 21 bp, Artificial Sequence
  Description of Artificial Sequence: Synthetic oligonucleotide
cgtacgagtatggtgagtaat

SEQ ID NO: 23796 - DNA, 21 bp, Artificial Sequence
  Description of Artificial Sequence: Synthetic oligonucleotide
aggactagtcctgagtcgcgg

SEQ ID NO: 23797 - DNA, 21 bp, Artificial Sequence
  Description of Artificial Sequence: Synthetic oligonucleotide
cggacttcgcctcttgctgtt

SEQ ID NO: 23798 - DNA, 21 bp, Artificial Sequence
  Description of Artificial Sequence: Synthetic oligonucleotide
cggactagtccgcagtctagt

SEQ ID NO: 23799 - DNA, 21 bp, Artificial Sequence
  Description of Artificial Sequence: Synthetic oligonucleotide
aggacttcgccgagttttcat

SEQ ID NO: 23800 - DNA, 21 bp, Artificial Sequence
  Description of Artificial Sequence: Synthetic oligonucleotide
cgtacgtctcagactgagccg

SEQ ID NO: 23801 - DNA, 21 bp, Artificial Sequence
  Description of Artificial Sequence: Synthetic oligonucleotide
cgtacgtcgacggaggggtcg

SEQ ID NO: 23802 - DNA, 21 bp, Artificial Sequence
  Description of Artificial Sequence: Synthetic oligonucleotide
cggacgtctacttatggtggt

SEQ ID NO: 23803 - DNA, 21 bp, Artificial Sequence
  Description of Artificial Sequence: Synthetic oligonucleotide
cgtacgtctgttgctgttgcg

SEQ ID NO: 23804 - DNA, 21 bp, Artificial Sequence
  Description of Artificial Sequence: Synthetic oligonucleotide
aggactactgataagcagggt

SEQ ID NO: 23805 - DNA, 21 bp, Artificial Sequence
  Description of Artificial Sequence: Synthetic oligonucleotide
aggacgacggagcatagtatg

SEQ ID NO: 23806 - DNA, 21 bp, Artificial Sequence
  Description of Artificial Sequence: Synthetic oligonucleotide
cgtactactcagagtgttatg

SEQ ID NO: 23807 - DNA, 21 bp, Artificial Sequence
  Description of Artificial Sequence: Synthetic oligonucleotide
cggacgacttctgatacgttt

SEQ ID NO: 23808 - DNA, 21 bp, Artificial Sequence
  Description of Artificial Sequence: Synthetic oligonucleotide
aggactacgtatcagtcgagt

SEQ ID NO: 23809 - DNA, 21 bp, Artificial Sequence
  Description of Artificial Sequence: Synthetic oligonucleotide
aggacggttgggtctttgaat

SEQ ID NO: 23810 - DNA, 21 bp, Artificial Sequence
  Description of Artificial Sequence: Synthetic oligonucleotide
aggactgtgaaggcggaggcg

SEQ ID NO: 23811 - DNA, 21 bp, Artificial Sequence
  Description of Artificial Sequence: Synthetic oligonucleotide
cgtacttatcatgtgccggat

SEQ ID NO: 23812 - DNA, 21 bp, Artificial Sequence
  Description of Artificial Sequence: Synthetic oligonucleotide
cgtgtggcggctagttctatt

SEQ ID NO: 23813 - DNA, 21 bp, Artificial Sequence
  Description of Artificial Sequence: Synthetic oligonucleotide
agggttgcgggttctaatggg

SEQ ID NO: 23814 - DNA, 21 bp, Artificial Sequence
  Description of Artificial Sequence: Synthetic oligonucleotide
cgggttgcgatgggggaggat

SEQ ID NO: 23815 - DNA, 21 bp, Artificial Sequence
  Description of Artificial Sequence: Synthetic oligonucleotide
agggttgcttctccgacggct

SEQ ID NO: 23816 - DNA, 21 bp, Artificial Sequence
  Description of Artificial Sequence: Synthetic oligonucleotide
cgtgttgatgcttcgcatagg

SEQ ID NO: 23817 - DNA, 21 bp, Artificial Sequence
  Description of Artificial Sequence: Synthetic oligonucleotide
agggtggatagtgttaggtct

SEQ ID NO: 23818 - DNA, 21 bp, Artificial Sequence
  Description of Artificial Sequence: Synthetic oligonucleotide
agggttgatacgcggatgcag

SEQ ID NO: 23819 - DNA, 21 bp, Artificial Sequence
  Description of Artificial Sequence: Synthetic oligonucleotide
cgtgttgaggagtgtgttatt

SEQ ID NO: 23820 - DNA, 21 bp, Artificial Sequence
  Description of Artificial Sequence: Synthetic oligonucleotide
cgtgttggtgatgggaagcat

SEQ ID NO: 23821 - DNA, 21 bp, Artificial Sequence
  Description of Artificial Sequence: Synthetic oligonucleotide
agggttggtgataagctgcag

SEQ ID NO: 23822 - DNA, 21 bp, Artificial Sequence
  Description of Artificial Sequence: Synthetic oligonucleotide
cgggttggggatagtgctttt

SEQ ID NO: 23823 - DNA, 21 bp, Artificial Sequence
  Description of Artificial Sequence: Synthetic oligonucleotide
cgtgttgggggttcttcttct

SEQ ID NO: 23824 - DNA, 21 bp, Artificial Sequence
  Description of Artificial Sequence: Synthetic oligonucleotide
agggttgggcattgtctgggt

SEQ ID NO: 23825 - DNA, 21 bp, Artificial Sequence
  Description of Artificial Sequence: Synthetic oligonucleotide
agggttggtcttgcttcgact

SEQ ID NO: 23826 - DNA, 21 bp, Artificial Sequence
  Description of Artificial Sequence: Synthetic oligonucleotide
cgtgttgggaatgtggatact

SEQ ID NO: 23827 - DNA, 21 bp, Artificial Sequence
  Description of Artificial Sequence: Synthetic oligonucleotide
cgggttggtcgtcctagtgag

SEQ ID NO: 23828 - DNA, 21 bp, Artificial Sequence
  Description of Artificial Sequence: Synthetic oligonucleotide
cgggttattcctgcgtgtcag

SEQ ID NO: 23829 - DNA, 21 bp, Artificial Sequence
  Description of Artificial Sequence: Synthetic oligonucleotide
cgggtgcttgatctggagaat

SEQ ID NO: 23830 - DNA, 21 bp, Artificial Sequence
  Description of Artificial Sequence: Synthetic oligonucleotide
agggttttgattgagcctgtt

SEQ ID NO: 23831 - DNA, 21 bp, Artificial Sequence
  Description of Artificial Sequence: Synthetic oligonucleotide
agggtgctgaatcatctgggg

SEQ ID NO: 23832 - DNA, 21 bp, Artificial Sequence
  Description of Artificial Sequence: Synthetic oligonucleotide
cgtgtgatggatcgtgcggct

SEQ ID NO: 23833 - DNA, 21 bp, Artificial Sequence
  Description of Artificial Sequence: Synthetic oligonucleotide
cgtgttaatgcgcctggtgtt

SEQ ID NO: 23834 - DNA, 21 bp, Artificial Sequence
  Description of Artificial Sequence: Synthetic oligonucleotide
cgtgtgaatcatgatgagacg

SEQ ID NO: 23835 - DNA, 21 bp, Artificial Sequence
  Description of Artificial Sequence: Synthetic oligonucleotide
cgggtgaatattttggcggag

SEQ ID NO: 23836 - DNA, 21 bp, Artificial Sequence
  Description of Artificial Sequence: Synthetic oligonucleotide
cgtgttaatcctgatcgttat

SEQ ID NO: 23837 - DNA, 21 bp, Artificial Sequence
  Description of Artificial Sequence: Synthetic oligonucleotide
cgtgtgaatagtattgctagt

SEQ ID NO: 23838 - DNA, 21 bp, Artificial Sequence
  Description of Artificial Sequence: Synthetic oligonucleotide
cgtgttccggatattgcgcgg

SEQ ID NO: 23839 - DNA, 21 bp, Artificial Sequence
  Description of Artificial Sequence: Synthetic oligonucleotide
cgtgttccggattcgactagg

SEQ ID NO: 23840 - DNA, 21 bp, Artificial Sequence
  Description of Artificial Sequence: Synthetic oligonucleotide
cgtgtgccggggattctgcat

SEQ ID NO: 23841 - DNA, 21 bp, Artificial Sequence
  Description of Artificial Sequence: Synthetic oligonucleotide
cgtgtgcctaatacgcttcct

SEQ ID NO: 23842 - DNA, 21 bp, Artificial Sequence
  Description of Artificial Sequence: Synthetic oligonucleotide
cgggtgccgaattggcctggg

SEQ ID NO: 23843 - DNA, 21 bp, Artificial Sequence
  Description of Artificial Sequence: Synthetic oligonucleotide
cgggtgccttctcagagtagt

SEQ ID NO: 23844 - DNA, 21 bp, Artificial Sequence
  Description of Artificial Sequence: Synthetic oligonucleotide
cgggttcagaatgggctgaat

SEQ ID NO: 23845 - DNA, 21 bp, Artificial Sequence
  Description of Artificial Sequence: Synthetic oligonucleotide
cgtgttcagcaggcttcgctt

SEQ ID NO: 23846 - DNA, 21 bp, Artificial Sequence
  Description of Artificial Sequence: Synthetic oligonucleotide
cgggttcagtctaatgtgcct

SEQ ID NO: 23847 - DNA, 21 bp, Artificial Sequence
  Description of Artificial Sequence: Synthetic oligonucleotide
agggtgcagactattcctagt

SEQ ID NO: 23848 - DNA, 21 bp, Artificial Sequence
  Description of Artificial Sequence: Synthetic oligonucleotide
cgtgttagtcagcctgatatg

SEQ ID NO: 23849 - DNA, 21 bp, Artificial Sequence
  Description of Artificial Sequence: Synthetic oligonucleotide
agggtttcgcaggttacgatg

SEQ ID NO: 23850 - DNA, 21 bp, Artificial Sequence
  Description of Artificial Sequence: Synthetic oligonucleotide
agggtttcgactatttctacg

SEQ ID NO: 23851 - DNA, 21 bp, Artificial Sequence
  Description of Artificial Sequence: Synthetic oligonucleotide
cgggtgtctactacgtctgat

SEQ ID NO: 23852 - DNA, 21 bp, Artificial Sequence
  Description of Artificial Sequence: Synthetic oligonucleotide
cgtgtgtcgtatgatacggag

SEQ ID NO: 23853 - DNA, 21 bp, Artificial Sequence
  Description of Artificial Sequence: Synthetic oligonucleotide
cgtgtgacgattggtacgtcg

SEQ ID NO: 23854 - DNA, 21 bp, Artificial Sequence
  Description of Artificial Sequence: Synthetic oligonucleotide
agggttactcctgagcttttt

SEQ ID NO: 23855 - DNA, 21 bp, Artificial Sequence
  Description of Artificial Sequence: Synthetic oligonucleotide
cgtgttacgagtacgttgagt

SEQ ID NO: 23856 - DNA, 21 bp, Artificial Sequence
  Description of Artificial Sequence: Synthetic oligonucleotide
agggttacgacggcggagttg

SEQ ID NO: 23857 - DNA, 21 bp, Artificial Sequence
  Description of Artificial Sequence: Synthetic oligonucleotide
cgtgttacgacggagttgccg

SEQ ID NO: 23858 - DNA, 21 bp, Artificial Sequence
  Description of Artificial Sequence: Synthetic oligonucleotide
cgggtggttgggggttctact

SEQ ID NO: 23859 - DNA, 21 bp, Artificial Sequence
  Description of Artificial Sequence: Synthetic oligonucleotide
agggtggtggggccggtgaat

SEQ ID NO: 23860 - DNA, 21 bp, Artificial Sequence
  Description of Artificial Sequence: Synthetic oligonucleotide
agggttgttacggttttggag

SEQ ID NO: 23861 - DNA, 21 bp, Artificial Sequence
  Description of Artificial Sequence: Synthetic oligonucleotide
cgggtgtataatatggatggt

SEQ ID NO: 23862 - DNA, 21 bp, Artificial Sequence
  Description of Artificial Sequence: Synthetic oligonucleotide
cggtgggcggatactgttact

SEQ ID NO: 23863 - DNA, 21 bp, Artificial Sequence
  Description of Artificial Sequence: Synthetic oligonucleotide
cggtgggatgatggggcgcgg

SEQ ID NO: 23864 - DNA, 21 bp, Artificial Sequence
  Description of Artificial Sequence: Synthetic oligonucleotide
cggtgggatgtgaaggcggat

SEQ ID NO: 23865 - DNA, 21 bp, Artificial Sequence
  Description of Artificial Sequence: Synthetic oligonucleotide
aggtggaaggctgagcctccg

SEQ ID NO: 23866 - DNA, 21 bp, Artificial Sequence
  Description of Artificial Sequence: Synthetic oligonucleotide
cggtggagtgaggatgggggg

SEQ ID NO: 23867 - DNA, 21 bp, Artificial Sequence
  Description of Artificial Sequence: Synthetic oligonucleotide
aggtggtcgccggctgttccg

SEQ ID NO: 23868 - DNA, 21 bp, Artificial Sequence
  Description of Artificial Sequence: Synthetic oligonucleotide
cgttatgctgagccttatatt

SEQ ID NO: 23869 - DNA, 21 bp, Artificial Sequence
  Description of Artificial Sequence: Synthetic oligonucleotide
cgttatgatttgactgcgccg

SEQ ID NO: 23870 - DNA, 21 bp, Artificial Sequence
  Description of Artificial Sequence: Synthetic oligonucleotide
cgttatgagtcgaatgcgcat

SEQ ID NO: 23871 - DNA, 21 bp, Artificial Sequence
  Description of Artificial Sequence: Synthetic oligonucleotide
cggtatggggctagtaatccg

SEQ ID NO: 23872 - DNA, 21 bp, Artificial Sequence
  Description of Artificial Sequence: Synthetic oligonucleotide
cggtatggggggtctatttct

SEQ ID NO: 23873 - DNA, 21 bp, Artificial Sequence
  Description of Artificial Sequence: Synthetic oligonucleotide
aggtatcatgatacgggtgat

SEQ ID NO: 23874 - DNA, 21 bp, Artificial Sequence
  Description of Artificial Sequence: Synthetic oligonucleotide
cgttatcttgatcggactgag

SEQ ID NO: 23875 - DNA, 21 bp, Artificial Sequence
  Description of Artificial Sequence: Synthetic oligonucleotide
cggtatatggagccttcgcct

SEQ ID NO: 23876 - DNA, 21 bp, Artificial Sequence
  Description of Artificial Sequence: Synthetic oligonucleotide
aggtataatgaggatgaggcg

SEQ ID NO: 23877 - DNA, 21 bp, Artificial Sequence
  Description of Artificial Sequence: Synthetic oligonucleotide
aggtataatgagactgtgtct

SEQ ID NO: 23878 - DNA, 21 bp, Artificial Sequence
  Description of Artificial Sequence: Synthetic oligonucleotide
aggtataataatcaggttccg

SEQ ID NO: 23879 - DNA, 21 bp, Artificial Sequence
  Description of Artificial Sequence: Synthetic oligonucleotide
cgttataatacggcgattagt

SEQ ID NO: 23880 - DNA, 21 bp, Artificial Sequence
  Description of Artificial Sequence: Synthetic oligonucleotide
aggtatccgtcgcagactagt

SEQ ID NO: 23881 - DNA, 21 bp, Artificial Sequence
  Description of Artificial Sequence: Synthetic oligonucleotide
cgttattcgaataatcttccg

SEQ ID NO: 23882 - DNA, 21 bp, Artificial Sequence
  Description of Artificial Sequence: Synthetic oligonucleotide
aggtattcgcctggttctcct

SEQ ID NO: 23883 - DNA, 21 bp, Artificial Sequence
  Description of Artificial Sequence: Synthetic oligonucleotide
aggtatactgttgctgatgct

SEQ ID NO: 23884 - DNA, 21 bp, Artificial Sequence
  Description of Artificial Sequence: Synthetic oligonucleotide
cggtatgtggatccgcttatg

SEQ ID NO: 23885 - DNA, 21 bp, Artificial Sequence
  Description of Artificial Sequence: Synthetic oligonucleotide
tctgctgctcatattgatctg

SEQ ID NO: 23886 - DNA, 21 bp, Artificial Sequence
  Description of Artificial Sequence: Synthetic oligonucleotide
agtgcggctcttcttgagcct

SEQ ID NO: 23887 - DNA, 21 bp, Artificial Sequence
  Description of Artificial Sequence: Synthetic oligonucleotide
agtgctgctcttagggagggg

SEQ ID NO: 23888 - DNA, 21 bp, Artificial Sequence
  Description of Artificial Sequence: Synthetic oligonucleotide
tctgctgctcgtgatacggat

SEQ ID NO: 23889 - DNA, 21 bp, Artificial Sequence
  Description of Artificial Sequence: Synthetic oligonucleotide
tctgctgcgaggatgactgcg

SEQ ID NO: 23890 - DNA, 21 bp, Artificial Sequence
  Description of Artificial Sequence: Synthetic oligonucleotide
tcggcggcttctggtcatcat

SEQ ID NO: 23891 - DNA, 21 bp, Artificial Sequence
  Description of Artificial Sequence: Synthetic oligonucleotide
agtgcggcttctaagttgttg

SEQ ID NO: 23892 - DNA, 21 bp, Artificial Sequence
  Description of Artificial Sequence: Synthetic oligonucleotide
tcggctgcgtcttctatgcgg

SEQ ID NO: 23893 - DNA, 21 bp, Artificial Sequence
  Description of Artificial Sequence: Synthetic oligonucleotide
agtgcggcttcgacggttttt

SEQ ID NO: 23894 - DNA, 21 bp, Artificial Sequence
  Description of Artificial Sequence: Synthetic oligonucleotide
tctgcggcttatgatcctaag

SEQ ID NO: 23895 - DNA, 21 bp, Artificial Sequence
  Description of Artificial Sequence: Synthetic oligonucleotide
tctgctgattttcagcgtggt

SEQ ID NO: 23896 - DNA, 21 bp, Artificial Sequence
  Description of Artificial Sequence: Synthetic oligonucleotide
agtgctgatacgatgttgatt

SEQ ID NO: 23897 - DNA, 21 bp, Artificial Sequence
  Description of Artificial Sequence: Synthetic oligonucleotide
tcggcggaggcgcatattacg

SEQ ID NO: 23898 - DNA, 21 bp, Artificial Sequence
  Description of Artificial Sequence: Synthetic oligonucleotide
agtgctgagattgagtttctt

SEQ ID NO: 23899 - DNA, 21 bp, Artificial Sequence
  Description of Artificial Sequence: Synthetic oligonucleotide
agtgctgagagtgtgccgcat

SEQ ID NO: 23900 - DNA, 21 bp, Artificial Sequence
  Description of Artificial Sequence: Synthetic oligonucleotide
agtgcggagtatcggagtgtt

SEQ ID NO: 23901 - DNA, 21 bp, Artificial Sequence
  Description of Artificial Sequence: Synthetic oligonucleotide
tcggcttttgggcagcatggg

SEQ ID NO: 23902 - DNA, 21 bp, Artificial Sequence
  Description of Artificial Sequence: Synthetic oligonucleotide
tcggcttttctgcctcatgct

SEQ ID NO: 23903 - DNA, 21 bp, Artificial Sequence
  Description of Artificial Sequence: Synthetic oligonucleotide
tcggcgtttcttcctacgccg

SEQ ID NO: 23904 - DNA, 21 bp, Artificial Sequence
  Description of Artificial Sequence: Synthetic oligonucleotide
tctgctttttctgcgggggct

SEQ ID NO: 23905 - DNA, 21 bp, Artificial Sequence
  Description of Artificial Sequence: Synthetic oligonucleotide
tcggcttttacgaattatccg

SEQ ID NO: 23906 - DNA, 21 bp, Artificial Sequence
  Description of Artificial Sequence: Synthetic oligonucleotide
agtgctggggagcgttcgctg

SEQ ID NO: 23907 - DNA, 21 bp, Artificial Sequence
  Description of Artificial Sequence: Synthetic oligonucleotide
tctgcgggtggtgagcgtacg

SEQ ID NO: 23908 - DNA, 21 bp, Artificial Sequence
  Description of Artificial Sequence: Synthetic oligonucleotide
tcggctgggggtgggatgaat

SEQ ID NO: 23909 - DNA, 21 bp, Artificial Sequence
  Description of Artificial Sequence: Synthetic oligonucleotide
agtgcggggaagctgcctatg

SEQ ID NO: 23910 - DNA, 21 bp, Artificial Sequence
  Description of Artificial Sequence: Synthetic oligonucleotide
tctgctgggcttcatgctgtg

SEQ ID NO: 23911 - DNA, 21 bp, Artificial Sequence
  Description of Artificial Sequence: Synthetic oligonucleotide
agtgctggtccggctcctcgt

SEQ ID NO: 23912 - DNA, 21 bp, Artificial Sequence
  Description of Artificial Sequence: Synthetic oligonucleotide
tctgcgggtcagtcgcagcgt

SEQ ID NO: 23913 - DNA, 21 bp, Artificial Sequence
  Description of Artificial Sequence: Synthetic oligonucleotide
tctgcggggaggtttgagact

SEQ ID NO: 23914 - DNA, 21 bp, Artificial Sequence
  Description of Artificial Sequence: Synthetic oligonucleotide
tcggctgggacggctatgatt

SEQ ID NO: 23915 - DNA, 21 bp, Artificial Sequence
  Description of Artificial Sequence: Synthetic oligonucleotide
tcggctggggttcataagagt

SEQ ID NO: 23916 - DNA, 21 bp, Artificial Sequence
  Description of Artificial Sequence: Synthetic oligonucleotide
tctgcgcattgtcctacgccg

SEQ ID NO: 23917 - DNA, 21 bp, Artificial Sequence
  Description of Artificial Sequence: Synthetic oligonucleotide
tctgctcatcattctcatatg

SEQ ID NO: 23918 - DNA, 21 bp, Artificial Sequence
  Description of Artificial Sequence: Synthetic oligonucleotide
tctgctcatatgtcgcgtgct

SEQ ID NO: 23919 - DNA, 21 bp, Artificial Sequence
  Description of Artificial Sequence: Synthetic oligonucleotide
agtgctcatcagttgcagact

SEQ ID NO: 23920 - DNA, 21 bp, Artificial Sequence
  Description of Artificial Sequence: Synthetic oligonucleotide
agtgctcatagtccgcagatg

SEQ ID NO: 23921 - DNA, 21 bp, Artificial Sequence
  Description of Artificial Sequence: Synthetic oligonucleotide
agtgctcatagtactccgcat

SEQ ID NO: 23922 - DNA, 21 bp, Artificial Sequence
  Description of Artificial Sequence: Synthetic oligonucleotide
tcggctatttgtcagtctgtt

SEQ ID NO: 23923 - DNA, 21 bp, Artificial Sequence
  Description of Artificial Sequence: Synthetic oligonucleotide
agtgctattatgccgtcgcct

SEQ ID NO: 23924 - DNA, 21 bp, Artificial Sequence
  Description of Artificial Sequence: Synthetic oligonucleotide
tctgctattatgagtcggtct

SEQ ID NO: 23925 - DNA, 21 bp, Artificial Sequence
  Description of Artificial Sequence: Synthetic oligonucleotide
tctgctattaatcgtctgccg

SEQ ID NO: 23926 - DNA, 21 bp, Artificial Sequence
  Description of Artificial Sequence: Synthetic oligonucleotide
agtgctatttcgtcgatgagt

SEQ ID NO: 23927 - DNA, 21 bp, Artificial Sequence
  Description of Artificial Sequence: Synthetic oligonucleotide
tctgcgaagtgtgttcaggcg

SEQ ID NO: 23928 - DNA, 21 bp, Artificial Sequence
  Description of Artificial Sequence: Synthetic oligonucleotide
tcggctaagcattctgcgatg

SEQ ID NO: 23929 - DNA, 21 bp, Artificial Sequence
  Description of Artificial Sequence: Synthetic oligonucleotide
tcggctaagtctgcgttttct

SEQ ID NO: 23930 - DNA, 21 bp, Artificial Sequence
  Description of Artificial Sequence: Synthetic oligonucleotide
agtgctaagagtatggttgtt

SEQ ID NO: 23931 - DNA, 21 bp, Artificial Sequence
  Description of Artificial Sequence: Synthetic oligonucleotide
tcggctaagactatgattccg

SEQ ID NO: 23932 - DNA, 21 bp, Artificial Sequence
  Description of Artificial Sequence: Synthetic oligonucleotide
tcggcgaagacgtctgagtcg

SEQ ID NO: 23933 - DNA, 21 bp, Artificial Sequence
  Description of Artificial Sequence: Synthetic oligonucleotide
tctgcgcttgctgggcttagt

SEQ ID NO: 23934 - DNA, 21 bp, Artificial Sequence
  Description of Artificial Sequence: Synthetic oligonucleotide
agtgctttggatcttaatcat

SEQ ID NO: 23935 - DNA, 21 bp, Artificial Sequence
  Description of Artificial Sequence: Synthetic oligonucleotide
agtgctttggataatattcgg

SEQ ID NO: 23936 - DNA, 21 bp, Artificial Sequence
  Description of Artificial Sequence: Synthetic oligonucleotide
agtgcgcttgggctgagtgtt

SEQ ID NO: 23937 - DNA, 21 bp, Artificial Sequence
  Description of Artificial Sequence: Synthetic oligonucleotide
tctgctctgggttcgcgggtt

SEQ ID NO: 23938 - DNA, 21 bp, Artificial Sequence
  Description of Artificial Sequence: Synthetic oligonucleotide
tcggctctgcatctggctgct

SEQ ID NO: 23939 - DNA, 21 bp, Artificial Sequence
  Description of Artificial Sequence: Synthetic oligonucleotide
tcggctttgaagacggattcg

SEQ ID NO: 23940 - DNA, 21 bp, Artificial Sequence
  Description of Artificial Sequence: Synthetic oligonucleotide
agtgcgcttaataagcggatt

SEQ ID NO: 23941 - DNA, 21 bp, Artificial Sequence
  Description of Artificial Sequence: Synthetic oligonucleotide
tctgcgttgcctaagcctgag

SEQ ID NO: 23942 - DNA, 21 bp, Artificial Sequence
  Description of Artificial Sequence: Synthetic oligonucleotide
tcggcgttgaggctggtgtct

SEQ ID NO: 23943 - DNA, 21 bp, Artificial Sequence
  Description of Artificial Sequence: Synthetic oligonucleotide
agtgcgcttcgtccggatagt

SEQ ID NO: 23944 - DNA, 21 bp, Artificial Sequence
  Description of Artificial Sequence: Synthetic oligonucleotide
agtgctttgaggagtgttact

SEQ ID NO: 23945 - DNA, 21 bp, Artificial Sequence
  Description of Artificial Sequence: Synthetic oligonucleotide
tctgcgttgcgtgtgcctgcg

SEQ ID NO: 23946 - DNA, 21 bp, Artificial Sequence
  Description of Artificial Sequence: Synthetic oligonucleotide
tcggcgctgtcgacgacgggt

SEQ ID NO: 23947 - DNA, 21 bp, Artificial Sequence
  Description of Artificial Sequence: Synthetic oligonucleotide
tctgcgcttacggataagctg

SEQ ID NO: 23948 - DNA, 21 bp, Artificial Sequence
  Description of Artificial Sequence: Synthetic oligonucleotide
tcggctcttacgcatgtgtcg

SEQ ID NO: 23949 - DNA, 21 bp, Artificial Sequence
  Description of Artificial Sequence: Synthetic oligonucleotide
agtgctttgacgtcttctctg

SEQ ID NO: 23950 - DNA, 21 bp, Artificial Sequence
  Description of Artificial Sequence: Synthetic oligonucleotide
agtgcgatgcatcctatgctg

SEQ ID NO: 23951 - DNA, 21 bp, Artificial Sequence
  Description of Artificial Sequence: Synthetic oligonucleotide
agtgcgatgaagcatccgtct

SEQ ID NO: 23952 - DNA, 21 bp, Artificial Sequence
  Description of Artificial Sequence: Synthetic oligonucleotide
tcggcgatgaggcctggttcg

SEQ ID NO: 23953 - DNA, 21 bp, Artificial Sequence
  Description of Artificial Sequence: Synthetic oligonucleotide
tcggcgatgactaagaatctt

SEQ ID NO: 23954 - DNA, 21 bp, Artificial Sequence
  Description of Artificial Sequence: Synthetic oligonucleotide
tctgcgaatgggagttcgtcg

SEQ ID NO: 23955 - DNA, 21 bp, Artificial Sequence
  Description of Artificial Sequence: Synthetic oligonucleotide
tctgctaatattactgtgaag

SEQ ID NO: 23956 - DNA, 21 bp, Artificial Sequence
  Description of Artificial Sequence: Synthetic oligonucleotide
agtgctaatccgcatattact

SEQ ID NO: 23957 - DNA, 21 bp, Artificial Sequence
  Description of Artificial Sequence: Synthetic oligonucleotide
agtgcgaatagtctgcctgcg

SEQ ID NO: 23958 - DNA, 21 bp, Artificial Sequence
  Description of Artificial Sequence: Synthetic oligonucleotide
tctgcgaatactgcgaggtcg

SEQ ID NO: 23959 - DNA, 21 bp, Artificial Sequence
  Description of Artificial Sequence: Synthetic oligonucleotide
tcggctccggagtggatgcct

SEQ ID NO: 23960 - DNA, 21 bp, Artificial Sequence
  Description of Artificial Sequence: Synthetic oligonucleotide
tctgctccttttgctacggag

SEQ ID NO: 23961 - DNA, 21 bp, Artificial Sequence
  Description of Artificial Sequence: Synthetic oligonucleotide
tctgcgccgggtgcttctttt

SEQ ID NO: 23962 - DNA, 21 bp, Artificial Sequence
  Description of Artificial Sequence: Synthetic oligonucleotide
agtgcgcctcatactcatctt

SEQ ID NO: 23963 - DNA, 21 bp, Artificial Sequence
  Description of Artificial Sequence: Synthetic oligonucleotide
tctgctcctcatacgattcct

SEQ ID NO: 23964 - DNA, 21 bp, Artificial Sequence
  Description of Artificial Sequence: Synthetic oligonucleotide
agtgcgcctttgattggttct

SEQ ID NO: 23965 - DNA, 21 bp, Artificial Sequence
  Description of Artificial Sequence: Synthetic oligonucleotide
tcggcgcctatgacttgtgcg

SEQ ID NO: 23966 - DNA, 21 bp, Artificial Sequence
  Description of Artificial Sequence: Synthetic oligonucleotide
agtgcgccgaattcttcgtcg

SEQ ID NO: 23967 - DNA, 21 bp, Artificial Sequence
  Description of Artificial Sequence: Synthetic oligonucleotide
tctgcgccggttcggtctcct

SEQ ID NO: 23968 - DNA, 21 bp, Artificial Sequence
  Description of Artificial Sequence: Synthetic oligonucleotide
tcggcgcagggtgcgaggcct

SEQ ID NO: 23969 - DNA, 21 bp, Artificial Sequence
  Description of Artificial Sequence: Synthetic oligonucleotide
tcggcgcagctttcgttgccg

SEQ ID NO: 23970 - DNA, 21 bp, Artificial Sequence
  Description of Artificial Sequence: Synthetic oligonucleotide
tctgctagggatgctcattcg

SEQ ID NO: 23971 - DNA, 21 bp, Artificial Sequence
  Description of Artificial Sequence: Synthetic oligonucleotide
tcggcgcgtgatcatcggcct

SEQ ID NO: 23972 - DNA, 21 bp, Artificial Sequence
  Description of Artificial Sequence: Synthetic oligonucleotide
agtgcgaggggttctgatcct

SEQ ID NO: 23973 - DNA, 21 bp, Artificial Sequence
  Description of Artificial Sequence: Synthetic oligonucleotide
tcggcgcgtggtgtggctacg

SEQ ID NO: 23974 - DNA, 21 bp, Artificial Sequence
  Description of Artificial Sequence: Synthetic oligonucleotide
tcggcgcgtatttttaaggat

SEQ ID NO: 23975 - DNA, 21 bp, Artificial Sequence
  Description of Artificial Sequence: Synthetic oligonucleotide
agtgctcgtatggcgctgggt

SEQ ID NO: 23976 - DNA, 21 bp, Artificial Sequence
  Description of Artificial Sequence: Synthetic oligonucleotide
tctgctcgtcaggtgtcgggg

SEQ ID NO: 23977 - DNA, 21 bp, Artificial Sequence
  Description of Artificial Sequence: Synthetic oligonucleotide
agtgcgcggtctgatccggct

SEQ ID NO: 23978 - DNA, 21 bp, Artificial Sequence
  Description of Artificial Sequence: Synthetic oligonucleotide
agtgcgcgtacggctggtcct

SEQ ID NO: 23979 - DNA, 21 bp, Artificial Sequence
  Description of Artificial Sequence: Synthetic oligonucleotide
agtgcgcggacggataggacg

SEQ ID NO: 23980 - DNA, 21 bp, Artificial Sequence
  Description of Artificial Sequence: Synthetic oligonucleotide
agtgcgcgtactgttgatatg

SEQ ID NO: 23981 - DNA, 21 bp, Artificial Sequence
  Description of Artificial Sequence: Synthetic oligonucleotide
agtgctcgtgtgtttcctgcg

SEQ ID NO: 23982 - DNA, 21 bp, Artificial Sequence
  Description of Artificial Sequence: Synthetic oligonucleotide
tctgctcgtgtgaatattggg

SEQ ID NO: 23983 - DNA, 21 bp, Artificial Sequence
  Description of Artificial Sequence: Synthetic oligonucleotide
agtgctcgtgtttctaattct

SEQ ID NO: 23984 - DNA, 21 bp, Artificial Sequence
  Description of Artificial Sequence: Synthetic oligonucleotide
tctgcgtcggcgttggtgctg

SEQ ID NO: 23985 - DNA, 21 bp, Artificial Sequence
  Description of Artificial Sequence: Synthetic oligonucleotide
agtgcgagtgagcgttttcgg

SEQ ID NO: 23986 - DNA, 21 bp, Artificial Sequence
  Description of Artificial Sequence: Synthetic oligonucleotide
tcggcttcggagtcgtctatg

SEQ ID NO: 23987 - DNA, 21 bp, Artificial Sequence
  Description of Artificial Sequence: Synthetic oligonucleotide
agtgcttcgattcaggtgatg

SEQ ID NO: 23988 - DNA, 21 bp, Artificial Sequence
  Description of Artificial Sequence: Synthetic oligonucleotide
agtgcgtctaagcctactagt

SEQ ID NO: 23989 - DNA, 21 bp, Artificial Sequence
  Description of Artificial Sequence: Synthetic oligonucleotide
agtgcttcgcttcgtttgccg

SEQ ID NO: 23990 - DNA, 21 bp, Artificial Sequence
  Description of Artificial Sequence: Synthetic oligonucleotide
tctgcgtcgatgcgtgcgttg

SEQ ID NO: 23991 - DNA, 21 bp, Artificial Sequence
  Description of Artificial Sequence: Synthetic oligonucleotide
agtgcttctaattctgttggt

SEQ ID NO: 23992 - DNA, 21 bp, Artificial Sequence
  Description of Artificial Sequence: Synthetic oligonucleotide
agtgcttctcctgctggtcat

SEQ ID NO: 23993 - DNA, 21 bp, Artificial Sequence
  Description of Artificial Sequence: Synthetic oligonucleotide
tctgcgtctcctcagaggacg

SEQ ID NO: 23994 - DNA, 21 bp, Artificial Sequence
  Description of Artificial Sequence: Synthetic oligonucleotide
tcggcttcgcggcagattccg

SEQ ID NO: 23995 - DNA, 21 bp, Artificial Sequence
  Description of Artificial Sequence: Synthetic oligonucleotide
tcggcttcttctgctgcgcag

SEQ ID NO: 23996 - DNA, 21 bp, Artificial Sequence
  Description of Artificial Sequence: Synthetic oligonucleotide
agtgcttcgtctaagacgggg

SEQ ID NO: 23997 - DNA, 21 bp, Artificial Sequence
  Description of Artificial Sequence: Synthetic oligonucleotide
agtgcttctacgccgaagcat

SEQ ID NO: 23998 - DNA, 21 bp, Artificial Sequence
  Description of Artificial Sequence: Synthetic oligonucleotide
agtgcttctacgcagatttct

SEQ ID NO: 23999 - DNA, 21 bp, Artificial Sequence
  Description of Artificial Sequence: Synthetic oligonucleotide
tcggcgtctgtgcggggtaat

SEQ ID NO: 24000 - DNA, 21 bp, Artificial Sequence
  Description of Artificial Sequence: Synthetic oligonucleotide
agtgcgagtgttacttattcg

SEQ ID NO: 24001 - DNA, 21 bp, Artificial Sequence
  Description of Artificial Sequence: Synthetic oligonucleotide
agtgctacgtttgatacgact

SEQ ID NO: 24002 - DNA, 21 bp, Artificial Sequence
  Description of Artificial Sequence: Synthetic oligonucleotide
agtgctactctttctgctctt

SEQ ID NO: 24003 - DNA, 21 bp, Artificial Sequence
  Description of Artificial Sequence: Synthetic oligonucleotide
agtgctacgccgcatagggct

SEQ ID NO: 24004 - DNA, 21 bp, Artificial Sequence
  Description of Artificial Sequence: Synthetic oligonucleotide
tctgctactcctatttcgcgg

SEQ ID NO: 24005 - DNA, 21 bp, Artificial Sequence
  Description of Artificial Sequence: Synthetic oligonucleotide
tcggctacgcagcatactggt

SEQ ID NO: 24006 - DNA, 21 bp, Artificial Sequence
  Description of Artificial Sequence: Synthetic oligonucleotide
agtgctacgcagcgtattgtg

SEQ ID NO: 24007 - DNA, 21 bp, Artificial Sequence
  Description of Artificial Sequence: Synthetic oligonucleotide
tctgcgacttctccggatcgt

SEQ ID NO: 24008 - DNA, 21 bp, Artificial Sequence
  Description of Artificial Sequence: Synthetic oligonucleotide
tcggcgacggtgcctcgtcct

SEQ ID NO: 24009 - DNA, 21 bp, Artificial Sequence
  Description of Artificial Sequence: Synthetic oligonucleotide
tcggctgtggcgattttgact

SEQ ID NO: 24010 - DNA, 21 bp, Artificial Sequence
  Description of Artificial Sequence: Synthetic oligonucleotide
tcggctgtgggggcgcatagt

SEQ ID NO: 24011 - DNA, 21 bp, Artificial Sequence
  Description of Artificial Sequence: Synthetic oligonucleotide
agtgctgtgggtaatgcgcgt

SEQ ID NO: 24012 - DNA, 21 bp, Artificial Sequence
  Description of Artificial Sequence: Synthetic oligonucleotide
agtgcggttggtcgtagtact

SEQ ID NO: 24013 - DNA, 21 bp, Artificial Sequence
  Description of Artificial Sequence: Synthetic oligonucleotide
tcggctgttggtacgtcgtat

SEQ ID NO: 24014 - DNA, 21 bp, Artificial Sequence
  Description of Artificial Sequence: Synthetic oligonucleotide
tctgcggttcataggatggat

SEQ ID NO: 24015 - DNA, 21 bp, Artificial Sequence
  Description of Artificial Sequence: Synthetic oligonucleotide
tctgcggtgattcgtgcttct

SEQ ID NO: 24016 - DNA, 21 bp, Artificial Sequence
  Description of Artificial Sequence: Synthetic oligonucleotide
tcggctgtgttgccgcagcgt

SEQ ID NO: 24017 - DNA, 21 bp, Artificial Sequence
  Description of Artificial Sequence: Synthetic oligonucleotide
agtgcggtgaatgaggctcgg

SEQ ID NO: 24018 - DNA, 21 bp, Artificial Sequence
  Description of Artificial Sequence: Synthetic oligonucleotide
tcggcggtgaattctaggatg

SEQ ID NO: 24019 - DNA, 21 bp, Artificial Sequence
  Description of Artificial Sequence: Synthetic oligonucleotide
agtgcggttcgtatggctacg

SEQ ID NO: 24020 - DNA, 21 bp, Artificial Sequence
  Description of Artificial Sequence: Synthetic oligonucleotide
agtgctgtgcgtccgttgccg

SEQ ID NO: 24021 - DNA, 21 bp, Artificial Sequence
  Description of Artificial Sequence: Synthetic oligonucleotide
tcggctgttactggggcgtgg

SEQ ID NO: 24022 - DNA, 21 bp, Artificial Sequence
  Description of Artificial Sequence: Synthetic oligonucleotide
tctgctgtgacgtctcatatg

SEQ ID NO: 24023 - DNA, 21 bp, Artificial Sequence
  Description of Artificial Sequence: Synthetic oligonucleotide
tctgcggtgtatcagggtcat

SEQ ID NO: 24024 - DNA, 21 bp, Artificial Sequence
  Description of Artificial Sequence: Synthetic oligonucleotide
tcggcttggtcgagtactggt

SEQ ID NO: 24025 - DNA, 21 bp, Artificial Sequence
  Description of Artificial Sequence: Synthetic oligonucleotide
agtgcttatgcttcgtctagt

SEQ ID NO: 24026 - DNA, 21 bp, Artificial Sequence
  Description of Artificial Sequence: Synthetic oligonucleotide
tctgcttatcagaatatggcg

SEQ ID NO: 24027 - DNA, 21 bp, Artificial Sequence
  Description of Artificial Sequence: Synthetic oligonucleotide
tctgcttatgtggatactagg

SEQ ID NO: 24028 - DNA, 21 bp, Artificial Sequence
  Description of Artificial Sequence: Synthetic oligonucleotide
tcttgtgagctgcttccggct

SEQ ID NO: 24029 - DNA, 21 bp, Artificial Sequence
  Description of Artificial Sequence: Synthetic oligonucleotide
agttgtttgaatggtgttccg

SEQ ID NO: 24030 - DNA, 21 bp, Artificial Sequence
  Description of Artificial Sequence: Synthetic oligonucleotide
tctgatgcgatgacgattgct

SEQ ID NO: 24031 - DNA, 21 bp, Artificial Sequence
  Description of Artificial Sequence: Synthetic oligonucleotide
tcggatgcgaatggtagttct

SEQ ID NO: 24032 - DNA, 21 bp, Artificial Sequence
  Description of Artificial Sequence: Synthetic oligonucleotide
agtgatgcgaatgttgggatg

SEQ ID NO: 24033 - DNA, 21 bp, Artificial Sequence
  Description of Artificial Sequence: Synthetic oligonucleotide
tctgatgctcctccttatagg

SEQ ID NO: 24034 - DNA, 21 bp, Artificial Sequence
  Description of Artificial Sequence: Synthetic oligonucleotide
tctgattgtattactcattct

SEQ ID NO: 24035 - DNA, 21 bp, Artificial Sequence
  Description of Artificial Sequence: Synthetic oligonucleotide
tcggatgatgggccgagtgct

SEQ ID NO: 24036 - DNA, 21 bp, Artificial Sequence
  Description of Artificial Sequence: Synthetic oligonucleotide
tcggatgatttggttccgaag

SEQ ID NO: 24037 - DNA, 21 bp, Artificial Sequence
  Description of Artificial Sequence: Synthetic oligonucleotide
tctgatgatcgtgagaattgt

SEQ ID NO: 24038 - DNA, 21 bp, Artificial Sequence
  Description of Artificial Sequence: Synthetic oligonucleotide
agtgatgattctaagaatacg

SEQ ID NO: 24039 - DNA, 21 bp, Artificial Sequence
  Description of Artificial Sequence: Synthetic oligonucleotide
tctgatgagtctggtatgcct

SEQ ID NO: 24040 - DNA, 21 bp, Artificial Sequence
  Description of Artificial Sequence: Synthetic oligonucleotide
tcggatggtcctcgtttgagt

SEQ ID NO: 24041 - DNA, 21 bp, Artificial Sequence
  Description of Artificial Sequence: Synthetic oligonucleotide
agtgatgggtcttcgcttgct

SEQ ID NO: 24042 - DNA, 21 bp, Artificial Sequence
  Description of Artificial Sequence: Synthetic oligonucleotide
agtgatcatcgttatctgatt

SEQ ID NO: 24043 - DNA, 21 bp, Artificial Sequence
  Description of Artificial Sequence: Synthetic oligonucleotide
tcggatcatagttctcggacg

SEQ ID NO: 24044 - DNA, 21 bp, Artificial Sequence
  Description of Artificial Sequence: Synthetic oligonucleotide
tctgatattccgcgtccgagt

SEQ ID NO: 24045 - DNA, 21 bp, Artificial Sequence
  Description of Artificial Sequence: Synthetic oligonucleotide
tcggatattgttgcgtctccg

SEQ ID NO: 24046 - DNA, 21 bp, Artificial Sequence
  Description of Artificial Sequence: Synthetic oligonucleotide
tctgataagttttttccgagt

SEQ ID NO: 24047 - DNA, 21 bp, Artificial Sequence
  Description of Artificial Sequence: Synthetic oligonucleotide
tctgatctgaataagcttgcg

SEQ ID NO: 24048 - DNA, 21 bp, Artificial Sequence
  Description of Artificial Sequence: Synthetic oligonucleotide
tctgatctgcctatgctggtt

SEQ ID NO: 24049 - DNA, 21 bp, Artificial Sequence
  Description of Artificial Sequence: Synthetic oligonucleotide
tctgatcttcgtatggttgct

SEQ ID NO: 24050 - DNA, 21 bp, Artificial Sequence
  Description of Artificial Sequence: Synthetic oligonucleotide
agtgatctttcgcggcctctt

SEQ ID NO: 24051 - DNA, 21 bp, Artificial Sequence
  Description of Artificial Sequence: Synthetic oligonucleotide
agtgatatggctactaagttg

SEQ ID NO: 24052 - DNA, 21 bp, Artificial Sequence
  Description of Artificial Sequence: Synthetic oligonucleotide
agtgatatgcctgttcctcgt

SEQ ID NO: 24053 - DNA, 21 bp, Artificial Sequence
  Description of Artificial Sequence: Synthetic oligonucleotide
tcggatatgacggctcggggg

SEQ ID NO: 24054 - DNA, 21 bp, Artificial Sequence
  Description of Artificial Sequence: Synthetic oligonucleotide
agtgataattatgagcgtacg

SEQ ID NO: 24055 - DNA, 21 bp, Artificial Sequence
  Description of Artificial Sequence: Synthetic oligonucleotide
tctgatcctgggcgtggtgcg

SEQ ID NO: 24056 - DNA, 21 bp, Artificial Sequence
  Description of Artificial Sequence: Synthetic oligonucleotide
agtgatcctaagtattcggtg

SEQ ID NO: 24057 - DNA, 21 bp, Artificial Sequence
  Description of Artificial Sequence: Synthetic oligonucleotide
tctgatccgaatacgtatatt

SEQ ID NO: 24058 - DNA, 21 bp, Artificial Sequence
  Description of Artificial Sequence: Synthetic oligonucleotide
tctgatcctaggaggactagt

SEQ ID NO: 24059 - DNA, 21 bp, Artificial Sequence
  Description of Artificial Sequence: Synthetic oligonucleotide
agtgatccgtcgttgccggtt

SEQ ID NO: 24060 - DNA, 21 bp, Artificial Sequence
  Description of Artificial Sequence: Synthetic oligonucleotide
tctgatccggtgttgggggcg

SEQ ID NO: 24061 - DNA, 21 bp, Artificial Sequence
  Description of Artificial Sequence: Synthetic oligonucleotide
tctgatcagcctactaaggct

SEQ ID NO: 24062 - DNA, 21 bp, Artificial Sequence
  Description of Artificial Sequence: Synthetic oligonucleotide
agtgatcagcggattttgcct

SEQ ID NO: 24063 - DNA, 21 bp, Artificial Sequence
  Description of Artificial Sequence: Synthetic oligonucleotide
tctgatcagtctctgacgtat

SEQ ID NO: 24064 - DNA, 21 bp, Artificial Sequence
  Description of Artificial Sequence: Synthetic oligonucleotide
agtgatcaggttaagagttct

SEQ ID NO: 24065 - DNA, 21 bp, Artificial Sequence
  Description of Artificial Sequence: Synthetic oligonucleotide
tcggatcgggagtctcgtatt

SEQ ID NO: 24066 - DNA, 21 bp, Artificial Sequence
  Description of Artificial Sequence: Synthetic oligonucleotide
tcggatagggaggttgatccg

SEQ ID NO: 24067 - DNA, 21 bp, Artificial Sequence
  Description of Artificial Sequence: Synthetic oligonucleotide
agtgatcgtgggattcgtgat

SEQ ID NO: 24068 - DNA, 21 bp, Artificial Sequence
  Description of Artificial Sequence: Synthetic oligonucleotide
tctgatagggggtatcctaag

SEQ ID NO: 24069 - DNA, 21 bp, Artificial Sequence
  Description of Artificial Sequence: Synthetic oligonucleotide
tcggatcggctttgtgatgag

SEQ ID NO: 24070 - DNA, 21 bp, Artificial Sequence
  Description of Artificial Sequence: Synthetic oligonucleotide
agtgatcggcttcagacggtt

SEQ ID NO: 24071 - DNA, 21 bp, Artificial Sequence
  Description of Artificial Sequence: Synthetic oligonucleotide
tctgataggatgatgactttt

SEQ ID NO: 24072 - DNA, 21 bp, Artificial Sequence
  Description of Artificial Sequence: Synthetic oligonucleotide
agtgatcgtatgtctagtcct

SEQ ID NO: 24073 - DNA, 21 bp, Artificial Sequence
  Description of Artificial Sequence: Synthetic oligonucleotide
tcggataggccggcgttgttg

SEQ ID NO: 24074 - DNA, 21 bp, Artificial Sequence
  Description of Artificial Sequence: Synthetic oligonucleotide
tctgatcggcctggtctgtat

SEQ ID NO: 24075 - DNA, 21 bp, Artificial Sequence
  Description of Artificial Sequence: Synthetic oligonucleotide
tcggatcgtcagccttttact

SEQ ID NO: 24076 - DNA, 21 bp, Artificial Sequence
  Description of Artificial Sequence: Synthetic oligonucleotide
agtgatcgtcgtgctatgagt

SEQ ID NO: 24077 - DNA, 21 bp, Artificial Sequence
  Description of Artificial Sequence: Synthetic oligonucleotide
tctgatcgtcgtaatatggcg

SEQ ID NO: 24078 - DNA, 21 bp, Artificial Sequence
  Description of Artificial Sequence: Synthetic oligonucleotide
agtgatcggagtgctacgtct

SEQ ID NO: 24079 - DNA, 21 bp, Artificial Sequence
  Description of Artificial Sequence: Synthetic oligonucleotide
tctgatcgttcggataagccg

SEQ ID NO: 24080 - DNA, 21 bp, Artificial Sequence
  Description of Artificial Sequence: Synthetic oligonucleotide
tctgattcggctcatgctcct

SEQ ID NO: 24081 - DNA, 21 bp, Artificial Sequence
  Description of Artificial Sequence: Synthetic oligonucleotide
tcggattctgggcagtctgcg

SEQ ID NO: 24082 - DNA, 21 bp, Artificial Sequence
  Description of Artificial Sequence: Synthetic oligonucleotide
tctgattcgaaggtgggtccg

SEQ ID NO: 24083 - DNA, 21 bp, Artificial Sequence
  Description of Artificial Sequence: Synthetic oligonucleotide
tcggattctcgtctgggggcg

SEQ ID NO: 24084 - DNA, 21 bp, Artificial Sequence
  Description of Artificial Sequence: Synthetic oligonucleotide
agtgattctcggagggagtat

SEQ ID NO: 24085 - DNA, 21 bp, Artificial Sequence
  Description of Artificial Sequence: Synthetic oligonucleotide
tctgattcgtatggttctcgt

SEQ ID NO: 24086 - DNA, 21 bp, Artificial Sequence
  Description of Artificial Sequence: Synthetic oligonucleotide
tcggatagttatccgcgtatt

SEQ ID NO: 24087 - DNA, 21 bp, Artificial Sequence
  Description of Artificial Sequence: Synthetic oligonucleotide
tcggatacgaagctgtatccg

SEQ ID NO: 24088 - DNA, 21 bp, Artificial Sequence
  Description of Artificial Sequence: Synthetic oligonucleotide
tctgatacgatgagggcggag

SEQ ID NO: 24089 - DNA, 21 bp, Artificial Sequence
  Description of Artificial Sequence: Synthetic oligonucleotide
tcggatacgaggctgacgcgt

SEQ ID NO: 24090 - DNA, 21 bp, Artificial Sequence
  Description of Artificial Sequence: Synthetic oligonucleotide
tcggatactaggaatggggcg

SEQ ID NO: 24091 - DNA, 21 bp, Artificial Sequence
  Description of Artificial Sequence: Synthetic oligonucleotide
agtgatactacgctgctggat

SEQ ID NO: 24092 - DNA, 21 bp, Artificial Sequence
  Description of Artificial Sequence: Synthetic oligonucleotide
tctgatacgtatatgcggttg

SEQ ID NO: 24093 - DNA, 21 bp, Artificial Sequence
  Description of Artificial Sequence: Synthetic oligonucleotide
tcggatgttgctgctaggagt

SEQ ID NO: 24094 - DNA, 21 bp, Artificial Sequence
  Description of Artificial Sequence: Synthetic oligonucleotide
tctgatgttgctatgcgggcg

SEQ ID NO: 24095 - DNA, 21 bp, Artificial Sequence
  Description of Artificial Sequence: Synthetic oligonucleotide
agtgatgttaatcaggggttg

SEQ ID NO: 24096 - DNA, 21 bp, Artificial Sequence
  Description of Artificial Sequence: Synthetic oligonucleotide
agtgaggcgtttcggccggcg

SEQ ID NO: 24097 - DNA, 21 bp, Artificial Sequence
  Description of Artificial Sequence: Synthetic oligonucleotide
tctgaggctccgaatgatcgg

SEQ ID NO: 24098 - DNA, 21 bp, Artificial Sequence
  Description of Artificial Sequence: Synthetic oligonucleotide
agtgaggcgtctgcgtctagg

SEQ ID NO: 24099 - DNA, 21 bp, Artificial Sequence
  Description of Artificial Sequence: Synthetic oligonucleotide
agtgaggcttggctggcgagt

SEQ ID NO: 24100 - DNA, 21 bp, Artificial Sequence
  Description of Artificial Sequence: Synthetic oligonucleotide
agtgaggatggtgatattaag

SEQ ID NO: 24101 - DNA, 21 bp, Artificial Sequence
  Description of Artificial Sequence: Synthetic oligonucleotide
tcggaggatcgtagtcggacg

SEQ ID NO: 24102 - DNA, 21 bp, Artificial Sequence
  Description of Artificial Sequence: Synthetic oligonucleotide
agtgaggagtcgtggggttat

SEQ ID NO: 24103 - DNA, 21 bp, Artificial Sequence
  Description of Artificial Sequence: Synthetic oligonucleotide
tctgagtttgttcggatgcct

SEQ ID NO: 24104 - DNA, 21 bp, Artificial Sequence
  Description of Artificial Sequence: Synthetic oligonucleotide
tctgagggggatcatgcgctt

SEQ ID NO: 24105 - DNA, 21 bp, Artificial Sequence
  Description of Artificial Sequence: Synthetic oligonucleotide
tcggagggttttaatgcgatg

SEQ ID NO: 24106 - DNA, 21 bp, Artificial Sequence
  Description of Artificial Sequence: Synthetic oligonucleotide
agtgaggggcatcggggtcct

SEQ ID NO: 24107 - DNA, 21 bp, Artificial Sequence
  Description of Artificial Sequence: Synthetic oligonucleotide
agtgagggtactgttcgggag

SEQ ID NO: 24108 - DNA, 21 bp, Artificial Sequence
  Description of Artificial Sequence: Synthetic oligonucleotide
tctgagattcataggcttccg

SEQ ID NO: 24109 - DNA, 21 bp, Artificial Sequence
  Description of Artificial Sequence: Synthetic oligonucleotide
tcggagattaatcgtcctgag

SEQ ID NO: 24110 - DNA, 21 bp, Artificial Sequence
  Description of Artificial Sequence: Synthetic oligonucleotide
tcggagattactcttccgctt

SEQ ID NO: 24111 - DNA, 21 bp, Artificial Sequence
  Description of Artificial Sequence: Synthetic oligonucleotide
tctgagaagtcgaatgagagt

SEQ ID NO: 24112 - DNA, 21 bp, Artificial Sequence
  Description of Artificial Sequence: Synthetic oligonucleotide
tcggagaagtatgctgctatg

SEQ ID NO: 24113 - DNA, 21 bp, Artificial Sequence
  Description of Artificial Sequence: Synthetic oligonucleotide
agtgagctggaggctcggacg

SEQ ID NO: 24114 - DNA, 21 bp, Artificial Sequence
  Description of Artificial Sequence: Synthetic oligonucleotide
tctgagcttcatgggcttctg

SEQ ID NO: 24115 - DNA, 21 bp, Artificial Sequence
  Description of Artificial Sequence: Synthetic oligonucleotide
tctgagttgaagacgaggcct

SEQ ID NO: 24116 - DNA, 21 bp, Artificial Sequence
  Description of Artificial Sequence: Synthetic oligonucleotide
agtgagcttaggtcggtgggt

SEQ ID NO: 24117 - DNA, 21 bp, Artificial Sequence
  Description of Artificial Sequence: Synthetic oligonucleotide
agtgagatggatttgcggtct

SEQ ID NO: 24118 - DNA, 21 bp, Artificial Sequence
  Description of Artificial Sequence: Synthetic oligonucleotide
tcggagaatcagatgaggtct

SEQ ID NO: 24119 - DNA, 21 bp, Artificial Sequence
  Description of Artificial Sequence: Synthetic oligonucleotide
agtgagaatacgtctgatcat

SEQ ID NO: 24120 - DNA, 21 bp, Artificial Sequence
  Description of Artificial Sequence: Synthetic oligonucleotide
tctgagcctattcgtactgtt

SEQ ID NO: 24121 - DNA, 21 bp, Artificial Sequence
  Description of Artificial Sequence: Synthetic oligonucleotide
agtgagcctaggcggactccg

SEQ ID NO: 24122 - DNA, 21 bp, Artificial Sequence
  Description of Artificial Sequence: Synthetic oligonucleotide
tcggagcctcggtcgcatccg

SEQ ID NO: 24123 - DNA, 21 bp, Artificial Sequence
  Description of Artificial Sequence: Synthetic oligonucleotide
agtgagccttctgattatgtg

SEQ ID NO: 24124 - DNA, 21 bp, Artificial Sequence
  Description of Artificial Sequence: Synthetic oligonucleotide
tcggagccttctctgtcgtct

SEQ ID NO: 24125 - DNA, 21 bp, Artificial Sequence
  Description of Artificial Sequence: Synthetic oligonucleotide
tctgagccgacggcgaggaat

SEQ ID NO: 24126 - DNA, 21 bp, Artificial Sequence
  Description of Artificial Sequence: Synthetic oligonucleotide
tcggagccgactatgattgtg

SEQ ID NO: 24127 - DNA, 21 bp, Artificial Sequence
  Description of Artificial Sequence: Synthetic oligonucleotide
tcggagccgtatggtcgtctt

SEQ ID NO: 24128 - DNA, 21 bp, Artificial Sequence
  Description of Artificial Sequence: Synthetic oligonucleotide
tctgagccttatcatgctgcg

SEQ ID NO: 24129 - DNA, 21 bp, Artificial Sequence
  Description of Artificial Sequence: Synthetic oligonucleotide
agtgagcagtcgcggttgttg

SEQ ID NO: 24130 - DNA, 21 bp, Artificial Sequence
  Description of Artificial Sequence: Synthetic oligonucleotide
tcggagcgtttttttaatggt

SEQ ID NO: 24131 - DNA, 21 bp, Artificial Sequence
  Description of Artificial Sequence: Synthetic oligonucleotide
tctgagcgtcatgcttgttct

SEQ ID NO: 24132 - DNA, 21 bp, Artificial Sequence
  Description of Artificial Sequence: Synthetic oligonucleotide
tctgagcgtccggcggcggct

SEQ ID NO: 24133 - DNA, 21 bp, Artificial Sequence
  Description of Artificial Sequence: Synthetic oligonucleotide
tcggagaggcctatgcctaag

SEQ ID NO: 24134 - DNA, 21 bp, Artificial Sequence
  Description of Artificial Sequence: Synthetic oligonucleotide
tctgagaggacgctgattatg

SEQ ID NO: 24135 - DNA, 21 bp, Artificial Sequence
  Description of Artificial Sequence: Synthetic oligonucleotide
tctgagcgggttgctgcgcat

SEQ ID NO: 24136 - DNA, 21 bp, Artificial Sequence
  Description of Artificial Sequence: Synthetic oligonucleotide
tctgagagggttgagaagcat

SEQ ID NO: 24137 - DNA, 21 bp, Artificial Sequence
  Description of Artificial Sequence: Synthetic oligonucleotide
tctgagagtagttcgcagaat

SEQ ID NO: 24138 - DNA, 21 bp, Artificial Sequence
  Description of Artificial Sequence: Synthetic oligonucleotide
tcggagacgacgtctcgtcat

SEQ ID NO: 24139 - DNA, 21 bp, Artificial Sequence
  Description of Artificial Sequence: Synthetic oligonucleotide
agtgaggtgggttctgcgacg

SEQ ID NO: 24140 - DNA, 21 bp, Artificial Sequence
  Description of Artificial Sequence: Synthetic oligonucleotide
tctgaggttaatcttccgtcg

SEQ ID NO: 24141 - DNA, 21 bp, Artificial Sequence
  Description of Artificial Sequence: Synthetic oligonucleotide
agtgaggttcgggctacggcg

SEQ ID NO: 24142 - DNA, 21 bp, Artificial Sequence
  Description of Artificial Sequence: Synthetic oligonucleotide
tcggaggtttctccgcggggg

SEQ ID NO: 24143 - DNA, 21 bp, Artificial Sequence
  Description of Artificial Sequence: Synthetic oligonucleotide
tctgagtggaaggttgagcat

SEQ ID NO: 24144 - DNA, 21 bp, Artificial Sequence
  Description of Artificial Sequence: Synthetic oligonucleotide
tcggagtattatcatagtgcg

SEQ ID NO: 24145 - DNA, 21 bp, Artificial Sequence
  Description of Artificial Sequence: Synthetic oligonucleotide
agttttgcgccggcgcatgat

SEQ ID NO: 24146 - DNA, 21 bp, Artificial Sequence
  Description of Artificial Sequence: Synthetic oligonucleotide
tcgtttgcgagttttccgggt

SEQ ID NO: 24147 - DNA, 21 bp, Artificial Sequence
  Description of Artificial Sequence: Synthetic oligonucleotide
agttttgatgatggtggtccg

SEQ ID NO: 24148 - DNA, 21 bp, Artificial Sequence
  Description of Artificial Sequence: Synthetic oligonucleotide
agttttgatggtgtgcctttt

SEQ ID NO: 24149 - DNA, 21 bp, Artificial Sequence
  Description of Artificial Sequence: Synthetic oligonucleotide
tcgtttgatcatactctgggg

SEQ ID NO: 24150 - DNA, 21 bp, Artificial Sequence
  Description of Artificial Sequence: Synthetic oligonucleotide
tcgtttgataagtttgcggag

SEQ ID NO: 24151 - DNA, 21 bp, Artificial Sequence
  Description of Artificial Sequence: Synthetic oligonucleotide
agttttgatatggctcttaag

SEQ ID NO: 24152 - DNA, 21 bp, Artificial Sequence
  Description of Artificial Sequence: Synthetic oligonucleotide
tcttttgattctaatcggacg

SEQ ID NO: 24153 - DNA, 21 bp, Artificial Sequence
  Description of Artificial Sequence: Synthetic oligonucleotide
tcgtttgagtctaagatgcat

SEQ ID NO: 24154 - DNA, 21 bp, Artificial Sequence
  Description of Artificial Sequence: Synthetic oligonucleotide
agttttgagacgattgggcgt

SEQ ID NO: 24155 - DNA, 21 bp, Artificial Sequence
  Description of Artificial Sequence: Synthetic oligonucleotide
agttttgagacgtgggcgccg

SEQ ID NO: 24156 - DNA, 21 bp, Artificial Sequence
  Description of Artificial Sequence: Synthetic oligonucleotide
tcttttgggatgaagccgtcg

SEQ ID NO: 24157 - DNA, 21 bp, Artificial Sequence
  Description of Artificial Sequence: Synthetic oligonucleotide
tcttttggtaatgggactgtt

SEQ ID NO: 24158 - DNA, 21 bp, Artificial Sequence
  Description of Artificial Sequence: Synthetic oligonucleotide
tcttttggttctggtccttcg

SEQ ID NO: 24159 - DNA, 21 bp, Artificial Sequence
  Description of Artificial Sequence: Synthetic oligonucleotide
tcgtttcatgaggcgactaat

SEQ ID NO: 24160 - DNA, 21 bp, Artificial Sequence
  Description of Artificial Sequence: Synthetic oligonucleotide
tcttttattacggatgctcct

SEQ ID NO: 24161 - DNA, 21 bp, Artificial Sequence
  Description of Artificial Sequence: Synthetic oligonucleotide
tcttttaaggatcattatgct

SEQ ID NO: 24162 - DNA, 21 bp, Artificial Sequence
  Description of Artificial Sequence: Synthetic oligonucleotide
tcttttaagtcgactaatctg

SEQ ID NO: 24163 - DNA, 21 bp, Artificial Sequence
  Description of Artificial Sequence: Synthetic oligonucleotide
agttttaagactggttctgcg

SEQ ID NO: 24164 - DNA, 21 bp, Artificial Sequence
  Description of Artificial Sequence: Synthetic oligonucleotide
tcgtttatgccgcagttggag

SEQ ID NO: 24165 - DNA, 21 bp, Artificial Sequence
  Description of Artificial Sequence: Synthetic oligonucleotide
tcgtttaatgcgggggcttct

SEQ ID NO: 24166 - DNA, 21 bp, Artificial Sequence
  Description of Artificial Sequence: Synthetic oligonucleotide
agttttcctgataggcctctg

SEQ ID NO: 24167 - DNA, 21 bp, Artificial Sequence
  Description of Artificial Sequence: Synthetic oligonucleotide
tcttttccgggtgagcgtgtt

SEQ ID NO: 24168 - DNA, 21 bp, Artificial Sequence
  Description of Artificial Sequence: Synthetic oligonucleotide
tcttttcagggggctcgtact

SEQ ID NO: 24169 - DNA, 21 bp, Artificial Sequence
  Description of Artificial Sequence: Synthetic oligonucleotide
agttttcagagtcatggtgat

SEQ ID NO: 24170 - DNA, 21 bp, Artificial Sequence
  Description of Artificial Sequence: Synthetic oligonucleotide
agttttcggggtgggattagt

SEQ ID NO: 24171 - DNA, 21 bp, Artificial Sequence
  Description of Artificial Sequence: Synthetic oligonucleotide
tcttttcgtcaggctagttgt

SEQ ID NO: 24172 - DNA, 21 bp, Artificial Sequence
  Description of Artificial Sequence: Synthetic oligonucleotide
agttttcggcagccgcagagt

SEQ ID NO: 24173 - DNA, 21 bp, Artificial Sequence
  Description of Artificial Sequence: Synthetic oligonucleotide
tcgttttctgatcctcagaat

SEQ ID NO: 24174 - DNA, 21 bp, Artificial Sequence
  Description of Artificial Sequence: Synthetic oligonucleotide
agttttagtggtcctaagtcg

SEQ ID NO: 24175 - DNA, 21 bp, Artificial Sequence
  Description of Artificial Sequence: Synthetic oligonucleotide
tctttttcgaatccttcgcag

SEQ ID NO: 24176 - DNA, 21 bp, Artificial Sequence
  Description of Artificial Sequence: Synthetic oligonucleotide
tcgttttcgcgtgcgacttct

SEQ ID NO: 24177 - DNA, 21 bp, Artificial Sequence
  Description of Artificial Sequence: Synthetic oligonucleotide
tctttttcgtctactgcttct

SEQ ID NO: 24178 - DNA, 21 bp, Artificial Sequence
  Description of Artificial Sequence: Synthetic oligonucleotide
agttttactggttctgttgcg

SEQ ID NO: 24179 - DNA, 21 bp, Artificial Sequence
  Description of Artificial Sequence: Synthetic oligonucleotide
tcgtttactgggtctgttcct

SEQ ID NO: 24180 - DNA, 21 bp, Artificial Sequence
  Description of Artificial Sequence: Synthetic oligonucleotide
tcttttactcaggcgttggag

SEQ ID NO: 24181 - DNA, 21 bp, Artificial Sequence
  Description of Artificial Sequence: Synthetic oligonucleotide
agttttactcgtcaggaggct

SEQ ID NO: 24182 - DNA, 21 bp, Artificial Sequence
  Description of Artificial Sequence: Synthetic oligonucleotide
tcttttacgacgggtggtgtg

SEQ ID NO: 24183 - DNA, 21 bp, Artificial Sequence
  Description of Artificial Sequence: Synthetic oligonucleotide
agttttacgacgcaggcgact

SEQ ID NO: 24184 - DNA, 21 bp, Artificial Sequence
  Description of Artificial Sequence: Synthetic oligonucleotide
tcgtttgtggatcgtgctggt

SEQ ID NO: 24185 - DNA, 21 bp, Artificial Sequence
  Description of Artificial Sequence: Synthetic oligonucleotide
tcgtttgttcagactacgcct

SEQ ID NO: 24186 - DNA, 21 bp, Artificial Sequence
  Description of Artificial Sequence: Synthetic oligonucleotide
tcgtttgttaggacgagtact

SEQ ID NO: 24187 - DNA, 21 bp, Artificial Sequence
  Description of Artificial Sequence: Synthetic oligonucleotide
agtggtgctgctcctacgtat

SEQ ID NO: 24188 - DNA, 21 bp, Artificial Sequence
  Description of Artificial Sequence: Synthetic oligonucleotide
tctggggcgtttcatttgagt

SEQ ID NO: 24189 - DNA, 21 bp, Artificial Sequence
  Description of Artificial Sequence: Synthetic oligonucleotide
tctggggctcagccgatgttt

SEQ ID NO: 24190 - DNA, 21 bp, Artificial Sequence
  Description of Artificial Sequence: Synthetic oligonucleotide
agtggggcgcaggttccgtct

SEQ ID NO: 24191 - DNA, 21 bp, Artificial Sequence
  Description of Artificial Sequence: Synthetic oligonucleotide
tcgggtgcgagtgttattgct

SEQ ID NO: 24192 - DNA, 21 bp, Artificial Sequence
  Description of Artificial Sequence: Synthetic oligonucleotide
tcgggggctacgcatccttat

SEQ ID NO: 24193 - DNA, 21 bp, Artificial Sequence
  Description of Artificial Sequence: Synthetic oligonucleotide
tcgggtgctgttagtgggctt

SEQ ID NO: 24194 - DNA, 21 bp, Artificial Sequence
  Description of Artificial Sequence: Synthetic oligonucleotide
tctggtgcgtattcttcgtct

SEQ ID NO: 24195 - DNA, 21 bp, Artificial Sequence
  Description of Artificial Sequence: Synthetic oligonucleotide
tcggggtgttctgagctgcct

SEQ ID NO: 24196 - DNA, 21 bp, Artificial Sequence
  Description of Artificial Sequence: Synthetic oligonucleotide
tctggtgatcctaaggatatt

SEQ ID NO: 24197 - DNA, 21 bp, Artificial Sequence
  Description of Artificial Sequence: Synthetic oligonucleotide
agtggggatcagggttcgagg

SEQ ID NO: 24198 - DNA, 21 bp, Artificial Sequence
  Description of Artificial Sequence: Synthetic oligonucleotide
tctggggaggctaagtcgggg

SEQ ID NO: 24199 - DNA, 21 bp, Artificial Sequence
  Description of Artificial Sequence: Synthetic oligonucleotide
agtggtgagttgggtggtttg

SEQ ID NO: 24200 - DNA, 21 bp, Artificial Sequence
  Description of Artificial Sequence: Synthetic oligonucleotide
tcgggtgagttgaatcctccg

SEQ ID NO: 24201 - DNA, 21 bp, Artificial Sequence
  Description of Artificial Sequence: Synthetic oligonucleotide
tctggggagcttcgttatatt

SEQ ID NO: 24202 - DNA, 21 bp, Artificial Sequence
  Description of Artificial Sequence: Synthetic oligonucleotide
tctggggagaggacgtcgggt

SEQ ID NO: 24203 - DNA, 21 bp, Artificial Sequence
  Description of Artificial Sequence: Synthetic oligonucleotide
agtggttttggggcgaagcag

SEQ ID NO: 24204 - DNA, 21 bp, Artificial Sequence
  Description of Artificial Sequence: Synthetic oligonucleotide
tctgggtttggtcctcttact

SEQ ID NO: 24205 - DNA, 21 bp, Artificial Sequence
  Description of Artificial Sequence: Synthetic oligonucleotide
tctgggggtgcgcttggttat

SEQ ID NO: 24206 - DNA, 21 bp, Artificial Sequence
  Description of Artificial Sequence: Synthetic oligonucleotide
tcggggggtgcttcgactact

SEQ ID NO: 24207 - DNA, 21 bp, Artificial Sequence
  Description of Artificial Sequence: Synthetic oligonucleotide
tctggtggggggacgtcgttg

SEQ ID NO: 24208 - DNA, 21 bp, Artificial Sequence
  Description of Artificial Sequence: Synthetic oligonucleotide
agtgggggtcatttgacgatt

SEQ ID NO: 24209 - DNA, 21 bp, Artificial Sequence
  Description of Artificial Sequence: Synthetic oligonucleotide
tcgggggggcttcgggcggcg

SEQ ID NO: 24210 - DNA, 21 bp, Artificial Sequence
  Description of Artificial Sequence: Synthetic oligonucleotide
tctggtgggcaggagtggact

SEQ ID NO: 24211 - DNA, 21 bp, Artificial Sequence
  Description of Artificial Sequence: Synthetic oligonucleotide
tctgggggttcgtttactact

SEQ ID NO: 24212 - DNA, 21 bp, Artificial Sequence
  Description of Artificial Sequence: Synthetic oligonucleotide
agtgggattgggtctcggcag

SEQ ID NO: 24213 - DNA, 21 bp, Artificial Sequence
  Description of Artificial Sequence: Synthetic oligonucleotide
tcggggattctgcagtcgagt

SEQ ID NO: 24214 - DNA, 21 bp, Artificial Sequence
  Description of Artificial Sequence: Synthetic oligonucleotide
tcggggattagtctgcggccg

SEQ ID NO: 24215 - DNA, 21 bp, Artificial Sequence
  Description of Artificial Sequence: Synthetic oligonucleotide
agtggtattagtcgtattgat

SEQ ID NO: 24216 - DNA, 21 bp, Artificial Sequence
  Description of Artificial Sequence: Synthetic oligonucleotide
tcgggtaaggcttctcctggg

SEQ ID NO: 24217 - DNA, 21 bp, Artificial Sequence
  Description of Artificial Sequence: Synthetic oligonucleotide
agtgggaagcatactatgaat

SEQ ID NO: 24218 - DNA, 21 bp, Artificial Sequence
  Description of Artificial Sequence: Synthetic oligonucleotide
tctggtaagttggttgtttct

SEQ ID NO: 24219 - DNA, 21 bp, Artificial Sequence
  Description of Artificial Sequence: Synthetic oligonucleotide
tctggtaagatgggtgtttat

SEQ ID NO: 24220 - DNA, 21 bp, Artificial Sequence
  Description of Artificial Sequence: Synthetic oligonucleotide
tcgggtaagaatccgggttat

SEQ ID NO: 24221 - DNA, 21 bp, Artificial Sequence
  Description of Artificial Sequence: Synthetic oligonucleotide
agtggtaagccgatggggacg

SEQ ID NO: 24222 - DNA, 21 bp, Artificial Sequence
  Description of Artificial Sequence: Synthetic oligonucleotide
tctgggaagtcgggttttgag

SEQ ID NO: 24223 - DNA, 21 bp, Artificial Sequence
  Description of Artificial Sequence: Synthetic oligonucleotide
agtgggttggctgttcatcct

SEQ ID NO: 24224 - DNA, 21 bp, Artificial Sequence
  Description of Artificial Sequence: Synthetic oligonucleotide
tcggggctggaggatgttgtt

SEQ ID NO: 24225 - DNA, 21 bp, Artificial Sequence
  Description of Artificial Sequence: Synthetic oligonucleotide
tctggtttggggatttcgact

SEQ ID NO: 24226 - DNA, 21 bp, Artificial Sequence
  Description of Artificial Sequence: Synthetic oligonucleotide
agtgggctgcatgctctgact

SEQ ID NO: 24227 - DNA, 21 bp, Artificial Sequence
  Description of Artificial Sequence: Synthetic oligonucleotide
agtggtctgattgctacgggg

SEQ ID NO: 24228 - DNA, 21 bp, Artificial Sequence
  Description of Artificial Sequence: Synthetic oligonucleotide
tcggggcttaatccgaagtct

SEQ ID NO: 24229 - DNA, 21 bp, Artificial Sequence
  Description of Artificial Sequence: Synthetic oligonucleotide
agtggtctgaatcggactgtt

SEQ ID NO: 24230 - DNA, 21 bp, Artificial Sequence
  Description of Artificial Sequence: Synthetic oligonucleotide
agtggtctgtctgcttatttg

SEQ ID NO: 24231 - DNA, 21 bp, Artificial Sequence
  Description of Artificial Sequence: Synthetic oligonucleotide
tcggggatgggtcatgtggct

SEQ ID NO: 24232 - DNA, 21 bp, Artificial Sequence
  Description of Artificial Sequence: Synthetic oligonucleotide
tcgggtatgctgatgcggggg

SEQ ID NO: 24233 - DNA, 21 bp, Artificial Sequence
  Description of Artificial Sequence: Synthetic oligonucleotide
tcgggtatgactgattcgccg

SEQ ID NO: 24234 - DNA, 21 bp, Artificial Sequence
  Description of Artificial Sequence: Synthetic oligonucleotide
agtggtaatggggttctgttg

SEQ ID NO: 24235 - DNA, 21 bp, Artificial Sequence
  Description of Artificial Sequence: Synthetic oligonucleotide
agtggtaatctgggttatgct

SEQ ID NO: 24236 - DNA, 21 bp, Artificial Sequence
  Description of Artificial Sequence: Synthetic oligonucleotide
agtgggaatatgagtgctggg

SEQ ID NO: 24237 - DNA, 21 bp, Artificial Sequence
  Description of Artificial Sequence: Synthetic oligonucleotide
tcgggtaatccgtctcaggct

SEQ ID NO: 24238 - DNA, 21 bp, Artificial Sequence
  Description of Artificial Sequence: Synthetic oligonucleotide
agtgggaatacttattctagg

SEQ ID NO: 24239 - DNA, 21 bp, Artificial Sequence
  Description of Artificial Sequence: Synthetic oligonucleotide
tctggtcctgatatttttctt

SEQ ID NO: 24240 - DNA, 21 bp, Artificial Sequence
  Description of Artificial Sequence: Synthetic oligonucleotide
agtgggccgcatggggggcag

SEQ ID NO: 24241 - DNA, 21 bp, Artificial Sequence
  Description of Artificial Sequence: Synthetic oligonucleotide
tcgggtcctcttaattctcct

SEQ ID NO: 24242 - DNA, 21 bp, Artificial Sequence
  Description of Artificial Sequence: Synthetic oligonucleotide
agtggtcctaggcttggtccg

SEQ ID NO: 24243 - DNA, 21 bp, Artificial Sequence
  Description of Artificial Sequence: Synthetic oligonucleotide
agtgggccgagtgtgctgcgg

SEQ ID NO: 24244 - DNA, 21 bp, Artificial Sequence
  Description of Artificial Sequence: Synthetic oligonucleotide
tctgggccgacgcatgcgatg

SEQ ID NO: 24245 - DNA, 21 bp, Artificial Sequence
  Description of Artificial Sequence: Synthetic oligonucleotide
tcgggtcctgtgggtcggact

SEQ ID NO: 24246 - DNA, 21 bp, Artificial Sequence
  Description of Artificial Sequence: Synthetic oligonucleotide
tctggtccgtataagctggag

SEQ ID NO: 24247 - DNA, 21 bp, Artificial Sequence
  Description of Artificial Sequence: Synthetic oligonucleotide
agtggtccgtatcctattaag

SEQ ID NO: 24248 - DNA, 21 bp, Artificial Sequence
  Description of Artificial Sequence: Synthetic oligonucleotide
tcggggcaggctagtttgact

SEQ ID NO: 24249 - DNA, 21 bp, Artificial Sequence
  Description of Artificial Sequence: Synthetic oligonucleotide
agtggtcagtctatttcgcct

SEQ ID NO: 24250 - DNA, 21 bp, Artificial Sequence
  Description of Artificial Sequence: Synthetic oligonucleotide
tcggggcaggtgccgtcggcg

SEQ ID NO: 24251 - DNA, 21 bp, Artificial Sequence
  Description of Artificial Sequence: Synthetic oligonucleotide
tctgggcagtatccttctatt

SEQ ID NO: 24252 - DNA, 21 bp, Artificial Sequence
  Description of Artificial Sequence: Synthetic oligonucleotide
tctggtcgtggtccgccgccg

SEQ ID NO: 24253 - DNA, 21 bp, Artificial Sequence
  Description of Artificial Sequence: Synthetic oligonucleotide
agtgggcgtcattctgatgat

SEQ ID NO: 24254 - DNA, 21 bp, Artificial Sequence
  Description of Artificial Sequence: Synthetic oligonucleotide
tcgggtcgtccttcgccggcg

SEQ ID NO: 24255 - DNA, 21 bp, Artificial Sequence
  Description of Artificial Sequence: Synthetic oligonucleotide
tcggggcggcagcctacggtt

SEQ ID NO: 24256 - DNA, 21 bp, Artificial Sequence
  Description of Artificial Sequence: Synthetic oligonucleotide
tcggggaggacgattattacg

SEQ ID NO: 24257 - DNA, 21 bp, Artificial Sequence
  Description of Artificial Sequence: Synthetic oligonucleotide
tctggtagggtgacgaatagt

SEQ ID NO: 24258 - DNA, 21 bp, Artificial Sequence
  Description of Artificial Sequence: Synthetic oligonucleotide
tctgggagtgatccgaggact

SEQ ID NO: 24259 - DNA, 21 bp, Artificial Sequence
  Description of Artificial Sequence: Synthetic oligonucleotide
tcgggtagtggtgtgccgcag

SEQ ID NO: 24260 - DNA, 21 bp, Artificial Sequence
  Description of Artificial Sequence: Synthetic oligonucleotide
tctggttctaaggattctcat

SEQ ID NO: 24261 - DNA, 21 bp, Artificial Sequence
  Description of Artificial Sequence: Synthetic oligonucleotide
agtgggtcgaagggggcgttt

SEQ ID NO: 24262 - DNA, 21 bp, Artificial Sequence
  Description of Artificial Sequence: Synthetic oligonucleotide
tctggttcgatgtctcaggtg

SEQ ID NO: 24263 - DNA, 21 bp, Artificial Sequence
  Description of Artificial Sequence: Synthetic oligonucleotide
tctgggtcgaatatgcttaag

SEQ ID NO: 24264 - DNA, 21 bp, Artificial Sequence
  Description of Artificial Sequence: Synthetic oligonucleotide
agtgggtctcctcgtatttcg

SEQ ID NO: 24265 - DNA, 21 bp, Artificial Sequence
  Description of Artificial Sequence: Synthetic oligonucleotide
agtggtagtcagggtacgagg

SEQ ID NO: 24266 - DNA, 21 bp, Artificial Sequence
  Description of Artificial Sequence: Synthetic oligonucleotide
tctgggtcgaggattatggag

SEQ ID NO: 24267 - DNA, 21 bp, Artificial Sequence
  Description of Artificial Sequence: Synthetic oligonucleotide
tcggggtctcggaatcttggg

SEQ ID NO: 24268 - DNA, 21 bp, Artificial Sequence
  Description of Artificial Sequence: Synthetic oligonucleotide
tcgggttcgcggaatatggtg

SEQ ID NO: 24269 - DNA, 21 bp, Artificial Sequence
  Description of Artificial Sequence: Synthetic oligonucleotide
tctgggtcgcggtcgatgctt

SEQ ID NO: 24270 - DNA, 21 bp, Artificial Sequence
  Description of Artificial Sequence: Synthetic oligonucleotide
tctggtagtcgtgttgctcct

SEQ ID NO: 24271 - DNA, 21 bp, Artificial Sequence
  Description of Artificial Sequence: Synthetic oligonucleotide
agtggttcgtctgcgtctcgg

SEQ ID NO: 24272 - DNA, 21 bp, Artificial Sequence
  Description of Artificial Sequence: Synthetic oligonucleotide
tcgggtagttctggtagtgct

SEQ ID NO: 24273 - DNA, 21 bp, Artificial Sequence
  Description of Artificial Sequence: Synthetic oligonucleotide
tctgggagtagtaagtcgatg

SEQ ID NO: 24274 - DNA, 21 bp, Artificial Sequence
  Description of Artificial Sequence: Synthetic oligonucleotide
agtgggagttctacgtgtatt

SEQ ID NO: 24275 - DNA, 21 bp, Artificial Sequence
  Description of Artificial Sequence: Synthetic oligonucleotide
tcggggtctagtacgattaat

SEQ ID NO: 24276 - DNA, 21 bp, Artificial Sequence
  Description of Artificial Sequence: Synthetic oligonucleotide
tcgggtagttctacgccgcag

SEQ ID NO: 24277 - DNA, 21 bp, Artificial Sequence
  Description of Artificial Sequence: Synthetic oligonucleotide
tctggtagtgtgtggccggat

SEQ ID NO: 24278 - DNA, 21 bp, Artificial Sequence
  Description of Artificial Sequence: Synthetic oligonucleotide
tcgggttcgtatcctcgggat

SEQ ID NO: 24279 - DNA, 21 bp, Artificial Sequence
  Description of Artificial Sequence: Synthetic oligonucleotide
tctgggacggctcttactttg

SEQ ID NO: 24280 - DNA, 21 bp, Artificial Sequence
  Description of Artificial Sequence: Synthetic oligonucleotide
tcgggtactgatcatctgctt

SEQ ID NO: 24281 - DNA, 21 bp, Artificial Sequence
  Description of Artificial Sequence: Synthetic oligonucleotide
tcggggacgggtcaggatggt

SEQ ID NO: 24282 - DNA, 21 bp, Artificial Sequence
  Description of Artificial Sequence: Synthetic oligonucleotide
agtgggactggtagggggact

SEQ ID NO: 24283 - DNA, 21 bp, Artificial Sequence
  Description of Artificial Sequence: Synthetic oligonucleotide
agtggtacgctgacgcagaag

SEQ ID NO: 24284 - DNA, 21 bp, Artificial Sequence
  Description of Artificial Sequence: Synthetic oligonucleotide
tcggggacgccgatgtctcgt

SEQ ID NO: 24285 - DNA, 21 bp, Artificial Sequence
  Description of Artificial Sequence: Synthetic oligonucleotide
agtgggactagtgtgtttgct

SEQ ID NO: 24286 - DNA, 21 bp, Artificial Sequence
  Description of Artificial Sequence: Synthetic oligonucleotide
tcggggactactgcgtgggcg

SEQ ID NO: 24287 - DNA, 21 bp, Artificial Sequence
  Description of Artificial Sequence: Synthetic oligonucleotide
tcggggactactggttatagg

SEQ ID NO: 24288 - DNA, 21 bp, Artificial Sequence
  Description of Artificial Sequence: Synthetic oligonucleotide
tcgggtacggtgtatcgggtt

SEQ ID NO: 24289 - DNA, 21 bp, Artificial Sequence
  Description of Artificial Sequence: Synthetic oligonucleotide
tctggggtggggatgatttct

SEQ ID NO: 24290 - DNA, 21 bp, Artificial Sequence
  Description of Artificial Sequence: Synthetic oligonucleotide
agtggggttcatccttttccg

SEQ ID NO: 24291 - DNA, 21 bp, Artificial Sequence
  Description of Artificial Sequence: Synthetic oligonucleotide
agtggggtgattaagacgtct

SEQ ID NO: 24292 - DNA, 21 bp, Artificial Sequence
  Description of Artificial Sequence: Synthetic oligonucleotide
tctggtgtgaatctttctagt

SEQ ID NO: 24293 - DNA, 21 bp, Artificial Sequence
  Description of Artificial Sequence: Synthetic oligonucleotide
agtggggtgcagtctggtccg

SEQ ID NO: 24294 - DNA, 21 bp, Artificial Sequence
  Description of Artificial Sequence: Synthetic oligonucleotide
tcgggtgtgcggcaggtggct

SEQ ID NO: 24295 - DNA, 21 bp, Artificial Sequence
  Description of Artificial Sequence: Synthetic oligonucleotide
tcgggtgtgtcgatgctgcct

SEQ ID NO: 24296 - DNA, 21 bp, Artificial Sequence
  Description of Artificial Sequence: Synthetic oligonucleotide
tctggggtttcgaggtatgct

SEQ ID NO: 24297 - DNA, 21 bp, Artificial Sequence
  Description of Artificial Sequence: Synthetic oligonucleotide
agtggtgtgagttatgttgag

SEQ ID NO: 24298 - DNA, 21 bp, Artificial Sequence
  Description of Artificial Sequence: Synthetic oligonucleotide
agtggttatccgaatttggat

SEQ ID NO: 24299 - DNA, 21 bp, Artificial Sequence
  Description of Artificial Sequence: Synthetic oligonucleotide
agtcatgctgcgcagttgcct

SEQ ID NO: 24300 - DNA, 21 bp, Artificial Sequence
  Description of Artificial Sequence: Synthetic oligonucleotide
agtcatgcgaatcttcatgcg

SEQ ID NO: 24301 - DNA, 21 bp, Artificial Sequence
  Description of Artificial Sequence: Synthetic oligonucleotide
tcgcatgcgaatacgtctagt

SEQ ID NO: 24302 - DNA, 21 bp, Artificial Sequence
  Description of Artificial Sequence: Synthetic oligonucleotide
tctcatgcgtctaattatccg

SEQ ID NO: 24303 - DNA, 21 bp, Artificial Sequence
  Description of Artificial Sequence: Synthetic oligonucleotide
agtcatgcgagtgtgcgttcg

SEQ ID NO: 24304 - DNA, 21 bp, Artificial Sequence
  Description of Artificial Sequence: Synthetic oligonucleotide
agtcatgctacgacgccgtct

SEQ ID NO: 24305 - DNA, 21 bp, Artificial Sequence
  Description of Artificial Sequence: Synthetic oligonucleotide
tcgcatgcggttcggatgggg

SEQ ID NO: 24306 - DNA, 21 bp, Artificial Sequence
  Description of Artificial Sequence: Synthetic oligonucleotide
tcgcatgataatcgtggggtg

SEQ ID NO: 24307 - DNA, 21 bp, Artificial Sequence
  Description of Artificial Sequence: Synthetic oligonucleotide
tctcatgagaatggttctact

SEQ ID NO: 24308 - DNA, 21 bp, Artificial Sequence
  Description of Artificial Sequence: Synthetic oligonucleotide
tctcatgagccgcatactcgt

SEQ ID NO: 24309 - DNA, 21 bp, Artificial Sequence
  Description of Artificial Sequence: Synthetic oligonucleotide
tcgcatgagtctttggggatg

SEQ ID NO: 24310 - DNA, 21 bp, Artificial Sequence
  Description of Artificial Sequence: Synthetic oligonucleotide
tctcattttcctatggcgcct

SEQ ID NO: 24311 - DNA, 21 bp, Artificial Sequence
  Description of Artificial Sequence: Synthetic oligonucleotide
tctcattttagtgcggcggag

SEQ ID NO: 24312 - DNA, 21 bp, Artificial Sequence
  Description of Artificial Sequence: Synthetic oligonucleotide
agtcatggtccgcctcgttct

SEQ ID NO: 24313 - DNA, 21 bp, Artificial Sequence
  Description of Artificial Sequence: Synthetic oligonucleotide
tcgcatggtccgtatccgtat

SEQ ID NO: 24314 - DNA, 21 bp, Artificial Sequence
  Description of Artificial Sequence: Synthetic oligonucleotide
tcgcatgggtcggcggtgaat

SEQ ID NO: 24315 - DNA, 21 bp, Artificial Sequence
  Description of Artificial Sequence: Synthetic oligonucleotide
tctcatggttcgtttccgtct

SEQ ID NO: 24316 - DNA, 21 bp, Artificial Sequence
  Description of Artificial Sequence: Synthetic oligonucleotide
tctcatgggacgaagtcgacg

SEQ ID NO: 24317 - DNA, 21 bp, Artificial Sequence
  Description of Artificial Sequence: Synthetic oligonucleotide
tcgcatcatgggtctattatt

SEQ ID NO: 24318 - DNA, 21 bp, Artificial Sequence
  Description of Artificial Sequence: Synthetic oligonucleotide
tctcatattcagcttgctccg

SEQ ID NO: 24319 - DNA, 21 bp, Artificial Sequence
  Description of Artificial Sequence: Synthetic oligonucleotide
agtcataagcgtatggtggat

SEQ ID NO: 24320 - DNA, 21 bp, Artificial Sequence
  Description of Artificial Sequence: Synthetic oligonucleotide
tctcataagtcgcctactcct

SEQ ID NO: 24321 - DNA, 21 bp, Artificial Sequence
  Description of Artificial Sequence: Synthetic oligonucleotide
tctcatcttgagattgatatg

SEQ ID NO: 24322 - DNA, 21 bp, Artificial Sequence
  Description of Artificial Sequence: Synthetic oligonucleotide
tcgcatttgaatcttcgtcct

SEQ ID NO: 24323 - DNA, 21 bp, Artificial Sequence
  Description of Artificial Sequence: Synthetic oligonucleotide
agtcatctgccggtgtcgatg

SEQ ID NO: 24324 - DNA, 21 bp, Artificial Sequence
  Description of Artificial Sequence: Synthetic oligonucleotide
agtcatttgcagaatcggatt

SEQ ID NO: 24325 - DNA, 21 bp, Artificial Sequence
  Description of Artificial Sequence: Synthetic oligonucleotide
tctcatatgacgggttcgacg

SEQ ID NO: 24326 - DNA, 21 bp, Artificial Sequence
  Description of Artificial Sequence: Synthetic oligonucleotide
agtcataatgcgtttccgact

SEQ ID NO: 24327 - DNA, 21 bp, Artificial Sequence
  Description of Artificial Sequence: Synthetic oligonucleotide
tctcataatgcgcttatggat

SEQ ID NO: 24328 - DNA, 21 bp, Artificial Sequence
  Description of Artificial Sequence: Synthetic oligonucleotide
agtcataatattcctgctggt

SEQ ID NO: 24329 - DNA, 21 bp, Artificial Sequence
  Description of Artificial Sequence: Synthetic oligonucleotide
tcgcataataagctgtcgagt

SEQ ID NO: 24330 - DNA, 21 bp, Artificial Sequence
  Description of Artificial Sequence: Synthetic oligonucleotide
tctcatcctgcgatttctgct

SEQ ID NO: 24331 - DNA, 21 bp, Artificial Sequence
  Description of Artificial Sequence: Synthetic oligonucleotide
tcgcatcctgcgctgcctccg

SEQ ID NO: 24332 - DNA, 21 bp, Artificial Sequence
  Description of Artificial Sequence: Synthetic oligonucleotide
tctcatccggatcttagtcct

SEQ ID NO: 24333 - DNA, 21 bp, Artificial Sequence
  Description of Artificial Sequence: Synthetic oligonucleotide
tctcatcctatgctgcctact

SEQ ID NO: 24334 - DNA, 21 bp, Artificial Sequence
  Description of Artificial Sequence: Synthetic oligonucleotide
tcgcatccgatgatgcctgcg

SEQ ID NO: 24335 - DNA, 21 bp, Artificial Sequence
  Description of Artificial Sequence: Synthetic oligonucleotide
agtcatcctccgcttcgtctg

SEQ ID NO: 24336 - DNA, 21 bp, Artificial Sequence
  Description of Artificial Sequence: Synthetic oligonucleotide
agtcatccttcgagtgagcct

SEQ ID NO: 24337 - DNA, 21 bp, Artificial Sequence
  Description of Artificial Sequence: Synthetic oligonucleotide
agtcatcaggcgcgtgctcct

SEQ ID NO: 24338 - DNA, 21 bp, Artificial Sequence
  Description of Artificial Sequence: Synthetic oligonucleotide
tctcataggggggatgagcat

SEQ ID NO: 24339 - DNA, 21 bp, Artificial Sequence
  Description of Artificial Sequence: Synthetic oligonucleotide
tctcatcggcctagtacgctg

SEQ ID NO: 24340 - DNA, 21 bp, Artificial Sequence
  Description of Artificial Sequence: Synthetic oligonucleotide
agtcataggcctacttcttct

SEQ ID NO: 24341 - DNA, 21 bp, Artificial Sequence
  Description of Artificial Sequence: Synthetic oligonucleotide
tctcatagtgcgctgatgggg

SEQ ID NO: 24342 - DNA, 21 bp, Artificial Sequence
  Description of Artificial Sequence: Synthetic oligonucleotide
tctcatagtgcgatgcagcat

SEQ ID NO: 24343 - DNA, 21 bp, Artificial Sequence
  Description of Artificial Sequence: Synthetic oligonucleotide
tctcattctcattctgatgct

SEQ ID NO: 24344 - DNA, 21 bp, Artificial Sequence
  Description of Artificial Sequence: Synthetic oligonucleotide
agtcattcgttgggtggtaat

SEQ ID NO: 24345 - DNA, 21 bp, Artificial Sequence
  Description of Artificial Sequence: Synthetic oligonucleotide
agtcattcgcctgatattaag

SEQ ID NO: 24346 - DNA, 21 bp, Artificial Sequence
  Description of Artificial Sequence: Synthetic oligonucleotide
tctcattcgcctttgttgccg

SEQ ID NO: 24347 - DNA, 21 bp, Artificial Sequence
  Description of Artificial Sequence: Synthetic oligonucleotide
tcgcatagttcgattatggtg

SEQ ID NO: 24348 - DNA, 21 bp, Artificial Sequence
  Description of Artificial Sequence: Synthetic oligonucleotide
agtcattcgtctcggctgatg

SEQ ID NO: 24349 - DNA, 21 bp, Artificial Sequence
  Description of Artificial Sequence: Synthetic oligonucleotide
agtcatactcatggtaatccg

SEQ ID NO: 24350 - DNA, 21 bp, Artificial Sequence
  Description of Artificial Sequence: Synthetic oligonucleotide
tctcatactaaggtgtcgcat

SEQ ID NO: 24351 - DNA, 21 bp, Artificial Sequence
  Description of Artificial Sequence: Synthetic oligonucleotide
tcgcatacgccgcgggcttcg

SEQ ID NO: 24352 - DNA, 21 bp, Artificial Sequence
  Description of Artificial Sequence: Synthetic oligonucleotide
agtcatacgcgtcctgatgct

SEQ ID NO: 24353 - DNA, 21 bp, Artificial Sequence
  Description of Artificial Sequence: Synthetic oligonucleotide
agtcatactagtctgccgcgg

SEQ ID NO: 24354 - DNA, 21 bp, Artificial Sequence
  Description of Artificial Sequence: Synthetic oligonucleotide
agtcatacttctcttgttatt

SEQ ID NO: 24355 - DNA, 21 bp, Artificial Sequence
  Description of Artificial Sequence: Synthetic oligonucleotide
tctcatgtggcgggtcatgct

SEQ ID NO: 24356 - DNA, 21 bp, Artificial Sequence
  Description of Artificial Sequence: Synthetic oligonucleotide
tctcatgttgcttcgaagggg

SEQ ID NO: 24357 - DNA, 21 bp, Artificial Sequence
  Description of Artificial Sequence: Synthetic oligonucleotide
agtcatgttgtgaatagtctg

SEQ ID NO: 24358 - DNA, 21 bp, Artificial Sequence
  Description of Artificial Sequence: Synthetic oligonucleotide
tctcatgtttatccgggtccg

SEQ ID NO: 24359 - DNA, 21 bp, Artificial Sequence
  Description of Artificial Sequence: Synthetic oligonucleotide
agtattgctgcgcatcagggg

SEQ ID NO: 24360 - DNA, 21 bp, Artificial Sequence
  Description of Artificial Sequence: Synthetic oligonucleotide
agtattgctcaggttggtgct

SEQ ID NO: 24361 - DNA, 21 bp, Artificial Sequence
  Description of Artificial Sequence: Synthetic oligonucleotide
agtattgctcgtgctgtgacg

SEQ ID NO: 24362 - DNA, 21 bp, Artificial Sequence
  Description of Artificial Sequence: Synthetic oligonucleotide
tctattgattcgattgcggtg

SEQ ID NO: 24363 - DNA, 21 bp, Artificial Sequence
  Description of Artificial Sequence: Synthetic oligonucleotide
tctattgattcgtcgtctctg

SEQ ID NO: 24364 - DNA, 21 bp, Artificial Sequence
  Description of Artificial Sequence: Synthetic oligonucleotide
tctattgattctacttatatg

SEQ ID NO: 24365 - DNA, 21 bp, Artificial Sequence
  Description of Artificial Sequence: Synthetic oligonucleotide
tcgattgagcgtgagcttcgt

SEQ ID NO: 24366 - DNA, 21 bp, Artificial Sequence
  Description of Artificial Sequence: Synthetic oligonucleotide
agtattgggggtgttctttat

SEQ ID NO: 24367 - DNA, 21 bp, Artificial Sequence
  Description of Artificial Sequence: Synthetic oligonucleotide
tcgattgggaattttccggat

SEQ ID NO: 24368 - DNA, 21 bp, Artificial Sequence
  Description of Artificial Sequence: Synthetic oligonucleotide
tctattgggtctgcgccggct

SEQ ID NO: 24369 - DNA, 21 bp, Artificial Sequence
  Description of Artificial Sequence: Synthetic oligonucleotide
agtattgggactgttgtgggg

SEQ ID NO: 24370 - DNA, 21 bp, Artificial Sequence
  Description of Artificial Sequence: Synthetic oligonucleotide
tctattggggtgcatccgggt

SEQ ID NO: 24371 - DNA, 21 bp, Artificial Sequence
  Description of Artificial Sequence: Synthetic oligonucleotide
agtattcatttggttacttct

SEQ ID NO: 24372 - DNA, 21 bp, Artificial Sequence
  Description of Artificial Sequence: Synthetic oligonucleotide
tctattcataatggtccgcag

SEQ ID NO: 24373 - DNA, 21 bp, Artificial Sequence
  Description of Artificial Sequence: Synthetic oligonucleotide
tctattattgagtcggttgcg

SEQ ID NO: 24374 - DNA, 21 bp, Artificial Sequence
  Description of Artificial Sequence: Synthetic oligonucleotide
tctattattcaggctaagcct

SEQ ID NO: 24375 - DNA, 21 bp, Artificial Sequence
  Description of Artificial Sequence: Synthetic oligonucleotide
tcgattattagtgagaggagg

SEQ ID NO: 24376 - DNA, 21 bp, Artificial Sequence
  Description of Artificial Sequence: Synthetic oligonucleotide
agtattaaggttaatccgcct

SEQ ID NO: 24377 - DNA, 21 bp, Artificial Sequence
  Description of Artificial Sequence: Synthetic oligonucleotide
tctattcttggggcgattcct

SEQ ID NO: 24378 - DNA, 21 bp, Artificial Sequence
  Description of Artificial Sequence: Synthetic oligonucleotide
tcgattctttatggtatgccg

SEQ ID NO: 24379 - DNA, 21 bp, Artificial Sequence
  Description of Artificial Sequence: Synthetic oligonucleotide
tctattatgaatacggggcct

SEQ ID NO: 24380 - DNA, 21 bp, Artificial Sequence
  Description of Artificial Sequence: Synthetic oligonucleotide
tctattatgcgtacggattgt

SEQ ID NO: 24381 - DNA, 21 bp, Artificial Sequence
  Description of Artificial Sequence: Synthetic oligonucleotide
tctattaatgaggagcctcct

SEQ ID NO: 24382 - DNA, 21 bp, Artificial Sequence
  Description of Artificial Sequence: Synthetic oligonucleotide
tcgattaatgtgacgcatggt

SEQ ID NO: 24383 - DNA, 21 bp, Artificial Sequence
  Description of Artificial Sequence: Synthetic oligonucleotide
agtattcctatgtctgggcgt

SEQ ID NO: 24384 - DNA, 21 bp, Artificial Sequence
  Description of Artificial Sequence: Synthetic oligonucleotide
agtattccgaatttgcaggcg

SEQ ID NO: 24385 - DNA, 21 bp, Artificial Sequence
  Description of Artificial Sequence: Synthetic oligonucleotide
tctattcctaatttgtatgat

SEQ ID NO: 24386 - DNA, 21 bp, Artificial Sequence
  Description of Artificial Sequence: Synthetic oligonucleotide
agtattccgaattcgcgtcag

SEQ ID NO: 24387 - DNA, 21 bp, Artificial Sequence
  Description of Artificial Sequence: Synthetic oligonucleotide
tcgattcagaagcatttgcct

SEQ ID NO: 24388 - DNA, 21 bp, Artificial Sequence
  Description of Artificial Sequence: Synthetic oligonucleotide
tctattcagtggaaggatagt

SEQ ID NO: 24389 - DNA, 21 bp, Artificial Sequence
  Description of Artificial Sequence: Synthetic oligonucleotide
tcgattagtttgccttatcct

SEQ ID NO: 24390 - DNA, 21 bp, Artificial Sequence
  Description of Artificial Sequence: Synthetic oligonucleotide
tctatttctccttcgccgggt

SEQ ID NO: 24391 - DNA, 21 bp, Artificial Sequence
  Description of Artificial Sequence: Synthetic oligonucleotide
tctatttctagtcaggatctt

SEQ ID NO: 24392 - DNA, 21 bp, Artificial Sequence
  Description of Artificial Sequence: Synthetic oligonucleotide
tcgattagttcgagttctggt

SEQ ID NO: 24393 - DNA, 21 bp, Artificial Sequence
  Description of Artificial Sequence: Synthetic oligonucleotide
tcgatttctgttatgaagcag

SEQ ID NO: 24394 - DNA, 21 bp, Artificial Sequence
  Description of Artificial Sequence: Synthetic oligonucleotide
tctattactccgtttaatgag

SEQ ID NO: 24395 - DNA, 21 bp, Artificial Sequence
  Description of Artificial Sequence: Synthetic oligonucleotide
agtattacgagtgagaagatt

SEQ ID NO: 24396 - DNA, 21 bp, Artificial Sequence
  Description of Artificial Sequence: Synthetic oligonucleotide
tcgattacgacgggtcggggg

SEQ ID NO: 24397 - DNA, 21 bp, Artificial Sequence
  Description of Artificial Sequence: Synthetic oligonucleotide
tctattacgactcgtactgat

SEQ ID NO: 24398 - DNA, 21 bp, Artificial Sequence
  Description of Artificial Sequence: Synthetic oligonucleotide
tcgattgttcatccggattct

SEQ ID NO: 24399 - DNA, 21 bp, Artificial Sequence
  Description of Artificial Sequence: Synthetic oligonucleotide
tcgattgttctgaaggggtct

SEQ ID NO: 24400 - DNA, 21 bp, Artificial Sequence
  Description of Artificial Sequence: Synthetic oligonucleotide
tcgattgtttctcgggtggag

SEQ ID NO: 24401 - DNA, 21 bp, Artificial Sequence
  Description of Artificial Sequence: Synthetic oligonucleotide
tcgattgttactgttagtggt

SEQ ID NO: 24402 - DNA, 21 bp, Artificial Sequence
  Description of Artificial Sequence: Synthetic oligonucleotide
tcgaaggctcatgagaatcct

SEQ ID NO: 24403 - DNA, 21 bp, Artificial Sequence
  Description of Artificial Sequence: Synthetic oligonucleotide
tctaaggcgccgtattctgcg

SEQ ID NO: 24404 - DNA, 21 bp, Artificial Sequence
  Description of Artificial Sequence: Synthetic oligonucleotide
tcgaaggcgtctttgaatcct

SEQ ID NO: 24405 - DNA, 21 bp, Artificial Sequence
  Description of Artificial Sequence: Synthetic oligonucleotide
agtaaggcttatactccgttg

SEQ ID NO: 24406 - DNA, 21 bp, Artificial Sequence
  Description of Artificial Sequence: Synthetic oligonucleotide
agtaaggatggttcgcttaat

SEQ ID NO: 24407 - DNA, 21 bp, Artificial Sequence
  Description of Artificial Sequence: Synthetic oligonucleotide
tctaaggatcattttccggct

SEQ ID NO: 24408 - DNA, 21 bp, Artificial Sequence
  Description of Artificial Sequence: Synthetic oligonucleotide
agtaaggatattctgcggtct

SEQ ID NO: 24409 - DNA, 21 bp, Artificial Sequence
  Description of Artificial Sequence: Synthetic oligonucleotide
tcgaaggatatgttggagact

SEQ ID NO: 24410 - DNA, 21 bp, Artificial Sequence
  Description of Artificial Sequence: Synthetic oligonucleotide
tctaaggatacgttgcgtaat

SEQ ID NO: 24411 - DNA, 21 bp, Artificial Sequence
  Description of Artificial Sequence: Synthetic oligonucleotide
tctaaggatactccgctggct

SEQ ID NO: 24412 - DNA, 21 bp, Artificial Sequence
  Description of Artificial Sequence: Synthetic oligonucleotide
tcgaaggagatttatacgcag

SEQ ID NO: 24413 - DNA, 21 bp, Artificial Sequence
  Description of Artificial Sequence: Synthetic oligonucleotide
agtaaggagaattatcctcat

SEQ ID NO: 24414 - DNA, 21 bp, Artificial Sequence
  Description of Artificial Sequence: Synthetic oligonucleotide
tcgaaggagaggtttccgtat

SEQ ID NO: 24415 - DNA, 21 bp, Artificial Sequence
  Description of Artificial Sequence: Synthetic oligonucleotide
tcgaaggagtatcctgagtat

SEQ ID NO: 24416 - DNA, 21 bp, Artificial Sequence
  Description of Artificial Sequence: Synthetic oligonucleotide
tcgaagtttaatgggcatctt

SEQ ID NO: 24417 - DNA, 21 bp, Artificial Sequence
  Description of Artificial Sequence: Synthetic oligonucleotide
tcgaagcatgaggtgtatctt

SEQ ID NO: 24418 - DNA, 21 bp, Artificial Sequence
  Description of Artificial Sequence: Synthetic oligonucleotide
tctaagcatacggcgtttgtt

SEQ ID NO: 24419 - DNA, 21 bp, Artificial Sequence
  Description of Artificial Sequence: Synthetic oligonucleotide
tctaagattgatctttatacg

SEQ ID NO: 24420 - DNA, 21 bp, Artificial Sequence
  Description of Artificial Sequence: Synthetic oligonucleotide
agtaagattgatcgggatgat

SEQ ID NO: 24421 - DNA, 21 bp, Artificial Sequence
  Description of Artificial Sequence: Synthetic oligonucleotide
agtaagattcctcatgaggtg

SEQ ID NO: 24422 - DNA, 21 bp, Artificial Sequence
  Description of Artificial Sequence: Synthetic oligonucleotide
tcgaagctggatgatgggcgg

SEQ ID NO: 24423 - DNA, 21 bp, Artificial Sequence
  Description of Artificial Sequence: Synthetic oligonucleotide
agtaagttgggttcgcatctg

SEQ ID NO: 24424 - DNA, 21 bp, Artificial Sequence
  Description of Artificial Sequence: Synthetic oligonucleotide
agtaagcttcctccgcttcat

SEQ ID NO: 24425 - DNA, 21 bp, Artificial Sequence
  Description of Artificial Sequence: Synthetic oligonucleotide
tctaagttgccggttgcgctt

SEQ ID NO: 24426 - DNA, 21 bp, Artificial Sequence
  Description of Artificial Sequence: Synthetic oligonucleotide
tctaagcttactactgagcct

SEQ ID NO: 24427 - DNA, 21 bp, Artificial Sequence
  Description of Artificial Sequence: Synthetic oligonucleotide
tcgaagatgctggagtttgtg

SEQ ID NO: 24428 - DNA, 21 bp, Artificial Sequence
  Description of Artificial Sequence: Synthetic oligonucleotide
tcgaagatgagtaggcttgag

SEQ ID NO: 24429 - DNA, 21 bp, Artificial Sequence
  Description of Artificial Sequence: Synthetic oligonucleotide
tcgaagaataatcctagtttg

SEQ ID NO: 24430 - DNA, 21 bp, Artificial Sequence
  Description of Artificial Sequence: Synthetic oligonucleotide
tcgaagaattctcaggattat

SEQ ID NO: 24431 - DNA, 21 bp, Artificial Sequence
  Description of Artificial Sequence: Synthetic oligonucleotide
agtaagaattctgtgcttaat

SEQ ID NO: 24432 - DNA, 21 bp, Artificial Sequence
  Description of Artificial Sequence: Synthetic oligonucleotide
tcgaagaatgtttgtgagcct

SEQ ID NO: 24433 - DNA, 21 bp, Artificial Sequence
  Description of Artificial Sequence: Synthetic oligonucleotide
tctaagccgcatcgggaggtt

SEQ ID NO: 24434 - DNA, 21 bp, Artificial Sequence
  Description of Artificial Sequence: Synthetic oligonucleotide
agtaagcctctttctggtttt

SEQ ID NO: 24435 - DNA, 21 bp, Artificial Sequence
  Description of Artificial Sequence: Synthetic oligonucleotide
tcgaagccttcgggtccttct

SEQ ID NO: 24436 - DNA, 21 bp, Artificial Sequence
  Description of Artificial Sequence: Synthetic oligonucleotide
agtaagcctacgcctactcat

SEQ ID NO: 24437 - DNA, 21 bp, Artificial Sequence
  Description of Artificial Sequence: Synthetic oligonucleotide
tctaagcaggctgcgtctgtg

SEQ ID NO: 24438 - DNA, 21 bp, Artificial Sequence
  Description of Artificial Sequence: Synthetic oligonucleotide
agtaagcagatgccgatgcat

SEQ ID NO: 24439 - DNA, 21 bp, Artificial Sequence
  Description of Artificial Sequence: Synthetic oligonucleotide
tcgaagcggacgacttgggat

SEQ ID NO: 24440 - DNA, 21 bp, Artificial Sequence
  Description of Artificial Sequence: Synthetic oligonucleotide
tctaagtcgggtacttcggag

SEQ ID NO: 24441 - DNA, 21 bp, Artificial Sequence
  Description of Artificial Sequence: Synthetic oligonucleotide
tctaagtctcttaagctgtct

SEQ ID NO: 24442 - DNA, 21 bp, Artificial Sequence
  Description of Artificial Sequence: Synthetic oligonucleotide
tcgaagagtcctaatccgtat

SEQ ID NO: 24443 - DNA, 21 bp, Artificial Sequence
  Description of Artificial Sequence: Synthetic oligonucleotide
tcgaagtcgcagtttcttgct

SEQ ID NO: 24444 - DNA, 21 bp, Artificial Sequence
  Description of Artificial Sequence: Synthetic oligonucleotide
tctaagagttcgatgcttatt

SEQ ID NO: 24445 - DNA, 21 bp, Artificial Sequence
  Description of Artificial Sequence: Synthetic oligonucleotide
tctaagactgatcgtatgaat

SEQ ID NO: 24446 - DNA, 21 bp, Artificial Sequence
  Description of Artificial Sequence: Synthetic oligonucleotide
tcgaagactagtgataggacg

SEQ ID NO: 24447 - DNA, 21 bp, Artificial Sequence
  Description of Artificial Sequence: Synthetic oligonucleotide
tctaagacggtggagcagaat

SEQ ID NO: 24448 - DNA, 21 bp, Artificial Sequence
  Description of Artificial Sequence: Synthetic oligonucleotide
agtaaggtgcctagtcttgct

SEQ ID NO: 24449 - DNA, 21 bp, Artificial Sequence
  Description of Artificial Sequence: Synthetic oligonucleotide
tctaaggtgcgtgagcctatt

SEQ ID NO: 24450 - DNA, 21 bp, Artificial Sequence
  Description of Artificial Sequence: Synthetic oligonucleotide
tcgaagtatgcgactgttgtg

SEQ ID NO: 24451 - DNA, 21 bp, Artificial Sequence
  Description of Artificial Sequence: Synthetic oligonucleotide
tcgaagtatttgcgtatggat

SEQ ID NO: 24452 - DNA, 21 bp, Artificial Sequence
  Description of Artificial Sequence: Synthetic oligonucleotide
agtaagtatactctggcttat

SEQ ID NO: 24453 - DNA, 21 bp, Artificial Sequence
  Description of Artificial Sequence: Synthetic oligonucleotide
tctcttgctgatgctaatgct

SEQ ID NO: 24454 - DNA, 21 bp, Artificial Sequence
  Description of Artificial Sequence: Synthetic oligonucleotide
agtctggctggtaatagttct

SEQ ID NO: 24455 - DNA, 21 bp, Artificial Sequence
  Description of Artificial Sequence: Synthetic oligonucleotide
tctttggctaagatgccgggt

SEQ ID NO: 24456 - DNA, 21 bp, Artificial Sequence
  Description of Artificial Sequence: Synthetic oligonucleotide
agtttggctcttgttgggcgg

SEQ ID NO: 24457 - DNA, 21 bp, Artificial Sequence
  Description of Artificial Sequence: Synthetic oligonucleotide
tctttggcgccgactgttatg

SEQ ID NO: 24458 - DNA, 21 bp, Artificial Sequence
  Description of Artificial Sequence: Synthetic oligonucleotide
tctcttgctcagaagcagcct

SEQ ID NO: 24459 - DNA, 21 bp, Artificial Sequence
  Description of Artificial Sequence: Synthetic oligonucleotide
tcgctggcgcagcttcattct

SEQ ID NO: 24460 - DNA, 21 bp, Artificial Sequence
  Description of Artificial Sequence: Synthetic oligonucleotide
tctctggcttcttctgcgatg

SEQ ID NO: 24461 - DNA, 21 bp, Artificial Sequence
  Description of Artificial Sequence: Synthetic oligonucleotide
tcgttggcgtcgactgggttt

SEQ ID NO: 24462 - DNA, 21 bp, Artificial Sequence
  Description of Artificial Sequence: Synthetic oligonucleotide
agtcttgcgactcggatttct

SEQ ID NO: 24463 - DNA, 21 bp, Artificial Sequence
  Description of Artificial Sequence: Synthetic oligonucleotide
agtcttgctactagtccgtat

SEQ ID NO: 24464 - DNA, 21 bp, Artificial Sequence
  Description of Artificial Sequence: Synthetic oligonucleotide
agtttggatgcgacgaaggat

SEQ ID NO: 24465 - DNA, 21 bp, Artificial Sequence
  Description of Artificial Sequence: Synthetic oligonucleotide
tcgcttgattttccgcggcct

SEQ ID NO: 24466 - DNA, 21 bp, Artificial Sequence
  Description of Artificial Sequence: Synthetic oligonucleotide
tcgcttgatcatcataatcgt

SEQ ID NO: 24467 - DNA, 21 bp, Artificial Sequence
  Description of Artificial Sequence: Synthetic oligonucleotide
tcgcttgataaggcgctgcgt

SEQ ID NO: 24468 - DNA, 21 bp, Artificial Sequence
  Description of Artificial Sequence: Synthetic oligonucleotide
tctctggatatgcagaagcag

SEQ ID NO: 24469 - DNA, 21 bp, Artificial Sequence
  Description of Artificial Sequence: Synthetic oligonucleotide
tcgctggatcctaagaatagt

SEQ ID NO: 24470 - DNA, 21 bp, Artificial Sequence
  Description of Artificial Sequence: Synthetic oligonucleotide
tctttggagattccgaagatt

SEQ ID NO: 24471 - DNA, 21 bp, Artificial Sequence
  Description of Artificial Sequence: Synthetic oligonucleotide
agtctggagaagcgtggtgag

SEQ ID NO: 24472 - DNA, 21 bp, Artificial Sequence
  Description of Artificial Sequence: Synthetic oligonucleotide
tctttggagcgtcatgtttat

SEQ ID NO: 24473 - DNA, 21 bp, Artificial Sequence
  Description of Artificial Sequence: Synthetic oligonucleotide
tcgcttgagtctgagcatcgt

SEQ ID NO: 24474 - DNA, 21 bp, Artificial Sequence
  Description of Artificial Sequence: Synthetic oligonucleotide
tctctggagagtatgattcat

SEQ ID NO: 24475 - DNA, 21 bp, Artificial Sequence
  Description of Artificial Sequence: Synthetic oligonucleotide
tcgcttgagagtcgtcattat

SEQ ID NO: 24476 - DNA, 21 bp, Artificial Sequence
  Description of Artificial Sequence: Synthetic oligonucleotide
agtctggaggtggttcgtaag

SEQ ID NO: 24477 - DNA, 21 bp, Artificial Sequence
  Description of Artificial Sequence: Synthetic oligonucleotide
tcgctttttaaggatgtgtct

SEQ ID NO: 24478 - DNA, 21 bp, Artificial Sequence
  Description of Artificial Sequence: Synthetic oligonucleotide
tcgttgtttcctgcggggggt

SEQ ID NO: 24479 - DNA, 21 bp, Artificial Sequence
  Description of Artificial Sequence: Synthetic oligonucleotide
agtctgtttagtgcgcgtccg

SEQ ID NO: 24480 - DNA, 21 bp, Artificial Sequence
  Description of Artificial Sequence: Synthetic oligonucleotide
agtttggggtttcgggcgggg

SEQ ID NO: 24481 - DNA, 21 bp, Artificial Sequence
  Description of Artificial Sequence: Synthetic oligonucleotide
tcgctggggatttcgaatttt

SEQ ID NO: 24482 - DNA, 21 bp, Artificial Sequence
  Description of Artificial Sequence: Synthetic oligonucleotide
tcgcttggtaagacttcgcct

SEQ ID NO: 24483 - DNA, 21 bp, Artificial Sequence
  Description of Artificial Sequence: Synthetic oligonucleotide
agtctggggatgaagtctgct

SEQ ID NO: 24484 - DNA, 21 bp, Artificial Sequence
  Description of Artificial Sequence: Synthetic oligonucleotide
tctcttggtcagagtcagtat

SEQ ID NO: 24485 - DNA, 21 bp, Artificial Sequence
  Description of Artificial Sequence: Synthetic oligonucleotide
tcgcttgggcggggttcgatt

SEQ ID NO: 24486 - DNA, 21 bp, Artificial Sequence
  Description of Artificial Sequence: Synthetic oligonucleotide
tcgttgggtactggtgttggg

SEQ ID NO: 24487 - DNA, 21 bp, Artificial Sequence
  Description of Artificial Sequence: Synthetic oligonucleotide
tcgctgcatgcgattaagaat

SEQ ID NO: 24488 - DNA, 21 bp, Artificial Sequence
  Description of Artificial Sequence: Synthetic oligonucleotide
tctcttcatgcggttgtgtcg

SEQ ID NO: 24489 - DNA, 21 bp, Artificial Sequence
  Description of Artificial Sequence: Synthetic oligonucleotide
agtcttcatgatatgtctggg

SEQ ID NO: 24490 - DNA, 21 bp, Artificial Sequence
  Description of Artificial Sequence: Synthetic oligonucleotide
tcgctgcattcgagtgatagt

SEQ ID NO: 24491 - DNA, 21 bp, Artificial Sequence
  Description of Artificial Sequence: Synthetic oligonucleotide
tctctgattgatccgtatgag

SEQ ID NO: 24492 - DNA, 21 bp, Artificial Sequence
  Description of Artificial Sequence: Synthetic oligonucleotide
tcgcttattgatcgtcatcct

SEQ ID NO: 24493 - DNA, 21 bp, Artificial Sequence
  Description of Artificial Sequence: Synthetic oligonucleotide
tcgctgattgggggtcagcag

SEQ ID NO: 24494 - DNA, 21 bp, Artificial Sequence
  Description of Artificial Sequence: Synthetic oligonucleotide
tcgttgattcggtcgagtacg

SEQ ID NO: 24495 - DNA, 21 bp, Artificial Sequence
  Description of Artificial Sequence: Synthetic oligonucleotide
tctctgattagtgagaagggt

SEQ ID NO: 24496 - DNA, 21 bp, Artificial Sequence
  Description of Artificial Sequence: Synthetic oligonucleotide
agtttgaaggcgtctcctccg

SEQ ID NO: 24497 - DNA, 21 bp, Artificial Sequence
  Description of Artificial Sequence: Synthetic oligonucleotide
tcgcttaaggaggcgtggttg

SEQ ID NO: 24498 - DNA, 21 bp, Artificial Sequence
  Description of Artificial Sequence: Synthetic oligonucleotide
tcgctgaagattcctacggcg

SEQ ID NO: 24499 - DNA, 21 bp, Artificial Sequence
  Description of Artificial Sequence: Synthetic oligonucleotide
tcgcttaagaatgagctggct

SEQ ID NO: 24500 - DNA, 21 bp, Artificial Sequence
  Description of Artificial Sequence: Synthetic oligonucleotide
tctcttaagcctggtggtggg

SEQ ID NO: 24501 - DNA, 21 bp, Artificial Sequence
  Description of Artificial Sequence: Synthetic oligonucleotide
agtctgaagccttatcagagt

SEQ ID NO: 24502 - DNA, 21 bp, Artificial Sequence
  Description of Artificial Sequence: Synthetic oligonucleotide
tctttgaagcagtcgcatcct

SEQ ID NO: 24503 - DNA, 21 bp, Artificial Sequence
  Description of Artificial Sequence: Synthetic oligonucleotide
tctttgaagtctccgcagctt

SEQ ID NO: 24504 - DNA, 21 bp, Artificial Sequence
  Description of Artificial Sequence: Synthetic oligonucleotide
tcgctgaagacttatcctgag

SEQ ID NO: 24505 - DNA, 21 bp, Artificial Sequence
  Description of Artificial Sequence: Synthetic oligonucleotide
agtcttttggcgaaggttccg

SEQ ID NO: 24506 - DNA, 21 bp, Artificial Sequence
  Description of Artificial Sequence: Synthetic oligonucleotide
tcgttgttggataggcctatt

SEQ ID NO: 24507 - DNA, 21 bp, Artificial Sequence
  Description of Artificial Sequence: Synthetic oligonucleotide
tcgctgttggggccgactcag

SEQ ID NO: 24508 - DNA, 21 bp, Artificial Sequence
  Description of Artificial Sequence: Synthetic oligonucleotide
tctcttttgaagcctgttcag

SEQ ID NO: 24509 - DNA, 21 bp, Artificial Sequence
  Description of Artificial Sequence: Synthetic oligonucleotide
tctctgcttcttctttgtgct

SEQ ID NO: 24510 - DNA, 21 bp, Artificial Sequence
  Description of Artificial Sequence: Synthetic oligonucleotide
agtctgcttttgaatcggggt

SEQ ID NO: 24511 - DNA, 21 bp, Artificial Sequence
  Description of Artificial Sequence: Synthetic oligonucleotide
agtttgcttctgcagaatcct

SEQ ID NO: 24512 - DNA, 21 bp, Artificial Sequence
  Description of Artificial Sequence: Synthetic oligonucleotide
agtctgctgaattctgatact

SEQ ID NO: 24513 - DNA, 21 bp, Artificial Sequence
  Description of Artificial Sequence: Synthetic oligonucleotide
agtcttttgaggcaggtgcct

SEQ ID NO: 24514 - DNA, 21 bp, Artificial Sequence
  Description of Artificial Sequence: Synthetic oligonucleotide
agtcttctttcggtgtcgcat

SEQ ID NO: 24515 - DNA, 21 bp, Artificial Sequence
  Description of Artificial Sequence: Synthetic oligonucleotide
agtttgcttactgctagtgtt

SEQ ID NO: 24516 - DNA, 21 bp, Artificial Sequence
  Description of Artificial Sequence: Synthetic oligonucleotide
tcgcttctgactagtgctccg

SEQ ID NO: 24517 - DNA, 21 bp, Artificial Sequence
  Description of Artificial Sequence: Synthetic oligonucleotide
agtctgcttgtgaatctttct

SEQ ID NO: 24518 - DNA, 21 bp, Artificial Sequence
  Description of Artificial Sequence: Synthetic oligonucleotide
tctttgctgtatccgactcct

SEQ ID NO: 24519 - DNA, 21 bp, Artificial Sequence
  Description of Artificial Sequence: Synthetic oligonucleotide
tcgttgatggcggcggggctt

SEQ ID NO: 24520 - DNA, 21 bp, Artificial Sequence
  Description of Artificial Sequence: Synthetic oligonucleotide
tctctgatggcgagtattggt

SEQ ID NO: 24521 - DNA, 21 bp, Artificial Sequence
  Description of Artificial Sequence: Synthetic oligonucleotide
tctcttatgcatgatgtgtct

SEQ ID NO: 24522 - DNA, 21 bp, Artificial Sequence
  Description of Artificial Sequence: Synthetic oligonucleotide
agtctgatgagtcttgatact

SEQ ID NO: 24523 - DNA, 21 bp, Artificial Sequence
  Description of Artificial Sequence: Synthetic oligonucleotide
tcgttgatgtcgccgtctatg

SEQ ID NO: 24524 - DNA, 21 bp, Artificial Sequence
  Description of Artificial Sequence: Synthetic oligonucleotide
agtcttaatctgaggggtaat

SEQ ID NO: 24525 - DNA, 21 bp, Artificial Sequence
  Description of Artificial Sequence: Synthetic oligonucleotide
tcgttgaataatgcgcggaat

SEQ ID NO: 24526 - DNA, 21 bp, Artificial Sequence
  Description of Artificial Sequence: Synthetic oligonucleotide
agtctgaataatgggttgact

SEQ ID NO: 24527 - DNA, 21 bp, Artificial Sequence
  Description of Artificial Sequence: Synthetic oligonucleotide
agtctgaataatcggccgagt

SEQ ID NO: 24528 - DNA, 21 bp, Artificial Sequence
  Description of Artificial Sequence: Synthetic oligonucleotide
agtttgaatcctaagtctcct

SEQ ID NO: 24529 - DNA, 21 bp, Artificial Sequence
  Description of Artificial Sequence: Synthetic oligonucleotide
tctttgaatccttctgggatg

SEQ ID NO: 24530 - DNA, 21 bp, Artificial Sequence
  Description of Artificial Sequence: Synthetic oligonucleotide
tcgctgaataggcagggtaat

SEQ ID NO: 24531 - DNA, 21 bp, Artificial Sequence
  Description of Artificial Sequence: Synthetic oligonucleotide
tctctgaattcttattcgccg

SEQ ID NO: 24532 - DNA, 21 bp, Artificial Sequence
  Description of Artificial Sequence: Synthetic oligonucleotide
tctctgaatactggtactatt

SEQ ID NO: 24533 - DNA, 21 bp, Artificial Sequence
  Description of Artificial Sequence: Synthetic oligonucleotide
agtctgaatactttgggtacg

SEQ ID NO: 24534 - DNA, 21 bp, Artificial Sequence
  Description of Artificial Sequence: Synthetic oligonucleotide
tcgttgaatacgatgaatgct

SEQ ID NO: 24535 - DNA, 21 bp, Artificial Sequence
  Description of Artificial Sequence: Synthetic oligonucleotide
tcgcttaatacgacgcctgag

SEQ ID NO: 24536 - DNA, 21 bp, Artificial Sequence
  Description of Artificial Sequence: Synthetic oligonucleotide
agtcttaatgttgctgatgct

SEQ ID NO: 24537 - DNA, 21 bp, Artificial Sequence
  Description of Artificial Sequence: Synthetic oligonucleotide
tctcttccggcgcagcaggtt

SEQ ID NO: 24538 - DNA, 21 bp, Artificial Sequence
  Description of Artificial Sequence: Synthetic oligonucleotide
tctttgcctgcgtcgactctg

SEQ ID NO: 24539 - DNA, 21 bp, Artificial Sequence
  Description of Artificial Sequence: Synthetic oligonucleotide
agtttgcctgagtctaatagt

SEQ ID NO: 24540 - DNA, 21 bp, Artificial Sequence
  Description of Artificial Sequence: Synthetic oligonucleotide
agtctgccggggtctgttatg

SEQ ID NO: 24541 - DNA, 21 bp, Artificial Sequence
  Description of Artificial Sequence: Synthetic oligonucleotide
tcgttgccgggtacggtgagg

SEQ ID NO: 24542 - DNA, 21 bp, Artificial Sequence
  Description of Artificial Sequence: Synthetic oligonucleotide
tcgcttcctcatattcgtcat

SEQ ID NO: 24543 - DNA, 21 bp, Artificial Sequence
  Description of Artificial Sequence: Synthetic oligonucleotide
agtttgccgcattcgtgtggt

SEQ ID NO: 24544 - DNA, 21 bp, Artificial Sequence
  Description of Artificial Sequence: Synthetic oligonucleotide
tctctgcctattgggggttct

SEQ ID NO: 24545 - DNA, 21 bp, Artificial Sequence
  Description of Artificial Sequence: Synthetic oligonucleotide
tcgctgccgaagccgtctcat

SEQ ID NO: 24546 - DNA, 21 bp, Artificial Sequence
  Description of Artificial Sequence: Synthetic oligonucleotide
tctttgccgcttaaggttaat

SEQ ID NO: 24547 - DNA, 21 bp, Artificial Sequence
  Description of Artificial Sequence: Synthetic oligonucleotide
tctcttcctttgcgtgatttg

SEQ ID NO: 24548 - DNA, 21 bp, Artificial Sequence
  Description of Artificial Sequence: Synthetic oligonucleotide
tcgctgccgaatattggtact

SEQ ID NO: 24549 - DNA, 21 bp, Artificial Sequence
  Description of Artificial Sequence: Synthetic oligonucleotide
agtctgccgcagcctcctttg

SEQ ID NO: 24550 - DNA, 21 bp, Artificial Sequence
  Description of Artificial Sequence: Synthetic oligonucleotide
agtttgcctcagactttgagg

SEQ ID NO: 24551 - DNA, 21 bp, Artificial Sequence
  Description of Artificial Sequence: Synthetic oligonucleotide
tcgctgcctcgtggttctaat

SEQ ID NO: 24552 - DNA, 21 bp, Artificial Sequence
  Description of Artificial Sequence: Synthetic oligonucleotide
tctcttccgtctctgctgggt

SEQ ID NO: 24553 - DNA, 21 bp, Artificial Sequence
  Description of Artificial Sequence: Synthetic oligonucleotide
tctttgccttcgtctccgtct

SEQ ID NO: 24554 - DNA, 21 bp, Artificial Sequence
  Description of Artificial Sequence: Synthetic oligonucleotide
tctttgccgtctacgcatgtg

SEQ ID NO: 24555 - DNA, 21 bp, Artificial Sequence
  Description of Artificial Sequence: Synthetic oligonucleotide
tctttgccgactgggcctatt

SEQ ID NO: 24556 - DNA, 21 bp, Artificial Sequence
  Description of Artificial Sequence: Synthetic oligonucleotide
agtctgccgacgtctactatg

SEQ ID NO: 24557 - DNA, 21 bp, Artificial Sequence
  Description of Artificial Sequence: Synthetic oligonucleotide
agtctgcctgttccgagtagg

SEQ ID NO: 24558 - DNA, 21 bp, Artificial Sequence
  Description of Artificial Sequence: Synthetic oligonucleotide
tcgcttcctgtgcggggggtg

SEQ ID NO: 24559 - DNA, 21 bp, Artificial Sequence
  Description of Artificial Sequence: Synthetic oligonucleotide
tctcttcctgtgtctccgtct

SEQ ID NO: 24560 - DNA, 21 bp, Artificial Sequence
  Description of Artificial Sequence: Synthetic oligonucleotide
tctctgcctgttactggtcgt

SEQ ID NO: 24561 - DNA, 21 bp, Artificial Sequence
  Description of Artificial Sequence: Synthetic oligonucleotide
tcgttgcagtttacgtcgtcg

SEQ ID NO: 24562 - DNA, 21 bp, Artificial Sequence
  Description of Artificial Sequence: Synthetic oligonucleotide
tctcttcagagggatctggtt

SEQ ID NO: 24563 - DNA, 21 bp, Artificial Sequence
  Description of Artificial Sequence: Synthetic oligonucleotide
tctctgcagcggccgactatt

SEQ ID NO: 24564 - DNA, 21 bp, Artificial Sequence
  Description of Artificial Sequence: Synthetic oligonucleotide
tctttgcagtcgtctcggggt

SEQ ID NO: 24565 - DNA, 21 bp, Artificial Sequence
  Description of Artificial Sequence: Synthetic oligonucleotide
tcgcttcagactgataatgag

SEQ ID NO: 24566 - DNA, 21 bp, Artificial Sequence
  Description of Artificial Sequence: Synthetic oligonucleotide
tctcttcagacgagtcgtgtg

SEQ ID NO: 24567 - DNA, 21 bp, Artificial Sequence
  Description of Artificial Sequence: Synthetic oligonucleotide
tctcttcagtggactagtgcg

SEQ ID NO: 24568 - DNA, 21 bp, Artificial Sequence
  Description of Artificial Sequence: Synthetic oligonucleotide
tctctgcgtgcgaatacttat

SEQ ID NO: 24569 - DNA, 21 bp, Artificial Sequence
  Description of Artificial Sequence: Synthetic oligonucleotide
tcgctgcgggctgttgtgcct

SEQ ID NO: 24570 - DNA, 21 bp, Artificial Sequence
  Description of Artificial Sequence: Synthetic oligonucleotide
agtctgcgggattcttatcat

SEQ ID NO: 24571 - DNA, 21 bp, Artificial Sequence
  Description of Artificial Sequence: Synthetic oligonucleotide
tctcttcgggaggatgctcag

SEQ ID NO: 24572 - DNA, 21 bp, Artificial Sequence
  Description of Artificial Sequence: Synthetic oligonucleotide
tctttgcggggttctagtagt

SEQ ID NO: 24573 - DNA, 21 bp, Artificial Sequence
  Description of Artificial Sequence: Synthetic oligonucleotide
tctttgcgtcatagtgagacg

SEQ ID NO: 24574 - DNA, 21 bp, Artificial Sequence
  Description of Artificial Sequence: Synthetic oligonucleotide
agtttgcgtatttctgctacg

SEQ ID NO: 24575 - DNA, 21 bp, Artificial Sequence
  Description of Artificial Sequence: Synthetic oligonucleotide
tcgcttcgtcctgatcagcat

SEQ ID NO: 24576 - DNA, 21 bp, Artificial Sequence
  Description of Artificial Sequence: Synthetic oligonucleotide
tcgttgaggccgaattcttct

SEQ ID NO: 24577 - DNA, 21 bp, Artificial Sequence
  Description of Artificial Sequence: Synthetic oligonucleotide
tcgcttaggtcgctgaattcg

SEQ ID NO: 24578 - DNA, 21 bp, Artificial Sequence
  Description of Artificial Sequence: Synthetic oligonucleotide
tctttgcgtactggtgattat

SEQ ID NO: 24579 - DNA, 21 bp, Artificial Sequence
  Description of Artificial Sequence: Synthetic oligonucleotide
tctcttcggacgattgctgcg

SEQ ID NO: 24580 - DNA, 21 bp, Artificial Sequence
  Description of Artificial Sequence: Synthetic oligonucleotide
tctttgaggactaatgtggtg

SEQ ID NO: 24581 - DNA, 21 bp, Artificial Sequence
  Description of Artificial Sequence: Synthetic oligonucleotide
tctctgcgtacgtcgatggtg

SEQ ID NO: 24582 - DNA, 21 bp, Artificial Sequence
  Description of Artificial Sequence: Synthetic oligonucleotide
tcgcttcgtgtggcggagctg

SEQ ID NO: 24583 - DNA, 21 bp, Artificial Sequence
  Description of Artificial Sequence: Synthetic oligonucleotide
tcgctgcgggttccggttgct

SEQ ID NO: 24584 - DNA, 21 bp, Artificial Sequence
  Description of Artificial Sequence: Synthetic oligonucleotide
tcgttgtcggctcatgatagg

SEQ ID NO: 24585 - DNA, 21 bp, Artificial Sequence
  Description of Artificial Sequence: Synthetic oligonucleotide
agtctttctgagacgtttagg

SEQ ID NO: 24586 - DNA, 21 bp, Artificial Sequence
  Description of Artificial Sequence: Synthetic oligonucleotide
agtctgagtggtgctcgggct

SEQ ID NO: 24587 - DNA, 21 bp, Artificial Sequence
  Description of Artificial Sequence: Synthetic oligonucleotide
agtctttctggtaatactgat

SEQ ID NO: 24588 - DNA, 21 bp, Artificial Sequence
  Description of Artificial Sequence: Synthetic oligonucleotide
tcgttgtcgggtcggccgagt

SEQ ID NO: 24589 - DNA, 21 bp, Artificial Sequence
  Description of Artificial Sequence: Synthetic oligonucleotide
tcgttgtcgcattttccggct

SEQ ID NO: 24590 - DNA, 21 bp, Artificial Sequence
  Description of Artificial Sequence: Synthetic oligonucleotide
tctttgtctcattcggatggg

SEQ ID NO: 24591 - DNA, 21 bp, Artificial Sequence
  Description of Artificial Sequence: Synthetic oligonucleotide
tctctttctattgataaggct

SEQ ID NO: 24592 - DNA, 21 bp, Artificial Sequence
  Description of Artificial Sequence: Synthetic oligonucleotide
tctctttcgaagatgcctagt

SEQ ID NO: 24593 - DNA, 21 bp, Artificial Sequence
  Description of Artificial Sequence: Synthetic oligonucleotide
agtctgtctaagccggttggt

SEQ ID NO: 24594 - DNA, 21 bp, Artificial Sequence
  Description of Artificial Sequence: Synthetic oligonucleotide
tctttgtcgccgcgtactttt

SEQ ID NO: 24595 - DNA, 21 bp, Artificial Sequence
  Description of Artificial Sequence: Synthetic oligonucleotide
tctctttcgcagggttctaat

SEQ ID NO: 24596 - DNA, 21 bp, Artificial Sequence
  Description of Artificial Sequence: Synthetic oligonucleotide
tctctttctcgggctgggcct

SEQ ID NO: 24597 - DNA, 21 bp, Artificial Sequence
  Description of Artificial Sequence: Synthetic oligonucleotide
tcgctttcgagtgctattggg

SEQ ID NO: 24598 - DNA, 21 bp, Artificial Sequence
  Description of Artificial Sequence: Synthetic oligonucleotide
tcgctttcgtctcggaatatt

SEQ ID NO: 24599 - DNA, 21 bp, Artificial Sequence
  Description of Artificial Sequence: Synthetic oligonucleotide
agtttgtcgacgacgtctaag

SEQ ID NO: 24600 - DNA, 21 bp, Artificial Sequence
  Description of Artificial Sequence: Synthetic oligonucleotide
tcgttgagtgttgagcctact

SEQ ID NO: 24601 - DNA, 21 bp, Artificial Sequence
  Description of Artificial Sequence: Synthetic oligonucleotide
tcgctgtcttatgcgaatcat

SEQ ID NO: 24602 - DNA, 21 bp, Artificial Sequence
  Description of Artificial Sequence: Synthetic oligonucleotide
tctttgtcgtatgcgcaggag

SEQ ID NO: 24603 - DNA, 21 bp, Artificial Sequence
  Description of Artificial Sequence: Synthetic oligonucleotide
tcgcttacggctggggggcat

SEQ ID NO: 24604 - DNA, 21 bp, Artificial Sequence
  Description of Artificial Sequence: Synthetic oligonucleotide
tcgttgacgtttagtactggg

SEQ ID NO: 24605 - DNA, 21 bp, Artificial Sequence
  Description of Artificial Sequence: Synthetic oligonucleotide
tcgcttacgggtgatggtgtt

SEQ ID NO: 24606 - DNA, 21 bp, Artificial Sequence
  Description of Artificial Sequence: Synthetic oligonucleotide
tctcttactcatattaatcat

SEQ ID NO: 24607 - DNA, 21 bp, Artificial Sequence
  Description of Artificial Sequence: Synthetic oligonucleotide
tctttgacgcatattccgatg

SEQ ID NO: 24608 - DNA, 21 bp, Artificial Sequence
  Description of Artificial Sequence: Synthetic oligonucleotide
tcgcttacgattgctgcggtt

SEQ ID NO: 24609 - DNA, 21 bp, Artificial Sequence
  Description of Artificial Sequence: Synthetic oligonucleotide
tctcttacgaatgaggctaag

SEQ ID NO: 24610 - DNA, 21 bp, Artificial Sequence
  Description of Artificial Sequence: Synthetic oligonucleotide
agtcttacgaatattgctcag

SEQ ID NO: 24611 - DNA, 21 bp, Artificial Sequence
  Description of Artificial Sequence: Synthetic oligonucleotide
tcgctgactcctattatgcgg

SEQ ID NO: 24612 - DNA, 21 bp, Artificial Sequence
  Description of Artificial Sequence: Synthetic oligonucleotide
agtctgacgcctcgttctact

SEQ ID NO: 24613 - DNA, 21 bp, Artificial Sequence
  Description of Artificial Sequence: Synthetic oligonucleotide
tctttgactccgtcgtttgct

SEQ ID NO: 24614 - DNA, 21 bp, Artificial Sequence
  Description of Artificial Sequence: Synthetic oligonucleotide
agtttgactagtgctactact

SEQ ID NO: 24615 - DNA, 21 bp, Artificial Sequence
  Description of Artificial Sequence: Synthetic oligonucleotide
agtcttacttctcggccgatg

SEQ ID NO: 24616 - DNA, 21 bp, Artificial Sequence
  Description of Artificial Sequence: Synthetic oligonucleotide
tctttgacttctacgatgagt

SEQ ID NO: 24617 - DNA, 21 bp, Artificial Sequence
  Description of Artificial Sequence: Synthetic oligonucleotide
tcgcttactgttttgcgtaat

SEQ ID NO: 24618 - DNA, 21 bp, Artificial Sequence
  Description of Artificial Sequence: Synthetic oligonucleotide
tctcttacttatgataattct

SEQ ID NO: 24619 - DNA, 21 bp, Artificial Sequence
  Description of Artificial Sequence: Synthetic oligonucleotide
tctttgacttatgagcgtgat

SEQ ID NO: 24620 - DNA, 21 bp, Artificial Sequence
  Description of Artificial Sequence: Synthetic oligonucleotide
agtctgacgtatggggctttg

SEQ ID NO: 24621 - DNA, 21 bp, Artificial Sequence
  Description of Artificial Sequence: Synthetic oligonucleotide
tcgcttgttgagcgtacgtct

SEQ ID NO: 24622 - DNA, 21 bp, Artificial Sequence
  Description of Artificial Sequence: Synthetic oligonucleotide
tcgttggttgggactgttgat

SEQ ID NO: 24623 - DNA, 21 bp, Artificial Sequence
  Description of Artificial Sequence: Synthetic oligonucleotide
tcgcttgtgcatcgttctact

SEQ ID NO: 24624 - DNA, 21 bp, Artificial Sequence
  Description of Artificial Sequence: Synthetic oligonucleotide
agtttggtgaatgagacgagt

SEQ ID NO: 24625 - DNA, 21 bp, Artificial Sequence
  Description of Artificial Sequence: Synthetic oligonucleotide
tctcttgtgcagaagctgtct

SEQ ID NO: 24626 - DNA, 21 bp, Artificial Sequence
  Description of Artificial Sequence: Synthetic oligonucleotide
agtcttgttcggagtggtgat

SEQ ID NO: 24627 - DNA, 21 bp, Artificial Sequence
  Description of Artificial Sequence: Synthetic oligonucleotide
tcgctggtgcgttctcagaat

SEQ ID NO: 24628 - DNA, 21 bp, Artificial Sequence
  Description of Artificial Sequence: Synthetic oligonucleotide
agtctggtgtctcggatttct

SEQ ID NO: 24629 - DNA, 21 bp, Artificial Sequence
  Description of Artificial Sequence: Synthetic oligonucleotide
tctctggttacggcggggagt

SEQ ID NO: 24630 - DNA, 21 bp, Artificial Sequence
  Description of Artificial Sequence: Synthetic oligonucleotide
tctcttgtggttcagtcggct

SEQ ID NO: 24631 - DNA, 21 bp, Artificial Sequence
  Description of Artificial Sequence: Synthetic oligonucleotide
tcgcttgtttatgatcctctg

SEQ ID NO: 24632 - DNA, 21 bp, Artificial Sequence
  Description of Artificial Sequence: Synthetic oligonucleotide
tcgttgtatagtggtaatgtt

SEQ ID NO: 24633 - DNA, 21 bp, Artificial Sequence
  Description of Artificial Sequence: Synthetic oligonucleotide
tctctgtatgtgcctaagcat

SEQ ID NO: 24634 - DNA, 21 bp, Artificial Sequence
  Description of Artificial Sequence: Synthetic oligonucleotide
tcgctttattataaggaggag

SEQ ID NO: 24635 - DNA, 21 bp, Artificial Sequence
  Description of Artificial Sequence: Synthetic oligonucleotide
agtatggctgcgacgcctgcg

SEQ ID NO: 24636 - DNA, 21 bp, Artificial Sequence
  Description of Artificial Sequence: Synthetic oligonucleotide
tcgatggctttgagtgggatt

SEQ ID NO: 24637 - DNA, 21 bp, Artificial Sequence
  Description of Artificial Sequence: Synthetic oligonucleotide
tctatggctgtgtctgtgccg

SEQ ID NO: 24638 - DNA, 21 bp, Artificial Sequence
  Description of Artificial Sequence: Synthetic oligonucleotide
tctatggattgtctttcgcct

SEQ ID NO: 24639 - DNA, 21 bp, Artificial Sequence
  Description of Artificial Sequence: Synthetic oligonucleotide
tcgatggatccgggtgctcgg

SEQ ID NO: 24640 - DNA, 21 bp, Artificial Sequence
  Description of Artificial Sequence: Synthetic oligonucleotide
tcgatggataggaagactggt

SEQ ID NO: 24641 - DNA, 21 bp, Artificial Sequence
  Description of Artificial Sequence: Synthetic oligonucleotide
tcgatggatgttagtgatacg

SEQ ID NO: 24642 - DNA, 21 bp, Artificial Sequence
  Description of Artificial Sequence: Synthetic oligonucleotide
agtatggagtctaggcttctg

SEQ ID NO: 24643 - DNA, 21 bp, Artificial Sequence
  Description of Artificial Sequence: Synthetic oligonucleotide
agtatgggtgcggggccgacg

SEQ ID NO: 24644 - DNA, 21 bp, Artificial Sequence
  Description of Artificial Sequence: Synthetic oligonucleotide
agtatgggtgataatcggagg

SEQ ID NO: 24645 - DNA, 21 bp, Artificial Sequence
  Description of Artificial Sequence: Synthetic oligonucleotide
tcgatggggagtagtgctttg

SEQ ID NO: 24646 - DNA, 21 bp, Artificial Sequence
  Description of Artificial Sequence: Synthetic oligonucleotide
tcgatgcatgcgcttagtgtt

SEQ ID NO: 24647 - DNA, 21 bp, Artificial Sequence
  Description of Artificial Sequence: Synthetic oligonucleotide
tctatgcatcagactgttcat

SEQ ID NO: 24648 - DNA, 21 bp, Artificial Sequence
  Description of Artificial Sequence: Synthetic oligonucleotide
agtatgcatcggactagtcct

SEQ ID NO: 24649 - DNA, 21 bp, Artificial Sequence
  Description of Artificial Sequence: Synthetic oligonucleotide
agtatgcatacgactacgact

SEQ ID NO: 24650 - DNA, 21 bp, Artificial Sequence
  Description of Artificial Sequence: Synthetic oligonucleotide
tctatgcatgtgcctggtgtt

SEQ ID NO: 24651 - DNA, 21 bp, Artificial Sequence
  Description of Artificial Sequence: Synthetic oligonucleotide
tcgatgaaggctgttttgaat

SEQ ID NO: 24652 - DNA, 21 bp, Artificial Sequence
  Description of Artificial Sequence: Synthetic oligonucleotide
tcgatgcttgattctcttctg

SEQ ID NO: 24653 - DNA, 21 bp, Artificial Sequence
  Description of Artificial Sequence: Synthetic oligonucleotide
tctatgctgaatgttacggtt

SEQ ID NO: 24654 - DNA, 21 bp, Artificial Sequence
  Description of Artificial Sequence: Synthetic oligonucleotide
tctatgcttagtgctagtctg

SEQ ID NO: 24655 - DNA, 21 bp, Artificial Sequence
  Description of Artificial Sequence: Synthetic oligonucleotide
tctatgatggctgtgaagcct

SEQ ID NO: 24656 - DNA, 21 bp, Artificial Sequence
  Description of Artificial Sequence: Synthetic oligonucleotide
tctatgatggagccgtttaag

SEQ ID NO: 24657 - DNA, 21 bp, Artificial Sequence
  Description of Artificial Sequence: Synthetic oligonucleotide
agtatgatgaatactgttggt

SEQ ID NO: 24658 - DNA, 21 bp, Artificial Sequence
  Description of Artificial Sequence: Synthetic oligonucleotide
tcgatgatgcagaaggttccg

SEQ ID NO: 24659 - DNA, 21 bp, Artificial Sequence
  Description of Artificial Sequence: Synthetic oligonucleotide
tctatgatgacgggtttggcg

SEQ ID NO: 24660 - DNA, 21 bp, Artificial Sequence
  Description of Artificial Sequence: Synthetic oligonucleotide
tcgatgatgtatattgagcct

SEQ ID NO: 24661 - DNA, 21 bp, Artificial Sequence
  Description of Artificial Sequence: Synthetic oligonucleotide
tctatgaatcttgggtcgact

SEQ ID NO: 24662 - DNA, 21 bp, Artificial Sequence
  Description of Artificial Sequence: Synthetic oligonucleotide
tctatgaatccgggttcggct

SEQ ID NO: 24663 - DNA, 21 bp, Artificial Sequence
  Description of Artificial Sequence: Synthetic oligonucleotide
tcgatgaatccgatgactgtg

SEQ ID NO: 24664 - DNA, 21 bp, Artificial Sequence
  Description of Artificial Sequence: Synthetic oligonucleotide
tcgatgaatgtgtatgatact

SEQ ID NO: 24665 - DNA, 21 bp, Artificial Sequence
  Description of Artificial Sequence: Synthetic oligonucleotide
agtatgcctttttctgttgct

SEQ ID NO: 24666 - DNA, 21 bp, Artificial Sequence
  Description of Artificial Sequence: Synthetic oligonucleotide
tcgatgcctggggtggctaat

SEQ ID NO: 24667 - DNA, 21 bp, Artificial Sequence
  Description of Artificial Sequence: Synthetic oligonucleotide
tctatgcctcatacgctgtct

SEQ ID NO: 24668 - DNA, 21 bp, Artificial Sequence
  Description of Artificial Sequence: Synthetic oligonucleotide
agtatgccgatgccgagtccg

SEQ ID NO: 24669 - DNA, 21 bp, Artificial Sequence
  Description of Artificial Sequence: Synthetic oligonucleotide
tctatgccgaatgcgcctagt

SEQ ID NO: 24670 - DNA, 21 bp, Artificial Sequence
  Description of Artificial Sequence: Synthetic oligonucleotide
tcgatgcctaatccttatcag

SEQ ID NO: 24671 - DNA, 21 bp, Artificial Sequence
  Description of Artificial Sequence: Synthetic oligonucleotide
tctatgcctcgggatttgatt

SEQ ID NO: 24672 - DNA, 21 bp, Artificial Sequence
  Description of Artificial Sequence: Synthetic oligonucleotide
tcgatgccgcgggagccgggg

SEQ ID NO: 24673 - DNA, 21 bp, Artificial Sequence
  Description of Artificial Sequence: Synthetic oligonucleotide
tctatgccgtctccgcgggtt

SEQ ID NO: 24674 - DNA, 21 bp, Artificial Sequence
  Description of Artificial Sequence: Synthetic oligonucleotide
tcgatgcgggctgcggctttt

SEQ ID NO: 24675 - DNA, 21 bp, Artificial Sequence
  Description of Artificial Sequence: Synthetic oligonucleotide
tctatgagggatacggatcgg

SEQ ID NO: 24676 - DNA, 21 bp, Artificial Sequence
  Description of Artificial Sequence: Synthetic oligonucleotide
tctatgaggccgtctgataat

SEQ ID NO: 24677 - DNA, 21 bp, Artificial Sequence
  Description of Artificial Sequence: Synthetic oligonucleotide
tctatgaggtctggtgagcct

SEQ ID NO: 24678 - DNA, 21 bp, Artificial Sequence
  Description of Artificial Sequence: Synthetic oligonucleotide
tctatgcggagtcgtgatacg

SEQ ID NO: 24679 - DNA, 21 bp, Artificial Sequence
  Description of Artificial Sequence: Synthetic oligonucleotide
agtatgcgtagttctccgttg

SEQ ID NO: 24680 - DNA, 21 bp, Artificial Sequence
  Description of Artificial Sequence: Synthetic oligonucleotide
tcgatgtctggttttgatgtt

SEQ ID NO: 24681 - DNA, 21 bp, Artificial Sequence
  Description of Artificial Sequence: Synthetic oligonucleotide
tcgatgtcggggaggattacg

SEQ ID NO: 24682 - DNA, 21 bp, Artificial Sequence
  Description of Artificial Sequence: Synthetic oligonucleotide
tcgatgtctctgtctgggctt

SEQ ID NO: 24683 - DNA, 21 bp, Artificial Sequence
  Description of Artificial Sequence: Synthetic oligonucleotide
tctatgtcgccttctcatccg

SEQ ID NO: 24684 - DNA, 21 bp, Artificial Sequence
  Description of Artificial Sequence: Synthetic oligonucleotide
tctatgagtcagccgacgtat

SEQ ID NO: 24685 - DNA, 21 bp, Artificial Sequence
  Description of Artificial Sequence: Synthetic oligonucleotide
tcgatgtctaggccgcagcct

SEQ ID NO: 24686 - DNA, 21 bp, Artificial Sequence
  Description of Artificial Sequence: Synthetic oligonucleotide
agtatgtcgagttttccgccg

SEQ ID NO: 24687 - DNA, 21 bp, Artificial Sequence
  Description of Artificial Sequence: Synthetic oligonucleotide
agtatgagtgtggagccttat

SEQ ID NO: 24688 - DNA, 21 bp, Artificial Sequence
  Description of Artificial Sequence: Synthetic oligonucleotide
tcgatgactgcggatctgatt

SEQ ID NO: 24689 - DNA, 21 bp, Artificial Sequence
  Description of Artificial Sequence: Synthetic oligonucleotide
tctatgacggcgctgacggcg

SEQ ID NO: 24690 - DNA, 21 bp, Artificial Sequence
  Description of Artificial Sequence: Synthetic oligonucleotide
tcgatgactgggcctgagctt

SEQ ID NO: 24691 - DNA, 21 bp, Artificial Sequence
  Description of Artificial Sequence: Synthetic oligonucleotide
tctatgactttggggactgcg

SEQ ID NO: 24692 - DNA, 21 bp, Artificial Sequence
  Description of Artificial Sequence: Synthetic oligonucleotide
tcgatgacgcctagtgtgact

SEQ ID NO: 24693 - DNA, 21 bp, Artificial Sequence
  Description of Artificial Sequence: Synthetic oligonucleotide
agtatgacgacgattggtccg

SEQ ID NO: 24694 - DNA, 21 bp, Artificial Sequence
  Description of Artificial Sequence: Synthetic oligonucleotide
tcgatggtgcagggtcgggtg

SEQ ID NO: 24695 - DNA, 21 bp, Artificial Sequence
  Description of Artificial Sequence: Synthetic oligonucleotide
tcgatgtatgctgctggtagt

SEQ ID NO: 24696 - DNA, 21 bp, Artificial Sequence
  Description of Artificial Sequence: Synthetic oligonucleotide
tctatgtatgatccgcgtgct

SEQ ID NO: 24697 - DNA, 21 bp, Artificial Sequence
  Description of Artificial Sequence: Synthetic oligonucleotide
agtaatgcggcgattccgttg

SEQ ID NO: 24698 - DNA, 21 bp, Artificial Sequence
  Description of Artificial Sequence: Synthetic oligonucleotide
tctaatgctcttaatattggt

SEQ ID NO: 24699 - DNA, 21 bp, Artificial Sequence
  Description of Artificial Sequence: Synthetic oligonucleotide
tctaatgcgagggcgcctgtt

SEQ ID NO: 24700 - DNA, 21 bp, Artificial Sequence
  Description of Artificial Sequence: Synthetic oligonucleotide
tcgaatgctaggccgccgtcg

SEQ ID NO: 24701 - DNA, 21 bp, Artificial Sequence
  Description of Artificial Sequence: Synthetic oligonucleotide
tctaatgcgtctcatagtgtg

SEQ ID NO: 24702 - DNA, 21 bp, Artificial Sequence
  Description of Artificial Sequence: Synthetic oligonucleotide
tctaatgcgagtatgatgcat

SEQ ID NO: 24703 - DNA, 21 bp, Artificial Sequence
  Description of Artificial Sequence: Synthetic oligonucleotide
tcgaatgctacgacgcctacg

SEQ ID NO: 24704 - DNA, 21 bp, Artificial Sequence
  Description of Artificial Sequence: Synthetic oligonucleotide
tctaattgtcctaaggattgt

SEQ ID NO: 24705 - DNA, 21 bp, Artificial Sequence
  Description of Artificial Sequence: Synthetic oligonucleotide
agtaattgttcttcgcttaag

SEQ ID NO: 24706 - DNA, 21 bp, Artificial Sequence
  Description of Artificial Sequence: Synthetic oligonucleotide
tctaatgagaatcggagttcg

SEQ ID NO: 24707 - DNA, 21 bp, Artificial Sequence
  Description of Artificial Sequence: Synthetic oligonucleotide
tcgaatgagaggacgactaat

SEQ ID NO: 24708 - DNA, 21 bp, Artificial Sequence
  Description of Artificial Sequence: Synthetic oligonucleotide
agtaattttactgaggcgatg

SEQ ID NO: 24709 - DNA, 21 bp, Artificial Sequence
  Description of Artificial Sequence: Synthetic oligonucleotide
tctaatggtcatgatgcttct

SEQ ID NO: 24710 - DNA, 21 bp, Artificial Sequence
  Description of Artificial Sequence: Synthetic oligonucleotide
tctaatggtcatcctccttgg

SEQ ID NO: 24711 - DNA, 21 bp, Artificial Sequence
  Description of Artificial Sequence: Synthetic oligonucleotide
tctaatgggattgattctggg

SEQ ID NO: 24712 - DNA, 21 bp, Artificial Sequence
  Description of Artificial Sequence: Synthetic oligonucleotide
tcgaatggtctgaatcgtctt

SEQ ID NO: 24713 - DNA, 21 bp, Artificial Sequence
  Description of Artificial Sequence: Synthetic oligonucleotide
tctaatggtaatcgtgattcg

SEQ ID NO: 24714 - DNA, 21 bp, Artificial Sequence
  Description of Artificial Sequence: Synthetic oligonucleotide
tcgaatggtcagacttcgcct

SEQ ID NO: 24715 - DNA, 21 bp, Artificial Sequence
  Description of Artificial Sequence: Synthetic oligonucleotide
agtaatggttcgaaggttgtg

SEQ ID NO: 24716 - DNA, 21 bp, Artificial Sequence
  Description of Artificial Sequence: Synthetic oligonucleotide
agtaatggttctccgaaggcg

SEQ ID NO: 24717 - DNA, 21 bp, Artificial Sequence
  Description of Artificial Sequence: Synthetic oligonucleotide
agtaatggtagtacgtataag

SEQ ID NO: 24718 - DNA, 21 bp, Artificial Sequence
  Description of Artificial Sequence: Synthetic oligonucleotide
tctaatggtacgaggtcgtat

SEQ ID NO: 24719 - DNA, 21 bp, Artificial Sequence
  Description of Artificial Sequence: Synthetic oligonucleotide
tctaatcatgcgcatagtctt

SEQ ID NO: 24720 - DNA, 21 bp, Artificial Sequence
  Description of Artificial Sequence: Synthetic oligonucleotide
tcgaatcatgagattgattat

SEQ ID NO: 24721 - DNA, 21 bp, Artificial Sequence
  Description of Artificial Sequence: Synthetic oligonucleotide
tctaatcatggtggggtttcg

SEQ ID NO: 24722 - DNA, 21 bp, Artificial Sequence
  Description of Artificial Sequence: Synthetic oligonucleotide
agtaatattgggggtgggtat

SEQ ID NO: 24723 - DNA, 21 bp, Artificial Sequence
  Description of Artificial Sequence: Synthetic oligonucleotide
tcgaatattctgcaggcgact

SEQ ID NO: 24724 - DNA, 21 bp, Artificial Sequence
  Description of Artificial Sequence: Synthetic oligonucleotide
agtaataaggctgcttatgcg

SEQ ID NO: 24725 - DNA, 21 bp, Artificial Sequence
  Description of Artificial Sequence: Synthetic oligonucleotide
tctaataagtttgttactgcg

SEQ ID NO: 24726 - DNA, 21 bp, Artificial Sequence
  Description of Artificial Sequence: Synthetic oligonucleotide
agtaataagggtttgactggg

SEQ ID NO: 24727 - DNA, 21 bp, Artificial Sequence
  Description of Artificial Sequence: Synthetic oligonucleotide
tcgaataagggtcctgtgacg

SEQ ID NO: 24728 - DNA, 21 bp, Artificial Sequence
  Description of Artificial Sequence: Synthetic oligonucleotide
agtaataagtataatgaggtt

SEQ ID NO: 24729 - DNA, 21 bp, Artificial Sequence
  Description of Artificial Sequence: Synthetic oligonucleotide
tcgaatctggagacgtcgcgt

SEQ ID NO: 24730 - DNA, 21 bp, Artificial Sequence
  Description of Artificial Sequence: Synthetic oligonucleotide
tcgaatctggggtttcctgcg

SEQ ID NO: 24731 - DNA, 21 bp, Artificial Sequence
  Description of Artificial Sequence: Synthetic oligonucleotide
agtaatctgggtatttcggct

SEQ ID NO: 24732 - DNA, 21 bp, Artificial Sequence
  Description of Artificial Sequence: Synthetic oligonucleotide
tcgaatcttttgcatgcttct

SEQ ID NO: 24733 - DNA, 21 bp, Artificial Sequence
  Description of Artificial Sequence: Synthetic oligonucleotide
agtaatttgtctcctgagcag

SEQ ID NO: 24734 - DNA, 21 bp, Artificial Sequence
  Description of Artificial Sequence: Synthetic oligonucleotide
tctaatctgacgatgagtaat

SEQ ID NO: 24735 - DNA, 21 bp, Artificial Sequence
  Description of Artificial Sequence: Synthetic oligonucleotide
agtaatatggatacgtctaag

SEQ ID NO: 24736 - DNA, 21 bp, Artificial Sequence
  Description of Artificial Sequence: Synthetic oligonucleotide
tcgaatatgatgctttctgag

SEQ ID NO: 24737 - DNA, 21 bp, Artificial Sequence
  Description of Artificial Sequence: Synthetic oligonucleotide
agtaatatgtcggtgtcgggt

SEQ ID NO: 24738 - DNA, 21 bp, Artificial Sequence
  Description of Artificial Sequence: Synthetic oligonucleotide
agtaatatggttcctatgtct

SEQ ID NO: 24739 - DNA, 21 bp, Artificial Sequence
  Description of Artificial Sequence: Synthetic oligonucleotide
agtaataatggggagcatgtg

SEQ ID NO: 24740 - DNA, 21 bp, Artificial Sequence
  Description of Artificial Sequence: Synthetic oligonucleotide
agtaataatcagcgtgttgtg

SEQ ID NO: 24741 - DNA, 21 bp, Artificial Sequence
  Description of Artificial Sequence: Synthetic oligonucleotide
tctaatcctgcgctgagtcgt

SEQ ID NO: 24742 - DNA, 21 bp, Artificial Sequence
  Description of Artificial Sequence: Synthetic oligonucleotide
tcgaatcctgcttcttatgtg

SEQ ID NO: 24743 - DNA, 21 bp, Artificial Sequence
  Description of Artificial Sequence: Synthetic oligonucleotide
agtaatccgcttaggacgttg

SEQ ID NO: 24744 - DNA, 21 bp, Artificial Sequence
  Description of Artificial Sequence: Synthetic oligonucleotide
tctaatccgatgacgcttact

SEQ ID NO: 24745 - DNA, 21 bp, Artificial Sequence
  Description of Artificial Sequence: Synthetic oligonucleotide
tcgaatccgcctcctttgtcg

SEQ ID NO: 24746 - DNA, 21 bp, Artificial Sequence
  Description of Artificial Sequence: Synthetic oligonucleotide
agtaatcctcctgtgcagaag

SEQ ID NO: 24747 - DNA, 21 bp, Artificial Sequence
  Description of Artificial Sequence: Synthetic oligonucleotide
tcgaatccgagtgcggcgcct

SEQ ID NO: 24748 - DNA, 21 bp, Artificial Sequence
  Description of Artificial Sequence: Synthetic oligonucleotide
tcgaatcagcagggtatggcg

SEQ ID NO: 24749 - DNA, 21 bp, Artificial Sequence
  Description of Artificial Sequence: Synthetic oligonucleotide
tcgaatcagagtcctccgccg

SEQ ID NO: 24750 - DNA, 21 bp, Artificial Sequence
  Description of Artificial Sequence: Synthetic oligonucleotide
tcgaatagtgggcgggctccg

SEQ ID NO: 24751 - DNA, 21 bp, Artificial Sequence
  Description of Artificial Sequence: Synthetic oligonucleotide
tctaattcgcattctccggag

SEQ ID NO: 24752 - DNA, 21 bp, Artificial Sequence
  Description of Artificial Sequence: Synthetic oligonucleotide
tcgaattcgatttctgctgcg

SEQ ID NO: 24753 - DNA, 21 bp, Artificial Sequence
  Description of Artificial Sequence: Synthetic oligonucleotide
tctaattcgcttcctgtgatg

SEQ ID NO: 24754 - DNA, 21 bp, Artificial Sequence
  Description of Artificial Sequence: Synthetic oligonucleotide
tctaatagtcctcgtgggtat

SEQ ID NO: 24755 - DNA, 21 bp, Artificial Sequence
  Description of Artificial Sequence: Synthetic oligonucleotide
tcgaattcgcagcctaatgtg

SEQ ID NO: 24756 - DNA, 21 bp, Artificial Sequence
  Description of Artificial Sequence: Synthetic oligonucleotide
tcgaattcgagggtggcgggg

SEQ ID NO: 24757 - DNA, 21 bp, Artificial Sequence
  Description of Artificial Sequence: Synthetic oligonucleotide
agtaatagttctgctgtgcat

SEQ ID NO: 24758 - DNA, 21 bp, Artificial Sequence
  Description of Artificial Sequence: Synthetic oligonucleotide
tcgaattcgacgattatttat

SEQ ID NO: 24759 - DNA, 21 bp, Artificial Sequence
  Description of Artificial Sequence: Synthetic oligonucleotide
tctaattcttatatgatgctg

SEQ ID NO: 24760 - DNA, 21 bp, Artificial Sequence
  Description of Artificial Sequence: Synthetic oligonucleotide
agtaatactctgagtcagttg

SEQ ID NO: 24761 - DNA, 21 bp, Artificial Sequence
  Description of Artificial Sequence: Synthetic oligonucleotide
agtaatactaatctttctgag

SEQ ID NO: 24762 - DNA, 21 bp, Artificial Sequence
  Description of Artificial Sequence: Synthetic oligonucleotide
tcgaatactactgctgctgtg

SEQ ID NO: 24763 - DNA, 21 bp, Artificial Sequence
  Description of Artificial Sequence: Synthetic oligonucleotide
tcgaatgttgcgattgttcag

SEQ ID NO: 24764 - DNA, 21 bp, Artificial Sequence
  Description of Artificial Sequence: Synthetic oligonucleotide
agtaatgttgagattatggag

SEQ ID NO: 24765 - DNA, 21 bp, Artificial Sequence
  Description of Artificial Sequence: Synthetic oligonucleotide
tcgaatgtgggtactcatttt

SEQ ID NO: 24766 - DNA, 21 bp, Artificial Sequence
  Description of Artificial Sequence: Synthetic oligonucleotide
tcgaatgtgcattctctgcat

SEQ ID NO: 24767 - DNA, 21 bp, Artificial Sequence
  Description of Artificial Sequence: Synthetic oligonucleotide
agtaatgttaatggtgctgat

SEQ ID NO: 24768 - DNA, 21 bp, Artificial Sequence
  Description of Artificial Sequence: Synthetic oligonucleotide
tctaatgttagggaggttgcg

SEQ ID NO: 24769 - DNA, 21 bp, Artificial Sequence
  Description of Artificial Sequence: Synthetic oligonucleotide
tcgaatgttagtccgcggcct

SEQ ID NO: 24770 - DNA, 21 bp, Artificial Sequence
  Description of Artificial Sequence: Synthetic oligonucleotide
tcgaatgtggtggtgctgcat

SEQ ID NO: 24771 - DNA, 21 bp, Artificial Sequence
  Description of Artificial Sequence: Synthetic oligonucleotide
tcgaattattcgctgaatcat

SEQ ID NO: 24772 - DNA, 21 bp, Artificial Sequence
  Description of Artificial Sequence: Synthetic oligonucleotide
tctccggcggctgagattaag

SEQ ID NO: 24773 - DNA, 21 bp, Artificial Sequence
  Description of Artificial Sequence: Synthetic oligonucleotide
agtcctgctctgaatcggagt

SEQ ID NO: 24774 - DNA, 21 bp, Artificial Sequence
  Description of Artificial Sequence: Synthetic oligonucleotide
tctccggcgaatcagtatgat

SEQ ID NO: 24775 - DNA, 21 bp, Artificial Sequence
  Description of Artificial Sequence: Synthetic oligonucleotide
agtccggcgccgtatgctctt

SEQ ID NO: 24776 - DNA, 21 bp, Artificial Sequence
  Description of Artificial Sequence: Synthetic oligonucleotide
tctcctgctcagtctgatgat

SEQ ID NO: 24777 - DNA, 21 bp, Artificial Sequence
  Description of Artificial Sequence: Synthetic oligonucleotide
tcgcctgcgcgggctgggtat

SEQ ID NO: 24778 - DNA, 21 bp, Artificial Sequence
  Description of Artificial Sequence: Synthetic oligonucleotide
agtccggcgcggaatttgatt

SEQ ID NO: 24779 - DNA, 21 bp, Artificial Sequence
  Description of Artificial Sequence: Synthetic oligonucleotide
tctcctgcgtctcatcatcgt

SEQ ID NO: 24780 - DNA, 21 bp, Artificial Sequence
  Description of Artificial Sequence: Synthetic oligonucleotide
tctccggctgtggggtgtcat

SEQ ID NO: 24781 - DNA, 21 bp, Artificial Sequence
  Description of Artificial Sequence: Synthetic oligonucleotide
tctccgtgtcctggtgatgcg

SEQ ID NO: 24782 - DNA, 21 bp, Artificial Sequence
  Description of Artificial Sequence: Synthetic oligonucleotide
agtccggatttgcctggtttg

SEQ ID NO: 24783 - DNA, 21 bp, Artificial Sequence
  Description of Artificial Sequence: Synthetic oligonucleotide
tctcctgatcttaggacgcct

SEQ ID NO: 24784 - DNA, 21 bp, Artificial Sequence
  Description of Artificial Sequence: Synthetic oligonucleotide
tctcctgatcgtgcgcagctg

SEQ ID NO: 24785 - DNA, 21 bp, Artificial Sequence
  Description of Artificial Sequence: Synthetic oligonucleotide
tcgcctgattcgaatgggccg

SEQ ID NO: 24786 - DNA, 21 bp, Artificial Sequence
  Description of Artificial Sequence: Synthetic oligonucleotide
agtccggatgttgttgtgagt

SEQ ID NO: 24787 - DNA, 21 bp, Artificial Sequence
  Description of Artificial Sequence: Synthetic oligonucleotide
tcgcctgagtttggtacgggt

SEQ ID NO: 24788 - DNA, 21 bp, Artificial Sequence
  Description of Artificial Sequence: Synthetic oligonucleotide
agtcctgagcttcctaaggcg

SEQ ID NO: 24789 - DNA, 21 bp, Artificial Sequence
  Description of Artificial Sequence: Synthetic oligonucleotide
tctcctgagtctcgtatgccg

SEQ ID NO: 24790 - DNA, 21 bp, Artificial Sequence
  Description of Artificial Sequence: Synthetic oligonucleotide
agtccttttgatgcgaatgtg

SEQ ID NO: 24791 - DNA, 21 bp, Artificial Sequence
  Description of Artificial Sequence: Synthetic oligonucleotide
tctccttttccgccgcagctg

SEQ ID NO: 24792 - DNA, 21 bp, Artificial Sequence
  Description of Artificial Sequence: Synthetic oligonucleotide
tctccttttagggatcaggag

SEQ ID NO: 24793 - DNA, 21 bp, Artificial Sequence
  Description of Artificial Sequence: Synthetic oligonucleotide
tcgccttttacgatgcgtcct

SEQ ID NO: 24794 - DNA, 21 bp, Artificial Sequence
  Description of Artificial Sequence: Synthetic oligonucleotide
tcgcctggggatccggcggag

SEQ ID NO: 24795 - DNA, 21 bp, Artificial Sequence
  Description of Artificial Sequence: Synthetic oligonucleotide
tcgccggggggtcatgttagt

SEQ ID NO: 24796 - DNA, 21 bp, Artificial Sequence
  Description of Artificial Sequence: Synthetic oligonucleotide
agtccgggtcatcctccgagt

SEQ ID NO: 24797 - DNA, 21 bp, Artificial Sequence
  Description of Artificial Sequence: Synthetic oligonucleotide
agtcctggtattcgtgatttt

SEQ ID NO: 24798 - DNA, 21 bp, Artificial Sequence
  Description of Artificial Sequence: Synthetic oligonucleotide
tctccgggtatttctaggctg

SEQ ID NO: 24799 - DNA, 21 bp, Artificial Sequence
  Description of Artificial Sequence: Synthetic oligonucleotide
tcgccgggtccgcataagtcg

SEQ ID NO: 24800 - DNA, 21 bp, Artificial Sequence
  Description of Artificial Sequence: Synthetic oligonucleotide
tctcctgggtctggtaagtct

SEQ ID NO: 24801 - DNA, 21 bp, Artificial Sequence
  Description of Artificial Sequence: Synthetic oligonucleotide
tcgcctggttcgccgatgtct

SEQ ID NO: 24802 - DNA, 21 bp, Artificial Sequence
  Description of Artificial Sequence: Synthetic oligonucleotide
tcgccggggactttgccgact

SEQ ID NO: 24803 - DNA, 21 bp, Artificial Sequence
  Description of Artificial Sequence: Synthetic oligonucleotide
agtcctggtgttatgccgggg

SEQ ID NO: 24804 - DNA, 21 bp, Artificial Sequence
  Description of Artificial Sequence: Synthetic oligonucleotide
agtcctcatgatgagacttcg

SEQ ID NO: 24805 - DNA, 21 bp, Artificial Sequence
  Description of Artificial Sequence: Synthetic oligonucleotide
agtcctcatgatagtccgctg

SEQ ID NO: 24806 - DNA, 21 bp, Artificial Sequence
  Description of Artificial Sequence: Synthetic oligonucleotide
tcgccgcatattactcatatg

SEQ ID NO: 24807 - DNA, 21 bp, Artificial Sequence
  Description of Artificial Sequence: Synthetic oligonucleotide
agtccgcataagaatgcgcat

SEQ ID NO: 24808 - DNA, 21 bp, Artificial Sequence
  Description of Artificial Sequence: Synthetic oligonucleotide
tcgcctcatttgcggggtgcg

SEQ ID NO: 24809 - DNA, 21 bp, Artificial Sequence
  Description of Artificial Sequence: Synthetic oligonucleotide
tctccgcatcctgagaatcat

SEQ ID NO: 24810 - DNA, 21 bp, Artificial Sequence
  Description of Artificial Sequence: Synthetic oligonucleotide
tctccgattgagcggcggacg

SEQ ID NO: 24811 - DNA, 21 bp, Artificial Sequence
  Description of Artificial Sequence: Synthetic oligonucleotide
tcgccgattcagacgaattct

SEQ ID NO: 24812 - DNA, 21 bp, Artificial Sequence
  Description of Artificial Sequence: Synthetic oligonucleotide
tctccgattcagactcagggt

SEQ ID NO: 24813 - DNA, 21 bp, Artificial Sequence
  Description of Artificial Sequence: Synthetic oligonucleotide
tcgccgatttctattaagaat

SEQ ID NO: 24814 - DNA, 21 bp, Artificial Sequence
  Description of Artificial Sequence: Synthetic oligonucleotide
tctcctattacgcctggtcgg

SEQ ID NO: 24815 - DNA, 21 bp, Artificial Sequence
  Description of Artificial Sequence: Synthetic oligonucleotide
tcgccgattacgtataatacg

SEQ ID NO: 24816 - DNA, 21 bp, Artificial Sequence
  Description of Artificial Sequence: Synthetic oligonucleotide
agtccgaagattccgacgcat

SEQ ID NO: 24817 - DNA, 21 bp, Artificial Sequence
  Description of Artificial Sequence: Synthetic oligonucleotide
tcgcctaagattccttggact

SEQ ID NO: 24818 - DNA, 21 bp, Artificial Sequence
  Description of Artificial Sequence: Synthetic oligonucleotide
tctcctaagatgctgaggtcg

SEQ ID NO: 24819 - DNA, 21 bp, Artificial Sequence
  Description of Artificial Sequence: Synthetic oligonucleotide
tcgccgaaggttgcgggtgtg

SEQ ID NO: 24820 - DNA, 21 bp, Artificial Sequence
  Description of Artificial Sequence: Synthetic oligonucleotide
tcgccgctggcggaggctcgt

SEQ ID NO: 24821 - DNA, 21 bp, Artificial Sequence
  Description of Artificial Sequence: Synthetic oligonucleotide
agtccgctggctactcgggtt

SEQ ID NO: 24822 - DNA, 21 bp, Artificial Sequence
  Description of Artificial Sequence: Synthetic oligonucleotide
agtcctcttattgtgaatact

SEQ ID NO: 24823 - DNA, 21 bp, Artificial Sequence
  Description of Artificial Sequence: Synthetic oligonucleotide
tctccgttgcttttggcgagt

SEQ ID NO: 24824 - DNA, 21 bp, Artificial Sequence
  Description of Artificial Sequence: Synthetic oligonucleotide
agtcctcttccgccttctaat

SEQ ID NO: 24825 - DNA, 21 bp, Artificial Sequence
  Description of Artificial Sequence: Synthetic oligonucleotide
tcgcctcttcgtgagcgtgtt

SEQ ID NO: 24826 - DNA, 21 bp, Artificial Sequence
  Description of Artificial Sequence: Synthetic oligonucleotide
tcgccgttgcgttctgatgtg

SEQ ID NO: 24827 - DNA, 21 bp, Artificial Sequence
  Description of Artificial Sequence: Synthetic oligonucleotide
agtccgctgacggatctttct

SEQ ID NO: 24828 - DNA, 21 bp, Artificial Sequence
  Description of Artificial Sequence: Synthetic oligonucleotide
agtcctcttactgattcgtat

SEQ ID NO: 24829 - DNA, 21 bp, Artificial Sequence
  Description of Artificial Sequence: Synthetic oligonucleotide
tcgcctctgacgacggtgcct

SEQ ID NO: 24830 - DNA, 21 bp, Artificial Sequence
  Description of Artificial Sequence: Synthetic oligonucleotide
tctccgttggtttcgactgct

SEQ ID NO: 24831 - DNA, 21 bp, Artificial Sequence
  Description of Artificial Sequence: Synthetic oligonucleotide
agtccgatgaaggcgggtacg

SEQ ID NO: 24832 - DNA, 21 bp, Artificial Sequence
  Description of Artificial Sequence: Synthetic oligonucleotide
tcgcctatgcggattgagcct

SEQ ID NO: 24833 - DNA, 21 bp, Artificial Sequence
  Description of Artificial Sequence: Synthetic oligonucleotide
tcgcctatgcgtccgcaggag

SEQ ID NO: 24834 - DNA, 21 bp, Artificial Sequence
  Description of Artificial Sequence: Synthetic oligonucleotide
tctccgaatgctcttctggat

SEQ ID NO: 24835 - DNA, 21 bp, Artificial Sequence
  Description of Artificial Sequence: Synthetic oligonucleotide
agtccgaatgctactactgat

SEQ ID NO: 24836 - DNA, 21 bp, Artificial Sequence
  Description of Artificial Sequence: Synthetic oligonucleotide
agtccgaatatggatcggctt

SEQ ID NO: 24837 - DNA, 21 bp, Artificial Sequence
  Description of Artificial Sequence: Synthetic oligonucleotide
tcgcctaatatgggtcagttt

SEQ ID NO: 24838 - DNA, 21 bp, Artificial Sequence
  Description of Artificial Sequence: Synthetic oligonucleotide
agtccgaatcgggagtctatg

SEQ ID NO: 24839 - DNA, 21 bp, Artificial Sequence
  Description of Artificial Sequence: Synthetic oligonucleotide
tctccgaatacgccgacgttt

SEQ ID NO: 24840 - DNA, 21 bp, Artificial Sequence
  Description of Artificial Sequence: Synthetic oligonucleotide
agtcctaatactaggactgct

SEQ ID NO: 24841 - DNA, 21 bp, Artificial Sequence
  Description of Artificial Sequence: Synthetic oligonucleotide
tctcctccgaattttcctgag

SEQ ID NO: 24842 - DNA, 21 bp, Artificial Sequence
  Description of Artificial Sequence: Synthetic oligonucleotide
tcgcctcctcaggctaatgct

SEQ ID NO: 24843 - DNA, 21 bp, Artificial Sequence
  Description of Artificial Sequence: Synthetic oligonucleotide
agtccgcctcaggtgactaag

SEQ ID NO: 24844 - DNA, 21 bp, Artificial Sequence
  Description of Artificial Sequence: Synthetic oligonucleotide
tctcctccgaggaatatggag

SEQ ID NO: 24845 - DNA, 21 bp, Artificial Sequence
  Description of Artificial Sequence: Synthetic oligonucleotide
agtccgccgcgtgtggggttg

SEQ ID NO: 24846 - DNA, 21 bp, Artificial Sequence
  Description of Artificial Sequence: Synthetic oligonucleotide
agtccgcctactgctcgtgat

SEQ ID NO: 24847 - DNA, 21 bp, Artificial Sequence
  Description of Artificial Sequence: Synthetic oligonucleotide
agtccgccggtgtcgtttgag

SEQ ID NO: 24848 - DNA, 21 bp, Artificial Sequence
  Description of Artificial Sequence: Synthetic oligonucleotide
agtccgcagggtaatggtgcg

SEQ ID NO: 24849 - DNA, 21 bp, Artificial Sequence
  Description of Artificial Sequence: Synthetic oligonucleotide
tctcctcagggtacttatgtg

SEQ ID NO: 24850 - DNA, 21 bp, Artificial Sequence
  Description of Artificial Sequence: Synthetic oligonucleotide
agtccgcagattacgcgtccg

SEQ ID NO: 24851 - DNA, 21 bp, Artificial Sequence
  Description of Artificial Sequence: Synthetic oligonucleotide
tcgcctcagaggattgaggat

SEQ ID NO: 24852 - DNA, 21 bp, Artificial Sequence
  Description of Artificial Sequence: Synthetic oligonucleotide
tctccgcagcgtccgatgaat

SEQ ID NO: 24853 - DNA, 21 bp, Artificial Sequence
  Description of Artificial Sequence: Synthetic oligonucleotide
tctccgagggctcgtattgat

SEQ ID NO: 24854 - DNA, 21 bp, Artificial Sequence
  Description of Artificial Sequence: Synthetic oligonucleotide
agtcctcgggatcctgagatt

SEQ ID NO: 24855 - DNA, 21 bp, Artificial Sequence
  Description of Artificial Sequence: Synthetic oligonucleotide
tcgcctcgtgagtgtggtctg

SEQ ID NO: 24856 - DNA, 21 bp, Artificial Sequence
  Description of Artificial Sequence: Synthetic oligonucleotide
tcgccgaggggtatggggttg

SEQ ID NO: 24857 - DNA, 21 bp, Artificial Sequence
  Description of Artificial Sequence: Synthetic oligonucleotide
tcgccgcgtggtatgccgctt

SEQ ID NO: 24858 - DNA, 21 bp, Artificial Sequence
  Description of Artificial Sequence: Synthetic oligonucleotide
tcgccgaggcataatcttggt

SEQ ID NO: 24859 - DNA, 21 bp, Artificial Sequence
  Description of Artificial Sequence: Synthetic oligonucleotide
tctcctcgtattagggatgat

SEQ ID NO: 24860 - DNA, 21 bp, Artificial Sequence
  Description of Artificial Sequence: Synthetic oligonucleotide
agtccgcgtccgtcgtatgct

SEQ ID NO: 24861 - DNA, 21 bp, Artificial Sequence
  Description of Artificial Sequence: Synthetic oligonucleotide
tctccgcggcagttgtctgtt

SEQ ID NO: 24862 - DNA, 21 bp, Artificial Sequence
  Description of Artificial Sequence: Synthetic oligonucleotide
tctccgcggcagaatattccg

SEQ ID NO: 24863 - DNA, 21 bp, Artificial Sequence
  Description of Artificial Sequence: Synthetic oligonucleotide
tctcctcggcagagtatttcg

SEQ ID NO: 24864 - DNA, 21 bp, Artificial Sequence
  Description of Artificial Sequence: Synthetic oligonucleotide
tcgcctcggactgcgcttcct

SEQ ID NO: 24865 - DNA, 21 bp, Artificial Sequence
  Description of Artificial Sequence: Synthetic oligonucleotide
tctcctaggacgggtttgggt

SEQ ID NO: 24866 - DNA, 21 bp, Artificial Sequence
  Description of Artificial Sequence: Synthetic oligonucleotide
tctcctcgttggcatgaggat

SEQ ID NO: 24867 - DNA, 21 bp, Artificial Sequence
  Description of Artificial Sequence: Synthetic oligonucleotide
agtccgtctgctcttttgcat

SEQ ID NO: 24868 - DNA, 21 bp, Artificial Sequence
  Description of Artificial Sequence: Synthetic oligonucleotide
tctccgtcggcgatggggatt

SEQ ID NO: 24869 - DNA, 21 bp, Artificial Sequence
  Description of Artificial Sequence: Synthetic oligonucleotide
agtccttcggggaataatggg

SEQ ID NO: 24870 - DNA, 21 bp, Artificial Sequence
  Description of Artificial Sequence: Synthetic oligonucleotide
agtccttcgggtccggtgagg

SEQ ID NO: 24871 - DNA, 21 bp, Artificial Sequence
  Description of Artificial Sequence: Synthetic oligonucleotide
tcgccttcgggttcgttggcg

SEQ ID NO: 24872 - DNA, 21 bp, Artificial Sequence
  Description of Artificial Sequence: Synthetic oligonucleotide
tcgcctagtggggtggcgggg

SEQ ID NO: 24873 - DNA, 21 bp, Artificial Sequence
  Description of Artificial Sequence: Synthetic oligonucleotide
tctccttctctgtcgcggtcg

SEQ ID NO: 24874 - DNA, 21 bp, Artificial Sequence
  Description of Artificial Sequence: Synthetic oligonucleotide
tcgccttcgctgacggctggg

SEQ ID NO: 24875 - DNA, 21 bp, Artificial Sequence
  Description of Artificial Sequence: Synthetic oligonucleotide
agtccgtcgcttacgagtgat

SEQ ID NO: 24876 - DNA, 21 bp, Artificial Sequence
  Description of Artificial Sequence: Synthetic oligonucleotide
tctcctagtatgcctgctcgt

SEQ ID NO: 24877 - DNA, 21 bp, Artificial Sequence
  Description of Artificial Sequence: Synthetic oligonucleotide
tctccgagtaggcatgagatt

SEQ ID NO: 24878 - DNA, 21 bp, Artificial Sequence
  Description of Artificial Sequence: Synthetic oligonucleotide
tcgccgagtcggatgaatagt

SEQ ID NO: 24879 - DNA, 21 bp, Artificial Sequence
  Description of Artificial Sequence: Synthetic oligonucleotide
tctccttctaggcctagtacg

SEQ ID NO: 24880 - DNA, 21 bp, Artificial Sequence
  Description of Artificial Sequence: Synthetic oligonucleotide
agtccgtctaggacgtctttg

SEQ ID NO: 24881 - DNA, 21 bp, Artificial Sequence
  Description of Artificial Sequence: Synthetic oligonucleotide
agtccgagtagtcttaaggag

SEQ ID NO: 24882 - DNA, 21 bp, Artificial Sequence
  Description of Artificial Sequence: Synthetic oligonucleotide
tctccgtctacgggtaagttg

SEQ ID NO: 24883 - DNA, 21 bp, Artificial Sequence
  Description of Artificial Sequence: Synthetic oligonucleotide
tctccgtctactcttccgcct

SEQ ID NO: 24884 - DNA, 21 bp, Artificial Sequence
  Description of Artificial Sequence: Synthetic oligonucleotide
agtccgagtactaataatacg

SEQ ID NO: 24885 - DNA, 21 bp, Artificial Sequence
  Description of Artificial Sequence: Synthetic oligonucleotide
agtccgtcgactcggatgggg

SEQ ID NO: 24886 - DNA, 21 bp, Artificial Sequence
  Description of Artificial Sequence: Synthetic oligonucleotide
tctccgagtgttgcgtatcat

SEQ ID NO: 24887 - DNA, 21 bp, Artificial Sequence
  Description of Artificial Sequence: Synthetic oligonucleotide
tcgccgagtgttgagttgttt

SEQ ID NO: 24888 - DNA, 21 bp, Artificial Sequence
  Description of Artificial Sequence: Synthetic oligonucleotide
tcgccgacggctaagatgtgg

SEQ ID NO: 24889 - DNA, 21 bp, Artificial Sequence
  Description of Artificial Sequence: Synthetic oligonucleotide
agtcctacttgtgtggcgtgt

SEQ ID NO: 24890 - DNA, 21 bp, Artificial Sequence
  Description of Artificial Sequence: Synthetic oligonucleotide
tctcctacggattttatgaat

SEQ ID NO: 24891 - DNA, 21 bp, Artificial Sequence
  Description of Artificial Sequence: Synthetic oligonucleotide
agtccgacgtttgttgggact

SEQ ID NO: 24892 - DNA, 21 bp, Artificial Sequence
  Description of Artificial Sequence: Synthetic oligonucleotide
tctcctactggtgtgcagccg

SEQ ID NO: 24893 - DNA, 21 bp, Artificial Sequence
  Description of Artificial Sequence: Synthetic oligonucleotide
tcgcctacgattactgctcgg

SEQ ID NO: 24894 - DNA, 21 bp, Artificial Sequence
  Description of Artificial Sequence: Synthetic oligonucleotide
tctccgacgctttcgccgggg

SEQ ID NO: 24895 - DNA, 21 bp, Artificial Sequence
  Description of Artificial Sequence: Synthetic oligonucleotide
tcgcctactcggaatattgtt

SEQ ID NO: 24896 - DNA, 21 bp, Artificial Sequence
  Description of Artificial Sequence: Synthetic oligonucleotide
tcgcctacttcttctgtgact

SEQ ID NO: 24897 - DNA, 21 bp, Artificial Sequence
  Description of Artificial Sequence: Synthetic oligonucleotide
agtcctactacgcagaggact

SEQ ID NO: 24898 - DNA, 21 bp, Artificial Sequence
  Description of Artificial Sequence: Synthetic oligonucleotide
tctccgactgttaatcctatt

SEQ ID NO: 24899 - DNA, 21 bp, Artificial Sequence
  Description of Artificial Sequence: Synthetic oligonucleotide
tcgccgacggttgttctggcg

SEQ ID NO: 24900 - DNA, 21 bp, Artificial Sequence
  Description of Artificial Sequence: Synthetic oligonucleotide
tcgccgacttatactattgat

SEQ ID NO: 24901 - DNA, 21 bp, Artificial Sequence
  Description of Artificial Sequence: Synthetic oligonucleotide
agtcctgttgctaggaataat

SEQ ID NO: 24902 - DNA, 21 bp, Artificial Sequence
  Description of Artificial Sequence: Synthetic oligonucleotide
tcgcctgttggtgggaaggat

SEQ ID NO: 24903 - DNA, 21 bp, Artificial Sequence
  Description of Artificial Sequence: Synthetic oligonucleotide
tcgccggttggttcgtctggt

SEQ ID NO: 24904 - DNA, 21 bp, Artificial Sequence
  Description of Artificial Sequence: Synthetic oligonucleotide
tctcctgtgatgcttcagtct

SEQ ID NO: 24905 - DNA, 21 bp, Artificial Sequence
  Description of Artificial Sequence: Synthetic oligonucleotide
agtcctgttcgtcatccgtct

SEQ ID NO: 24906 - DNA, 21 bp, Artificial Sequence
  Description of Artificial Sequence: Synthetic oligonucleotide
tctcctgttagtgataatcct

SEQ ID NO: 24907 - DNA, 21 bp, Artificial Sequence
  Description of Artificial Sequence: Synthetic oligonucleotide
tcgcctgtggtggcgcagccg

SEQ ID NO: 24908 - DNA, 21 bp, Artificial Sequence
  Description of Artificial Sequence: Synthetic oligonucleotide
tcgcctgtggttccgcgtgct

SEQ ID NO: 24909 - DNA, 21 bp, Artificial Sequence
  Description of Artificial Sequence: Synthetic oligonucleotide
agtccgtatggtcatcagaat

SEQ ID NO: 24910 - DNA, 21 bp, Artificial Sequence
  Description of Artificial Sequence: Synthetic oligonucleotide
tctccttataagcagaattct

SEQ ID NO: 24911 - DNA, 21 bp, Artificial Sequence
  Description of Artificial Sequence: Synthetic oligonucleotide
tcgccgtataatattacttcg

SEQ ID NO: 24912 - DNA, 21 bp, Artificial Sequence
  Description of Artificial Sequence: Synthetic oligonucleotide
tcgccttatcctgcgcttctt

SEQ ID NO: 24913 - DNA, 21 bp, Artificial Sequence
  Description of Artificial Sequence: Synthetic oligonucleotide
tctcaggctggtgcgattcct

SEQ ID NO: 24914 - DNA, 21 bp, Artificial Sequence
  Description of Artificial Sequence: Synthetic oligonucleotide
tctcaggcgatgcagacgttg

SEQ ID NO: 24915 - DNA, 21 bp, Artificial Sequence
  Description of Artificial Sequence: Synthetic oligonucleotide
agtcaggctcctagggatcct

SEQ ID NO: 24916 - DNA, 21 bp, Artificial Sequence
  Description of Artificial Sequence: Synthetic oligonucleotide
agtcaggcgactggtcgttcg

SEQ ID NO: 24917 - DNA, 21 bp, Artificial Sequence
  Description of Artificial Sequence: Synthetic oligonucleotide
tctcaggctacgcagcataat

SEQ ID NO: 24918 - DNA, 21 bp, Artificial Sequence
  Description of Artificial Sequence: Synthetic oligonucleotide
agtcaggctgttcctccgagt

SEQ ID NO: 24919 - DNA, 21 bp, Artificial Sequence
  Description of Artificial Sequence: Synthetic oligonucleotide
tcgcaggatatgtatcggggt

SEQ ID NO: 24920 - DNA, 21 bp, Artificial Sequence
  Description of Artificial Sequence: Synthetic oligonucleotide
tcgcaggataatgttcaggag

SEQ ID NO: 24921 - DNA, 21 bp, Artificial Sequence
  Description of Artificial Sequence: Synthetic oligonucleotide
tcgcaggattggaatcttact

SEQ ID NO: 24922 - DNA, 21 bp, Artificial Sequence
  Description of Artificial Sequence: Synthetic oligonucleotide
tcgcaggagctgcctgggtcg

SEQ ID NO: 24923 - DNA, 21 bp, Artificial Sequence
  Description of Artificial Sequence: Synthetic oligonucleotide
tctcaggagtcgtatatggat

SEQ ID NO: 24924 - DNA, 21 bp, Artificial Sequence
  Description of Artificial Sequence: Synthetic oligonucleotide
agtcagtttgaggctcggccg

SEQ ID NO: 24925 - DNA, 21 bp, Artificial Sequence
  Description of Artificial Sequence: Synthetic oligonucleotide
agtcagtttaagccgacgttt

SEQ ID NO: 24926 - DNA, 21 bp, Artificial Sequence
  Description of Artificial Sequence: Synthetic oligonucleotide
tctcagtttcttgcggatatt

SEQ ID NO: 24927 - DNA, 21 bp, Artificial Sequence
  Description of Artificial Sequence: Synthetic oligonucleotide
agtcagggtgcgcgtaatgat

SEQ ID NO: 24928 - DNA, 21 bp, Artificial Sequence
  Description of Artificial Sequence: Synthetic oligonucleotide
tcgcagggttttaattcgagt

SEQ ID NO: 24929 - DNA, 21 bp, Artificial Sequence
  Description of Artificial Sequence: Synthetic oligonucleotide
agtcaggggcatgctcttcct

SEQ ID NO: 24930 - DNA, 21 bp, Artificial Sequence
  Description of Artificial Sequence: Synthetic oligonucleotide
tcgcagggtagtgttcagggt

SEQ ID NO: 24931 - DNA, 21 bp, Artificial Sequence
  Description of Artificial Sequence: Synthetic oligonucleotide
tctcagggtgtgagggttggg

SEQ ID NO: 24932 - DNA, 21 bp, Artificial Sequence
  Description of Artificial Sequence: Synthetic oligonucleotide
tcgcagcatctttctgttaat

SEQ ID NO: 24933 - DNA, 21 bp, Artificial Sequence
  Description of Artificial Sequence: Synthetic oligonucleotide
tctcagcatccgattagggag

SEQ ID NO: 24934 - DNA, 21 bp, Artificial Sequence
  Description of Artificial Sequence: Synthetic oligonucleotide
agtcagcatccgccgggtgat

SEQ ID NO: 24935 - DNA, 21 bp, Artificial Sequence
  Description of Artificial Sequence: Synthetic oligonucleotide
tctcagcatcgtgatcatccg

SEQ ID NO: 24936 - DNA, 21 bp, Artificial Sequence
  Description of Artificial Sequence: Synthetic oligonucleotide
tcgcagcatgttgcgtctcct

SEQ ID NO: 24937 - DNA, 21 bp, Artificial Sequence
  Description of Artificial Sequence: Synthetic oligonucleotide
tctcagattagttgtgggctt

SEQ ID NO: 24938 - DNA, 21 bp, Artificial Sequence
  Description of Artificial Sequence: Synthetic oligonucleotide
agtcagaagccgatggttgcg

SEQ ID NO: 24939 - DNA, 21 bp, Artificial Sequence
  Description of Artificial Sequence: Synthetic oligonucleotide
tctcagaagtctcatgggaat

SEQ ID NO: 24940 - DNA, 21 bp, Artificial Sequence
  Description of Artificial Sequence: Synthetic oligonucleotide
tctcagcttgatattaatggg

SEQ ID NO: 24941 - DNA, 21 bp, Artificial Sequence
  Description of Artificial Sequence: Synthetic oligonucleotide
tctcagatggatgatactttg

SEQ ID NO: 24942 - DNA, 21 bp, Artificial Sequence
  Description of Artificial Sequence: Synthetic oligonucleotide
agtcagatgcttccggctccg

SEQ ID NO: 24943 - DNA, 21 bp, Artificial Sequence
  Description of Artificial Sequence: Synthetic oligonucleotide
tctcagatgcttactgggccg

SEQ ID NO: 24944 - DNA, 21 bp, Artificial Sequence
  Description of Artificial Sequence: Synthetic oligonucleotide
tcgcagatgcgtgagccggtg

SEQ ID NO: 24945 - DNA, 21 bp, Artificial Sequence
  Description of Artificial Sequence: Synthetic oligonucleotide
tctcagaatttggtgattagt

SEQ ID NO: 24946 - DNA, 21 bp, Artificial Sequence
  Description of Artificial Sequence: Synthetic oligonucleotide
tcgcagaattctttgtcggag

SEQ ID NO: 24947 - DNA, 21 bp, Artificial Sequence
  Description of Artificial Sequence: Synthetic oligonucleotide
tctcagaatactgggcagaat

SEQ ID NO: 24948 - DNA, 21 bp, Artificial Sequence
  Description of Artificial Sequence: Synthetic oligonucleotide
agtcagcctcattttgcgtct

SEQ ID NO: 24949 - DNA, 21 bp, Artificial Sequence
  Description of Artificial Sequence: Synthetic oligonucleotide
tctcagccgatggctaggatg

SEQ ID NO: 24950 - DNA, 21 bp, Artificial Sequence
  Description of Artificial Sequence: Synthetic oligonucleotide
agtcagcctatgcctcctgcg

SEQ ID NO: 24951 - DNA, 21 bp, Artificial Sequence
  Description of Artificial Sequence: Synthetic oligonucleotide
tcgcagcctaatcctgctgtg

SEQ ID NO: 24952 - DNA, 21 bp, Artificial Sequence
  Description of Artificial Sequence: Synthetic oligonucleotide
agtcagccgactactgctagg

SEQ ID NO: 24953 - DNA, 21 bp, Artificial Sequence
  Description of Artificial Sequence: Synthetic oligonucleotide
tctcagccggttactgcgggt

SEQ ID NO: 24954 - DNA, 21 bp, Artificial Sequence
  Description of Artificial Sequence: Synthetic oligonucleotide
tctcagcaggatcctattttg

SEQ ID NO: 24955 - DNA, 21 bp, Artificial Sequence
  Description of Artificial Sequence: Synthetic oligonucleotide
tcgcagcgggcgccgattcct

SEQ ID NO: 24956 - DNA, 21 bp, Artificial Sequence
  Description of Artificial Sequence: Synthetic oligonucleotide
agtcagcgtgctactgcgctt

SEQ ID NO: 24957 - DNA, 21 bp, Artificial Sequence
  Description of Artificial Sequence: Synthetic oligonucleotide
agtcagcggattcttgatact

SEQ ID NO: 24958 - DNA, 21 bp, Artificial Sequence
  Description of Artificial Sequence: Synthetic oligonucleotide
agtcagcgtagtggtcgggag

SEQ ID NO: 24959 - DNA, 21 bp, Artificial Sequence
  Description of Artificial Sequence: Synthetic oligonucleotide
tcgcagcgtagtacgcttacg

SEQ ID NO: 24960 - DNA, 21 bp, Artificial Sequence
  Description of Artificial Sequence: Synthetic oligonucleotide
tctcagcgggtggcttcggag

SEQ ID NO: 24961 - DNA, 21 bp, Artificial Sequence
  Description of Artificial Sequence: Synthetic oligonucleotide
tcgcagagggtttctcagtcg

SEQ ID NO: 24962 - DNA, 21 bp, Artificial Sequence
  Description of Artificial Sequence: Synthetic oligonucleotide
tctcagtcgttttctgttgat

SEQ ID NO: 24963 - DNA, 21 bp, Artificial Sequence
  Description of Artificial Sequence: Synthetic oligonucleotide
tctcagagtggttcttcgaat

SEQ ID NO: 24964 - DNA, 21 bp, Artificial Sequence
  Description of Artificial Sequence: Synthetic oligonucleotide
tcgcagagtatgaggtcttcg

SEQ ID NO: 24965 - DNA, 21 bp, Artificial Sequence
  Description of Artificial Sequence: Synthetic oligonucleotide
tctcagtctcctgtgctgaag

SEQ ID NO: 24966 - DNA, 21 bp, Artificial Sequence
  Description of Artificial Sequence: Synthetic oligonucleotide
tctcagtctcagatgcttccg

SEQ ID NO: 24967 - DNA, 21 bp, Artificial Sequence
  Description of Artificial Sequence: Synthetic oligonucleotide
tcgcagtcgcggttttcggcg

SEQ ID NO: 24968 - DNA, 21 bp, Artificial Sequence
  Description of Artificial Sequence: Synthetic oligonucleotide
tctcagtcgcggatgcagcct

SEQ ID NO: 24969 - DNA, 21 bp, Artificial Sequence
  Description of Artificial Sequence: Synthetic oligonucleotide
tctcagagttctattaggctt

SEQ ID NO: 24970 - DNA, 21 bp, Artificial Sequence
  Description of Artificial Sequence: Synthetic oligonucleotide
tctcagagtagtaattatccg

SEQ ID NO: 24971 - DNA, 21 bp, Artificial Sequence
  Description of Artificial Sequence: Synthetic oligonucleotide
agtcagtcgacgtataatatt

SEQ ID NO: 24972 - DNA, 21 bp, Artificial Sequence
  Description of Artificial Sequence: Synthetic oligonucleotide
tctcagacgggtctgcttact

SEQ ID NO: 24973 - DNA, 21 bp, Artificial Sequence
  Description of Artificial Sequence: Synthetic oligonucleotide
agtcagactattccggattcg

SEQ ID NO: 24974 - DNA, 21 bp, Artificial Sequence
  Description of Artificial Sequence: Synthetic oligonucleotide
agtcagacgaagtcgcagcat

SEQ ID NO: 24975 - DNA, 21 bp, Artificial Sequence
  Description of Artificial Sequence: Synthetic oligonucleotide
agtcagacgcctcgttctacg

SEQ ID NO: 24976 - DNA, 21 bp, Artificial Sequence
  Description of Artificial Sequence: Synthetic oligonucleotide
tcgcagactcagcataggatt

SEQ ID NO: 24977 - DNA, 21 bp, Artificial Sequence
  Description of Artificial Sequence: Synthetic oligonucleotide
tctcagactgttggggtgtct

SEQ ID NO: 24978 - DNA, 21 bp, Artificial Sequence
  Description of Artificial Sequence: Synthetic oligonucleotide
tctcaggtgggtgctccgact

SEQ ID NO: 24979 - DNA, 21 bp, Artificial Sequence
  Description of Artificial Sequence: Synthetic oligonucleotide
tcgcaggttggtatgtatagg

SEQ ID NO: 24980 - DNA, 21 bp, Artificial Sequence
  Description of Artificial Sequence: Synthetic oligonucleotide
tctcagtgggtgcctacgaat

SEQ ID NO: 24981 - DNA, 21 bp, Artificial Sequence
  Description of Artificial Sequence: Synthetic oligonucleotide
agtcagtatgcgtctttggat

SEQ ID NO: 24982 - DNA, 21 bp, Artificial Sequence
  Description of Artificial Sequence: Synthetic oligonucleotide
tcgcagtatactaagtttcag

SEQ ID NO: 24983 - DNA, 21 bp, Artificial Sequence
  Description of Artificial Sequence: Synthetic oligonucleotide
agtcagtatgtgccttcttcg

SEQ ID NO: 24984 - DNA, 21 bp, Artificial Sequence
  Description of Artificial Sequence: Synthetic oligonucleotide
tctcgggcggcgatggatggt

SEQ ID NO: 24985 - DNA, 21 bp, Artificial Sequence
  Description of Artificial Sequence: Synthetic oligonucleotide
agtcgtgctgatatttttctt

SEQ ID NO: 24986 - DNA, 21 bp, Artificial Sequence
  Description of Artificial Sequence: Synthetic oligonucleotide
tcgcgggcgggtcgttcggag

SEQ ID NO: 24987 - DNA, 21 bp, Artificial Sequence
  Description of Artificial Sequence: Synthetic oligonucleotide
tcgcgggcggggactacgacg

SEQ ID NO: 24988 - DNA, 21 bp, Artificial Sequence
  Description of Artificial Sequence: Synthetic oligonucleotide
tcgcgggctattcttgcggat

SEQ ID NO: 24989 - DNA, 21 bp, Artificial Sequence
  Description of Artificial Sequence: Synthetic oligonucleotide
tctcgggcgcttactggtccg

SEQ ID NO: 24990 - DNA, 21 bp, Artificial Sequence
  Description of Artificial Sequence: Synthetic oligonucleotide
tctcgggcgctggtttctgcg

SEQ ID NO: 24991 - DNA, 21 bp, Artificial Sequence
  Description of Artificial Sequence: Synthetic oligonucleotide
tctcgggcgaatcttcattct

SEQ ID NO: 24992 - DNA, 21 bp, Artificial Sequence
  Description of Artificial Sequence: Synthetic oligonucleotide
tcgcgtgcgccgtctcttcct

SEQ ID NO: 24993 - DNA, 21 bp, Artificial Sequence
  Description of Artificial Sequence: Synthetic oligonucleotide
tctcgtgctagtatggcggtt

SEQ ID NO: 24994 - DNA, 21 bp, Artificial Sequence
  Description of Artificial Sequence: Synthetic oligonucleotide
agtcgggcggtttcggatgct

SEQ ID NO: 24995 - DNA, 21 bp, Artificial Sequence
  Description of Artificial Sequence: Synthetic oligonucleotide
tctcgggatgcgattcatgat

SEQ ID NO: 24996 - DNA, 21 bp, Artificial Sequence
  Description of Artificial Sequence: Synthetic oligonucleotide
tctcgtgatgctaagcagtcg

SEQ ID NO: 24997 - DNA, 21 bp, Artificial Sequence
  Description of Artificial Sequence: Synthetic oligonucleotide
agtcgtgatctgttgtcgccg

SEQ ID NO: 24998 - DNA, 21 bp, Artificial Sequence
  Description of Artificial Sequence: Synthetic oligonucleotide
tcgcgggatatgacgaatttt

SEQ ID NO: 24999 - DNA, 21 bp, Artificial Sequence
  Description of Artificial Sequence: Synthetic oligonucleotide
agtcgtgataatcagactgtt

SEQ ID NO: 25000 - DNA, 21 bp, Artificial Sequence
  Description of Artificial Sequence: Synthetic oligonucleotide
agtcgggataggactttgaat

SEQ ID NO: 25001 - DNA, 21 bp, Artificial Sequence
  Description of Artificial Sequence: Synthetic oligonucleotide
tctcgtgattcgggtactagt

SEQ ID NO: 25002 - DNA, 21 bp, Artificial Sequence
  Description of Artificial Sequence: Synthetic oligonucleotide
agtcgtgatagtcagcgtgag

SEQ ID NO: 25003 - DNA, 21 bp, Artificial Sequence
  Description of Artificial Sequence: Synthetic oligonucleotide
tctcgtgatactgggcatacg

SEQ ID NO: 25004 - DNA, 21 bp, Artificial Sequence
  Description of Artificial Sequence: Synthetic oligonucleotide
tcgcgggatacgtcgcatcat

SEQ ID NO: 25005 - DNA, 21 bp, Artificial Sequence
  Description of Artificial Sequence: Synthetic oligonucleotide
tcgcgtgatgttcctcagaat

SEQ ID NO: 25006 - DNA, 21 bp, Artificial Sequence
  Description of Artificial Sequence: Synthetic oligonucleotide
tcgagggattatcagttgaat

SEQ ID NO: 25007 - DNA, 21 bp, Artificial Sequence
  Description of Artificial Sequence: Synthetic oligonucleotide
tcgagggagaaggtgtcggcg

SEQ ID NO: 25008 - DNA, 21 bp, Artificial Sequence
  Description of Artificial Sequence: Synthetic oligonucleotide
tcgagggagctgtcgcgtctg

SEQ ID NO: 25009 - DNA, 21 bp, Artificial Sequence
  Description of Artificial Sequence: Synthetic oligonucleotide
agtcgggagatggctcctagt

SEQ ID NO: 25010 - DNA, 21 bp, Artificial Sequence
  Description of Artificial Sequence: Synthetic oligonucleotide
tctcgtgagcctgctaatatt

SEQ ID NO: 25011 - DNA, 21 bp, Artificial Sequence
  Description of Artificial Sequence: Synthetic oligonucleotide
tcgagggagcagctgagtggg

SEQ ID NO: 25012 - DNA, 21 bp, Artificial Sequence
  Description of Artificial Sequence: Synthetic oligonucleotide
agtagggagtctcggtttgat

SEQ ID NO: 25013 - DNA, 21 bp, Artificial Sequence
  Description of Artificial Sequence: Synthetic oligonucleotide
tctcgtgagtcttatcagcag

SEQ ID NO: 25014 - DNA, 21 bp, Artificial Sequence
  Description of Artificial Sequence: Synthetic oligonucleotide
tcgcgtgagactcgtgcggtt

SEQ ID NO: 25015 - DNA, 21 bp, Artificial Sequence
  Description of Artificial Sequence: Synthetic oligonucleotide
tctcgggaggtggataagact

SEQ ID NO: 25016 - DNA, 21 bp, Artificial Sequence
  Description of Artificial Sequence: Synthetic oligonucleotide
agtcgtgaggttgttgcgtcg

SEQ ID NO: 25017 - DNA, 21 bp, Artificial Sequence
  Description of Artificial Sequence: Synthetic oligonucleotide
tctcggtttgaggcgaatact

SEQ ID NO: 25018 - DNA, 21 bp, Artificial Sequence
  Description of Artificial Sequence: Synthetic oligonucleotide
agtcggtttgagcagctgggg

SEQ ID NO: 25019 - DNA, 21 bp, Artificial Sequence
  Description of Artificial Sequence: Synthetic oligonucleotide
agtcggtttcatcctacggag

SEQ ID NO: 25020 - DNA, 21 bp, Artificial Sequence
  Description of Artificial Sequence: Synthetic oligonucleotide
tcgcgttttcagggttcgggt

SEQ ID NO: 25021 - DNA, 21 bp, Artificial Sequence
  Description of Artificial Sequence: Synthetic oligonucleotide
agtcggtttactactcaggtt

SEQ ID NO: 25022 - DNA, 21 bp, Artificial Sequence
  Description of Artificial Sequence: Synthetic oligonucleotide
tcgcggggtgatccgctgttt

SEQ ID NO: 25023 - DNA, 21 bp, Artificial Sequence
  Description of Artificial Sequence: Synthetic oligonucleotide
tctcggggggatcgtccgatg

SEQ ID NO: 25024 - DNA, 21 bp, Artificial Sequence
  Description of Artificial Sequence: Synthetic oligonucleotide
tctaggggtgatactatggtt

SEQ ID NO: 25025 - DNA, 21 bp, Artificial Sequence
  Description of Artificial Sequence: Synthetic oligonucleotide
agtcgtggtgagcattatgtt

SEQ ID NO: 25026 - DNA, 21 bp, Artificial Sequence
  Description of Artificial Sequence: Synthetic oligonucleotide
tcgaggggtcatgagacgtct

SEQ ID NO: 25027 - DNA, 21 bp, Artificial Sequence
  Description of Artificial Sequence: Synthetic oligonucleotide
tcgcgtgggaaggaggtgatt

SEQ ID NO: 25028 - DNA, 21 bp, Artificial Sequence
  Description of Artificial Sequence: Synthetic oligonucleotide
tcgcgtggttctgagtcgatt

SEQ ID NO: 25029 - DNA, 21 bp, Artificial Sequence
  Description of Artificial Sequence: Synthetic oligonucleotide
agtcgtggggtggataatctt

SEQ ID NO: 25030 - DNA, 21 bp, Artificial Sequence
  Description of Artificial Sequence: Synthetic oligonucleotide
tcgcgtggtgtgtcttctcct

SEQ ID NO: 25031 - DNA, 21 bp, Artificial Sequence
  Description of Artificial Sequence: Synthetic oligonucleotide
tcgcggcatccggtgccgcat

SEQ ID NO: 25032 - DNA, 21 bp, Artificial Sequence
  Description of Artificial Sequence: Synthetic oligonucleotide
tctaggcatcaggctacttcg

SEQ ID NO: 25033 - DNA, 21 bp, Artificial Sequence
  Description of Artificial Sequence: Synthetic oligonucleotide
tcgaggcatacgtcgctttct

SEQ ID NO: 25034 - DNA, 21 bp, Artificial Sequence
  Description of Artificial Sequence: Synthetic oligonucleotide
tcgaggcattatactactgag

SEQ ID NO: 25035 - DNA, 21 bp, Artificial Sequence
  Description of Artificial Sequence: Synthetic oligonucleotide
agtaggattgcggagcctaag

SEQ ID NO: 25036 - DNA, 21 bp, Artificial Sequence
  Description of Artificial Sequence: Synthetic oligonucleotide
tctcggattggtatttcggct

SEQ ID NO: 25037 - DNA, 21 bp, Artificial Sequence
  Description of Artificial Sequence: Synthetic oligonucleotide
tcgcggattttgcggctggat

SEQ ID NO: 25038 - DNA, 21 bp, Artificial Sequence
  Description of Artificial Sequence: Synthetic oligonucleotide
tcgcgtcttggggggcattcg

SEQ ID NO: 25039 - DNA, 21 bp, Artificial Sequence
  Description of Artificial Sequence: Synthetic oligonucleotide
tcgaggcttccgactcaggat

SEQ ID NO: 25040 - DNA, 21 bp, Artificial Sequence
  Description of Artificial Sequence: Synthetic oligonucleotide
tcgcgtctgccttatcctaat

SEQ ID NO: 25041 - DNA, 21 bp, Artificial Sequence
  Description of Artificial Sequence: Synthetic oligonucleotide
tctcgtttgtcgggggcggag

SEQ ID NO: 25042 - DNA, 21 bp, Artificial Sequence
  Description of Artificial Sequence: Synthetic oligonucleotide
agtaggctgtcgcatgagttg

SEQ ID NO: 25043 - DNA, 21 bp, Artificial Sequence
  Description of Artificial Sequence: Synthetic oligonucleotide
tctcggctgactccgccgagt

SEQ ID NO: 25044 - DNA, 21 bp, Artificial Sequence
  Description of Artificial Sequence: Synthetic oligonucleotide
tctaggcttacgccttatcct

SEQ ID NO: 25045 - DNA, 21 bp, Artificial Sequence
  Description of Artificial Sequence: Synthetic oligonucleotide
tctaggttggtgccggttgcg

SEQ ID NO: 25046 - DNA, 21 bp, Artificial Sequence
  Description of Artificial Sequence: Synthetic oligonucleotide
tctcgtatggctattagtgat

SEQ ID NO: 25047 - DNA, 21 bp, Artificial Sequence
  Description of Artificial Sequence: Synthetic oligonucleotide
tctcggatggggcagacttcg

SEQ ID NO: 25048 - DNA, 21 bp, Artificial Sequence
  Description of Artificial Sequence: Synthetic oligonucleotide
tcgaggatgagttttgcgccg

SEQ ID NO: 25049 - DNA, 21 bp, Artificial Sequence
  Description of Artificial Sequence: Synthetic oligonucleotide
agtcgtatgagtcagggtttt

SEQ ID NO: 25050 - DNA, 21 bp, Artificial Sequence
  Description of Artificial Sequence: Synthetic oligonucleotide
tctcggaattcgttggcgctt

SEQ ID NO: 25051 - DNA, 21 bp, Artificial Sequence
  Description of Artificial Sequence: Synthetic oligonucleotide
tctaggaatagtcttttggat

SEQ ID NO: 25052 - DNA, 21 bp, Artificial Sequence
  Description of Artificial Sequence: Synthetic oligonucleotide
tcgaggaatactaatacggat

SEQ ID NO: 25053 - DNA, 21 bp, Artificial Sequence
  Description of Artificial Sequence: Synthetic oligonucleotide
tcgcggaatactcctgttgat

SEQ ID NO: 25054 - DNA, 21 bp, Artificial Sequence
  Description of Artificial Sequence: Synthetic oligonucleotide
tcgcgtccggcgattggttcg

SEQ ID NO: 25055 - DNA, 21 bp, Artificial Sequence
  Description of Artificial Sequence: Synthetic oligonucleotide
tcgcgtcctgctcctgttctt

SEQ ID NO: 25056 - DNA, 21 bp, Artificial Sequence
  Description of Artificial Sequence: Synthetic oligonucleotide
tctcgtcctgcgactaatccg

SEQ ID NO: 25057 - DNA, 21 bp, Artificial Sequence
  Description of Artificial Sequence: Synthetic oligonucleotide
agtcggccggagcctccgtat

SEQ ID NO: 25058 - DNA, 21 bp, Artificial Sequence
  Description of Artificial Sequence: Synthetic oligonucleotide
agtaggccgggttttcagaat

SEQ ID NO: 25059 - DNA, 21 bp, Artificial Sequence
  Description of Artificial Sequence: Synthetic oligonucleotide
tctaggccggggcttacgttt

SEQ ID NO: 25060 - DNA, 21 bp, Artificial Sequence
  Description of Artificial Sequence: Synthetic oligonucleotide
tctcgtcctattactcctttg

SEQ ID NO: 25061 - DNA, 21 bp, Artificial Sequence
  Description of Artificial Sequence: Synthetic oligonucleotide
agtcggccgatgtcgttggag

SEQ ID NO: 25062 - DNA, 21 bp, Artificial Sequence
  Description of Artificial Sequence: Synthetic oligonucleotide
tctcgtccgcgtgatactgat

SEQ ID NO: 25063 - DNA, 21 bp, Artificial Sequence
  Description of Artificial Sequence: Synthetic oligonucleotide
tctcgtccttcggcttatcag

SEQ ID NO: 25064 - DNA, 21 bp, Artificial Sequence
  Description of Artificial Sequence: Synthetic oligonucleotide
tctaggccgtctgatgtttgg

SEQ ID NO: 25065 - DNA, 21 bp, Artificial Sequence
  Description of Artificial Sequence: Synthetic oligonucleotide
tctaggccttctaatgatgct

SEQ ID NO: 25066 - DNA, 21 bp, Artificial Sequence
  Description of Artificial Sequence: Synthetic oligonucleotide
tcgcggcctagttctgagtct

SEQ ID NO: 25067 - DNA, 21 bp, Artificial Sequence
  Description of Artificial Sequence: Synthetic oligonucleotide
agtcgtccgacggcgcaggag

SEQ ID NO: 25068 - DNA, 21 bp, Artificial Sequence
  Description of Artificial Sequence: Synthetic oligonucleotide
tcgcggcctacgtctgcttct

SEQ ID NO: 25069 - DNA, 21 bp, Artificial Sequence
  Description of Artificial Sequence: Synthetic oligonucleotide
tcgcgtcctgtggtgtcgagt

SEQ ID NO: 25070 - DNA, 21 bp, Artificial Sequence
  Description of Artificial Sequence: Synthetic oligonucleotide
tctaggcaggctcttagtgat

SEQ ID NO: 25071 - DNA, 21 bp, Artificial Sequence
  Description of Artificial Sequence: Synthetic oligonucleotide
agtcgtcaggatcattggcct

SEQ ID NO: 25072 - DNA, 21 bp, Artificial Sequence
  Description of Artificial Sequence: Synthetic oligonucleotide
tcgcgtcaggatcctgttatt

SEQ ID NO: 25073 - DNA, 21 bp, Artificial Sequence
  Description of Artificial Sequence: Synthetic oligonucleotide
agtcggcagcttgctccgagt

SEQ ID NO: 25074 - DNA, 21 bp, Artificial Sequence
  Description of Artificial Sequence: Synthetic oligonucleotide
agtaggcagatggagcatgtg

SEQ ID NO: 25075 - DNA, 21 bp, Artificial Sequence
  Description of Artificial Sequence: Synthetic oligonucleotide
tctcgtcagcaggagaggggg

SEQ ID NO: 25076 - DNA, 21 bp, Artificial Sequence
  Description of Artificial Sequence: Synthetic oligonucleotide
agtcggcagcagacgccggat

SEQ ID NO: 25077 - DNA, 21 bp, Artificial Sequence
  Description of Artificial Sequence: Synthetic oligonucleotide
agtaggcagtcgccttcgctg

SEQ ID NO: 25078 - DNA, 21 bp, Artificial Sequence
  Description of Artificial Sequence: Synthetic oligonucleotide
tctcgtcagtctgttcatggt

SEQ ID NO: 25079 - DNA, 21 bp, Artificial Sequence
  Description of Artificial Sequence: Synthetic oligonucleotide
agtcgtaggccttcggatatt

SEQ ID NO: 25080 - DNA, 21 bp, Artificial Sequence
  Description of Artificial Sequence: Synthetic oligonucleotide
agtaggtcggctcttactgat

SEQ ID NO: 25081 - DNA, 21 bp, Artificial Sequence
  Description of Artificial Sequence: Synthetic oligonucleotide
tcgcgttcggagcgtatgcct

SEQ ID NO: 25082 - DNA, 21 bp, Artificial Sequence
  Description of Artificial Sequence: Synthetic oligonucleotide
tcgcgttcgggtcagggtgat

SEQ ID NO: 25083 - DNA, 21 bp, Artificial Sequence
  Description of Artificial Sequence: Synthetic oligonucleotide
agtcggagtggtagtcttccg

SEQ ID NO: 25084 - DNA, 21 bp, Artificial Sequence
  Description of Artificial Sequence: Synthetic oligonucleotide
tctcggtctggtactccgttt

SEQ ID NO: 25085 - DNA, 21 bp, Artificial Sequence
  Description of Artificial Sequence: Synthetic oligonucleotide
tcgcgtagtcatccgagtcag

SEQ ID NO: 25086 - DNA, 21 bp, Artificial Sequence
  Description of Artificial Sequence: Synthetic oligonucleotide
tctcggtcgattatgcagggg

SEQ ID NO: 25087 - DNA, 21 bp, Artificial Sequence
  Description of Artificial Sequence: Synthetic oligonucleotide
tcgcggtctatttcgacggat

SEQ ID NO: 25088 - DNA, 21 bp, Artificial Sequence
  Description of Artificial Sequence: Synthetic oligonucleotide
agtcgttctcttgagagtacg

SEQ ID NO: 25089 - DNA, 21 bp, Artificial Sequence
  Description of Artificial Sequence: Synthetic oligonucleotide
tcgaggtctttgggtacgaat

SEQ ID NO: 25090 - DNA, 21 bp, Artificial Sequence
  Description of Artificial Sequence: Synthetic oligonucleotide
tcgaggagtttgcatcttgtg

SEQ ID NO: 25091 - DNA, 21 bp, Artificial Sequence
  Description of Artificial Sequence: Synthetic oligonucleotide
agtcgttctttgaggcctgat

SEQ ID NO: 25092 - DNA, 21 bp, Artificial Sequence
  Description of Artificial Sequence: Synthetic oligonucleotide
tcgcggtcgaatgctaatatt

SEQ ID NO: 25093 - DNA, 21 bp, Artificial Sequence
  Description of Artificial Sequence: Synthetic oligonucleotide
agtaggagtaatggtgttatt

SEQ ID NO: 25094 - DNA, 21 bp, Artificial Sequence
  Description of Artificial Sequence: Synthetic oligonucleotide
tctaggtctccgggtgtgcat

SEQ ID NO: 25095 - DNA, 21 bp, Artificial Sequence
  Description of Artificial Sequence: Synthetic oligonucleotide
tctcgttctcctatgcagcct

SEQ ID NO: 25096 - DNA, 21 bp, Artificial Sequence
  Description of Artificial Sequence: Synthetic oligonucleotide
tctcgttcgccgccgctgcct

SEQ ID NO: 25097 - DNA, 21 bp, Artificial Sequence
  Description of Artificial Sequence: Synthetic oligonucleotide
tcgaggagtccgccgatgacg

SEQ ID NO: 25098 - DNA, 21 bp, Artificial Sequence
  Description of Artificial Sequence: Synthetic oligonucleotide
tctcgttctcgtacggagacg

SEQ ID NO: 25099 - DNA, 21 bp, Artificial Sequence
  Description of Artificial Sequence: Synthetic oligonucleotide
tctaggtcgtcgggtggtaat

SEQ ID NO: 25100 - DNA, 21 bp, Artificial Sequence
  Description of Artificial Sequence: Synthetic oligonucleotide
tcgcggagttcgggtggttct

SEQ ID NO: 25101 - DNA, 21 bp, Artificial Sequence
  Description of Artificial Sequence: Synthetic oligonucleotide
agtcgtagtgtttcggggacg

SEQ ID NO: 25102 - DNA, 21 bp, Artificial Sequence
  Description of Artificial Sequence: Synthetic oligonucleotide
tcgcggtctgtttcgttgtcg

SEQ ID NO: 25103 - DNA, 21 bp, Artificial Sequence
  Description of Artificial Sequence: Synthetic oligonucleotide
tcgcgtactgctaatgctgct

SEQ ID NO: 25104 - DNA, 21 bp, Artificial Sequence
  Description of Artificial Sequence: Synthetic oligonucleotide
agtaggactgcgtcgtttccg

SEQ ID NO: 25105 - DNA, 21 bp, Artificial Sequence
  Description of Artificial Sequence: Synthetic oligonucleotide
tcgcgtacggcttcgtctggt

SEQ ID NO: 25106 - DNA, 21 bp, Artificial Sequence
  Description of Artificial Sequence: Synthetic oligonucleotide
agtaggactgatacgattaag

SEQ ID NO: 25107 - DNA, 21 bp, Artificial Sequence
  Description of Artificial Sequence: Synthetic oligonucleotide
tctcggactgaggcgcttggt

SEQ ID NO: 25108 - DNA, 21 bp, Artificial Sequence
  Description of Artificial Sequence: Synthetic oligonucleotide
agtcgtacggagcgttctgcg

SEQ ID NO: 25109 - DNA, 21 bp, Artificial Sequence
  Description of Artificial Sequence: Synthetic oligonucleotide
tctcgtacgggggcgtatcct

SEQ ID NO: 25110 - DNA, 21 bp, Artificial Sequence
  Description of Artificial Sequence: Synthetic oligonucleotide
tcgaggactggttcgactttg

SEQ ID NO: 25111 - DNA, 21 bp, Artificial Sequence
  Description of Artificial Sequence: Synthetic oligonucleotide
agtcggactcatgatcaggct

SEQ ID NO: 25112 - DNA, 21 bp, Artificial Sequence
  Description of Artificial Sequence: Synthetic oligonucleotide
tcgcgtactctggttggtgag

SEQ ID NO: 25113 - DNA, 21 bp, Artificial Sequence
  Description of Artificial Sequence: Synthetic oligonucleotide
tctaggacgccgcatattgat

SEQ ID NO: 25114 - DNA, 21 bp, Artificial Sequence
  Description of Artificial Sequence: Synthetic oligonucleotide
agtaggactccgatgtcgatg

SEQ ID NO: 25115 - DNA, 21 bp, Artificial Sequence
  Description of Artificial Sequence: Synthetic oligonucleotide
tctcgtactagtatgccttct

SEQ ID NO: 25116 - DNA, 21 bp, Artificial Sequence
  Description of Artificial Sequence: Synthetic oligonucleotide
agtcgtacttcgcggctggat

SEQ ID NO: 25117 - DNA, 21 bp, Artificial Sequence
  Description of Artificial Sequence: Synthetic oligonucleotide
agtcggactgtggcttcgggt

SEQ ID NO: 25118 - DNA, 21 bp, Artificial Sequence
  Description of Artificial Sequence: Synthetic oligonucleotide
tctcggactgtgcaggcgatg

SEQ ID NO: 25119 - DNA, 21 bp, Artificial Sequence
  Description of Artificial Sequence: Synthetic oligonucleotide
tcgcgtgttgctacgacgttg

SEQ ID NO: 25120 - DNA, 21 bp, Artificial Sequence
  Description of Artificial Sequence: Synthetic oligonucleotide
agtagggtgattcatgttagt

SEQ ID NO: 25121 - DNA, 21 bp, Artificial Sequence
  Description of Artificial Sequence: Synthetic oligonucleotide
agtcgtgttaatgcgccgagt

SEQ ID NO: 25122 - DNA, 21 bp, Artificial Sequence
  Description of Artificial Sequence: Synthetic oligonucleotide
tctcgggttaatgctcaggct

SEQ ID NO: 25123 - DNA, 21 bp, Artificial Sequence
  Description of Artificial Sequence: Synthetic oligonucleotide
agtcgtgtgcctcatagtgat

SEQ ID NO: 25124 - DNA, 21 bp, Artificial Sequence
  Description of Artificial Sequence: Synthetic oligonucleotide
tcgcgggttcctaatctttcg

SEQ ID NO: 25125 - DNA, 21 bp, Artificial Sequence
  Description of Artificial Sequence: Synthetic oligonucleotide
agtcgtgtgcagaatggggtg

SEQ ID NO: 25126 - DNA, 21 bp, Artificial Sequence
  Description of Artificial Sequence: Synthetic oligonucleotide
agtcgtgttagtgctgtgatg

SEQ ID NO: 25127 - DNA, 21 bp, Artificial Sequence
  Description of Artificial Sequence: Synthetic oligonucleotide
agtcgggtgtctgggcagtcg

SEQ ID NO: 25128 - DNA, 21 bp, Artificial Sequence
  Description of Artificial Sequence: Synthetic oligonucleotide
agtagggtttctcaggtgatg

SEQ ID NO: 25129 - DNA, 21 bp, Artificial Sequence
  Description of Artificial Sequence: Synthetic oligonucleotide
tctcgttgggttactattgag

SEQ ID NO: 25130 - DNA, 21 bp, Artificial Sequence
  Description of Artificial Sequence: Synthetic oligonucleotide
tcgaggtatgctacttctggg

SEQ ID NO: 25131 - DNA, 21 bp, Artificial Sequence
  Description of Artificial Sequence: Synthetic oligonucleotide
agtcgttatgaggatccggag

SEQ ID NO: 25132 - DNA, 21 bp, Artificial Sequence
  Description of Artificial Sequence: Synthetic oligonucleotide
agtcgttatgggtcggattct

SEQ ID NO: 25133 - DNA, 21 bp, Artificial Sequence
  Description of Artificial Sequence: Synthetic oligonucleotide
tctcggtataatgggatgggt

SEQ ID NO: 25134 - DNA, 21 bp, Artificial Sequence
  Description of Artificial Sequence: Synthetic oligonucleotide
agtcggtatcctgaggctact

SEQ ID NO: 25135 - DNA, 21 bp, Artificial Sequence
  Description of Artificial Sequence: Synthetic oligonucleotide
tcttctgcttgtattaaggct

SEQ ID NO: 25136 - DNA, 21 bp, Artificial Sequence
  Description of Artificial Sequence: Synthetic oligonucleotide
tcgagtgctgaggctcgtctg

SEQ ID NO: 25137 - DNA, 21 bp, Artificial Sequence
  Description of Artificial Sequence: Synthetic oligonucleotide
tcgtcggcgggtgcgcctttg

SEQ ID NO: 25138 - DNA, 21 bp, Artificial Sequence
  Description of Artificial Sequence: Synthetic oligonucleotide
agtagtgcgggttgggtgggt

SEQ ID NO: 25139 - DNA, 21 bp, Artificial Sequence
  Description of Artificial Sequence: Synthetic oligonucleotide
agttctgctattccgatgaag

SEQ ID NO: 25140 - DNA, 21 bp, Artificial Sequence
  Description of Artificial Sequence: Synthetic oligonucleotide
tcttctgctaatgctccgcgt

SEQ ID NO: 25141 - DNA, 21 bp, Artificial Sequence
  Description of Artificial Sequence: Synthetic oligonucleotide
agtagtgctaatgcgagtact

SEQ ID NO: 25142 - DNA, 21 bp, Artificial Sequence
  Description of Artificial Sequence: Synthetic oligonucleotide
tcgtcggcgccggtttctcct

SEQ ID NO: 25143 - DNA, 21 bp, Artificial Sequence
  Description of Artificial Sequence: Synthetic oligonucleotide
tcttcggctcaggtgtctgtg

SEQ ID NO: 25144 - DNA, 21 bp, Artificial Sequence
  Description of Artificial Sequence: Synthetic oligonucleotide
tcgtcggcgactatgactacg

SEQ ID NO: 25145 - DNA, 21 bp, Artificial Sequence
  Description of Artificial Sequence: Synthetic oligonucleotide
tcttcggatgctagtcgtcgt

SEQ ID NO: 25146 - DNA, 21 bp, Artificial Sequence
  Description of Artificial Sequence: Synthetic oligonucleotide
tctagtgatcatgggcttaag

SEQ ID NO: 25147 - DNA, 21 bp, Artificial Sequence
  Description of Artificial Sequence: Synthetic oligonucleotide
tcttcggatcatattggttgt

SEQ ID NO: 25148 - DNA, 21 bp, Artificial Sequence
  Description of Artificial Sequence: Synthetic oligonucleotide
tctagtgatattaggccgtct

SEQ ID NO: 25149 - DNA, 21 bp, Artificial Sequence
  Description of Artificial Sequence: Synthetic oligonucleotide
agtagtgattcggtgaagcat

SEQ ID NO: 25150 - DNA, 21 bp, Artificial Sequence
  Description of Artificial Sequence: Synthetic oligonucleotide
tcgtctgatacgagtcctggg

SEQ ID NO: 25151 - DNA, 21 bp, Artificial Sequence
  Description of Artificial Sequence: Synthetic oligonucleotide
agttcggatactgtgactgag

SEQ ID NO: 25152 - DNA, 21 bp, Artificial Sequence
  Description of Artificial Sequence: Synthetic oligonucleotide
tcttctgaggctgctaggggg

SEQ ID NO: 25153 - DNA, 21 bp, Artificial Sequence
  Description of Artificial Sequence: Synthetic oligonucleotide
tctagtgaggatgttggtttt

SEQ ID NO: 25154 - DNA, 21 bp, Artificial Sequence
  Description of Artificial Sequence: Synthetic oligonucleotide
agtagtgagcatgggcggaat

SEQ ID NO: 25155 - DNA, 21 bp, Artificial Sequence
  Description of Artificial Sequence: Synthetic oligonucleotide
tcttcggagaagcattcgcct

SEQ ID NO: 25156 - DNA, 21 bp, Artificial Sequence
  Description of Artificial Sequence: Synthetic oligonucleotide
tcttcggagaagcgtcctggt

SEQ ID NO: 25157 - DNA, 21 bp, Artificial Sequence
  Description of Artificial Sequence: Synthetic oligonucleotide
tctagtgagatgtcgggtaat

SEQ ID NO: 25158 - DNA, 21 bp, Artificial Sequence
  Description of Artificial Sequence: Synthetic oligonucleotide
tcgtctgagagggcgcatggt

SEQ ID NO: 25159 - DNA, 21 bp, Artificial Sequence
  Description of Artificial Sequence: Synthetic oligonucleotide
agtagtgagcgggcgtcttct

SEQ ID NO: 25160 - DNA, 21 bp, Artificial Sequence
  Description of Artificial Sequence: Synthetic oligonucleotide
tcttctgagtcgctggggagg

SEQ ID NO: 25161 - DNA, 21 bp, Artificial Sequence
  Description of Artificial Sequence: Synthetic oligonucleotide
tcgtcggagtctcgttggatt

SEQ ID NO: 25162 - DNA, 21 bp, Artificial Sequence
  Description of Artificial Sequence: Synthetic oligonucleotide
tctagttttgcggttgggggg

SEQ ID NO: 25163 - DNA, 21 bp, Artificial Sequence
  Description of Artificial Sequence: Synthetic oligonucleotide
tcgagttttgataggggggcg

SEQ ID NO: 25164 - DNA, 21 bp, Artificial Sequence
  Description of Artificial Sequence: Synthetic oligonucleotide
agttcgtttaagggtacgttt

SEQ ID NO: 25165 - DNA, 21 bp, Artificial Sequence
  Description of Artificial Sequence: Synthetic oligonucleotide
tcgtcttttttgactccttct

SEQ ID NO: 25166 - DNA, 21 bp, Artificial Sequence
  Description of Artificial Sequence: Synthetic oligonucleotide
tctagttttccttctaaggcg

SEQ ID NO: 25167 - DNA, 21 bp, Artificial Sequence
  Description of Artificial Sequence: Synthetic oligonucleotide
tcgtcgtttcggacgcctctg

SEQ ID NO: 25168 - DNA, 21 bp, Artificial Sequence
  Description of Artificial Sequence: Synthetic oligonucleotide
tcttcgggtgcttcgtcgcct

SEQ ID NO: 25169 - DNA, 21 bp, Artificial Sequence
  Description of Artificial Sequence: Synthetic oligonucleotide
tctagtggggatcggagtcat

SEQ ID NO: 25170 - DNA, 21 bp, Artificial Sequence
  Description of Artificial Sequence: Synthetic oligonucleotide
tcgtctggtgaggggtataag

SEQ ID NO: 25171 - DNA, 21 bp, Artificial Sequence
  Description of Artificial Sequence: Synthetic oligonucleotide
tcttctgggtttggtaagcct

SEQ ID NO: 25172 - DNA, 21 bp, Artificial Sequence
  Description of Artificial Sequence: Synthetic oligonucleotide
tcgtcggggattgggcatttt

SEQ ID NO: 25173 - DNA, 21 bp, Artificial Sequence
  Description of Artificial Sequence: Synthetic oligonucleotide
tctagtgggcttgctcgtgct

SEQ ID NO: 25174 - DNA, 21 bp, Artificial Sequence
  Description of Artificial Sequence: Synthetic oligonucleotide
agttcgggtctgatttctgtt

SEQ ID NO: 25175 - DNA, 21 bp, Artificial Sequence
  Description of Artificial Sequence: Synthetic oligonucleotide
tcgagtgggaataatcttcat

SEQ ID NO: 25176 - DNA, 21 bp, Artificial Sequence
  Description of Artificial Sequence: Synthetic oligonucleotide
agttctgggccttctcttgct

SEQ ID NO: 25177 - DNA, 21 bp, Artificial Sequence
  Description of Artificial Sequence: Synthetic oligonucleotide
tcgtcggggcaggtgcgtcag

SEQ ID NO: 25178 - DNA, 21 bp, Artificial Sequence
  Description of Artificial Sequence: Synthetic oligonucleotide
tcgtcgggtcgtcctgttgct

SEQ ID NO: 25179 - DNA, 21 bp, Artificial Sequence
  Description of Artificial Sequence: Synthetic oligonucleotide
agttctggtactatgtcttat

SEQ ID NO: 25180 - DNA, 21 bp, Artificial Sequence
  Description of Artificial Sequence: Synthetic oligonucleotide
tcgtcgcattttagggctgat

SEQ ID NO: 25181 - DNA, 21 bp, Artificial Sequence
  Description of Artificial Sequence: Synthetic oligonucleotide
tcgagtcattttgttgtgact

SEQ ID NO: 25182 - DNA, 21 bp, Artificial Sequence
  Description of Artificial Sequence: Synthetic oligonucleotide
agttcgcatcatcagtttccg

SEQ ID NO: 25183 - DNA, 21 bp, Artificial Sequence
  Description of Artificial Sequence: Synthetic oligonucleotide
agttcgcataaggtggcttgg

SEQ ID NO: 25184 - DNA, 21 bp, Artificial Sequence
  Description of Artificial Sequence: Synthetic oligonucleotide
agtagtcatatgtcgccgtgg

SEQ ID NO: 25185 - DNA, 21 bp, Artificial Sequence
  Description of Artificial Sequence: Synthetic oligonucleotide
tcgtctcatccttcgaggatt

SEQ ID NO: 25186 - DNA, 21 bp, Artificial Sequence
  Description of Artificial Sequence: Synthetic oligonucleotide
agttctcatcaggagaagctt

SEQ ID NO: 25187 - DNA, 21 bp, Artificial Sequence
  Description of Artificial Sequence: Synthetic oligonucleotide
tcgtctcatagggctcttgtt

SEQ ID NO: 25188 - DNA, 21 bp, Artificial Sequence
  Description of Artificial Sequence: Synthetic oligonucleotide
tcttctcatagtctttatact

SEQ ID NO: 25189 - DNA, 21 bp, Artificial Sequence
  Description of Artificial Sequence: Synthetic oligonucleotide
tcttctcattcgtatgttacg

SEQ ID NO: 25190 - DNA, 21 bp, Artificial Sequence
  Description of Artificial Sequence: Synthetic oligonucleotide
tcgtctcatgttacgggttat

SEQ ID NO: 25191 - DNA, 21 bp, Artificial Sequence
  Description of Artificial Sequence: Synthetic oligonucleotide
agtagtattcataatgctgtt

SEQ ID NO: 25192 - DNA, 21 bp, Artificial Sequence
  Description of Artificial Sequence: Synthetic oligonucleotide
tctagtattattttgggtgat

SEQ ID NO: 25193 - DNA, 21 bp, Artificial Sequence
  Description of Artificial Sequence: Synthetic oligonucleotide
tcgagtattcctaggcatccg

SEQ ID NO: 25194 - DNA, 21 bp, Artificial Sequence
  Description of Artificial Sequence: Synthetic oligonucleotide
tctagtattccttcgaatgtt

SEQ ID NO: 25195 - DNA, 21 bp, Artificial Sequence
  Description of Artificial Sequence: Synthetic oligonucleotide
tcgagtattcagacggctcag

SEQ ID NO: 25196 - DNA, 21 bp, Artificial Sequence
  Description of Artificial Sequence: Synthetic oligonucleotide
tctagtattaggcctagtcct

SEQ ID NO: 25197 - DNA, 21 bp, Artificial Sequence
  Description of Artificial Sequence: Synthetic oligonucleotide
tcttctatttcgggtagttcg

SEQ ID NO: 25198 - DNA, 21 bp, Artificial Sequence
  Description of Artificial Sequence: Synthetic oligonucleotide
tcgtcgattagtcctaatggt

SEQ ID NO: 25199 - DNA, 21 bp, Artificial Sequence
  Description of Artificial Sequence: Synthetic oligonucleotide
tcgagtaaggagagtccgctg

SEQ ID NO: 25200 - DNA, 21 bp, Artificial Sequence
  Description of Artificial Sequence: Synthetic oligonucleotide
tcgtctaaggggtatcatttg

SEQ ID NO: 25201 - DNA, 21 bp, Artificial Sequence
  Description of Artificial Sequence: Synthetic oligonucleotide
agttcgaaggggtatctggtt

SEQ ID NO: 25202 - DNA, 21 bp, Artificial Sequence
  Description of Artificial Sequence: Synthetic oligonucleotide
tcgtctaagttggagactgag

SEQ ID NO: 25203 - DNA, 21 bp, Artificial Sequence
  Description of Artificial Sequence: Synthetic oligonucleotide
tcgagtaagatgacggggagt

SEQ ID NO: 25204 - DNA, 21 bp, Artificial Sequence
  Description of Artificial Sequence: Synthetic oligonucleotide
agtagtaagcaggtgacgaat

SEQ ID NO: 25205 - DNA, 21 bp, Artificial Sequence
  Description of Artificial Sequence: Synthetic oligonucleotide
agttctaagtatgctgagaat

SEQ ID NO: 25206 - DNA, 21 bp, Artificial Sequence
  Description of Artificial Sequence: Synthetic oligonucleotide
tcttctcttgcttctggtgct

SEQ ID NO: 25207 - DNA, 21 bp, Artificial Sequence
  Description of Artificial Sequence: Synthetic oligonucleotide
tcgtctcttgatagggagttt

SEQ ID NO: 25208 - DNA, 21 bp, Artificial Sequence
  Description of Artificial Sequence: Synthetic oligonucleotide
tcttcgctgggtgagactctg

SEQ ID NO: 25209 - DNA, 21 bp, Artificial Sequence
  Description of Artificial Sequence: Synthetic oligonucleotide
tcgagtttgattgagctgctt

SEQ ID NO: 25210 - DNA, 21 bp, Artificial Sequence
  Description of Artificial Sequence: Synthetic oligonucleotide
tctagtcttaagattgagacg

SEQ ID NO: 25211 - DNA, 21 bp, Artificial Sequence
  Description of Artificial Sequence: Synthetic oligonucleotide
tcttctcttaagttgaatggt

SEQ ID NO: 25212 - DNA, 21 bp, Artificial Sequence
  Description of Artificial Sequence: Synthetic oligonucleotide
agttctctgaatactggtgcg

SEQ ID NO: 25213 - DNA, 21 bp, Artificial Sequence
  Description of Artificial Sequence: Synthetic oligonucleotide
tcgtctttgcctgctggtcgt

SEQ ID NO: 25214 - DNA, 21 bp, Artificial Sequence
  Description of Artificial Sequence: Synthetic oligonucleotide
tcttcgctgcgtaataatatt

SEQ ID NO: 25215 - DNA, 21 bp, Artificial Sequence
  Description of Artificial Sequence: Synthetic oligonucleotide
tcttcgcttaggcctgctacg

SEQ ID NO: 25216 - DNA, 21 bp, Artificial Sequence
  Description of Artificial Sequence: Synthetic oligonucleotide
agtagtctttcggatcgggat

SEQ ID NO: 25217 - DNA, 21 bp, Artificial Sequence
  Description of Artificial Sequence: Synthetic oligonucleotide
tcttctttgtcgcgtactggg

SEQ ID NO: 25218 - DNA, 21 bp, Artificial Sequence
  Description of Artificial Sequence: Synthetic oligonucleotide
tcgagtatggctaagaaggag

SEQ ID NO: 25219 - DNA, 21 bp, Artificial Sequence
  Description of Artificial Sequence: Synthetic oligonucleotide
tctagtatggctttgggtacg

SEQ ID NO: 25220 - DNA, 21 bp, Artificial Sequence
  Description of Artificial Sequence: Synthetic oligonucleotide
tctagtatggttgatcaggtt

SEQ ID NO: 25221 - DNA, 21 bp, Artificial Sequence
  Description of Artificial Sequence: Synthetic oligonucleotide
agtagtaatgctatgctgcct

SEQ ID NO: 25222 - DNA, 21 bp, Artificial Sequence
  Description of Artificial Sequence: Synthetic oligonucleotide
tcttcgaatgagcatatgcgt

SEQ ID NO: 25223 - DNA, 21 bp, Artificial Sequence
  Description of Artificial Sequence: Synthetic oligonucleotide
agttctaatcttaagcttagt

SEQ ID NO: 25224 - DNA, 21 bp, Artificial Sequence
  Description of Artificial Sequence: Synthetic oligonucleotide
agttctaatcctatgttgagg

SEQ ID NO: 25225 - DNA, 21 bp, Artificial Sequence
  Description of Artificial Sequence: Synthetic oligonucleotide
tcgtcgaatccgcagagggtg

SEQ ID NO: 25226 - DNA, 21 bp, Artificial Sequence
  Description of Artificial Sequence: Synthetic oligonucleotide
agttctaatagggcgagtgtt

SEQ ID NO: 25227 - DNA, 21 bp, Artificial Sequence
  Description of Artificial Sequence: Synthetic oligonucleotide
tcgtcgaataggggtgagctg

SEQ ID NO: 25228 - DNA, 21 bp, Artificial Sequence
  Description of Artificial Sequence: Synthetic oligonucleotide
tcttcgaatagttttcctcgt

SEQ ID NO: 25229 - DNA, 21 bp, Artificial Sequence
  Description of Artificial Sequence: Synthetic oligonucleotide
agttctaattctggtgtgccg

SEQ ID NO: 25230 - DNA, 21 bp, Artificial Sequence
  Description of Artificial Sequence: Synthetic oligonucleotide
tcgtctaatagtcgtgctatt

SEQ ID NO: 25231 - DNA, 21 bp, Artificial Sequence
  Description of Artificial Sequence: Synthetic oligonucleotide
agtagtaattcgagttttgcg

SEQ ID NO: 25232 - DNA, 21 bp, Artificial Sequence
  Description of Artificial Sequence: Synthetic oligonucleotide
tcgtcgaatagtgttattgcg

SEQ ID NO: 25233 - DNA, 21 bp, Artificial Sequence
  Description of Artificial Sequence: Synthetic oligonucleotide
tcttctcctgcgctgaattat

SEQ ID NO: 25234 - DNA, 21 bp, Artificial Sequence
  Description of Artificial Sequence: Synthetic oligonucleotide
tcttcgcctgaggggctggct

SEQ ID NO: 25235 - DNA, 21 bp, Artificial Sequence
  Description of Artificial Sequence: Synthetic oligonucleotide
agttctccgatgcgttctgag

SEQ ID NO: 25236 - DNA, 21 bp, Artificial Sequence
  Description of Artificial Sequence: Synthetic oligonucleotide
tcttctcctccggggaatggg

SEQ ID NO: 25237 - DNA, 21 bp, Artificial Sequence
  Description of Artificial Sequence: Synthetic oligonucleotide
tcgtctcctcggggttttggt

SEQ ID NO: 25238 - DNA, 21 bp, Artificial Sequence
  Description of Artificial Sequence: Synthetic oligonucleotide
agtagtcctcgtcatagtgag

SEQ ID NO: 25239 - DNA, 21 bp, Artificial Sequence
  Description of Artificial Sequence: Synthetic oligonucleotide
tctagtcctagtcttactctt

SEQ ID NO: 25240 - DNA, 21 bp, Artificial Sequence
  Description of Artificial Sequence: Synthetic oligonucleotide
tctagtcctagttctaatggg

SEQ ID NO: 25241 - DNA, 21 bp, Artificial Sequence
  Description of Artificial Sequence: Synthetic oligonucleotide
agttcgcctacgtgttgtcct

SEQ ID NO: 25242 - DNA, 21 bp, Artificial Sequence
  Description of Artificial Sequence: Synthetic oligonucleotide
agttcgcctactatgtttgtt

SEQ ID NO: 25243 - DNA, 21 bp, Artificial Sequence
  Description of Artificial Sequence: Synthetic oligonucleotide
tcgagtcctactcctcttaag

SEQ ID NO: 25244 - DNA, 21 bp, Artificial Sequence
  Description of Artificial Sequence: Synthetic oligonucleotide
agttcgccggttgcttcgtcg

SEQ ID NO: 25245 - DNA, 21 bp, Artificial Sequence
  Description of Artificial Sequence: Synthetic oligonucleotide
agttctcctgttaagactctg

SEQ ID NO: 25246 - DNA, 21 bp, Artificial Sequence
  Description of Artificial Sequence: Synthetic oligonucleotide
agtagtccgtatcctatgatg

SEQ ID NO: 25247 - DNA, 21 bp, Artificial Sequence
  Description of Artificial Sequence: Synthetic oligonucleotide
agttctcaggagcgtaatgtt

SEQ ID NO: 25248 - DNA, 21 bp, Artificial Sequence
  Description of Artificial Sequence: Synthetic oligonucleotide
tcttcgcaggggcctattagg

SEQ ID NO: 25249 - DNA, 21 bp, Artificial Sequence
  Description of Artificial Sequence: Synthetic oligonucleotide
agttctcagaagccggtgctt

SEQ ID NO: 25250 - DNA, 21 bp, Artificial Sequence
  Description of Artificial Sequence: Synthetic oligonucleotide
tctagtcagctgctgttggat

SEQ ID NO: 25251 - DNA, 21 bp, Artificial Sequence
  Description of Artificial Sequence: Synthetic oligonucleotide
tcttcgcagatgctttatccg

SEQ ID NO: 25252 - DNA, 21 bp, Artificial Sequence
  Description of Artificial Sequence: Synthetic oligonucleotide
tctagtcagcctcttgagctg

SEQ ID NO: 25253 - DNA, 21 bp, Artificial Sequence
  Description of Artificial Sequence: Synthetic oligonucleotide
agttcgcagccgatgtcttat

SEQ ID NO: 25254 - DNA, 21 bp, Artificial Sequence
  Description of Artificial Sequence: Synthetic oligonucleotide
tcttcgcagcgtgttccgagt

SEQ ID NO: 25255 - DNA, 21 bp, Artificial Sequence
  Description of Artificial Sequence: Synthetic oligonucleotide
agttcgcagagtatgactctt

SEQ ID NO: 25256 - DNA, 21 bp, Artificial Sequence
  Description of Artificial Sequence: Synthetic oligonucleotide
tcgtctcaggttaagacgttg

SEQ ID NO: 25257 - DNA, 21 bp, Artificial Sequence
  Description of Artificial Sequence: Synthetic oligonucleotide
tcgagtcagtggcatgcgggt

SEQ ID NO: 25258 - DNA, 21 bp, Artificial Sequence
  Description of Artificial Sequence: Synthetic oligonucleotide
agttcgcgggctggtacggag

SEQ ID NO: 25259 - DNA, 21 bp, Artificial Sequence
  Description of Artificial Sequence: Synthetic oligonucleotide
agttctagggatatgacttct

SEQ ID NO: 25260 - DNA, 21 bp, Artificial Sequence
  Description of Artificial Sequence: Synthetic oligonucleotide
tcgtctagggatgttgggcgt

SEQ ID NO: 25261 - DNA, 21 bp, Artificial Sequence
  Description of Artificial Sequence: Synthetic oligonucleotide
tcttctcgggggccgattgct

SEQ ID NO: 25262 - DNA, 21 bp, Artificial Sequence
  Description of Artificial Sequence: Synthetic oligonucleotide
agttctagggggagtccgtct

SEQ ID NO: 25263 - DNA, 21 bp, Artificial Sequence
  Description of Artificial Sequence: Synthetic oligonucleotide
tcgtctcgtggggtgcctggg

SEQ ID NO: 25264 - DNA, 21 bp, Artificial Sequence
  Description of Artificial Sequence: Synthetic oligonucleotide
agtagtcgtattaatcctatg

SEQ ID NO: 25265 - DNA, 21 bp, Artificial Sequence
  Description of Artificial Sequence: Synthetic oligonucleotide
agttcgcggattccggatacg

SEQ ID NO: 25266 - DNA, 21 bp, Artificial Sequence
  Description of Artificial Sequence: Synthetic oligonucleotide
tcttctaggctgaatgagcag

SEQ ID NO: 25267 - DNA, 21 bp, Artificial Sequence
  Description of Artificial Sequence: Synthetic oligonucleotide
agtagtcgtctgtctgcggat

SEQ ID NO: 25268 - DNA, 21 bp, Artificial Sequence
  Description of Artificial Sequence: Synthetic oligonucleotide
tcgtcgaggttgtctgagagt

SEQ ID NO: 25269 - DNA, 21 bp, Artificial Sequence
  Description of Artificial Sequence: Synthetic oligonucleotide
tcttcgcgtccgggtatgagt

SEQ ID NO: 25270 - DNA, 21 bp, Artificial Sequence
  Description of Artificial Sequence: Synthetic oligonucleotide
agttctcgtccgggtcagcat

SEQ ID NO: 25271 - DNA, 21 bp, Artificial Sequence
  Description of Artificial Sequence: Synthetic oligonucleotide
tcttcgaggccgaatgatgat

SEQ ID NO: 25272 - DNA, 21 bp, Artificial Sequence
  Description of Artificial Sequence: Synthetic oligonucleotide
agttctcggccgtcgggttcg

SEQ ID NO: 25273 - DNA, 21 bp, Artificial Sequence
  Description of Artificial Sequence: Synthetic oligonucleotide
agtagtcgtagtgctcagagt

SEQ ID NO: 25274 - DNA, 21 bp, Artificial Sequence
  Description of Artificial Sequence: Synthetic oligonucleotide
tcgtcgaggtcgcctgatctg

SEQ ID NO: 25275 - DNA, 21 bp, Artificial Sequence
  Description of Artificial Sequence: Synthetic oligonucleotide
tcttcgcggactaattcttat

SEQ ID NO: 25276 - DNA, 21 bp, Artificial Sequence
  Description of Artificial Sequence: Synthetic oligonucleotide
agtagtcgtacggttgaggcg

SEQ ID NO: 25277 - DNA, 21 bp, Artificial Sequence
  Description of Artificial Sequence: Synthetic oligonucleotide
tcgtcgtcggcgcttgtgctt

SEQ ID NO: 25278 - DNA, 21 bp, Artificial Sequence
  Description of Artificial Sequence: Synthetic oligonucleotide
tctagttctgcggtggcttcg

SEQ ID NO: 25279 - DNA, 21 bp, Artificial Sequence
  Description of Artificial Sequence: Synthetic oligonucleotide
tcttctagtgagtctgcgtgg

SEQ ID NO: 25280 - DNA, 21 bp, Artificial Sequence
  Description of Artificial Sequence: Synthetic oligonucleotide
tctagttctgggactcatcct

SEQ ID NO: 25281 - DNA, 21 bp, Artificial Sequence
  Description of Artificial Sequence: Synthetic oligonucleotide
agttcgtcgattattcggact

SEQ ID NO: 25282 - DNA, 21 bp, Artificial Sequence
  Description of Artificial Sequence: Synthetic oligonucleotide
tcgagttcgattcgggctaat

SEQ ID NO: 25283 - DNA, 21 bp, Artificial Sequence
  Description of Artificial Sequence: Synthetic oligonucleotide
tcttctagtaagcctcatttg

SEQ ID NO: 25284 - DNA, 21 bp, Artificial Sequence
  Description of Artificial Sequence: Synthetic oligonucleotide
tcgagttcgcttgatagtcgg

SEQ ID NO: 25285 - DNA, 21 bp, Artificial Sequence
  Description of Artificial Sequence: Synthetic oligonucleotide
tcgagttcgcttcagctgggt

SEQ ID NO: 25286 - DNA, 21 bp, Artificial Sequence
  Description of Artificial Sequence: Synthetic oligonucleotide
tcgagttcgttgtcgcattcg

SEQ ID NO: 25287 - DNA, 21 bp, Artificial Sequence
  Description of Artificial Sequence: Synthetic oligonucleotide
tcgtcttcgatgagggagagg

SEQ ID NO: 25288 - DNA, 21 bp, Artificial Sequence
  Description of Artificial Sequence: Synthetic oligonucleotide
tcgagtagtaatacgctgact

SEQ ID NO: 25289 - DNA, 21 bp, Artificial Sequence
  Description of Artificial Sequence: Synthetic oligonucleotide
tcgagtagtagggcggttgag

SEQ ID NO: 25290 - DNA, 21 bp, Artificial Sequence
  Description of Artificial Sequence: Synthetic oligonucleotide
tcgtcttcgcggcctactcag

SEQ ID NO: 25291 - DNA, 21 bp, Artificial Sequence
  Description of Artificial Sequence: Synthetic oligonucleotide
tcttcttcgtctaagactcct

SEQ ID NO: 25292 - DNA, 21 bp, Artificial Sequence
  Description of Artificial Sequence: Synthetic oligonucleotide
tcgtcttctagtctttatact

SEQ ID NO: 25293 - DNA, 21 bp, Artificial Sequence
  Description of Artificial Sequence: Synthetic oligonucleotide
agttctagttcgccgcgtgct

SEQ ID NO: 25294 - DNA, 21 bp, Artificial Sequence
  Description of Artificial Sequence: Synthetic oligonucleotide
tcgtctagttcgtcgcggccg

SEQ ID NO: 25295 - DNA, 21 bp, Artificial Sequence
  Description of Artificial Sequence: Synthetic oligonucleotide
agttcttcgtctgttcgggcg

SEQ ID NO: 25296 - DNA, 21 bp, Artificial Sequence
  Description of Artificial Sequence: Synthetic oligonucleotide
agttcgtctactccgccgttg

SEQ ID NO: 25297 - DNA, 21 bp, Artificial Sequence
  Description of Artificial Sequence: Synthetic oligonucleotide
tcgagttcgactcctccttct

SEQ ID NO: 25298 - DNA, 21 bp, Artificial Sequence
  Description of Artificial Sequence: Synthetic oligonucleotide
agttcttcgactccgccgact

SEQ ID NO: 25299 - DNA, 21 bp, Artificial Sequence
  Description of Artificial Sequence: Synthetic oligonucleotide
tcgagttctacgtctactggt

SEQ ID NO: 25300 - DNA, 21 bp, Artificial Sequence
  Description of Artificial Sequence: Synthetic oligonucleotide
tcttcgtctactgttcagttt

SEQ ID NO: 25301 - DNA, 21 bp, Artificial Sequence
  Description of Artificial Sequence: Synthetic oligonucleotide
agttcgtcggttagtaataat

SEQ ID NO: 25302 - DNA, 21 bp, Artificial Sequence
  Description of Artificial Sequence: Synthetic oligonucleotide
tctagttcgtataatggtaag

SEQ ID NO: 25303 - DNA, 21 bp, Artificial Sequence
  Description of Artificial Sequence: Synthetic oligonucleotide
tcgagtacggagtctattagg

SEQ ID NO: 25304 - DNA, 21 bp, Artificial Sequence
  Description of Artificial Sequence: Synthetic oligonucleotide
tcgagtacgcatgagaagccg

SEQ ID NO: 25305 - DNA, 21 bp, Artificial Sequence
  Description of Artificial Sequence: Synthetic oligonucleotide
tcgagtacgaagtcgcttgct

SEQ ID NO: 25306 - DNA, 21 bp, Artificial Sequence
  Description of Artificial Sequence: Synthetic oligonucleotide
tcttctacgccgccgaagtat

SEQ ID NO: 25307 - DNA, 21 bp, Artificial Sequence
  Description of Artificial Sequence: Synthetic oligonucleotide
tcgtctactcctacttcgcat

SEQ ID NO: 25308 - DNA, 21 bp, Artificial Sequence
  Description of Artificial Sequence: Synthetic oligonucleotide
tcttctacgccgactactgcg

SEQ ID NO: 25309 - DNA, 21 bp, Artificial Sequence
  Description of Artificial Sequence: Synthetic oligonucleotide
agttcgacgcgtgatgctcat

SEQ ID NO: 25310 - DNA, 21 bp, Artificial Sequence
  Description of Artificial Sequence: Synthetic oligonucleotide
tcgagtacgcgtacgcctcct

SEQ ID NO: 25311 - DNA, 21 bp, Artificial Sequence
  Description of Artificial Sequence: Synthetic oligonucleotide
tctagtacttctagtcggttt

SEQ ID NO: 25312 - DNA, 21 bp, Artificial Sequence
  Description of Artificial Sequence: Synthetic oligonucleotide
agttcgacgtcgacgcttttg

SEQ ID NO: 25313 - DNA, 21 bp, Artificial Sequence
  Description of Artificial Sequence: Synthetic oligonucleotide
tcgtctactactatgattgag

SEQ ID NO: 25314 - DNA, 21 bp, Artificial Sequence
  Description of Artificial Sequence: Synthetic oligonucleotide
agttcggttgcttcgactgtt

SEQ ID NO: 25315 - DNA, 21 bp, Artificial Sequence
  Description of Artificial Sequence: Synthetic oligonucleotide
tcgtctgttgggagtgctggt

SEQ ID NO: 25316 - DNA, 21 bp, Artificial Sequence
  Description of Artificial Sequence: Synthetic oligonucleotide
tcgagtgtgcatctttatcct

SEQ ID NO: 25317 - DNA, 21 bp, Artificial Sequence
  Description of Artificial Sequence: Synthetic oligonucleotide
tcgtctgttcattcgaggatg

SEQ ID NO: 25318 - DNA, 21 bp, Artificial Sequence
  Description of Artificial Sequence: Synthetic oligonucleotide
tcttctgttaatacgtctggt

SEQ ID NO: 25319 - DNA, 21 bp, Artificial Sequence
  Description of Artificial Sequence: Synthetic oligonucleotide
tcgagtgtgcctcgtccgtct

SEQ ID NO: 25320 - DNA, 21 bp, Artificial Sequence
  Description of Artificial Sequence: Synthetic oligonucleotide
agttcggtgcgtttgttgtcg

SEQ ID NO: 25321 - DNA, 21 bp, Artificial Sequence
  Description of Artificial Sequence: Synthetic oligonucleotide
tcgagtgtttcggggttgagt

SEQ ID NO: 25322 - DNA, 21 bp, Artificial Sequence
  Description of Artificial Sequence: Synthetic oligonucleotide
tcttctgttacgcggacgggg

SEQ ID NO: 25323 - DNA, 21 bp, Artificial Sequence
  Description of Artificial Sequence: Synthetic oligonucleotide
tcttctgtgacggtttcttct

SEQ ID NO: 25324 - DNA, 21 bp, Artificial Sequence
  Description of Artificial Sequence: Synthetic oligonucleotide
tcgagtgttgttcatggggtg

SEQ ID NO: 25325 - DNA, 21 bp, Artificial Sequence
  Description of Artificial Sequence: Synthetic oligonucleotide
tcgtcggtggttccgtctatg

SEQ ID NO: 25326 - DNA, 21 bp, Artificial Sequence
  Description of Artificial Sequence: Synthetic oligonucleotide
tctagttggcagccttttgag

SEQ ID NO: 25327 - DNA, 21 bp, Artificial Sequence
  Description of Artificial Sequence: Synthetic oligonucleotide
agttcttatgctccgttgcat

SEQ ID NO: 25328 - DNA, 21 bp, Artificial Sequence
  Description of Artificial Sequence: Synthetic oligonucleotide
agtagttatgcgtctgggtcg

SEQ ID NO: 25329 - DNA, 21 bp, Artificial Sequence
  Description of Artificial Sequence: Synthetic oligonucleotide
agttcgtatgattctagtaag

SEQ ID NO: 25330 - DNA, 21 bp, Artificial Sequence
  Description of Artificial Sequence: Synthetic oligonucleotide
tcgagttatgagaaggggact

SEQ ID NO: 25331 - DNA, 21 bp, Artificial Sequence
  Description of Artificial Sequence: Synthetic oligonucleotide
tcgtcttatcatgggcttacg

SEQ ID NO: 25332 - DNA, 21 bp, Artificial Sequence
  Description of Artificial Sequence: Synthetic oligonucleotide
tctagttatcatcctgcggag

SEQ ID NO: 25333 - DNA, 21 bp, Artificial Sequence
  Description of Artificial Sequence: Synthetic oligonucleotide
tcttcgtatcctgggcattcg

SEQ ID NO: 25334 - DNA, 21 bp, Artificial Sequence
  Description of Artificial Sequence: Synthetic oligonucleotide
tcgtcgtatagtgttccggag

SEQ ID NO: 25335 - DNA, 21 bp, Artificial Sequence
  Description of Artificial Sequence: Synthetic oligonucleotide
tctacggctattactattcat

SEQ ID NO: 25336 - DNA, 21 bp, Artificial Sequence
  Description of Artificial Sequence: Synthetic oligonucleotide
tcgactgcgcttggtattgtt

SEQ ID NO: 25337 - DNA, 21 bp, Artificial Sequence
  Description of Artificial Sequence: Synthetic oligonucleotide
agtactgctaatgctcagact

SEQ ID NO: 25338 - DNA, 21 bp, Artificial Sequence
  Description of Artificial Sequence: Synthetic oligonucleotide
agtacggctccgggtgctgcg

SEQ ID NO: 25339 - DNA, 21 bp, Artificial Sequence
  Description of Artificial Sequence: Synthetic oligonucleotide
tctacggctcgggctagtact

SEQ ID NO: 25340 - DNA, 21 bp, Artificial Sequence
  Description of Artificial Sequence: Synthetic oligonucleotide
tcgacggcgcggctgcgggat

SEQ ID NO: 25341 - DNA, 21 bp, Artificial Sequence
  Description of Artificial Sequence: Synthetic oligonucleotide
agtacggcgacgcagttgatg

SEQ ID NO: 25342 - DNA, 21 bp, Artificial Sequence
  Description of Artificial Sequence: Synthetic oligonucleotide
tctacgtgtcatccttcgggt

SEQ ID NO: 25343 - DNA, 21 bp, Artificial Sequence
  Description of Artificial Sequence: Synthetic oligonucleotide
tctacggatgagcatgtgatg

SEQ ID NO: 25344 - DNA, 21 bp, Artificial Sequence
  Description of Artificial Sequence: Synthetic oligonucleotide
tcgactgatcatacggcttat

SEQ ID NO: 25345 - DNA, 21 bp, Artificial Sequence
  Description of Artificial Sequence: Synthetic oligonucleotide
agtactgatttgaggcaggct

SEQ ID NO: 25346 - DNA, 21 bp, Artificial Sequence
  Description of Artificial Sequence: Synthetic oligonucleotide
tcgacggatatgcggcatatt

SEQ ID NO: 25347 - DNA, 21 bp, Artificial Sequence
  Description of Artificial Sequence: Synthetic oligonucleotide
tcgactgataatgatcttcgg

SEQ ID NO: 25348 - DNA, 21 bp, Artificial Sequence
  Description of Artificial Sequence: Synthetic oligonucleotide
agtacggatacgaatcatcag

SEQ ID NO: 25349 - DNA, 21 bp, Artificial Sequence
  Description of Artificial Sequence: Synthetic oligonucleotide
tctacggatgtgaagacgcag

SEQ ID NO: 25350 - DNA, 21 bp, Artificial Sequence
  Description of Artificial Sequence: Synthetic oligonucleotide
tctacggagtttaagtcggct

SEQ ID NO: 25351 - DNA, 21 bp, Artificial Sequence
  Description of Artificial Sequence: Synthetic oligonucleotide
tctacggagcgtcctatgcct

SEQ ID NO: 25352 - DNA, 21 bp, Artificial Sequence
  Description of Artificial Sequence: Synthetic oligonucleotide
tctactgagactgcgcagagt

SEQ ID NO: 25353 - DNA, 21 bp, Artificial Sequence
  Description of Artificial Sequence: Synthetic oligonucleotide
tcgacgtttaagaatgttgtt

SEQ ID NO: 25354 - DNA, 21 bp, Artificial Sequence
  Description of Artificial Sequence: Synthetic oligonucleotide
tcgacgtttaattcggctggt

SEQ ID NO: 25355 - DNA, 21 bp, Artificial Sequence
  Description of Artificial Sequence: Synthetic oligonucleotide
agtacttttagttcttcgatg

SEQ ID NO: 25356 - DNA, 21 bp, Artificial Sequence
  Description of Artificial Sequence: Synthetic oligonucleotide
tcgacgtttgtgactgcgggg

SEQ ID NO: 25357 - DNA, 21 bp, Artificial Sequence
  Description of Artificial Sequence: Synthetic oligonucleotide
tcgacttttgtgactaggagt

SEQ ID NO: 25358 - DNA, 21 bp, Artificial Sequence
  Description of Artificial Sequence: Synthetic oligonucleotide
agtacgggtgctttgccttct

SEQ ID NO: 25359 - DNA, 21 bp, Artificial Sequence
  Description of Artificial Sequence: Synthetic oligonucleotide
tctacgggtgctatgctgcat

SEQ ID NO: 25360 - DNA, 21 bp, Artificial Sequence
  Description of Artificial Sequence: Synthetic oligonucleotide
agtactggggctcctcctgat

SEQ ID NO: 25361 - DNA, 21 bp, Artificial Sequence
  Description of Artificial Sequence: Synthetic oligonucleotide
agtactggtatgggtgctttt

SEQ ID NO: 25362 - DNA, 21 bp, Artificial Sequence
  Description of Artificial Sequence: Synthetic oligonucleotide
tcgactggtccgtttcttccg

SEQ ID NO: 25363 - DNA, 21 bp, Artificial Sequence
  Description of Artificial Sequence: Synthetic oligonucleotide
tcgacggggtcggctcagact

SEQ ID NO: 25364 - DNA, 21 bp, Artificial Sequence
  Description of Artificial Sequence: Synthetic oligonucleotide
tcgacgggttcgacgctgcag

SEQ ID NO: 25365 - DNA, 21 bp, Artificial Sequence
  Description of Artificial Sequence: Synthetic oligonucleotide
agtacggggtatggtggtctg

SEQ ID NO: 25366 - DNA, 21 bp, Artificial Sequence
  Description of Artificial Sequence: Synthetic oligonucleotide
agtacgcatatttctcctcct

SEQ ID NO: 25367 - DNA, 21 bp, Artificial Sequence
  Description of Artificial Sequence: Synthetic oligonucleotide
agtacgcatatgcggcttgcg

SEQ ID NO: 25368 - DNA, 21 bp, Artificial Sequence
  Description of Artificial Sequence: Synthetic oligonucleotide
tctactcataatctgacttcg

SEQ ID NO: 25369 - DNA, 21 bp, Artificial Sequence
  Description of Artificial Sequence: Synthetic oligonucleotide
agtactcatcgggattcgagt

SEQ ID NO: 25370 - DNA, 21 bp, Artificial Sequence
  Description of Artificial Sequence: Synthetic oligonucleotide
tctacgcatcgtagtcttgct

SEQ ID NO: 25371 - DNA, 21 bp, Artificial Sequence
  Description of Artificial Sequence: Synthetic oligonucleotide
tcgacgcattcgtatccggtg

SEQ ID NO: 25372 - DNA, 21 bp, Artificial Sequence
  Description of Artificial Sequence: Synthetic oligonucleotide
tcgactcatgtgtcgagtacg

SEQ ID NO: 25373 - DNA, 21 bp, Artificial Sequence
  Description of Artificial Sequence: Synthetic oligonucleotide
agtactattgcgggtacgccg

SEQ ID NO: 25374 - DNA, 21 bp, Artificial Sequence
  Description of Artificial Sequence: Synthetic oligonucleotide
agtactattagtgctcttgcg

SEQ ID NO: 25375 - DNA, 21 bp, Artificial Sequence
  Description of Artificial Sequence: Synthetic oligonucleotide
agtactaaggagtcgcagctt

SEQ ID NO: 25376 - DNA, 21 bp, Artificial Sequence
  Description of Artificial Sequence: Synthetic oligonucleotide
agtactaagtctgggactcct

SEQ ID NO: 25377 - DNA, 21 bp, Artificial Sequence
  Description of Artificial Sequence: Synthetic oligonucleotide
tctacgaagactcctcctgcg

SEQ ID NO: 25378 - DNA, 21 bp, Artificial Sequence
  Description of Artificial Sequence: Synthetic oligonucleotide
agtacgaagtattcgtctgtt

SEQ ID NO: 25379 - DNA, 21 bp, Artificial Sequence
  Description of Artificial Sequence: Synthetic oligonucleotide
tcgactcttgcgcgggataat

SEQ ID NO: 25380 - DNA, 21 bp, Artificial Sequence
  Description of Artificial Sequence: Synthetic oligonucleotide
agtacgttggcgcgggtgcct

SEQ ID NO: 25381 - DNA, 21 bp, Artificial Sequence
  Description of Artificial Sequence: Synthetic oligonucleotide
agtactctgtgtcctgttctt

SEQ ID NO: 25382 - DNA, 21 bp, Artificial Sequence
  Description of Artificial Sequence: Synthetic oligonucleotide
tctactctgggtgggggttat

SEQ ID NO: 25383 - DNA, 21 bp, Artificial Sequence
  Description of Artificial Sequence: Synthetic oligonucleotide
tcgacgttgaataatgttccg

SEQ ID NO: 25384 - DNA, 21 bp, Artificial Sequence
  Description of Artificial Sequence: Synthetic oligonucleotide
tcgactcttccttcgcctgag

SEQ ID NO: 25385 - DNA, 21 bp, Artificial Sequence
  Description of Artificial Sequence: Synthetic oligonucleotide
agtactctgccgtctcgtcct

SEQ ID NO: 25386 - DNA, 21 bp, Artificial Sequence
  Description of Artificial Sequence: Synthetic oligonucleotide
tctacgctgaggtgtggggag

SEQ ID NO: 25387 - DNA, 21 bp, Artificial Sequence
  Description of Artificial Sequence: Synthetic oligonucleotide
tcgacgttggtgaagaatgct

SEQ ID NO: 25388 - DNA, 21 bp, Artificial Sequence
  Description of Artificial Sequence: Synthetic oligonucleotide
tctactttggttcgtgctgag

SEQ ID NO: 25389 - DNA, 21 bp, Artificial Sequence
  Description of Artificial Sequence: Synthetic oligonucleotide
tctactatggcggggaggcat

SEQ ID NO: 25390 - DNA, 21 bp, Artificial Sequence
  Description of Artificial Sequence: Synthetic oligonucleotide
tcgactatgattgctcattct

SEQ ID NO: 25391 - DNA, 21 bp, Artificial Sequence
  Description of Artificial Sequence: Synthetic oligonucleotide
agtactatgctgttgccgtct

SEQ ID NO: 25392 - DNA, 21 bp, Artificial Sequence
  Description of Artificial Sequence: Synthetic oligonucleotide
tcgacgatgaatcgtggtctg

SEQ ID NO: 25393 - DNA, 21 bp, Artificial Sequence
  Description of Artificial Sequence: Synthetic oligonucleotide
agtacgatgcgtccgcagttg

SEQ ID NO: 25394 - DNA, 21 bp, Artificial Sequence
  Description of Artificial Sequence: Synthetic oligonucleotide
tctacgatgtctgttaaggag

SEQ ID NO: 25395 - DNA, 21 bp, Artificial Sequence
  Description of Artificial Sequence: Synthetic oligonucleotide
tcgactaatgctacttctaat

SEQ ID NO: 25396 - DNA, 21 bp, Artificial Sequence
  Description of Artificial Sequence: Synthetic oligonucleotide
tctactaatattgtggagtat

SEQ ID NO: 25397 - DNA, 21 bp, Artificial Sequence
  Description of Artificial Sequence: Synthetic oligonucleotide
tcgacgaatcggtcgacggtg

SEQ ID NO: 25398 - DNA, 21 bp, Artificial Sequence
  Description of Artificial Sequence: Synthetic oligonucleotide
tcgactaatactgctctgtgg

SEQ ID NO: 25399 - DNA, 21 bp, Artificial Sequence
  Description of Artificial Sequence: Synthetic oligonucleotide
agtactaatacgccgcgtggt

SEQ ID NO: 25400 - DNA, 21 bp, Artificial Sequence
  Description of Artificial Sequence: Synthetic oligonucleotide
tcgactaatacgcaggcttat

SEQ ID NO: 25401 - DNA, 21 bp, Artificial Sequence
  Description of Artificial Sequence: Synthetic oligonucleotide
tcgacgaatactagggaggag

SEQ ID NO: 25402 - DNA, 21 bp, Artificial Sequence
  Description of Artificial Sequence: Synthetic oligonucleotide
tcgacgaatgtggggcttgct

SEQ ID NO: 25403 - DNA, 21 bp, Artificial Sequence
  Description of Artificial Sequence: Synthetic oligonucleotide
agtactccggcgaagtatggt

SEQ ID NO: 25404 - DNA, 21 bp, Artificial Sequence
  Description of Artificial Sequence: Synthetic oligonucleotide
agtacgcctgcgtctcgtgcg

SEQ ID NO: 25405 - DNA, 21 bp, Artificial Sequence
  Description of Artificial Sequence: Synthetic oligonucleotide
agtactccggataatcatacg

SEQ ID NO: 25406 - DNA, 21 bp, Artificial Sequence
  Description of Artificial Sequence: Synthetic oligonucleotide
agtactccggatcgtcagacg

SEQ ID NO: 25407 - DNA, 21 bp, Artificial Sequence
  Description of Artificial Sequence: Synthetic oligonucleotide
tcgacgccgcatacgaatgcg

SEQ ID NO: 25408 - DNA, 21 bp, Artificial Sequence
  Description of Artificial Sequence: Synthetic oligonucleotide
tctacgccgaagccttcgcct

SEQ ID NO: 25409 - DNA, 21 bp, Artificial Sequence
  Description of Artificial Sequence: Synthetic oligonucleotide
agtacgccgttgattgctaag

SEQ ID NO: 25410 - DNA, 21 bp, Artificial Sequence
  Description of Artificial Sequence: Synthetic oligonucleotide
tctacgccgttgcctaggacg

SEQ ID NO: 25411 - DNA, 21 bp, Artificial Sequence
  Description of Artificial Sequence: Synthetic oligonucleotide
agtactccgttgcagactccg

SEQ ID NO: 25412 - DNA, 21 bp, Artificial Sequence
  Description of Artificial Sequence: Synthetic oligonucleotide
agtactccgctgcgtacgagt

SEQ ID NO: 25413 - DNA, 21 bp, Artificial Sequence
  Description of Artificial Sequence: Synthetic oligonucleotide
tcgactcctaatgctcggatt

SEQ ID NO: 25414 - DNA, 21 bp, Artificial Sequence
  Description of Artificial Sequence: Synthetic oligonucleotide
tcgactccgaatatgaatagg

SEQ ID NO: 25415 - DNA, 21 bp, Artificial Sequence
  Description of Artificial Sequence: Synthetic oligonucleotide
agtactcctccggctcgttct

SEQ ID NO: 25416 - DNA, 21 bp, Artificial Sequence
  Description of Artificial Sequence: Synthetic oligonucleotide
tctacgccgccgctgtatgag

SEQ ID NO: 25417 - DNA, 21 bp, Artificial Sequence
  Description of Artificial Sequence: Synthetic oligonucleotide
agtacgcctcctactacgctg

SEQ ID NO: 25418 - DNA, 21 bp, Artificial Sequence
  Description of Artificial Sequence: Synthetic oligonucleotide
tctactcctcgtccgcatgat

SEQ ID NO: 25419 - DNA, 21 bp, Artificial Sequence
  Description of Artificial Sequence: Synthetic oligonucleotide
tctacgcctactggggctctg

SEQ ID NO: 25420 - DNA, 21 bp, Artificial Sequence
  Description of Artificial Sequence: Synthetic oligonucleotide
tcgacgcagcagcgttctggt

SEQ ID NO: 25421 - DNA, 21 bp, Artificial Sequence
  Description of Artificial Sequence: Synthetic oligonucleotide
tctactcagcgtgctgctgcg

SEQ ID NO: 25422 - DNA, 21 bp, Artificial Sequence
  Description of Artificial Sequence: Synthetic oligonucleotide
tcgacgcaggttcatctgttg

SEQ ID NO: 25423 - DNA, 21 bp, Artificial Sequence
  Description of Artificial Sequence: Synthetic oligonucleotide
tcgacgcaggtgcatatgatg

SEQ ID NO: 25424 - DNA, 21 bp, Artificial Sequence
  Description of Artificial Sequence: Synthetic oligonucleotide
agtactcaggtgccgaataag

SEQ ID NO: 25425 - DNA, 21 bp, Artificial Sequence
  Description of Artificial Sequence: Synthetic oligonucleotide
tctactcagtggcggactgag

SEQ ID NO: 25426 - DNA, 21 bp, Artificial Sequence
  Description of Artificial Sequence: Synthetic oligonucleotide
tcgactcagtatagtccggtg

SEQ ID NO: 25427 - DNA, 21 bp, Artificial Sequence
  Description of Artificial Sequence: Synthetic oligonucleotide
tcgactcgggcgcctacggcg

SEQ ID NO: 25428 - DNA, 21 bp, Artificial Sequence
  Description of Artificial Sequence: Synthetic oligonucleotide
tctacgcgtgatacttcgaat

SEQ ID NO: 25429 - DNA, 21 bp, Artificial Sequence
  Description of Artificial Sequence: Synthetic oligonucleotide
tctacgcgtgaggcgaagccg

SEQ ID NO: 25430 - DNA, 21 bp, Artificial Sequence
  Description of Artificial Sequence: Synthetic oligonucleotide
agtactcgggaggatgtgttg

SEQ ID NO: 25431 - DNA, 21 bp, Artificial Sequence
  Description of Artificial Sequence: Synthetic oligonucleotide
agtactaggtttaattctact

SEQ ID NO: 25432 - DNA, 21 bp, Artificial Sequence
  Description of Artificial Sequence: Synthetic oligonucleotide
tcgacgcggcctacggttaat

SEQ ID NO: 25433 - DNA, 21 bp, Artificial Sequence
  Description of Artificial Sequence: Synthetic oligonucleotide
tctacgcgtcagttgcagcag

SEQ ID NO: 25434 - DNA, 21 bp, Artificial Sequence
  Description of Artificial Sequence: Synthetic oligonucleotide
tctactcggtctgatatgtat

SEQ ID NO: 25435 - DNA, 21 bp, Artificial Sequence
  Description of Artificial Sequence: Synthetic oligonucleotide
tcgacgcggtctattgctggt

SEQ ID NO: 25436 - DNA, 21 bp, Artificial Sequence
  Description of Artificial Sequence: Synthetic oligonucleotide
tcgactaggtcggtggagcat

SEQ ID NO: 25437 - DNA, 21 bp, Artificial Sequence
  Description of Artificial Sequence: Synthetic oligonucleotide
tcgactcgtacggtttctaat

SEQ ID NO: 25438 - DNA, 21 bp, Artificial Sequence
  Description of Artificial Sequence: Synthetic oligonucleotide
agtacgagggttttgactacg

SEQ ID NO: 25439 - DNA, 21 bp, Artificial Sequence
  Description of Artificial Sequence: Synthetic oligonucleotide
tctacgtctgcgaatctgggt

SEQ ID NO: 25440 - DNA, 21 bp, Artificial Sequence
  Description of Artificial Sequence: Synthetic oligonucleotide
tctacttctgatacgtggaag

SEQ ID NO: 25441 - DNA, 21 bp, Artificial Sequence
  Description of Artificial Sequence: Synthetic oligonucleotide
tcgacgtctgagggtcttaag

SEQ ID NO: 25442 - DNA, 21 bp, Artificial Sequence
  Description of Artificial Sequence: Synthetic oligonucleotide
tctactagtgagattgatcgt

SEQ ID NO: 25443 - DNA, 21 bp, Artificial Sequence
  Description of Artificial Sequence: Synthetic oligonucleotide
agtacttcgtttgcggtgggg

SEQ ID NO: 25444 - DNA, 21 bp, Artificial Sequence
  Description of Artificial Sequence: Synthetic oligonucleotide
tctacttctaaggcgcagtgt

SEQ ID NO: 25445 - DNA, 21 bp, Artificial Sequence
  Description of Artificial Sequence: Synthetic oligonucleotide
agtacgtctaaggctcagatt

SEQ ID NO: 25446 - DNA, 21 bp, Artificial Sequence
  Description of Artificial Sequence: Synthetic oligonucleotide
tctacttcgaagtatatgcat

SEQ ID NO: 25447 - DNA, 21 bp, Artificial Sequence
  Description of Artificial Sequence: Synthetic oligonucleotide
tctactagtcttgcggtgcag

SEQ ID NO: 25448 - DNA, 21 bp, Artificial Sequence
  Description of Artificial Sequence: Synthetic oligonucleotide
tcgacttcgttggggtatcag

SEQ ID NO: 25449 - DNA, 21 bp, Artificial Sequence
  Description of Artificial Sequence: Synthetic oligonucleotide
tcgacgtctcttccgtcgtgt

SEQ ID NO: 25450 - DNA, 21 bp, Artificial Sequence
  Description of Artificial Sequence: Synthetic oligonucleotide
tctacttctatgatgtcggcg

SEQ ID NO: 25451 - DNA, 21 bp, Artificial Sequence
  Description of Artificial Sequence: Synthetic oligonucleotide
tctacgtctatgtctcggact

SEQ ID NO: 25452 - DNA, 21 bp, Artificial Sequence
  Description of Artificial Sequence: Synthetic oligonucleotide
agtacgtcgcagccgttgcct

SEQ ID NO: 25453 - DNA, 21 bp, Artificial Sequence
  Description of Artificial Sequence: Synthetic oligonucleotide
tctactagtcgtaatatgagt

SEQ ID NO: 25454 - DNA, 21 bp, Artificial Sequence
  Description of Artificial Sequence: Synthetic oligonucleotide
tctacttcgtctctgtctgct

SEQ ID NO: 25455 - DNA, 21 bp, Artificial Sequence
  Description of Artificial Sequence: Synthetic oligonucleotide
tctacttcgagtcctcggcat

SEQ ID NO: 25456 - DNA, 21 bp, Artificial Sequence
  Description of Artificial Sequence: Synthetic oligonucleotide
agtacttctagttctctgtat

SEQ ID NO: 25457 - DNA, 21 bp, Artificial Sequence
  Description of Artificial Sequence: Synthetic oligonucleotide
tcgacgtcgtctacgctttcg

SEQ ID NO: 25458 - DNA, 21 bp, Artificial Sequence
  Description of Artificial Sequence: Synthetic oligonucleotide
tctacttctactggggctcct

SEQ ID NO: 25459 - DNA, 21 bp, Artificial Sequence
  Description of Artificial Sequence: Synthetic oligonucleotide
tcgacgtctactcttccgctt

SEQ ID NO: 25460 - DNA, 21 bp, Artificial Sequence
  Description of Artificial Sequence: Synthetic oligonucleotide
tcgacgtctactcttgtgcat

SEQ ID NO: 25461 - DNA, 21 bp, Artificial Sequence
  Description of Artificial Sequence: Synthetic oligonucleotide
agtactagtgtgccgcctaag

SEQ ID NO: 25462 - DNA, 21 bp, Artificial Sequence
  Description of Artificial Sequence: Synthetic oligonucleotide
tcgacttctgttcgtcagacg

SEQ ID NO: 25463 - DNA, 21 bp, Artificial Sequence
  Description of Artificial Sequence: Synthetic oligonucleotide
agtacgacggctaaggctatg

SEQ ID NO: 25464 - DNA, 21 bp, Artificial Sequence
  Description of Artificial Sequence: Synthetic oligonucleotide
tcgactactgcgcagactaag

SEQ ID NO: 25465 - DNA, 21 bp, Artificial Sequence
  Description of Artificial Sequence: Synthetic oligonucleotide
agtactactgctcggtcgcat

SEQ ID NO: 25466 - DNA, 21 bp, Artificial Sequence
  Description of Artificial Sequence: Synthetic oligonucleotide
tctactactgataagccttct

SEQ ID NO: 25467 - DNA, 21 bp, Artificial Sequence
  Description of Artificial Sequence: Synthetic oligonucleotide
tctacgactcatgatggtcgt

SEQ ID NO: 25468 - DNA, 21 bp, Artificial Sequence
  Description of Artificial Sequence: Synthetic oligonucleotide
agtacgactcatgggcgtgat

SEQ ID NO: 25469 - DNA, 21 bp, Artificial Sequence
  Description of Artificial Sequence: Synthetic oligonucleotide
agtactactttgcattatgtt

SEQ ID NO: 25470 - DNA, 21 bp, Artificial Sequence
  Description of Artificial Sequence: Synthetic oligonucleotide
tctacgactcttaagatgccg

SEQ ID NO: 25471 - DNA, 21 bp, Artificial Sequence
  Description of Artificial Sequence: Synthetic oligonucleotide
tctactactcttaatgggctg

SEQ ID NO: 25472 - DNA, 21 bp, Artificial Sequence
  Description of Artificial Sequence: Synthetic oligonucleotide
tcgacgacgctgacgccgctt

SEQ ID NO: 25473 - DNA, 21 bp, Artificial Sequence
  Description of Artificial Sequence: Synthetic oligonucleotide
tctactactaatatgttgctg

SEQ ID NO: 25474 - DNA, 21 bp, Artificial Sequence
  Description of Artificial Sequence: Synthetic oligonucleotide
agtacgacgccgtcgccgatg

SEQ ID NO: 25475 - DNA, 21 bp, Artificial Sequence
  Description of Artificial Sequence: Synthetic oligonucleotide
agtactacgaggtctcttctt

SEQ ID NO: 25476 - DNA, 21 bp, Artificial Sequence
  Description of Artificial Sequence: Synthetic oligonucleotide
tctactactcggacggggggg

SEQ ID NO: 25477 - DNA, 21 bp, Artificial Sequence
  Description of Artificial Sequence: Synthetic oligonucleotide
tctactacgaggactactctt

SEQ ID NO: 25478 - DNA, 21 bp, Artificial Sequence
  Description of Artificial Sequence: Synthetic oligonucleotide
agtactacttctccttctcgt

SEQ ID NO: 25479 - DNA, 21 bp, Artificial Sequence
  Description of Artificial Sequence: Synthetic oligonucleotide
tcgacgacgtctagggtggag

SEQ ID NO: 25480 - DNA, 21 bp, Artificial Sequence
  Description of Artificial Sequence: Synthetic oligonucleotide
tcgacgacttctactttgact

SEQ ID NO: 25481 - DNA, 21 bp, Artificial Sequence
  Description of Artificial Sequence: Synthetic oligonucleotide
tcgactactgttattactcct

SEQ ID NO: 25482 - DNA, 21 bp, Artificial Sequence
  Description of Artificial Sequence: Synthetic oligonucleotide
agtacggttattaagatgaat

SEQ ID NO: 25483 - DNA, 21 bp, Artificial Sequence
  Description of Artificial Sequence: Synthetic oligonucleotide
agtactgttattaatcctact

SEQ ID NO: 25484 - DNA, 21 bp, Artificial Sequence
  Description of Artificial Sequence: Synthetic oligonucleotide
agtacggttattcctactcct

SEQ ID NO: 25485 - DNA, 21 bp, Artificial Sequence
  Description of Artificial Sequence: Synthetic oligonucleotide
agtacggtgctgcttactgct

SEQ ID NO: 25486 - DNA, 21 bp, Artificial Sequence
  Description of Artificial Sequence: Synthetic oligonucleotide
tctactgttatgacgaaggtt

SEQ ID NO: 25487 - DNA, 21 bp, Artificial Sequence
  Description of Artificial Sequence: Synthetic oligonucleotide
agtacgtatatgacgcatagt

SEQ ID NO: 25488 - DNA, 21 bp, Artificial Sequence
  Description of Artificial Sequence: Synthetic oligonucleotide
tcgacgtataattcgccggag

SEQ ID NO: 25489 - DNA, 21 bp, Artificial Sequence
  Description of Artificial Sequence: Synthetic oligonucleotide
agtgtggcggctcatcagcat

SEQ ID NO: 25490 - DNA, 21 bp, Artificial Sequence
  Description of Artificial Sequence: Synthetic oligonucleotide
tcggtggctgctattaagccg

SEQ ID NO: 25491 - DNA, 21 bp, Artificial Sequence
  Description of Artificial Sequence: Synthetic oligonucleotide
tctgttgctgcggttagtttg

SEQ ID NO: 25492 - DNA, 21 bp, Artificial Sequence
  Description of Artificial Sequence: Synthetic oligonucleotide
tctgttgcgggtcttattaag

SEQ ID NO: 25493 - DNA, 21 bp, Artificial Sequence
  Description of Artificial Sequence: Synthetic oligonucleotide
agtgttgcgcataatcgtgct

SEQ ID NO: 25494 - DNA, 21 bp, Artificial Sequence
  Description of Artificial Sequence: Synthetic oligonucleotide
agtgttgcgcattatgggctt

SEQ ID NO: 25495 - DNA, 21 bp, Artificial Sequence
  Description of Artificial Sequence: Synthetic oligonucleotide
tctgtggctcctgctactctg

SEQ ID NO: 25496 - DNA, 21 bp, Artificial Sequence
  Description of Artificial Sequence: Synthetic oligonucleotide
tctgttgcgcctgttaaggcg

SEQ ID NO: 25497 - DNA, 21 bp, Artificial Sequence
  Description of Artificial Sequence: Synthetic oligonucleotide
tctgttgctaggaattctccg

SEQ ID NO: 25498 - DNA, 21 bp, Artificial Sequence
  Description of Artificial Sequence: Synthetic oligonucleotide
tcggttgcttcgatgtcgagt

SEQ ID NO: 25499 - DNA, 21 bp, Artificial Sequence
  Description of Artificial Sequence: Synthetic oligonucleotide
tcggttgctacggctcagacg

SEQ ID NO: 25500 - DNA, 21 bp, Artificial Sequence
  Description of Artificial Sequence: Synthetic oligonucleotide
tctgtggatgcggttactggt

SEQ ID NO: 25501 - DNA, 21 bp, Artificial Sequence
  Description of Artificial Sequence: Synthetic oligonucleotide
tcggttgatgagggtgcgcgt

SEQ ID NO: 25502 - DNA, 21 bp, Artificial Sequence
  Description of Artificial Sequence: Synthetic oligonucleotide
tcggttgatcctcataatccg

SEQ ID NO: 25503 - DNA, 21 bp, Artificial Sequence
  Description of Artificial Sequence: Synthetic oligonucleotide
agtgttgattcgtctattatt

SEQ ID NO: 25504 - DNA, 21 bp, Artificial Sequence
  Description of Artificial Sequence: Synthetic oligonucleotide
tcggtggatactggtcattcg

SEQ ID NO: 25505 - DNA, 21 bp, Artificial Sequence
  Description of Artificial Sequence: Synthetic oligonucleotide
agtgttgattatgtgggggtt

SEQ ID NO: 25506 - DNA, 21 bp, Artificial Sequence
  Description of Artificial Sequence: Synthetic oligonucleotide
tcggttgagttttctgatgcg

SEQ ID NO: 25507 - DNA, 21 bp, Artificial Sequence
  Description of Artificial Sequence: Synthetic oligonucleotide
tcggtggagaaggatgatcat

SEQ ID NO: 25508 - DNA, 21 bp, Artificial Sequence
  Description of Artificial Sequence: Synthetic oligonucleotide
agtgttgagactggtcgtgtg

SEQ ID NO: 25509 - DNA, 21 bp, Artificial Sequence
  Description of Artificial Sequence: Synthetic oligonucleotide
tctgtggagactactaattat

SEQ ID NO: 25510 - DNA, 21 bp, Artificial Sequence
  Description of Artificial Sequence: Synthetic oligonucleotide
tcggttgaggttagtcgtgct

SEQ ID NO: 25511 - DNA, 21 bp, Artificial Sequence
  Description of Artificial Sequence: Synthetic oligonucleotide
agtgtttttaagtgtgagccg

SEQ ID NO: 25512 - DNA, 21 bp, Artificial Sequence
  Description of Artificial Sequence: Synthetic oligonucleotide
tcggtgtttccgcattctgcg

SEQ ID NO: 25513 - DNA, 21 bp, Artificial Sequence
  Description of Artificial Sequence: Synthetic oligonucleotide
agtgtttttccgcttccgcat

SEQ ID NO: 25514 - DNA, 21 bp, Artificial Sequence
  Description of Artificial Sequence: Synthetic oligonucleotide
agtgttggtgataatggttcg

SEQ ID NO: 25515 - DNA, 21 bp, Artificial Sequence
  Description of Artificial Sequence: Synthetic oligonucleotide
tcggttgggcttcagcttgag

SEQ ID NO: 25516 - DNA, 21 bp, Artificial Sequence
  Description of Artificial Sequence: Synthetic oligonucleotide
agtgtgggtagtgctatggag

SEQ ID NO: 25517 - DNA, 21 bp, Artificial Sequence
  Description of Artificial Sequence: Synthetic oligonucleotide
tctgtggggagttatagtccg

SEQ ID NO: 25518 - DNA, 21 bp, Artificial Sequence
  Description of Artificial Sequence: Synthetic oligonucleotide
tcggtggggtcgtatgttgat

SEQ ID NO: 25519 - DNA, 21 bp, Artificial Sequence
  Description of Artificial Sequence: Synthetic oligonucleotide
tcggtggggacgaaggatgat

SEQ ID NO: 25520 - DNA, 21 bp, Artificial Sequence
  Description of Artificial Sequence: Synthetic oligonucleotide
agtgtgcatgatcatcgttct

SEQ ID NO: 25521 - DNA, 21 bp, Artificial Sequence
  Description of Artificial Sequence: Synthetic oligonucleotide
agtgtgcatgagcattctatg

SEQ ID NO: 25522 - DNA, 21 bp, Artificial Sequence
  Description of Artificial Sequence: Synthetic oligonucleotide
tcggttcatccgaatcaggct

SEQ ID NO: 25523 - DNA, 21 bp, Artificial Sequence
  Description of Artificial Sequence: Synthetic oligonucleotide
tctgtgattctgcgggcgact

SEQ ID NO: 25524 - DNA, 21 bp, Artificial Sequence
  Description of Artificial Sequence: Synthetic oligonucleotide
tctgtgattaatagtcgtggt

SEQ ID NO: 25525 - DNA, 21 bp, Artificial Sequence
  Description of Artificial Sequence: Synthetic oligonucleotide
agtgtgatttctcggtcggag

SEQ ID NO: 25526 - DNA, 21 bp, Artificial Sequence
  Description of Artificial Sequence: Synthetic oligonucleotide
agtgtgattacttgggaggat

SEQ ID NO: 25527 - DNA, 21 bp, Artificial Sequence
  Description of Artificial Sequence: Synthetic oligonucleotide
tctgtgaagcctctgaatcat

SEQ ID NO: 25528 - DNA, 21 bp, Artificial Sequence
  Description of Artificial Sequence: Synthetic oligonucleotide
tcggttaaggtgctgcggcct

SEQ ID NO: 25529 - DNA, 21 bp, Artificial Sequence
  Description of Artificial Sequence: Synthetic oligonucleotide
tctgtgttggatgggccgccg

SEQ ID NO: 25530 - DNA, 21 bp, Artificial Sequence
  Description of Artificial Sequence: Synthetic oligonucleotide
agtgttctgaatcttccgtcg

SEQ ID NO: 25531 - DNA, 21 bp, Artificial Sequence
  Description of Artificial Sequence: Synthetic oligonucleotide
tctgtgctgcctgagccttcg

SEQ ID NO: 25532 - DNA, 21 bp, Artificial Sequence
  Description of Artificial Sequence: Synthetic oligonucleotide
tcggttctgaggcatccgact

SEQ ID NO: 25533 - DNA, 21 bp, Artificial Sequence
  Description of Artificial Sequence: Synthetic oligonucleotide
tcggtgctgaggactactccg

SEQ ID NO: 25534 - DNA, 21 bp, Artificial Sequence
  Description of Artificial Sequence: Synthetic oligonucleotide
agtgttttgtctgctgttccg

SEQ ID NO: 25535 - DNA, 21 bp, Artificial Sequence
  Description of Artificial Sequence: Synthetic oligonucleotide
tcggtgctttctattgatcgg

SEQ ID NO: 25536 - DNA, 21 bp, Artificial Sequence
  Description of Artificial Sequence: Synthetic oligonucleotide
tcggttctgagttcgtctgtt

SEQ ID NO: 25537 - DNA, 21 bp, Artificial Sequence
  Description of Artificial Sequence: Synthetic oligonucleotide
tctgttatggctaatcaggct

SEQ ID NO: 25538 - DNA, 21 bp, Artificial Sequence
  Description of Artificial Sequence: Synthetic oligonucleotide
agtgttatgccgaagcctcag

SEQ ID NO: 25539 - DNA, 21 bp, Artificial Sequence
  Description of Artificial Sequence: Synthetic oligonucleotide
agtgttaatgcgacgcgtggg

SEQ ID NO: 25540 - DNA, 21 bp, Artificial Sequence
  Description of Artificial Sequence: Synthetic oligonucleotide
tctgtgaatggtaatgatgtg

SEQ ID NO: 25541 - DNA, 21 bp, Artificial Sequence
  Description of Artificial Sequence: Synthetic oligonucleotide
tcggtgaatgggagttggaag

SEQ ID NO: 25542 - DNA, 21 bp, Artificial Sequence
  Description of Artificial Sequence: Synthetic oligonucleotide
tctgtgccggagtataatggt

SEQ ID NO: 25543 - DNA, 21 bp, Artificial Sequence
  Description of Artificial Sequence: Synthetic oligonucleotide
tctgttccggggactgggtct

SEQ ID NO: 25544 - DNA, 21 bp, Artificial Sequence
  Description of Artificial Sequence: Synthetic oligonucleotide
tctgtgccgcatacgtctact

SEQ ID NO: 25545 - DNA, 21 bp, Artificial Sequence
  Description of Artificial Sequence: Synthetic oligonucleotide
agtgtgccgcagatgtatagt

SEQ ID NO: 25546 - DNA, 21 bp, Artificial Sequence
  Description of Artificial Sequence: Synthetic oligonucleotide
agtgtgcctagtgcgtcgaag

SEQ ID NO: 25547 - DNA, 21 bp, Artificial Sequence
  Description of Artificial Sequence: Synthetic oligonucleotide
agtgtgccgtcttctactcgg

SEQ ID NO: 25548 - DNA, 21 bp, Artificial Sequence
  Description of Artificial Sequence: Synthetic oligonucleotide
tctgttccggtgacgcctggg

SEQ ID NO: 25549 - DNA, 21 bp, Artificial Sequence
  Description of Artificial Sequence: Synthetic oligonucleotide
tctgttccttatgtggggacg

SEQ ID NO: 25550 - DNA, 21 bp, Artificial Sequence
  Description of Artificial Sequence: Synthetic oligonucleotide
tctgttcagagggaggagcgg

SEQ ID NO: 25551 - DNA, 21 bp, Artificial Sequence
  Description of Artificial Sequence: Synthetic oligonucleotide
tctgttcagcgtggggtggat

SEQ ID NO: 25552 - DNA, 21 bp, Artificial Sequence
  Description of Artificial Sequence: Synthetic oligonucleotide
tctgtgcagacgcgtccggag

SEQ ID NO: 25553 - DNA, 21 bp, Artificial Sequence
  Description of Artificial Sequence: Synthetic oligonucleotide
tcggtgcaggtgggttatcat

SEQ ID NO: 25554 - DNA, 21 bp, Artificial Sequence
  Description of Artificial Sequence: Synthetic oligonucleotide
agtgttcgtgcggagtctgcg

SEQ ID NO: 25555 - DNA, 21 bp, Artificial Sequence
  Description of Artificial Sequence: Synthetic oligonucleotide
agtgtgaggcatgttgagcct

SEQ ID NO: 25556 - DNA, 21 bp, Artificial Sequence
  Description of Artificial Sequence: Synthetic oligonucleotide
tcggttaggtcggcttctcag

SEQ ID NO: 25557 - DNA, 21 bp, Artificial Sequence
  Description of Artificial Sequence: Synthetic oligonucleotide
tcggtgcggagtctgtctccg

SEQ ID NO: 25558 - DNA, 21 bp, Artificial Sequence
  Description of Artificial Sequence: Synthetic oligonucleotide
agtgtgaggtcgaatcatgct

SEQ ID NO: 25559 - DNA, 21 bp, Artificial Sequence
  Description of Artificial Sequence: Synthetic oligonucleotide
tcggttcggactaaggattct

SEQ ID NO: 25560 - DNA, 21 bp, Artificial Sequence
  Description of Artificial Sequence: Synthetic oligonucleotide
tctgtttcttttagttcgtct

SEQ ID NO: 25561 - DNA, 21 bp, Artificial Sequence
  Description of Artificial Sequence: Synthetic oligonucleotide
agtgtttctggggcggctgcg

SEQ ID NO: 25562 - DNA, 21 bp, Artificial Sequence
  Description of Artificial Sequence: Synthetic oligonucleotide
tcggtgtctcataatgcgccg

SEQ ID NO: 25563 - DNA, 21 bp, Artificial Sequence
  Description of Artificial Sequence: Synthetic oligonucleotide
tctgtgtctaaggaggggacg

SEQ ID NO: 25564 - DNA, 21 bp, Artificial Sequence
  Description of Artificial Sequence: Synthetic oligonucleotide
tctgtttctttggctgatcct

SEQ ID NO: 25565 - DNA, 21 bp, Artificial Sequence
  Description of Artificial Sequence: Synthetic oligonucleotide
tcggttagtcttgagctgtat

SEQ ID NO: 25566 - DNA, 21 bp, Artificial Sequence
  Description of Artificial Sequence: Synthetic oligonucleotide
tctgtgagtcttggtcctaag

SEQ ID NO: 25567 - DNA, 21 bp, Artificial Sequence
  Description of Artificial Sequence: Synthetic oligonucleotide
tctgttagtccgcatcaggct

SEQ ID NO: 25568 - DNA, 21 bp, Artificial Sequence
  Description of Artificial Sequence: Synthetic oligonucleotide
tcggtgtctaggatggttgct

SEQ ID NO: 25569 - DNA, 21 bp, Artificial Sequence
  Description of Artificial Sequence: Synthetic oligonucleotide
tcggtttctcggcctgctctt

SEQ ID NO: 25570 - DNA, 21 bp, Artificial Sequence
  Description of Artificial Sequence: Synthetic oligonucleotide
tctgtttcgcgtcagcagatt

SEQ ID NO: 25571 - DNA, 21 bp, Artificial Sequence
  Description of Artificial Sequence: Synthetic oligonucleotide
tctgtttcgtctcagaatact

SEQ ID NO: 25572 - DNA, 21 bp, Artificial Sequence
  Description of Artificial Sequence: Synthetic oligonucleotide
tctgtgagttcgtcgcagctg

SEQ ID NO: 25573 - DNA, 21 bp, Artificial Sequence
  Description of Artificial Sequence: Synthetic oligonucleotide
tcggtttctactgctaatcct

SEQ ID NO: 25574 - DNA, 21 bp, Artificial Sequence
  Description of Artificial Sequence: Synthetic oligonucleotide
agtgttagtacgttgcctatg

SEQ ID NO: 25575 - DNA, 21 bp, Artificial Sequence
  Description of Artificial Sequence: Synthetic oligonucleotide
agtgtgtcgactaataagtat

SEQ ID NO: 25576 - DNA, 21 bp, Artificial Sequence
  Description of Artificial Sequence: Synthetic oligonucleotide
tctgttagtgttgattatatg

SEQ ID NO: 25577 - DNA, 21 bp, Artificial Sequence
  Description of Artificial Sequence: Synthetic oligonucleotide
tctgtgactgcgaagacgtat

SEQ ID NO: 25578 - DNA, 21 bp, Artificial Sequence
  Description of Artificial Sequence: Synthetic oligonucleotide
agtgttacggatggggtgctg

SEQ ID NO: 25579 - DNA, 21 bp, Artificial Sequence
  Description of Artificial Sequence: Synthetic oligonucleotide
agtgttacggagcatgttatt

SEQ ID NO: 25580 - DNA, 21 bp, Artificial Sequence
  Description of Artificial Sequence: Synthetic oligonucleotide
tcggttactggtgcgaatact

SEQ ID NO: 25581 - DNA, 21 bp, Artificial Sequence
  Description of Artificial Sequence: Synthetic oligonucleotide
tcggttactcatttgtttaag

SEQ ID NO: 25582 - DNA, 21 bp, Artificial Sequence
  Description of Artificial Sequence: Synthetic oligonucleotide
tcggttacgcctactcgtgct

SEQ ID NO: 25583 - DNA, 21 bp, Artificial Sequence
  Description of Artificial Sequence: Synthetic oligonucleotide
tctgttactcagatgtttaag

SEQ ID NO: 25584 - DNA, 21 bp, Artificial Sequence
  Description of Artificial Sequence: Synthetic oligonucleotide
tcggtgacgcgggctccgtat

SEQ ID NO: 25585 - DNA, 21 bp, Artificial Sequence
  Description of Artificial Sequence: Synthetic oligonucleotide
tctgtgactactagggctatt

SEQ ID NO: 25586 - DNA, 21 bp, Artificial Sequence
  Description of Artificial Sequence: Synthetic oligonucleotide
agtgtggttgctgcggttatt

SEQ ID NO: 25587 - DNA, 21 bp, Artificial Sequence
  Description of Artificial Sequence: Synthetic oligonucleotide
tctgtggttgggacgcatgcg

SEQ ID NO: 25588 - DNA, 21 bp, Artificial Sequence
  Description of Artificial Sequence: Synthetic oligonucleotide
agtgttgttcctcatgatctt

SEQ ID NO: 25589 - DNA, 21 bp, Artificial Sequence
  Description of Artificial Sequence: Synthetic oligonucleotide
tctgttgtgcggaaggaggct

SEQ ID NO: 25590 - DNA, 21 bp, Artificial Sequence
  Description of Artificial Sequence: Synthetic oligonucleotide
tctgtggtgtctaggcttggg

SEQ ID NO: 25591 - DNA, 21 bp, Artificial Sequence
  Description of Artificial Sequence: Synthetic oligonucleotide
tcggttgtgtcgtctcagggt

SEQ ID NO: 25592 - DNA, 21 bp, Artificial Sequence
  Description of Artificial Sequence: Synthetic oligonucleotide
tctgtttatacgcaggcgcct

SEQ ID NO: 25593 - DNA, 21 bp, Artificial Sequence
  Description of Artificial Sequence: Synthetic oligonucleotide
tcttgggatgcgagtgctctt

SEQ ID NO: 25594 - DNA, 21 bp, Artificial Sequence
  Description of Artificial Sequence: Synthetic oligonucleotide
tcttggggtgcgaaggagggt

SEQ ID NO: 25595 - DNA, 21 bp, Artificial Sequence
  Description of Artificial Sequence: Synthetic oligonucleotide
agttggggtgagacggctaag

SEQ ID NO: 25596 - DNA, 21 bp, Artificial Sequence
  Description of Artificial Sequence: Synthetic oligonucleotide
tcttggcataatagtcagcct

SEQ ID NO: 25597 - DNA, 21 bp, Artificial Sequence
  Description of Artificial Sequence: Synthetic oligonucleotide
agttggccgtcgaatggtgtt

SEQ ID NO: 25598 - DNA, 21 bp, Artificial Sequence
  Description of Artificial Sequence: Synthetic oligonucleotide
tcttggcagacttcgattgcg

SEQ ID NO: 25599 - DNA, 21 bp, Artificial Sequence
  Description of Artificial Sequence: Synthetic oligonucleotide
tcttggcgtgatgttccgccg

SEQ ID NO: 25600 - DNA, 21 bp, Artificial Sequence
  Description of Artificial Sequence: Synthetic oligonucleotide
tcgtggtcgcatgagcaggag

SEQ ID NO: 25601 - DNA, 21 bp, Artificial Sequence
  Description of Artificial Sequence: Synthetic oligonucleotide
tcgtatgctaagagtctggat

SEQ ID NO: 25602 - DNA, 21 bp, Artificial Sequence
  Description of Artificial Sequence: Synthetic oligonucleotide
tcgtatgctaggacgtctttg

SEQ ID NO: 25603 - DNA, 21 bp, Artificial Sequence
  Description of Artificial Sequence: Synthetic oligonucleotide
tcgtatgcttctctgactcct

SEQ ID NO: 25604 - DNA, 21 bp, Artificial Sequence
  Description of Artificial Sequence: Synthetic oligonucleotide
agttatgcttctcggactgtt

SEQ ID NO: 25605 - DNA, 21 bp, Artificial Sequence
  Description of Artificial Sequence: Synthetic oligonucleotide
agttatgctacgtctttgact

SEQ ID NO: 25606 - DNA, 21 bp, Artificial Sequence
  Description of Artificial Sequence: Synthetic oligonucleotide
tcttatgatcgttcgcctgcg

SEQ ID NO: 25607 - DNA, 21 bp, Artificial Sequence
  Description of Artificial Sequence: Synthetic oligonucleotide
tcttatgaggcttcgaagtat

SEQ ID NO: 25608 - DNA, 21 bp, Artificial Sequence
  Description of Artificial Sequence: Synthetic oligonucleotide
tcgtatgaggatgatagttgt

SEQ ID NO: 25609 - DNA, 21 bp, Artificial Sequence
  Description of Artificial Sequence: Synthetic oligonucleotide
tcgtatgagccgaataagctg

SEQ ID NO: 25610 - DNA, 21 bp, Artificial Sequence
  Description of Artificial Sequence: Synthetic oligonucleotide
tcgtatgggggtactcttctt

SEQ ID NO: 25611 - DNA, 21 bp, Artificial Sequence
  Description of Artificial Sequence: Synthetic oligonucleotide
tcgtatgggaaggagtatgtg

SEQ ID NO: 25612 - DNA, 21 bp, Artificial Sequence
  Description of Artificial Sequence: Synthetic oligonucleotide
tcgtatggtcttccggcgtat

SEQ ID NO: 25613 - DNA, 21 bp, Artificial Sequence
  Description of Artificial Sequence: Synthetic oligonucleotide
tcttatggtcctattaagact

SEQ ID NO: 25614 - DNA, 21 bp, Artificial Sequence
  Description of Artificial Sequence: Synthetic oligonucleotide
tcgtatgggcgtggggctgag

SEQ ID NO: 25615 - DNA, 21 bp, Artificial Sequence
  Description of Artificial Sequence: Synthetic oligonucleotide
agttatgggtctggtcagatt

SEQ ID NO: 25616 - DNA, 21 bp, Artificial Sequence
  Description of Artificial Sequence: Synthetic oligonucleotide
tcttatgggtcgaagcttcct

SEQ ID NO: 25617 - DNA, 21 bp, Artificial Sequence
  Description of Artificial Sequence: Synthetic oligonucleotide
tcgtatgggactgcgccgatt

SEQ ID NO: 25618 - DNA, 21 bp, Artificial Sequence
  Description of Artificial Sequence: Synthetic oligonucleotide
tcgtatggggttccgcgtccg

SEQ ID NO: 25619 - DNA, 21 bp, Artificial Sequence
  Description of Artificial Sequence: Synthetic oligonucleotide
tcgtatcatccgaagttgaat

SEQ ID NO: 25620 - DNA, 21 bp, Artificial Sequence
  Description of Artificial Sequence: Synthetic oligonucleotide
agttatattccgtctacgatt

SEQ ID NO: 25621 - DNA, 21 bp, Artificial Sequence
  Description of Artificial Sequence: Synthetic oligonucleotide
tcgtatattcgggaggatcct

SEQ ID NO: 25622 - DNA, 21 bp, Artificial Sequence
  Description of Artificial Sequence: Synthetic oligonucleotide
tcgtataaggggtcgtatatg

SEQ ID NO: 25623 - DNA, 21 bp, Artificial Sequence
  Description of Artificial Sequence: Synthetic oligonucleotide
tcttataagcatatgccgcct

SEQ ID NO: 25624 - DNA, 21 bp, Artificial Sequence
  Description of Artificial Sequence: Synthetic oligonucleotide
agttataagtcgcagattgcg

SEQ ID NO: 25625 - DNA, 21 bp, Artificial Sequence
  Description of Artificial Sequence: Synthetic oligonucleotide
tcgtatttggggattgcgcct

SEQ ID NO: 25626 - DNA, 21 bp, Artificial Sequence
  Description of Artificial Sequence: Synthetic oligonucleotide
tcttatctgaatcctatgaat

SEQ ID NO: 25627 - DNA, 21 bp, Artificial Sequence
  Description of Artificial Sequence: Synthetic oligonucleotide
tcttatcttcctccggcgccg

SEQ ID NO: 25628 - DNA, 21 bp, Artificial Sequence
  Description of Artificial Sequence: Synthetic oligonucleotide
tcgtatatggcgtcgttgcct

SEQ ID NO: 25629 - DNA, 21 bp, Artificial Sequence
  Description of Artificial Sequence: Synthetic oligonucleotide
tcgtatatgccgcagacggtg

SEQ ID NO: 25630 - DNA, 21 bp, Artificial Sequence
  Description of Artificial Sequence: Synthetic oligonucleotide
agttatatgtctccggtttct

SEQ ID NO: 25631 - DNA, 21 bp, Artificial Sequence
  Description of Artificial Sequence: Synthetic oligonucleotide
agttatatgacgaaggatttg

SEQ ID NO: 25632 - DNA, 21 bp, Artificial Sequence
  Description of Artificial Sequence: Synthetic oligonucleotide
agttatccggcgaagcctagt

SEQ ID NO: 25633 - DNA, 21 bp, Artificial Sequence
  Description of Artificial Sequence: Synthetic oligonucleotide
tcttatcctgcttcgtctcgt

SEQ ID NO: 25634 - DNA, 21 bp, Artificial Sequence
  Description of Artificial Sequence: Synthetic oligonucleotide
agttatcctaagtcgtatgag

SEQ ID NO: 25635 - DNA, 21 bp, Artificial Sequence
  Description of Artificial Sequence: Synthetic oligonucleotide
tcgtatcctgttagtgttccg

SEQ ID NO: 25636 - DNA, 21 bp, Artificial Sequence
  Description of Artificial Sequence: Synthetic oligonucleotide
tcttatcaggcgattagtacg

SEQ ID NO: 25637 - DNA, 21 bp, Artificial Sequence
  Description of Artificial Sequence: Synthetic oligonucleotide
agttatcgtcctgagagtggt

SEQ ID NO: 25638 - DNA, 21 bp, Artificial Sequence
  Description of Artificial Sequence: Synthetic oligonucleotide
tcttataggcctgagacgaat

SEQ ID NO: 25639 - DNA, 21 bp, Artificial Sequence
  Description of Artificial Sequence: Synthetic oligonucleotide
agttatcgggtgaatacgggg

SEQ ID NO: 25640 - DNA, 21 bp, Artificial Sequence
  Description of Artificial Sequence: Synthetic oligonucleotide
tcgtattcggcttcggagttt

SEQ ID NO: 25641 - DNA, 21 bp, Artificial Sequence
  Description of Artificial Sequence: Synthetic oligonucleotide
agttattctgcgacgacggtt

SEQ ID NO: 25642 - DNA, 21 bp, Artificial Sequence
  Description of Artificial Sequence: Synthetic oligonucleotide
tcttattctggggggtgtttg

SEQ ID NO: 25643 - DNA, 21 bp, Artificial Sequence
  Description of Artificial Sequence: Synthetic oligonucleotide
tcgtattcgcatcttagtggg

SEQ ID NO: 25644 - DNA, 21 bp, Artificial Sequence
  Description of Artificial Sequence: Synthetic oligonucleotide
tcgtattctatggcgcatccg

SEQ ID NO: 25645 - DNA, 21 bp, Artificial Sequence
  Description of Artificial Sequence: Synthetic oligonucleotide
tcttatagtagtgatcgttcg

SEQ ID NO: 25646 - DNA, 21 bp, Artificial Sequence
  Description of Artificial Sequence: Synthetic oligonucleotide
tcttatactgatgctgcgttg

SEQ ID NO: 25647 - DNA, 21 bp, Artificial Sequence
  Description of Artificial Sequence: Synthetic oligonucleotide
tcgtatactcatgtgtctggt

SEQ ID NO: 25648 - DNA, 21 bp, Artificial Sequence
  Description of Artificial Sequence: Synthetic oligonucleotide
tcttatactaaggatgttgat

SEQ ID NO: 25649 - DNA, 21 bp, Artificial Sequence
  Description of Artificial Sequence: Synthetic oligonucleotide
tcgtatacgaagtcggcgccg

SEQ ID NO: 25650 - DNA, 21 bp, Artificial Sequence
  Description of Artificial Sequence: Synthetic oligonucleotide
agttatacgtctccttcgtcg

SEQ ID NO: 25651 - DNA, 21 bp, Artificial Sequence
  Description of Artificial Sequence: Synthetic oligonucleotide
agttatacggttgattctcat

SEQ ID NO: 25652 - DNA, 21 bp, Artificial Sequence
  Description of Artificial Sequence: Synthetic oligonucleotide
tcgtatgtgaagcctgcggag

SEQ ID NO: 25653 - DNA, 21 bp, Artificial Sequence
  Description of Artificial Sequence: Synthetic oligonucleotide
tcttatgtgaataatccgggt

SEQ ID NO: 25654 - DNA, 21 bp, Artificial Sequence
  Description of Artificial Sequence: Synthetic oligonucleotide
tcgtatgtgcgtccgacttct

SEQ ID NO: 25655 - DNA, 21 bp, Artificial Sequence
  Description of Artificial Sequence: Synthetic oligonucleotide
agttatgtgagtggggcggcg

SEQ ID NO: 25656 - DNA, 21 bp, Artificial Sequence
  Description of Artificial Sequence: Synthetic oligonucleotide
acggcggcggcggatcgtgtt

SEQ ID NO: 25657 - DNA, 21 bp, Artificial Sequence
  Description of Artificial Sequence: Synthetic oligonucleotide
actgctgctgcgtctaatagg

SEQ ID NO: 25658 - DNA, 21 bp, Artificial Sequence
  Description of Artificial Sequence: Synthetic oligonucleotide
acggctgctgcttcggttcgt

SEQ ID NO: 25659 - DNA, 21 bp, Artificial Sequence
  Description of Artificial Sequence: Synthetic oligonucleotide
actgctgcggataatgatgag

SEQ ID NO: 25660 - DNA, 21 bp, Artificial Sequence
  Description of Artificial Sequence: Synthetic oligonucleotide
acggcggcttttgatcgtgtg

SEQ ID NO: 25661 - DNA, 21 bp, Artificial Sequence
  Description of Artificial Sequence: Synthetic oligonucleotide
acggcggcgcatcttggtaat

SEQ ID NO: 25662 - DNA, 21 bp, Artificial Sequence
  Description of Artificial Sequence: Synthetic oligonucleotide
acggctgctaagagtgctggg

SEQ ID NO: 25663 - DNA, 21 bp, Artificial Sequence
  Description of Artificial Sequence: Synthetic oligonucleotide
actgcggctctgactgggcat

SEQ ID NO: 25664 - DNA, 21 bp, Artificial Sequence
  Description of Artificial Sequence: Synthetic oligonucleotide
actgcggcgaggtttgctgcg

SEQ ID NO: 25665 - DNA, 21 bp, Artificial Sequence
  Description of Artificial Sequence: Synthetic oligonucleotide
acggctgctcggagttcggat

SEQ ID NO: 25666 - DNA, 21 bp, Artificial Sequence
  Description of Artificial Sequence: Synthetic oligonucleotide
acggctgcgtcgcattcgact

SEQ ID NO: 25667 - DNA, 21 bp, Artificial Sequence
  Description of Artificial Sequence: Synthetic oligonucleotide
actgctgctactaatgttaat

SEQ ID NO: 25668 - DNA, 21 bp, Artificial Sequence
  Description of Artificial Sequence: Synthetic oligonucleotide
actgctgcggttactaatacg

SEQ ID NO: 25669 - DNA, 21 bp, Artificial Sequence
  Description of Artificial Sequence: Synthetic oligonucleotide
actgcggatcggatgatgtcg

SEQ ID NO: 25670 - DNA, 21 bp, Artificial Sequence
  Description of Artificial Sequence: Synthetic oligonucleotide
actgcggagcatacgcggttt

SEQ ID NO: 25671 - DNA, 21 bp, Artificial Sequence
  Description of Artificial Sequence: Synthetic oligonucleotide
acggcggagaatctgtctcct

SEQ ID NO: 25672 - DNA, 21 bp, Artificial Sequence
  Description of Artificial Sequence: Synthetic oligonucleotide
actgcggagcctgttcggacg

SEQ ID NO: 25673 - DNA, 21 bp, Artificial Sequence
  Description of Artificial Sequence: Synthetic oligonucleotide
actgcttttcagacgattgag

SEQ ID NO: 25674 - DNA, 21 bp, Artificial Sequence
  Description of Artificial Sequence: Synthetic oligonucleotide
actgcttttcggatggattat

SEQ ID NO: 25675 - DNA, 21 bp, Artificial Sequence
  Description of Artificial Sequence: Synthetic oligonucleotide
actgcgggggggcagccgctt

SEQ ID NO: 25676 - DNA, 21 bp, Artificial Sequence
  Description of Artificial Sequence: Synthetic oligonucleotide
actgcggggggtacgactcct

SEQ ID NO: 25677 - DNA, 21 bp, Artificial Sequence
  Description of Artificial Sequence: Synthetic oligonucleotide
actgctgggcttggggtgccg

SEQ ID NO: 25678 - DNA, 21 bp, Artificial Sequence
  Description of Artificial Sequence: Synthetic oligonucleotide
acggcgggtaatttgattccg

SEQ ID NO: 25679 - DNA, 21 bp, Artificial Sequence
  Description of Artificial Sequence: Synthetic oligonucleotide
actgcggggccgcatcgtgtt

SEQ ID NO: 25680 - DNA, 21 bp, Artificial Sequence
  Description of Artificial Sequence: Synthetic oligonucleotide
acggcgggtgttccggcgatt

SEQ ID NO: 25681 - DNA, 21 bp, Artificial Sequence
  Description of Artificial Sequence: Synthetic oligonucleotide
acggctcatgaggagaggaat

SEQ ID NO: 25682 - DNA, 21 bp, Artificial Sequence
  Description of Artificial Sequence: Synthetic oligonucleotide
actgcgcattttagtgcgact

SEQ ID NO: 25683 - DNA, 21 bp, Artificial Sequence
  Description of Artificial Sequence: Synthetic oligonucleotide
actgctcatccgtttcctcct

SEQ ID NO: 25684 - DNA, 21 bp, Artificial Sequence
  Description of Artificial Sequence: Synthetic oligonucleotide
actgctcatcagttgattgct

SEQ ID NO: 25685 - DNA, 21 bp, Artificial Sequence
  Description of Artificial Sequence: Synthetic oligonucleotide
acggctcattctttgcagtcg

SEQ ID NO: 25686 - DNA, 21 bp, Artificial Sequence
  Description of Artificial Sequence: Synthetic oligonucleotide
acggctcattcttatgctcat

SEQ ID NO: 25687 - DNA, 21 bp, Artificial Sequence
  Description of Artificial Sequence: Synthetic oligonucleotide
acggctcatgtgtttcctgct

SEQ ID NO: 25688 - DNA, 21 bp, Artificial Sequence
  Description of Artificial Sequence: Synthetic oligonucleotide
actgctattgggattagtccg

SEQ ID NO: 25689 - DNA, 21 bp, Artificial Sequence
  Description of Artificial Sequence: Synthetic oligonucleotide
acggctattccttttcctgcg

SEQ ID NO: 25690 - DNA, 21 bp, Artificial Sequence
  Description of Artificial Sequence: Synthetic oligonucleotide
actgctattagttctcgggct

SEQ ID NO: 25691 - DNA, 21 bp, Artificial Sequence
  Description of Artificial Sequence: Synthetic oligonucleotide
actgctaaggctacggttgag

SEQ ID NO: 25692 - DNA, 21 bp, Artificial Sequence
  Description of Artificial Sequence: Synthetic oligonucleotide
actgcgaagtcttcgaataat

SEQ ID NO: 25693 - DNA, 21 bp, Artificial Sequence
  Description of Artificial Sequence: Synthetic oligonucleotide
actgcgaagactagtgcgatt

SEQ ID NO: 25694 - DNA, 21 bp, Artificial Sequence
  Description of Artificial Sequence: Synthetic oligonucleotide
actgcgaagtatgatcatctg

SEQ ID NO: 25695 - DNA, 21 bp, Artificial Sequence
  Description of Artificial Sequence: Synthetic oligonucleotide
actgcgctttttcaggatgct

SEQ ID NO: 25696 - DNA, 21 bp, Artificial Sequence
  Description of Artificial Sequence: Synthetic oligonucleotide
acggcgttgcatgcggatgtg

SEQ ID NO: 25697 - DNA, 21 bp, Artificial Sequence
  Description of Artificial Sequence: Synthetic oligonucleotide
acggctttgcattatagtgag

SEQ ID NO: 25698 - DNA, 21 bp, Artificial Sequence
  Description of Artificial Sequence: Synthetic oligonucleotide
acggcgatgccgatgaagatt

SEQ ID NO: 25699 - DNA, 21 bp, Artificial Sequence
  Description of Artificial Sequence: Synthetic oligonucleotide
acggcgatgcagatgactccg

SEQ ID NO: 25700 - DNA, 21 bp, Artificial Sequence
  Description of Artificial Sequence: Synthetic oligonucleotide
actgctatgcagacggctatg

SEQ ID NO: 25701 - DNA, 21 bp, Artificial Sequence
  Description of Artificial Sequence: Synthetic oligonucleotide
actgctatgacgactatgggg

SEQ ID NO: 25702 - DNA, 21 bp, Artificial Sequence
  Description of Artificial Sequence: Synthetic oligonucleotide
acggctaatccgcttagtacg

SEQ ID NO: 25703 - DNA, 21 bp, Artificial Sequence
  Description of Artificial Sequence: Synthetic oligonucleotide
actgcgaatgtgcctgctcgt

SEQ ID NO: 25704 - DNA, 21 bp, Artificial Sequence
  Description of Artificial Sequence: Synthetic oligonucleotide
acggctaatgtgcgttcgatg

SEQ ID NO: 25705 - DNA, 21 bp, Artificial Sequence
  Description of Artificial Sequence: Synthetic oligonucleotide
acggctcctgagaggactaat

SEQ ID NO: 25706 - DNA, 21 bp, Artificial Sequence
  Description of Artificial Sequence: Synthetic oligonucleotide
acggctcctggtcatgcgtcg

SEQ ID NO: 25707 - DNA, 21 bp, Artificial Sequence
  Description of Artificial Sequence: Synthetic oligonucleotide
acggctcctcctacggatcgt

SEQ ID NO: 25708 - DNA, 21 bp, Artificial Sequence
  Description of Artificial Sequence: Synthetic oligonucleotide
acggctcctaggagttctgag

SEQ ID NO: 25709 - DNA, 21 bp, Artificial Sequence
  Description of Artificial Sequence: Synthetic oligonucleotide
acggctcctagtcggatgggt

SEQ ID NO: 25710 - DNA, 21 bp, Artificial Sequence
  Description of Artificial Sequence: Synthetic oligonucleotide
acggctcctactggtactatt

SEQ ID NO: 25711 - DNA, 21 bp, Artificial Sequence
  Description of Artificial Sequence: Synthetic oligonucleotide
actgctccgtatggggatgct

SEQ ID NO: 25712 - DNA, 21 bp, Artificial Sequence
  Description of Artificial Sequence: Synthetic oligonucleotide
actgcgcaggaggggcggact

SEQ ID NO: 25713 - DNA, 21 bp, Artificial Sequence
  Description of Artificial Sequence: Synthetic oligonucleotide
actgcgcagttgactgctcat

SEQ ID NO: 25714 - DNA, 21 bp, Artificial Sequence
  Description of Artificial Sequence: Synthetic oligonucleotide
actgctcagctgacttcttct

SEQ ID NO: 25715 - DNA, 21 bp, Artificial Sequence
  Description of Artificial Sequence: Synthetic oligonucleotide
actgctcagcggggtccggct

SEQ ID NO: 25716 - DNA, 21 bp, Artificial Sequence
  Description of Artificial Sequence: Synthetic oligonucleotide
acggcgcgggattctagtccg

SEQ ID NO: 25717 - DNA, 21 bp, Artificial Sequence
  Description of Artificial Sequence: Synthetic oligonucleotide
actgcgcgtggtcttgttcct

SEQ ID NO: 25718 - DNA, 21 bp, Artificial Sequence
  Description of Artificial Sequence: Synthetic oligonucleotide
actgctcgtggtaatatgctg

SEQ ID NO: 25719 - DNA, 21 bp, Artificial Sequence
  Description of Artificial Sequence: Synthetic oligonucleotide
actgctcgtgggtctccgttg

SEQ ID NO: 25720 - DNA, 21 bp, Artificial Sequence
  Description of Artificial Sequence: Synthetic oligonucleotide
acggcgcggccgcctggggtg

SEQ ID NO: 25721 - DNA, 21 bp, Artificial Sequence
  Description of Artificial Sequence: Synthetic oligonucleotide
actgctcggtcttctgtgacg

SEQ ID NO: 25722 - DNA, 21 bp, Artificial Sequence
  Description of Artificial Sequence: Synthetic oligonucleotide
actgcgcgtacgttgattagt

SEQ ID NO: 25723 - DNA, 21 bp, Artificial Sequence
  Description of Artificial Sequence: Synthetic oligonucleotide
actgcgtctgctgcgaggacg

SEQ ID NO: 25724 - DNA, 21 bp, Artificial Sequence
  Description of Artificial Sequence: Synthetic oligonucleotide
actgcttctgcgacttatccg

SEQ ID NO: 25725 - DNA, 21 bp, Artificial Sequence
  Description of Artificial Sequence: Synthetic oligonucleotide
actgcttcgttttcttctacg

SEQ ID NO: 25726 - DNA, 21 bp, Artificial Sequence
  Description of Artificial Sequence: Synthetic oligonucleotide
acggcgagtggtagtgagcgg

SEQ ID NO: 25727 - DNA, 21 bp, Artificial Sequence
  Description of Artificial Sequence: Synthetic oligonucleotide
acggcttcgaagaatgattat

SEQ ID NO: 25728 - DNA, 21 bp, Artificial Sequence
  Description of Artificial Sequence: Synthetic oligonucleotide
acggcgtctatgggggagcgt

SEQ ID NO: 25729 - DNA, 21 bp, Artificial Sequence
  Description of Artificial Sequence: Synthetic oligonucleotide
acggcgtcgtcgatggggaag

SEQ ID NO: 25730 - DNA, 21 bp, Artificial Sequence
  Description of Artificial Sequence: Synthetic oligonucleotide
actgcgagtacggtgaagatg

SEQ ID NO: 25731 - DNA, 21 bp, Artificial Sequence
  Description of Artificial Sequence: Synthetic oligonucleotide
actgcttcggttcctatgaag

SEQ ID NO: 25732 - DNA, 21 bp, Artificial Sequence
  Description of Artificial Sequence: Synthetic oligonucleotide
acggcttcgtatagtcctaag

SEQ ID NO: 25733 - DNA, 21 bp, Artificial Sequence
  Description of Artificial Sequence: Synthetic oligonucleotide
acggctactccgcatattggg

SEQ ID NO: 25734 - DNA, 21 bp, Artificial Sequence
  Description of Artificial Sequence: Synthetic oligonucleotide
acggctactcggaatgaggtg

SEQ ID NO: 25735 - DNA, 21 bp, Artificial Sequence
  Description of Artificial Sequence: Synthetic oligonucleotide
actgcgactcggactggtcct

SEQ ID NO: 25736 - DNA, 21 bp, Artificial Sequence
  Description of Artificial Sequence: Synthetic oligonucleotide
actgctacttatcctaatgat

SEQ ID NO: 25737 - DNA, 21 bp, Artificial Sequence
  Description of Artificial Sequence: Synthetic oligonucleotide
actgctgttgctcatcctgcg

SEQ ID NO: 25738 - DNA, 21 bp, Artificial Sequence
  Description of Artificial Sequence: Synthetic oligonucleotide
actgcggtgccggagtggact

SEQ ID NO: 25739 - DNA, 21 bp, Artificial Sequence
  Description of Artificial Sequence: Synthetic oligonucleotide
actgctgttcaggagcatact

SEQ ID NO: 25740 - DNA, 21 bp, Artificial Sequence
  Description of Artificial Sequence: Synthetic oligonucleotide
actgctgttcgttcgatttcg

SEQ ID NO: 25741 - DNA, 21 bp, Artificial Sequence
  Description of Artificial Sequence: Synthetic oligonucleotide
actgctgtggttaagtttccg

SEQ ID NO: 25742 - DNA, 21 bp, Artificial Sequence
  Description of Artificial Sequence: Synthetic oligonucleotide
acggcggtgtatgcgacggcg

SEQ ID NO: 25743 - DNA, 21 bp, Artificial Sequence
  Description of Artificial Sequence: Synthetic oligonucleotide
acggctgtgtattctaagggg

SEQ ID NO: 25744 - DNA, 21 bp, Artificial Sequence
  Description of Artificial Sequence: Synthetic oligonucleotide
actgcgtgggatcctgagtcg

SEQ ID NO: 25745 - DNA, 21 bp, Artificial Sequence
  Description of Artificial Sequence: Synthetic oligonucleotide
acggcttattgtcagcagtat

SEQ ID NO: 25746 - DNA, 21 bp, Artificial Sequence
  Description of Artificial Sequence: Synthetic oligonucleotide
acggcgtatccttttgaggcg

SEQ ID NO: 25747 - DNA, 21 bp, Artificial Sequence
  Description of Artificial Sequence: Synthetic oligonucleotide
acggcgtatcctcatcagatt

SEQ ID NO: 25748 - DNA, 21 bp, Artificial Sequence
  Description of Artificial Sequence: Synthetic oligonucleotide
acggatgctgatcggtctcct

SEQ ID NO: 25749 - DNA, 21 bp, Artificial Sequence
  Description of Artificial Sequence: Synthetic oligonucleotide
acggattgtcgtcaggggggt

SEQ ID NO: 25750 - DNA, 21 bp, Artificial Sequence
  Description of Artificial Sequence: Synthetic oligonucleotide
actgatgatattaagaatgat

SEQ ID NO: 25751 - DNA, 21 bp, Artificial Sequence
  Description of Artificial Sequence: Synthetic oligonucleotide
actgatgagtataagaaggct

SEQ ID NO: 25752 - DNA, 21 bp, Artificial Sequence
  Description of Artificial Sequence: Synthetic oligonucleotide
actgattttcgtaggattcct

SEQ ID NO: 25753 - DNA, 21 bp, Artificial Sequence
  Description of Artificial Sequence: Synthetic oligonucleotide
acggatgggttgcataagttg

SEQ ID NO: 25754 - DNA, 21 bp, Artificial Sequence
  Description of Artificial Sequence: Synthetic oligonucleotide
acggatgggcctggtctgacg

SEQ ID NO: 25755 - DNA, 21 bp, Artificial Sequence
  Description of Artificial Sequence: Synthetic oligonucleotide
acggatggtcggttggggggt

SEQ ID NO: 25756 - DNA, 21 bp, Artificial Sequence
  Description of Artificial Sequence: Synthetic oligonucleotide
acggatgggtctagggtgcct

SEQ ID NO: 25757 - DNA, 21 bp, Artificial Sequence
  Description of Artificial Sequence: Synthetic oligonucleotide
acggatcatgtgcatcgtggg

SEQ ID NO: 25758 - DNA, 21 bp, Artificial Sequence
  Description of Artificial Sequence: Synthetic oligonucleotide
acggataagcatggtgtgctg

SEQ ID NO: 25759 - DNA, 21 bp, Artificial Sequence
  Description of Artificial Sequence: Synthetic oligonucleotide
actgataaggtgaggagtcag

SEQ ID NO: 25760 - DNA, 21 bp, Artificial Sequence
  Description of Artificial Sequence: Synthetic oligonucleotide
actgatcttcatctggagctt

SEQ ID NO: 25761 - DNA, 21 bp, Artificial Sequence
  Description of Artificial Sequence: Synthetic oligonucleotide
acggatttgtcgcatgggcat

SEQ ID NO: 25762 - DNA, 21 bp, Artificial Sequence
  Description of Artificial Sequence: Synthetic oligonucleotide
actgatctttattctcagtct

SEQ ID NO: 25763 - DNA, 21 bp, Artificial Sequence
  Description of Artificial Sequence: Synthetic oligonucleotide
actgatatgcagaggttgggt

SEQ ID NO: 25764 - DNA, 21 bp, Artificial Sequence
  Description of Artificial Sequence: Synthetic oligonucleotide
acggataataggattacggct

SEQ ID NO: 25765 - DNA, 21 bp, Artificial Sequence
  Description of Artificial Sequence: Synthetic oligonucleotide
actgatccgcattcggataag

SEQ ID NO: 25766 - DNA, 21 bp, Artificial Sequence
  Description of Artificial Sequence: Synthetic oligonucleotide
acggatcagagtctgatgtct

SEQ ID NO: 25767 - DNA, 21 bp, Artificial Sequence
  Description of Artificial Sequence: Synthetic oligonucleotide
actgatcgtggtggtgttcag

SEQ ID NO: 25768 - DNA, 21 bp, Artificial Sequence
  Description of Artificial Sequence: Synthetic oligonucleotide
actgataggtcggctttgagt

SEQ ID NO: 25769 - DNA, 21 bp, Artificial Sequence
  Description of Artificial Sequence: Synthetic oligonucleotide
actgataggagttcgctttct

SEQ ID NO: 25770 - DNA, 21 bp, Artificial Sequence
  Description of Artificial Sequence: Synthetic oligonucleotide
acggatcgggttccgagtttt

SEQ ID NO: 25771 - DNA, 21 bp, Artificial Sequence
  Description of Artificial Sequence: Synthetic oligonucleotide
acggatagtggtcctactcct

SEQ ID NO: 25772 - DNA, 21 bp, Artificial Sequence
  Description of Artificial Sequence: Synthetic oligonucleotide
actgatagtcatgtgctgtat

SEQ ID NO: 25773 - DNA, 21 bp, Artificial Sequence
  Description of Artificial Sequence: Synthetic oligonucleotide
acggatacgcatagttcggtg

SEQ ID NO: 25774 - DNA, 21 bp, Artificial Sequence
  Description of Artificial Sequence: Synthetic oligonucleotide
acggatacgtcgcggggtctg

SEQ ID NO: 25775 - DNA, 21 bp, Artificial Sequence
  Description of Artificial Sequence: Synthetic oligonucleotide
actgatacgacgggtggtccg

SEQ ID NO: 25776 - DNA, 21 bp, Artificial Sequence
  Description of Artificial Sequence: Synthetic oligonucleotide
actgatgttattactgttgcg

SEQ ID NO: 25777 - DNA, 21 bp, Artificial Sequence
  Description of Artificial Sequence: Synthetic oligonucleotide
acggatgttccgcatcctaat

SEQ ID NO: 25778 - DNA, 21 bp, Artificial Sequence
  Description of Artificial Sequence: Synthetic oligonucleotide
acggatgtgcgtccggctggg

SEQ ID NO: 25779 - DNA, 21 bp, Artificial Sequence
  Description of Artificial Sequence: Synthetic oligonucleotide
acggatgtgaggacgaagaat

SEQ ID NO: 25780 - DNA, 21 bp, Artificial Sequence
  Description of Artificial Sequence: Synthetic oligonucleotide
actgattgggagcatgatccg

SEQ ID NO: 25781 - DNA, 21 bp, Artificial Sequence
  Description of Artificial Sequence: Synthetic oligonucleotide
acggattatgatctttcgagt

SEQ ID NO: 25782 - DNA, 21 bp, Artificial Sequence
  Description of Artificial Sequence: Synthetic oligonucleotide
actgaggctgcgagtcgtcag

SEQ ID NO: 25783 - DNA, 21 bp, Artificial Sequence
  Description of Artificial Sequence: Synthetic oligonucleotide
actgaggcgcgtaatccggtt

SEQ ID NO: 25784 - DNA, 21 bp, Artificial Sequence
  Description of Artificial Sequence: Synthetic oligonucleotide
actgaggatacggcgccttgt

SEQ ID NO: 25785 - DNA, 21 bp, Artificial Sequence
  Description of Artificial Sequence: Synthetic oligonucleotide
actgagttttatgatttggag

SEQ ID NO: 25786 - DNA, 21 bp, Artificial Sequence
  Description of Artificial Sequence: Synthetic oligonucleotide
actgagggtagggctccgacg

SEQ ID NO: 25787 - DNA, 21 bp, Artificial Sequence
  Description of Artificial Sequence: Synthetic oligonucleotide
actgagcatgggactaagatt

SEQ ID NO: 25788 - DNA, 21 bp, Artificial Sequence
  Description of Artificial Sequence: Synthetic oligonucleotide
acggagctgaatagggcgatt

SEQ ID NO: 25789 - DNA, 21 bp, Artificial Sequence
  Description of Artificial Sequence: Synthetic oligonucleotide
acggagctttctcataatagg

SEQ ID NO: 25790 - DNA, 21 bp, Artificial Sequence
  Description of Artificial Sequence: Synthetic oligonucleotide
acggagcttagttcgcctagg

SEQ ID NO: 25791 - DNA, 21 bp, Artificial Sequence
  Description of Artificial Sequence: Synthetic oligonucleotide
actgagttggttattggtaag

SEQ ID NO: 25792 - DNA, 21 bp, Artificial Sequence
  Description of Artificial Sequence: Synthetic oligonucleotide
acggagaatgcggggacgggt

SEQ ID NO: 25793 - DNA, 21 bp, Artificial Sequence
  Description of Artificial Sequence: Synthetic oligonucleotide
actgagcctcctcatgttgct

SEQ ID NO: 25794 - DNA, 21 bp, Artificial Sequence
  Description of Artificial Sequence: Synthetic oligonucleotide
actgagcctccgtataggttg

SEQ ID NO: 25795 - DNA, 21 bp, Artificial Sequence
  Description of Artificial Sequence: Synthetic oligonucleotide
acggagcctcagattggtcgg

SEQ ID NO: 25796 - DNA, 21 bp, Artificial Sequence
  Description of Artificial Sequence: Synthetic oligonucleotide
actgagcctcggatggtttct

SEQ ID NO: 25797 - DNA, 21 bp, Artificial Sequence
  Description of Artificial Sequence: Synthetic oligonucleotide
acggagccttatgctccggat

SEQ ID NO: 25798 - DNA, 21 bp, Artificial Sequence
  Description of Artificial Sequence: Synthetic oligonucleotide
actgagccgtatacggatttt

SEQ ID NO: 25799 - DNA, 21 bp, Artificial Sequence
  Description of Artificial Sequence: Synthetic oligonucleotide
acggagagggcggatgagcat

SEQ ID NO: 25800 - DNA, 21 bp, Artificial Sequence
  Description of Artificial Sequence: Synthetic oligonucleotide
acggagcggcctagtcctacg

SEQ ID NO: 25801 - DNA, 21 bp, Artificial Sequence
  Description of Artificial Sequence: Synthetic oligonucleotide
actgagtcgcatcatcctctt

SEQ ID NO: 25802 - DNA, 21 bp, Artificial Sequence
  Description of Artificial Sequence: Synthetic oligonucleotide
actgagtcgacgtttaatatg

SEQ ID NO: 25803 - DNA, 21 bp, Artificial Sequence
  Description of Artificial Sequence: Synthetic oligonucleotide
acggagtctacgcatcagact

SEQ ID NO: 25804 - DNA, 21 bp, Artificial Sequence
  Description of Artificial Sequence: Synthetic oligonucleotide
acggagactgcgagtagtccg

SEQ ID NO: 25805 - DNA, 21 bp, Artificial Sequence
  Description of Artificial Sequence: Synthetic oligonucleotide
actgagactgggaattgtcat

SEQ ID NO: 25806 - DNA, 21 bp, Artificial Sequence
  Description of Artificial Sequence: Synthetic oligonucleotide
actgagactctgcataatcgt

SEQ ID NO: 25807 - DNA, 21 bp, Artificial Sequence
  Description of Artificial Sequence: Synthetic oligonucleotide
acggagacggttggtgatctt

SEQ ID NO: 25808 - DNA, 21 bp, Artificial Sequence
  Description of Artificial Sequence: Synthetic oligonucleotide
acggaggttaagttgttgcct

SEQ ID NO: 25809 - DNA, 21 bp, Artificial Sequence
  Description of Artificial Sequence: Synthetic oligonucleotide
actgaggttcgtccgggtttg

SEQ ID NO: 25810 - DNA, 21 bp, Artificial Sequence
  Description of Artificial Sequence: Synthetic oligonucleotide
actgaggtgcggtcgcctttg

SEQ ID NO: 25811 - DNA, 21 bp, Artificial Sequence
  Description of Artificial Sequence: Synthetic oligonucleotide
actgaggtgtcgtctaataag

SEQ ID NO: 25812 - DNA, 21 bp, Artificial Sequence
  Description of Artificial Sequence: Synthetic oligonucleotide
acggagtggagtagtaatgat

SEQ ID NO: 25813 - DNA, 21 bp, Artificial Sequence
  Description of Artificial Sequence: Synthetic oligonucleotide
acggagtatgctacgcggcct

SEQ ID NO: 25814 - DNA, 21 bp, Artificial Sequence
  Description of Artificial Sequence: Synthetic oligonucleotide
actgagtatacgcttcatggt

SEQ ID NO: 25815 - DNA, 21 bp, Artificial Sequence
  Description of Artificial Sequence: Synthetic oligonucleotide
acttttgcgtcgggggcgccg

SEQ ID NO: 25816 - DNA, 21 bp, Artificial Sequence
  Description of Artificial Sequence: Synthetic oligonucleotide
acgtttgcgagtccgctgctg

SEQ ID NO: 25817 - DNA, 21 bp, Artificial Sequence
  Description of Artificial Sequence: Synthetic oligonucleotide
acttttgatccgcagtgggcg

SEQ ID NO: 25818 - DNA, 21 bp, Artificial Sequence
  Description of Artificial Sequence: Synthetic oligonucleotide
acttttgatactagggggagt

SEQ ID NO: 25819 - DNA, 21 bp, Artificial Sequence
  Description of Artificial Sequence: Synthetic oligonucleotide
acgtttggtgctatttctgct

SEQ ID NO: 25820 - DNA, 21 bp, Artificial Sequence
  Description of Artificial Sequence: Synthetic oligonucleotide
acttttgggtcggatggtact

SEQ ID NO: 25821 - DNA, 21 bp, Artificial Sequence
  Description of Artificial Sequence: Synthetic oligonucleotide
acgtttggtacgtctattaag

SEQ ID NO: 25822 - DNA, 21 bp, Artificial Sequence
  Description of Artificial Sequence: Synthetic oligonucleotide
acgtttcatgcgcctagttct

SEQ ID NO: 25823 - DNA, 21 bp, Artificial Sequence
  Description of Artificial Sequence: Synthetic oligonucleotide
acgtttcataggactgataat

SEQ ID NO: 25824 - DNA, 21 bp, Artificial Sequence
  Description of Artificial Sequence: Synthetic oligonucleotide
acttttaaggatcctacggtg

SEQ ID NO: 25825 - DNA, 21 bp, Artificial Sequence
  Description of Artificial Sequence: Synthetic oligonucleotide
acgtttaagattactggtgat

SEQ ID NO: 25826 - DNA, 21 bp, Artificial Sequence
  Description of Artificial Sequence: Synthetic oligonucleotide
acgtttaatgggatgaatgag

SEQ ID NO: 25827 - DNA, 21 bp, Artificial Sequence
  Description of Artificial Sequence: Synthetic oligonucleotide
acgtttccgcttcctcgtact

SEQ ID NO: 25828 - DNA, 21 bp, Artificial Sequence
  Description of Artificial Sequence: Synthetic oligonucleotide
acttttccgctgagtgattgg

SEQ ID NO: 25829 - DNA, 21 bp, Artificial Sequence
  Description of Artificial Sequence: Synthetic oligonucleotide
acttttcctacgtctgggatg

SEQ ID NO: 25830 - DNA, 21 bp, Artificial Sequence
  Description of Artificial Sequence: Synthetic oligonucleotide
acttttcagcctacttctgtt

SEQ ID NO: 25831 - DNA, 21 bp, Artificial Sequence
  Description of Artificial Sequence: Synthetic oligonucleotide
acttttcggggtatgaaggat

SEQ ID NO: 25832 - DNA, 21 bp, Artificial Sequence
  Description of Artificial Sequence: Synthetic oligonucleotide
acttttcggacgtctgttgcg

SEQ ID NO: 25833 - DNA, 21 bp, Artificial Sequence
  Description of Artificial Sequence: Synthetic oligonucleotide
acttttagtattgttagtcct

SEQ ID NO: 25834 - DNA, 21 bp, Artificial Sequence
  Description of Artificial Sequence: Synthetic oligonucleotide
actttttcgccgcctaatttt

SEQ ID NO: 25835 - DNA, 21 bp, Artificial Sequence
  Description of Artificial Sequence: Synthetic oligonucleotide
acgttttctccgactttttcg

SEQ ID NO: 25836 - DNA, 21 bp, Artificial Sequence
  Description of Artificial Sequence: Synthetic oligonucleotide
acttttagtagtacgtcgcat

SEQ ID NO: 25837 - DNA, 21 bp, Artificial Sequence
  Description of Artificial Sequence: Synthetic oligonucleotide
acttttagttctgtggctgcg

SEQ ID NO: 25838 - DNA, 21 bp, Artificial Sequence
  Description of Artificial Sequence: Synthetic oligonucleotide
actttttctagtgttacgggt

SEQ ID NO: 25839 - DNA, 21 bp, Artificial Sequence
  Description of Artificial Sequence: Synthetic oligonucleotide
acgtttagtacgggtcgtgtg

SEQ ID NO: 25840 - DNA, 21 bp, Artificial Sequence
  Description of Artificial Sequence: Synthetic oligonucleotide
actttttctactggttcgcct

SEQ ID NO: 25841 - DNA, 21 bp, Artificial Sequence
  Description of Artificial Sequence: Synthetic oligonucleotide
actttttcgactaatacttcg

SEQ ID NO: 25842 - DNA, 21 bp, Artificial Sequence
  Description of Artificial Sequence: Synthetic oligonucleotide
acgttttctgtgtcgcagatt

SEQ ID NO: 25843 - DNA, 21 bp, Artificial Sequence
  Description of Artificial Sequence: Synthetic oligonucleotide
acgtttactaatcctacgaat

SEQ ID NO: 25844 - DNA, 21 bp, Artificial Sequence
  Description of Artificial Sequence: Synthetic oligonucleotide
acttttactcagttggctagt

SEQ ID NO: 25845 - DNA, 21 bp, Artificial Sequence
  Description of Artificial Sequence: Synthetic oligonucleotide
acgtttgttcgtgaggtggtt

SEQ ID NO: 25846 - DNA, 21 bp, Artificial Sequence
  Description of Artificial Sequence: Synthetic oligonucleotide
acttttgtgagtgggggtgat

SEQ ID NO: 25847 - DNA, 21 bp, Artificial Sequence
  Description of Artificial Sequence: Synthetic oligonucleotide
acgggggctggtcagactctg

SEQ ID NO: 25848 - DNA, 21 bp, Artificial Sequence
  Description of Artificial Sequence: Synthetic oligonucleotide
acgggtgcgcatgtgggtgag

SEQ ID NO: 25849 - DNA, 21 bp, Artificial Sequence
  Description of Artificial Sequence: Synthetic oligonucleotide
acgggggcgcttgctactctg

SEQ ID NO: 25850 - DNA, 21 bp, Artificial Sequence
  Description of Artificial Sequence: Synthetic oligonucleotide
acgggggcgcctcctcagatt

SEQ ID NO: 25851 - DNA, 21 bp, Artificial Sequence
  Description of Artificial Sequence: Synthetic oligonucleotide
actggtgcgtcggtgctgttt

SEQ ID NO: 25852 - DNA, 21 bp, Artificial Sequence
  Description of Artificial Sequence: Synthetic oligonucleotide
actggtgctgtttttactccg

SEQ ID NO: 25853 - DNA, 21 bp, Artificial Sequence
  Description of Artificial Sequence: Synthetic oligonucleotide
actggtgatgcgactcctttt

SEQ ID NO: 25854 - DNA, 21 bp, Artificial Sequence
  Description of Artificial Sequence: Synthetic oligonucleotide
acgggtgatcagaagtggcat

SEQ ID NO: 25855 - DNA, 21 bp, Artificial Sequence
  Description of Artificial Sequence: Synthetic oligonucleotide
actggtgatcagaatcggtat

SEQ ID NO: 25856 - DNA, 21 bp, Artificial Sequence
  Description of Artificial Sequence: Synthetic oligonucleotide
actggtgatacttctcgtacg

SEQ ID NO: 25857 - DNA, 21 bp, Artificial Sequence
  Description of Artificial Sequence: Synthetic oligonucleotide
acgggggatgtggatggttgg

SEQ ID NO: 25858 - DNA, 21 bp, Artificial Sequence
  Description of Artificial Sequence: Synthetic oligonucleotide
actggggagcagccgggtcat

SEQ ID NO: 25859 - DNA, 21 bp, Artificial Sequence
  Description of Artificial Sequence: Synthetic oligonucleotide
actgggttttcggatcagttt

SEQ ID NO: 25860 - DNA, 21 bp, Artificial Sequence
  Description of Artificial Sequence: Synthetic oligonucleotide
actgggggtgcgcagcgtggg

SEQ ID NO: 25861 - DNA, 21 bp, Artificial Sequence
  Description of Artificial Sequence: Synthetic oligonucleotide
acgggtgggtctccgacttct

SEQ ID NO: 25862 - DNA, 21 bp, Artificial Sequence
  Description of Artificial Sequence: Synthetic oligonucleotide
actggtgggtctactcgtctt

SEQ ID NO: 25863 - DNA, 21 bp, Artificial Sequence
  Description of Artificial Sequence: Synthetic oligonucleotide
acgggtgggtatgttctggct

SEQ ID NO: 25864 - DNA, 21 bp, Artificial Sequence
  Description of Artificial Sequence: Synthetic oligonucleotide
actgggcatgcgcagaatcag

SEQ ID NO: 25865 - DNA, 21 bp, Artificial Sequence
  Description of Artificial Sequence: Synthetic oligonucleotide
actgggcatgatactgttgag

SEQ ID NO: 25866 - DNA, 21 bp, Artificial Sequence
  Description of Artificial Sequence: Synthetic oligonucleotide
acggggcatacgaggttggat

SEQ ID NO: 25867 - DNA, 21 bp, Artificial Sequence
  Description of Artificial Sequence: Synthetic oligonucleotide
acggggcatacgtctacgctt

SEQ ID NO: 25868 - DNA, 21 bp, Artificial Sequence
  Description of Artificial Sequence: Synthetic oligonucleotide
actgggattgcgcctaattct

SEQ ID NO: 25869 - DNA, 21 bp, Artificial Sequence
  Description of Artificial Sequence: Synthetic oligonucleotide
actggtatttcgtcgcatatg

SEQ ID NO: 25870 - DNA, 21 bp, Artificial Sequence
  Description of Artificial Sequence: Synthetic oligonucleotide
actgggattacgggggctcct

SEQ ID NO: 25871 - DNA, 21 bp, Artificial Sequence
  Description of Artificial Sequence: Synthetic oligonucleotide
acgggtaaggttctgggtttt

SEQ ID NO: 25872 - DNA, 21 bp, Artificial Sequence
  Description of Artificial Sequence: Synthetic oligonucleotide
actgggctgtgtcctcatcct

SEQ ID NO: 25873 - DNA, 21 bp, Artificial Sequence
  Description of Artificial Sequence: Synthetic oligonucleotide
actggtctggggcttttgacg

SEQ ID NO: 25874 - DNA, 21 bp, Artificial Sequence
  Description of Artificial Sequence: Synthetic oligonucleotide
actggtctgatgggtcctgtg

SEQ ID NO: 25875 - DNA, 21 bp, Artificial Sequence
  Description of Artificial Sequence: Synthetic oligonucleotide
acgggtcttaatcattttaat

SEQ ID NO: 25876 - DNA, 21 bp, Artificial Sequence
  Description of Artificial Sequence: Synthetic oligonucleotide
acgggtctgaatcctgcgctg

SEQ ID NO: 25877 - DNA, 21 bp, Artificial Sequence
  Description of Artificial Sequence: Synthetic oligonucleotide
actgggttgcctgtggggttt

SEQ ID NO: 25878 - DNA, 21 bp, Artificial Sequence
  Description of Artificial Sequence: Synthetic oligonucleotide
actgggcttcggggtacggtt

SEQ ID NO: 25879 - DNA, 21 bp, Artificial Sequence
  Description of Artificial Sequence: Synthetic oligonucleotide
acgggtcttgttactgatgag

SEQ ID NO: 25880 - DNA, 21 bp, Artificial Sequence
  Description of Artificial Sequence: Synthetic oligonucleotide
acggggatgaataattttagt

SEQ ID NO: 25881 - DNA, 21 bp, Artificial Sequence
  Description of Artificial Sequence: Synthetic oligonucleotide
actgggatgcaggctgctctg

SEQ ID NO: 25882 - DNA, 21 bp, Artificial Sequence
  Description of Artificial Sequence: Synthetic oligonucleotide
acggggaatcatattcgtatt

SEQ ID NO: 25883 - DNA, 21 bp, Artificial Sequence
  Description of Artificial Sequence: Synthetic oligonucleotide
actgggaatcatgttactttt

SEQ ID NO: 25884 - DNA, 21 bp, Artificial Sequence
  Description of Artificial Sequence: Synthetic oligonucleotide
actgggaatatttcgccgctg

SEQ ID NO: 25885 - DNA, 21 bp, Artificial Sequence
  Description of Artificial Sequence: Synthetic oligonucleotide
acggggaattcgccgcatgcg

SEQ ID NO: 25886 - DNA, 21 bp, Artificial Sequence
  Description of Artificial Sequence: Synthetic oligonucleotide
acgggtcctgctcctttggat

SEQ ID NO: 25887 - DNA, 21 bp, Artificial Sequence
  Description of Artificial Sequence: Synthetic oligonucleotide
actggtccggcgcgtggttcg

SEQ ID NO: 25888 - DNA, 21 bp, Artificial Sequence
  Description of Artificial Sequence: Synthetic oligonucleotide
actgggcctgattatcctaag

SEQ ID NO: 25889 - DNA, 21 bp, Artificial Sequence
  Description of Artificial Sequence: Synthetic oligonucleotide
actgggcctcatttgaaggcg

SEQ ID NO: 25890 - DNA, 21 bp, Artificial Sequence
  Description of Artificial Sequence: Synthetic oligonucleotide
actgggcctattaatgctccg

SEQ ID NO: 25891 - DNA, 21 bp, Artificial Sequence
  Description of Artificial Sequence: Synthetic oligonucleotide
actgggccgaatacgtcgacg

SEQ ID NO: 25892 - DNA, 21 bp, Artificial Sequence
  Description of Artificial Sequence: Synthetic oligonucleotide
acgggtcctcctactacgatg

SEQ ID NO: 25893 - DNA, 21 bp, Artificial Sequence
  Description of Artificial Sequence: Synthetic oligonucleotide
acggggccgcgtcttagtacg

SEQ ID NO: 25894 - DNA, 21 bp, Artificial Sequence
  Description of Artificial Sequence: Synthetic oligonucleotide
actggtccgagtgcgcgggct

SEQ ID NO: 25895 - DNA, 21 bp, Artificial Sequence
  Description of Artificial Sequence: Synthetic oligonucleotide
acggggccgtctattcatact

SEQ ID NO: 25896 - DNA, 21 bp, Artificial Sequence
  Description of Artificial Sequence: Synthetic oligonucleotide
acggggccttctttggatcgt

SEQ ID NO: 25897 - DNA, 21 bp, Artificial Sequence
  Description of Artificial Sequence: Synthetic oligonucleotide
actggtccgtcgcggacgtcg

SEQ ID NO: 25898 - DNA, 21 bp, Artificial Sequence
  Description of Artificial Sequence: Synthetic oligonucleotide
acgggtcagggtaatgcggat

SEQ ID NO: 25899 - DNA, 21 bp, Artificial Sequence
  Description of Artificial Sequence: Synthetic oligonucleotide
actggtcagagggcgggtcag

SEQ ID NO: 25900 - DNA, 21 bp, Artificial Sequence
  Description of Artificial Sequence: Synthetic oligonucleotide
actggtcagaggatggatctg

SEQ ID NO: 25901 - DNA, 21 bp, Artificial Sequence
  Description of Artificial Sequence: Synthetic oligonucleotide
acggggcagcgtcagaatgtt

SEQ ID NO: 25902 - DNA, 21 bp, Artificial Sequence
  Description of Artificial Sequence: Synthetic oligonucleotide
actgggcggcctgttggtaat

SEQ ID NO: 25903 - DNA, 21 bp, Artificial Sequence
  Description of Artificial Sequence: Synthetic oligonucleotide
actggtcgggttgctgggagt

SEQ ID NO: 25904 - DNA, 21 bp, Artificial Sequence
  Description of Artificial Sequence: Synthetic oligonucleotide
actggttctgctggggagaag

SEQ ID NO: 25905 - DNA, 21 bp, Artificial Sequence
  Description of Artificial Sequence: Synthetic oligonucleotide
actggttctgcgcatgtttcg

SEQ ID NO: 25906 - DNA, 21 bp, Artificial Sequence
  Description of Artificial Sequence: Synthetic oligonucleotide
actggttctgctatgcgtccg

SEQ ID NO: 25907 - DNA, 21 bp, Artificial Sequence
  Description of Artificial Sequence: Synthetic oligonucleotide
acggggtcggggcatggtcct

SEQ ID NO: 25908 - DNA, 21 bp, Artificial Sequence
  Description of Artificial Sequence: Synthetic oligonucleotide
actggttcgaagcctgggtcg

SEQ ID NO: 25909 - DNA, 21 bp, Artificial Sequence
  Description of Artificial Sequence: Synthetic oligonucleotide
acggggtcgctgcagtatgat

SEQ ID NO: 25910 - DNA, 21 bp, Artificial Sequence
  Description of Artificial Sequence: Synthetic oligonucleotide
actggttcgtcggggtttctt

SEQ ID NO: 25911 - DNA, 21 bp, Artificial Sequence
  Description of Artificial Sequence: Synthetic oligonucleotide
acggggtctagtgttcgggcg

SEQ ID NO: 25912 - DNA, 21 bp, Artificial Sequence
  Description of Artificial Sequence: Synthetic oligonucleotide
actgggactgggcgtattcat

SEQ ID NO: 25913 - DNA, 21 bp, Artificial Sequence
  Description of Artificial Sequence: Synthetic oligonucleotide
acggggacttcgtcttgggtg

SEQ ID NO: 25914 - DNA, 21 bp, Artificial Sequence
  Description of Artificial Sequence: Synthetic oligonucleotide
actgggacgactttgcatcct

SEQ ID NO: 25915 - DNA, 21 bp, Artificial Sequence
  Description of Artificial Sequence: Synthetic oligonucleotide
actggggttccgcggggtttt

SEQ ID NO: 25916 - DNA, 21 bp, Artificial Sequence
  Description of Artificial Sequence: Synthetic oligonucleotide
acgggtgtgcctcggccttat

SEQ ID NO: 25917 - DNA, 21 bp, Artificial Sequence
  Description of Artificial Sequence: Synthetic oligonucleotide
actggggtgccggtggatgcg

SEQ ID NO: 25918 - DNA, 21 bp, Artificial Sequence
  Description of Artificial Sequence: Synthetic oligonucleotide
acggggtatgagtttaagttg

SEQ ID NO: 25919 - DNA, 21 bp, Artificial Sequence
  Description of Artificial Sequence: Synthetic oligonucleotide
actggttataagagtccgaat

SEQ ID NO: 25920 - DNA, 21 bp, Artificial Sequence
  Description of Artificial Sequence: Synthetic oligonucleotide
acgcatgctgctgcggatttt

SEQ ID NO: 25921 - DNA, 21 bp, Artificial Sequence
  Description of Artificial Sequence: Synthetic oligonucleotide
actcatgctattattgtgacg

SEQ ID NO: 25922 - DNA, 21 bp, Artificial Sequence
  Description of Artificial Sequence: Synthetic oligonucleotide
acgcatgcgcagacgtctgtt

SEQ ID NO: 25923 - DNA, 21 bp, Artificial Sequence
  Description of Artificial Sequence: Synthetic oligonucleotide
actcatgatgaggatcggagg

SEQ ID NO: 25924 - DNA, 21 bp, Artificial Sequence
  Description of Artificial Sequence: Synthetic oligonucleotide
actcatgatcatgctgattct

SEQ ID NO: 25925 - DNA, 21 bp, Artificial Sequence
  Description of Artificial Sequence: Synthetic oligonucleotide
acgcatgatctgtcgcttgct

SEQ ID NO: 25926 - DNA, 21 bp, Artificial Sequence
  Description of Artificial Sequence: Synthetic oligonucleotide
actcatgatccgaggcatggg

SEQ ID NO: 25927 - DNA, 21 bp, Artificial Sequence
  Description of Artificial Sequence: Synthetic oligonucleotide
actcatgagcattattcgcat

SEQ ID NO: 25928 - DNA, 21 bp, Artificial Sequence
  Description of Artificial Sequence: Synthetic oligonucleotide
actcatgagccgaggcgggcg

SEQ ID NO: 25929 - DNA, 21 bp, Artificial Sequence
  Description of Artificial Sequence: Synthetic oligonucleotide
acgcatgagagtgctgcggcg

SEQ ID NO: 25930 - DNA, 21 bp, Artificial Sequence
  Description of Artificial Sequence: Synthetic oligonucleotide
acgcattttcctggtcttccg

SEQ ID NO: 25931 - DNA, 21 bp, Artificial Sequence
  Description of Artificial Sequence: Synthetic oligonucleotide
acgcatgggcgtcttccgaat

SEQ ID NO: 25932 - DNA, 21 bp, Artificial Sequence
  Description of Artificial Sequence: Synthetic oligonucleotide
actcatcatgctgcgttgact

SEQ ID NO: 25933 - DNA, 21 bp, Artificial Sequence
  Description of Artificial Sequence: Synthetic oligonucleotide
acgcatcattcgggttcgatt

SEQ ID NO: 25934 - DNA, 21 bp, Artificial Sequence
  Description of Artificial Sequence: Synthetic oligonucleotide
acgcatcatgtgactcagact

SEQ ID NO: 25935 - DNA, 21 bp, Artificial Sequence
  Description of Artificial Sequence: Synthetic oligonucleotide
acgcatattccttcgaggccg

SEQ ID NO: 25936 - DNA, 21 bp, Artificial Sequence
  Description of Artificial Sequence: Synthetic oligonucleotide
acgcatattcgttcggcgcag

SEQ ID NO: 25937 - DNA, 21 bp, Artificial Sequence
  Description of Artificial Sequence: Synthetic oligonucleotide
acgcataaggagactcatatg

SEQ ID NO: 25938 - DNA, 21 bp, Artificial Sequence
  Description of Artificial Sequence: Synthetic oligonucleotide
acgcataagtttccgacgtct

SEQ ID NO: 25939 - DNA, 21 bp, Artificial Sequence
  Description of Artificial Sequence: Synthetic oligonucleotide
acgcataagctgactgctgag

SEQ ID NO: 25940 - DNA, 21 bp, Artificial Sequence
  Description of Artificial Sequence: Synthetic oligonucleotide
actcataagtctatttcgaat

SEQ ID NO: 25941 - DNA, 21 bp, Artificial Sequence
  Description of Artificial Sequence: Synthetic oligonucleotide
actcatctggctagttcggat

SEQ ID NO: 25942 - DNA, 21 bp, Artificial Sequence
  Description of Artificial Sequence: Synthetic oligonucleotide
acgcatcttggtgagtcggtg

SEQ ID NO: 25943 - DNA, 21 bp, Artificial Sequence
  Description of Artificial Sequence: Synthetic oligonucleotide
acgcatctgtctaatactctt

SEQ ID NO: 25944 - DNA, 21 bp, Artificial Sequence
  Description of Artificial Sequence: Synthetic oligonucleotide
actcatttgtctacggctaag

SEQ ID NO: 25945 - DNA, 21 bp, Artificial Sequence
  Description of Artificial Sequence: Synthetic oligonucleotide
actcatttgtctacgccgtct

SEQ ID NO: 25946 - DNA, 21 bp, Artificial Sequence
  Description of Artificial Sequence: Synthetic oligonucleotide
actcatatgattggtaatact

SEQ ID NO: 25947 - DNA, 21 bp, Artificial Sequence
  Description of Artificial Sequence: Synthetic oligonucleotide
acgcataatgcgcttactgtg

SEQ ID NO: 25948 - DNA, 21 bp, Artificial Sequence
  Description of Artificial Sequence: Synthetic oligonucleotide
actcataatttgtctattcgg

SEQ ID NO: 25949 - DNA, 21 bp, Artificial Sequence
  Description of Artificial Sequence: Synthetic oligonucleotide
actcatcctgcggttacgcag

SEQ ID NO: 25950 - DNA, 21 bp, Artificial Sequence
  Description of Artificial Sequence: Synthetic oligonucleotide
actcatcctgatcgtggtctg

SEQ ID NO: 25951 - DNA, 21 bp, Artificial Sequence
  Description of Artificial Sequence: Synthetic oligonucleotide
actcatcctaagccgacgttg

SEQ ID NO: 25952 - DNA, 21 bp, Artificial Sequence
  Description of Artificial Sequence: Synthetic oligonucleotide
acgcatccgcagagtgttgat

SEQ ID NO: 25953 - DNA, 21 bp, Artificial Sequence
  Description of Artificial Sequence: Synthetic oligonucleotide
actcatccttcggttcctgtt

SEQ ID NO: 25954 - DNA, 21 bp, Artificial Sequence
  Description of Artificial Sequence: Synthetic oligonucleotide
acgcatccggttgggattttg

SEQ ID NO: 25955 - DNA, 21 bp, Artificial Sequence
  Description of Artificial Sequence: Synthetic oligonucleotide
acgcatcctgttagttcggtt

SEQ ID NO: 25956 - DNA, 21 bp, Artificial Sequence
  Description of Artificial Sequence: Synthetic oligonucleotide
actcatcagacgtctgtttat

SEQ ID NO: 25957 - DNA, 21 bp, Artificial Sequence
  Description of Artificial Sequence: Synthetic oligonucleotide
actcatcaggttcctagtgtg

SEQ ID NO: 25958 - DNA, 21 bp, Artificial Sequence
  Description of Artificial Sequence: Synthetic oligonucleotide
actcatagggatggtattatg

SEQ ID NO: 25959 - DNA, 21 bp, Artificial Sequence
  Description of Artificial Sequence: Synthetic oligonucleotide
acgcataggcaggatacgtcg

SEQ ID NO: 25960 - DNA, 21 bp, Artificial Sequence
  Description of Artificial Sequence: Synthetic oligonucleotide
actcatcggtctctggatgtt

SEQ ID NO: 25961 - DNA, 21 bp, Artificial Sequence
  Description of Artificial Sequence: Synthetic oligonucleotide
acgcatcggagtcagacggtt

SEQ ID NO: 25962 - DNA, 21 bp, Artificial Sequence
  Description of Artificial Sequence: Synthetic oligonucleotide
actcattcggcgtataatcat

SEQ ID NO: 25963 - DNA, 21 bp, Artificial Sequence
  Description of Artificial Sequence: Synthetic oligonucleotide
actcattctgagtcttctaag

SEQ ID NO: 25964 - DNA, 21 bp, Artificial Sequence
  Description of Artificial Sequence: Synthetic oligonucleotide
actcattctggtgctaataat

SEQ ID NO: 25965 - DNA, 21 bp, Artificial Sequence
  Description of Artificial Sequence: Synthetic oligonucleotide
actcattcgcatgttgatgat

SEQ ID NO: 25966 - DNA, 21 bp, Artificial Sequence
  Description of Artificial Sequence: Synthetic oligonucleotide
acgcattctatggtgatgcct

SEQ ID NO: 25967 - DNA, 21 bp, Artificial Sequence
  Description of Artificial Sequence: Synthetic oligonucleotide
acgcatagtcctttgactcgt

SEQ ID NO: 25968 - DNA, 21 bp, Artificial Sequence
  Description of Artificial Sequence: Synthetic oligonucleotide
actcatacgttgaatactagg

SEQ ID NO: 25969 - DNA, 21 bp, Artificial Sequence
  Description of Artificial Sequence: Synthetic oligonucleotide
acgcatacgcctctgcctgct

SEQ ID NO: 25970 - DNA, 21 bp, Artificial Sequence
  Description of Artificial Sequence: Synthetic oligonucleotide
acgcatactcgtactcttatg

SEQ ID NO: 25971 - DNA, 21 bp, Artificial Sequence
  Description of Artificial Sequence: Synthetic oligonucleotide
actcatacgtctgctgcggag

SEQ ID NO: 25972 - DNA, 21 bp, Artificial Sequence
  Description of Artificial Sequence: Synthetic oligonucleotide
acgcatacggttggtactcag

SEQ ID NO: 25973 - DNA, 21 bp, Artificial Sequence
  Description of Artificial Sequence: Synthetic oligonucleotide
actcatgttgctgaggttacg

SEQ ID NO: 25974 - DNA, 21 bp, Artificial Sequence
  Description of Artificial Sequence: Synthetic oligonucleotide
acgcatgttccgcctatgcgg

SEQ ID NO: 25975 - DNA, 21 bp, Artificial Sequence
  Description of Artificial Sequence: Synthetic oligonucleotide
actcattatgatgtggttatg

SEQ ID NO: 25976 - DNA, 21 bp, Artificial Sequence
  Description of Artificial Sequence: Synthetic oligonucleotide
actattgctgatgatcagaag

SEQ ID NO: 25977 - DNA, 21 bp, Artificial Sequence
  Description of Artificial Sequence: Synthetic oligonucleotide
acgattgctgatatgcgtacg

SEQ ID NO: 25978 - DNA, 21 bp, Artificial Sequence
  Description of Artificial Sequence: Synthetic oligonucleotide
acgatttgtaatgatgggcct

SEQ ID NO: 25979 - DNA, 21 bp, Artificial Sequence
  Description of Artificial Sequence: Synthetic oligonucleotide
acgattgatccgcctctgact

SEQ ID NO: 25980 - DNA, 21 bp, Artificial Sequence
  Description of Artificial Sequence: Synthetic oligonucleotide
acgattgatacgacgtcgttg

SEQ ID NO: 25981 - DNA, 21 bp, Artificial Sequence
  Description of Artificial Sequence: Synthetic oligonucleotide
actattgagcagcgggagcgt

SEQ ID NO: 25982 - DNA, 21 bp, Artificial Sequence
  Description of Artificial Sequence: Synthetic oligonucleotide
actattgagtcgccgggtgtg

SEQ ID NO: 25983 - DNA, 21 bp, Artificial Sequence
  Description of Artificial Sequence: Synthetic oligonucleotide
acgattggtcatgagagttat

SEQ ID NO: 25984 - DNA, 21 bp, Artificial Sequence
  Description of Artificial Sequence: Synthetic oligonucleotide
acgattgggaggcttatgcag

SEQ ID NO: 25985 - DNA, 21 bp, Artificial Sequence
  Description of Artificial Sequence: Synthetic oligonucleotide
actattgggtctgttaggctg

SEQ ID NO: 25986 - DNA, 21 bp, Artificial Sequence
  Description of Artificial Sequence: Synthetic oligonucleotide
actattcatcggcctgatatg

SEQ ID NO: 25987 - DNA, 21 bp, Artificial Sequence
  Description of Artificial Sequence: Synthetic oligonucleotide
actattattccgtctaagctt

SEQ ID NO: 25988 - DNA, 21 bp, Artificial Sequence
  Description of Artificial Sequence: Synthetic oligonucleotide
acgattattcgtaaggattct

SEQ ID NO: 25989 - DNA, 21 bp, Artificial Sequence
  Description of Artificial Sequence: Synthetic oligonucleotide
acgattaaggctcaggtgagt

SEQ ID NO: 25990 - DNA, 21 bp, Artificial Sequence
  Description of Artificial Sequence: Synthetic oligonucleotide
actattaagcttaatgttggg

SEQ ID NO: 25991 - DNA, 21 bp, Artificial Sequence
  Description of Artificial Sequence: Synthetic oligonucleotide
actattaagccgctttctcag

SEQ ID NO: 25992 - DNA, 21 bp, Artificial Sequence
  Description of Artificial Sequence: Synthetic oligonucleotide
acgattctgaatcctaataat

SEQ ID NO: 25993 - DNA, 21 bp, Artificial Sequence
  Description of Artificial Sequence: Synthetic oligonucleotide
acgattcttcggactgaggag

SEQ ID NO: 25994 - DNA, 21 bp, Artificial Sequence
  Description of Artificial Sequence: Synthetic oligonucleotide
actattctttcgagtcatggg

SEQ ID NO: 25995 - DNA, 21 bp, Artificial Sequence
  Description of Artificial Sequence: Synthetic oligonucleotide
acgattctgagtacggggtcg

SEQ ID NO: 25996 - DNA, 21 bp, Artificial Sequence
  Description of Artificial Sequence: Synthetic oligonucleotide
actattaatcatgcggagcag

SEQ ID NO: 25997 - DNA, 21 bp, Artificial Sequence
  Description of Artificial Sequence: Synthetic oligonucleotide
actattaattgggtgggggat

SEQ ID NO: 25998 - DNA, 21 bp, Artificial Sequence
  Description of Artificial Sequence: Synthetic oligonucleotide
actattccgtctcagattgct

SEQ ID NO: 25999 - DNA, 21 bp, Artificial Sequence
  Description of Artificial Sequence: Synthetic oligonucleotide
acgattcagcttcgttctgct

SEQ ID NO: 26000 - DNA, 21 bp, Artificial Sequence
  Description of Artificial Sequence: Synthetic oligonucleotide
acgattcgtgaggcttttact

SEQ ID NO: 26001 - DNA, 21 bp, Artificial Sequence
  Description of Artificial Sequence: Synthetic oligonucleotide
actattcgtgggagttttctt

SEQ ID NO: 26002 - DNA, 21 bp, Artificial Sequence
  Description of Artificial Sequence: Synthetic oligonucleotide
acgattcgtggtactattagt

SEQ ID NO: 26003 - DNA, 21 bp, Artificial Sequence
  Description of Artificial Sequence: Synthetic oligonucleotide
actattcgggttaatccgacg

SEQ ID NO: 26004 - DNA, 21 bp, Artificial Sequence
  Description of Artificial Sequence: Synthetic oligonucleotide
actattagggtttctcttgct

SEQ ID NO: 26005 - DNA, 21 bp, Artificial Sequence
  Description of Artificial Sequence: Synthetic oligonucleotide
acgatttctaatgcgagttct

SEQ ID NO: 26006 - DNA, 21 bp, Artificial Sequence
  Description of Artificial Sequence: Synthetic oligonucleotide
acgatttcgtcttctcagagt

SEQ ID NO: 26007 - DNA, 21 bp, Artificial Sequence
  Description of Artificial Sequence: Synthetic oligonucleotide
actattagtacgtctaagcat

SEQ ID NO: 26008 - DNA, 21 bp, Artificial Sequence
  Description of Artificial Sequence: Synthetic oligonucleotide
acgattactgcgcatgatcct

SEQ ID NO: 26009 - DNA, 21 bp, Artificial Sequence
  Description of Artificial Sequence: Synthetic oligonucleotide
acgattacgcctcgtgctgat

SEQ ID NO: 26010 - DNA, 21 bp, Artificial Sequence
  Description of Artificial Sequence: Synthetic oligonucleotide
actattacttctcctaagatg

SEQ ID NO: 26011 - DNA, 21 bp, Artificial Sequence
  Description of Artificial Sequence: Synthetic oligonucleotide
actattacgtatgagctgacg

SEQ ID NO: 26012 - DNA, 21 bp, Artificial Sequence
  Description of Artificial Sequence: Synthetic oligonucleotide
actattgtgcgtgagctgacg

SEQ ID NO: 26013 - DNA, 21 bp, Artificial Sequence
  Description of Artificial Sequence: Synthetic oligonucleotide
acgattgttagtgatccgcgg

SEQ ID NO: 26014 - DNA, 21 bp, Artificial Sequence
  Description of Artificial Sequence: Synthetic oligonucleotide
actattgtgtctggtgttgtt

SEQ ID NO: 26015 - DNA, 21 bp, Artificial Sequence
  Description of Artificial Sequence: Synthetic oligonucleotide
acgattgttacgggggctagt

SEQ ID NO: 26016 - DNA, 21 bp, Artificial Sequence
  Description of Artificial Sequence: Synthetic oligonucleotide
acgatttattatgatgtgacg

SEQ ID NO: 26017 - DNA, 21 bp, Artificial Sequence
  Description of Artificial Sequence: Synthetic oligonucleotide
acgaaggcgggttcttttcat

SEQ ID NO: 26018 - DNA, 21 bp, Artificial Sequence
  Description of Artificial Sequence: Synthetic oligonucleotide
acgaaggctcattgttgtggt

SEQ ID NO: 26019 - DNA, 21 bp, Artificial Sequence
  Description of Artificial Sequence: Synthetic oligonucleotide
actaaggctctggttcatatg

SEQ ID NO: 26020 - DNA, 21 bp, Artificial Sequence
  Description of Artificial Sequence: Synthetic oligonucleotide
actaaggatcaggttcgtttg

SEQ ID NO: 26021 - DNA, 21 bp, Artificial Sequence
  Description of Artificial Sequence: Synthetic oligonucleotide
actaaggatcggccgtttctg

SEQ ID NO: 26022 - DNA, 21 bp, Artificial Sequence
  Description of Artificial Sequence: Synthetic oligonucleotide
actaaggagtgtatgttgact

SEQ ID NO: 26023 - DNA, 21 bp, Artificial Sequence
  Description of Artificial Sequence: Synthetic oligonucleotide
actaagggtggttttaatgat

SEQ ID NO: 26024 - DNA, 21 bp, Artificial Sequence
  Description of Artificial Sequence: Synthetic oligonucleotide
acgaaggggggtaagcagccg

SEQ ID NO: 26025 - DNA, 21 bp, Artificial Sequence
  Description of Artificial Sequence: Synthetic oligonucleotide
actaagggtcgggagccggtg

SEQ ID NO: 26026 - DNA, 21 bp, Artificial Sequence
  Description of Artificial Sequence: Synthetic oligonucleotide
acgaagggtgttcctgggtat

SEQ ID NO: 26027 - DNA, 21 bp, Artificial Sequence
  Description of Artificial Sequence: Synthetic oligonucleotide
acgaagcatcttatgccggcg

SEQ ID NO: 26028 - DNA, 21 bp, Artificial Sequence
  Description of Artificial Sequence: Synthetic oligonucleotide
acgaagattgctggtttttcg

SEQ ID NO: 26029 - DNA, 21 bp, Artificial Sequence
  Description of Artificial Sequence: Synthetic oligonucleotide
acgaagattgggagtgctatg

SEQ ID NO: 26030 - DNA, 21 bp, Artificial Sequence
  Description of Artificial Sequence: Synthetic oligonucleotide
acgaagttgaatgcgtttgat

SEQ ID NO: 26031 - DNA, 21 bp, Artificial Sequence
  Description of Artificial Sequence: Synthetic oligonucleotide
actaagcttccgaattctagt

SEQ ID NO: 26032 - DNA, 21 bp, Artificial Sequence
  Description of Artificial Sequence: Synthetic oligonucleotide
actaagcttcaggcttcgctt

SEQ ID NO: 26033 - DNA, 21 bp, Artificial Sequence
  Description of Artificial Sequence: Synthetic oligonucleotide
actaagttggtgactgagagt

SEQ ID NO: 26034 - DNA, 21 bp, Artificial Sequence
  Description of Artificial Sequence: Synthetic oligonucleotide
acgaagatgaatgcttctggg

SEQ ID NO: 26035 - DNA, 21 bp, Artificial Sequence
  Description of Artificial Sequence: Synthetic oligonucleotide
actaagaatcttgatcatacg

SEQ ID NO: 26036 - DNA, 21 bp, Artificial Sequence
  Description of Artificial Sequence: Synthetic oligonucleotide
acgaagaatcttacggagcgt

SEQ ID NO: 26037 - DNA, 21 bp, Artificial Sequence
  Description of Artificial Sequence: Synthetic oligonucleotide
actaagaataggatggatctt

SEQ ID NO: 26038 - DNA, 21 bp, Artificial Sequence
  Description of Artificial Sequence: Synthetic oligonucleotide
actaagcctggttcgattttt

SEQ ID NO: 26039 - DNA, 21 bp, Artificial Sequence
  Description of Artificial Sequence: Synthetic oligonucleotide
actaagccgcctgttcagagt

SEQ ID NO: 26040 - DNA, 21 bp, Artificial Sequence
  Description of Artificial Sequence: Synthetic oligonucleotide
actaagccgcagagtagttat

SEQ ID NO: 26041 - DNA, 21 bp, Artificial Sequence
  Description of Artificial Sequence: Synthetic oligonucleotide
actaagcgtgagtcgcattct

SEQ ID NO: 26042 - DNA, 21 bp, Artificial Sequence
  Description of Artificial Sequence: Synthetic oligonucleotide
acgaagtcggctgctacggct

SEQ ID NO: 26043 - DNA, 21 bp, Artificial Sequence
  Description of Artificial Sequence: Synthetic oligonucleotide
acgaagagtgggttgacgcag

SEQ ID NO: 26044 - DNA, 21 bp, Artificial Sequence
  Description of Artificial Sequence: Synthetic oligonucleotide
acgaagtctggtaatagtctg

SEQ ID NO: 26045 - DNA, 21 bp, Artificial Sequence
  Description of Artificial Sequence: Synthetic oligonucleotide
actaagagtcagactcatctg

SEQ ID NO: 26046 - DNA, 21 bp, Artificial Sequence
  Description of Artificial Sequence: Synthetic oligonucleotide
actaagtcgtctgttttgcct

SEQ ID NO: 26047 - DNA, 21 bp, Artificial Sequence
  Description of Artificial Sequence: Synthetic oligonucleotide
actaagagttattctccgaat

SEQ ID NO: 26048 - DNA, 21 bp, Artificial Sequence
  Description of Artificial Sequence: Synthetic oligonucleotide
acgaagactggtgatggtcct

SEQ ID NO: 26049 - DNA, 21 bp, Artificial Sequence
  Description of Artificial Sequence: Synthetic oligonucleotide
actaagacgtcgtttcctaat

SEQ ID NO: 26050 - DNA, 21 bp, Artificial Sequence
  Description of Artificial Sequence: Synthetic oligonucleotide
actaaggttgctctggatcct

SEQ ID NO: 26051 - DNA, 21 bp, Artificial Sequence
  Description of Artificial Sequence: Synthetic oligonucleotide
actaaggtggctcgggaggtg

SEQ ID NO: 26052 - DNA, 21 bp, Artificial Sequence
  Description of Artificial Sequence: Synthetic oligonucleotide
actcttgctttgtatgcgtct

SEQ ID NO: 26053 - DNA, 21 bp, Artificial Sequence
  Description of Artificial Sequence: Synthetic oligonucleotide
acgctggctccgactactaag

SEQ ID NO: 26054 - DNA, 21 bp, Artificial Sequence
  Description of Artificial Sequence: Synthetic oligonucleotide
actctggcgtctgggagggct

SEQ ID NO: 26055 - DNA, 21 bp, Artificial Sequence
  Description of Artificial Sequence: Synthetic oligonucleotide
actctggcgtctcgtagtgtt

SEQ ID NO: 26056 - DNA, 21 bp, Artificial Sequence
  Description of Artificial Sequence: Synthetic oligonucleotide
actttggctacgtcttctaat

SEQ ID NO: 26057 - DNA, 21 bp, Artificial Sequence
  Description of Artificial Sequence: Synthetic oligonucleotide
actttggcggtgaattcgatg

SEQ ID NO: 26058 - DNA, 21 bp, Artificial Sequence
  Description of Artificial Sequence: Synthetic oligonucleotide
acgcttgatatgacgagtgtg

SEQ ID NO: 26059 - DNA, 21 bp, Artificial Sequence
  Description of Artificial Sequence: Synthetic oligonucleotide
actctggataattctcgtgct

SEQ ID NO: 26060 - DNA, 21 bp, Artificial Sequence
  Description of Artificial Sequence: Synthetic oligonucleotide
actttggatgttcattatgtg

SEQ ID NO: 26061 - DNA, 21 bp, Artificial Sequence
  Description of Artificial Sequence: Synthetic oligonucleotide
actctggaggctcagactgat

SEQ ID NO: 26062 - DNA, 21 bp, Artificial Sequence
  Description of Artificial Sequence: Synthetic oligonucleotide
actctggagcatacttgtcgg

SEQ ID NO: 26063 - DNA, 21 bp, Artificial Sequence
  Description of Artificial Sequence: Synthetic oligonucleotide
acgcttgagcctcggaaggat

SEQ ID NO: 26064 - DNA, 21 bp, Artificial Sequence
  Description of Artificial Sequence: Synthetic oligonucleotide
actttggagcagtttggtagt

SEQ ID NO: 26065 - DNA, 21 bp, Artificial Sequence
  Description of Artificial Sequence: Synthetic oligonucleotide
acgctggagcagtataagctg

SEQ ID NO: 26066 - DNA, 21 bp, Artificial Sequence
  Description of Artificial Sequence: Synthetic oligonucleotide
acgttggagaggaagctggat

SEQ ID NO: 26067 - DNA, 21 bp, Artificial Sequence
  Description of Artificial Sequence: Synthetic oligonucleotide
actctggagcggccgtttatt

SEQ ID NO: 26068 - DNA, 21 bp, Artificial Sequence
  Description of Artificial Sequence: Synthetic oligonucleotide
acgctgtttaatagtgagaag

SEQ ID NO: 26069 - DNA, 21 bp, Artificial Sequence
  Description of Artificial Sequence: Synthetic oligonucleotide
acgctttttcagcagcctcct

SEQ ID NO: 26070 - DNA, 21 bp, Artificial Sequence
  Description of Artificial Sequence: Synthetic oligonucleotide
actctttttcgggatggttcg

SEQ ID NO: 26071 - DNA, 21 bp, Artificial Sequence
  Description of Artificial Sequence: Synthetic oligonucleotide
acgttggggggttctccggtt

SEQ ID NO: 26072 - DNA, 21 bp, Artificial Sequence
  Description of Artificial Sequence: Synthetic oligonucleotide
actttgggtgggagtcgggct

SEQ ID NO: 26073 - DNA, 21 bp, Artificial Sequence
  Description of Artificial Sequence: Synthetic oligonucleotide
actttggggcatgcttttgct

SEQ ID NO: 26074 - DNA, 21 bp, Artificial Sequence
  Description of Artificial Sequence: Synthetic oligonucleotide
actttgggtcatgttccgccg

SEQ ID NO: 26075 - DNA, 21 bp, Artificial Sequence
  Description of Artificial Sequence: Synthetic oligonucleotide
acgcttggtattacggctcat

SEQ ID NO: 26076 - DNA, 21 bp, Artificial Sequence
  Description of Artificial Sequence: Synthetic oligonucleotide
acgttggggattgtgacgcag

SEQ ID NO: 26077 - DNA, 21 bp, Artificial Sequence
  Description of Artificial Sequence: Synthetic oligonucleotide
acgctgggtctgacgatgccg

SEQ ID NO: 26078 - DNA, 21 bp, Artificial Sequence
  Description of Artificial Sequence: Synthetic oligonucleotide
acgttgggtcctaattctcgg

SEQ ID NO: 26079 - DNA, 21 bp, Artificial Sequence
  Description of Artificial Sequence: Synthetic oligonucleotide
actctggggcagacgacgggg

SEQ ID NO: 26080 - DNA, 21 bp, Artificial Sequence
  Description of Artificial Sequence: Synthetic oligonucleotide
acgttgcatcagattccggcg

SEQ ID NO: 26081 - DNA, 21 bp, Artificial Sequence
  Description of Artificial Sequence: Synthetic oligonucleotide
actttgcatagtagtagttct

SEQ ID NO: 26082 - DNA, 21 bp, Artificial Sequence
  Description of Artificial Sequence: Synthetic oligonucleotide
acgctgattggtaatgatacg

SEQ ID NO: 26083 - DNA, 21 bp, Artificial Sequence
  Description of Artificial Sequence: Synthetic oligonucleotide
acgcttatttcttctgttacg

SEQ ID NO: 26084 - DNA, 21 bp, Artificial Sequence
  Description of Artificial Sequence: Synthetic oligonucleotide
acgttgaaggctgaggatctt

SEQ ID NO: 26085 - DNA, 21 bp, Artificial Sequence
  Description of Artificial Sequence: Synthetic oligonucleotide
actcttaagggtcctggtcag

SEQ ID NO: 26086 - DNA, 21 bp, Artificial Sequence
  Description of Artificial Sequence: Synthetic oligonucleotide
acgcttaagcggggtctggat

SEQ ID NO: 26087 - DNA, 21 bp, Artificial Sequence
  Description of Artificial Sequence: Synthetic oligonucleotide
acgttgaagtcgaatgcgaag

SEQ ID NO: 26088 - DNA, 21 bp, Artificial Sequence
  Description of Artificial Sequence: Synthetic oligonucleotide
acgcttctgcctgcgagtcct

SEQ ID NO: 26089 - DNA, 21 bp, Artificial Sequence
  Description of Artificial Sequence: Synthetic oligonucleotide
acgcttttgccgggtgatccg

SEQ ID NO: 26090 - DNA, 21 bp, Artificial Sequence
  Description of Artificial Sequence: Synthetic oligonucleotide
actctgcttccgcatcctacg

SEQ ID NO: 26091 - DNA, 21 bp, Artificial Sequence
  Description of Artificial Sequence: Synthetic oligonucleotide
acgttgttgactgatgatctt

SEQ ID NO: 26092 - DNA, 21 bp, Artificial Sequence
  Description of Artificial Sequence: Synthetic oligonucleotide
actttgatgcaggtttcgggg

SEQ ID NO: 26093 - DNA, 21 bp, Artificial Sequence
  Description of Artificial Sequence: Synthetic oligonucleotide
acgctgatgcgtggtgcttct

SEQ ID NO: 26094 - DNA, 21 bp, Artificial Sequence
  Description of Artificial Sequence: Synthetic oligonucleotide
actctgaattcggcgaagaag

SEQ ID NO: 26095 - DNA, 21 bp, Artificial Sequence
  Description of Artificial Sequence: Synthetic oligonucleotide
acgcttaatagtgagcggatg

SEQ ID NO: 26096 - DNA, 21 bp, Artificial Sequence
  Description of Artificial Sequence: Synthetic oligonucleotide
actttgccgcatcgggtggcg

SEQ ID NO: 26097 - DNA, 21 bp, Artificial Sequence
  Description of Artificial Sequence: Synthetic oligonucleotide
acgcttcctcatagtcctaag

SEQ ID NO: 26098 - DNA, 21 bp, Artificial Sequence
  Description of Artificial Sequence: Synthetic oligonucleotide
acgttgccgaagacgaatctg

SEQ ID NO: 26099 - DNA, 21 bp, Artificial Sequence
  Description of Artificial Sequence: Synthetic oligonucleotide
actcttcctttgacttctacg

SEQ ID NO: 26100 - DNA, 21 bp, Artificial Sequence
  Description of Artificial Sequence: Synthetic oligonucleotide
actcttcctaattatctggct

SEQ ID NO: 26101 - DNA, 21 bp, Artificial Sequence
  Description of Artificial Sequence: Synthetic oligonucleotide
acgctgccgccgaattcgcct

SEQ ID NO: 26102 - DNA, 21 bp, Artificial Sequence
  Description of Artificial Sequence: Synthetic oligonucleotide
acgttgccttcggagcgtgtg

SEQ ID NO: 26103 - DNA, 21 bp, Artificial Sequence
  Description of Artificial Sequence: Synthetic oligonucleotide
acgttgcctacgacgctggtt

SEQ ID NO: 26104 - DNA, 21 bp, Artificial Sequence
  Description of Artificial Sequence: Synthetic oligonucleotide
actttgccggtgaataatttg

SEQ ID NO: 26105 - DNA, 21 bp, Artificial Sequence
  Description of Artificial Sequence: Synthetic oligonucleotide
actttgcaggataatcgtgct

SEQ ID NO: 26106 - DNA, 21 bp, Artificial Sequence
  Description of Artificial Sequence: Synthetic oligonucleotide
acgcttcaggaggggactggg

SEQ ID NO: 26107 - DNA, 21 bp, Artificial Sequence
  Description of Artificial Sequence: Synthetic oligonucleotide
acgcttcagtttggtgctggg

SEQ ID NO: 26108 - DNA, 21 bp, Artificial Sequence
  Description of Artificial Sequence: Synthetic oligonucleotide
actctgcagggtgggtctctt

SEQ ID NO: 26109 - DNA, 21 bp, Artificial Sequence
  Description of Artificial Sequence: Synthetic oligonucleotide
acgttgcagccgttgcgtatt

SEQ ID NO: 26110 - DNA, 21 bp, Artificial Sequence
  Description of Artificial Sequence: Synthetic oligonucleotide
acgcttcgggatactgctgat

SEQ ID NO: 26111 - DNA, 21 bp, Artificial Sequence
  Description of Artificial Sequence: Synthetic oligonucleotide
actctgcgtgagtctgatacg

SEQ ID NO: 26112 - DNA, 21 bp, Artificial Sequence
  Description of Artificial Sequence: Synthetic oligonucleotide
acgttgcgtggtgctgaggat

SEQ ID NO: 26113 - DNA, 21 bp, Artificial Sequence
  Description of Artificial Sequence: Synthetic oligonucleotide
acgttgaggcttactgctggg

SEQ ID NO: 26114 - DNA, 21 bp, Artificial Sequence
  Description of Artificial Sequence: Synthetic oligonucleotide
acgctgcgtatgcagctgaat

SEQ ID NO: 26115 - DNA, 21 bp, Artificial Sequence
  Description of Artificial Sequence: Synthetic oligonucleotide
actctgcggaattctccggct

SEQ ID NO: 26116 - DNA, 21 bp, Artificial Sequence
  Description of Artificial Sequence: Synthetic oligonucleotide
acgttgcggcctttgcaggct

SEQ ID NO: 26117 - DNA, 21 bp, Artificial Sequence
  Description of Artificial Sequence: Synthetic oligonucleotide
acgctgcgttctgcgggtcct

SEQ ID NO: 26118 - DNA, 21 bp, Artificial Sequence
  Description of Artificial Sequence: Synthetic oligonucleotide
actcttcggacgcttgcggag

SEQ ID NO: 26119 - DNA, 21 bp, Artificial Sequence
  Description of Artificial Sequence: Synthetic oligonucleotide
acgctgagtgcgcttcctcct

SEQ ID NO: 26120 - DNA, 21 bp, Artificial Sequence
  Description of Artificial Sequence: Synthetic oligonucleotide
actttgtcggatcgtccgcct

SEQ ID NO: 26121 - DNA, 21 bp, Artificial Sequence
  Description of Artificial Sequence: Synthetic oligonucleotide
acgctgtcggattctgttgat

SEQ ID NO: 26122 - DNA, 21 bp, Artificial Sequence
  Description of Artificial Sequence: Synthetic oligonucleotide
actcttagtgagaatttgccg

SEQ ID NO: 26123 - DNA, 21 bp, Artificial Sequence
  Description of Artificial Sequence: Synthetic oligonucleotide
acgctttcgcatcttccgtat

SEQ ID NO: 26124 - DNA, 21 bp, Artificial Sequence
  Description of Artificial Sequence: Synthetic oligonucleotide
actctgagtcataatgctcct

SEQ ID NO: 26125 - DNA, 21 bp, Artificial Sequence
  Description of Artificial Sequence: Synthetic oligonucleotide
acgctgtctcatcgtcttccg

SEQ ID NO: 26126 - DNA, 21 bp, Artificial Sequence
  Description of Artificial Sequence: Synthetic oligonucleotide
actctgtctaagcatctgctg

SEQ ID NO: 26127 - DNA, 21 bp, Artificial Sequence
  Description of Artificial Sequence: Synthetic oligonucleotide
actttgtctaagccgccgtcg

SEQ ID NO: 26128 - DNA, 21 bp, Artificial Sequence
  Description of Artificial Sequence: Synthetic oligonucleotide
acgctgtctctttctgcgatt

SEQ ID NO: 26129 - DNA, 21 bp, Artificial Sequence
  Description of Artificial Sequence: Synthetic oligonucleotide
actctgtctcttagtaataat

SEQ ID NO: 26130 - DNA, 21 bp, Artificial Sequence
  Description of Artificial Sequence: Synthetic oligonucleotide
actttgagtctttcgacgggg

SEQ ID NO: 26131 - DNA, 21 bp, Artificial Sequence
  Description of Artificial Sequence: Synthetic oligonucleotide
actcttagtaattctgttccg

SEQ ID NO: 26132 - DNA, 21 bp, Artificial Sequence
  Description of Artificial Sequence: Synthetic oligonucleotide
actctttctccgaagtctgtg

SEQ ID NO: 26133 - DNA, 21 bp, Artificial Sequence
  Description of Artificial Sequence: Synthetic oligonucleotide
acgctttctccgtctggtagt

SEQ ID NO: 26134 - DNA, 21 bp, Artificial Sequence
  Description of Artificial Sequence: Synthetic oligonucleotide
actctttcgccgacgacgagt

SEQ ID NO: 26135 - DNA, 21 bp, Artificial Sequence
  Description of Artificial Sequence: Synthetic oligonucleotide
actcttagtcagcgtccgcct

SEQ ID NO: 26136 - DNA, 21 bp, Artificial Sequence
  Description of Artificial Sequence: Synthetic oligonucleotide
acgctgagtcagtctactcat

SEQ ID NO: 26137 - DNA, 21 bp, Artificial Sequence
  Description of Artificial Sequence: Synthetic oligonucleotide
acgctgtcgcgtactttggag

SEQ ID NO: 26138 - DNA, 21 bp, Artificial Sequence
  Description of Artificial Sequence: Synthetic oligonucleotide
actctttcgagtggtcagacg

SEQ ID NO: 26139 - DNA, 21 bp, Artificial Sequence
  Description of Artificial Sequence: Synthetic oligonucleotide
actcttagttcgcgtcctatg

SEQ ID NO: 26140 - DNA, 21 bp, Artificial Sequence
  Description of Artificial Sequence: Synthetic oligonucleotide
actttgagttcgcgtcagagt

SEQ ID NO: 26141 - DNA, 21 bp, Artificial Sequence
  Description of Artificial Sequence: Synthetic oligonucleotide
actctttctactgtgagtctg

SEQ ID NO: 26142 - DNA, 21 bp, Artificial Sequence
  Description of Artificial Sequence: Synthetic oligonucleotide
acgttgagttatacgccggct

SEQ ID NO: 26143 - DNA, 21 bp, Artificial Sequence
  Description of Artificial Sequence: Synthetic oligonucleotide
actctgacttttcggggggat

SEQ ID NO: 26144 - DNA, 21 bp, Artificial Sequence
  Description of Artificial Sequence: Synthetic oligonucleotide
acgttgactaagaatagtacg

SEQ ID NO: 26145 - DNA, 21 bp, Artificial Sequence
  Description of Artificial Sequence: Synthetic oligonucleotide
acgctgactccgttgtatgag

SEQ ID NO: 26146 - DNA, 21 bp, Artificial Sequence
  Description of Artificial Sequence: Synthetic oligonucleotide
actttgacgccgaatgagagt

SEQ ID NO: 26147 - DNA, 21 bp, Artificial Sequence
  Description of Artificial Sequence: Synthetic oligonucleotide
acgttgacgcgtctttcgcct

SEQ ID NO: 26148 - DNA, 21 bp, Artificial Sequence
  Description of Artificial Sequence: Synthetic oligonucleotide
acgctgacgaggatgaatgtg

SEQ ID NO: 26149 - DNA, 21 bp, Artificial Sequence
  Description of Artificial Sequence: Synthetic oligonucleotide
actctgactactaatgtttct

SEQ ID NO: 26150 - DNA, 21 bp, Artificial Sequence
  Description of Artificial Sequence: Synthetic oligonucleotide
acgctgactactcctatgaat

SEQ ID NO: 26151 - DNA, 21 bp, Artificial Sequence
  Description of Artificial Sequence: Synthetic oligonucleotide
actcttactgtgcttgatcct

SEQ ID NO: 26152 - DNA, 21 bp, Artificial Sequence
  Description of Artificial Sequence: Synthetic oligonucleotide
acgttgacgtatcatcgtgat

SEQ ID NO: 26153 - DNA, 21 bp, Artificial Sequence
  Description of Artificial Sequence: Synthetic oligonucleotide
actttggtgggtcattattat

SEQ ID NO: 26154 - DNA, 21 bp, Artificial Sequence
  Description of Artificial Sequence: Synthetic oligonucleotide
actcttgtgggtccggctagt

SEQ ID NO: 26155 - DNA, 21 bp, Artificial Sequence
  Description of Artificial Sequence: Synthetic oligonucleotide
acgctggttccgcgggatctg

SEQ ID NO: 26156 - DNA, 21 bp, Artificial Sequence
  Description of Artificial Sequence: Synthetic oligonucleotide
acgttggttcaggcggagatg

SEQ ID NO: 26157 - DNA, 21 bp, Artificial Sequence
  Description of Artificial Sequence: Synthetic oligonucleotide
actctggttactagggagaat

SEQ ID NO: 26158 - DNA, 21 bp, Artificial Sequence
  Description of Artificial Sequence: Synthetic oligonucleotide
actcttgttgtgcggtcgcct

SEQ ID NO: 26159 - DNA, 21 bp, Artificial Sequence
  Description of Artificial Sequence: Synthetic oligonucleotide
actctgtatggtcatccgtcg

SEQ ID NO: 26160 - DNA, 21 bp, Artificial Sequence
  Description of Artificial Sequence: Synthetic oligonucleotide
acgctgtatcttcattctgag

SEQ ID NO: 26161 - DNA, 21 bp, Artificial Sequence
  Description of Artificial Sequence: Synthetic oligonucleotide
actctttataatacgactatg

SEQ ID NO: 26162 - DNA, 21 bp, Artificial Sequence
  Description of Artificial Sequence: Synthetic oligonucleotide
actctgtatcgtgttaatccg

SEQ ID NO: 26163 - DNA, 21 bp, Artificial Sequence
  Description of Artificial Sequence: Synthetic oligonucleotide
acgttgtattctcagtctgag

SEQ ID NO: 26164 - DNA, 21 bp, Artificial Sequence
  Description of Artificial Sequence: Synthetic oligonucleotide
actctgtatacgaattcggtt

SEQ ID NO: 26165 - DNA, 21 bp, Artificial Sequence
  Description of Artificial Sequence: Synthetic oligonucleotide
actatggctatgaatcctcgt

SEQ ID NO: 26166 - DNA, 21 bp, Artificial Sequence
  Description of Artificial Sequence: Synthetic oligonucleotide
actatggctccgcgggatttg

SEQ ID NO: 26167 - DNA, 21 bp, Artificial Sequence
  Description of Artificial Sequence: Synthetic oligonucleotide
acgatggataatttgaggcag

SEQ ID NO: 26168 - DNA, 21 bp, Artificial Sequence
  Description of Artificial Sequence: Synthetic oligonucleotide
actatggatcgtacgccgggg

SEQ ID NO: 26169 - DNA, 21 bp, Artificial Sequence
  Description of Artificial Sequence: Synthetic oligonucleotide
actatggatgtgttgtctttt

SEQ ID NO: 26170 - DNA, 21 bp, Artificial Sequence
  Description of Artificial Sequence: Synthetic oligonucleotide
acgatggagcggggtgatagt

SEQ ID NO: 26171 - DNA, 21 bp, Artificial Sequence
  Description of Artificial Sequence: Synthetic oligonucleotide
acgatgcatgcgcatccgctg

SEQ ID NO: 26172 - DNA, 21 bp, Artificial Sequence
  Description of Artificial Sequence: Synthetic oligonucleotide
actatgcttactcgtacgggg

SEQ ID NO: 26173 - DNA, 21 bp, Artificial Sequence
  Description of Artificial Sequence: Synthetic oligonucleotide
actatgatgaagcctttggat

SEQ ID NO: 26174 - DNA, 21 bp, Artificial Sequence
  Description of Artificial Sequence: Synthetic oligonucleotide
actatgaataagccgacgctt

SEQ ID NO: 26175 - DNA, 21 bp, Artificial Sequence
  Description of Artificial Sequence: Synthetic oligonucleotide
actatgaatcttggggagatg

SEQ ID NO: 26176 - DNA, 21 bp, Artificial Sequence
  Description of Artificial Sequence: Synthetic oligonucleotide
actatgaatcctacgcagaat

SEQ ID NO: 26177 - DNA, 21 bp, Artificial Sequence
  Description of Artificial Sequence: Synthetic oligonucleotide
acgatgaatactttggttact

SEQ ID NO: 26178 - DNA, 21 bp, Artificial Sequence
  Description of Artificial Sequence: Synthetic oligonucleotide
acgatgcctaatcatgggcct

SEQ ID NO: 26179 - DNA, 21 bp, Artificial Sequence
  Description of Artificial Sequence: Synthetic oligonucleotide
actatgccgagtgagtcggtg

SEQ ID NO: 26180 - DNA, 21 bp, Artificial Sequence
  Description of Artificial Sequence: Synthetic oligonucleotide
acgatgcaggcgccgtctgcg

SEQ ID NO: 26181 - DNA, 21 bp, Artificial Sequence
  Description of Artificial Sequence: Synthetic oligonucleotide
acgatgcagtatgggtcgact

SEQ ID NO: 26182 - DNA, 21 bp, Artificial Sequence
  Description of Artificial Sequence: Synthetic oligonucleotide
actatgcgggaggggccggct

SEQ ID NO: 26183 - DNA, 21 bp, Artificial Sequence
  Description of Artificial Sequence: Synthetic oligonucleotide
acgatgcggattgatctgcct

SEQ ID NO: 26184 - DNA, 21 bp, Artificial Sequence
  Description of Artificial Sequence: Synthetic oligonucleotide
actatgcgtagtagtgagatt

SEQ ID NO: 26185 - DNA, 21 bp, Artificial Sequence
  Description of Artificial Sequence: Synthetic oligonucleotide
acgatgcgtacgaatccggat

SEQ ID NO: 26186 - DNA, 21 bp, Artificial Sequence
  Description of Artificial Sequence: Synthetic oligonucleotide
actatgagtgggacttcgagg

SEQ ID NO: 26187 - DNA, 21 bp, Artificial Sequence
  Description of Artificial Sequence: Synthetic oligonucleotide
acgatgagtattgcgctggct

SEQ ID NO: 26188 - DNA, 21 bp, Artificial Sequence
  Description of Artificial Sequence: Synthetic oligonucleotide
acgatgtctaagccttcttat

SEQ ID NO: 26189 - DNA, 21 bp, Artificial Sequence
  Description of Artificial Sequence: Synthetic oligonucleotide
actatgagtatgagtattact

SEQ ID NO: 26190 - DNA, 21 bp, Artificial Sequence
  Description of Artificial Sequence: Synthetic oligonucleotide
acgatgtctcctgggaataat

SEQ ID NO: 26191 - DNA, 21 bp, Artificial Sequence
  Description of Artificial Sequence: Synthetic oligonucleotide
actatgtcgcctcatagtccg

SEQ ID NO: 26192 - DNA, 21 bp, Artificial Sequence
  Description of Artificial Sequence: Synthetic oligonucleotide
acgatgtcgccgctgaatagg

SEQ ID NO: 26193 - DNA, 21 bp, Artificial Sequence
  Description of Artificial Sequence: Synthetic oligonucleotide
acgatgacgcatcatcagttt

SEQ ID NO: 26194 - DNA, 21 bp, Artificial Sequence
  Description of Artificial Sequence: Synthetic oligonucleotide
acgatgactcgttctatgctg

SEQ ID NO: 26195 - DNA, 21 bp, Artificial Sequence
  Description of Artificial Sequence: Synthetic oligonucleotide
actatgacggttctgactatg

SEQ ID NO: 26196 - DNA, 21 bp, Artificial Sequence
  Description of Artificial Sequence: Synthetic oligonucleotide
acgatggtggcgtcgatggcg

SEQ ID NO: 26197 - DNA, 21 bp, Artificial Sequence
  Description of Artificial Sequence: Synthetic oligonucleotide
actatggttaagcagggtaat

SEQ ID NO: 26198 - DNA, 21 bp, Artificial Sequence
  Description of Artificial Sequence: Synthetic oligonucleotide
acgatggtgtcgggtggtcat

SEQ ID NO: 26199 - DNA, 21 bp, Artificial Sequence
  Description of Artificial Sequence: Synthetic oligonucleotide
actatggttgttgtgtctagt

SEQ ID NO: 26200 - DNA, 21 bp, Artificial Sequence
  Description of Artificial Sequence: Synthetic oligonucleotide
actatggtttatactgataat

SEQ ID NO: 26201 - DNA, 21 bp, Artificial Sequence
  Description of Artificial Sequence: Synthetic oligonucleotide
actaatgctgcgctgcagtct

SEQ ID NO: 26202 - DNA, 21 bp, Artificial Sequence
  Description of Artificial Sequence: Synthetic oligonucleotide
acgaatgctattaagtctggg

SEQ ID NO: 26203 - DNA, 21 bp, Artificial Sequence
  Description of Artificial Sequence: Synthetic oligonucleotide
actaatgcgtcttggcctccg

SEQ ID NO: 26204 - DNA, 21 bp, Artificial Sequence
  Description of Artificial Sequence: Synthetic oligonucleotide
acgaatgatcctatgatgcct

SEQ ID NO: 26205 - DNA, 21 bp, Artificial Sequence
  Description of Artificial Sequence: Synthetic oligonucleotide
acgaatgagcataagttttcg

SEQ ID NO: 26206 - DNA, 21 bp, Artificial Sequence
  Description of Artificial Sequence: Synthetic oligonucleotide
acgaatgagtctagtgggacg

SEQ ID NO: 26207 - DNA, 21 bp, Artificial Sequence
  Description of Artificial Sequence: Synthetic oligonucleotide
actaattttttgcctcatggt

SEQ ID NO: 26208 - DNA, 21 bp, Artificial Sequence
  Description of Artificial Sequence: Synthetic oligonucleotide
actaattttcctcagtctgcg

SEQ ID NO: 26209 - DNA, 21 bp, Artificial Sequence
  Description of Artificial Sequence: Synthetic oligonucleotide
actaattttcagctgactgtt

SEQ ID NO: 26210 - DNA, 21 bp, Artificial Sequence
  Description of Artificial Sequence: Synthetic oligonucleotide
actaatgggcgggtgacggcg

SEQ ID NO: 26211 - DNA, 21 bp, Artificial Sequence
  Description of Artificial Sequence: Synthetic oligonucleotide
actaatggtacgaagcctact

SEQ ID NO: 26212 - DNA, 21 bp, Artificial Sequence
  Description of Artificial Sequence: Synthetic oligonucleotide
actaatggggttaagttgtct

SEQ ID NO: 26213 - DNA, 21 bp, Artificial Sequence
  Description of Artificial Sequence: Synthetic oligonucleotide
acgaatcatattgctgctctg

SEQ ID NO: 26214 - DNA, 21 bp, Artificial Sequence
  Description of Artificial Sequence: Synthetic oligonucleotide
acgaatcattcttctccgctt

SEQ ID NO: 26215 - DNA, 21 bp, Artificial Sequence
  Description of Artificial Sequence: Synthetic oligonucleotide
acgaataagacggtgggttgt

SEQ ID NO: 26216 - DNA, 21 bp, Artificial Sequence
  Description of Artificial Sequence: Synthetic oligonucleotide
actaatttggctgcgcggcct

SEQ ID NO: 26217 - DNA, 21 bp, Artificial Sequence
  Description of Artificial Sequence: Synthetic oligonucleotide
actaatcttaagcgtatggat

SEQ ID NO: 26218 - DNA, 21 bp, Artificial Sequence
  Description of Artificial Sequence: Synthetic oligonucleotide
acgaatttgaatggtaatgat

SEQ ID NO: 26219 - DNA, 21 bp, Artificial Sequence
  Description of Artificial Sequence: Synthetic oligonucleotide
acgaatcttaatactcgtcct

SEQ ID NO: 26220 - DNA, 21 bp, Artificial Sequence
  Description of Artificial Sequence: Synthetic oligonucleotide
acgaatcttaggtctgagttg

SEQ ID NO: 26221 - DNA, 21 bp, Artificial Sequence
  Description of Artificial Sequence: Synthetic oligonucleotide
acgaatctgcggactgctgtt

SEQ ID NO: 26222 - DNA, 21 bp, Artificial Sequence
  Description of Artificial Sequence: Synthetic oligonucleotide
actaatatgaagactgattct

SEQ ID NO: 26223 - DNA, 21 bp, Artificial Sequence
  Description of Artificial Sequence: Synthetic oligonucleotide
actaatatgcctatgaatcct

SEQ ID NO: 26224 - DNA, 21 bp, Artificial Sequence
  Description of Artificial Sequence: Synthetic oligonucleotide
acgaatatgccgccgcttccg

SEQ ID NO: 26225 - DNA, 21 bp, Artificial Sequence
  Description of Artificial Sequence: Synthetic oligonucleotide
acgaatatgccgccgcttacg

SEQ ID NO: 26226 - DNA, 21 bp, Artificial Sequence
  Description of Artificial Sequence: Synthetic oligonucleotide
actaataatggtggtatgtat

SEQ ID NO: 26227 - DNA, 21 bp, Artificial Sequence
  Description of Artificial Sequence: Synthetic oligonucleotide
actaataatagtacgaatccg

SEQ ID NO: 26228 - DNA, 21 bp, Artificial Sequence
  Description of Artificial Sequence: Synthetic oligonucleotide
acgaatcctgcgccgaattcg

SEQ ID NO: 26229 - DNA, 21 bp, Artificial Sequence
  Description of Artificial Sequence: Synthetic oligonucleotide
actaatccgggtcctcttgat

SEQ ID NO: 26230 - DNA, 21 bp, Artificial Sequence
  Description of Artificial Sequence: Synthetic oligonucleotide
actaatcctcatagggatacg

SEQ ID NO: 26231 - DNA, 21 bp, Artificial Sequence
  Description of Artificial Sequence: Synthetic oligonucleotide
actaatccgttgtcgacgggt

SEQ ID NO: 26232 - DNA, 21 bp, Artificial Sequence
  Description of Artificial Sequence: Synthetic oligonucleotide
actaatcctaataatgcgaat

SEQ ID NO: 26233 - DNA, 21 bp, Artificial Sequence
  Description of Artificial Sequence: Synthetic oligonucleotide
actaatcctcggtcgtatact

SEQ ID NO: 26234 - DNA, 21 bp, Artificial Sequence
  Description of Artificial Sequence: Synthetic oligonucleotide
acgaatccgagtgctcttggg

SEQ ID NO: 26235 - DNA, 21 bp, Artificial Sequence
  Description of Artificial Sequence: Synthetic oligonucleotide
acgaatccgtctatgtgtctg

SEQ ID NO: 26236 - DNA, 21 bp, Artificial Sequence
  Description of Artificial Sequence: Synthetic oligonucleotide
actaatcctactagtatggct

SEQ ID NO: 26237 - DNA, 21 bp, Artificial Sequence
  Description of Artificial Sequence: Synthetic oligonucleotide
acgaatcctgtgcttactgag

SEQ ID NO: 26238 - DNA, 21 bp, Artificial Sequence
  Description of Artificial Sequence: Synthetic oligonucleotide
actaatccggttaggcttgtt

SEQ ID NO: 26239 - DNA, 21 bp, Artificial Sequence
  Description of Artificial Sequence: Synthetic oligonucleotide
acgaatcctgttcggacgtct

SEQ ID NO: 26240 - DNA, 21 bp, Artificial Sequence
  Description of Artificial Sequence: Synthetic oligonucleotide
actaatcgtggttggactgat

SEQ ID NO: 26241 - DNA, 21 bp, Artificial Sequence
  Description of Artificial Sequence: Synthetic oligonucleotide
actaatcggaattcggaggtt

SEQ ID NO: 26242 - DNA, 21 bp, Artificial Sequence
  Description of Artificial Sequence: Synthetic oligonucleotide
acgaataggcctattgatact

SEQ ID NO: 26243 - DNA, 21 bp, Artificial Sequence
  Description of Artificial Sequence: Synthetic oligonucleotide
acgaataggcaggctagtacg

SEQ ID NO: 26244 - DNA, 21 bp, Artificial Sequence
  Description of Artificial Sequence: Synthetic oligonucleotide
actaatcggcaggatactcgg

SEQ ID NO: 26245 - DNA, 21 bp, Artificial Sequence
  Description of Artificial Sequence: Synthetic oligonucleotide
actaatagtgcgatttcgggt

SEQ ID NO: 26246 - DNA, 21 bp, Artificial Sequence
  Description of Artificial Sequence: Synthetic oligonucleotide
actaatagtggttctgatgct

SEQ ID NO: 26247 - DNA, 21 bp, Artificial Sequence
  Description of Artificial Sequence: Synthetic oligonucleotide
actaattctcatgcgatgctt

SEQ ID NO: 26248 - DNA, 21 bp, Artificial Sequence
  Description of Artificial Sequence: Synthetic oligonucleotide
acgaatagtttgcctgctctg

SEQ ID NO: 26249 - DNA, 21 bp, Artificial Sequence
  Description of Artificial Sequence: Synthetic oligonucleotide
actaattctatgggtgtgccg

SEQ ID NO: 26250 - DNA, 21 bp, Artificial Sequence
  Description of Artificial Sequence: Synthetic oligonucleotide
acgaatagtaatcatacgtat

SEQ ID NO: 26251 - DNA, 21 bp, Artificial Sequence
  Description of Artificial Sequence: Synthetic oligonucleotide
actaattcgccgtcgaggtct

SEQ ID NO: 26252 - DNA, 21 bp, Artificial Sequence
  Description of Artificial Sequence: Synthetic oligonucleotide
actaatactgatgttacgaag

SEQ ID NO: 26253 - DNA, 21 bp, Artificial Sequence
  Description of Artificial Sequence: Synthetic oligonucleotide
acgaatactcgtacgccttat

SEQ ID NO: 26254 - DNA, 21 bp, Artificial Sequence
  Description of Artificial Sequence: Synthetic oligonucleotide
actaatacttctgcgtcgagg

SEQ ID NO: 26255 - DNA, 21 bp, Artificial Sequence
  Description of Artificial Sequence: Synthetic oligonucleotide
actaatacgtcgtcgacttat

SEQ ID NO: 26256 - DNA, 21 bp, Artificial Sequence
  Description of Artificial Sequence: Synthetic oligonucleotide
actaatacgacgattaatctg

SEQ ID NO: 26257 - DNA, 21 bp, Artificial Sequence
  Description of Artificial Sequence: Synthetic oligonucleotide
acgaatacggttcggaatttt

SEQ ID NO: 26258 - DNA, 21 bp, Artificial Sequence
  Description of Artificial Sequence: Synthetic oligonucleotide
acgaatgttatgaaggcgggg

SEQ ID NO: 26259 - DNA, 21 bp, Artificial Sequence
  Description of Artificial Sequence: Synthetic oligonucleotide
acgaattataatgtggggagt

SEQ ID NO: 26260 - DNA, 21 bp, Artificial Sequence
  Description of Artificial Sequence: Synthetic oligonucleotide
acgaattatgttcttgcgccg

SEQ ID NO: 26261 - DNA, 21 bp, Artificial Sequence
  Description of Artificial Sequence: Synthetic oligonucleotide
acgcctgcttttaagattcag

SEQ ID NO: 26262 - DNA, 21 bp, Artificial Sequence
  Description of Artificial Sequence: Synthetic oligonucleotide
acgcctgctattgtgcctacg

SEQ ID NO: 26263 - DNA, 21 bp, Artificial Sequence
  Description of Artificial Sequence: Synthetic oligonucleotide
actccggctttgaatcggcct

SEQ ID NO: 26264 - DNA, 21 bp, Artificial Sequence
  Description of Artificial Sequence: Synthetic oligonucleotide
actccggcgaatgatccgcgt

SEQ ID NO: 26265 - DNA, 21 bp, Artificial Sequence
  Description of Artificial Sequence: Synthetic oligonucleotide
acgcctgctcctaataggttt

SEQ ID NO: 26266 - DNA, 21 bp, Artificial Sequence
  Description of Artificial Sequence: Synthetic oligonucleotide
acgccggcttcgccttcggat

SEQ ID NO: 26267 - DNA, 21 bp, Artificial Sequence
  Description of Artificial Sequence: Synthetic oligonucleotide
actccggctacgctgccgtct

SEQ ID NO: 26268 - DNA, 21 bp, Artificial Sequence
  Description of Artificial Sequence: Synthetic oligonucleotide
acgcctgcggtggagaagctt

SEQ ID NO: 26269 - DNA, 21 bp, Artificial Sequence
  Description of Artificial Sequence: Synthetic oligonucleotide
actccggcttatggtcggatt

SEQ ID NO: 26270 - DNA, 21 bp, Artificial Sequence
  Description of Artificial Sequence: Synthetic oligonucleotide
acgccggatatgccttttact

SEQ ID NO: 26271 - DNA, 21 bp, Artificial Sequence
  Description of Artificial Sequence: Synthetic oligonucleotide
actccggatcagtatgagttt

SEQ ID NO: 26272 - DNA, 21 bp, Artificial Sequence
  Description of Artificial Sequence: Synthetic oligonucleotide
actccggattctatgactgcg

SEQ ID NO: 26273 - DNA, 21 bp, Artificial Sequence
  Description of Artificial Sequence: Synthetic oligonucleotide
acgcctgagatgaagtctaat

SEQ ID NO: 26274 - DNA, 21 bp, Artificial Sequence
  Description of Artificial Sequence: Synthetic oligonucleotide
actcctgagagggcgatgtcg

SEQ ID NO: 26275 - DNA, 21 bp, Artificial Sequence
  Description of Artificial Sequence: Synthetic oligonucleotide
actcctgagacgaatcggccg

SEQ ID NO: 26276 - DNA, 21 bp, Artificial Sequence
  Description of Artificial Sequence: Synthetic oligonucleotide
actccgggtggtgctcggcct

SEQ ID NO: 26277 - DNA, 21 bp, Artificial Sequence
  Description of Artificial Sequence: Synthetic oligonucleotide
actccggggcatatggattct

SEQ ID NO: 26278 - DNA, 21 bp, Artificial Sequence
  Description of Artificial Sequence: Synthetic oligonucleotide
acgcctgggattcctaggtgt

SEQ ID NO: 26279 - DNA, 21 bp, Artificial Sequence
  Description of Artificial Sequence: Synthetic oligonucleotide
acgccggggcggcagtttcct

SEQ ID NO: 26280 - DNA, 21 bp, Artificial Sequence
  Description of Artificial Sequence: Synthetic oligonucleotide
actccgggtactattaatggt

SEQ ID NO: 26281 - DNA, 21 bp, Artificial Sequence
  Description of Artificial Sequence: Synthetic oligonucleotide
actccgcatggggtttcgccg

SEQ ID NO: 26282 - DNA, 21 bp, Artificial Sequence
  Description of Artificial Sequence: Synthetic oligonucleotide
actcctcatttggatgggcat

SEQ ID NO: 26283 - DNA, 21 bp, Artificial Sequence
  Description of Artificial Sequence: Synthetic oligonucleotide
acgccgcatactgggaatcag

SEQ ID NO: 26284 - DNA, 21 bp, Artificial Sequence
  Description of Artificial Sequence: Synthetic oligonucleotide
acgcctcatacgctggaggtg

SEQ ID NO: 26285 - DNA, 21 bp, Artificial Sequence
  Description of Artificial Sequence: Synthetic oligonucleotide
acgccgattgggcttccttct

SEQ ID NO: 26286 - DNA, 21 bp, Artificial Sequence
  Description of Artificial Sequence: Synthetic oligonucleotide
actcctattaggaatattcct

SEQ ID NO: 26287 - DNA, 21 bp, Artificial Sequence
  Description of Artificial Sequence: Synthetic oligonucleotide
acgccgatttcgatgccttct

SEQ ID NO: 26288 - DNA, 21 bp, Artificial Sequence
  Description of Artificial Sequence: Synthetic oligonucleotide
actcctattgtgcatattaat

SEQ ID NO: 26289 - DNA, 21 bp, Artificial Sequence
  Description of Artificial Sequence: Synthetic oligonucleotide
actcctattgttcatccgcgg

SEQ ID NO: 26290 - DNA, 21 bp, Artificial Sequence
  Description of Artificial Sequence: Synthetic oligonucleotide
actcctattgttaagcctgat

SEQ ID NO: 26291 - DNA, 21 bp, Artificial Sequence
  Description of Artificial Sequence: Synthetic oligonucleotide
actcctaaggatgctgaggtg

SEQ ID NO: 26292 - DNA, 21 bp, Artificial Sequence
  Description of Artificial Sequence: Synthetic oligonucleotide
actcctaagctttctgagcag

SEQ ID NO: 26293 - DNA, 21 bp, Artificial Sequence
  Description of Artificial Sequence: Synthetic oligonucleotide
actccgaagaatacgttggct

SEQ ID NO: 26294 - DNA, 21 bp, Artificial Sequence
  Description of Artificial Sequence: Synthetic oligonucleotide
acgcctaagtcggcttctggt

SEQ ID NO: 26295 - DNA, 21 bp, Artificial Sequence
  Description of Artificial Sequence: Synthetic oligonucleotide
acgcctcttgggggttcttct

SEQ ID NO: 26296 - DNA, 21 bp, Artificial Sequence
  Description of Artificial Sequence: Synthetic oligonucleotide
acgccgcttcattcgccgggt

SEQ ID NO: 26297 - DNA, 21 bp, Artificial Sequence
  Description of Artificial Sequence: Synthetic oligonucleotide
acgccgctgcatagtactacg

SEQ ID NO: 26298 - DNA, 21 bp, Artificial Sequence
  Description of Artificial Sequence: Synthetic oligonucleotide
acgccgcttttgtgtggtaag

SEQ ID NO: 26299 - DNA, 21 bp, Artificial Sequence
  Description of Artificial Sequence: Synthetic oligonucleotide
actccgcttctgtctcatagt

SEQ ID NO: 26300 - DNA, 21 bp, Artificial Sequence
  Description of Artificial Sequence: Synthetic oligonucleotide
actcctcttcagactacggtg

SEQ ID NO: 26301 - DNA, 21 bp, Artificial Sequence
  Description of Artificial Sequence: Synthetic oligonucleotide
acgccgttgaggtcgtctaat

SEQ ID NO: 26302 - DNA, 21 bp, Artificial Sequence
  Description of Artificial Sequence: Synthetic oligonucleotide
actccgctgtcggctattcag

SEQ ID NO: 26303 - DNA, 21 bp, Artificial Sequence
  Description of Artificial Sequence: Synthetic oligonucleotide
actcctttgactaatattgcg

SEQ ID NO: 26304 - DNA, 21 bp, Artificial Sequence
  Description of Artificial Sequence: Synthetic oligonucleotide
acgcctttgacgacggcgggg

SEQ ID NO: 26305 - DNA, 21 bp, Artificial Sequence
  Description of Artificial Sequence: Synthetic oligonucleotide
acgcctatggctgttgagagt

SEQ ID NO: 26306 - DNA, 21 bp, Artificial Sequence
  Description of Artificial Sequence: Synthetic oligonucleotide
actccgatggagatgattccg

SEQ ID NO: 26307 - DNA, 21 bp, Artificial Sequence
  Description of Artificial Sequence: Synthetic oligonucleotide
actcctatgggttcggggtgg

SEQ ID NO: 26308 - DNA, 21 bp, Artificial Sequence
  Description of Artificial Sequence: Synthetic oligonucleotide
actcctatgcaggttccggcg

SEQ ID NO: 26309 - DNA, 21 bp, Artificial Sequence
  Description of Artificial Sequence: Synthetic oligonucleotide
acgccgaatatgctttctgct

SEQ ID NO: 26310 - DNA, 21 bp, Artificial Sequence
  Description of Artificial Sequence: Synthetic oligonucleotide
actcctaatatggtgacgggt

SEQ ID NO: 26311 - DNA, 21 bp, Artificial Sequence
  Description of Artificial Sequence: Synthetic oligonucleotide
acgcctaattctcgtactgtg

SEQ ID NO: 26312 - DNA, 21 bp, Artificial Sequence
  Description of Artificial Sequence: Synthetic oligonucleotide
actcctaatgtgacttatcgt

SEQ ID NO: 26313 - DNA, 21 bp, Artificial Sequence
  Description of Artificial Sequence: Synthetic oligonucleotide
acgccgaattattatcatgag

SEQ ID NO: 26314 - DNA, 21 bp, Artificial Sequence
  Description of Artificial Sequence: Synthetic oligonucleotide
acgcctccggatggtactagg

SEQ ID NO: 26315 - DNA, 21 bp, Artificial Sequence
  Description of Artificial Sequence: Synthetic oligonucleotide
acgccgccggatcagtctagg

SEQ ID NO: 26316 - DNA, 21 bp, Artificial Sequence
  Description of Artificial Sequence: Synthetic oligonucleotide
actccgccgggtgagatgagg

SEQ ID NO: 26317 - DNA, 21 bp, Artificial Sequence
  Description of Artificial Sequence: Synthetic oligonucleotide
acgccgcctctgaaggcgtcg

SEQ ID NO: 26318 - DNA, 21 bp, Artificial Sequence
  Description of Artificial Sequence: Synthetic oligonucleotide
acgcctccgccgcctacttgg

SEQ ID NO: 26319 - DNA, 21 bp, Artificial Sequence
  Description of Artificial Sequence: Synthetic oligonucleotide
acgccgccgcgtggtattccg

SEQ ID NO: 26320 - DNA, 21 bp, Artificial Sequence
  Description of Artificial Sequence: Synthetic oligonucleotide
acgcctccgcgtactgtggtg

SEQ ID NO: 26321 - DNA, 21 bp, Artificial Sequence
  Description of Artificial Sequence: Synthetic oligonucleotide
actccgccttcgtctgagtgg

SEQ ID NO: 26322 - DNA, 21 bp, Artificial Sequence
  Description of Artificial Sequence: Synthetic oligonucleotide
actcctccgactgctacgcgt

SEQ ID NO: 26323 - DNA, 21 bp, Artificial Sequence
  Description of Artificial Sequence: Synthetic oligonucleotide
actcctccgactttgatggag

SEQ ID NO: 26324 - DNA, 21 bp, Artificial Sequence
  Description of Artificial Sequence: Synthetic oligonucleotide
actcctccttatgtggcgcag

SEQ ID NO: 26325 - DNA, 21 bp, Artificial Sequence
  Description of Artificial Sequence: Synthetic oligonucleotide
acgccgcagggtgatattgct

SEQ ID NO: 26326 - DNA, 21 bp, Artificial Sequence
  Description of Artificial Sequence: Synthetic oligonucleotide
actcctcagcatatgggtcct

SEQ ID NO: 26327 - DNA, 21 bp, Artificial Sequence
  Description of Artificial Sequence: Synthetic oligonucleotide
actcctcagcatatgaggggg

SEQ ID NO: 26328 - DNA, 21 bp, Artificial Sequence
  Description of Artificial Sequence: Synthetic oligonucleotide
acgcctcagatgccgtttcct

SEQ ID NO: 26329 - DNA, 21 bp, Artificial Sequence
  Description of Artificial Sequence: Synthetic oligonucleotide
actccgcagaatattatggat

SEQ ID NO: 26330 - DNA, 21 bp, Artificial Sequence
  Description of Artificial Sequence: Synthetic oligonucleotide
actccgcagcgggcggggatt

SEQ ID NO: 26331 - DNA, 21 bp, Artificial Sequence
  Description of Artificial Sequence: Synthetic oligonucleotide
acgcctagggctgagcatact

SEQ ID NO: 26332 - DNA, 21 bp, Artificial Sequence
  Description of Artificial Sequence: Synthetic oligonucleotide
acgcctaggggtcagagtctt

SEQ ID NO: 26333 - DNA, 21 bp, Artificial Sequence
  Description of Artificial Sequence: Synthetic oligonucleotide
actccgcggggtagtcttgat

SEQ ID NO: 26334 - DNA, 21 bp, Artificial Sequence
  Description of Artificial Sequence: Synthetic oligonucleotide
acgcctaggcttactgttgag

SEQ ID NO: 26335 - DNA, 21 bp, Artificial Sequence
  Description of Artificial Sequence: Synthetic oligonucleotide
actcctcggccgacgtatact

(The sequence listing continues in the following parts.)

1. An AAV capsid protein comprising (i) a parent VP1 amino acid sequence selected from the group consisting of SEQ ID NO: 2 or SEQ ID NO: 3, and (ii) at least one targeting peptide inserted into the parent VP1 amino acid sequence of (i), wherein the targeting peptide is selected from any member of the group consisting of SEQ ID NO: 4-14326 and any member of the group consisting of SEQ ID NO: 42973-42999.

2. The AAV capsid protein of claim 1, wherein the parent VP1 amino acid sequence comprises a VP2 region and/or a VP3 region.

3. The AAV capsid protein of claim 2, wherein the targeting peptide is inserted within the VP2 region of the parent VP1 amino acid sequence.

4. The AAV capsid protein of claim 2, wherein the targeting peptide is inserted within the VP3 region of the parent VP1 amino acid sequence.

5. The AAV capsid protein of claim 1, wherein the targeting peptide is inserted at any amino acid position between amino acids 586-592, inclusive, of the parent VP1 amino acid sequence.

6. The AAV capsid protein of claim 1, wherein the targeting peptide is inserted between amino acids 588-589 of the parent VP1 amino acid sequence.

7. A peptide comprising an amino acid sequence selected from the group consisting of SEQ ID NO: 4-14326 and SEQ ID NO: 42973-42999.

8. A nucleic acid sequence encoding the peptide of claim 7, selected from the group consisting of SEQ ID NO: 14327-42972 and SEQ ID NO: 4300-43053.

9. An AAV particle comprising an AAV capsid protein of any of claims 1-8 and a viral genome.

10. The AAV particle of claim 9, wherein the viral genome comprises a nucleic acid sequence encoding a payload.

11. The AAV particle of claim 10, wherein the payload is an RNAi agent.

12. The AAV particle of claim 11, wherein the RNAi agent is selected from the group consisting of dsRNA, siRNA, shRNA, pre-miRNA, pri-miRNA, miRNA, stRNA, lncRNA, piRNA, or snoRNA.

13. The AAV particle of claim 11, wherein the RNAi agent, when expressed, inhibits or suppresses the expression of a gene of interest in a cell, wherein the gene of interest is selected from the group consisting of SOD1, MAPT, APOE, HTT, C90RF72, TDP-43, APP, BACE, SNCA, ATXN1, ATXN2, ATXN3, ATXN7, SCN1A-SCN5A, or SCN8A-SCN11A.

14. The AAV particle of claim 10, wherein the payload is a polypeptide.

15. The AAV particle of claim 14, wherein the polypeptide is selected from the group consisting of an antibody, aromatic L-amino acid decarboxylase (AADC), survival motor neuron 1 (SMN1), frataxin (FXN), ApoE2, GBA1, GRN, ASPA, CLN2, GLB1, SGSH, NAGLU, IDS, NPC1, or GAN.

16. A pharmaceutical composition comprising the AAV particle of any of claims 9-15 and a pharmaceutically acceptable excipient.

17. A method of treating a disease in a subject by administering the pharmaceutical composition of claim 16 to said subject.

18. The method of claim 17, wherein the disease is Huntington's Disease.

19. The method of claim 17, wherein the disease is Amyotrophic Lateral Sclerosis.

20. The method of claim 17, wherein the disease is Friedreich's Ataxia.

21. The method of claim 17, wherein the disease is Parkinson's Disease.

22. The method of claim 17, wherein the disease is Alzheimer's Disease.

23. The method of claim 17, wherein the disease is a tauopathy.

24. The method of claim 17, wherein the disease is neuropathic pam.
